United States Patent Application Publication US 2003/0194704 A1 - sequence listing, part 7

SEQ ID NO: 21580 - DNA, 180 bp, Homo sapiens
  MAP TO CHR14.3; EXPRESSED IN PLACENTA, SIGNAL = 3.8; EXPRESSED IN HELA, SIGNAL =   4; EXPRESSED IN HEART, SIGNAL = 4.7; EXPRESSED IN LUNG, SIGNAL = 3.3; EXPRESSED IN BRAIN, SIGNAL = 4.1; EXPRESSED IN ADULT LIVER, SIGNAL = 4.4; NT HIT: X13237.1, EVALUE 4.00e-02; SWISSPROT HIT: Q9L6Q2, EVALUE 1.10e+00
tcagatgtgccgtctccggaggtcacttccatagtggccatcaacagcttggccaaactcggccgcaggatcttttcctatcaattgcaggatggactcttcccgcagccatgcgacctgtggcccgcggtcctgctccctgagctggaggaggctgaacagaatgagcaggttgaggcc

SEQ ID NO: 21581 - DNA, 149 bp, Homo sapiens
  MAP TO CHR19.3; EXPRESSED IN ADULT LIVER, SIGNAL = 2.5; EXPRESSED IN HELA, SIGNAL = 4.3; EXPRESSED IN HEART, SIGNAL = 4.7; EXPRESSED IN LUNG, SIGNAL = 3.4; SWISSPROT HIT: O60016, EVALUE 7.70e+00; NT HIT: gi4758513, EVALUE 6.00e-19; EST_HUMAN HIT: BG708988.1, EVALUE 1.00e-42
gtccaatcaggcctgcagctggagcggacaggacggcttcggggatgtggcggggcctttgtctctcgctgcagctggagctgcaggtctcgccttcactgccctgtgtcctctgctcgcagaggcccagcctctgtggccctgtgacc

SEQ ID NO: 21582 - DNA, 150 bp, Homo sapiens
  MAP TO CHR16.3; EXPRESSED IN FETAL LIVER, SIGNAL = 7.8; EXPRESSED IN LUNG, SIGNAL = 4.5; EXPRESSED IN BONE MARROW, SIGNAL = 6.4; EXPRESSED IN ADULT LIVER, SIGNAL =  11; EXPRESSED IN BRAIN, SIGNAL = 7.3; EXPRESSED IN PLACENTA, SIGNAL =   8; EXPRESSED IN HELA, SIGNAL = 6.6; SWISSPROT HIT: Q02388, EVALUE 6.70e-01; EST_HUMAN HIT: BI194807.1, EVALUE 4.80e-02
catgctgacagctcccgctgtgagagtcggggcctctgccaggcagcttgctccctgtccacaggagaggccacggggccagggagggaggccatgggagcagctgcttcagcagcgtgtggggactgcgggacagatgcccactccttg

SEQ ID NO: 21583 - DNA, 431 bp, Homo sapiens
  MAP TO CHR18.3; EXPRESSED IN LUNG, SIGNAL = 1.9; EXPRESSED IN HEART, SIGNAL = 1.8; EXPRESSED IN HELA, SIGNAL = 1.3; EXPRESSED IN BONE MARROW, SIGNAL = 1.4; EXPRESSED IN FETAL LIVER, SIGNAL =   2; EXPRESSED IN ADULT LIVER, SIGNAL = 1.4; EXPRESSED IN PLACENTA, SIGNAL = 1.6; SWISSPROT HIT: P23791, EVALUE 3.30e-01; NT HIT: AJ007421.2, EVALUE 0.00e+00; EST_HUMAN HIT: AI871129.1, EVALUE 0.00e+00
tagttgataccaatctccttgttatcctcgataaaccgcgtgaatgggcggctggctgctgtttctgagctcgctttgtccaagctgacgatgggtgggctactgccagtgcgtgctttgtccatcccactggccatgctgcccagaggggggagggcgctgcccccaagactcacggggagctgggggatgccgccgttctggatgacggagatctcgttgttcttcatggcgagcccgttagtgatggctgcagcatactggttccaaaaactggggtcgacgttcattgcccgagctgccaggtccttctggaacatttcagagaacttcagggcatcaccccctaggagagccatggggttctccacagacaggcggcggccgcgtctcgcgggggcgttattccacatgtgtgtccccatgtgcac

SEQ ID NO: 21584 - DNA, 168 bp, Homo sapiens
  MAP TO CHR14.3; EXPRESSED IN LUNG, SIGNAL = 1.6; EXPRESSED IN ADULT LIVER, SIGNAL =   1; EXPRESSED IN PLACENTA, SIGNAL = 1.7; EST_HUMAN HIT: BG330306.1, EVALUE 8.60e-01; SWISSPROT HIT: P13608, EVALUE 4.40e+00
aagttttgcaggaggcggcgggcgctttaattcccgaggctgttggtggcagctcgctgctcaccccaagcctgttaactgctaggttgccggtgctggggacaatgcggctgcccggcccctcgccaccctcgtggtgcccggatgggagctctcctgaggaaagcg

SEQ ID NO: 21585 - DNA, 122 bp, Homo sapiens
  MAP TO CHR18.3; EXPRESSED IN LUNG, SIGNAL = 2.2; EXPRESSED IN BONE MARROW, SIGNAL = 1.8; EXPRESSED IN ADULT LIVER, SIGNAL = 1.5; EXPRESSED IN PLACENTA, SIGNAL = 1.7; EST_HUMAN HIT: AI953378.1, EVALUE 1.50e-01; SWISSPROT HIT: P24126, EVALUE 3.50e+00; NT HIT: AF221943.1, EVALUE 6.30e+00
ttaaccacggcctcagcctgggatccctgtgtgtcctccatgcacgccacatccacactgcctgctgctcccctttcctgatcccatctcccaccttctgtggaagtgcaggcctggccctt

SEQ ID NO: 21586 - DNA, 338 bp, Homo sapiens
  MAP TO CHR18.3; EXPRESSED IN FETAL LIVER, SIGNAL = 1.4; EXPRESSED IN ADULT LIVER, SIGNAL = 1.5; EXPRESSED IN PLACENTA, SIGNAL = 1.4; SWISSPROT HIT: Q46654, EVALUE 6.60e-01
caaactgcgatgttcccggaagcacgcagaggccctgtgcgaatgcggacgcagggcaaggccgctgggctctgtgcctgggcagcgctgtgccttcggctcccaggtgctgctttcggaagcaaggatttggggcatcgctgcgtttcctgcagcgccggcctggccggttctgctgtaacacactccagcctggacccttcggtgggtgggattccattttctttcaagagagaactccatttgaaagcgtggccatcccgggcgctgtcagctgttggcctggcttctttcttcccgggctttgctatcagcgcctctatcccgcagccgttcat

SEQ ID NO: 21587 - DNA, 235 bp, Homo sapiens
  MAP TO CHR19.3; EXPRESSED IN ADULT LIVER, SIGNAL = 1.5; EXPRESSED IN PLACENTA, SIGNAL = 1.7; EXPRESSED IN LUNG, SIGNAL = 1.6; EXPRESSED IN BRAIN, SIGNAL = 1.8; EST_HUMAN HIT: BI963972.1, EVALUE 1.00e-129; NT HIT: gi16193756, EVALUE 1.00e-129; SWISSPROT HIT: P53197, EVALUE 5.00e-21
ccagctcgttggcgtgcttggaccaggccagattgcacacttgggagcccgtgtcgatacactgcagtggttgtcctgtcagcgtgttccagaagcggatacagcggtcagctgtgccgccccccgaggccagcagcccgtgctgatgtggggaccaggcgatggccttcacggccgccaggtgctccgtgtactgctgcacggggctcaggctcgagtgattccagaccagcag

SEQ ID NO: 21588 - DNA, 95 bp, Homo sapiens
  MAP TO CHR19.3; EXPRESSED IN ADULT LIVER, SIGNAL = 0.93; EXPRESSED IN HEART, SIGNAL = 6.5; EXPRESSED IN BONE MARROW, SIGNAL = 0.8; EST_HUMAN HIT: AI085619.1, EVALUE 2.00e-46; NT HIT: gi16163761, EVALUE 1.00e-46; SWISSPROT HIT: O75437, EVALUE 2.00e-11
tgggggttcagttaccatctcatgtctcttcacattccaaggttcttttccttgctccagacaggtgatcaggtctggcttagaggcagcaatac

SEQ ID NO: 21589 - DNA, 158 bp, Homo sapiens
  MAP TO CHR16.3; EXPRESSED IN FETAL LIVER, SIGNAL = 1.5; EXPRESSED IN ADULT LIVER, SIGNAL = 1.1; EXPRESSED IN BRAIN, SIGNAL = 1.6; EXPRESSED IN PLACENTA, SIGNAL = 1.1; SWISSPROT HIT: P36115, EVALUE 4.40e+00; EST_HUMAN HIT: AL529805.1, EVALUE 9.00e-84; NT HIT: L26339.1, EVALUE 6.00e-84
atgacctgcttctcttgcaggttaatgggtggcatggtccgaagaccagtcttgtttgctgaggtactatcacctgagcagagcgggtctgggaccagaagtccattgaggtccccattgtaggcactggatggccgtgggctctctgcactggggcc

SEQ ID NO: 21590 - DNA, 155 bp, Homo sapiens
  MAP TO CHR18.3; EXPRESSED IN ADULT LIVER, SIGNAL = 2.1; EXPRESSED IN PLACENTA, SIGNAL = 1.8; EXPRESSED IN HELA, SIGNAL = 2.3; EXPRESSED IN BONE MARROW, SIGNAL = 1.8; NT HIT: AL163204.2, EVALUE 1.30e-01; SWISSPROT HIT: P57632, EVALUE 1.00e+01; EST_HUMAN HIT: BF848266.1, EVALUE 2.00e-01
tcactggcatcacccacctgattaaaaatgtgcactgaggcgatgaagccagggacttcttttcctttaccacatttgcattttttcttggccttacaagaatggctaccaagcaaagtaacacttgcaataaagcgaatgctgttgttgtacag

SEQ ID NO: 21591 - DNA, 151 bp, Homo sapiens
  MAP TO CHR19.3; EXPRESSED IN ADULT LIVER, SIGNAL = 1.9; EXPRESSED IN PLACENTA, SIGNAL =   2; EXPRESSED IN HEART, SIGNAL =   3; NT HIT: AE002080.1, EVALUE 3.30e-02; SWISSPROT HIT: Q01955, EVALUE 2.60e+00; EST_HUMAN HIT: BF668078.1, EVALUE 1.90e-01
catccggcagcccagcagcttccggccccctccaattggctgtaggggccgatggcgtcactggttgctatggcgaacacccagatcacgacgtgggcagcctggagcccaccaaagtaaaaatagtcgtgtgtccccaacgtggccgccc

SEQ ID NO: 21592 - DNA, 239 bp, Homo sapiens
  MAP TO CHR18.3; EXPRESSED IN HELA, SIGNAL =   1; EXPRESSED IN ADULT LIVER, SIGNAL = 1.4; EXPRESSED IN PLACENTA, SIGNAL = 1.2; SWISSPROT HIT: Q63203, EVALUE 2.90e+00; EST_HUMAN HIT: AV704747.1, EVALUE 5.00e+00
aaatcaaacatcacgaacatcagcagcttaactccactcgggagcctgctgcacaagtgacaacagtaggcaacatacagatgtcatccttggtgacagaggccagccatggacttaccctcacagcccatctaaacgacaccccagcactatttcacaccctcaaaactactatgcaaagaagtctgcttaatgtgtcctctcagactcctggctctcactatcctggcattgaataa

SEQ ID NO: 21593 - DNA, 189 bp, Homo sapiens
  MAP TO CHR18.3; EXPRESSED IN HEART, SIGNAL = 4.3; EXPRESSED IN LUNG, SIGNAL = 5.1; EXPRESSED IN FETAL LIVER, SIGNAL = 3.7; EXPRESSED IN ADULT LIVER, SIGNAL = 4.4; EXPRESSED IN PLACENTA, SIGNAL =   5; SWISSPROT HIT: P27465, EVALUE 2.50e+00; EST_HUMAN HIT: BF676323.1, EVALUE 9.80e-01
tccatccttcctcctcgtcccctcccccgtactccatcagggactctatgctctctcgtctccctttctccaagtctctcccacccacataccctgaaattactcctcctgtccaaatggaattcggtgaaggatttctcaatatctgtgaccgagccatgctccggcccctggccagcttaagctgac

SEQ ID NO: 21594 - DNA, 163 bp, Homo sapiens
  MAP TO CHR16.3; EXPRESSED IN ADULT LIVER, SIGNAL = 1.5; EXPRESSED IN PLACENTA, SIGNAL = 1.4; EXPRESSED IN HEART, SIGNAL = 2.9; EXPRESSED IN HELA, SIGNAL =   2; EXPRESSED IN BRAIN, SIGNAL = 1.8; EST_HUMAN HIT: BI554168.1, EVALUE 2.00e-47; NT HIT: gi14777210, EVALUE 4.00e-54; SWISSPROT HIT: O70239, EVALUE 1.00e-13
ggatgggatccccccatacaggatccgtaagcagcaccgcagggagatgcaggagagcgtgcaggtcaatgggcgggtgcccctacctcacattcccgtaagtaccggctttgcggtcctcagcccatcgtcctccccgctcagcgtgggcctggtgaactgg

SEQ ID NO: 21595 - DNA, 134 bp, Homo sapiens
  MAP TO CHR19.3; EXPRESSED IN ADULT LIVER, SIGNAL = 1.3; EXPRESSED IN HEART, SIGNAL =  25; EXPRESSED IN BRAIN, SIGNAL =   2; EST_HUMAN HIT: C05040.1, EVALUE 6.00e-69; NT HIT: M21490.1, EVALUE 1.00e-69; SWISSPROT HIT: P00564, EVALUE 3.00e-20
ccttccacagagagcttctccaccgcccggcgctcgccacgggagcagtgtgggggcaacgtgtagcccttgatgctgcggccagtgcggacgcggctgctgagcacgtagttagggtccaggtcgtctccacc

SEQ ID NO: 21596 - DNA, 87 bp, Homo sapiens
  MAP TO CHR19.3; EXPRESSED IN ADULT LIVER, SIGNAL = 2.9; SWISSPROT HIT: Q10554, EVALUE 3.60e+00; NT HIT: AB032187.1, EVALUE 6.80e-02
catctcccattaccccatctctgtgaaggtgccagattccatcaccacgtggcagtttgtggtggtcagcctcaaggctggacaagg

SEQ ID NO: 21597 - DNA, 161 bp, Homo sapiens
  MAP TO CHR18.3; EXPRESSED IN ADULT LIVER, SIGNAL = 0.94; EXPRESSED IN PLACENTA, SIGNAL = 1.4; EXPRESSED IN HELA, SIGNAL = 1.5; NT HIT: AF283320.1, EVALUE 8.70e+00; SWISSPROT HIT: Q56307, EVALUE 1.50e+00; EST_HUMAN HIT: BF312042.1, EVALUE 3.00e-03
tgtcctgctggctgagcggcagcccacgtgtccggggcagggtggccagctggccagctgggccagagcccagagtgctgaggctcgcagcccgatctcggcagtcctgtaccgtcgcatcaggccacaggccacaggccacaggtggctcttcccgcatg

SEQ ID NO: 21598 - DNA, 282 bp, Homo sapiens
  MAP TO CHR16.3; EXPRESSED IN HELA, SIGNAL = 3.8; EXPRESSED IN BONE MARROW, SIGNAL =   2; EXPRESSED IN ADULT LIVER, SIGNAL =   2; NT HIT: gi5803162, EVALUE 3.00e-19; EST_HUMAN HIT: BI085494.1, EVALUE 0.00e+00
ctaggagatcttgcagttactccgcgagcagttctggggggggctctggggtggacggatggacttggacctcttgaggctgttgcccttgctgccgccgcccccggccccgctggccagggagtaggaacggccgtgcatcatgaccgcgttcatgccgttggccatcgagaaggacttgaggtggctcttgatggtgacgggcagtggaagcttgtcgatgaggtgcacgggggtgcaggagacgatggcccggcagcagaggtcctgcaggctgaacac

SEQ ID NO: 21599 - DNA, 124 bp, Homo sapiens
  MAP TO CHR18.3; EXPRESSED IN BRAIN, SIGNAL = 1.1; EXPRESSED IN ADULT LIVER, SIGNAL = 0.95; EXPRESSED IN FETAL LIVER, SIGNAL = 1.3; EXPRESSED IN BONE MARROW, SIGNAL = 1.2; NT HIT: AF282277.1, EVALUE 4.10e-01
ttgttcaagggcagctgcagctcagccactggtttggggctatattttaggcccagccatgtgtctctccagtccttcatctgccatcctatcctagcagccaccaagcacctcagcatgacag

SEQ ID NO: 21600 - DNA, 308 bp, Homo sapiens
  MAP TO CHR16.3; EXPRESSED IN ADULT LIVER, SIGNAL = 1.2; EXPRESSED IN HELA, SIGNAL = 3.3; EST_HUMAN HIT: AL601756.1, EVALUE 1.00e-130; NT HIT: AJ012166.1, EVALUE 4.40e+00; SWISSPROT HIT: P10386, EVALUE 9.50e-01
catcatcatagccaaaagtactcagcagcagcacctccaggtccagaggcacctccagctgcatgcacacacaatgaatgaaagactgccaggtgtccgaaccctggacatgcagcttgttgagttgcaggatgactctctgttcagggtccaaggtctcgttcctggaatccaggtccgtgttggggaggaagaacttcatcttggcgttcagccattctgggtctttggtgagcagcctcacaagacagctccacaggttcttgttgccgagctggaggccaacggggtccatgaggagccagccc

SEQ ID NO: 21601 - DNA, 101 bp, Homo sapiens
  MAP TO CHR16.3; EXPRESSED IN ADULT LIVER, SIGNAL =   1; EXPRESSED IN PLACENTA, SIGNAL = 1.5; EST_HUMAN HIT: AI476770.1, EVALUE 2.00e-49; SWISSPROT HIT: P35728, EVALUE 4.70e+00
aatatactgatgataatgctctgattcctaagaattcttctgtaattgttagaagaattcctattggaggtgttaaatctacaagcaagacatatgttatg

SEQ ID NO: 21602 - DNA, 369 bp, Homo sapiens
  MAP TO CHR18.3; EXPRESSED IN HELA, SIGNAL = 8.9; EXPRESSED IN HEART, SIGNAL = 6.4; EXPRESSED IN FETAL LIVER, SIGNAL = 8.8; EXPRESSED IN BONE MARROW, SIGNAL = 3.6; EXPRESSED IN ADULT LIVER, SIGNAL = 2.8; SWISSPROT HIT: P56545, EVALUE 8.00e-60; EST_HUMAN HIT: BG830337.1, EVALUE 0.00e+00; NT HIT: gi12746589, EVALUE 0.00e+00
cttccggcattctctgctttgttcgttggggtgctctggattgtccccgtgttttgtgggctggttgggagagggagcttgggagggatgtgccactgtggggaggttgtgagtcactgggatgcctccagggatgatcccttctgtggctgcgggaagtcctcctggagccacgcacacgaagcctggcagatatctgtatgtggcaccattaagctcgggatgaattgcttgctggtctattactgaccaaggagctgatgtgacaaagaattccttgttcacacagtttcttaagctttctgggatgcaacctgtgatggttcgtcggatctcggtggcagccgcctccctcatctccagggacac

SEQ ID NO: 21603 - DNA, 130 bp, Homo sapiens
  MAP TO CHR18.3; EXPRESSED IN LUNG, SIGNAL = 4.1; EXPRESSED IN FETAL LIVER, SIGNAL = 5.9; EXPRESSED IN ADULT LIVER, SIGNAL = 2.6; EXPRESSED IN PLACENTA, SIGNAL = 3.1; NT HIT: AE000682.1, EVALUE 4.30e-01; SWISSPROT HIT: P07567, EVALUE 9.00e-01
ttgatctccaagagcagggaggatttatccccactaatccgtggaccataaatccagctcaggcgggctgcagccccgtcctgcttggccccaagctcagatgcccagtggaaaacatcacagtgattgg

SEQ ID NO: 21604 - DNA, 335 bp, Homo sapiens
  MAP TO CHR16.3; EXPRESSED IN ADULT LIVER, SIGNAL = 3.1; EXPRESSED IN HELA, SIGNAL = 3.3; EXPRESSED IN LUNG, SIGNAL = 2.5; EXPRESSED IN BONE MARROW, SIGNAL = 3.9; NT HIT: AJ277441.1, EVALUE 0.00e+00; SWISSPROT HIT: Q20365, EVALUE 1.50e+00; EST_HUMAN HIT: AV753416.1, EVALUE 1.80e+00
caggtttgatgggctgcctgttcgagaaggtcagaggcgcaacgaggaatttggtctctgcaactggcacccagtggtggagaattttcactgtccagaccccaggcctcaggggcaagttcaaagggggcttgtagtgtgtgaattcggcagtggactcaatgaggatgtcgtaggtggctgcgatgacattgacgggatccacccaaatgacggtcacggtcacattaggtcccttcccccacttctgcatacccaccggctcatccatgggccccagaagacccccaaagttgcggaatagcctctccttggcatcccagtcagtgccgacc

SEQ ID NO: 21605 - DNA, 158 bp, Homo sapiens
  MAP TO CHR16.3; EXPRESSED IN LUNG, SIGNAL = 1.1; EXPRESSED IN ADULT LIVER, SIGNAL =   1; NT HIT: Y18642.1, EVALUE 1.40e-01; SWISSPROT HIT: P51691, EVALUE 3.40e+00; EST_HUMAN HIT: BE250990.1, EVALUE 3.20e+00
agcatgtgggctccagggcagtaatgagaaggtttctccagggtgcttcacaaagccaagttgctgaggcagcagaaccagtccccacttccctgcaacctgtggctgcattctccttggctgacaccagcaaagtcagagaacaggaagtggtggtg

SEQ ID NO: 21606 - DNA, 162 bp, Homo sapiens
  MAP TO CHR16.3; EXPRESSED IN ADULT LIVER, SIGNAL =   1; EST_HUMAN HIT: BE772843.1, EVALUE 4.00e-86; NT HIT: AB015317.1, EVALUE 3.00e-86; SWISSPROT HIT: O43747, EVALUE 1.00e-24
ggcatcccctccatcacagcatacagtaagaatggcttgaagatagaattcacctttgaacggtcaaataccaaccccagtgtaacagtgataacgatacaggcctccaacagcacagagctagatatgacggactttgttttccaagctgcagtaccaaag

SEQ ID NO: 21607 - DNA, 200 bp, Homo sapiens
  MAP TO CHR14.3; EXPRESSED IN ADULT LIVER, SIGNAL = 1.1; EXPRESSED IN BRAIN, SIGNAL = 1.3; EXPRESSED IN PLACENTA, SIGNAL = 1.4; EXPRESSED IN LUNG, SIGNAL =   2; EST_HUMAN HIT: BE613614.1, EVALUE 1.00e+00; NT HIT: AF018597.1, EVALUE 3.00e-03; SWISSPROT HIT: P46139, EVALUE 8.40e-01
ctaaagacatcagccaccgcatctatccaatggagacaatactctttctccccacccctgccacatctccctggacccatggctacttggagggaagggctgatggcacaggccctgtcctgggtgctccaggggagaaagcagaggccgaggagagagccaatgacttgcttcaggtcactgtccccttccacccaggg

SEQ ID NO: 21608 - DNA, 455 bp, Homo sapiens
  MAP TO CHR14.3; EXPRESSED IN HEART, SIGNAL = 4.8; EXPRESSED IN FETAL LIVER, SIGNAL = 7.6; EXPRESSED IN ADULT LIVER, SIGNAL = 7.8; SWISSPROT HIT: Q09167, EVALUE 6.00e-07; NT HIT: gi14784329, EVALUE 0.00e+00; EST_HUMAN HIT: BE926681.1, EVALUE 0.00e+00
gggttactattgaacatgctagggctcggtcacgaggtggaagaggtagaggacgatactctgaccgttttagtagtcgcagacctcgaaatgatagacggtatgtgaagggtggatggctgcattgaacaattattgtaggggtagcatttaagattcaggagtcattagcagtgatgattttgggtcctgccgtataatctgttcttctattcccacgttagccagttgttcttgatgaatctatatgagtcatagaacacaaatctattgacggaagtcattagaatggcttgtgatatctgatggcttgaacttgcccacagttgaacacaagtgctgtcattgcatttcttccattgtgaatacgaattttcttcctcagaaatgctccacctgtaagaacagaaaatcgtcttatagttgagaatttatcctcaagagtcagctggcag

SEQ ID NO: 21609 - DNA, 443 bp, Homo sapiens
  MAP TO CHR14.3; EXPRESSED IN FETAL LIVER, SIGNAL = 1.6; EXPRESSED IN LUNG, SIGNAL = 1.7; EXPRESSED IN ADULT LIVER, SIGNAL = 1.3; EXPRESSED IN PLACENTA, SIGNAL = 1.5; EXPRESSED IN HELA, SIGNAL = 2.2; SWISSPROT HIT: P10074, EVALUE 6.00e-09; NT HIT: X98834.1, EVALUE 0.00e+00; EST_HUMAN HIT: BG291890.1, EVALUE 0.00e+00
tggggggcaaagggctgtacctggtggtgtgccaggagcatatgcttcttgagggtagcccgctcaagaaagccctgcctgcagaaaacacaagtgaagagcggcccctccttggggtgggtcttctgatgctcctccagagctgcctgggagggaaaggcctggccacacacttcgcaggcctttctgctgctgctctctcctggctcctttctcattgcctcctgcaggctcagctcctctaccaaggtcacgctggtggcttccccttctggggtgagtgctgatgccggacttgagcttctctccggtttgcccccctcttccttgcctcctaaaacaccactgcttccctgctccattggctgaggctgatccaggctgtcaggtggtggtggtggtggcaaagaagactgttgagtagttttctcattactgtccat

SEQ ID NO: 21610 - DNA, 89 bp, Homo sapiens
  MAP TO CHR16.3; EXPRESSED IN HELA, SIGNAL =  17; EXPRESSED IN HEART, SIGNAL =  11; EXPRESSED IN FETAL LIVER, SIGNAL =  23; EXPRESSED IN BRAIN, SIGNAL =  19; EXPRESSED IN PLACENTA, SIGNAL =  16; EXPRESSED IN BONE MARROW, SIGNAL =  33; EXPRESSED IN LUNG, SIGNAL =  15; EXPRESSED IN ADULT LIVER, SIGNAL =  13; NT HIT: gi14779150, EVALUE 5.00e-43; EST_HUMAN HIT: BI561523.1, EVALUE 1.00e-35
ccagtcctcgacgcgcccagcatcttgactgcagagggcgaagcggccgcatctcccggcaaacgcgtgtgaagcagcggtgccgccat

SEQ ID NO: 21611 - DNA, 223 bp, Homo sapiens
  MAP TO CHR16.3; EXPRESSED IN PLACENTA, SIGNAL = 1.4; EXPRESSED IN FETAL LIVER, SIGNAL = 0.85; EXPRESSED IN ADULT LIVER, SIGNAL = 2.1; SWISSPROT HIT: P41248, EVALUE 2.10e-01; NT HIT: U17874.1, EVALUE 3.10e+00
ttctttggaatctcagcttggaaacggtcaaggctggtaatcagaatatttagaatagagaaattcagaatgcgaatcactggtctgcagctcacaccaaggcctgggttgaggggtgaggggcaggttgaggagtgcaggggaaaatacagaaaactccttcctctccttccactctttttcccaaagctcagcagacacgactccttcatcctcctttctt

SEQ ID NO: 21612 - DNA, 326 bp, Homo sapiens
  MAP TO CHR14.3; EXPRESSED IN BRAIN, SIGNAL = 1.2; EXPRESSED IN ADULT LIVER, SIGNAL = 1.3; EXPRESSED IN PLACENTA, SIGNAL = 4.8; EST_HUMAN HIT: BE276349.1, EVALUE 0.00e+00; SWISSPROT HIT: P17931, EVALUE 2.00e-08; NT HIT: gi14753301, EVALUE 0.00e+00
agctccatgatgcgttatctgggtctggaaacccaaaccctcaaggatggcctggcgcatgggggaaccagcctgctggggcagggggctacccaggggcttcctatcctggggcctaccccgggcaggcacccccaggggcttatcctggacaggcacctccaggcgcctaccctggagcacctggagcttatcccggagcacctgcacctggagtctacccagggccacccagcggccctggggcctacccatcttctggacagccaagtgccaccggagcctaccctgccactggcccctatggcgcccctgctgggccactg

SEQ ID NO: 21613 - DNA, 274 bp, Homo sapiens
  MAP TO CHR14.3; EXPRESSED IN BONE MARROW, SIGNAL = 1.8; EXPRESSED IN ADULT LIVER, SIGNAL = 1.1; EXPRESSED IN PLACENTA, SIGNAL = 0.88; EXPRESSED IN HELA, SIGNAL = 1.2; EST_HUMAN HIT: BI911817.1, EVALUE 0.00e+00; SWISSPROT HIT: P01848, EVALUE 6.00e-48; NT HIT: M94081.1, EVALUE 0.00e+00
atatccagaaccctgaccctgccgtgtaccagctgagagactctaaatccagtgacaagtctgtctgcctattcaccgattttgattctcaaacaaatgtgtcacaaagtaaggattctgatgtgtatatcacagacaaaactgtgctagacatgaggtctatggacttcaagagcaacagtgctgtggcctggagcaacaaatctgactttgcatgtgcaaacgccttcaacaacagcattattccagaagacaccttcttccccagcccagg

SEQ ID NO: 21614 - DNA, 84 bp, Homo sapiens
  MAP TO CHR14.3; EXPRESSED IN LUNG, SIGNAL = 2.3; EXPRESSED IN FETAL LIVER, SIGNAL = 2.4; EXPRESSED IN BRAIN, SIGNAL = 1.9; EXPRESSED IN ADULT LIVER, SIGNAL = 1.7; EXPRESSED IN PLACENTA, SIGNAL =   2; EST_HUMAN HIT: AW118655.1, EVALUE 6.00e-40
ccactgttcatgtacctggagctcatgtacctggagatgtggagttatcagaactttctgccacccttaatcctcttggcccag

SEQ ID NO: 21615 - DNA, 80 bp, Homo sapiens
  MAP TO CHR14.3; EXPRESSED IN BRAIN, SIGNAL =  11; EXPRESSED IN ADULT LIVER, SIGNAL = 7.1; EXPRESSED IN PLACENTA, SIGNAL = 5.2; EXPRESSED IN HELA, SIGNAL = 4.3; EXPRESSED IN LUNG, SIGNAL = 5.5; EXPRESSED IN FETAL LIVER, SIGNAL = 6.9; EXPRESSED IN BONE MARROW, SIGNAL = 7.8; SWISSPROT HIT: Q24266, EVALUE 8.20e+00
tggtcctgggcttcccgcttgggagtgcgcttggtaagcccggtgcagatggtgtcttccttgttgaagatgccacccat

SEQ ID NO: 21616 - DNA, 103 bp, Homo sapiens
  MAP TO CHR16.3; EXPRESSED IN HEART, SIGNAL = 2.2; EXPRESSED IN FETAL LIVER, SIGNAL = 3.4; EXPRESSED IN LUNG, SIGNAL = 1.7; EXPRESSED IN BONE MARROW, SIGNAL = 1.7; EXPRESSED IN ADULT LIVER, SIGNAL =   2; EXPRESSED IN PLACENTA, SIGNAL = 2.2; EXPRESSED IN HELA, SIGNAL = 2.4; EST_HUMAN HIT: AW368114.1, EVALUE 4.80e-01; SWISSPROT HIT: P53916, EVALUE 4.70e+00
tgcttggtgaagtaaagagaagaaaaaagactaatatagttagtgagagtgattctgtcaacaatttcatccagcagtctaaaaggcagcatgaaatgagagg

SEQ ID NO: 21617 - DNA, 271 bp, Homo sapiens
  MAP TO CHR19.3; EXPRESSED IN HEART, SIGNAL = 5.8; EXPRESSED IN LUNG, SIGNAL = 2.3; EXPRESSED IN BONE MARROW, SIGNAL = 2.8; EXPRESSED IN ADULT LIVER, SIGNAL = 1.8; EXPRESSED IN HELA, SIGNAL =   3; SWISSPROT HIT: Q03923, EVALUE 9.00e-40; EST_HUMAN HIT: AU143734.1, EVALUE 4.00e-72; NT HIT: M88366.1, EVALUE 1.00e-100
tatgcggcaaagcttttaactcgtcctcaaaccttactacacataagaaaattcatactggagagaaaccctacagatgtgaagaatgtggcaaagccttcaaaaggtcctcacaccttactgtacataagatagttcatactggagagaaatcctacaaatgtgaagaatgcgggaaagcctttaagcacccctcacatgttactgcacataagaaaattcatactggagggaaaccctacaaatgtgaagaatgtggcaaagactttaa

SEQ ID NO: 21618 - DNA, 162 bp, Homo sapiens
  MAP TO CHR19.3; EXPRESSED IN ADULT LIVER, SIGNAL = 1.6; EXPRESSED IN BRAIN, SIGNAL =   2; EXPRESSED IN PLACENTA, SIGNAL = 1.7; EXPRESSED IN HELA, SIGNAL = 1.5; EXPRESSED IN LUNG, SIGNAL = 1.4; EXPRESSED IN FETAL LIVER, SIGNAL =   3; EXPRESSED IN BONE MARROW, SIGNAL = 2.1; SWISSPROT HIT: P49306, EVALUE 7.60e+00; EST_HUMAN HIT: AI672482.1, EVALUE 5.00e-67; NT HIT: gi16171561, EVALUE 2.00e-71
atgacaggtgtggtggttggaaaggacctggtttcagctccgggtacacatcctccttccttctgctgcgtggctgtggcctcttccacgtcctcagaatccagctgttactccgtccgcggcctctcagctctagggccctctgcacactggcccccccag

SEQ ID NO: 21619 - DNA, 193 bp, Homo sapiens
  MAP TO CHR18.3; EXPRESSED IN ADULT LIVER, SIGNAL =  22; EXPRESSED IN HEART, SIGNAL =  10; EXPRESSED IN FETAL LIVER, SIGNAL =  17; NT HIT: gi14724560, EVALUE 1.00e-104; SWISSPROT HIT: P24049, EVALUE 3.00e-32; EST_HUMAN HIT: BI226637.1, EVALUE 1.00e-104
gggtttagatgtagattctctggtcattgagcatatccaagtgaacaaagcacctaagatgcgccgccggacctacagagctcatggtcggattaacccatacatgagctctccctgccacattgagatgatccttacggaaaaggaacagattgttcctaaaccagaagaggaggttgcccagaagaaaaag

SEQ ID NO: 21620 - DNA, 131 bp, Homo sapiens
  MAP TO CHR16.3; EXPRESSED IN FETAL LIVER, SIGNAL = 3.7; EXPRESSED IN LUNG, SIGNAL = 4.6; EXPRESSED IN ADULT LIVER, SIGNAL = 4.6; EXPRESSED IN HELA, SIGNAL = 5.3; EXPRESSED IN PLACENTA, SIGNAL = 4.3; EST_HUMAN HIT: BE747041.1, EVALUE 8.00e-22; NT HIT: gi14748324, EVALUE 4.00e-23; SWISSPROT HIT: O15228, EVALUE 2.00e-09
aagtccattcctgctgctataactggcacagacaaatcatgcttgtatgggagaaaagacaacaccagaaagtcaacgtaactttgatgactgagcagaagaacaagatgctcctggttggcttgctacag

SEQ ID NO: 21621 - DNA, 98 bp, Homo sapiens
  MAP TO CHR16.3; EXPRESSED IN PLACENTA, SIGNAL = 2.2; EXPRESSED IN LUNG, SIGNAL = 1.4; EXPRESSED IN ADULT LIVER, SIGNAL = 2.2; EXPRESSED IN BRAIN, SIGNAL = 3.8; EST_HUMAN HIT: AU119060.1, EVALUE 2.90e-02; NT HIT: M73718.1, EVALUE 3.10e-01
aagtagccacgaacaactgtactacaatgcccttttgaatggcgggggtgctgacagctgtctatttgctctaaagatgtggctgcttcagggagcaa

SEQ ID NO: 21622 - DNA, 173 bp, Homo sapiens
  MAP TO CHR16.3; EXPRESSED IN HELA, SIGNAL = 6.9; EXPRESSED IN BONE MARROW, SIGNAL = 1.3; EXPRESSED IN FETAL LIVER, SIGNAL = 0.82; EXPRESSED IN ADULT LIVER, SIGNAL = 1.1; EST_HUMAN HIT: BI011310.1, EVALUE 1.00e-92; NT HIT: gi14778168, EVALUE 8.00e-93
ctgagggcggggagcctggagagccaggtgtggggctgtcatccaccaggcccagctccctgtgcagagcacggggccggaccacacccagcgtcctctcccgcttctctcttgccgcccggagcttggtgatactcagcttcaggtcgagcggctcgtccagggagtgcatg

SEQ ID NO: 21623 - DNA, 189 bp, Homo sapiens
  MAP TO CHR16.3; EXPRESSED IN ADULT LIVER, SIGNAL = 1.3; EXPRESSED IN PLACENTA, SIGNAL = 1.9; NT HIT: gi14778625, EVALUE 1.00e-102; EST_HUMAN HIT: BF898603.1, EVALUE 1.00e-101; SWISSPROT HIT: P26442, EVALUE 7.50e-01
cttgcgagcttgctggaggagttcgtccttacgctgcaccagcatgcgctgtctctcatcagcagacttggagaagcggctcccacgagcctcgaagtcttccacctcactgggctccacttccacctcgccgaagtccagcgtctcctccaggcgaggactgaggtccagtggcacacgctcggtctg

SEQ ID NO: 21624 - DNA, 346 bp, Homo sapiens
  MAP TO CHR18.3; EXPRESSED IN PLACENTA, SIGNAL = 2.2; EXPRESSED IN FETAL LIVER, SIGNAL =   2; EXPRESSED IN ADULT LIVER, SIGNAL = 1.9; NT HIT: gi5729807, EVALUE 0.00e+00; EST_HUMAN HIT: AA907897.1, EVALUE 1.20e-01; SWISSPROT HIT: P31809, EVALUE 2.30e-01
ccctcggctacagtcaatctcatcacgaaggtttcgttttctcctgcgctggcctgcaagtagcagcggtaaagccccgagtctgagactgtgacatcggggatgacgatgacgctccaccttccgtggctgcagttgctcactatttgtcttgggaacttggaggtgaaatttctgccatggaccaagttgcagtaagttaagaggtcgatctgacggggctggatcttttcccacctcactgcctgcacaggccacgtcatctgaggctgacaagtgagtgtgacattctttccaggttccgaaacaatgtggctatttgatggcacagctgcctcaaaactat

SEQ ID NO: 21625 - DNA, 102 bp, Homo sapiens
  MAP TO CHR16.3; EXPRESSED IN LUNG, SIGNAL = 3.2; EXPRESSED IN BONE MARROW, SIGNAL = 3.7; EXPRESSED IN ADULT LIVER, SIGNAL = 2.9; EXPRESSED IN PLACENTA, SIGNAL = 2.8; EXPRESSED IN HEART, SIGNAL = 2.3; NT HIT: U00482.1, EVALUE 3.20e-01; SWISSPROT HIT: Q09252, EVALUE 4.70e+00
ctgggggcttccaagggggcttctaaagtgggtgagggtggggctgtccccagccggggcttgggcgagctggcgcctctgtcctccacgggcacctttcat

SEQ ID NO: 21626 - DNA, 334 bp, Homo sapiens
  MAP TO CHR19.3; EXPRESSED IN LUNG, SIGNAL =  35; EXPRESSED IN BONE MARROW, SIGNAL = 0.98; EXPRESSED IN ADULT LIVER, SIGNAL =  17; EXPRESSED IN HELA, SIGNAL =  79; EXPRESSED IN HEART, SIGNAL = 2.6; NT HIT: gi4557887, EVALUE 2.00e-98; EST_HUMAN HIT: BE744906.1, EVALUE 6.00e-99; SWISSPROT HIT: P05783, EVALUE 1.00e-39
gacagagctggccatgtgccagtctgtggagagcaacatccatggctttgcaaagtcattgatgacaccaatgtcactcggctgcggttggagacagagatcaaggttctcagggaggagctgctctttatgaagaagaaccacaaagaggaagtaaaaggactacaagccaaggtcgacagctctgggttgaccagggaggtagttgcccccaaagctcaggaccttgccaagatcatggcagacatccaggcccaatacgacgaggtagctcagaagaaccgagaggagctggacaagtaccagtctcagcagattgaggagagtatatagt

SEQ ID NO: 21627 - DNA, 123 bp, Homo sapiens
  MAP TO CHR18.3; EXPRESSED IN ADULT LIVER, SIGNAL =  11; EXPRESSED IN BRAIN, SIGNAL =  13; EXPRESSED IN HELA, SIGNAL = 9.2; EXPRESSED IN HEART, SIGNAL =  15; EXPRESSED IN FETAL LIVER, SIGNAL =  21; NT HIT: AL163203.2, EVALUE 1.00e-22; SWISSPROT HIT: P06196, EVALUE 6.00e+00
ttgagtagctgtgctttcatgatcctgttaatgtgttggaagtagttattcaggaacttaataaacaaagcacaaataaaatactggtagcaaacagccatttcatctctctcacatagtagt

SEQ ID NO: 21628 - DNA, 78 bp, Homo sapiens
  MAP TO CHR16.3; EXPRESSED IN BONE MARROW, SIGNAL = 1.6; EXPRESSED IN ADULT LIVER, SIGNAL = 1.7; EXPRESSED IN PLACENTA, SIGNAL = 1.4; NT HIT: AJ400878.1, EVALUE 2.30e-01; EST_HUMAN HIT: N73717.1, EVALUE 2.20e-02
ctttgcaaaatcagttctgtttttcttggcagcttcatttccactctttctctttgtcttattcccctgaagttccat

SEQ ID NO: 21629 - DNA, 181 bp, Homo sapiens
  MAP TO CHR18.3; EXPRESSED IN ADULT LIVER, SIGNAL = 1.3; SWISSPROT HIT: Q04736, EVALUE 3.00e-29; EST_HUMAN HIT: BF881419.1, EVALUE 5.00e-61; NT HIT: gi15305503, EVALUE 1.00e-97
ggaacatggaatggaaccacgaaagtagcaatcaaaacactaaaaccaggtacaatgatgccagaagctttccttcaagaagctcagataatgaaaaaattaagacatgataaacttgttccactatatgctgttgtttctgaagaaccaatttacattgtcactgaatttatgtcaaaag

SEQ ID NO: 21630 - DNA, 135 bp, Homo sapiens
  MAP TO CHR19.3; EXPRESSED IN PLACENTA, SIGNAL = 2.5; EXPRESSED IN HEART, SIGNAL = 2.5; EXPRESSED IN HELA, SIGNAL = 3.5; EXPRESSED IN LUNG, SIGNAL = 2.5; EXPRESSED IN BRAIN, SIGNAL = 3.2; EXPRESSED IN ADULT LIVER, SIGNAL = 2.8; EST_HUMAN HIT: AI479683.1, EVALUE 4.00e-39; NT HIT: AF090120.1, EVALUE 2.90e-02; SWISSPROT HIT: Q01081, EVALUE 7.00e-18
ttccggagggaggaggatggagagcgggccgtggctgaactcagtaaccgctggttcaacgggcaggctgtgcacggtgagctgtctcctgtcactgacttccgggagtcatgctgtcgccagtatgagatgggg

SEQ ID NO: 21631 - DNA, 110 bp, Homo sapiens
  MAP TO CHR16.3; EXPRESSED IN PLACENTA, SIGNAL = 2.6; EXPRESSED IN HEART, SIGNAL = 2.3; EXPRESSED IN BONE MARROW, SIGNAL = 4.2; EXPRESSED IN FETAL LIVER, SIGNAL = 2.5; EXPRESSED IN LUNG, SIGNAL = 3.1; EXPRESSED IN ADULT LIVER, SIGNAL =   3; EST_HUMAN HIT: BF529612.1, EVALUE 1.00e-54; NT HIT: AF411253.1, EVALUE 4.00e-19; SWISSPROT HIT: P54641, EVALUE 2.10e+00
atgatgggaagctgtccttggaggaattccagctcttctttgcagatggcgtccttaatgagaaagaactggaggatctctttcacacgattgactctgacaacaccaag

SEQ ID NO: 21632 - DNA, 107 bp, Homo sapiens
  MAP TO CHR16.3; EXPRESSED IN HELA, SIGNAL = 0.9; EXPRESSED IN LUNG, SIGNAL = 1.4; EXPRESSED IN ADULT LIVER, SIGNAL = 1.1; EXPRESSED IN PLACENTA, SIGNAL = 1.2; EST_HUMAN HIT: BI546754.1, EVALUE 5.10e-01; NT HIT: D26374.1, EVALUE 1.40e+00; SWISSPROT HIT: Q15049, EVALUE 4.60e+00
tcaggcgacggtttccgcggacaggacagacggggtggccggatcccctgcacagctccaagtttgggtgacggtttccgtggacagggcggacagggtggccgggt

SEQ ID NO: 21633 - DNA, 99 bp, Homo sapiens
  MAP TO CHR16.3; EXPRESSED IN HEART, SIGNAL = 2.4; EXPRESSED IN HELA, SIGNAL = 2.8; EXPRESSED IN LUNG, SIGNAL = 1.1; EXPRESSED IN ADULT LIVER, SIGNAL = 1.5; EST_HUMAN HIT: AV707624.1, EVALUE 8.00e-49; NT HIT: gi4506230, EVALUE 6.00e-49; SWISSPROT HIT: P26516, EVALUE 2.00e-14
cggaattaggacagtatcttttcatgagttcgttgatggcaatgtcattcttgtgtagtttagggcctgtgtggtaccagccaactattctttccctgg

SEQ ID NO: 21634 - DNA, 298 bp, Homo sapiens
  MAP TO CHR16.3; EXPRESSED IN ADULT LIVER, SIGNAL =   1; EXPRESSED IN PLACENTA, SIGNAL = 1.1; EXPRESSED IN HELA, SIGNAL = 1.3; EST_HUMAN HIT: BE968659.1, EVALUE 1.00e-01; SWISSPROT HIT: Q02100, EVALUE 2.80e+00
ttactgggtatagtgatgacaaatcactgtttcaagagacaatttcaaaagcatgagatgctgctgaaagaggattgtgaaccaggggacagctctttcattctgggagagcaacattgggagaatatgctctgtgagcccaaacagcatcctccccagcagggtgagggcagagctgcagggcaggcccagaacccactcaacacagacgtcagccctggagctggtgcaaaggagtctgaggagaaaatttaccagcatctgaattacacttatttcaaacaaaaatgcatgtcct

SEQ ID NO: 21635 - DNA, 408 bp, Homo sapiens
  MAP TO CHR18.3; EXPRESSED IN PLACENTA, SIGNAL = 1.4; EXPRESSED IN HEART, SIGNAL = 2.4; EXPRESSED IN LUNG, SIGNAL = 1.8; EXPRESSED IN FETAL LIVER, SIGNAL =   2; EXPRESSED IN ADULT LIVER, SIGNAL =   1; EST_HUMAN HIT: AW608406.1, EVALUE 1.00e-72; NT HIT: gi14749049, EVALUE 2.00e-24; SWISSPROT HIT: P49910, EVALUE 3.00e-38
ctgttgccttggctcctccagttctttttccagctcctccagcatagtcacagcttcctctccattctctggccgatgctctcgcagccaagcttgcagctcctcaggaaggatggccaggaactgctccaacatcagcagctccaggatctgctccttggagtgcacctccggcctcaaccactgacagcaaagctctcgcagccggctcagagcctcccgagggccagtggagtcagagtaactaaactgcctgaacttctgccggaatacctcttggctccaggggttttcctgaaggccaaagtcctggtccaaaacataattttcttcttcaaccttgacaactagaagtccttcctgttcttctggagcatggtaggccaagactgtggcctctcctgacat

SEQ ID NO: 21636 - DNA, 90 bp, Homo sapiens
  MAP TO CHR16.3; EXPRESSED IN BONE MARROW, SIGNAL = 1.1; EXPRESSED IN BRAIN, SIGNAL = 4.1; EXPRESSED IN ADULT LIVER, SIGNAL = 1.4; EXPRESSED IN PLACENTA, SIGNAL = 1.9; NT HIT: AF070933.1, EVALUE 4.40e+00; EST_HUMAN HIT: AI656951.1, EVALUE 2.00e-43
gcttttctggctttgcccgcccagctgctccatgccaggaggaggaggagacacctagagcctgcgacaccatggctcgcctcgctgcag

SEQ ID NO: 21637 - DNA, 143 bp, Homo sapiens
  MAP TO CHR14.3; EXPRESSED IN LUNG, SIGNAL = 2.7; EXPRESSED IN ADULT LIVER, SIGNAL = 1.2; EXPRESSED IN PLACENTA, SIGNAL = 2.1; EXPRESSED IN HELA, SIGNAL = 2.3; SWISSPROT HIT: P18708, EVALUE 3.40e+00; NT HIT: AF253417.1, EVALUE 4.80e-01; EST_HUMAN HIT: BG214294.1, EVALUE 3.00e-68
taaaaccagtttatgaggtctttgcaggagccgatgccacaccaatgaatgtcaatagatgagtagaagaagtcttcagcttgctgattgccccactcaagaccaaggcctctcttcctgcatcttccttcgttcagcaaatt

SEQ ID NO: 21638 - DNA, 231 bp, Homo sapiens
  MAP TO CHR16.3; EXPRESSED IN HELA, SIGNAL = 1.6; EXPRESSED IN LUNG, SIGNAL = 2.8; EXPRESSED IN BRAIN, SIGNAL = 1.4; EXPRESSED IN ADULT LIVER, SIGNAL = 1.3; SWISSPROT HIT: P96289, EVALUE 4.70e-02
tgagaggggaggaagcttccgctcttctggcctcccggatccgccagggctcctgctgctcccacttccgccacccaggagggccaggccgccgtcttgagtttccctccagcctggcctagggacgactcttcttcagtgccgccttctccaccgagtcctcgcatattaagattccagaaggttctgatctcctggtgcttcagtgtaaacgagtgtgtttggggatag

SEQ ID NO: 21639 - DNA, 359 bp, Homo sapiens
  MAP TO CHR14.3; EXPRESSED IN PLACENTA, SIGNAL = 1.1; EXPRESSED IN HELA, SIGNAL = 2.6; EXPRESSED IN FETAL LIVER, SIGNAL = 7.6; EXPRESSED IN LUNG, SIGNAL = 1.1; EXPRESSED IN ADULT LIVER, SIGNAL = 1.2; EXPRESSED IN BRAIN, SIGNAL = 1.9; EST_HUMAN HIT: N73448.1, EVALUE 0.00e+00; NT HIT: gi14774912, EVALUE 3.00e-54; SWISSPROT HIT: P39027, EVALUE 5.00e-34
tgtgcactttcatcttgctcctttgtggtccatgatgccagctgaggttgtcaatacaactaaactgactggagaagagcagactgttttgccatttttctaggtctttgagttgtacatcgaagttgaggctaatcatgccacacatgtttaacctgcctgagggattcgcagctcttttcccagctgtgtaatcatcaatgatttcaaatttgccagtgtaaccacgcttcatcatcacagtgagaaaccagatgatggctctggagcacggccccataagaacctgatgtttgcctctctttttagcattgttattgctcttgagagcatcagccaggacaatcatgagcaccatt

SEQ ID NO: 21640 - DNA, 81 bp, Homo sapiens
  MAP TO CHR16.3; EXPRESSED IN HEART, SIGNAL = 2.2; EXPRESSED IN LUNG, SIGNAL = 4.7; EXPRESSED IN ADULT LIVER, SIGNAL = 2.8; EXPRESSED IN BRAIN, SIGNAL = 3.1; EXPRESSED IN PLACENTA, SIGNAL = 3.2; EXPRESSED IN HELA, SIGNAL = 2.7; NT HIT: gi7706780, EVALUE 2.50e-01
caagcggccagctgtcctgtggttcacaaagcagcttaaaactccagtaatagatggcctcgtccaggcccgagaatgtga

SEQ ID NO: 21641 - DNA, 149 bp, Homo sapiens
  MAP TO CHR14.3; EXPRESSED IN ADULT LIVER, SIGNAL = 1.1; EXPRESSED IN PLACENTA, SIGNAL = 0.89; EXPRESSED IN FETAL LIVER, SIGNAL = 0.94; EXPRESSED IN BONE MARROW, SIGNAL = 0.69; EST_HUMAN HIT: BI113892.1, EVALUE 8.00e-78; NT HIT: gi14748350, EVALUE 5.00e-78; SWISSPROT HIT: P25054, EVALUE 5.10e-01
atgattcattccggactcgtaatgccagtagcgttccatcttccttttctcctaatactcccttaccgagtacttcccgtgggacaggtaactcagttgaccccaagagcagtggaagtaaagatacacaaccacggaaggctaccttg

SEQ ID NO: 21642 - DNA, 233 bp, Homo sapiens
  MAP TO CHR16.3; EXPRESSED IN LUNG, SIGNAL =  10; EXPRESSED IN BONE MARROW, SIGNAL =  14; EXPRESSED IN ADULT LIVER, SIGNAL =  12; EXPRESSED IN PLACENTA, SIGNAL =  13; EXPRESSED IN HELA, SIGNAL =  15; EXPRESSED IN HEART, SIGNAL = 8.4; EXPRESSED IN FETAL LIVER, SIGNAL =  14; EXPRESSED IN BRAIN, SIGNAL =  21; EST_HUMAN HIT: BF346444.1, EVALUE 1.00e-15; NT HIT: gi14776680, EVALUE 3.00e-68; SWISSPROT HIT: P40603, EVALUE 3.70e-02
tgccgtccgagggtgaaggtgaaggtcggggaagatgggctggtgcccaggacagcggctgagttcatggcactggagaccacagcaaaagcagggacatgcctggcttggaggtcagtgctggggctggtgggctcatctatgcatgtggaaggagaaaggtgtgaaggcggcagacagcggaacctgcttgcctccaccctagccttgccagcccccgtgccactcacctc

SEQ ID NO: 21643 - DNA, 100 bp, Homo sapiens
  MAP TO CHR16.3; EXPRESSED IN LUNG, SIGNAL = 5.9; EXPRESSED IN FETAL LIVER, SIGNAL = 4.6; EXPRESSED IN ADULT LIVER, SIGNAL =   3; NT HIT: gi5031984, EVALUE 1.00e-49; SWISSPROT HIT: P13662, EVALUE 3.00e-13; EST_HUMAN HIT: BG199689.1, EVALUE 2.00e-49
ccttaagctggcccacaaccatgctgatgatgcagctatctggagtgggctgatggtcctgcgcggtgatgctgtgctgaattttctggaacggaaggct

SEQ ID NO: 21644 - DNA, 149 bp, Homo sapiens
  MAP TO CHR16.3; EXPRESSED IN LUNG, SIGNAL = 6.7; EXPRESSED IN BONE MARROW, SIGNAL = 6.1; EXPRESSED IN ADULT LIVER, SIGNAL = 4.9; EXPRESSED IN PLACENTA, SIGNAL = 5.6; NT HIT: gi14776249, EVALUE 1.00e-78; SWISSPROT HIT: P30132, EVALUE 1.50e+00; EST_HUMAN HIT: BI597351.1, EVALUE 1.00e-45
gccctgagctagaggccccctacagcagagaggaggagcggcagcggctgtcggacctgtaccaccgcctgcatgctcgtctccacagcacctcccgacccctgcgcctcatttaccacgtggctgagaaggagacactactggcctgg

SEQ ID NO: 21645 - DNA, 128 bp, Homo sapiens
  MAP TO CHR19.3; EXPRESSED IN PLACENTA, SIGNAL = 2.2; EXPRESSED IN HELA, SIGNAL = 2.2; EXPRESSED IN HEART, SIGNAL = 1.7; EXPRESSED IN LUNG, SIGNAL = 3.6; EXPRESSED IN FETAL LIVER, SIGNAL = 1.1; EXPRESSED IN ADULT LIVER, SIGNAL = 2.3; NT HIT: gi14670376, EVALUE 9.00e-61; EST_HUMAN HIT: BE893345.1, EVALUE 1.00e-60
cgtccttcgacctgaagcagcagctgctgctcaacaagctcatggggaaagatgagagcacctcacggaaccgccgctcgctgagccctatcctgccccggcagacacagtcctgcgcccccaccagg

SEQ ID NO: 21646 - DNA, 263 bp, Homo sapiens
  MAP TO CHR14.3; EXPRESSED IN HELA, SIGNAL =  72; EXPRESSED IN PLACENTA, SIGNAL = 6.1; EXPRESSED IN HEART, SIGNAL =  25; EXPRESSED IN LUNG, SIGNAL =  41; EXPRESSED IN FETAL LIVER, SIGNAL =  55; EXPRESSED IN BRAIN, SIGNAL = 7.8; EXPRESSED IN ADULT LIVER, SIGNAL = 9.4; SWISSPROT HIT: P36578, EVALUE 2.00e-37; NT HIT: gi14729580, EVALUE 2.00e-97; EST_HUMAN HIT: AV744906.1, EVALUE 8.00e-98
cgtatccggcgcaggggcgccgcatcatctgtaatgaggataatggtatcgtcaaggccttcagaaacatccctggaattactatgcttaatataagcaaactgaacattttgaaacttgctcctggtgggcatgtgggacatttctgcatttggactcaaagtgctttctggaagttagatgaattttctggcacttggcataaagctgcttccctcaagagtaactacaatcttcccatgcacaagatgatcaatacagac

SEQ ID NO: 21647 - DNA, 96 bp, Homo sapiens
  MAP TO CHR14.3; EXPRESSED IN BRAIN, SIGNAL = 1.3; EXPRESSED IN ADULT LIVER, SIGNAL = 1.2; EXPRESSED IN PLACENTA, SIGNAL = 1.3; EXPRESSED IN HELA, SIGNAL = 1.3; EXPRESSED IN LUNG, SIGNAL = 1.1; SWISSPROT HIT: Q9YGY0, EVALUE 9.30e-01; EST_HUMAN HIT: BG985228.1, EVALUE 7.00e-03
gtgtgagaactctcctgtgtgaggccgaggcaaagctgcacgggatcctgagagagcagcagccagagcagaagctgcaggagagactggcacatg

SEQ ID NO: 21648 - DNA, 114 bp, Homo sapiens
  MAP TO CHR19.3; EXPRESSED IN HELA, SIGNAL = 1.3; EXPRESSED IN BRAIN, SIGNAL = 1.8; EXPRESSED IN ADULT LIVER, SIGNAL = 0.95; EXPRESSED IN PLACENTA, SIGNAL = 1.2; EST_HUMAN HIT: AA947585.1, EVALUE 4.00e-57; NT HIT: gi14670376, EVALUE 3.00e-57
accaatcacaggagagatggatgaagccgattctgcgtttttaaaatttaagcagacagctgatgactctctgtcccttacatctccaaacaccgagtccatttttgtagaagg

SEQ ID NO: 21649 - DNA, 149 bp, Homo sapiens
  MAP TO CHR16.3; EXPRESSED IN PLACENTA, SIGNAL = 1.4; EXPRESSED IN HELA, SIGNAL = 1.3; EXPRESSED IN BONE MARROW, SIGNAL = 1.4; EXPRESSED IN ADULT LIVER, SIGNAL = 0.94; EST_HUMAN HIT: BF237964.1, EVALUE 1.90e-01; SWISSPROT HIT: P98094, EVALUE 1.50e+00; NT HIT: AJ002153.2, EVALUE 5.10e-01
atgtccatcaagactggcttcatcaaggctctttgcttacaaggaacagaaatctgctcagaacagctcaagcataccagagatatttttgaaaggatgcaaggatatctcccagaaggagatatgaatgggaatcaggactgggcaag

SEQ ID NO: 21650 - DNA, 237 bp, Homo sapiens
  MAP TO CHR16.3; EXPRESSED IN HEART, SIGNAL = 4.1; EXPRESSED IN FETAL LIVER, SIGNAL =   5; EXPRESSED IN LUNG, SIGNAL = 8.5; EXPRESSED IN BONE MARROW, SIGNAL = 7.6; EXPRESSED IN ADULT LIVER, SIGNAL = 4.2; EXPRESSED IN BRAIN, SIGNAL = 5.4; EXPRESSED IN PLACENTA, SIGNAL = 5.1; EST_HUMAN HIT: BE277860.1, EVALUE 1.20e+00; SWISSPROT HIT: Q9M291, EVALUE 3.00e-03; NT HIT: M62601.1, EVALUE 3.40e+00
cattcaaccagcgtgtgtatgagggacgtgctcaggccagcatagcccaggccctccgggatctgctccttggtgagggagacaccccaaatcatgacgaggtaggaaccccacatgtccgaggggcaggcagagccggcctcgctgagccgacgtttgagttccaaatgaacgaggggcgtctggaaacggtgtcccaggccgagggcgcagtcccggagccgggggcacccctct

SEQ ID NO: 21651 - DNA, 94 bp, Homo sapiens
  MAP TO CHR18.3; EXPRESSED IN HELA, SIGNAL = 2.6; EXPRESSED IN LUNG, SIGNAL = 1.4; EXPRESSED IN FETAL LIVER, SIGNAL = 2.1; EXPRESSED IN BONE MARROW, SIGNAL = 1.1; EXPRESSED IN ADULT LIVER, SIGNAL =   1; EXPRESSED IN PLACENTA, SIGNAL = 0.97; SWISSPROT HIT: P40826, EVALUE 8.00e-11; NT HIT: gi4827049, EVALUE 2.00e-33; EST_HUMAN HIT: BG027863.1, EVALUE 3.00e-33
tccaagatcagccggctgcctgcttacttgaccattcagatggttcgatttttttataaagagaaggaatctgtgaatgccaaagttcttaagg

SEQ ID NO: 21652 - DNA, 98 bp, Homo sapiens
  MAP TO CHR14.3; EXPRESSED IN ADULT LIVER, SIGNAL = 1.7; EXPRESSED IN PLACENTA, SIGNAL = 0.92; EXPRESSED IN BRAIN, SIGNAL = 1.2; NT HIT: U07345.1, EVALUE 4.80e+00; EST_HUMAN HIT: BI828372.1, EVALUE 3.00e-48
tcttcagatcatgagacagatcatggcagggaaggggtgtgaggaatcctcggtcatggagctccttaaggaagcagaggagatgaaacagaacttgg

SEQ ID NO: 21653 - DNA, 332 bp, Homo sapiens
  MAP TO CHR19.3; EXPRESSED IN ADULT LIVER, SIGNAL = 3.5; EXPRESSED IN HEART, SIGNAL = 3.9; EXPRESSED IN FETAL LIVER, SIGNAL = 5.1; SWISSPROT HIT: P01233, EVALUE 3.00e-44; NT HIT: gi16162816, EVALUE 0.00e+00; EST_HUMAN HIT: AI189807.1, EVALUE 0.00e+00
tgcggattgagaagcctttattgtgggaggatcggggtgtccgagggccccgggagtcgggatgggcttggaaggctggggggaggggcctttgaggaagaggagtcctggaagcgggggtcatcacaggtcaaggggtggtccttgggacccccgcagtcagtggtgctgcggcggcagagtgcacattgacagctgagagccacggcgtaggagaccacggggttcacgccgcgcgggcagccagggagccggatggactcgaagcgcacatcgcggtagttgcacaccacctgaggcagggccggcaggaccccctgcagcacgcgggt

SEQ ID NO: 21654 - DNA, 126 bp, Homo sapiens
  MAP TO CHR16.3; EXPRESSED IN BRAIN, SIGNAL = 1.3; EXPRESSED IN ADULT LIVER, SIGNAL = 1.4; EXPRESSED IN PLACENTA, SIGNAL = 1.3; EXPRESSED IN LUNG, SIGNAL =   1; EST_HUMAN HIT: BE960756.1, EVALUE 1.60e-01; NT HIT: AL161580.2, EVALUE 7.00e-03
tcaagaaacgacattgttttcctgagcggcagtgacagcgaggtgacagagattaatagcttggtattgactgagcaacttcgagttccttatctctgtcaagtcaaggctgtgtccaagggctga

SEQ ID NO: 21655 - DNA, 128 bp, Homo sapiens
  MAP TO CHR19.3; EXPRESSED IN LUNG, SIGNAL = 1.1; EXPRESSED IN ADULT LIVER, SIGNAL = 1.2; EXPRESSED IN BRAIN, SIGNAL = 1.4; EST_HUMAN HIT: BE560374.1, EVALUE 6.00e-66; SWISSPROT HIT: P17038, EVALUE 2.00e-16; NT HIT: gi4508026, EVALUE 4.00e-66
ccaggaagaccaggtttctgtagttctctaacatcacattcctatataaattctgctgtgcaatgtccaggcattgccactcctccagacagaattctatggccacatccataaatgtcaatggtccc

SEQ ID NO: 21656 - DNA, 130 bp, Homo sapiens
  MAP TO CHR16.3; EXPRESSED IN HEART, SIGNAL = 3.2; EXPRESSED IN LUNG, SIGNAL = 7.1; EXPRESSED IN FETAL LIVER, SIGNAL = 5.6; EXPRESSED IN ADULT LIVER, SIGNAL = 3.1; EXPRESSED IN PLACENTA, SIGNAL = 4.6; EST_HUMAN HIT: BG757991.1, EVALUE 1.00e-54; SWISSPROT HIT: O22585, EVALUE 2.70e+00; NT HIT: gi8923535, EVALUE 9.00e-55
cctgagtgggggcagggctggggagaaggtcatgggggggctgcagtaggggtggtcattgtgcaggctgagttgagagaagtgggtggccatgttctcctcagacagaaactgcttgcgcagaggctcc

SEQ ID NO: 21657 - DNA, 103 bp, Homo sapiens
  MAP TO CHR16.3; EXPRESSED IN LUNG, SIGNAL = 3.6; EXPRESSED IN BONE MARROW, SIGNAL = 4.3; EXPRESSED IN ADULT LIVER, SIGNAL = 4.3; EXPRESSED IN PLACENTA, SIGNAL = 4.5; EXPRESSED IN FETAL LIVER, SIGNAL = 3.7; EXPRESSED IN BRAIN, SIGNAL = 3.1; EST_HUMAN HIT: BG818059.1, EVALUE 1.00e-41; SWISSPROT HIT: Q39055, EVALUE 3.00e-03; NT HIT: gi14748080, EVALUE 9.00e-42
agctgctgagaatcattggcgctgccgtgggcaggaagaagcagcagcatgcaggcatgttcagtatttcccagatgaagaactggcccatgatcctcatcgg

SEQ ID NO: 21658 - DNA, 190 bp, Homo sapiens
  MAP TO CHR16.3; EXPRESSED IN ADULT LIVER, SIGNAL = 1.5; EXPRESSED IN PLACENTA, SIGNAL = 1.7; EXPRESSED IN HELA, SIGNAL = 4.9; NT HIT: AB053172.1, EVALUE 1.00e-102; EST_HUMAN HIT: BI224536.1, EVALUE 1.00e-102; SWISSPROT HIT: Q03131, EVALUE 6.50e-01
gccttcctggcctccctgagccccgccatggtggtgccggaggaccagctgacccgctggcacccgcgcttcaacgtggatgaagtacccgacatcgagccggccgcgctgccccagccacccgccacggagaagctcaccactgctcaggaggtgctggcccgggcccgcaacctgatttcacccaggg

SEQ ID NO: 21659 - DNA, 182 bp, Homo sapiens
  MAP TO CHR14.3; EXPRESSED IN FETAL LIVER, SIGNAL = 1.7; EXPRESSED IN LUNG, SIGNAL = 1.2; EXPRESSED IN BONE MARROW, SIGNAL = 1.4; EXPRESSED IN ADULT LIVER, SIGNAL = 1.5; EXPRESSED IN BRAIN, SIGNAL = 1.5; SWISSPROT HIT: Q99297, EVALUE 1.00e-05; NT HIT: gi15299985, EVALUE 3.00e-98; EST_HUMAN HIT: R29313.1, EVALUE 2.00e-76
ccttcttcctgatagactgttgccattgttttaaaacaggttctgtacttgatctctccaggaactggttgaggcccttgaatcctacttttggcaacatcaaaagggatgttaatgactgaggctattgtccccgagagaagaccaatcccaaattttctccaaaactccaagattggatc

SEQ ID NO: 21660 - DNA, 270 bp, Homo sapiens
  MAP TO CHR16.3; EXPRESSED IN PLACENTA, SIGNAL = 1.4; EXPRESSED IN HELA, SIGNAL = 2.6; EXPRESSED IN FETAL LIVER, SIGNAL = 1.2; EXPRESSED IN ADULT LIVER, SIGNAL = 1.8; EST_HUMAN HIT: AW157368.1, EVALUE 0.00e+00; SWISSPROT HIT: P27904, EVALUE 3.70e+00; NT HIT: gi14776386, EVALUE 0.00e+00
tctgttggcttcatcagcatcctcttcattgatggagctggaaggggagggagtggctgatttgcttgctggaggtgaaggagatgtgtgaggcatactggcacctcccaaattcaaccccaactgggcgctgagctgagactggttgatggtggtgagctgggcaggaggcatgaccccagaacgcgcagcatcggtcatgtggacgatggaccgcatgatcagggagggatcctgccggtactgggacacttgtgtgtggctctgatc

SEQ ID NO: 21661 - DNA, 125 bp, Homo sapiens
  MAP TO CHR19.3; EXPRESSED IN ADULT LIVER, SIGNAL = 1.4; EXPRESSED IN BRAIN, SIGNAL =   2; EXPRESSED IN HELA, SIGNAL = 1.5; EXPRESSED IN PLACENTA, SIGNAL = 1.7; EST_HUMAN HIT: BF887748.1, EVALUE 1.00e-02; SWISSPROT HIT: P26732, EVALUE 7.80e+00; NT HIT: AE001943.1, EVALUE 1.00e-01
ggggcaagggctccagcaccaaagccagggagcctctgaccttacgagatgagctccgcaccatcctgggcggtgcagggctgctggctgctggggcactcaaggccttcagccttgagaagttg

SEQ ID NO: 21662 - DNA, 207 bp, Homo sapiens
  MAP TO CHR18.3; EXPRESSED IN HELA, SIGNAL = 4.8; EXPRESSED IN HEART, SIGNAL = 5.1; EXPRESSED IN LUNG, SIGNAL = 5.8; EXPRESSED IN FETAL LIVER, SIGNAL =  20; EXPRESSED IN BONE MARROW, SIGNAL = 7.9; EXPRESSED IN ADULT LIVER, SIGNAL = 6.7; EXPRESSED IN BRAIN, SIGNAL =   8; SWISSPROT HIT: P32710, EVALUE 2.50e+00; NT HIT: AF230497.1, EVALUE 7.30e-01
aagtcaacacaaggcttctggctgatgctccaggacactgggctgctgatgccttccacgcagatccagaacttcttgtcctctgggttcacaatttcacagcacagggagtcagtcctggcttggcctctccctctcacagacctgtggtcagggtttgtggccaactgtagggcttccttaagggaaggggtttgtaaacccatt

SEQ ID NO: 21663 - DNA, 471 bp, Homo sapiens
  MAP TO CHR19.3; EXPRESSED IN ADULT LIVER, SIGNAL =   5; EXPRESSED IN HELA, SIGNAL =  21; EXPRESSED IN HEART, SIGNAL = 4.7; EXPRESSED IN LUNG, SIGNAL =  12; EXPRESSED IN FETAL LIVER, SIGNAL = 4.8; EXPRESSED IN BONE MARROW, SIGNAL = 5.9; EST_HUMAN HIT: AW340703.1, EVALUE 0.00e+00; SWISSPROT HIT: Q9SHI1, EVALUE 3.70e-01; NT HIT: gi7706110, EVALUE 0.00e+00
aagcaactttaatcgccaccctcagacggggcagcaggagtgtcttaagcacagggccgttctaccccctgggagctgcctggggccagcccctcagttctggctgtggcaggttccccatcctagctccccggatctccatagggagtgtccagggaccctcaatctccagggccacttctgcaggagctcgggttcgaggttccacgtggccagaagagctcaggtctctgagggctggtgtgcccgggtacccatccgcatcactgctctcctcctgtccggctacgcccaggggctgagtgacggtggtggcaagtgcttgtcctcagggcagcgaggtcttctgttctgacagcagcagggactccttcatggccaccagtaaccccagtgggcggaggcgctcctgggctcggagccaggacaaaaggaggagggtggcggtgaccaggcttgcactgagcaccg

SEQ ID NO: 21664 - DNA, 184 bp, Homo sapiens
  MAP TO CHR18.3; EXPRESSED IN ADULT LIVER, SIGNAL = 2.6; EXPRESSED IN HELA, SIGNAL = 2.7; EXPRESSED IN PLACENTA, SIGNAL = 2.6; EXPRESSED IN BONE MARROW, SIGNAL = 3.1; EXPRESSED IN BRAIN, SIGNAL = 2.8; NT HIT: AF370148.1, EVALUE 4.10e-02
atggacaacacccctggaaggaggaagctgccagcagaagccactgatggaagctcagtgacaacaaggagtggtaaagaagaggggttaagggatatattcacagaggccactactgcaaatttcctgaaggcagcagcaaagcacaggggtgcaaacctgtttcttcattttggaatcttag

SEQ ID NO: 21665 - DNA, 171 bp, Homo sapiens
  MAP TO CHR19.3; EXPRESSED IN ADULT LIVER, SIGNAL = 3e+02; EXPRESSED IN PLACENTA, SIGNAL = 6.5; EXPRESSED IN HELA, SIGNAL = 5.3; EXPRESSED IN HEART, SIGNAL = 5.9; EXPRESSED IN LUNG, SIGNAL = 6.2; EXPRESSED IN FETAL LIVER, SIGNAL =  51; EXPRESSED IN BONE MARROW, SIGNAL =  11; NT HIT: M20902.1, EVALUE 1.00e-91; EST_HUMAN HIT: BI835602.1, EVALUE 2.00e-91; SWISSPROT HIT: P02654, EVALUE 3.00e-04
gggagtggttttcagagacatttcagaaagtgaaggagaaactcaagattgactcatgaggacctgaagggtgacatcccaggaggggcctctgaaatttcccacaccccagcgcctgtgctgaggactccctccatgtggccccaggtgccaccaataaaaatcctacag

SEQ ID NO: 21666 - DNA, 135 bp, Homo sapiens
  MAP TO CHR16.3; EXPRESSED IN BRAIN, SIGNAL = 5.5; EXPRESSED IN ADULT LIVER, SIGNAL =   6; EXPRESSED IN PLACENTA, SIGNAL = 4.6; EXPRESSED IN HEART, SIGNAL = 4.1; EXPRESSED IN LUNG, SIGNAL = 6.8; EXPRESSED IN BONE MARROW, SIGNAL = 4.7; EXPRESSED IN FETAL LIVER, SIGNAL =   4; NT HIT: gi14747488, EVALUE 1.80e+00; SWISSPROT HIT: P51826, EVALUE 1.50e+00
ctggatgggctgggcaccacttggtctgccattttgatgctcgcggcgggaccaggatgctgtaaacacccatacgcgactctcctgcagggtctccgggttgccagcaatcacggccatctgctcatatggcac

SEQ ID NO: 21667 - DNA, 87 bp, Homo sapiens
  MAP TO CHR18.3; EXPRESSED IN ADULT LIVER, SIGNAL =   1; EXPRESSED IN PLACENTA, SIGNAL = 1.3; EXPRESSED IN LUNG, SIGNAL = 1.5; EXPRESSED IN BONE MARROW, SIGNAL = 2.3; EXPRESSED IN FETAL LIVER, SIGNAL = 2.3; EST_HUMAN HIT: BF380547.1, EVALUE 1.50e+00
agaaagataaagttttgaattgcacttacaatgccttcagagaagaatacaacaaatttatgttgaccatgtactgctactactaat

SEQ ID NO: 21668 - DNA, 149 bp, Homo sapiens
  MAP TO CHR18.3; EXPRESSED IN BRAIN, SIGNAL = 1.1; EXPRESSED IN ADULT LIVER, SIGNAL = 1.1; SWISSPROT HIT: P55244, EVALUE 3.90e-01; NT HIT: D25327.1, EVALUE 2.00e+00; EST_HUMAN HIT: AW895486.1, EVALUE 4.80e-02
aatgttcttggaccacttaaataatgaggaactaagcaacacactcatttcttatgctgtgaaccagaaaccgaaaggtcaaatgtgctttgggaatgcaatcattaaaacacataagcgtggcggcatggataggaggagccattttg

SEQ ID NO: 21669 - DNA, 92 bp, Homo sapiens
  MAP TO CHR16.3; EXPRESSED IN HEART, SIGNAL = 2.1; EXPRESSED IN LUNG, SIGNAL = 1.7; EXPRESSED IN BONE MARROW, SIGNAL = 1.4; EXPRESSED IN ADULT LIVER, SIGNAL = 1.5; EST_HUMAN HIT: BE878959.1, EVALUE 5.00e-44; SWISSPROT HIT: P54851, EVALUE 3.00e-07; NT HIT: gi14776463, EVALUE 3.00e-44
ccttgaaagctgtcattgatgactgtgcaattcgtgttgttggtacatattctccagacatctgcaaaaaactcatctcctacccaccaggc

SEQ ID NO: 21670 - DNA, 184 bp, Homo sapiens
  MAP TO CHR14.3; EXPRESSED IN PLACENTA, SIGNAL = 1.2; EXPRESSED IN BONE MARROW, SIGNAL = 1.3; EXPRESSED IN BRAIN, SIGNAL = 1.3; EXPRESSED IN ADULT LIVER, SIGNAL = 1.5; EST_HUMAN HIT: BE567564.1, EVALUE 2.40e-01; SWISSPROT HIT: Q15233, EVALUE 1.90e+00; NT HIT: AF296098.1, EVALUE 6.40e-01
tttccagaagtcacctttatccctggccttagggaccactcctttcttggctatcttcctgcttccctggggatggcttctcagtccctcctcctggtgtctcctcatctcttgacttctcaacattggagtgcccaggcttaccaaggtgatcttatccaggaccatggctttaaatgccatt

SEQ ID NO: 21671 - DNA, 215 bp, Homo sapiens
  MAP TO CHR18.3; EXPRESSED IN FETAL LIVER, SIGNAL =   2; EXPRESSED IN BONE MARROW, SIGNAL = 2.7; EXPRESSED IN BRAIN, SIGNAL = 1.8; EXPRESSED IN ADULT LIVER, SIGNAL = 1.3; EXPRESSED IN LUNG, SIGNAL = 1.4; NT HIT: gi13646818, EVALUE 1.00e-118; EST_HUMAN HIT: AA639918.1, EVALUE 1.00e-110; SWISSPROT HIT: Q06890, EVALUE 1.00e-04
actgtcctgatgtacctgctctgcacacagaattagacgaggcgatcaggttggtcaatgtatccaatcagcagtatggccagattctccagatgacccggaagcacttggaggacaccgcctatctggtggagaagatgagagggcaatttggctgggtgtctgaactggcaaaccaggccccagaaacagagatcatctttaattcaatacag

SEQ ID NO: 21672 - DNA, 127 bp, Homo sapiens
  MAP TO CHR19.3; EXPRESSED IN HEART, SIGNAL = 2.6; EXPRESSED IN BONE MARROW, SIGNAL = 1.5; EXPRESSED IN ADULT LIVER, SIGNAL = 2.1; SWISSPROT HIT: Q03923, EVALUE 2.00e-17; NT HIT: AF325191.1, EVALUE 2.00e-65; EST_HUMAN HIT: BF530154.1, EVALUE 3.00e-46
ggaccattgacatttacagatgtggccatagaattctctctggaggagtggcagtgcctggacacagcacaacagaacttatatagaaatgtgatgttagagaactacagaaacttggtcttcctgg

SEQ ID NO: 21673 - DNA, 350 bp, Homo sapiens
  MAP TO CHR18.3; EXPRESSED IN FETAL LIVER, SIGNAL = 4.9; EXPRESSED IN LUNG, SIGNAL = 3.6; EXPRESSED IN BONE MARROW, SIGNAL = 6.1; EXPRESSED IN ADULT LIVER, SIGNAL = 4.3; EXPRESSED IN BRAIN, SIGNAL = 4.5; EXPRESSED IN PLACENTA, SIGNAL = 4.4; SWISSPROT HIT: P17221, EVALUE 3.60e-02; NT HIT: AB046847.1, EVALUE 2.10e-02; EST_HUMAN HIT: AI146454.1, EVALUE 3.00e-48
cactttgctttttcccatctaggctgcatgatgagattattcatgaccacttttatcactgcagggaattttgcccttggatgtgttctgagtggagctgacatctctgcagcatcttctctaggacccttctctctgacatagcagtggcctaactcttcatctgtctctcctccatccagcatggcaccacactcctgatggttgctgcctacgctggccacatagactgtgtgagggaactggttctgcaaggagcagacatcaatctccagagagaggtaggtcaggctttgcacttgaagaaaaatgaccaggctcagagatctgaagttttcatgatagtgaac

SEQ ID NO: 21674 - DNA, 280 bp, Homo sapiens
  MAP TO CHR19.3; EXPRESSED IN ADULT LIVER, SIGNAL = 2.2; EXPRESSED IN HELA, SIGNAL = 2.5; EXPRESSED IN HEART, SIGNAL = 1.9; EXPRESSED IN FETAL LIVER, SIGNAL = 4.1; SWISSPROT HIT: P40199, EVALUE 1.00e-45; NT HIT: gi14756165, EVALUE 0.00e+00; EST_HUMAN HIT: AW579185.1, EVALUE 0.00e+00
gcggagctgcccaagccctccatctccagcaacaactccaaccccgtggaggacaaggatgctgtggccttcacctgtgaacctgaggttcagaacacaacctacctgtggtgggtaaatggtcagagcctcccggtcagtcccaggctgcagctgtccaatggcaacatgaccctcactctactcagcgtcaaaaggaacgatgcaggatcctatgaatgtgaaatacagaacccagcgagtgccaaccgcagtgacccagtcaccctgaatgtcctct

SEQ ID NO: 21675 - DNA, 276 bp, Homo sapiens
  MAP TO CHR19.3; EXPRESSED IN HELA, SIGNAL = 2.6; EXPRESSED IN FETAL LIVER, SIGNAL = 9.4; EXPRESSED IN ADULT LIVER, SIGNAL =  23; EST_HUMAN HIT: BI824582.1, EVALUE 0.00e+00; SWISSPROT HIT: P55899, EVALUE 6.00e-52; NT HIT: gi15302489, EVALUE 0.00e+00
ccttccactccaggtttccacggcccctctccaggtgctcccgcaggcggtgcgggcaggagaatagcaggaaggtgagctccttgttggccgccttgtcctgctgctgccaccgctgactgatagccagggcctcgggccagtccccaccccaggtgccctgcttgaggtcgaaattcatgaactcctcgccgttcagggcgaacttggcggtgggcaccgaggtgttgtcagggcccagttcacagcccagcaggccctgcagagtgtagggac

SEQ ID NO: 21676 - DNA, 130 bp, Homo sapiens
  MAP TO CHR16.3; EXPRESSED IN ADULT LIVER, SIGNAL = 2.7; EXPRESSED IN HEART, SIGNAL = 2.6; EXPRESSED IN HELA, SIGNAL =   2; EXPRESSED IN LUNG, SIGNAL = 2.9; EXPRESSED IN BONE MARROW, SIGNAL = 2.1; EXPRESSED IN FETAL LIVER, SIGNAL = 2.1; EXPRESSED IN BRAIN, SIGNAL = 2.1; SWISSPROT HIT: Q02759, EVALUE 9.00e-01
atgttcaccctgtcccccatgagactggtcactgataaagaactggtagaaaggttctttcctacaaatccaattccagtcggcttggctgatgcttggcctgctcctcagagaggcaaacatgcccatt

SEQ ID NO: 21677 - DNA, 198 bp, Homo sapiens
  MAP TO CHR18.3; EXPRESSED IN ADULT LIVER, SIGNAL = 2.5; EXPRESSED IN PLACENTA, SIGNAL = 2.2; EXPRESSED IN HELA, SIGNAL = 5.6; NT HIT: X85107.1, EVALUE 1.00e-107; EST_HUMAN HIT: AU140779.1, EVALUE 1.00e-107; SWISSPROT HIT: Q16787, EVALUE 1.00e-22
gtgctgaaccggataaggacctggcagaaaacccaccagggggagaacaatgggcttgctaacagtatccgggattctttaaatgaatacgaagccaaactcagtgaccttcgtgctcggctgcaggaggcagctgcccaagccaagcaggcaaatggcttgaaccaagaaaacgagagagctttgggagccattcag

SEQ ID NO: 21678 - DNA, 206 bp, Homo sapiens
  MAP TO CHR18.3; EXPRESSED IN FETAL LIVER, SIGNAL = 1.3; EXPRESSED IN BONE MARROW, SIGNAL = 1.5; EXPRESSED IN BRAIN, SIGNAL = 1.8; EXPRESSED IN ADULT LIVER, SIGNAL = 1.9; EXPRESSED IN PLACENTA, SIGNAL =   2; SWISSPROT HIT: P37127, EVALUE 2.50e+00; EST_HUMAN HIT: BG475630.1, EVALUE 4.20e+00
catgtggaggagaagtatgtgcagaggagaagcagagaaatcagagaagccagcaagcagatgccttaattgtcaagtccatcctatctgtcaccaagatatgtactattttggcagcccaggaaatgatatttccaggagaagcaggagctgctgctaaagccagcagatacattttttttggtggtagcctcatgggccagtaa

SEQ ID NO: 21679 - DNA, 373 bp, Homo sapiens
  MAP TO CHR19.3; EXPRESSED IN ADULT LIVER, SIGNAL = 1.1; EXPRESSED IN HELA, SIGNAL = 1.4; EXPRESSED IN LUNG, SIGNAL = 1.3; SWISSPROT HIT: P13709, EVALUE 1.30e-02; EST_HUMAN HIT: AI200818.1, EVALUE 5.10e-01
tcacagcggccccctggtccctccagaatctctgtcatcagtcacccccatacacagagcatcgtccatcgtgggtgggggccccgccacagatgccactccccagacccagaagatgaccgcaagctgctgcaacgcggggcaggggttcaggatgtccgtaatctcccgcctcgccctgtctgagtccccttttctgtcgcctggaaaaaccacagcagccgccctcgcagaagtagggaagttcgcccgtgctacagcggcgtccgcaatcccagggggccccacgggacgaggcttaagaggcgaggcgcgctgcatgccgggaggagctcgatgggcggggctttgagcgactgtgcagcctccgttt

SEQ ID NO: 21680 - DNA, 290 bp, Homo sapiens
  MAP TO CHR16.3; EXPRESSED IN ADULT LIVER, SIGNAL = 2.4; EXPRESSED IN HELA, SIGNAL = 2.1; EXPRESSED IN PLACENTA, SIGNAL = 6.1; EXPRESSED IN HEART, SIGNAL = 4.9; EXPRESSED IN LUNG, SIGNAL = 2.9; EXPRESSED IN BONE MARROW, SIGNAL =   3; NT HIT: gi14589894, EVALUE 0.00e+00; SWISSPROT HIT: P33151, EVALUE 2.00e-50; EST_HUMAN HIT: AU138341.1, EVALUE 0.00e+00
gatcaagtcaagcgtgagtcgcaagaatgccaagtacctgctcaaaggagaatatgtgggcaaggtcttccgggtcgatgcagagacaggagacgtgttcgccattgagaggctggaccgggagaatatctcagagtaccacctcactgctgtcattgtggacaaggacactggtgaaaacctggagactccttccagcttcaccatcaaagttcatgacgtgaacgacaactggcctgtgttcacgcatcggttgttcaatgcgtccgtgcctgagtcgtcggctgtgg

SEQ ID NO: 21681 - DNA, 64 bp, Homo sapiens
  MAP TO CHR16.3; EXPRESSED IN HELA, SIGNAL = 1.4; EXPRESSED IN LUNG, SIGNAL = 1.6; EXPRESSED IN BONE MARROW, SIGNAL = 0.79; EXPRESSED IN ADULT LIVER, SIGNAL =   1; EST_HUMAN HIT: BI036761.1, EVALUE 1.10e+00
cccaccagtttcccatggatctgaagctccatgtcttcaagacagcggttcctgccttcgtcat

SEQ ID NO: 21682 - DNA, 256 bp, Homo sapiens
  MAP TO CHR16.3; EXPRESSED IN ADULT LIVER, SIGNAL = 1.6; EXPRESSED IN LUNG, SIGNAL = 2.7; NT HIT: gi14785920, EVALUE 2.30e-01; SWISSPROT HIT: P09042, EVALUE 2.00e-03; EST_HUMAN HIT: BI760121.1, EVALUE 0.00e+00
gactggagtgacagcctggcccagctggctcaagccagggcagccctctgtggaaccccaaccccgagcctggcgtccggcctgtggcgcaccctgcaagtgggctggaacatgcagctgctacccgcgggcttggtgtcctttgtcgaagtggtcagcctatggtttgcagaggggcagcggtacagccacgcggcaggagagtgtgctcgcaacgccacctgcacccactacacgcaggtgagtgtgctgcagg

SEQ ID NO: 21683 - DNA, 382 bp, Homo sapiens
  MAP TO CHR19.3; EXPRESSED IN LUNG, SIGNAL = 2.1; EXPRESSED IN FETAL LIVER, SIGNAL = 2.6; EXPRESSED IN ADULT LIVER, SIGNAL = 1.4; EXPRESSED IN HELA, SIGNAL = 1.9; EST_HUMAN HIT: BF970086.1, EVALUE 8.00e-31; NT HIT: AF311856.1, EVALUE 0.00e+00; SWISSPROT HIT: Q62261, EVALUE 3.00e-31
ggtgctgcaggagaaattctcagagtttgccagcgagacaggtatggcagggcgggaacggctggcagctgtgaaccagatggtggatgagctgatcgagtgtggccatacagcagcggccaccatggccgagtggaaggacggactgaacgaggcctgggctgagctgctggagctcatgggcacacgggcccagctgctggccgcctctcgggagcttcataagttcttcagtgacgcccgagagcttcagggacagattgaggagaagcggaggcggctgccccgcctgaccaccccgcctgagccgagacccagtgccagttccatgcagcggaccctgagagcctttgagcatgacctgcagctcctcgtgtcccag

SEQ ID NO: 21684 - DNA, 71 bp, Homo sapiens
  MAP TO CHR16.3; EXPRESSED IN LUNG, SIGNAL = 1.1; EXPRESSED IN BRAIN, SIGNAL = 1.2; EXPRESSED IN ADULT LIVER, SIGNAL = 1.1; EXPRESSED IN PLACENTA, SIGNAL = 1.5; EST_HUMAN HIT: AA496162.1, EVALUE 4.70e+00; NT HIT: AF127030.1, EVALUE 2.00e-04
atggaggggaggaagggagagggggagaaaggatgcaggcaggcaaacctcctctcaaataatattctcaa

SEQ ID NO: 21685 - DNA, 355 bp, Homo sapiens
  MAP TO CHR19.3; EXPRESSED IN LUNG, SIGNAL = 1.4; EXPRESSED IN BRAIN, SIGNAL = 1.9; EXPRESSED IN ADULT LIVER, SIGNAL = 1.3; EXPRESSED IN PLACENTA, SIGNAL = 1.6; EXPRESSED IN HEART, SIGNAL = 1.7; EST_HUMAN HIT: BI520890.1, EVALUE 1.00e-110; SWISSPROT HIT: P46598, EVALUE 9.30e-01; NT HIT: gi14767579, EVALUE 0.00e+00
ctagctctccaccatagatggaaaagtccttctccaagatgacccacttttcaatcctctgtgcattgttcatggcttcctggttcacagcattgatgccttgctggatggccttgtagaccagggggtcttgctgcttcacaatctcagtcacggtggatgcctggctgcccagaccccgacagaagttgatggcctcgaagttcagcttgtccagaggttctccgctcatctgattcatctcacactgcccccagacacctctgtcaccacccatgctccttgaccagcacccctccccaggcccacagaccaagaagtgggtcttgaacccacagatgcatcctcttgaccc

SEQ ID NO: 21686 - DNA, 112 bp, Homo sapiens
  MAP TO CHR14.3; EXPRESSED IN ADULT LIVER, SIGNAL =   1; EXPRESSED IN PLACENTA, SIGNAL = 0.93; EXPRESSED IN BONE MARROW, SIGNAL = 1.3; EST_HUMAN HIT: BG331230.1, EVALUE 2.00e-03; SWISSPROT HIT: O03548, EVALUE 2.70e+00; NT HIT: AY037274.1, EVALUE 2.30e-02
tttgccgtattgcatgtacatgaagccaaagagtgactgggaagaatcccagcagagcacgagagagcaacaaactataaaagaaaaaatgagaacggaaagaggggaaaag

SEQ ID NO: 21687 - DNA, 103 bp, Homo sapiens
  MAP TO CHR19.3; EXPRESSED IN ADULT LIVER, SIGNAL =  10; EXPRESSED IN HEART, SIGNAL = 7.6; EXPRESSED IN HELA, SIGNAL = 9.1; EXPRESSED IN BONE MARROW, SIGNAL = 9.2; EXPRESSED IN FETAL LIVER, SIGNAL = 3.4; SWISSPROT HIT: O05543, EVALUE 2.10e+00; NT HIT: AF112202.1, EVALUE 2.00e-51; EST_HUMAN HIT: BG775446.1, EVALUE 4.00e-51
cccagcacccagaagacggccgagcccgcaccagccagccagaagaaggggaaggagatgcctccagccagagcatactgatgcgctgggctcacctctcggc

SEQ ID NO: 21688 - DNA, 225 bp, Homo sapiens
  MAP TO CHR19.3; EXPRESSED IN BONE MARROW, SIGNAL = 4.1; EXPRESSED IN ADULT LIVER, SIGNAL = 2.9; EXPRESSED IN HELA, SIGNAL =   3; SWISSPROT HIT: Q9UF02, EVALUE 1.00e-24; NT HIT: gi14769417, EVALUE 1.00e-116; EST_HUMAN HIT: BF364668.1, EVALUE 1.00e-113
ccccgcagggcgccccctgcctctgaggatgagtcactgcagcagccgcgccctgaccctgctgagcagcgtgtttggtgcgtgtggcctgctcctggtaggcatcgcggtcagcactgactactggctgtacatggaagaaggcacagtgctaccgcagaaccagaccaccgaggtcaagatggccctgcacgccggcctctggcgagtctgcttctttgcagg

SEQ ID NO: 21689 - DNA, 130 bp, Homo sapiens
  MAP TO CHR19.3; EXPRESSED IN HELA, SIGNAL = 3.8; EXPRESSED IN HEART, SIGNAL = 1.7; EXPRESSED IN LUNG, SIGNAL = 2.4; EXPRESSED IN ADULT LIVER, SIGNAL = 2.2; EST_HUMAN HIT: BE892972.1, EVALUE 1.00e-66; SWISSPROT HIT: Q9ULX6, EVALUE 5.20e-01; NT HIT: gi13375951, EVALUE 1.00e-66
ccccgagaagatccggttcttcagctcagggacctgctgcaggcgaccttcagggcccacgtggcgtgcccactcctcctctgtaactggagggccccgctccacggttggccgaggccccagctccacc

SEQ ID NO: 21690 - DNA, 133 bp, Homo sapiens
  MAP TO CHR16.3; EXPRESSED IN HELA, SIGNAL = 3.1; EXPRESSED IN PLACENTA, SIGNAL = 3.7; EXPRESSED IN LUNG, SIGNAL =   4; EXPRESSED IN BONE MARROW, SIGNAL =   5; EXPRESSED IN FETAL LIVER, SIGNAL =   3; EXPRESSED IN ADULT LIVER, SIGNAL = 2.6; EXPRESSED IN BRAIN, SIGNAL = 2.8; EST_HUMAN HIT: BF920913.1, EVALUE 4.00e-67; SWISSPROT HIT: P50570, EVALUE 2.60e+00; NT HIT: gi14916432, EVALUE 4.00e-69
tgacagcttcgccgtgagcgctgcctgggctcggaagggcatcgaggagtggatcgggagacagcgctgcccgggcggtgtctcgggaccccgacagctgcggttggcgggcaccataggccgaagcacccgg

SEQ ID NO: 21691 - DNA, 81 bp, Homo sapiens
  MAP TO CHR14.3; EXPRESSED IN ADULT LIVER, SIGNAL = 1.1; EXPRESSED IN PLACENTA, SIGNAL = 1.3; EXPRESSED IN HELA, SIGNAL = 1.8; EXPRESSED IN LUNG, SIGNAL = 1.3; EXPRESSED IN FETAL LIVER, SIGNAL =   1; EST_HUMAN HIT: BE895124.1, EVALUE 1.00e-37; SWISSPROT HIT: Q92524, EVALUE 5.00e-08; NT HIT: AF006305.1, EVALUE 1.00e-37
taagggaacaattaaaagaacttaccaagcagtatgaaaagtctgaaaatgatctgaaggccctacagagtgttgggcagg

SEQ ID NO: 21692 - DNA, 238 bp, Homo sapiens
  MAP TO CHR19.3; EXPRESSED IN ADULT LIVER, SIGNAL = 1.2; EXPRESSED IN HELA, SIGNAL = 1.8; EXPRESSED IN PLACENTA, SIGNAL = 1.6; EXPRESSED IN BONE MARROW, SIGNAL =  41; EST_HUMAN HIT: BG187105.1, EVALUE 0.00e+00; SWISSPROT HIT: P17588, EVALUE 1.90e-01; NT HIT: gi14761033, EVALUE 0.00e+00
gacagtggggtttttggccatgggaggggaggaatggggtgcggatcagcagggcctcagggggagcggtagtgtggccaattctggatgaggtggtagagctggttgcctggagagagtgtacgctgcacatcccggtgtcctttgagcacatagttggacctcagggctccctgagccacaccgcaggccagtagaccctgggctgcccggatggcctggggtgtgggcacccgat

SEQ ID NO: 21693 - DNA, 169 bp, Homo sapiens
  MAP TO CHR19.3; EXPRESSED IN BONE MARROW, SIGNAL = 4.1; EXPRESSED IN ADULT LIVER, SIGNAL = 3.2; EXPRESSED IN PLACENTA, SIGNAL = 3.8; EXPRESSED IN HELA, SIGNAL = 3.6; EXPRESSED IN LUNG, SIGNAL = 4.7; NT HIT: gi14760398, EVALUE 7.00e-90; EST_HUMAN HIT: BF852003.1, EVALUE 1.00e-05; SWISSPROT HIT: P51545, EVALUE 1.90e+00
cctccgtgttccaggggttcacccccagctgctgggccagttccaggaaggcaggcagctgctggcggtccaggagcaggtagacaggtacccagcggcgcgtggcagcatccaccaagtccaaaagcaggtctgggtcagtgaagacgtccatgaccacggccaccag

SEQ ID NO: 21694 - DNA, 130 bp, Homo sapiens
  MAP TO CHR18.3; EXPRESSED IN BRAIN, SIGNAL = 1.5; EXPRESSED IN ADULT LIVER, SIGNAL = 1.2; EXPRESSED IN PLACENTA, SIGNAL = 1.7; EXPRESSED IN LUNG, SIGNAL = 1.4; EXPRESSED IN FETAL LIVER, SIGNAL = 1.8; SWISSPROT HIT: P12488, EVALUE 7.80e+00; NT HIT: gi14768131, EVALUE 6.80e+00
caggctgctgcacaggatctagcttctcccacctaagatgggcacattgaaagccttgttgcagcagcacccccatctgtggaagcacaggctgcctgcacttctccagctgctctagcacctgacttcc

SEQ ID NO: 21695 - DNA, 183 bp, Homo sapiens
  MAP TO CHR16.3; EXPRESSED IN ADULT LIVER, SIGNAL = 1.4; EXPRESSED IN PLACENTA, SIGNAL = 1.2; EXPRESSED IN LUNG, SIGNAL = 1.8; SWISSPROT HIT: P32190, EVALUE 1.10e+00; NT HIT: AF151058.1, EVALUE 3.00e-80; EST_HUMAN HIT: BG249994.1, EVALUE 3.00e-84
ggtgtttgcacttgtgacagcagtatgctgtcttgccgacggggcccttatttaccggaagcttctgttcaatcccagcggtccttaccagaaaaagcctgtgcatgaaaaaaaagaagtttgtaattttatattactttttagtttgatactaagtattaaacatatttctgtattcttcca

SEQ ID NO: 21696 - DNA, 136 bp, Homo sapiens
  MAP TO CHR14.3; EXPRESSED IN LUNG, SIGNAL = 2.9; EXPRESSED IN BONE MARROW, SIGNAL =   4; EXPRESSED IN ADULT LIVER, SIGNAL = 3.3; EXPRESSED IN PLACENTA, SIGNAL = 2.4; EXPRESSED IN HELA, SIGNAL = 1.7; SWISSPROT HIT: P51617, EVALUE 5.20e-01; NT HIT: gi15920163, EVALUE 1.20e-01; EST_HUMAN HIT: BG655877.1, EVALUE 1.00e-70
aggccttgtagagaaaaaagaaatggaattggttttaagtgaattagaagcagcacagaggtacttggcgcagaagtactgtatccttgtgctgggcttggccgtgccggataagcatcacatgtgctgtggaaag

SEQ ID NO: 21697 - DNA, 104 bp, Homo sapiens
  MAP TO CHR19.3; EXPRESSED IN ADULT LIVER, SIGNAL =  17; EXPRESSED IN PLACENTA, SIGNAL =  13; EXPRESSED IN HEART, SIGNAL =  17; EXPRESSED IN LUNG, SIGNAL =  12; EXPRESSED IN FETAL LIVER, SIGNAL =  17; EST_HUMAN HIT: BI050395.1, EVALUE 1.20e-01; SWISSPROT HIT: Q9ZCC3, EVALUE 8.00e+00; NT HIT: Z21780.1, EVALUE 2.10e-02
ctctctacttcctcaaaggagaaataaaatcagggtcttggaatccatttctattcaggaaaccggaaatagtttcaaaatgcgcttcagatgcacctgtgctt

SEQ ID NO: 21698 - DNA, 110 bp, Homo sapiens
  MAP TO CHR14.3; EXPRESSED IN HELA, SIGNAL =   2; EXPRESSED IN PLACENTA, SIGNAL = 1.6; EXPRESSED IN LUNG, SIGNAL = 2.3; EXPRESSED IN FETAL LIVER, SIGNAL = 1.4; EXPRESSED IN ADULT LIVER, SIGNAL = 1.7; EST_HUMAN HIT: BE348980.1, EVALUE 6.00e-53; SWISSPROT HIT: Q03727, EVALUE 6.10e+00; NT HIT: AF372930.1, EVALUE 1.40e+00
tgtgggtcaccctggctatatccacatacggcctatttattctaccaagctcatctatctcatgaatcctctcaaccatctcatgaattctctttccttgattcaaaccc

SEQ ID NO: 21699 - DNA, 242 bp, Homo sapiens
  MAP TO CHR16.3; EXPRESSED IN HEART, SIGNAL = 1.8; EXPRESSED IN PLACENTA, SIGNAL = 1.5; EXPRESSED IN LUNG, SIGNAL = 2.2; EXPRESSED IN FETAL LIVER, SIGNAL = 1.1; EXPRESSED IN ADULT LIVER, SIGNAL = 1.9; EST_HUMAN HIT: AW150634.1, EVALUE 0.00e+00; NT HIT: gi4502168, EVALUE 0.00e+00; SWISSPROT HIT: P42744, EVALUE 6.00e-03
attacaaatgagaaaaatgtttattaagaaaacaatttagcagctctcctttagaattttacagactaaagcacaacccgaaggcaattacagtttcaatcattaacacactacttaaggtgcttgcttactctacaactggaaagttgctgaagtttgtgacatgccactgtaaatgtaagtattattaaaaattacaaattgtttggtgattattttgatgacctcttgagcagcagctc

SEQ ID NO: 21700 - DNA, 270 bp, Homo sapiens
  MAP TO CHR16.3; EXPRESSED IN ADULT LIVER, SIGNAL =   4; EXPRESSED IN PLACENTA, SIGNAL = 3.5; EXPRESSED IN HELA, SIGNAL = 3.4; EXPRESSED IN FETAL LIVER, SIGNAL = 2.7; EXPRESSED IN LUNG, SIGNAL =   3; EXPRESSED IN BRAIN, SIGNAL = 3.1; EST_HUMAN HIT: BG910262.1, EVALUE 5.70e+00; NT HIT: gi6678913, EVALUE 9.80e-01; SWISSPROT HIT: P16157, EVALUE 1.00e-02
tcaccgctggccactggccccagccgcgtgaggcagtgtccacgctcagccagtgatgggtgctttccgacttgctccgcagccatgtggactggggtcacattaggtctagcagccatgtggactggggtctcctcaggtctcacagccatgtggattggggtctccttaggtctctcagccatgtggactggggtctccttaggtctcacagccatgtggactggggtctccttaggtctctcagccatgtggattggggtctcctta

SEQ ID NO: 21701 - DNA, 205 bp, Homo sapiens
  MAP TO CHR16.3; EXPRESSED IN FETAL LIVER, SIGNAL = 6.3; EXPRESSED IN BRAIN, SIGNAL = 1.9; EXPRESSED IN ADULT LIVER, SIGNAL = 1.4; EXPRESSED IN HELA, SIGNAL =  18; EXPRESSED IN LUNG, SIGNAL =  14; EST_HUMAN HIT: AL526468.1, EVALUE 1.00e-111; NT HIT: X73458.1, EVALUE 1.00e-112; SWISSPROT HIT: P53350, EVALUE 6.00e-33
ttaggaggccttgagacggttgctggccgagcgtgagctcagcagcttgtccaccatagtgcgggcgtagcggagccggctggccagctccttgcagcagccgtactcctccaggagactcaggcggtatgtgcggaagtcccgcttctcgtcgatgtaggtcacggctgccatcagtgggcacaagatgagcttggtgtgatcc

SEQ ID NO: 21702 - DNA, 150 bp, Homo sapiens
  MAP TO CHR14.3; EXPRESSED IN FETAL LIVER, SIGNAL = 0.86; EXPRESSED IN BONE MARROW, SIGNAL = 1.1; EXPRESSED IN BRAIN, SIGNAL =   1; EXPRESSED IN ADULT LIVER, SIGNAL = 1.1; EXPRESSED IN PLACENTA, SIGNAL = 0.88; EST_HUMAN HIT: AA083045.1, EVALUE 3.00e+00; NT HIT: AJ010604.1, EVALUE 5.10e-01
tggagatggaaggtcattaacagggcacttgagcagataggaattacagtcaattgagacgttgaaacatcctaaatggcctaatgcaccaactaagtgcttcttaaattccaaaacttttacttgagcacagcaatcatgattttccat

SEQ ID NO: 21703 - DNA, 164 bp, Homo sapiens
  MAP TO CHR14.3; EXPRESSED IN FETAL LIVER, SIGNAL = 0.86; EXPRESSED IN LUNG, SIGNAL = 1.3; EXPRESSED IN ADULT LIVER, SIGNAL = 1.1; EXPRESSED IN PLACENTA, SIGNAL = 1.1; NT HIT: AL161512.2, EVALUE 1.40e-01; SWISSPROT HIT: P24939, EVALUE 5.10e-01; EST_HUMAN HIT: BF331727.1, EVALUE 2.00e-87
ttaatgcatggaaaataaagctaaattatgccttgcccccacccctccatcaaactgaagcttggctccaggaggtagaagagcttatggatgaagatttgtcagcctcccaggatcactctcaagccgtgactctgatacaagagaaaatgactttattcaag

SEQ ID NO: 21704 - DNA, 188 bp, Homo sapiens
  MAP TO CHR14.3; EXPRESSED IN ADULT LIVER, SIGNAL = 1.7; EXPRESSED IN LUNG, SIGNAL = 1.5; EXPRESSED IN BRAIN, SIGNAL = 1.2; NT HIT: L01418.1, EVALUE 4.20e-02; SWISSPROT HIT: P08113, EVALUE 7.40e+00
ctgcagacacgggccttgatgctcatctccctctgtgaactgccctcttctcctctgtcttgctccagtggttcctctggccactctaccttggtgtgccacacaccatgatcccaatctagactttctcctaagtgcaatcttcagccctactctctctatattttggtactgttgcaaggccttcg

SEQ ID NO: 21705 - DNA, 163 bp, Homo sapiens
  MAP TO CHR18.3; EXPRESSED IN BRAIN, SIGNAL = 1.3; EXPRESSED IN ADULT LIVER, SIGNAL = 0.94; SWISSPROT HIT: P15752, EVALUE 4.40e+00; NT HIT: AF336043.1, EVALUE 1.40e-01; EST_HUMAN HIT: BF918023.1, EVALUE 8.30e-01
acaccatctgacgggacactgtcgggattaaacgtagtaaacctagagaagagttcagtgcagtgcttggcacttgaggcttcagagatggaacctgttgtttctaagctcttaaagctggtccctcctgtctgtgccccagaagcctgtgtggactctttcc

SEQ ID NO: 21706 - DNA, 101 bp, Homo sapiens
  MAP TO CHR19.3; EXPRESSED IN BONE MARROW, SIGNAL = 0.9; EXPRESSED IN ADULT LIVER, SIGNAL = 1.4; EXPRESSED IN PLACENTA, SIGNAL = 1.2; EST_HUMAN HIT: H25607.1, EVALUE 6.00e-50; SWISSPROT HIT: P04706, EVALUE 4.70e+00; NT HIT: gi14757770, EVALUE 4.00e-50
cgagacgtgggcctcttcaccccgaggttattgtgggcctcgttggccacagtggacagtgacagggtggactgggaatagattttgctcagccgagagcc

SEQ ID NO: 21707 - DNA, 86 bp, Homo sapiens
  MAP TO CHR19.3; EXPRESSED IN LUNG, SIGNAL = 2.3; EXPRESSED IN FETAL LIVER, SIGNAL = 0.89; EXPRESSED IN BONE MARROW, SIGNAL = 1.6; EXPRESSED IN ADULT LIVER, SIGNAL = 1.1; EXPRESSED IN PLACENTA, SIGNAL = 1.3; EXPRESSED IN HELA, SIGNAL = 2.2; EST_HUMAN HIT: BF365806.1, EVALUE 9.00e-33; SWISSPROT HIT: P38675, EVALUE 4.70e+00; NT HIT: AF006508.1, EVALUE 4.10e+00
caaactcatcagcggagaagtgtcgtgtccagaaggacttgccattggtgaggaccatctcatactccagctgcaatccatcaccc

SEQ ID NO: 21708 - DNA, 163 bp, Homo sapiens
  MAP TO CHR16.3; EXPRESSED IN PLACENTA, SIGNAL = 2.4; EXPRESSED IN HELA, SIGNAL = 2.1; EXPRESSED IN LUNG, SIGNAL = 2.8; EXPRESSED IN BONE MARROW, SIGNAL = 2.2; EXPRESSED IN BRAIN, SIGNAL = 1.9; EXPRESSED IN ADULT LIVER, SIGNAL = 2.3; EST_HUMAN HIT: H60718.1, EVALUE 5.30e-02; SWISSPROT HIT: P35177, EVALUE 1.00e-01
taacacagcctccactcagctaaccaatcccaaacaaggccttctaagcatggctttcccttctgactttcataacgataaacactcatgtcgaggggcaaaggcttttgaaaaatctgataaagatatagacctggatgaagacactgtatccatcaaatgg

SEQ ID NO: 21709 - DNA, 93 bp, Homo sapiens
  MAP TO CHR18.3; EXPRESSED IN ADULT LIVER, SIGNAL =   1; EXPRESSED IN FETAL LIVER, SIGNAL = 1.1; EST_HUMAN HIT: BF082266.1, EVALUE 6.70e+00; NT HIT: AJ310932.1, EVALUE 1.10e+00
ttacagtaaaatgaacacactcattgtatcatctgtactacaacagatagcctttctctggttaagtgatcctcctacccatatcaaaatagt

SEQ ID NO: 21710 - DNA, 180 bp, Homo sapiens
  MAP TO CHR16.3; EXPRESSED IN FETAL LIVER, SIGNAL = 1.4; EXPRESSED IN BRAIN, SIGNAL = 1.3; EXPRESSED IN ADULT LIVER, SIGNAL = 1.8; EXPRESSED IN PLACENTA, SIGNAL = 1.6; SWISSPROT HIT: Q46919, EVALUE 2.50e+00; NT HIT: AF335470.1, EVALUE 2.50e+00
tgtttgatccactcaataggaggcacctgactaagaacaagtggctgagtctcctccctgagaactttgtagacttgagagtcagagaatatgccagactgtctcatgacacaagctctcaggagcaaagctcaagagtcatgggtggtcatgtttgctactttgtggaaatgatggagg

SEQ ID NO: 21711 - DNA, 224 bp, Homo sapiens
  MAP TO CHR14.3; EXPRESSED IN ADULT LIVER, SIGNAL = 1.4; EXPRESSED IN PLACENTA, SIGNAL = 1.3; EXPRESSED IN HEART, SIGNAL = 2.2; EXPRESSED IN LUNG, SIGNAL = 1.1; EXPRESSED IN BONE MARROW, SIGNAL = 1.5; NT HIT: AL163281.2, EVALUE 2.00e-29; EST_HUMAN HIT: BF824914.1, EVALUE 3.00e-41; SWISSPROT HIT: Q58597, EVALUE 1.90e+00
tgctgccatgtaagacgtgcctttcgccttctgctgtgattgtgaggcttccccagccatatggaactgtgagtccattaaacccccttttctttataatttccccagtctcaggtatgtctttatcaccagtgtgaaaacagactaacacacctgttaccatacatacattgttaccaccatggctgattccccaaacagtacccactctctccatcctcatg

SEQ ID NO: 21712 - DNA, 180 bp, Homo sapiens
  MAP TO CHR19.3; EXPRESSED IN PLACENTA, SIGNAL = 3.5; EXPRESSED IN LUNG, SIGNAL = 2.4; EXPRESSED IN BONE MARROW, SIGNAL = 1.9; EXPRESSED IN ADULT LIVER, SIGNAL = 1.7; SWISSPROT HIT: Q16478, EVALUE 3.00e-26; NT HIT: gi14756303, EVALUE 5.00e-97; EST_HUMAN HIT: BF305115.1, EVALUE 5.00e-18
gcctgctgcgattggaggaactggtgcgtggcttcctcatctccaaggagacgctgtcagtgaggatgttggacgacagccgggaccccacaccactgctcaaggagatccgtgatgacaaggtgtccaccatcatcatcgacgccaacgcctccatctcccacctcatcctccgtaagg

SEQ ID NO: 21713 - DNA, 301 bp, Homo sapiens
  MAP TO CHR19.3; EXPRESSED IN BRAIN, SIGNAL = 1.1; EXPRESSED IN ADULT LIVER, SIGNAL = 1.2; SWISSPROT HIT: P43626, EVALUE 1.00e-53; NT HIT: AF135554.1, EVALUE 0.00e+00; EST_HUMAN HIT: BI909654.1, EVALUE 1.00e-130
gagtccacagaaaaccttccctcctggcccacccaggtcgcctggtgaaatcagaagagacagtcatcctgcagtgttggtcagatgtcatgtttgaacacttccttctgcacagagaggggatgtttaacgacactttgcgcctcattggagaacaccatgatggggtctccaaggccaacttctccatcagtcgcatgacgcaagacctggcagggacctacagatgctacggttctgttactcactccccctatcaggtgtcagctcccagtgaccctctggacatcgtgatcatagg

SEQ ID NO: 21714 - DNA, 161 bp, Homo sapiens
  MAP TO CHR16.3; EXPRESSED IN BONE MARROW, SIGNAL = 1.5; EXPRESSED IN FETAL LIVER, SIGNAL = 1.1; EXPRESSED IN BRAIN, SIGNAL = 0.99; EXPRESSED IN ADULT LIVER, SIGNAL = 0.93; EST_HUMAN HIT: T75239.1, EVALUE 5.00e-76; SWISSPROT HIT: P49379, EVALUE 5.10e-01; NT HIT: gi14776305, EVALUE 1.00e-85
cttctggttccaagtcctctgttatttctgtttcatcttcagaagatgccaagctttgttctgcaagctgaccttcagatagtaaagacacatcatcttttccttgctgcattttctcagtattctcttttacctcatctacactgccttcttgtgaaacc

SEQ ID NO: 21715 - DNA, 88 bp, Homo sapiens
  MAP TO CHR14.3; EXPRESSED IN HELA, SIGNAL = 3.3; EXPRESSED IN HEART, SIGNAL = 4.2; EXPRESSED IN LUNG, SIGNAL = 1.5; EXPRESSED IN ADULT LIVER, SIGNAL = 1.3; EST_HUMAN HIT: BE791131.1, EVALUE 1.00e-41; NT HIT: AF100755.1, EVALUE 7.00e-42
ctgaaaaatacaaggatttagtacctgataattcaaaaactgctgacaatgcaactaaaaatgcagaaccattgatcaatttggatgg

SEQ ID NO: 21716 - DNA, 382 bp, Homo sapiens
  MAP TO CHR19.3; EXPRESSED IN ADULT LIVER, SIGNAL =   2; EXPRESSED IN HELA, SIGNAL = 2.3; EXPRESSED IN LUNG, SIGNAL = 2.7; EXPRESSED IN FETAL LIVER, SIGNAL = 0.97; NT HIT: gi14741769, EVALUE 0.00e+00; EST_HUMAN HIT: BI911521.1, EVALUE 0.00e+00; SWISSPROT HIT: P20138, EVALUE 4.00e-72
cctgtcacatgcacagagagctggggagatttgtaactgtatttggtacttcctctctccatccgaaagaagtatgaaccattatccctcctcctggcgtctacgatgctcagggagcagttgttcctactgggatccccaaggaggcggaatctgccctgagtctcctcctgtacttcttgatctagcttgtttgtggccactggagagtccccggatataatggctccttcccggaaccagtaaccatgaactggggagttcttgtcgtagtagggtatgggatggaagaaagtgcagggcacgaggacgcacaaaccctcctgtaccgtcactgactcctgcacttgcagccagaaatttggatccatagccagggccc

SEQ ID NO: 21717 - DNA, 125 bp, Homo sapiens
  MAP TO CHR18.3; EXPRESSED IN ADULT LIVER, SIGNAL = 1.1; EXPRESSED IN PLACENTA, SIGNAL =   1; EXPRESSED IN FETAL LIVER, SIGNAL = 0.93; EXPRESSED IN BRAIN, SIGNAL = 1.2; NT HIT: X95311.1, EVALUE 7.00e-03; EST_HUMAN HIT: BG819025.1, EVALUE 3.90e-02
tgttctcttccccttcctcttccctctccctgtgatttctctccctgattctaagctctggggtatagagagtgccattatgttggagaagaggtgacatcttgatcttccctgtctggaacttg

SEQ ID NO: 21718 - DNA, 169 bp, Homo sapiens
  MAP TO CHR14.3; EXPRESSED IN LUNG, SIGNAL = 2.9; EXPRESSED IN ADULT LIVER, SIGNAL = 3.8; EXPRESSED IN HELA, SIGNAL = 3.5; EXPRESSED IN FETAL LIVER, SIGNAL = 2.2; SWISSPROT HIT: P32069, EVALUE 6.60e-01; EST_HUMAN HIT: BG956901.1, EVALUE 2.20e-01
ttccaagggcttcatcgagtgcttctctgtaggcagctggaatttcagctgccttcttcagtttaggccaaaacaaataggtctttctctttcccggagggatgcgctggaccagaagacctgagttagctttttcaccctttggggctgcctctgtggtgtgtggtcc

SEQ ID NO: 21719 - DNA, 175 bp, Homo sapiens
  MAP TO CHR14.3; EXPRESSED IN PLACENTA, SIGNAL =   2; EXPRESSED IN FETAL LIVER, SIGNAL = 1.9; EXPRESSED IN ADULT LIVER, SIGNAL = 1.4; EXPRESSED IN BRAIN, SIGNAL = 2.2; SWISSPROT HIT: P50876, EVALUE 2.20e-01; EST_HUMAN HIT: BF854275.1, EVALUE 7.00e-94; NT HIT: gi14750893, EVALUE 5.00e-94
gatgcaggccctgacttcctgtgagtgcaccatctgtcctgactgcttccgccagcacttcaccatcgccttgaaggagaagcacatcacagacatggtgtgccctgcctgtggccgccccgacctcaccgatgacacacagttgctcagctacttctctacccttgacatccag

SEQ ID NO: 21720 - DNA, 192 bp, Homo sapiens
  MAP TO CHR14.3; EXPRESSED IN PLACENTA, SIGNAL = 1.1; EXPRESSED IN ADULT LIVER, SIGNAL = 0.95; SWISSPROT HIT: P75800, EVALUE 7.30e+00
ccacacattacctcagattccaggagcagctgctgcagcagacccagctagcccagcctgcagattgtcaccatgaagacagagatgatccttcctccagtgaagagcaaaacttctttgtggcctatatgactgcttggtgctgggcaagcttcctgaagagtcatcagcagctggagaccatggctgagt

SEQ ID NO: 21721 - DNA, 220 bp, Homo sapiens
  MAP TO CHR14.3; EXPRESSED IN ADULT LIVER, SIGNAL =   1; EXPRESSED IN PLACENTA, SIGNAL = 1.1; NT HIT: AF056527.1, EVALUE 5.00e-02; EST_HUMAN HIT: BE256214.1, EVALUE 7.40e-02
tgttctacataaatgatcttttcaaatgtattacagaaaatattaaccttcattattttaataatttttacagattacttgggaaaagagaaagagtgaaaggaaatttcagacatgaagcacatgcttgcaaaagacttaaaagtgggaataagatgaacacaaaagagaacttcaaactcgctgctcctggaatagtcagatcagccagcagcgtggg

SEQ ID NO: 21722 - DNA, 150 bp, Homo sapiens
  MAP TO CHR14.3; EXPRESSED IN BONE MARROW, SIGNAL = 0.71; EXPRESSED IN ADULT LIVER, SIGNAL = 1.1; EXPRESSED IN BRAIN, SIGNAL = 1.5; NT HIT: gi14149937, EVALUE 3.00e-79; EST_HUMAN HIT: H11159.1, EVALUE 5.00e-79; SWISSPROT HIT: P47872, EVALUE 5.80e+00
cttgatatctcttgttgctctcaaaccaaagccctcttctttgaagttaaccatttcaaaaccctcgacagaagccccattttcagaggcccatttcattagatcaggaaagtaatcttctctttttccatcaaaagtaacggacagacc

SEQ ID NO: 21723 - DNA, 138 bp, Homo sapiens
  MAP TO CHR18.3; EXPRESSED IN HEART, SIGNAL = 2.1; EXPRESSED IN ADULT LIVER, SIGNAL = 0.97; NT HIT: X97161.1, EVALUE 7.30e+00; EST_HUMAN HIT: BE408420.1, EVALUE 6.90e-01; SWISSPROT HIT: P77365, EVALUE 7.70e+00
taagcctttggctggaaaggggaggagaggttctccttggcagcctccatttccataagatgcgagatcgtcttcttttggtcatctacagagtccaagtggttgcagcagtgacatccctttggagcttcttcctcc

SEQ ID NO: 21724 - DNA, 95 bp, Homo sapiens
  MAP TO CHR16.3; EXPRESSED IN FETAL LIVER, SIGNAL = 1.1; EXPRESSED IN ADULT LIVER, SIGNAL = 1.5; EXPRESSED IN PLACENTA, SIGNAL = 1.9; NT HIT: AE005198.1, EVALUE 1.20e+00; EST_HUMAN HIT: AW444666.1, EVALUE 4.40e-01
tgcacagtctcttgctttgaaatgtctgtgcagaagccaggtcataaacacgcagtttcttggcgagctcggggttagacagcaggagctgcatg

SEQ ID NO: 21725 - DNA, 137 bp, Homo sapiens
  MAP TO CHR19.3; EXPRESSED IN PLACENTA, SIGNAL = 1.6; EXPRESSED IN HELA, SIGNAL = 2.3; EXPRESSED IN BONE MARROW, SIGNAL = 1.7; EXPRESSED IN BRAIN, SIGNAL = 2.1; EXPRESSED IN ADULT LIVER, SIGNAL = 1.5; NT HIT: gi14768236, EVALUE 2.00e-71; SWISSPROT HIT: P98158, EVALUE 3.40e+00; EST_HUMAN HIT: BF204181.1, EVALUE 3.00e-71
ccacgtccacccaggattccacctgtctccaggactcagaatttcctgtttcttcaaaagaccattcctgtccccagaatttggacctgttcgtgtgcagtggtctggagcctcacacacccagtgttggttcccag

SEQ ID NO: 21726 - DNA, 192 bp, Homo sapiens
  MAP TO CHR18.3; EXPRESSED IN PLACENTA, SIGNAL =   3; EXPRESSED IN HEART, SIGNAL =  18; EXPRESSED IN BRAIN, SIGNAL = 5.3; EXPRESSED IN ADULT LIVER, SIGNAL =   2; NT HIT: M31520.1, EVALUE 2.00e-59; SWISSPROT HIT: P02377, EVALUE 1.00e-22; EST_HUMAN HIT: BI198068.1, EVALUE 3.00e-59
tgacctaccaactacttcagaggaaacaaatgggcatcagtgtccttcaccctgggaaggcaacagtacctaagacagaaatttgggggaaactagccaaaatgtacaataccacactggatgtcatctttgaatttggattcagaacctattttagtggtggcaagacaactggctttggcatgattttat

SEQ ID NO: 21727 - DNA, 199 bp, Homo sapiens
  MAP TO CHR18.3; EXPRESSED IN BONE MARROW, SIGNAL = 7.2; EXPRESSED IN BRAIN, SIGNAL = 8.1; EXPRESSED IN ADULT LIVER, SIGNAL = 6.6; EXPRESSED IN PLACENTA, SIGNAL = 5.5; EXPRESSED IN HEART, SIGNAL = 3.4; EXPRESSED IN HELA, SIGNAL = 5.6; EXPRESSED IN LUNG, SIGNAL = 4.4; SWISSPROT HIT: P08489, EVALUE 9.70e-02; EST_HUMAN HIT: AW956767.1, EVALUE 1.70e-02
tctgcacatctctgtctccttccttggttccatccaggaactgagtcagctccctccctccccaaggggctgccatggcctcccctgtcctctgcgcttctcccacccaggctgactggcctggagcatcaggctccctgtgccttgctgccccaatgcaggctcttgcaaggggctgattggcaaacacagtagcatc

SEQ ID NO: 21728 - DNA, 265 bp, Homo sapiens
  MAP TO CHR19.3; EXPRESSED IN BRAIN, SIGNAL = 1.2; EXPRESSED IN ADULT LIVER, SIGNAL = 1.4; EXPRESSED IN HELA, SIGNAL = 1.3; EST_HUMAN HIT: BI912561.1, EVALUE 1.00e-116; SWISSPROT HIT: P43626, EVALUE 2.00e-42; NT HIT: AF204919.1, EVALUE 0.00e+00
gtcccctggtgaaatcagaagagacagtcatcctgcaatgttggtcagatgtcatgtttgagcacttccttctgcacagagaggggaagtttaatgacactttgcgcctcactggagagctccatgatggggtctccaaggccaacttctccatcggtcgcatgacgcaagaccttgcagggacctacagatgctacggttctgttcctcattccccctatcagttgtcagctcccagtgaccctctggacatcgtgattacagg

SEQ ID NO: 21729 - DNA, 246 bp, Homo sapiens
  MAP TO CHR14.3; EXPRESSED IN FETAL LIVER, SIGNAL = 2.9; EXPRESSED IN BONE MARROW, SIGNAL = 4.6; EXPRESSED IN ADULT LIVER, SIGNAL = 3.9; EXPRESSED IN PLACENTA, SIGNAL = 2.9; EXPRESSED IN HEART, SIGNAL = 3.5; EXPRESSED IN HELA, SIGNAL = 2.6; EXPRESSED IN LUNG, SIGNAL =   3; SWISSPROT HIT: P08582, EVALUE 1.80e+00; EST_HUMAN HIT: BG541691.1, EVALUE 5.10e+00; NT HIT: X97738.1, EVALUE 3.50e+00
tgaccggtagaaatggcagagctaagggacaaaagtctgaggctggtggagacttaatcaccttaatcagtgattacgacggtggggaatgcaactcacttccagacattctagaatctttggaatccacagtgctctgcaggaggaagcaggagcctcttgaaaaacttaccaccaaacttcatggaatcaccctggccttcttcaacaaaaacctctttaacagcactaaaacacagctaaaag

SEQ ID NO: 21730 - DNA, 155 bp, Homo sapiens
  MAP TO CHR16.3; EXPRESSED IN HELA, SIGNAL = 1.6; EXPRESSED IN LUNG, SIGNAL = 1.6; EXPRESSED IN FETAL LIVER, SIGNAL = 1.3; EXPRESSED IN BONE MARROW, SIGNAL = 1.6; EXPRESSED IN ADULT LIVER, SIGNAL = 1.5; EXPRESSED IN PLACENTA, SIGNAL = 1.7; NT HIT: Y18930.1, EVALUE 8.30e+00; SWISSPROT HIT: P44137, EVALUE 1.10e+00
caggcacccacggcatctcagtaattgtgttatttaaacttggccatctcttttcttcatttatcttggcaaatcctccaaaatttatccactcttcctcaaatccctctataatgaacttccagctcacatccttctcaaggaatggccttgcc

SEQ ID NO: 21731 - DNA, 157 bp, Homo sapiens
  MAP TO CHR16.3; EXPRESSED IN BRAIN, SIGNAL = 1.1; EXPRESSED IN ADULT LIVER, SIGNAL = 1.1; EXPRESSED IN HELA, SIGNAL = 1.1; NT HIT: AB007975.1, EVALUE 1.40e-01; EST_HUMAN HIT: AA377652.1, EVALUE 2.00e-01
tgccttgcaattatatttcactttccaaagttcctcctgcctattatcttggttgatcctcacaacatcactgtggcagagatcctctcctttgtacatggagaaccacagaggttcactgacttgtccaagcccccaaacctggagctgttactct

SEQ ID NO: 21732 - DNA, 159 bp, Homo sapiens
  MAP TO CHR16.3; EXPRESSED IN LUNG, SIGNAL = 0.99; EXPRESSED IN BRAIN, SIGNAL = 1.5; EXPRESSED IN ADULT LIVER, SIGNAL = 0.97; NT HIT: AF098669.1, EVALUE 1.40e-01; SWISSPROT HIT: Q21313, EVALUE 2.00e+00
ctcctccctgagttctgcctgtgccttattgatgagcacgtgcctgtgtctggcattgtccagctgtccatgtccacagagcagggcaggcacagttccaagctcgtcctagaaatctccttggtagattcaggcttgaggaggacgcgagaagggatg

SEQ ID NO: 21733 - DNA, 162 bp, Homo sapiens
  MAP TO CHR16.3; EXPRESSED IN FETAL LIVER, SIGNAL = 2.6; EXPRESSED IN LUNG, SIGNAL = 1.4; EXPRESSED IN ADULT LIVER, SIGNAL = 1.3; EXPRESSED IN BRAIN, SIGNAL = 1.4; EXPRESSED IN PLACENTA, SIGNAL = 1.4; NT HIT: AJ277892.1, EVALUE 5.60e-01; EST_HUMAN HIT: BI913994.1, EVALUE 2.10e-01; SWISSPROT HIT: O15015, EVALUE 2.60e+00
ctgccgtctttctccgtgtgggagacgtgctcctaatgagggcctctgtgcccagccaaatgtcctggtctttggagaggtttcctgcacctctgacaccttctctgtggcagcttcttttgcttcttgtcctctgtgtagccagcggctgcactcggttgc

SEQ ID NO: 21734 - DNA, 93 bp, Homo sapiens
  MAP TO CHR16.3; EXPRESSED IN HEART, SIGNAL = 4.9; EXPRESSED IN FETAL LIVER, SIGNAL = 8.4; EXPRESSED IN LUNG, SIGNAL =   6; EXPRESSED IN BONE MARROW, SIGNAL = 8.4; EXPRESSED IN ADULT LIVER, SIGNAL = 7.1; EXPRESSED IN BRAIN, SIGNAL =  11; EXPRESSED IN HELA, SIGNAL = 7.2
ctctccagaggtaaggactttgccagttttttcaacaatggtttttatggtgattatgcatttgagagtttttgagatgctgatgaaaagtcc

SEQ ID NO: 21735 - DNA, 117 bp, Homo sapiens
  MAP TO CHR19.3; EXPRESSED IN LUNG, SIGNAL = 1.3; EXPRESSED IN FETAL LIVER, SIGNAL = 1.1; EXPRESSED IN BONE MARROW, SIGNAL = 1.1; EXPRESSED IN BRAIN, SIGNAL = 2.1; EXPRESSED IN ADULT LIVER, SIGNAL = 1.2; EXPRESSED IN PLACENTA, SIGNAL = 1.3; SWISSPROT HIT: P51460, EVALUE 1.00e-10; NT HIT: gi14766254, EVALUE 1.00e-59; EST_HUMAN HIT: BG718760.1, EVALUE 2.00e-59
atcagtagggacagagggtcagcaggtcttgttgggtacagccactgaggcagcagtagcgtgcagggttggtggcagctgcacggtggtggcggtgatggtgagaggtctggggca

SEQ ID NO: 21736 - DNA, 198 bp, Homo sapiens
  MAP TO CHR19.3; EXPRESSED IN PLACENTA, SIGNAL = 3.8; EXPRESSED IN LUNG, SIGNAL = 4.9; EXPRESSED IN ADULT LIVER, SIGNAL = 3.3; EXPRESSED IN BRAIN, SIGNAL = 3.5; EST_HUMAN HIT: BG183696.1, EVALUE 6.00e-98; SWISSPROT HIT: O43615, EVALUE 1.00e-16; NT HIT: gi14757914, EVALUE 4.00e-98
tggagttgccgcagtgagtgttgcggtgcctctgtgcctgatgacccaggccggggctacctggctccggcaccacactcagagaatctgctcggtgctggaggccgagatgtccaggagccgccagcccgcgtaggggttgagctcgtcctggtctcggcagagcgcccacacgtacagcatccgcagcaccttgtc

SEQ ID NO: 21737 - DNA, 199 bp, Homo sapiens
  MAP TO CHR19.3; EXPRESSED IN ADULT LIVER, SIGNAL =   2; EXPRESSED IN PLACENTA, SIGNAL = 1.9; EXPRESSED IN FETAL LIVER, SIGNAL =   1; NT HIT: gi16175212, EVALUE 1.00e-108; EST_HUMAN HIT: AW246057.1, EVALUE 1.00e-108; SWISSPROT HIT: P20908, EVALUE 8.40e-01
ccgatttttctcatgcaccttgtacatctccctttggagcaagtaatccctcagagcctccacatcgtagaaatagttggtcaggaactggagtattgtccttttcttcttctgattgccctctggggccactgccgcacccaggcgatggatgcccctgatacgcccattccacatgggggcgaccaggcgcagggac

SEQ ID NO: 21738 - DNA, 92 bp, Homo sapiens
  MAP TO CHR16.3; EXPRESSED IN ADULT LIVER, SIGNAL =   1; EXPRESSED IN FETAL LIVER, SIGNAL =   3; NT HIT: gi4507856, EVALUE 8.00e-45; SWISSPROT HIT: Q93009, EVALUE 1.60e-02; EST_HUMAN HIT: AW503389.1, EVALUE 1.00e-44
tatttttctttcctttgatacttagctggatatcataataatcttctcttctatcagaccgatagtctacttctttacactggatataggac

SEQ ID NO: 21739 - DNA, 439 bp, Homo sapiens
  MAP TO CHR14.3; EXPRESSED IN HELA, SIGNAL = 1.2; EXPRESSED IN ADULT LIVER, SIGNAL = 1.7; EXPRESSED IN PLACENTA, SIGNAL = 1.6; NT HIT: AF068686.2, EVALUE 1.00e-01; SWISSPROT HIT: P29037, EVALUE 1.00e-02; EST_HUMAN HIT: BI027838.1, EVALUE 6.10e-01
tgtagttgaggtacaattccacaacattctgaaataggggtcattggtgtcatgggagttatggatgccagagacaaggagtcggagtttggtttctcaggagagggctggactgagtcagtatcaccagggtgcagctgtgaatgggaatttgacaaactgctgctgtttaagcccagcccaacgtcctgttcgctgggtgatggcaacctactttgtggactttggctttcagaattttcttcagtttcgtgtttgctaatgacaggctggtctttattttcctgggtaacttcatctggtaggaagctaagatccacagatgagaaatcaccagatgtttctttgacttcagggttcgaattaaatgcagtatccggattggatgcattcagtatgtacatatcataaggtacaactgggctgaacaggggagacc

SEQ ID NO: 21740 - DNA, 84 bp, Homo sapiens
  MAP TO CHR18.3; EXPRESSED IN BONE MARROW, SIGNAL = 0.88; EXPRESSED IN BRAIN, SIGNAL = 1.1; EXPRESSED IN ADULT LIVER, SIGNAL = 1.2; NT HIT: AF188125.1, EVALUE 4.00e-40; SWISSPROT HIT: Q9Y4E6, EVALUE 1.00e-10; EST_HUMAN HIT: BF984064.1, EVALUE 6.00e-40
gttatggacatcattatgtactgccttgaaggatctttagttaaaaagaaaggtcttcaagaatgtttcccagccatctgcagg

SEQ ID NO: 21741 - DNA, 126 bp, Homo sapiens
  MAP TO CHR19.3; EXPRESSED IN HEART, SIGNAL = 1.8; EXPRESSED IN LUNG, SIGNAL = 4.1; EXPRESSED IN FETAL LIVER, SIGNAL = 6.3; EXPRESSED IN ADULT LIVER, SIGNAL = 2.7; NT HIT: gi16163370, EVALUE 6.00e-65; SWISSPROT HIT: P41233, EVALUE 8.00e-10; EST_HUMAN HIT: AA587583.1, EVALUE 9.00e-31
ctgaagaaggacacctgagcaccgtacatggtgggactgagccgcagagccgggtagtgcccgaaaggaggcacgatgaggctgaacacgagggccaggcccacaaagagggcaggcagcacgatc

SEQ ID NO: 21742 - DNA, 75 bp, Homo sapiens
  MAP TO CHR19.3; EXPRESSED IN ADULT LIVER, SIGNAL = 1.1; EXPRESSED IN LUNG, SIGNAL = 1.4; EXPRESSED IN BONE MARROW, SIGNAL = 1.1; NT HIT: AF274714.1, EVALUE 3.50e+00; EST_HUMAN HIT: BF961509.1, EVALUE 5.00e+00
ctcagggtagcggaaacggaagtccagtcggccgtaatccgagaggaaacaaaatcttgtcaggaacacccagtc

SEQ ID NO: 21743 - DNA, 197 bp, Homo sapiens
  MAP TO CHR16.3; EXPRESSED IN PLACENTA, SIGNAL = 1.3; EXPRESSED IN HELA, SIGNAL = 1.4; EXPRESSED IN ADULT LIVER, SIGNAL = 1.3; EXPRESSED IN BRAIN, SIGNAL = 1.1; NT HIT: AF117827.1, EVALUE 1.80e-01; EST_HUMAN HIT: BE410049.1, EVALUE 1.00e+00; SWISSPROT HIT: P42768, EVALUE 2.50e+00
cctacactcagtgcctacatggctgaggcctgtggcggctgcgacctccagctgaacgtgtgtctcttctacgtgggcgagccaaagatggacaccacaccccctgcccgctatgccagtcacactgacacagccgccgcctacaaggaggtcacccgggctgcaggtggccgcttccactggtttggagacacagg

SEQ ID NO: 21744 - DNA, 156 bp, Homo sapiens
  MAP TO CHR19.3; EXPRESSED IN ADULT LIVER, SIGNAL = 1.3; EXPRESSED IN PLACENTA, SIGNAL = 1.2; EXPRESSED IN HELA, SIGNAL = 1.5; EXPRESSED IN FETAL LIVER, SIGNAL = 3.1; SWISSPROT HIT: P17024, EVALUE 4.00e-14; NT HIT: gi15304226, EVALUE 9.00e-43; EST_HUMAN HIT: BG675577.1, EVALUE 2.00e-66
cctcctctacacatgtgagatgtttcaggaccctgtggcctgtgaggatgttgctgtgaacttcacccaggaggagtgggctttgctggatatttcgcagaggaaactctacagggaagtgatgctggaaactttcaggaacctgacctctatagg

SEQ ID NO: 21745 - DNA, 224 bp, Homo sapiens
  MAP TO CHR16.3; EXPRESSED IN PLACENTA, SIGNAL =   1; EXPRESSED IN HEART, SIGNAL = 1.6; EXPRESSED IN LUNG, SIGNAL = 1.4; EXPRESSED IN FETAL LIVER, SIGNAL = 1.4; EXPRESSED IN BRAIN, SIGNAL = 1.2; EXPRESSED IN ADULT LIVER, SIGNAL = 1.1; SWISSPROT HIT: Q03164, EVALUE 5.00e-01; NT HIT: gi15318237, EVALUE 3.00e-93; EST_HUMAN HIT: BI460156.1, EVALUE 1.00e-92
gacctggaagccggcgagagagacccctgtctgcaacccgcaaaactctttgcgaggctgagtacccagaggaagatgcctctgctgtgctccaagccatccaggtggagaacgcagccctgcagagggcgctcctcagcagaaaggccgagcagccagccagcccactgcaggtgcgctccgggctgggagaggaaccgggggatgctccctggactgggcag

SEQ ID NO: 21746 - DNA, 75 bp, Homo sapiens
  MAP TO CHR16.3; EXPRESSED IN PLACENTA, SIGNAL = 1.4; EXPRESSED IN HELA, SIGNAL = 3.1; EXPRESSED IN BONE MARROW, SIGNAL = 1.5; EXPRESSED IN ADULT LIVER, SIGNAL = 1.8; NT HIT: gi14732772, EVALUE 8.80e-01; EST_HUMAN HIT: BE814085.1, EVALUE 5.00e+00
tgtacagtgactgttctcttccctcttgttgatcttactaaggaggacaaccttgaagtcccctccccaaatcat

SEQ ID NO: 21747 - DNA, 111 bp, Homo sapiens
  MAP TO CHR18.3; EXPRESSED IN ADULT LIVER, SIGNAL = 1.1; EXPRESSED IN PLACENTA, SIGNAL = 1.1; EST_HUMAN HIT: BF345585.1, EVALUE 2.10e+00; NT HIT: AJ305238.1, EVALUE 1.40e+00
tccccccgagagacgtgctcaaaccccacggcataggcagcaggggaaggaaaaccttcttccctcaaagttactgggctgatgtcctcgcatccgatggcctctttcatc

SEQ ID NO: 21748 - DNA, 189 bp, Homo sapiens
  MAP TO CHR16.3; EXPRESSED IN FETAL LIVER, SIGNAL = 0.85; EXPRESSED IN ADULT LIVER, SIGNAL = 1.4; EXPRESSED IN PLACENTA, SIGNAL = 1.3; EXPRESSED IN LUNG, SIGNAL = 2.1; EXPRESSED IN BONE MARROW, SIGNAL = 1.9; NT HIT: M19725.1, EVALUE 1.70e-01; EST_HUMAN HIT: BI015035.1, EVALUE 6.30e-02; SWISSPROT HIT: P50415, EVALUE 5.70e-02
tgccaccttcagatgctgccgtggccacagcattcgtgccagaccagcaagggtgtcctggacactgcccagatgctgaccccgtcatcaaagcagacactggacactgcccaggtgccgaccccaccatcgaagcagacactaccttgtcccctcccgccccccagcaagaagacgccaagccctgag

SEQ ID NO: 21749 - DNA, 178 bp, Homo sapiens
  MAP TO CHR14.3; EXPRESSED IN LUNG, SIGNAL = 3.8; EXPRESSED IN BONE MARROW, SIGNAL = 3.2; EXPRESSED IN FETAL LIVER, SIGNAL = 1.6; EXPRESSED IN BRAIN, SIGNAL = 2.7; EXPRESSED IN ADULT LIVER, SIGNAL = 3.1; EXPRESSED IN PLACENTA, SIGNAL = 3.2; EXPRESSED IN HEART, SIGNAL = 2.9; NT HIT: gi8923365, EVALUE 1.00e-14; EST_HUMAN HIT: AW166235.1, EVALUE 1.00e-95; SWISSPROT HIT: Q61554, EVALUE 4.30e+00
gctttctggctcatctgctggaggaatccttgctgcgggggtgttttcattttctcgtctaacatggcagtggtccattgcagcagaggtttttagcttaaacaatctctttgtggggctgcttatggctcttactgtacattttgaggaagcagcaactgctaaggagagatcaaag

SEQ ID NO: 21750 - DNA, 286 bp, Homo sapiens
  MAP TO CHR18.3; EXPRESSED IN LUNG, SIGNAL = 1.8; EXPRESSED IN BONE MARROW, SIGNAL =   1; EXPRESSED IN FETAL LIVER, SIGNAL = 2.4; EXPRESSED IN ADULT LIVER, SIGNAL = 1.6; SWISSPROT HIT: P03100, EVALUE 1.90e+00; NT HIT: AF010283.1, EVALUE 1.00e+00; EST_HUMAN HIT: BI760571.1, EVALUE 0.00e+00
tcaaggctgcataataaaatgttccaaaccaaacaccagaagttattagatgcactggaatcagaacttttccatactgtctaaatgtcttcttgaatcgttgataaagactaatagatttgtcttgcaaaggatcaggctcttcctttttttccggagttccctgagctgtggcactggatgaaaaaaccctcctgaatgaaacatgttgcttcccttgcttatggcgaaggactcctggttggggtggatgagcatccaatggcctcctttcctttgcaacaca

SEQ ID NO: 21751 - DNA, 273 bp, Homo sapiens
  MAP TO CHR18.3; EXPRESSED IN FETAL LIVER, SIGNAL = 2.2; EXPRESSED IN ADULT LIVER, SIGNAL = 1.3; EXPRESSED IN HELA, SIGNAL = 2.1; EXPRESSED IN HEART, SIGNAL =   2; SWISSPROT HIT: O08593, EVALUE 1.70e+00; NT HIT: AB011113.1, EVALUE 0.00e+00; EST_HUMAN HIT: AV721494.1, EVALUE 0.00e+00
gggcagaacccgctcgtgccatctgtcgattcagaggcacgcacacatgctctgcaggatgtggccatcctgtcaccaggtagtttttccctgccagagatggcaggggaaagccagcggttcctgggaacgctcttgttgcttggtgcaacagaagcacaaaaatcaataaacactgtgattgcactcccagcccagatcagcatttttagccatctcaaccgcacctctgaagtgctgcttgaatctggccgttctgacactgggtgttga

SEQ ID NO: 21752 - DNA, 167 bp, Homo sapiens
  MAP TO CHR16.3; EXPRESSED IN HELA, SIGNAL = 0.9; EXPRESSED IN BONE MARROW, SIGNAL = 0.68; EXPRESSED IN BRAIN, SIGNAL = 1.5; EXPRESSED IN ADULT LIVER, SIGNAL =   1; NT HIT: AB014543.1, EVALUE 6.00e-35; EST_HUMAN HIT: AU133882.1, EVALUE 8.00e-35
cacaaacttagcagtccttacacagtggtgaagaagaatagaacagtccagaaaagggccatctctcctgagtctgtatttcctcttccacaggaagctaaaaacactctctgcctgatacagaacaagctcaaggaggaagagaagcgcctgctcaagagtggaag

SEQ ID NO: 21753 - DNA, 78 bp, Homo sapiens
  MAP TO CHR16.3; EXPRESSED IN BONE MARROW, SIGNAL =   1; EXPRESSED IN BRAIN, SIGNAL = 1.5; EXPRESSED IN ADULT LIVER, SIGNAL = 1.5; EXPRESSED IN PLACENTA, SIGNAL = 1.2; EXPRESSED IN HELA, SIGNAL = 1.5; SWISSPROT HIT: P40318, EVALUE 8.20e+00; NT HIT: AF218211.1, EVALUE 3.70e+00; EST_HUMAN HIT: AL543347.1, EVALUE 1.30e+00
atgggtgacttgcacaacgtttgcagtcaagatagagaagcaaacattaccaacacaaatgaagtacgacaagacagg

SEQ ID NO: 21754 - DNA, 102 bp, Homo sapiens
  MAP TO CHR16.3; EXPRESSED IN BONE MARROW, SIGNAL = 1.2; EXPRESSED IN ADULT LIVER, SIGNAL = 1.3; EXPRESSED IN BRAIN, SIGNAL = 1.3; EXPRESSED IN HELA, SIGNAL = 1.5; SWISSPROT HIT: Q22812, EVALUE 3.60e+00
gctaaactctaatctgtaccgtgagatgcactgctgcaaagggaggggcaggtggcgaggggtgaaggttcagatgaggaggaaggaatggtgcaaagacag

SEQ ID NO: 21755 - DNA, 84 bp, Homo sapiens
  MAP TO CHR16.3; EXPRESSED IN PLACENTA, SIGNAL = 1.3; EXPRESSED IN FETAL LIVER, SIGNAL = 1.4; EXPRESSED IN LUNG, SIGNAL = 1.5; EXPRESSED IN ADULT LIVER, SIGNAL = 0.92; NT HIT: AF422176.1, EVALUE 6.50e-02; EST_HUMAN HIT: BG763496.1, EVALUE 5.90e+00
tggcattgacaaacgccaattgaattagctgaacgtgaatgtctaacgcatgtgtggccatgtcagtggtggctcccaggagcc

SEQ ID NO: 21756 - DNA, 131 bp, Homo sapiens
  MAP TO CHR14.3; EXPRESSED IN PLACENTA, SIGNAL =  19; EXPRESSED IN HELA, SIGNAL =  18; EXPRESSED IN BONE MARROW, SIGNAL =  26; EXPRESSED IN LUNG, SIGNAL =  22; EXPRESSED IN ADULT LIVER, SIGNAL =  23; EXPRESSED IN BRAIN, SIGNAL =  24; NT HIT: AB015355.1, EVALUE 2.00e-09; EST_HUMAN HIT: BI712105.1, EVALUE 7.00e-10; SWISSPROT HIT: P39188, EVALUE 9.00e-01
tgcccagcctcttctcattcttgtacccatggtagaactggctttctctcatcttaccaccagttgcttggttcctcaatattttgtagagatggggtttttctatgttgctcaggattgtgttgaactcc

SEQ ID NO: 21757 - DNA, 82 bp, Homo sapiens
  MAP TO CHR18.3; EXPRESSED IN LUNG, SIGNAL = 1.5; EXPRESSED IN BONE MARROW, SIGNAL = 1.4; EXPRESSED IN FETAL LIVER, SIGNAL = 1.3; EXPRESSED IN BRAIN, SIGNAL = 1.5; EXPRESSED IN ADULT LIVER, SIGNAL = 1.6; NT HIT: AL583917.1, EVALUE 3.90e+00; SWISSPROT HIT: P35446, EVALUE 9.40e-01
ggtcacaccttcagcatccagccacattgtttgctgcatttcaggtgccagtgtggcagagggccagcccaggaaagatgaa

SEQ ID NO: 21758 - DNA, 110 bp, Homo sapiens
  MAP TO CHR14.3; EXPRESSED IN ADULT LIVER, SIGNAL = 1.5; EXPRESSED IN BRAIN, SIGNAL = 2.1; EXPRESSED IN PLACENTA, SIGNAL = 2.4; EXPRESSED IN FETAL LIVER, SIGNAL = 2.7; EXPRESSED IN LUNG, SIGNAL = 2.1; EST_HUMAN HIT: BG187058.1, EVALUE 5.20e-01; NT HIT: X63306.1, EVALUE 2.30e-02; SWISSPROT HIT: P44094, EVALUE 7.90e+00
tccaccctccacagccagcttcttcatgaacagaaactgtattttaggactctgcttccccagtccctggcacagtctaggcacccacagtgttgacagaagagggggct

SEQ ID NO: 21759 - DNA, 97 bp, Homo sapiens
  MAP TO CHR18.3; EXPRESSED IN ADULT LIVER, SIGNAL = 1.9; EXPRESSED IN PLACENTA, SIGNAL = 1.5; SWISSPROT HIT: Q9CX84, EVALUE 8.10e+00; NT HIT: AJ297824.1, EVALUE 4.80e+00; EST_HUMAN HIT: BE865748.1, EVALUE 4.50e-01
tgcttcctgatgcaaagaccacatcttgccatcagttcatacacagtcacttctggcttttccatgatcctgaacaccagcaagcccagaggatgca

SEQ ID NO: 21760 - DNA, 77 bp, Homo sapiens
  MAP TO CHR14.3; EXPRESSED IN BRAIN, SIGNAL = 1.4; EXPRESSED IN ADULT LIVER, SIGNAL = 1.2; EXPRESSED IN PLACENTA, SIGNAL = 0.84; EXPRESSED IN HELA, SIGNAL = 1.7; EXPRESSED IN BONE MARROW, SIGNAL = 1.4; NT HIT: gi11496991, EVALUE 2.00e-35; EST_HUMAN HIT: BG990077.1, EVALUE 1.00e-34
ttgggaaaatgggacagcacagcctggtggcttgttcaggcaatctcaacaaggccaaggaaatctttcagaagaag

SEQ ID NO: 21761 - DNA, 143 bp, Homo sapiens
  MAP TO CHR16.3; EXPRESSED IN ADULT LIVER, SIGNAL = 1.1; EXPRESSED IN PLACENTA, SIGNAL = 0.97; EXPRESSED IN LUNG, SIGNAL = 1.4; EXPRESSED IN BONE MARROW, SIGNAL = 0.89; EXPRESSED IN BRAIN, SIGNAL = 1.1
tgctgaagaggaggaatgtgaatgagagctttgtagaaaaggtgacaaagagctggatctcgcagagagggtttggcagcatggagggaacaggaaggcgagcccaggagagggtgacaccaccagccaagggggtcaagaag

SEQ ID NO: 21762 - DNA, 229 bp, Homo sapiens
  MAP TO CHR14.3; EXPRESSED IN PLACENTA, SIGNAL = 1.4; EXPRESSED IN FETAL LIVER, SIGNAL = 1.4; EXPRESSED IN BONE MARROW, SIGNAL = 1.5; EXPRESSED IN ADULT LIVER, SIGNAL = 1.7; EST_HUMAN HIT: BF980022.1, EVALUE 1.20e+00; SWISSPROT HIT: P14355, EVALUE 3.40e+00
ctttcctctgctgtggctgtggcatcatctctacatgaccatgcagtttagttctgcagatgaactaatttggcttctgtgtccaaattccagacaaatgggagagatattagatcccccaatattggggtcaattgcacttctactagcacagctgtggccagacgaagtgatggcaagagatatgtgggctatccttctggagatgtgtactgtgcagattgtctaa

SEQ ID NO: 21763 - DNA, 140 bp, Homo sapiens
  MAP TO CHR16.3; EXPRESSED IN LUNG, SIGNAL = 1.9; EXPRESSED IN BONE MARROW, SIGNAL = 1.2; EXPRESSED IN BRAIN, SIGNAL = 1.8; EXPRESSED IN ADULT LIVER, SIGNAL = 2.5; EST_HUMAN HIT: AV686394.1, EVALUE 8.00e-50; NT HIT: gi16161253, EVALUE 6.00e-59
gtgcgaggtggagagggtacgtactacttgcacctgtccgtcttctccgatctggtggatctgcacctgctgcacgttggccagcgcgtagtgcagggcctgcggctgcggctgtggctgcaggagctctctggcaggag

SEQ ID NO: 21764 - DNA, 81 bp, Homo sapiens
  MAP TO CHR16.3; EXPRESSED IN ADULT LIVER, SIGNAL = 0.93; EXPRESSED IN PLACENTA, SIGNAL = 0.91; EXPRESSED IN HELA, SIGNAL = 1.1; NT HIT: AE007782.1, EVALUE 2.50e-01; EST_HUMAN HIT: AW004702.1, EVALUE 3.60e-01
ccgcaacttgcccccttccttctgtgatttttttttttttaacccatgtttcacttcccacattctggttcttgttcttcc

SEQ ID NO: 21765 - DNA, 139 bp, Homo sapiens
  MAP TO CHR16.3; EXPRESSED IN ADULT LIVER, SIGNAL = 1.4; EXPRESSED IN HELA, SIGNAL = 0.94; EXPRESSED IN BONE MARROW, SIGNAL = 1.8; NT HIT: AB023572.1, EVALUE 1.90e+00; SWISSPROT HIT: O30387, EVALUE 7.70e+00
aagagctcctgtcccccacagtgattttcaactctcttgctatgcatgaggtcagccatttcatggctccacccaaatcttctgatgcaaaagtggaatggactcatgccataatgctgggctgcctgatcatcgcatg

SEQ ID NO: 21766 - DNA, 250 bp, Homo sapiens
  MAP TO CHR14.3; EXPRESSED IN ADULT LIVER, SIGNAL = 0.95; EXPRESSED IN PLACENTA, SIGNAL = 1.1; EXPRESSED IN LUNG, SIGNAL = 1.3; NT HIT: M20783.1, EVALUE 4.00e-03; EST_HUMAN HIT: BF348146.1, EVALUE 8.50e-02; SWISSPROT HIT: Q9DED6, EVALUE 3.70e-01
gcattgcaggcaccagccttcatgtgggccaggctgcggcaagagtagggacagcaccatgggctggagaaagagtgtaaatgacaacccaagtgtgcacagtccatccggtgctgttggctgtgtgggtttgggtgggtttgccttggatgcagggaagggggtggaggagggtgagagcaagccccagaatcagtacagcatgaatgtcattggagcaataaaatggggaaaggatggaaagagctaa

SEQ ID NO: 21767 - DNA, 167 bp, Homo sapiens
  MAP TO CHR18.3; EXPRESSED IN ADULT LIVER, SIGNAL = 1.3; EXPRESSED IN PLACENTA, SIGNAL = 1.2; NT HIT: AE000732.1, EVALUE 5.80e-01; EST_HUMAN HIT: AW842373.1, EVALUE 8.50e-01; SWISSPROT HIT: Q03609, EVALUE 4.40e+00
gcctgattgctgagacactcagtcaggaaagtatgaatgattctaggcagcagtctctgttcttcatcacacttccagatttaaacaaactctgtgctgtcagaataatactgagtaataaggtggcagatactgagattaggactatacaaatgaagatgtgcagg

SEQ ID NO: 21768 - DNA, 102 bp, Homo sapiens
  MAP TO CHR19.3; EXPRESSED IN LUNG, SIGNAL = 2.2; EXPRESSED IN BONE MARROW, SIGNAL = 2.8; EXPRESSED IN ADULT LIVER, SIGNAL = 2.3; EXPRESSED IN PLACENTA, SIGNAL = 1.7; NT HIT: U48508.1, EVALUE 1.00e-50; EST_HUMAN HIT: F34300.1, EVALUE 1.00e-50; SWISSPROT HIT: P11716, EVALUE 1.00e-15
atgtaattggccaggttgtgctcctccagcgtgtgagtctcgaagccatgcggtgtcgtatcaaagtagtcactgccgattccacagatgaagcacttggtc

SEQ ID NO: 21769 - DNA, 114 bp, Homo sapiens
  MAP TO CHR19.3; EXPRESSED IN ADULT LIVER, SIGNAL = 1.8; EXPRESSED IN PLACENTA, SIGNAL = 1.4; EXPRESSED IN LUNG, SIGNAL = 1.6; EXPRESSED IN BONE MARROW, SIGNAL = 2.3; EST_HUMAN HIT: AL554402.1, EVALUE 3.00e-55; SWISSPROT HIT: O09046, EVALUE 2.00e-14; NT HIT: AF293462.1, EVALUE 2.00e-55
gtcaccatcctggaggcagataacaggatcgggggccgcatcttcacctaccgggaccagaacacgggctggattagggagctgggagccatgcgcatgcccagctctcacagg

SEQ ID NO: 21770 - DNA, 151 bp, Homo sapiens
  MAP TO CHR14.3; EXPRESSED IN PLACENTA, SIGNAL = 1.2; EXPRESSED IN HELA, SIGNAL =   1; EXPRESSED IN LUNG, SIGNAL = 1.1; EXPRESSED IN FETAL LIVER, SIGNAL =   1; EXPRESSED IN ADULT LIVER, SIGNAL = 1.5; NT HIT: X84285.1, EVALUE 5.20e-01; EST_HUMAN HIT: BE061596.1, EVALUE 7.60e-01; SWISSPROT HIT: O61613, EVALUE 1.20e+00
cgccccgttcttcaatatggtcaactgtcatttttccgagagcactgtgtaaatacagcttcaaacctgagcccatttcctggagcgtgtaagcccctcctatatggaaattcaggagctggcactggtcagcagcacccaccggtgaaag

SEQ ID NO: 21771 - DNA, 96 bp, Homo sapiens
  MAP TO CHR19.3; EXPRESSED IN ADULT LIVER, SIGNAL = 4.6; EXPRESSED IN PLACENTA, SIGNAL =   5; EXPRESSED IN FETAL LIVER, SIGNAL = 4.1; EXPRESSED IN LUNG, SIGNAL = 7.6; EXPRESSED IN BONE MARROW, SIGNAL = 6.8; NT HIT: gi8923581, EVALUE 3.00e-47; EST_HUMAN HIT: AW246135.1, EVALUE 4.00e-32; SWISSPROT HIT: O75173, EVALUE 1.20e+00
gcaccctccagccctccacttgcagcacagtcccctgaggggaaccatggacaccaagaaccagcctccacatccttccacccacccaggattcag

SEQ ID NO: 21772 - DNA, 148 bp, Homo sapiens
  MAP TO CHR14.3; EXPRESSED IN BONE MARROW, SIGNAL = 3.1; EXPRESSED IN ADULT LIVER, SIGNAL = 2.8; EXPRESSED IN PLACENTA, SIGNAL = 2.1; EXPRESSED IN HELA, SIGNAL = 2.3; EXPRESSED IN HEART, SIGNAL = 2.7; EXPRESSED IN LUNG, SIGNAL = 2.2; EST_HUMAN HIT: BG485050.1, EVALUE 2.00e-56; SWISSPROT HIT: P29154, EVALUE 3.40e+00
tccaccacccccttagggggcggggcctcagagctcagtgctcgaactggctccagagccgtgagttcggcatgcaagagcggaagaaacgcggctggtaccccggaagcagtcgctgcaacttccgggaggtgcttgtgtgcctggt

SEQ ID NO: 21773 - DNA, 159 bp, Homo sapiens
  MAP TO CHR18.3; EXPRESSED IN HEART, SIGNAL = 1.8; EXPRESSED IN BONE MARROW, SIGNAL = 1.8; EXPRESSED IN FETAL LIVER, SIGNAL = 2.4; EXPRESSED IN ADULT LIVER, SIGNAL = 1.7; EXPRESSED IN BRAIN, SIGNAL = 2.4; NT HIT: Z79077.1, EVALUE 1.40e-01; EST_HUMAN HIT: AA582063.1, EVALUE 2.00e-01; SWISSPROT HIT: O35344, EVALUE 2.00e+00
tcagggctccagagcagcagcatggtggacagtgtgcttctcagcagcgtgggctgccaggcctggaaaatgggatagtacctggcagaagaagcactggttgcaggcataatcatgatacctagtggcagcagcaggggctggaggatgcagatctcc

SEQ ID NO: 21774 - DNA, 125 bp, Homo sapiens
  MAP TO CHR18.3; EXPRESSED IN BONE MARROW, SIGNAL = 2.8; EXPRESSED IN ADULT LIVER, SIGNAL = 1.6; EXPRESSED IN BRAIN, SIGNAL = 1.2; EXPRESSED IN PLACENTA, SIGNAL = 1.4; EXPRESSED IN HELA, SIGNAL = 1.8; SWISSPROT HIT: P30667, EVALUE 2.00e+00
tgcctcagcccttgcaggcgactggaaaagctggtaaaggtgcggctgggcacctgctgggaggggccttgatggggaggggtttgcgggtctgggtcggaccccagcagctcttcctgtttttc

SEQ ID NO: 21775 - DNA, 259 bp, Homo sapiens
  MAP TO CHR16.3; EXPRESSED IN ADULT LIVER, SIGNAL = 1.1; EXPRESSED IN HELA, SIGNAL = 0.99; SWISSPROT HIT: P01426, EVALUE 3.90e-01; NT HIT: gi13376122, EVALUE 3.00e-90; EST_HUMAN HIT: AW665036.1, EVALUE 0.00e+00
ttcctggtggaatacctcaaatgtcgacttcctgaggtggttgctattttgttctgttttgattttaaacagaaagcaagggcggaccatggtttgattccagatgtgaagttagaaaaaacagtcccccggctgcaccgtccgtccctccagcatttcagggagcagtttttggttccagggaggcccgtgatcctgaaaggcgtggctgaccactggccgtgcatgcagaagtggaggtgggtggtcgctgagggag

SEQ ID NO: 21776 - DNA, 140 bp, Homo sapiens
  MAP TO CHR18.3; EXPRESSED IN ADULT LIVER, SIGNAL = 3.8; EXPRESSED IN PLACENTA, SIGNAL = 2.3; EXPRESSED IN HELA, SIGNAL = 2.8; EXPRESSED IN HEART, SIGNAL = 2.8; EXPRESSED IN BONE MARROW, SIGNAL = 3.7; SWISSPROT HIT: Q9UXU9, EVALUE 3.40e+00; NT HIT: gi16163658, EVALUE 3.00e-73; EST_HUMAN HIT: AW974781.1, EVALUE 4.00e-73
tgatgagaatggaaaggaggaattattctcactgaaggatctcagcttgcgttttcgtgccaatattattatcaatggaaaaagggcttttgaagaagagaaatgggatgagatttcaattggctctttgcgtttccagg

SEQ ID NO: 21777 - DNA, 112 bp, Homo sapiens
  MAP TO CHR18.3; EXPRESSED IN FETAL LIVER, SIGNAL = 1.5; EXPRESSED IN BRAIN, SIGNAL =   1; EXPRESSED IN ADULT LIVER, SIGNAL = 1.1; EST_HUMAN HIT: AU158022.1, EVALUE 8.40e+00
actacacggaatatgacattattattattttcacttttaaagttaaacaggggaatataaatcttattcagcttgctgattgcacatacggtgtttttgtctccccccgata

SEQ ID NO: 21778 - DNA, 131 bp, Homo sapiens
  MAP TO CHR19.3; EXPRESSED IN FETAL LIVER, SIGNAL = 2.1; EXPRESSED IN ADULT LIVER, SIGNAL = 1.9; EXPRESSED IN PLACENTA, SIGNAL = 2.5; EXPRESSED IN HELA, SIGNAL = 5.3; NT HIT: gi14757244, EVALUE 6.00e-68; EST_HUMAN HIT: AA442510.1, EVALUE 9.00e-68; SWISSPROT HIT: P12752, EVALUE 4.50e+00
ggtgcgaggaagaagatgtggagatgagtgaggacgcctacacggtgctgacccgcatcgggctggagacgtcactgcgctacgccatccagctcatcacagctgccagcttggtgtgccggaaacgcaag

SEQ ID NO: 21779 - DNA, 133 bp, Homo sapiens
  MAP TO CHR14.3; EXPRESSED IN LUNG, SIGNAL = 1.7; EXPRESSED IN ADULT LIVER, SIGNAL = 1.1; NT HIT: gi14748798, EVALUE 2.00e-68; EST_HUMAN HIT: AV648831.1, EVALUE 6.00e-69; SWISSPROT HIT: Q9UYT3, EVALUE 3.50e+00
attggcagtggctagcatgttctctgggtcaactaaagttcgaagcaggcccataagctggactgctcctccaagttcaggatctgtatcacaaatcatatgttctataatgaggttgatgagcaaaatatcc

SEQ ID NO: 21780 - DNA, 145 bp, Homo sapiens
  MAP TO CHR18.3; EXPRESSED IN LUNG, SIGNAL = 3.3; EXPRESSED IN BONE MARROW, SIGNAL = 1.9; EXPRESSED IN ADULT LIVER, SIGNAL =   2; EXPRESSED IN BRAIN, SIGNAL = 1.3; EXPRESSED IN PLACENTA, SIGNAL =   2; SWISSPROT HIT: Q9PK01, EVALUE 5.90e+00; NT HIT: gi15296833, EVALUE 4.90e-01; EST_HUMAN HIT: AA205391.1, EVALUE 7.30e-01
tggcgcctgatcgaggtaaactaaatagcaccatgaactcacagcatagtgaactatccacacggcagtcggagacaagcacatttgcaatttttctgagatttgccagaatcggaatgactcaatccacggaagataatggatg

SEQ ID NO: 21781 - DNA, 124 bp, Homo sapiens
  MAP TO CHR18.3; EXPRESSED IN ADULT LIVER, SIGNAL = 1.1; EXPRESSED IN HELA, SIGNAL =   1; EXPRESSED IN FETAL LIVER, SIGNAL = 1.8; NT HIT: AF154113.1, EVALUE 1.00e-01; EST_HUMAN HIT: BI042078.1, EVALUE 3.90e-02; SWISSPROT HIT: Q15459, EVALUE 4.60e+00
tggcggagtggaagactgcttctggagccaggatgcctgggtggaaactgacagtctcctggaaggctctgagatatgggggctatgaggaatgcttctggagccacgatgcctgggtggaggg

SEQ ID NO: 21782 - DNA, 366 bp, Homo sapiens
  MAP TO CHR19.3; EXPRESSED IN HEART, SIGNAL = 2.6; EXPRESSED IN BONE MARROW, SIGNAL = 1.9; EXPRESSED IN BRAIN, SIGNAL = 1.3; EXPRESSED IN ADULT LIVER, SIGNAL = 1.7; EXPRESSED IN PLACENTA, SIGNAL = 1.9; NT HIT: gi13376694, EVALUE 4.00e-10; EST_HUMAN HIT: AV761306.1, EVALUE 1.00e-122; SWISSPROT HIT: O14813, EVALUE 3.30e-01
ggttacgcaccaccccgatgcatactgggattgtagttctgaagctacctacccatgggctgagagcagtaaagagactacaactcccagcataccaggcgcggcgcgcaccgccctgccccttcctctggggttgcgaaccgcccccgagcctggtacaggctgggattgtagtcctgcagccttgtggccgaagggctgggactggccatgagattacatgtcctagcatgctcagccaggcgcgcgcagctctgccccttcctccagtgatgcgcacagtccctgatccctgtgcacgctgggattgtagtcctgcagccctgcgatcacttgcaggtaacaagaaatttcagcttccggcat

SEQ ID NO: 21783 - DNA, 79 bp, Homo sapiens
  MAP TO CHR14.3; EXPRESSED IN PLACENTA, SIGNAL = 1.4; EXPRESSED IN LUNG, SIGNAL = 2.1; EXPRESSED IN BONE MARROW, SIGNAL = 2.1; EXPRESSED IN BRAIN, SIGNAL = 1.2; EXPRESSED IN ADULT LIVER, SIGNAL = 1.6; EST_HUMAN HIT: BE548756.1, EVALUE 1.40e+00
gcagaagaagaacaaggtgtgcacgcggggaagttcggagtccctccttgtctttctagactgcagctgcgacaacatg

SEQ ID NO: 21784 - DNA, 163 bp, Homo sapiens
  MAP TO CHR16.3; EXPRESSED IN PLACENTA, SIGNAL = 1.2; EXPRESSED IN FETAL LIVER, SIGNAL = 1.5; EXPRESSED IN BRAIN, SIGNAL = 1.4; EXPRESSED IN ADULT LIVER, SIGNAL = 2.5; NT HIT: gi14776216, EVALUE 7.00e-87; EST_HUMAN HIT: BE393331.1, EVALUE 1.00e-86; SWISSPROT HIT: P53342, EVALUE 7.60e+00
gttggccctgggctttagtctggcagtgtatggggccagctaccactctatgagctcgatggcacgagcagcgttctctgaggatggggccctgatggatggtggcatggacctcaacatggagcagggcatggcagagtgagtgtcccccaccgccagccca

SEQ ID NO: 21785 - DNA, 193 bp, Homo sapiens
  MAP TO CHR14.3; EXPRESSED IN ADULT LIVER, SIGNAL = 4.1; EXPRESSED IN HELA, SIGNAL = 6.3; EXPRESSED IN HEART, SIGNAL = 9.2; EXPRESSED IN FETAL LIVER, SIGNAL =   6; EXPRESSED IN BONE MARROW, SIGNAL = 2.5; NT HIT: AF035824.1, EVALUE 1.00e-104; EST_HUMAN HIT: BF922192.1, EVALUE 1.00e-104; SWISSPROT HIT: Q9UEU0, EVALUE 2.00e-32
ccatatgctcattctctacagcatatatgccatatttcatgtctcctcggcctccaggtgtggctgtcaaaggtgtgcttctcacctcccgatggagtttagcaaggtccttccggtagtttcgaagcttagacatcatggggtttcggaaagacaggggtgcataacgtagctcctcctccatctctgccag

SEQ ID NO: 21786 - DNA, 318 bp, Homo sapiens
  MAP TO CHR18.3; EXPRESSED IN BONE MARROW, SIGNAL = 1.3; EXPRESSED IN BRAIN, SIGNAL = 1.1; EXPRESSED IN ADULT LIVER, SIGNAL = 1.4; EXPRESSED IN PLACENTA, SIGNAL = 1.3; SWISSPROT HIT: P50617, EVALUE 2.00e-01; NT HIT: U79117.1, EVALUE 4.60e+00
cttgggtcttgcagcagatgtcggttgatttgcatgcgatgcttgagttcccttctcacctgcctcaccatccatcacacctggaatatagcggtgtctgagcttgctgaccttagccagaaggtgggagaggcggggcactgacccaggtgtagggcacccaacgtctaggtggagctgcgttccctttgtctctcccctttgacggcagtcgcatgatgaagggctctggtgatgaagggtgctgtatggaggtagcaccacactggagccacccccagtgaaagtagaaattaagaaccggcagagaaagccgct

SEQ ID NO: 21787 - DNA, 180 bp, Homo sapiens
  MAP TO CHR14.3; EXPRESSED IN BRAIN, SIGNAL = 2.5; EXPRESSED IN ADULT LIVER, SIGNAL = 1.5; EXPRESSED IN PLACENTA, SIGNAL = 1.8; EXPRESSED IN HELA, SIGNAL = 1.8; EXPRESSED IN LUNG, SIGNAL = 2.2; NT HIT: AL163268.2, EVALUE 1.60e-01; EST_HUMAN HIT: AW889804.1, EVALUE 2.30e-01; SWISSPROT HIT: P36714, EVALUE 5.70e+00
tgaacttatggttgctggagttcagaaagttaaggatctataaggttggcacttcaatgatcattgatatgaagttgccatcactgatcatagagaaactggtggactggaagcttatgcatacatgggtaaattaccagagtttagaagatgataatgagaccaaggagagggtggttt

SEQ ID NO: 21788 - DNA, 106 bp, Homo sapiens
  MAP TO CHR18.3; EXPRESSED IN LUNG, SIGNAL = 4.7; EXPRESSED IN BONE MARROW, SIGNAL = 3.6; EXPRESSED IN ADULT LIVER, SIGNAL = 3.6; EXPRESSED IN PLACENTA, SIGNAL = 4.2; EXPRESSED IN HELA, SIGNAL = 4.3; NT HIT: AJ302647.1, EVALUE 5.30e+00; EST_HUMAN HIT: BI260728.1, EVALUE 6.00e-53
ttacttctttctgtagttgaaaagcaccatgtaattttcccagttagtgccatagggacctcctattagccctaggtccacatatacgggtttcttgactttgaga

SEQ ID NO: 21789 - DNA, 152 bp, Homo sapiens
  MAP TO CHR18.3; EXPRESSED IN ADULT LIVER, SIGNAL = 0.97; EXPRESSED IN PLACENTA, SIGNAL = 1.3; EXPRESSED IN LUNG, SIGNAL =   1; NT HIT: AF005258.1, EVALUE 2.00e-80; EST_HUMAN HIT: BF855187.1, EVALUE 4.90e-02; SWISSPROT HIT: Q61001, EVALUE 9.00e-18
gccagttctgtgactattgcaattctgaagaccccaggaaagcacatcctgtcaccaatgccatcgatggatctgaacgttggtggcaaagccctcccctgtcctcaggcacacagtacaacagagtcaacctcaccttggatctggggcag

SEQ ID NO: 21790 - DNA, 161 bp, Homo sapiens
  MAP TO CHR18.3; EXPRESSED IN FETAL LIVER, SIGNAL = 1.5; EXPRESSED IN BRAIN, SIGNAL = 1.8; EXPRESSED IN ADULT LIVER, SIGNAL = 1.2; EXPRESSED IN PLACENTA, SIGNAL = 1.2; NT HIT: AF135024.2, EVALUE 3.60e-02; EST_HUMAN HIT: R94475.1, EVALUE 5.20e-02; SWISSPROT HIT: P29040, EVALUE 1.50e+00
tgctctatctttcccacctaattcatccttcaaggccagctcaaatgtctcctcttcctggagccatacctgattgcccatctggattaattgctcctccctctgcacttccacagcactggggttcttatgcaggttttgcacgtcttccatcctgtctg

SEQ ID NO: 21791 - DNA, 483 bp, Homo sapiens
  MAP TO CHR19.3; EXPRESSED IN HEART, SIGNAL = 1.8; EXPRESSED IN FETAL LIVER, SIGNAL = 2.3; EXPRESSED IN BRAIN, SIGNAL = 1.4; EXPRESSED IN ADULT LIVER, SIGNAL = 1.2; EXPRESSED IN HELA, SIGNAL = 1.6; EXPRESSED IN PLACENTA, SIGNAL = 1.3; NT HIT: gi14768904, EVALUE 0.00e+00; EST_HUMAN HIT: BG394063.1, EVALUE 0.00e+00; SWISSPROT HIT: P35227, EVALUE 5.00e-09
ttacaagacatagtgtacaaattagtgatcaatctagaggaaagagaaaaaaagcaaatgcatgatttctatcaagaaagaggtctagaagtacctaaacctgctgttccacagccagtcccttcaagcaaaggaagatctaaaaaaatccgagaatcagtgtttcctattccacctgaacttgatatgtctttattactggagttcattggtgctaatgaaggcacgggacattttaagccattggaaaagaagtttgttcgagtttcaggagaagcaactattggacatgtagaaaaattcttcagaagaaaaatgggtcttgatccagcttgtcaggtagatatcatctgtggtgatcacctgttggagcagtatcaaactctaagggaaatccgacgtgcaataggtgatgcagcaatgcaggatggtctgcttgtccttcattatggtcttgtagtttctcctctgaagataacttga

SEQ ID NO: 21792 - DNA, 158 bp, Homo sapiens
  MAP TO CHR18.3; EXPRESSED IN LUNG, SIGNAL = 2.4; EXPRESSED IN ADULT LIVER, SIGNAL = 1.5; EXPRESSED IN HELA, SIGNAL = 2.4; EXPRESSED IN PLACENTA, SIGNAL = 1.8; NT HIT: AF045970.1, EVALUE 1.40e-01; EST_HUMAN HIT: BG166745.1, EVALUE 8.00e-01
tagatttctttaagtggaaaaggatatattcctgtggccaaaatgaaagtatcaataaggttttcttcctttgcatttactactttcctcaaatcaagtgcaagaattctgacatcaatagagcctctgcctccttcaactcttttgttgtctgttac

SEQ ID NO: 21793 - DNA, 101 bp, Homo sapiens
  MAP TO CHR18.3; EXPRESSED IN ADULT LIVER, SIGNAL = 1.9; EXPRESSED IN BRAIN, SIGNAL = 2.3; NT HIT: gi6679920, EVALUE 3.20e-01; EST_HUMAN HIT: AW891125.1, EVALUE 1.90e+00
tgactcttacaatcaatgggattgaccaaaccaacagtgaagtcagcagcaacaagagcatggcccaactgcggtccattaatgtggcctgtggctccagg

SEQ ID NO: 21794 - DNA, 225 bp, Homo sapiens
  MAP TO CHR18.3; EXPRESSED IN HEART, SIGNAL = 1.5; EXPRESSED IN FETAL LIVER, SIGNAL = 1.3; EXPRESSED IN BONE MARROW, SIGNAL =   1; EXPRESSED IN BRAIN, SIGNAL = 1.3; EXPRESSED IN ADULT LIVER, SIGNAL = 1.1; EXPRESSED IN PLACENTA, SIGNAL = 0.85; SWISSPROT HIT: P97887, EVALUE 1.10e+00; NT HIT: X76389.1, EVALUE 8.00e-01; EST_HUMAN HIT: AV713585.1, EVALUE 1.20e+00
tggaaagaaggaaccattcaagtggcgatgaggagagacattctaaatgcagggaatcaactgagataaagcaagagagggagaattatgactcatttgagtacagctttaatcccaagaagcatagtaggggagatatggctagcaatgtaagcagggacagaattcaggctcctgatgaggatattttaccttggaataatggcaattggaaagaccagaggg

SEQ ID NO: 21795 - DNA, 131 bp, Homo sapiens
  MAP TO CHR16.3; EXPRESSED IN HEART, SIGNAL = 4.3; EXPRESSED IN ADULT LIVER, SIGNAL = 3.9; EXPRESSED IN PLACENTA, SIGNAL = 3.3; EXPRESSED IN HELA, SIGNAL = 3.1; NT HIT: AF404862.1, EVALUE 6.80e+00
tgggagctgtcagttgtgagagctcctatgggaagagtgttttgatgtatagacatccctggtccacagagccaccaagcaaggcagactatttcgtgagaaagaaggaagatagactccatgcaacacag

SEQ ID NO: 21796 - DNA, 215 bp, Homo sapiens
  MAP TO CHR16.3; EXPRESSED IN FETAL LIVER, SIGNAL = 1.9; EXPRESSED IN BRAIN, SIGNAL = 1.4; EXPRESSED IN ADULT LIVER, SIGNAL = 1.5; EXPRESSED IN PLACENTA, SIGNAL = 2.9; NT HIT: AJ271885.2, EVALUE 4.90e-02; SWISSPROT HIT: P03186, EVALUE 2.30e-02; EST_HUMAN HIT: BE390197.1, EVALUE 1.80e-02
ctagcccagatgccggcaggcgggagcagagcctgtgccaagggcatctggtagcagtagaggcagatgagatggccggcgccgaagcaccccaccgcggcgcagagtctgctgaagccccgagtgctgatgggaaagtggcaggcccaccaggtgcagagggccaggaagagcagcaggtagacactggagagggccgaggggtgggcgatgcc

SEQ ID NO: 21797 - DNA, 76 bp, Homo sapiens
  MAP TO CHR19.3; EXPRESSED IN HELA, SIGNAL = 2.4; EXPRESSED IN LUNG, SIGNAL = 2.7; EXPRESSED IN FETAL LIVER, SIGNAL =   3; EXPRESSED IN BONE MARROW, SIGNAL = 2.2; EXPRESSED IN ADULT LIVER, SIGNAL = 1.7; EXPRESSED IN PLACENTA, SIGNAL =   2; NT HIT: AF287263.1, EVALUE 3.50e+00; EST_HUMAN HIT: AA766283.1, EVALUE 3.00e-26
gcagactgcctcaaattctaacatcccgtggagagcagaactctccggatatccagcccagaccgctcccgcccgg

SEQ ID NO: 21798 - DNA, 169 bp, Homo sapiens
  MAP TO CHR18.3; EXPRESSED IN HELA, SIGNAL = 3.4; EXPRESSED IN LUNG, SIGNAL = 3.9; EXPRESSED IN FETAL LIVER, SIGNAL = 1.5; EXPRESSED IN ADULT LIVER, SIGNAL = 2.8; EXPRESSED IN PLACENTA, SIGNAL = 2.9; SWISSPROT HIT: Q9ZND3, EVALUE 1.50e+00; EST_HUMAN HIT: BF740773.1, EVALUE 1.40e-02
cagctgcaagacctgagtgaagtcagcaaatgcacagataaaaacaagggcatgacaaagcatgtggtggacatgaagagaggagaatccaaaaatagcatcaggttccgccaggaaagtgtggcaagaacagcagctgaaaacaggaaggatttcgccccatgcagta

SEQ ID NO: 21799 - DNA, 158 bp, Homo sapiens
  MAP TO CHR16.3; EXPRESSED IN PLACENTA, SIGNAL = 3.1; EXPRESSED IN HELA, SIGNAL = 4.9; EXPRESSED IN FETAL LIVER, SIGNAL = 2.9; EXPRESSED IN BONE MARROW, SIGNAL =   5; EXPRESSED IN ADULT LIVER, SIGNAL = 3.2; SWISSPROT HIT: P05979, EVALUE 5.10e-01; EST_HUMAN HIT: BG107665.1, EVALUE 9.00e-84; NT HIT: gi14775225, EVALUE 6.00e-84
cattgcaacagctgcttgatgttttccacagacacgcggccctcattgccggttaacgcttgaagcttatccaccagacctttcagagcctccactggggatgacttatcccagaccactgccacaaactggccagcagagatcccaaaatctgccat

SEQ ID NO: 21800 - DNA, 277 bp, Homo sapiens
  MAP TO CHR18.3; EXPRESSED IN FETAL LIVER, SIGNAL = 2.2; EXPRESSED IN BRAIN, SIGNAL = 2.8; EXPRESSED IN ADULT LIVER, SIGNAL = 1.2; EXPRESSED IN HELA, SIGNAL = 1.9; EXPRESSED IN PLACENTA, SIGNAL = 1.4; SWISSPROT HIT: P46934, EVALUE 2.00e-10; EST_HUMAN HIT: BG216805.1, EVALUE 1.00e-105; NT HIT: gi14760440, EVALUE 3.00e-90
gccagagagccccagagcaaggagaagggcatgcagggcatgctgtgatgacctcttactcacagccgaagaaccaacctcataatcgtccctttaactttattccgcagcatggatgggaagttgttgactcaaatgactcggcttctcagcaccaagaggaacttcctcctcctcctctgcctcccgggtgggaagaaaaagtggacaatttaggccgaacttactatgtcaaccacaacaaccggaccactcagtggcacagaccaagcctgat

SEQ ID NO: 21801 - DNA, 117 bp, Homo sapiens
  MAP TO CHR18.3; EXPRESSED IN ADULT LIVER, SIGNAL = 1.2; EXPRESSED IN PLACENTA, SIGNAL = 0.91; SWISSPROT HIT: Q10423, EVALUE 6.00e+00; EST_HUMAN HIT: AA677085.1, EVALUE 2.20e+00; NT HIT: AF106081.2, EVALUE 3.80e-01
ccgttttgcttgtccaacatgaggatgaccattttgggtaaagatttgggcttatggacagcagcatgacatattttaaatgtaacttcgtactgtttgtttttagaagatggtgct

SEQ ID NO: 21802 - DNA, 147 bp, Homo sapiens
  MAP TO CHR18.3; EXPRESSED IN HELA, SIGNAL = 1.6; EXPRESSED IN LUNG, SIGNAL =   2; EXPRESSED IN BONE MARROW, SIGNAL = 1.5; EXPRESSED IN BRAIN, SIGNAL = 1.3; EXPRESSED IN ADULT LIVER, SIGNAL = 1.5; EXPRESSED IN PLACENTA, SIGNAL = 1.4; SWISSPROT HIT: Q9PJY1, EVALUE 7.70e+00; EST_HUMAN HIT: BE971721.1, EVALUE 7.40e-01
cggggccagtgcccacagatctggcagtgcagctgtgtcgtggtggataatctgtgattgtgccggggacgtggctgtcatgagggtgtttttcagtggagggtcactactgcttgtgctgccgctgttggtggccagggctgcagc

SEQ ID NO: 21803 - DNA, 199 bp, Homo sapiens
  MAP TO CHR19.3; EXPRESSED IN BONE MARROW, SIGNAL = 7.2; EXPRESSED IN ADULT LIVER, SIGNAL = 5.2; EXPRESSED IN PLACENTA, SIGNAL = 5.5; EXPRESSED IN HEART, SIGNAL = 2.3; EXPRESSED IN HELA, SIGNAL = 8.9; SWISSPROT HIT: O00115, EVALUE 5.00e-35; NT HIT: gi16176147, EVALUE 1.00e-108; EST_HUMAN HIT: AL532880.1, EVALUE 1.00e-108
ggcaagcagctgacctacacctacccctgggtctataactaccagctggaagggatctttgcccaggaattccccgacttggagaatgtggtcaagggccaccacgttagccaagaaccctggaacagcagcatcacactcacatcccaggccggggctgttttccagagctttgccaagttcagcaaatttggagatg

SEQ ID NO: 21804 - DNA, 112 bp, Homo sapiens
  MAP TO CHR14.3; EXPRESSED IN ADULT LIVER, SIGNAL = 1.3; EXPRESSED IN BRAIN, SIGNAL = 1.3; EXPRESSED IN FETAL LIVER, SIGNAL = 1.6; SWISSPROT HIT: Q04637, EVALUE 9.20e-01; NT HIT: AB018302.1, EVALUE 1.00e-56; EST_HUMAN HIT: BF815876.1, EVALUE 2.00e-56
ctggcttagtatctgtcactccttccataaggaccagtcctactggtcgctgacaagcgatgctgcagaagcggaaacgtagcaggaagtctcggccatacttgcgtctctc

SEQ ID NO: 21805 - DNA, 61 bp, Homo sapiens
  MAP TO CHR16.3; EXPRESSED IN HELA, SIGNAL = 1.9; EXPRESSED IN ADULT LIVER, SIGNAL = 1.7; EST_HUMAN HIT: AL524649.1, EVALUE 8.00e-26; SWISSPROT HIT: P46935, EVALUE 2.10e+00; NT HIT: AF325425.1, EVALUE 1.00e-26
cagatttgccatacggatgggaacaagaaactgatgagaacggacaagtgttttttgttga

SEQ ID NO: 21806 - DNA, 272 bp, Homo sapiens
  MAP TO CHR14.3; EXPRESSED IN HELA, SIGNAL = 1.3; EXPRESSED IN ADULT LIVER, SIGNAL =   1; SWISSPROT HIT: P46935, EVALUE 3.00e-10; NT HIT: gi16162512, EVALUE 0.00e+00; EST_HUMAN HIT: BI489611.1, EVALUE 0.00e+00
cctaggagcacagggatgcctgtattgggccttcttatttgtgtgatctacataataggttccaaattcggatgactcaactcgttcccatccaggaggaagtccttctcgctcaagaggatggctccagtgagttgtatttgtgttatgatctatataatattttctccctctcattgtccagtccacagaccagccaggaggaaggggtaaatcttcagaaccatggttagtcaaatttcctaaagatgtagcagcaactctcccaatac

SEQ ID NO: 21807 - DNA, 137 bp, Homo sapiens
  MAP TO CHR18.3; EXPRESSED IN ADULT LIVER, SIGNAL = 1.3; EXPRESSED IN PLACENTA, SIGNAL = 1.3; EXPRESSED IN HELA, SIGNAL = 1.3; EXPRESSED IN LUNG, SIGNAL = 1.2; EXPRESSED IN FETAL LIVER, SIGNAL = 1.6; EXPRESSED IN BRAIN, SIGNAL = 1.1; SWISSPROT HIT: P47101, EVALUE 2.60e+00; NT HIT: AB051531.1, EVALUE 7.00e-71; EST_HUMAN HIT: AI380017.1, EVALUE 1.00e-70
ctggtcagccgaggtcacacagtgctctgggtgttgaatggtggtacagctttgcttcctccaatccacaattccattctgttcagaatattgcatggtaagcccatccaatggagaacaacttgtaccaatattgc

SEQ ID NO: 21808 - DNA, 121 bp, Homo sapiens
  MAP TO CHR19.3; EXPRESSED IN ADULT LIVER, SIGNAL =   1; EXPRESSED IN BRAIN, SIGNAL = 1.5; EXPRESSED IN PLACENTA, SIGNAL = 1.2; EST_HUMAN HIT: BF527391.1, EVALUE 8.00e-62; SWISSPROT HIT: Q92782, EVALUE 2.00e-19; NT HIT: gi4758797, EVALUE 5.00e-62
cctgatcgcccacagtccgcacaggagatgaggtcctcgggacaccccgtcttcttggagccccccaggcagaagtcacagtagccgttggggatgacagtgccgtcgggcgccttcttgg

SEQ ID NO: 21809 - DNA, 89 bp, Homo sapiens
  MAP TO CHR16.3; EXPRESSED IN HELA, SIGNAL = 4.1; EXPRESSED IN PLACENTA, SIGNAL = 3.3; EXPRESSED IN LUNG, SIGNAL = 4.6; EXPRESSED IN BONE MARROW, SIGNAL = 4.7; EXPRESSED IN FETAL LIVER, SIGNAL = 1.8; EXPRESSED IN ADULT LIVER, SIGNAL = 3.3; EST_HUMAN HIT: BF221768.1, EVALUE 4.00e-01
tctagttcagtcatctctctggctaggtcatgaagaactagaatgatttgtccgtgaagtttcaccttcagctccattttcccaaccat

SEQ ID NO: 21810 - DNA, 77 bp, Homo sapiens
  MAP TO CHR18.3; EXPRESSED IN LUNG, SIGNAL = 1.1; EXPRESSED IN BONE MARROW, SIGNAL = 1.4; EXPRESSED IN FETAL LIVER, SIGNAL = 1.6; EXPRESSED IN BRAIN, SIGNAL = 1.1; EXPRESSED IN ADULT LIVER, SIGNAL = 1.2; NT HIT: gi15304430, EVALUE 3.00e-25; EST_HUMAN HIT: BF027364.1, EVALUE 2.00e-14
tatatcaaggcattatacctggtatgttcaactgatgtatttttctcatcaataactgcaagagccacaagctttcc

SEQ ID NO: 21811 - DNA, 193 bp, Homo sapiens
  MAP TO CHR19.3; EXPRESSED IN ADULT LIVER, SIGNAL = 1.5; EXPRESSED IN LUNG, SIGNAL = 1.3; EST_HUMAN HIT: BF342513.1, EVALUE 1.00e+00; SWISSPROT HIT: P45210, EVALUE 3.80e-01; NT HIT: AB017602.1, EVALUE 1.70e-01
ttaacctggaaagagaagagagacgtcatcggggccggccccctgcctccacaccacgacggtttcactcattccaacatccacctcccaaaagactccaaggtcagaagcagtggccacgacccaagcacaggctctgcccaaggcgtccccaaggacaggcccccaccggcaatctgtgctccccaagcac

SEQ ID NO: 21812 - DNA, 134 bp, Homo sapiens
  MAP TO CHR18.3; EXPRESSED IN FETAL LIVER, SIGNAL =   5; EXPRESSED IN BRAIN, SIGNAL = 5.4; EXPRESSED IN ADULT LIVER, SIGNAL = 5.7; EXPRESSED IN PLACENTA, SIGNAL = 4.6; EXPRESSED IN HEART, SIGNAL = 4.9; EXPRESSED IN LUNG, SIGNAL = 4.2; EST_HUMAN HIT: BE782641.1, EVALUE 6.60e-01; SWISSPROT HIT: Q9YF67, EVALUE 7.80e+00; NT HIT: AF275345.2, EVALUE 7.00e+00
tggtgatctactatggttgttctgaatacagaagactggaaaacccttcagtaattgtgaaaatcacactcatgaatgttgccttacaggttattaattctaaactagggaagcagattttggaggatttgaag

SEQ ID NO: 21813 - DNA, 119 bp, Homo sapiens
  MAP TO CHR18.3; EXPRESSED IN FETAL LIVER, SIGNAL = 1.4; EXPRESSED IN BRAIN, SIGNAL = 1.4; EXPRESSED IN ADULT LIVER, SIGNAL = 1.1; EXPRESSED IN HELA, SIGNAL =   1; NT HIT: AL161571.2, EVALUE 9.90e-02; EST_HUMAN HIT: AA582731.1, EVALUE 5.80e-01
cataaaaggcagtaggtggccatccatgtctgttcattccctgcttcaaagcctgaataaacagcagagtcatagtctacaggtctttcctgttcttcatgtgacatatttctcctttg

SEQ ID NO: 21814 - DNA, 215 bp, Homo sapiens
  MAP TO CHR16.3; EXPRESSED IN HELA, SIGNAL = 5.2; EXPRESSED IN HEART, SIGNAL = 3.7; EXPRESSED IN LUNG, SIGNAL = 7.4; EXPRESSED IN BONE MARROW, SIGNAL = 5.9; EXPRESSED IN BRAIN, SIGNAL = 4.1; EXPRESSED IN ADULT LIVER, SIGNAL = 4.5; EXPRESSED IN PLACENTA, SIGNAL =   5; NT HIT: gi14777842, EVALUE 1.00e-118; EST_HUMAN HIT: BG911784.1, EVALUE 1.00e-117; SWISSPROT HIT: O95201, EVALUE 3.00e-19
ggttccagatcgtggacatcctcatcaggaaatgccttctaagctgggggaggcggtaccttcaggggacactcaggagtcactgcacattaagatggagcccgaagagccacactccgagggggcatcgcaggaggatggggctcaaggtgcctggggctgggcacccctaagtcacggctctaaggagaaagctctcttcctgcctggcggag

SEQ ID NO: 21815 - DNA, 106 bp, Homo sapiens
  MAP TO CHR16.3; EXPRESSED IN ADULT LIVER, SIGNAL = 1.2; EXPRESSED IN HELA, SIGNAL =   1; EXPRESSED IN PLACENTA, SIGNAL = 0.99; NT HIT: gi11602909, EVALUE 3.40e-01; EST_HUMAN HIT: BE273186.1, EVALUE 1.30e-01
cctcctctcctacattttccaaatccaaactttgcaccttctttgacagccctgaggaccccagcccccaggagagcagctccaaggaacattcagaagcaagttg

SEQ ID NO: 21816 - DNA, 160 bp, Homo sapiens
  MAP TO CHR14.3; EXPRESSED IN PLACENTA, SIGNAL = 1.2; EXPRESSED IN FETAL LIVER, SIGNAL = 0.98; EXPRESSED IN BONE MARROW, SIGNAL = 1.5; EXPRESSED IN ADULT LIVER, SIGNAL = 1.2; EXPRESSED IN BRAIN, SIGNAL = 1.4; SWISSPROT HIT: P04280, EVALUE 3.00e-01; EST_HUMAN HIT: T02852.1, EVALUE 3.00e-19
ctgtcacttgcctcgtggaggtccaggccctgattgctctgttgtattctggggctgttctcctcgaggtatgtatcggggtgacagcttctcatctctgcatcgtggcggctagaatcagccttgtttctgatgagggcggtagcggccagtcgattgc

SEQ ID NO: 21817 - DNA, 149 bp, Homo sapiens
  MAP TO CHR18.3; EXPRESSED IN ADULT LIVER, SIGNAL = 0.93; EXPRESSED IN PLACENTA, SIGNAL = 1.2; EXPRESSED IN LUNG, SIGNAL = 1.1; EST_HUMAN HIT: BG281527.1, EVALUE 1.90e-01; SWISSPROT HIT: P20888, EVALUE 2.00e+00; NT HIT: X15147.1, EVALUE 5.10e-01
cctcaggggatcactgggagggcgcttggccttggtatccagtggagaattggtcaacacccaccgagatgtgttgaccgtgagccagaccctgtcaccagcaaattgaacaccccgaggctcttccccatctctcctgtgtcttctct

SEQ ID NO: 21818 - DNA, 128 bp, Homo sapiens
  MAP TO CHR18.3; EXPRESSED IN BRAIN, SIGNAL = 1.5; EXPRESSED IN ADULT LIVER, SIGNAL = 1.1; EXPRESSED IN PLACENTA, SIGNAL = 1.3; EST_HUMAN HIT: BF742544.1, EVALUE 6.30e-01; SWISSPROT HIT: O04104, EVALUE 2.00e+00; NT HIT: gi15308731, EVALUE 4.30e-01
tactgcctagcattaagcttttcatctcccaggtagctgttgtacatatctttatctatagttatgcctacgtgtacatcgataactatatttgcattttccctatatccgtgagtgttgtttgctcc

SEQ ID NO: 21819 - DNA, 134 bp, Homo sapiens
  MAP TO CHR16.3; EXPRESSED IN HELA, SIGNAL =  10; EXPRESSED IN PLACENTA, SIGNAL = 9.9; EXPRESSED IN HEART, SIGNAL = 6.6; EXPRESSED IN LUNG, SIGNAL =  13; EXPRESSED IN BONE MARROW, SIGNAL =  16; EXPRESSED IN FETAL LIVER, SIGNAL =  14; EXPRESSED IN ADULT LIVER, SIGNAL = 8.7; SWISSPROT HIT: Q05588, EVALUE 1.20e+00; EST_HUMAN HIT: AW856342.1, EVALUE 1.70e-01; NT HIT: AF103901.2, EVALUE 1.80e+00
tgacacgaacatcaggacatggggctgatattaaagtaaccagaaacacaaatgtgtattgcaacactcggaacattgccatctgtgtgttgcatgcccggagggacacccagggaggactgcgtgaagacagg

SEQ ID NO: 21820 - DNA, 216 bp, Homo sapiens
  MAP TO CHR18.3; EXPRESSED IN ADULT LIVER, SIGNAL = 1.1; EXPRESSED IN PLACENTA, SIGNAL = 1.1; EXPRESSED IN LUNG, SIGNAL = 1.1; EST_HUMAN HIT: AW269019.1, EVALUE 4.00e-31; SWISSPROT HIT: Q15393, EVALUE 7.60e-01; NT HIT: AJ131016.1, EVALUE 1.00e-05
cagagttcccagatgagccaccagagccccctaaggaggttgaaccatctgcaacccagcaggaagcctcaggtcatcctccgaagtccactgaagaggtcagtcctccactgcagcaggagataccagctcagccatcagagccacctgagaaggtcaaaccatctccagtcataaagcagcccccaactcagcttttagagccacattcaaagt

SEQ ID NO: 21821 - DNA, 83 bp, Homo sapiens
  MAP TO CHR16.3; EXPRESSED IN FETAL LIVER, SIGNAL = 1.6; EXPRESSED IN ADULT LIVER, SIGNAL = 1.7; EXPRESSED IN HELA, SIGNAL =   2; NT HIT: gi4502730, EVALUE 2.00e-39; EST_HUMAN HIT: BG746769.1, EVALUE 2.00e-39; SWISSPROT HIT: Q15131, EVALUE 2.00e-09
catcttcctggtgatgggttactgtgagcaggacctggccagcctcctggagaatatgccaacacccttctcggaggctcagg

SEQ ID NO: 21822 - DNA, 335 bp, Homo sapiens
  MAP TO CHR14.3; EXPRESSED IN HEART, SIGNAL =   2; EXPRESSED IN BONE MARROW, SIGNAL = 1.6; EXPRESSED IN FETAL LIVER, SIGNAL = 2.8; EXPRESSED IN ADULT LIVER, SIGNAL = 2.9; EXPRESSED IN BRAIN, SIGNAL = 1.8; EXPRESSED IN HELA, SIGNAL = 3.5; SWISSPROT HIT: P38480, EVALUE 9.70e-02; NT HIT: gi14751981, EVALUE 0.00e+00; EST_HUMAN HIT: BE786578.1, EVALUE 0.00e+00
cctaatgggaagccaagaacaccagactgtgcaatcatggatggttcaagggtgccttcatggttagcaatagtgatgtttcgtagcctaaggctatcatagaggccttggagcttttgatactgacgattgcgctccataagtttctcagagatgtcactgaactttttcttgtattcttctagtactttcttcatggaggtaacctcccctttcatagaggtcaattctacatccttgctttgtatttgctgagtatatatcttctccatctgtttcagatggccctcagccttgctgaaattgtattcttgatagagacgttcctgatgtac

SEQ ID NO: 21823 - DNA, 252 bp, Homo sapiens
  MAP TO CHR18.3; EXPRESSED IN PLACENTA, SIGNAL = 1.9; EXPRESSED IN HELA, SIGNAL =   2; EXPRESSED IN LUNG, SIGNAL = 2.3; EXPRESSED IN BONE MARROW, SIGNAL = 1.8; EXPRESSED IN ADULT LIVER, SIGNAL = 1.7; EXPRESSED IN BRAIN, SIGNAL =   2; SWISSPROT HIT: P98161, EVALUE 3.00e-05
cttctcacagaaccagcctctgttgacacccacattgccatgcccgacggagacccgactcagggggctaaggaggacagccagctcgatgtggaagatgtccgtgcggcctcggtcaaacacgccgccctccaggaagattttcccactgttcttattccctctggccccatacatgaccaagtagattttggatttggtaccagccccccggacatccccagtgaagacggtgacaatatacgtaatagc

SEQ ID NO: 21824 - DNA, 99 bp, Homo sapiens
  MAP TO CHR16.3; EXPRESSED IN PLACENTA, SIGNAL = 3.9; EXPRESSED IN HELA, SIGNAL = 4.1; EXPRESSED IN ADULT LIVER, SIGNAL = 2.9; EST_HUMAN HIT: BG769724.1, EVALUE 8.00e-40; SWISSPROT HIT: P51798, EVALUE 2.00e-09; NT HIT: U88844.1, EVALUE 5.00e-40
ctgattgcggttgtccaccaccaccaggtgccgcaggcccagggcccggaacagcttgaacacccgtgggagcgacgcctcctgcagcaggggcacagc

SEQ ID NO: 21825 - DNA, 109 bp, Homo sapiens
  MAP TO CHR16.3; EXPRESSED IN FETAL LIVER, SIGNAL = 6.7; EXPRESSED IN BRAIN, SIGNAL =   5; EXPRESSED IN LUNG, SIGNAL =   7; EXPRESSED IN BONE MARROW, SIGNAL =  11; EXPRESSED IN ADULT LIVER, SIGNAL = 4.3; EXPRESSED IN PLACENTA, SIGNAL = 5.5; EXPRESSED IN HELA, SIGNAL = 6.1; EXPRESSED IN HEART, SIGNAL = 2.8; EST_HUMAN HIT: BG775641.1, EVALUE 1.00e-54; SWISSPROT HIT: P57073, EVALUE 6.10e+00; NT HIT: AF184514.1, EVALUE 3.50e-01
gtttttggagcctccgtttccaacatcaggtgcagcagccatgtgggggcacccccagcctccctggtgagggtgactaaggcatcagtgttggtcttggagggcatcc

SEQ ID NO: 21826 - DNA, 198 bp, Homo sapiens
  MAP TO CHR14.3; EXPRESSED IN ADULT LIVER, SIGNAL = 0.98; EXPRESSED IN PLACENTA, SIGNAL = 1.3; EST_HUMAN HIT: AU140599.1, EVALUE 1.00e-105; SWISSPROT HIT: Q16937, EVALUE 1.30e-01; NT HIT: AB002319.1, EVALUE 1.00e-107
cttctgatacacctgcagctccgccagcttcctctgtagctcacactttagtccttcttggacagccgtgtctgaaatgcagtaggccagaatctccaggcatgactccaggggccacctgtccacaaactgtagggccagccgacttctcagagatgcatccttcacgggaaacaggtattgccaaccttctttgtc

SEQ ID NO: 21827 - DNA, 209 bp, Homo sapiens
  MAP TO CHR16.3; EXPRESSED IN BONE MARROW, SIGNAL = 2.5; EXPRESSED IN ADULT LIVER, SIGNAL = 1.2; EXPRESSED IN HELA, SIGNAL =   2; EXPRESSED IN PLACENTA, SIGNAL = 1.6; EXPRESSED IN LUNG, SIGNAL = 2.4; EST_HUMAN HIT: BI907235.1, EVALUE 1.00e-92; SWISSPROT HIT: O60268, EVALUE 1.00e-34; NT HIT: gi7662163, EVALUE 1.00e-114
ggaaaaccacagctgctgcccccggagtcccgggagaagcccgcgggcagcatcgactcctacctgaaatccgcaaacagctggctggccgaaaagaaggacatcgccgagcggctgctgaagaacacctcggccaggactgagaatgtcaagggcttcttcggggggctggagaccaagctgaaggggcccctggccaggaggaacga

SEQ ID NO: 21828 - DNA, 110 bp, Homo sapiens
  MAP TO CHR19.3; EXPRESSED IN HEART, SIGNAL = 4.8; EXPRESSED IN HELA, SIGNAL = 3.8; EXPRESSED IN BONE MARROW, SIGNAL = 2.6; EXPRESSED IN FETAL LIVER, SIGNAL = 8.4; EXPRESSED IN ADULT LIVER, SIGNAL = 1.4; NT HIT: gi11424768, EVALUE 2.00e-55; EST_HUMAN HIT: BI598870.1, EVALUE 3.00e-55; SWISSPROT HIT: P33188, EVALUE 1.00e-16
gttttgggaggttatcagtgacgaacatggcatcgaccccacaggcacataccatggggacagtgacctgcaactggagaggatcaacgtgtactacaacgaggccacag

SEQ ID NO: 21829 - DNA, 213 bp, Homo sapiens
  MAP TO CHR18.3; EXPRESSED IN ADULT LIVER, SIGNAL = 2.7; EXPRESSED IN PLACENTA, SIGNAL = 3.8; EXPRESSED IN HELA, SIGNAL = 3.6; EXPRESSED IN LUNG, SIGNAL = 3.4; EXPRESSED IN BONE MARROW, SIGNAL = 2.4; EXPRESSED IN FETAL LIVER, SIGNAL = 3.4; EST_HUMAN HIT: BF810437.1, EVALUE 1.80e-02; SWISSPROT HIT: P78411, EVALUE 1.90e-01; NT HIT: AL096805.1, EVALUE 1.20e-02
  unsure 144
ggtccagccagccagcatggtccccacccccatctctcccacgctgaacagagctcccgggcccatactccccagcttggtcaggttgtcccagggcctggagtgcagagccacaacccccaccatctagaccctccagctctnctggatcattgcaagcttccccttccaggaatccttctccagcttccctggcccatgaggcagacctga

SEQ ID NO: 21830 - DNA, 200 bp, Homo sapiens
  MAP TO CHR16.3; EXPRESSED IN LUNG, SIGNAL = 3.7; EXPRESSED IN BONE MARROW, SIGNAL = 2.1; EXPRESSED IN BRAIN, SIGNAL = 2.7; EXPRESSED IN ADULT LIVER, SIGNAL =   3; EXPRESSED IN PLACENTA, SIGNAL = 2.7; EXPRESSED IN HELA, SIGNAL = 3.1; EST_HUMAN HIT: AU125937.1, EVALUE 1.00e-108; SWISSPROT HIT: P39981, EVALUE 1.10e-02; NT HIT: gi8922691, EVALUE 1.00e-108
ctcttgtcctgctggtcgccaatgatgattaggaaggcaatgcaggtgccaaaggtgtagacagcgatggccacctcacatagcacacctgtcagcttgccacacacagcccataccacctcctggtaggtcctctcattgctggcctgggagcagtaggccaggatgacaaggccactgatgatgaaaaccagcatacc

SEQ ID NO: 21831 - DNA, 77 bp, Homo sapiens
  MAP TO CHR19.3; EXPRESSED IN LUNG, SIGNAL = 1.4; EXPRESSED IN FETAL LIVER, SIGNAL =   1; EXPRESSED IN BRAIN, SIGNAL = 1.7; EXPRESSED IN ADULT LIVER, SIGNAL = 1.3; EXPRESSED IN PLACENTA, SIGNAL = 1.7; EXPRESSED IN HELA, SIGNAL = 1.7; EST_HUMAN HIT: BI767008.1, EVALUE 8.00e-36; SWISSPROT HIT: P13561, EVALUE 1.60e+00; NT HIT: gi14767217, EVALUE 1.00e-33
ctgtccatgtgactcttctccagcagacactgcaagacagcatccagttggttccgggctttggccatctccagctc

SEQ ID NO: 21832 - DNA, 173 bp, Homo sapiens
  MAP TO CHR18.3; EXPRESSED IN FETAL LIVER, SIGNAL = 1.1; EXPRESSED IN BONE MARROW, SIGNAL = 1.6; EXPRESSED IN ADULT LIVER, SIGNAL = 2.6; EXPRESSED IN PLACENTA, SIGNAL = 2.3; EXPRESSED IN HELA, SIGNAL = 2.8; EXPRESSED IN LUNG, SIGNAL = 3.8; SWISSPROT HIT: O08734, EVALUE 3.80e-01; NT HIT: AF060568.1, EVALUE 9.40e+00
ttaggcaggcagatccctgcccagcagtcccgtctccctgcctgcctggccaggagtcaagggagcattatctccgtcctggttctgggaaggcctcttccattgatattctgctttgcttcctcccttttcctctgcaccattcctgctgttatggtgagaatcgtcctttc

SEQ ID NO: 21833 - DNA, 129 bp, Homo sapiens
  MAP TO CHR16.3; EXPRESSED IN PLACENTA, SIGNAL = 5.2; EXPRESSED IN HELA, SIGNAL = 5.8; EXPRESSED IN FETAL LIVER, SIGNAL =   4; EXPRESSED IN HEART, SIGNAL = 2.1; EXPRESSED IN ADULT LIVER, SIGNAL = 2.1; EXPRESSED IN BRAIN, SIGNAL =   2; NT HIT: gi5031984, EVALUE 4.00e-66; EST_HUMAN HIT: BG753306.1, EVALUE 6.00e-66; SWISSPROT HIT: P13662, EVALUE 2.00e-14
cgtaaattgcgcctagttgggttctatcattatcaaataactggtagtaatgttgaatgaagctggatccaatctgctcccaaattggcttgtctcccattctggagcgtcacccggcctcacggagac

SEQ ID NO: 21834 - DNA, 350 bp, Homo sapiens
  MAP TO CHR18.3; EXPRESSED IN ADULT LIVER, SIGNAL = 1.6; EXPRESSED IN HELA, SIGNAL = 4.9; EXPRESSED IN HEART, SIGNAL = 3.4; EXPRESSED IN FETAL LIVER, SIGNAL = 2.8; EXPRESSED IN LUNG, SIGNAL = 2.7; NT HIT: gi14754417, EVALUE 0.00e+00; EST_HUMAN HIT: AL554077.1, EVALUE 0.00e+00; SWISSPROT HIT: Q09556, EVALUE 2.00e-03
ctcccttgctgaaccctgagattttaagtgccccacccggcttgattcagcgatccaaggtagataatacaagtgcagccaccgttgagaagaaagccacagcaaccgtcactgccaaaccacagatcactaatcccaaggcagagattactcgatttgtgcccagtgcattgagagtacgtcgggagaataaaagggctactgctgcttcccaaagaaagtcagaggataattctgctgtgcctcttgccaaagcagcacccaaatctggtccttctgttcctgtctcagtacaaactaaggatgatgtctatgaggatttcatgaaagagatggaagggctactgtga

SEQ ID NO: 21835 - DNA, 311 bp, Homo sapiens
  MAP TO CHR14.3; EXPRESSED IN LUNG, SIGNAL = 6.6; EXPRESSED IN ADULT LIVER, SIGNAL = 3.9; EXPRESSED IN BRAIN, SIGNAL = 3.7; EXPRESSED IN PLACENTA, SIGNAL = 4.8; EXPRESSED IN HEART, SIGNAL = 5.3; EXPRESSED IN HELA, SIGNAL = 4.5; SWISSPROT HIT: Q13546, EVALUE 1.00e-09; EST_HUMAN HIT: AL601137.1, EVALUE 0.00e+00; NT HIT: gi11434029, EVALUE 0.00e+00
ccttgacgtgcagctctgggtccagcaggacgttggatggcttgaggtcccggtgcaggagcaccgggttctggtcgtgcaggtaaaacatcccaagcaccacttctttcagcaggcggcaaaggagcggccagggccgagggcactgggactgcagcagccccgacaaggagccgttctccatgaatttagtcaccagagccggcttgggatcttggtcccagttcaccttctcgataaccccttctaggcgcagcacgaattcgttatccagacttgccatggccttgacctccctggatatcgccttc

SEQ ID NO: 21836 - DNA, 180 bp, Homo sapiens
  MAP TO CHR18.3; EXPRESSED IN HEART, SIGNAL = 1.7; EXPRESSED IN LUNG, SIGNAL = 1.1; EXPRESSED IN BONE MARROW, SIGNAL = 2.1; EXPRESSED IN FETAL LIVER, SIGNAL = 1.5; EXPRESSED IN ADULT LIVER, SIGNAL = 1.2; EXPRESSED IN BRAIN, SIGNAL = 1.9; EXPRESSED IN PLACENTA, SIGNAL = 1.2; SWISSPROT HIT: Q9IAK1, EVALUE 5.00e-01; EST_HUMAN HIT: BI860191.1, EVALUE 8.00e-97; NT HIT: AB037749.1, EVALUE 5.00e-97
ctatcccaagagaaaggatctggcacaaaggaatctgcctttcctccgtctcaagtctcccacccttgactggttgggatttgctcgtccagcctctagacacttcccaaagcaagactggacacatgccgagggcgttgcggatagtgcctcaccattgcccaccctgctgcccaactc

SEQ ID NO: 21837 - DNA, 269 bp, Homo sapiens
  MAP TO CHR16.3; EXPRESSED IN ADULT LIVER, SIGNAL =   1; EXPRESSED IN HELA, SIGNAL = 1.2; EXPRESSED IN PLACENTA, SIGNAL = 1.1; EXPRESSED IN BONE MARROW, SIGNAL =   2; SWISSPROT HIT: Q09625, EVALUE 1.50e-01; EST_HUMAN HIT: AA383789.1, EVALUE 0.00e+00; NT HIT: gi15805042, EVALUE 3.90e+00
ctgggcaggctgctcccccgtggtgacctgctcactggttttcacgttgccgcccgtcttgtcctcctgcacgctggtgtggctgctctgcctgttttgggcactgccatccagccggacgctctgacggctgctggcctgggtggagggaaggctggctgtggaagtcagcagcccgctgctcaccttgtaggtgagggcactgctgcccaagctgatgaagctggcgctggacaggatgctgctgccgctgccgctgccgggcaggc

SEQ ID NO: 21838 - DNA, 258 bp, Homo sapiens
  MAP TO CHR16.3; EXPRESSED IN HELA, SIGNAL =   2; EXPRESSED IN PLACENTA, SIGNAL = 2.4; EXPRESSED IN LUNG, SIGNAL =   2; EXPRESSED IN ADULT LIVER, SIGNAL = 2.9; SWISSPROT HIT: P24607, EVALUE 4.40e+00; NT HIT: L11000.1, EVALUE 6.00e-02
ttgtgggcagtacagtgtagagtcactttgatttttctcatctccttcctggaatgtgccacagaagaaaacccacgaagtcttgagctaaacgaagcagagatgggagaagggacaaggtgggaggcggtagtggtgctgcatgggataaaaatggaaacacacacttttgccctctgtacccaaaaggaaatgtcggtggaggcaggcgttcaagctggcctcgtgtttgtggttttagacacagctttgagtcgt

SEQ ID NO: 21839 - DNA, 334 bp, Homo sapiens
  MAP TO CHR16.3; EXPRESSED IN BRAIN, SIGNAL = 1.9; EXPRESSED IN ADULT LIVER, SIGNAL = 2.4; EXPRESSED IN PLACENTA, SIGNAL = 1.1; EXPRESSED IN HELA, SIGNAL = 0.95; NT HIT: gi13518298, EVALUE 4.80e+00; EST_HUMAN HIT: BG209929.1, EVALUE 9.00e-58; SWISSPROT HIT: Q61001, EVALUE 1.10e-01
tctgagacgagggatcctcaggggcctgaggtgtccaaacatcgtggagttgcgagcagacagcgcaggtttcttcctcgagggggggctccagaccacaggaggcaggaccctctgtggggtgcccgtgttctgagggctaagacacagcctcataggggcaccatcccacctgtctggaaaagaaggcccaagatgtcgctgacggttgaagagtgggaaatggccccagattccccgggcaggcacaggtgcaggagccgcggggtgagcccggccagctgggaaggcctcacggacaagacgagcaggtggccgatggcatggccaggac

SEQ ID NO: 21840 - DNA, 263 bp, Homo sapiens
  MAP TO CHR16.3; EXPRESSED IN FETAL LIVER, SIGNAL =  26; EXPRESSED IN ADULT LIVER, SIGNAL =  26; EXPRESSED IN HEART, SIGNAL =  61; NT HIT: AF005889.1, EVALUE 0.00e+00; SWISSPROT HIT: P13073, EVALUE 9.00e-22; EST_HUMAN HIT: AW000709.1, EVALUE 0.00e+00
tcaggtaaactggtcatttattagcagtggtacaactgtttggcataacaggtttccagtaaataggcatggagttgcatggcggtgacagagccaggcgcaggtgcaggcgcaggccagcatctctcacttcttccactcgttcttttcgtagtcccacttggaggctaagccctggatggggttcaccttcatgtccagcatcctcttggtctgcttggccacccactctttgtcaaagctttgcgggagggggccgtaca

SEQ ID NO: 21841 - DNA, 132 bp, Homo sapiens
  MAP TO CHR18.3; EXPRESSED IN BRAIN, SIGNAL = 7.3; EXPRESSED IN PLACENTA, SIGNAL = 8.8; EXPRESSED IN HELA, SIGNAL = 7.2; EXPRESSED IN FETAL LIVER, SIGNAL =  10; EXPRESSED IN ADULT LIVER, SIGNAL = 9.3; EST_HUMAN HIT: BF106044.1, EVALUE 1.10e-02; NT HIT: M35366.1, EVALUE 1.10e-01
aatgcaggctatcaatgcacctctgcagctgtggctggacatgttcaagagcaagaatccttacattatctctcttcttggcaccactaatttcagtagcacttgctttcaacatgacccttcatccccaag

SEQ ID NO: 21842 - DNA, 104 bp, Homo sapiens
  MAP TO CHR18.3; EXPRESSED IN HELA, SIGNAL = 1.5; EXPRESSED IN FETAL LIVER, SIGNAL = 0.95; EXPRESSED IN ADULT LIVER, SIGNAL = 1.5; SWISSPROT HIT: P46983, EVALUE 6.10e+00; EST_HUMAN HIT: BE547182.1, EVALUE 1.90e+00; NT HIT: Z36940.1, EVALUE 8.40e-02
ataactgagtgggtgaaggtgtcaacaattactaatgaaaaaagggcaaatatggcacagaaatcggatggtaataagcttggttttgatgaattaaagttcag

SEQ ID NO: 21843 - DNA, 206 bp, Homo sapiens
  MAP TO CHR16.3; EXPRESSED IN BONE MARROW, SIGNAL =   1; EXPRESSED IN ADULT LIVER, SIGNAL = 0.96; EXPRESSED IN PLACENTA, SIGNAL = 0.84; SWISSPROT HIT: O43747, EVALUE 1.00e-24; EST_HUMAN HIT: BI464498.1, EVALUE 1.00e-111; NT HIT: gi4501978, EVALUE 1.00e-112
agaggatgccagcccccatcagattgcgggagctgatccggaccatccggacagcccgaacccaagctgaagaacgagaaatgatccagaaagaatgtgctgcaatccggtcatcttttagagaagaagacaatacataccgatgtcggaatgtggcaaaattactgtatatgcacatgctgggctaccctgctcactttggacag

SEQ ID NO: 21844 - DNA, 142 bp, Homo sapiens
  MAP TO CHR18.3; EXPRESSED IN PLACENTA, SIGNAL = 1.6; EXPRESSED IN LUNG, SIGNAL = 2.1; EXPRESSED IN BONE MARROW, SIGNAL = 2.5; EXPRESSED IN FETAL LIVER, SIGNAL = 1.8; EXPRESSED IN BRAIN, SIGNAL = 2.2; EXPRESSED IN ADULT LIVER, SIGNAL = 1.7; EST_HUMAN HIT: AV694115.1, EVALUE 4.50e-02; NT HIT: AF110520.1, EVALUE 7.50e+00
atcacctccatgttgagtgaagtgtccagccaaaagcttagtacttccaggagccctaggcatccaccaattctgatgctttcagacttcttctgatccaccctcatgtttccatggccatctccccagctcaaggtttggt

SEQ ID NO: 21845 - DNA, 168 bp, Homo sapiens
  MAP TO CHR14.3; EXPRESSED IN PLACENTA, SIGNAL = 3.5; EXPRESSED IN ADULT LIVER, SIGNAL = 3.6; EXPRESSED IN HELA, SIGNAL = 3.1; NT HIT: gi9624966, EVALUE 2.30e+00; SWISSPROT HIT: Q9Y2X9, EVALUE 1.50e+00
ttggcctccaaataagtggcattcttggattgtcttctaatgagctggctgatggggctgcaagcaatctatgctttcgattaatcagccaaggggaaactagagccgcaaaaaaacaaactactggcattatcaccacaggaacactgggcatgacaatgatgacgt

SEQ ID NO: 21846 - DNA, 80 bp, Homo sapiens
  MAP TO CHR14.3; EXPRESSED IN FETAL LIVER, SIGNAL = 4.8; EXPRESSED IN ADULT LIVER, SIGNAL = 3.1; EXPRESSED IN BRAIN, SIGNAL = 3.4; EST_HUMAN HIT: AI051572.1, EVALUE 1.00e-37
tgcttcactcggtagcgctccattcctaatctttttaaggacaaattcatcaacttggcgttaaagtctatcagtaacat

SEQ ID NO: 21847 - DNA, 299 bp, Homo sapiens
  MAP TO CHR18.3; EXPRESSED IN FETAL LIVER, SIGNAL = 1.6; EXPRESSED IN BRAIN, SIGNAL = 1.7; EXPRESSED IN ADULT LIVER, SIGNAL = 1.2; EXPRESSED IN PLACENTA, SIGNAL = 1.4; EXPRESSED IN LUNG, SIGNAL = 0.99; NT HIT: AF287911.1, EVALUE 7.00e-02; SWISSPROT HIT: Q9Y6W5, EVALUE 3.50e+00
gcagtaggcttggggagccagcgtttgggcaactcccaggctctaacttcctgcttccatcaacatgcttctcattgtaattcactttttcacttttccagagcctgctggacaagaagtttcccactatagaccatgagcattcttttctgttgccatccaccctcagggtttgaaaattatgaaccccgttgctggggcagagcaactttggagtgatttgaatggtgatcagcaggtacaaatatctgaacaccatattcttcctggacactttataattcttattagtttggcat

SEQ ID NO: 21848 - DNA, 166 bp, Homo sapiens
  MAP TO CHR19.3; EXPRESSED IN HELA, SIGNAL =  17; EXPRESSED IN HEART, SIGNAL = 3.9; EXPRESSED IN FETAL LIVER, SIGNAL = 7.5; EXPRESSED IN ADULT LIVER, SIGNAL = 4.7; NT HIT: gi14759311, EVALUE 1.00e-88; SWISSPROT HIT: P54726, EVALUE 5.00e-18; EST_HUMAN HIT: BF736815.1, EVALUE 2.00e-88
ccctctctatagcttctttctcctgcggcgtcacctggatgtagttcatctgcggggcctcctctcctatggcgcccacctccccctccacatctgagatgtccgccagctccccagggggctcgttcagcatctggatgaactgctcctggtgccggctgatttg

SEQ ID NO: 21849 - DNA, 138 bp, Homo sapiens
  MAP TO CHR19.3; EXPRESSED IN ADULT LIVER, SIGNAL =   1; EXPRESSED IN PLACENTA, SIGNAL = 1.5; SWISSPROT HIT: P52785, EVALUE 1.20e+00; EST_HUMAN HIT: BG740598.1, EVALUE 7.00e-72; NT HIT: gi13376163, EVALUE 5.00e-72
attctgaagaccaccctcacccaccgcaagacaggcatcccatgcttgacccccagcgagctcgaggccttcctttataacttctcacagcctggtggcctcactgggcccctcaactactaccgaaacctcttcagg

SEQ ID NO: 21850 - DNA, 79 bp, Homo sapiens
  MAP TO CHR19.3; EXPRESSED IN ADULT LIVER, SIGNAL = 2.6; EXPRESSED IN HELA, SIGNAL =   4; EXPRESSED IN HEART, SIGNAL = 4.4; EXPRESSED IN LUNG, SIGNAL = 3.4; EXPRESSED IN FETAL LIVER, SIGNAL = 4.9; SWISSPROT HIT: O95167, EVALUE 3.00e-09; EST_HUMAN HIT: AA255557.1, EVALUE 2.00e-36; NT HIT: gi4758771, EVALUE 1.00e-36
cctgggtagttgtagggcgtggccttgttgatcatgacggagtacttgaagtaggggctcaatgggggcagaattacag

SEQ ID NO: 21851 - DNA, 111 bp, Homo sapiens
  MAP TO CHR18.3; EXPRESSED IN FETAL LIVER, SIGNAL = 1.3; EXPRESSED IN ADULT LIVER, SIGNAL = 1.4; EXPRESSED IN BRAIN, SIGNAL = 1.4; EST_HUMAN HIT: BE512677.1, EVALUE 5.30e-01; NT HIT: gi15320657, EVALUE 3.60e-01
cgaggactggggcagtatgggacaggtgtttgtccttggttcttccagctccagcaacagtttggttttgctgtgatctgttcttagcagcttctctgctcatgttccagc

SEQ ID NO: 21852 - DNA, 203 bp, Homo sapiens
  MAP TO CHR14.3; EXPRESSED IN LUNG, SIGNAL = 1.2; EXPRESSED IN ADULT LIVER, SIGNAL = 0.99; SWISSPROT HIT: Q12389, EVALUE 6.40e-01
ctcatggagccggctttggccagcaattgtgatgctcctgacagcgtttccattgtcagctcttttaaatcccagcatctgcagcccgttttctctctgcggtatggttttgcttccctgacatgctgcctctgctaacaactgctccagtttctctactgctggtgctgtggcttctcctgtctgtctgggcccagtcactc

SEQ ID NO: 21853 - DNA, 108 bp, Homo sapiens
  MAP TO CHR19.3; EXPRESSED IN ADULT LIVER, SIGNAL = 2.4; EXPRESSED IN BRAIN, SIGNAL = 3.2; EXPRESSED IN PLACENTA, SIGNAL = 2.7; EXPRESSED IN LUNG, SIGNAL = 3.5; EXPRESSED IN FETAL LIVER, SIGNAL = 2.8; NT HIT: AF166267.1, EVALUE 2.00e-08; SWISSPROT HIT: Q05090, EVALUE 3.00e-03; EST_HUMAN HIT: BG122566.1, EVALUE 4.00e-54
ccggctgctcctgccgccgcctcgcctcggagccgggagaccagcttctcacttcctcgcctgatagactcacggatcttggagagtgagctgctgcggcgaagggcc

SEQ ID NO: 21854 - DNA, 147 bp, Homo sapiens
  MAP TO CHR18.3; EXPRESSED IN BRAIN, SIGNAL = 1.3; EXPRESSED IN ADULT LIVER, SIGNAL = 1.4; NT HIT: gi14727537, EVALUE 5.00e-01; EST_HUMAN HIT: BI549164.1, EVALUE 7.40e-01
ccatcaattctgctgtctcaaactggagcttaattccttgtatgagacccatatgttcaaaactgtctagcttgggggtttcttgagggagtaggcttgcatgctttgattccataaaaatctgattattttctccttcatctaagc

SEQ ID NO: 21855 - DNA, 226 bp, Homo sapiens
  MAP TO CHR14.3; EXPRESSED IN FETAL LIVER, SIGNAL = 0.78; EXPRESSED IN LUNG, SIGNAL = 2.7; EXPRESSED IN ADULT LIVER, SIGNAL = 1.2; EXPRESSED IN HELA, SIGNAL = 1.7; EXPRESSED IN PLACENTA, SIGNAL = 1.1; SWISSPROT HIT: P05844, EVALUE 5.60e+00; EST_HUMAN HIT: AV731927.1, EVALUE 1.90e-02; NT HIT: gi9964314, EVALUE 8.10e-01
aagtgtatcataaatgattattggtatataaaaatacatgctccagaagatacagagatagatacttgtaaaagtgaactaaaaatttttgcactttctgaacaaagcccacctcttttaggttgtaaccttgccaagaaaatgattgtcctttacaatattatgtatagttatatgctttatatttatggaaatctgatgtgtgacacagaacgcatagtgttgg

SEQ ID NO: 21856 - DNA, 115 bp, Homo sapiens
  MAP TO CHR18.3; EXPRESSED IN PLACENTA, SIGNAL = 1.2; EXPRESSED IN HELA, SIGNAL = 1.5; EXPRESSED IN FETAL LIVER, SIGNAL = 1.5; EXPRESSED IN BRAIN, SIGNAL = 1.3; EXPRESSED IN ADULT LIVER, SIGNAL = 1.4; SWISSPROT HIT: Q9UPE1, EVALUE 5.00e-04; EST_HUMAN HIT: AA309978.1, EVALUE 1.00e-32; NT HIT: AJ318054.1, EVALUE 9.00e-33
tttttggtgaaaaattccttggaatgcttccctggcacagtgagcttgtgagtcaccttccccagaagttctgtgatcaatgcaatgtgatcttcatcttgagtgtgctctttcc

SEQ ID NO: 21857 - DNA, 148 bp, Homo sapiens
  MAP TO CHR16.3; EXPRESSED IN ADULT LIVER, SIGNAL = 2.3; EXPRESSED IN BRAIN, SIGNAL = 1.2; EXPRESSED IN HELA, SIGNAL = 3.2; EXPRESSED IN FETAL LIVER, SIGNAL = 1.3; SWISSPROT HIT: P54851, EVALUE 2.00e-20; EST_HUMAN HIT: BG541996.1, EVALUE 8.00e-78; NT HIT: gi14776462, EVALUE 5.00e-78
catgacattagctggatgatggaggttaggacaaacctctctccctgcttcaggcggaagagctggagcacgaagatgaagaaggcgatgcagcagagaatggtggagaggatcatggtggcctggaccgcctgcagcgtggagtact

SEQ ID NO: 21858 - DNA, 147 bp, Homo sapiens
  MAP TO CHR16.3; EXPRESSED IN HELA, SIGNAL = 0.99; EXPRESSED IN LUNG, SIGNAL =   1; EXPRESSED IN BRAIN, SIGNAL = 1.3; EXPRESSED IN ADULT LIVER, SIGNAL = 1.1; SWISSPROT HIT: P53706, EVALUE 1.20e+00; NT HIT: gi9910569, EVALUE 2.00e+00
tggagaagtcacaaaaggtttctgaacagaagaagaatctgattggatatgatgcttataggggagctggactgggaagacaaaactcaggtttgaaaagctggtgggaagatgtggagcagtcaagacgagaggtagcaaagagag

SEQ ID NO: 21859 - DNA, 283 bp, Homo sapiens
  MAP TO CHR14.3; EXPRESSED IN HELA, SIGNAL = 6.2; EXPRESSED IN HEART, SIGNAL = 2.1; EXPRESSED IN FETAL LIVER, SIGNAL = 6.6; EXPRESSED IN ADULT LIVER, SIGNAL = 3.8; NT HIT: gi14754020, EVALUE 0.00e+00; SWISSPROT HIT: P55010, EVALUE 5.00e-07; EST_HUMAN HIT: BI549256.1, EVALUE 0.00e+00
cagagctgttgcgcagccattggtacctgtattggggaaacatagcatacaagcaagaagcttacagcctcagtggcgaaaattttttcatgtcagagaccgagaactcttgcagtcgtttatgtcatcccttcttctccagacagaagataccaaaaagttgcaatcaaagatctcttcatcttattgataaagccactaataagccaaaatgtctgtcaatgtcaaccgcagcgtgtcagaccagttctatcgctacaagatgccccgtctgattgccaag

SEQ ID NO: 21860 - DNA, 103 bp, Homo sapiens
  MAP TO CHR19.3; EXPRESSED IN LUNG, SIGNAL = 1.8; EXPRESSED IN ADULT LIVER, SIGNAL = 1.1; EXPRESSED IN PLACENTA, SIGNAL = 1.2; NT HIT: U38912.1, EVALUE 3.30e-01; EST_HUMAN HIT: AI571106.1, EVALUE 4.00e-51
gtgaaatctgaacggagcagaaactctcgcaagtggtgccgccgccggggcatagaggagcatcgactgtacgaaatggccaaccttcggcgccagttcaagg

SEQ ID NO: 21861 - DNA, 221 bp, Homo sapiens
  MAP TO CHR16.3; EXPRESSED IN HEART, SIGNAL =   3; EXPRESSED IN HELA, SIGNAL = 3.6; EXPRESSED IN LUNG, SIGNAL = 3.2; EXPRESSED IN ADULT LIVER, SIGNAL = 2.6; EST_HUMAN HIT: BI766146.1, EVALUE 1.00e-121; NT HIT: gi14775463, EVALUE 1.00e-121; SWISSPROT HIT: P14380, EVALUE 1.80e+00
ggaagagaagacaaggtggcctctcattagaagaagaggaagaggaggatgccaattcagaatctgagggaagcagtagtgaggaggaagatgacgctgcagagcaggaaaaaggcattggatcagaggatgccaggaaaaagaaggaggacgaactctgggccagcttcctcaatgatgtgggaccaaaatcaaaagtgcccccaagtacacaagttaag

SEQ ID NO: 21862 - DNA, 86 bp, Homo sapiens
  MAP TO CHR14.3; EXPRESSED IN HELA, SIGNAL = 3.6; EXPRESSED IN ADULT LIVER, SIGNAL = 2.5; EXPRESSED IN PLACENTA, SIGNAL = 1.3; SWISSPROT HIT: P00426, EVALUE 1.60e+00; EST_HUMAN HIT: AA807805.1, EVALUE 5.00e-16; NT HIT: AF233074.1, EVALUE 8.00e-20
tctggttccagagcccaaatcactgatgctgctttgtgggcattcagacagttatatgattttgctagtgcagttggcatcctaga

SEQ ID NO: 21863 - DNA, 192 bp, Homo sapiens
  MAP TO CHR18.3; EXPRESSED IN ADULT LIVER, SIGNAL = 0.92; EST_HUMAN HIT: BI772098.1, EVALUE 3.00e-07; SWISSPROT HIT: Q28614, EVALUE 2.00e-28; NT HIT: AF349446.1, EVALUE 1.00e-104
aggggcatttccatctctgtccaggtgatattgggcactgaagacacaggctctaccagtgttgtggggaagaagaggttgtagtggcctgtggctgcaaggtacaaggtgactgcaatgttgaagggcagagtgaagaccgggaggtcccacttgctgaagatggaattcaaggcactagaaagaactggg

SEQ ID NO: 21864 - DNA, 149 bp, Homo sapiens
  MAP TO CHR16.3; EXPRESSED IN ADULT LIVER, SIGNAL =  12; EXPRESSED IN PLACENTA, SIGNAL = 0.82; EXPRESSED IN FETAL LIVER, SIGNAL =   1; SWISSPROT HIT: Q29550, EVALUE 2.00e-18; EST_HUMAN HIT: AL540369.1, EVALUE 5.00e-39; NT HIT: D21085.1, EVALUE 8.00e-40
cgcattcctaaggaattgattccagaagccattgagaagtacttaggaggaacagatgaccctgtcaagaagaaagacctgttcctggacttaatgggggacgtactgttcggtgtcccatctgtgactgtggcccggaaccacagagg

SEQ ID NO: 21865 - DNA, 154 bp, Homo sapiens
  MAP TO CHR14.3; EXPRESSED IN ADULT LIVER, SIGNAL = 0.92; EXPRESSED IN LUNG, SIGNAL = 1.1; NT HIT: gi15375327, EVALUE 1.00e-81; SWISSPROT HIT: Q9Y5Z0, EVALUE 5.80e+00; EST_HUMAN HIT: BF885867.1, EVALUE 2.00e-81
ctttcacttgcacgaaatccagctggtggatggattgcagcagagggctgttgtccagactcaagtcaaagtccgtggtcatccttggagtgagtgtgcctttaccccactgatcctcagtcaggtgcactcttcttatgagggcgtcagaaat

SEQ ID NO: 21866 - DNA, 84 bp, Homo sapiens
  MAP TO CHR19.3; EXPRESSED IN LUNG, SIGNAL = 5.3; EXPRESSED IN ADULT LIVER, SIGNAL = 3.2; EXPRESSED IN PLACENTA, SIGNAL =   4; EXPRESSED IN HELA, SIGNAL = 5.1; NT HIT: gi16162962, EVALUE 4.00e-40; SWISSPROT HIT: P05129, EVALUE 9.00e-12; EST_HUMAN HIT: BI757265.1, EVALUE 6.00e-40
tctgcagctttgtggttcatcgacgatgccacgaatttgtgaccttcgagtgtccaggcgctgggaagggcccccagacggacg

SEQ ID NO: 21867 - DNA, 140 bp, Homo sapiens
  MAP TO CHR16.3; EXPRESSED IN FETAL LIVER, SIGNAL = 2.1; EXPRESSED IN BRAIN, SIGNAL =   2; EXPRESSED IN ADULT LIVER, SIGNAL = 1.1; EXPRESSED IN PLACENTA, SIGNAL = 1.6; EXPRESSED IN LUNG, SIGNAL = 3.9; NT HIT: AF287892.1, EVALUE 7.40e+00; SWISSPROT HIT: Q03600, EVALUE 8.90e-01
cagctcccgtagatgtgggctctgccgggtgttccttgcaaggcgcccgcagatgccgaggcagacagaggagaccaccaagatgcccaggtcaggggccaccagccggatggcgttggggatgtccttcaggtccagcc

SEQ ID NO: 21868 - DNA, 114 bp, Homo sapiens
  MAP TO CHR18.3; EXPRESSED IN BONE MARROW, SIGNAL =   1; EXPRESSED IN BRAIN, SIGNAL = 1.6; EXPRESSED IN ADULT LIVER, SIGNAL = 1.6; NT HIT: gi16165088, EVALUE 4.00e-10; SWISSPROT HIT: Q9Y5Q5, EVALUE 6.00e-04; EST_HUMAN HIT: BE185505.1, EVALUE 6.00e-10
ctccttgtgaaggcaacacattcttctgccatagtaacatgtgtattaataatactttggtctgcaatggactccagaactgtgtgtatccttgggatgaaaatcactgtaaag

SEQ ID NO: 21869 - DNA, 193 bp, Homo sapiens
  MAP TO CHR16.3; EXPRESSED IN BRAIN, SIGNAL = 4.7; EXPRESSED IN ADULT LIVER, SIGNAL =  14; EXPRESSED IN FETAL LIVER, SIGNAL =  40; NT HIT: gi16158226, EVALUE 2.00e-72; SWISSPROT HIT: P17073, EVALUE 1.00e-30; EST_HUMAN HIT: AA182042.1, EVALUE 9.00e-69
ggttttctgggcatcaaggtgaaggtcatgctgccctgggaccccgctggtaagactggccctaagaagcctctgcctgaccacgtgagcatcatggaacccaaagatgaggtagtgcccaccactcccatctcagaacagaagggtgggaagccagagccacctgctatgccccagccagtccccatagcat

SEQ ID NO: 21870 - DNA, 152 bp, Homo sapiens
  MAP TO CHR19.3; EXPRESSED IN ADULT LIVER, SIGNAL = 1.3; EXPRESSED IN PLACENTA, SIGNAL = 0.89; EXPRESSED IN HEART, SIGNAL = 2.2e+02; SWISSPROT HIT: P08922, EVALUE 6.70e-01; EST_HUMAN HIT: AL532430.1, EVALUE 3.00e-80; NT HIT: X90780.1, EVALUE 2.00e-80
ccatccgccatgctgagactcaggccgggaatggcaggaggcagggcgaggacaggggcgtttggagggtcagtgagggggccgcccgggtgaccttcagggtcccagggaccgtcagtctcctccgggctgcttgagactccccgaggaca

SEQ ID NO: 21871 - DNA, 247 bp, Homo sapiens
  MAP TO CHR18.3; EXPRESSED IN ADULT LIVER, SIGNAL = 1.8; EXPRESSED IN PLACENTA, SIGNAL = 2.4; EXPRESSED IN LUNG, SIGNAL = 2.6; NT HIT: AF047880.1, EVALUE 8.90e-01; SWISSPROT HIT: O60583, EVALUE 7.30e-01; EST_HUMAN HIT: AI097462.1, EVALUE 1.30e+00
gctgtgggaaaactgctggtagagaggaagaagctggcaatgggcgtgccagctgatgatgagtggaacaaagtccacgaggagtgggaggtggaagctcggacggagcaggtggcaaaggggaactcatccactgagacattaggaaagaagacgtcagtgtgttcacatgcggggcctaacctggtggttggatgttcttgtcaaaagaggaataatgaagtggatgggcttgggcaggggcctt

SEQ ID NO: 21872 - DNA, 104 bp, Homo sapiens
  MAP TO CHR19.3; EXPRESSED IN BONE MARROW, SIGNAL =   6; EXPRESSED IN FETAL LIVER, SIGNAL = 4.3; EXPRESSED IN ADULT LIVER, SIGNAL = 2.3; EXPRESSED IN PLACENTA, SIGNAL =   3; EXPRESSED IN HELA, SIGNAL = 5.1; EXPRESSED IN LUNG, SIGNAL = 5.2; NT HIT: AF246218.1, EVALUE 2.00e-11; SWISSPROT HIT: P73077, EVALUE 7.00e-01; EST_HUMAN HIT: BI908500.1, EVALUE 3.00e-42
cctttaagtcctcctgttgcagttcgtcgcctgcagcttcgagaggagttggatcgatcttcttgtggaaacgtcctcttcaatggttacctgccgccaccagg

SEQ ID NO: 21873 - DNA, 136 bp, Homo sapiens
  MAP TO CHR18.3; EXPRESSED IN BRAIN, SIGNAL = 1.1; EXPRESSED IN ADULT LIVER, SIGNAL = 1.2; EXPRESSED IN PLACENTA, SIGNAL =   1; EXPRESSED IN LUNG, SIGNAL = 1.2; EXPRESSED IN FETAL LIVER, SIGNAL = 1.5; EST_HUMAN HIT: AA329142.1, EVALUE 6.70e-01
ttcacgactgcactttccaggatggctggcctggatcttctgcttgcaggcctgtgcgtgcttctccttccccttgaagctccccttaaagccctcaaaactgtgcttcactgaaggaaccagggcgaaaaagggc

SEQ ID NO: 21874 - DNA, 105 bp, Homo sapiens
  MAP TO CHR19.3; EXPRESSED IN LUNG, SIGNAL = 4.1; EXPRESSED IN ADULT LIVER, SIGNAL = 3.7; EXPRESSED IN HELA, SIGNAL = 5.1; NT HIT: gi15301803, EVALUE 6.00e-52; SWISSPROT HIT: Q9UPR5, EVALUE 4.00e-14
gaaaactcttcaggtgaagatagttgatgacgaggaatatgagaaaaaggataatttcttcattgagctgggccagccccagtggcttaagcgagggatttcagg

SEQ ID NO: 21875 - DNA, 121 bp, Homo sapiens
  MAP TO CHR14.3; EXPRESSED IN PLACENTA, SIGNAL = 1.6; EXPRESSED IN ADULT LIVER, SIGNAL = 1.5; SWISSPROT HIT: P49750, EVALUE 4.00e-14; EST_HUMAN HIT: AU126079.1, EVALUE 8.00e-28; NT HIT: gi14784506, EVALUE 6.00e-28
gataaggaggtagaatttggaggacctgcacccagagttctaagcctggatgattacttcatcactgaagtggaaaaagaagaaaaagatccagattctggaaagaaagtgaaaaagaagg

SEQ ID NO: 21876 - DNA, 135 bp, Homo sapiens
  MAP TO CHR16.3; EXPRESSED IN ADULT LIVER, SIGNAL =   2; EXPRESSED IN HELA, SIGNAL = 3.6; EXPRESSED IN PLACENTA, SIGNAL = 2.3; EXPRESSED IN LUNG, SIGNAL = 3.4; NT HIT: gi16164692, EVALUE 1.00e-69; EST_HUMAN HIT: AW749600.1, EVALUE 2.00e-69; SWISSPROT HIT: P34692, EVALUE 3.00e-06
gttgtggacctggcctattagcagatgccaagatgcgggtatttgaacgttcagtgtattttggtgattcctgccaagatgttcttagcatgcttggctctccacacaaagtcttctataaatcagaagacaagg

SEQ ID NO: 21877 - DNA, 224 bp, Homo sapiens
  MAP TO CHR14.3; EXPRESSED IN ADULT LIVER, SIGNAL = 1.5; EXPRESSED IN BRAIN, SIGNAL = 1.8; EXPRESSED IN PLACENTA, SIGNAL = 1.3; NT HIT: AF111167.2, EVALUE 1.00e-123; EST_HUMAN HIT: BE217780.1, EVALUE 1.00e-123; SWISSPROT HIT: O83993, EVALUE 1.10e-02
ctggcctgccactcctcctgctatgatgcctgggcagatcccggacccttcggtgaccacaggctccctgccagggcttggccccctgaccgggctccccagctcggccctgactgtggaggagctgaaatacgctgacatccgcaacctcggggccatgattgcacccttgcacttcctggaggtgaaactgggcaagaggccccagcccgtgaaaagtgagg

SEQ ID NO: 21878 - DNA, 120 bp, Homo sapiens
  MAP TO CHR18.3; EXPRESSED IN ADULT LIVER, SIGNAL =   1; EXPRESSED IN BRAIN, SIGNAL = 1.2; EXPRESSED IN PLACENTA, SIGNAL = 1.5; EXPRESSED IN LUNG, SIGNAL = 1.1; EXPRESSED IN FETAL LIVER, SIGNAL = 1.3; NT HIT: AL163206.2, EVALUE 1.00e-01; SWISSPROT HIT: Q15835, EVALUE 2.00e+00; EST_HUMAN HIT: C03650.1, EVALUE 9.10e+00
ctttgtggaaggaaattttttgacatgtttcatcctggaagtcactcaatttctcagtgtttcttttatgcaactgctcaagaaagacttggggaagctcaggaagcaggtggtttggag

SEQ ID NO: 21879 - DNA, 91 bp, Homo sapiens
  MAP TO CHR18.3; EXPRESSED IN BONE MARROW, SIGNAL = 1.1; EXPRESSED IN ADULT LIVER, SIGNAL = 1.2; EXPRESSED IN BRAIN, SIGNAL = 1.1; NT HIT: S79193.1, EVALUE 1.10e+00; EST_HUMAN HIT: BF329551.1, EVALUE 1.60e+00
tgtgtaacagatttaatgagctagcaggtcacctgaatccagctgttcccgaccagctttatgaaacagagaatgcagctagcagtgggag

SEQ ID NO: 21880 - DNA, 239 bp, Homo sapiens
  MAP TO CHR14.3; EXPRESSED IN ADULT LIVER, SIGNAL = 2.1; EXPRESSED IN HELA, SIGNAL = 2.6; EXPRESSED IN HEART, SIGNAL = 3.3; EST_HUMAN HIT: BF853329.1, EVALUE 3.00e-44; SWISSPROT HIT: P28971, EVALUE 8.70e+00; NT HIT: AF040732.1, EVALUE 2.20e-01
cagtgtgagaaccacagggtggtcattgtttgcaagatgttcattcacctttggtttaatgtttttgatgatgatgtgatccaagtgggctctctgcagtgtgaggccagcaaggtgcagtcaccaccccccacagcccagtccctagcattgtggggttggaaacccgatattacccattcatccagaaatactagggttctcttgggccatgagaggaggcatggagtggagatggg

SEQ ID NO: 21881 - DNA, 220 bp, Homo sapiens
  MAP TO CHR14.3; EXPRESSED IN ADULT LIVER, SIGNAL = 2.3; EXPRESSED IN PLACENTA, SIGNAL = 1.6; EXPRESSED IN HEART, SIGNAL =   3; EXPRESSED IN HELA, SIGNAL = 2.2; EXPRESSED IN BONE MARROW, SIGNAL = 1.4; EXPRESSED IN FETAL LIVER, SIGNAL = 2.6; EST_HUMAN HIT: BG563989.1, EVALUE 1.00e-114; SWISSPROT HIT: P76113, EVALUE 4.00e-14; NT HIT: AF282920.1, EVALUE 8.00e-04
attggccatttcttaggttgttccagagtggtgggaatttgtggaacacatgagaaatgcatcctcttgacctcagaactgggctttgatgctgcaattaattataaaaaagacaatgtggcagaacagctccgtgaatcatgcccagctggagtggatgtttattttgacaatgttggtggtaacatcagtgatacagtgataagtcaggttgtttgct

SEQ ID NO: 21882 - DNA, 162 bp, Homo sapiens
  MAP TO CHR14.3; EXPRESSED IN BONE MARROW, SIGNAL = 3.7; EXPRESSED IN FETAL LIVER, SIGNAL = 1.8; EXPRESSED IN ADULT LIVER, SIGNAL = 2.8; EXPRESSED IN BRAIN, SIGNAL = 3.6; EXPRESSED IN HELA, SIGNAL =   3; SWISSPROT HIT: P02440, EVALUE 8.70e-01; NT HIT: AJ252213.1, EVALUE 5.60e-01; EST_HUMAN HIT: BG911429.1, EVALUE 1.00e-52
gcagcggtgacgggtggggcagtgtgagatctgagccgagggcccgcatcaaagtcccctttcggcttctccatctgtgacatgggttgcacctgctctgactgctgcttacgagagatggtgagcagtgttctgtgctgcgtggccgtgactgccgaggtt

SEQ ID NO: 21883 - DNA, 98 bp, Homo sapiens
  MAP TO CHR14.3; EXPRESSED IN BONE MARROW, SIGNAL = 2.3; EXPRESSED IN BRAIN, SIGNAL = 1.8; EXPRESSED IN ADULT LIVER, SIGNAL = 1.5; EXPRESSED IN HELA, SIGNAL = 1.6; EXPRESSED IN PLACENTA, SIGNAL = 1.7; NT HIT: AL161538.2, EVALUE 7.80e-02; EST_HUMAN HIT: AI400204.1, EVALUE 8.00e-46
ggccacacgcatgctgcgtatggtcagtcctgttccacaccttttgcagcatggctccgtagccactgtcgcagttttcagactctttttctcctacc

SEQ ID NO: 21884 - DNA, 229 bp, Homo sapiens
  MAP TO CHR14.3; EXPRESSED IN BONE MARROW, SIGNAL = 1.5; EXPRESSED IN ADULT LIVER, SIGNAL = 1.3; EXPRESSED IN PLACENTA, SIGNAL = 1.4; SWISSPROT HIT: P49619, EVALUE 3.40e+00; NT HIT: U32722.1, EVALUE 2.10e-01; EST_HUMAN HIT: AI248224.1, EVALUE 7.70e-02
atggagttacaagatgatggaatcacgatgggtttagagcacagcttatcaaaggacattatttctattataaacaatgtcttccaagccccctgggggggatcccacacctgccagaaggacgaaaaagcaatcgagtgcaacttatgtcagtctagtatcctctgctatcagcttgcttgtgaactcctggagagactagctcctaaagaagaaagccggctggtgg

SEQ ID NO: 21885 - DNA, 136 bp, Homo sapiens
  MAP TO CHR18.3; EXPRESSED IN ADULT LIVER, SIGNAL = 1.2; EXPRESSED IN BRAIN, SIGNAL = 1.1; EXPRESSED IN PLACENTA, SIGNAL = 1.1; EST_HUMAN HIT: BI559470.1, EVALUE 4.30e-02; SWISSPROT HIT: P36431, EVALUE 1.20e+00
atgaaggccacaggcttctgccctgactccaggacggccggttaagcacacttgcttatcaccatgctggctcctgcctctcagggcgtaggaagctgttattttcatgtttagagtgtaaacatctgcattgcac

SEQ ID NO: 21886 - DNA, 140 bp, Homo sapiens
  MAP TO CHR16.3; EXPRESSED IN FETAL LIVER, SIGNAL = 4.4; EXPRESSED IN LUNG, SIGNAL =   5; EXPRESSED IN ADULT LIVER, SIGNAL = 4.9; EXPRESSED IN BRAIN, SIGNAL = 4.1; EXPRESSED IN PLACENTA, SIGNAL = 5.1; EXPRESSED IN HELA, SIGNAL = 5.2; NT HIT: gi4508014, EVALUE 3.00e-73; EST_HUMAN HIT: BE407859.1, EVALUE 7.00e-69; SWISSPROT HIT: P16310, EVALUE 7.70e+00
ggctcctggccagaagctggagggggcttggccaaaaagagggagaaacaactcagctgttctttctagctctgaaatagaaaatgtctgcagacggcggaggcatccaggacacccaggacaaggagacacccccggag

SEQ ID NO: 21887 - DNA, 144 bp, Homo sapiens
  MAP TO CHR16.3; EXPRESSED IN BONE MARROW, SIGNAL = 1.2; EXPRESSED IN FETAL LIVER, SIGNAL =   1; EXPRESSED IN ADULT LIVER, SIGNAL = 1.4; EXPRESSED IN BRAIN, SIGNAL = 1.9; SWISSPROT HIT: Q90270, EVALUE 7.70e+00; NT HIT: AB004824.1, EVALUE 1.90e+00
ttactcagtccctctgttgtcaaggaagtccaacgccaccagcactagatccttcaacaatgcagagtcctcccgcaaatgaatctgactttgcctgtaaaccgcggagagtttcaaaaactggaaagcattacaggtggccag

SEQ ID NO: 21888 - DNA, 219 bp, Homo sapiens
  MAP TO CHR14.3; EXPRESSED IN FETAL LIVER, SIGNAL = 1.3; EXPRESSED IN BONE MARROW, SIGNAL = 1.3; EXPRESSED IN ADULT LIVER, SIGNAL = 1.2; SWISSPROT HIT: Q01500, EVALUE 6.80e+00; NT HIT: AF217251.1, EVALUE 7.80e-01; EST_HUMAN HIT: BG436569.1, EVALUE 2.90e-01
atgaattggcggtggatgaaattggtcttagctcattcctcaagaccttccccgcccagtcactcagtgtgtggaagtggaaagtgtttaacaaacagggtagaattaacttccaaaacagaggtaaaaactcccaggccacccctaccctgcatcctgtggtgtacaactacaggaactcaacaagggcaaaacaccaccaagaactcaaagacgcaa

SEQ ID NO: 21889 - DNA, 143 bp, Homo sapiens
  MAP TO CHR18.3; EXPRESSED IN PLACENTA, SIGNAL = 3.4; EXPRESSED IN LUNG, SIGNAL = 3.6; EXPRESSED IN ADULT LIVER, SIGNAL = 3.3; EXPRESSED IN BRAIN, SIGNAL = 2.3; EST_HUMAN HIT: BF344579.1, EVALUE 7.10e-01; SWISSPROT HIT: gi462312, EVALUE 5.90e+00
agtctttaagttgtaccttgcaattaaaagggctccaactagaacagacatgttgtggtcagggaaagacatgatgacgagggtagtgatgagtagctttatctttgggagttcacaaagttttaggccaggtatgatagaac

SEQ ID NO: 21890 - DNA, 246 bp, Homo sapiens
  MAP TO CHR14.3; EXPRESSED IN ADULT LIVER, SIGNAL = 3.1; EXPRESSED IN PLACENTA, SIGNAL = 2.9; EXPRESSED IN LUNG, SIGNAL = 2.6; EXPRESSED IN BONE MARROW, SIGNAL = 3.3; EST_HUMAN HIT: BE620155.1, EVALUE 1.30e+00; SWISSPROT HIT: P07676, EVALUE 6.20e-01
ctgtataagcaccagcacaggctccgacaacatgcaggtgaggaaggggacagaagggcctaagatcccaccatggagagagagggaggagaggggaggggggcttgtagcatcagcttatcagaaggaccccctggtgcaccagaagattgtagtcctgggtgaacaagagctgccctcgggggttagcagcctgttgcttctgttgacttggctttctgccctgcagccagtgaaacctgacag

SEQ ID NO: 21891 - DNA, 497 bp, Homo sapiens
  MAP TO CHR16.3; EXPRESSED IN BRAIN, SIGNAL = 1.5; EXPRESSED IN ADULT LIVER, SIGNAL = 1.7; EXPRESSED IN HELA, SIGNAL = 3.1; EXPRESSED IN HEART, SIGNAL = 2.8; EXPRESSED IN LUNG, SIGNAL = 2.5; EST_HUMAN HIT: AW295242.1, EVALUE 3.00e-77; SWISSPROT HIT: O75351, EVALUE 3.00e-25; NT HIT: AF282903.1, EVALUE 0.00e+00
cccttgccctcactctggttctctttgactggcttcttgccgtgtttctctttgcttcgtaaataatccttcagcttctcggcccggtctaggtactgcacgcacttggctcgaatgctctccttggccttgtcgctgtgggcctcatctgtgaaagggaacacagaggggcccctgtgaggctcgtgcgccaccccctctcctccgctcccctctggagtgcggcagcctgaggacccctcgtgtgactcacacttgatagcgtggaggaagtactccaccgcatgctggtacagccgcagcgcctcctcgtagttcttggctttgtcctcctctgtggctttcgtcaccagatcaatggctttctggaaaggcaaagcaaatggctcagtgcttcctcggagaggtggaaagtccctggggtcacaggcatggggatgaaacgtgacgagggatgccgctgggcctgtggatttattgcttgcgggccatttcat

SEQ ID NO: 21892 - DNA, 183 bp, Homo sapiens
  MAP TO CHR16.3; EXPRESSED IN FETAL LIVER, SIGNAL = 4.6; EXPRESSED IN LUNG, SIGNAL = 7.9; EXPRESSED IN ADULT LIVER, SIGNAL =   7; EXPRESSED IN PLACENTA, SIGNAL = 7.4; EXPRESSED IN HELA, SIGNAL = 7.6; SWISSPROT HIT: O48520, EVALUE 3.30e+00; NT HIT: gi12621103, EVALUE 2.50e+00; EST_HUMAN HIT: BG217155.1, EVALUE 2.40e-01
gactgctgagttcttgtgtagaacgcttccatggccccaccttcatccagccccgaatacagtgggtagagccagcatcagctacagagagctgtgatctgtgctcgcagtgtagccggagagatggcatcatcatcatcatcaccgtggccagcacaaatggaacatacaccacgtaccagg

SEQ ID NO: 21893 - DNA, 202 bp, Homo sapiens
  MAP TO CHR14.3; EXPRESSED IN PLACENTA, SIGNAL = 1.6; EXPRESSED IN FETAL LIVER, SIGNAL = 1.3; EXPRESSED IN BONE MARROW, SIGNAL = 2.2; EXPRESSED IN LUNG, SIGNAL = 1.5; EXPRESSED IN ADULT LIVER, SIGNAL = 1.7; EXPRESSED IN BRAIN, SIGNAL = 1.8; SWISSPROT HIT: P93844, EVALUE 6.40e-01; NT HIT: AF371262.1, EVALUE 4.60e-02; EST_HUMAN HIT: BG423057.1, EVALUE 2.60e-01
cacttccacacttatgcccccagagttgggtggcagtgtgagcaatggaaaattcctttgaccccagaactgagctgtgaaggtcatgccacggggtgcatctttccaaaatagaaccaatggatctcagctcagcttcactttctttctctaaagtccaagatacgttcagtagccccataatctcctctgtcttgaaggg

SEQ ID NO: 21894 - DNA, 307 bp, Homo sapiens
  MAP TO CHR14.3; EXPRESSED IN ADULT LIVER, SIGNAL = 0.96; EXPRESSED IN PLACENTA, SIGNAL = 0.98; SWISSPROT HIT: Q9SEH4, EVALUE 3.00e-06; NT HIT: AF329674.1, EVALUE 1.10e+00; EST_HUMAN HIT: BF038259.1, EVALUE 1.10e-01
ggtcacccccagtactggagggagcatcttgctgaagccctccatgaagggccacccctctgcaatcgcaccatctgtaaatggtcacccctctgaaatcacaccatccatgaacggccatgcctctgaactcaaaccatccaggaatggctgctcctctgaaatcacaccatctgtgaatggccacccctctgaaatcacacaacccgtgaatggccacccctctgaaatcacactgaccatgaatggctacctctccaaaattacagctgtgctgctctgggttcaacttgcccaattctgctga

SEQ ID NO: 21895 - DNA, 62 bp, Homo sapiens
  MAP TO CHR16.3; EXPRESSED IN HELA, SIGNAL = 1.4; EXPRESSED IN LUNG, SIGNAL = 1.1; EXPRESSED IN BONE MARROW, SIGNAL = 1.2; EXPRESSED IN BRAIN, SIGNAL = 1.5; EXPRESSED IN ADULT LIVER, SIGNAL = 1.5; EST_HUMAN HIT: BG282055.1, EVALUE 1.00e+00
tgaaaatgatccccgttggttccattttgtctgtccgaagcctgacaccaatgtgggtcatc

SEQ ID NO: 21896 - DNA, 407 bp, Homo sapiens
  MAP TO CHR18.3; EXPRESSED IN HELA, SIGNAL = 5.8; EXPRESSED IN BONE MARROW, SIGNAL = 2.1; EXPRESSED IN LUNG, SIGNAL = 6.8; EXPRESSED IN ADULT LIVER, SIGNAL = 2.6; EXPRESSED IN PLACENTA, SIGNAL = 4.9; EST_HUMAN HIT: BG324693.1, EVALUE 9.00e-06; SWISSPROT HIT: P55289, EVALUE 8.00e-08; NT HIT: gi16306488, EVALUE 1.00e-115
ggtacttactacaccattctttggcgaaggctattcagcagtggtgacctcttccaatccaacactctacagattattatctctggactcccagctgacaccctgccggaggcaagagctactaagccaactggaactgtgccttttctcttgtcaaggtttttttcttacacaggaaaaagaaagaaaaaaaaaagatgaagttgggcaaagtggagttctgccattttctgcagctaatagctcttttcctgtgtttttctgggatgagtcaagcagaactctcaaggtccagatcaaagccctatttccaatcagggaggtcccggaccaagcgcagctgggtgtggaatcagttctttgtgctggaggaatacatgggttcagaccccctctatgtaggaaag

SEQ ID NO: 21897 - DNA, 111 bp, Homo sapiens
  MAP TO CHR18.3; EXPRESSED IN HEART, SIGNAL = 2.6; EXPRESSED IN BONE MARROW, SIGNAL = 1.8; EXPRESSED IN BRAIN, SIGNAL = 1.7; EXPRESSED IN ADULT LIVER, SIGNAL = 2.2; EXPRESSED IN PLACENTA, SIGNAL = 1.8; EST_HUMAN HIT: AV686113.1, EVALUE 7.00e-56; NT HIT: AB033040.1, EVALUE 3.60e-01
gcctcaaaggcaaaattcacctggctttgaagccaaatctgtatggtgctgagaatgaaatctgtccgtctaagatgacaataagaccttccagggaaccaggcagaaagg

SEQ ID NO: 21898 - DNA, 154 bp, Homo sapiens
  MAP TO CHR14.3; EXPRESSED IN PLACENTA, SIGNAL = 1.9; EXPRESSED IN HELA, SIGNAL = 3.4; EXPRESSED IN BONE MARROW, SIGNAL = 2.3; EXPRESSED IN ADULT LIVER, SIGNAL = 1.8; EST_HUMAN HIT: AA399388.1, EVALUE 2.00e-81; SWISSPROT HIT: O43526, EVALUE 6.70e-01; NT HIT: gi14784657, EVALUE 1.00e-81
taacaaacctgaatttggcaactggcatcataaacagaagcagtgcttcagctcccccaaccctccgacccatcatcagtcctagtggcccgacatggtctacacagtcagacccccaagctcccgagaatcactccagctctcctggaagcag

SEQ ID NO: 21899 - DNA, 163 bp, Homo sapiens
  MAP TO CHR19.3; EXPRESSED IN PLACENTA, SIGNAL =   2; EXPRESSED IN FETAL LIVER, SIGNAL =   2; EXPRESSED IN LUNG, SIGNAL = 2.2; EXPRESSED IN BONE MARROW, SIGNAL = 1.9; EXPRESSED IN ADULT LIVER, SIGNAL = 1.5; NT HIT: M62302.1, EVALUE 7.00e-87; EST_HUMAN HIT: AI936592.1, EVALUE 1.00e-86; SWISSPROT HIT: P27544, EVALUE 4.00e-27
ccagctgaagccgaagctgaggcagcccaagtctgctgccaaggcatgcagccgatggtaggagccgccgcgggacttgaagtaaatgttgagcttggtgaactcaagctgcacgtcactgatatcgtgcaggaagagcacaaggatgcccacattgtggtac

SEQ ID NO: 21900 - DNA, 210 bp, Homo sapiens
  MAP TO CHR14.3; EXPRESSED IN HEART, SIGNAL = 1.9; EXPRESSED IN LUNG, SIGNAL = 1.1; EXPRESSED IN ADULT LIVER, SIGNAL = 0.93; SWISSPROT HIT: P57555, EVALUE 8.30e-01; NT HIT: AF268062.1, EVALUE 7.50e-01; EST_HUMAN HIT: AA731070.1, EVALUE 1.00e-114
cttagcagcattgtaacatggtttgtttgtagttttaattctttgattgcacttgcaacagggtctccttgagcctgggcttctttcacaattaacccaatttctgtccaatctatctggttagctaaagcacttcgaactacctgaatggctctgtcaactatttgtaggttcatttctatgagctctcctttcagtttgtctatttcc

SEQ ID NO: 21901 - DNA, 192 bp, Homo sapiens
  MAP TO CHR14.3; EXPRESSED IN ADULT LIVER, SIGNAL = 2.9; EXPRESSED IN PLACENTA, SIGNAL = 4.2; EXPRESSED IN HELA, SIGNAL = 3.2; EXPRESSED IN HEART, SIGNAL = 2.7; EXPRESSED IN LUNG, SIGNAL = 4.1; EXPRESSED IN FETAL LIVER, SIGNAL = 5.7; EXPRESSED IN BONE MARROW, SIGNAL = 4.9; SWISSPROT HIT: P26660, EVALUE 8.50e-01
atgaggcctgctggagccgacaggggatctgtgttggggatagatgctgctgacaacctgaaaaagaatccaccctatggctctgaaattaacagtgttcagcagtcttgtgggcagagtgagagcacctgccctctggagctgtcctggggagccccagaccagaggagtgaggagtgccctctgttgcag

SEQ ID NO: 21902 - DNA, 104 bp, Homo sapiens
  MAP TO CHR16.3; EXPRESSED IN ADULT LIVER, SIGNAL = 1.7; EXPRESSED IN PLACENTA, SIGNAL = 1.1; EXPRESSED IN LUNG, SIGNAL = 1.2; EST_HUMAN HIT: BG722042.1, EVALUE 7.70e+00; SWISSPROT HIT: P32448, EVALUE 7.00e-01; NT HIT: M25387.1, EVALUE 1.30e+00
aggtctccactctgggtacagtggccagatctgatgaccttagcaaagccgctcttggcctggagaatcttgcaagcttggactttctggggctcgtgcactga

SEQ ID NO: 21903 - DNA, 73 bp, Homo sapiens
  MAP TO CHR16.3; EXPRESSED IN LUNG, SIGNAL = 2.3; EXPRESSED IN BRAIN, SIGNAL = 3.6; EXPRESSED IN ADULT LIVER, SIGNAL = 1.8; NT HIT: U56823.1, EVALUE 3.40e+00
agtgttggttttcacatgtcttttgtatggcaccacgtggttcaccatttctgttaaaatatgttgatgggtt

SEQ ID NO: 21904 - DNA, 343 bp, Homo sapiens
  MAP TO CHR14.3; EXPRESSED IN HELA, SIGNAL =   3; EXPRESSED IN FETAL LIVER, SIGNAL = 2.7; EXPRESSED IN LUNG, SIGNAL = 2.5; EXPRESSED IN BONE MARROW, SIGNAL = 4.8; EXPRESSED IN BRAIN, SIGNAL = 5.6; EXPRESSED IN ADULT LIVER, SIGNAL = 3.6; EXPRESSED IN PLACENTA, SIGNAL = 3.6; SWISSPROT HIT: P13983, EVALUE 3.00e-01; NT HIT: AE004959.1, EVALUE 2.00e-02
ggctgcaaactcagaatctgccttcgcctctggtgcgctgccaactcccccttgggcaggcctgtcgcctgcagcctgtgtctgtgctgccctccactgccgtggcagtgcccaggccaactggtcggcatgcttgggctcagggacaacttcacggtcagcacgtggctgtgcatggccttggacacctggaacgtggagccggtcagccagcagctttcagacagggaggggccgaagggtccaggccacacagagggccagggccagcagccaggcactggctgccaccacccgttttcccccagcagccctgggctctcccttggtggctctgctctgt

SEQ ID NO: 21905 - DNA, 135 bp, Homo sapiens
  MAP TO CHR18.3; EXPRESSED IN LUNG, SIGNAL =   1; EXPRESSED IN ADULT LIVER, SIGNAL = 0.97; NT HIT: gi14747523, EVALUE 1.10e-01; SWISSPROT HIT: O24585, EVALUE 3.50e+00
gtgcaaacataaaatgctggtgacttaaggtcagtccccagggttttgtgaaattcagaatttgccaatttgattgcatccacttttctactgagtgttgtgaggacatttgcagcattccccgtagtgatcatt

SEQ ID NO: 21906 - DNA, 152 bp, Homo sapiens
  MAP TO CHR14.3; EXPRESSED IN HELA, SIGNAL = 3.3; EXPRESSED IN PLACENTA, SIGNAL = 2.8; EXPRESSED IN LUNG, SIGNAL = 3.3; EXPRESSED IN FETAL LIVER, SIGNAL = 2.3; EXPRESSED IN ADULT LIVER, SIGNAL = 2.3; SWISSPROT HIT: P12270, EVALUE 6.70e-01; NT HIT: D01095.1, EVALUE 1.30e-01; EST_HUMAN HIT: AA393036.1, EVALUE 4.00e-21
tgccctgctggggggggtgggggcttctccttggctgcatctaatttgggagacgtcggcagctctgctggcctcttggctgcttttttcaccttgcccgagttgggagggtccttctttgcctcacctggtttgttggggccctttcccct

SEQ ID NO: 21907 - DNA, 115 bp, Homo sapiens
  MAP TO CHR14.3; EXPRESSED IN ADULT LIVER, SIGNAL = 1.4; EXPRESSED IN FETAL LIVER, SIGNAL = 1.4; EST_HUMAN HIT: BF850832.1, EVALUE 2.20e+00; SWISSPROT HIT: P32901, EVALUE 4.60e+00; NT HIT: Z25465.1, EVALUE 9.50e-02
cctcaatccctccgtccatccacagagcaaccagccatggcctcagcgactggttggctgtgctggttccctgagatccagaaccagctctgatatgttcctccaggcactgagc

SEQ ID NO: 21908 - DNA, 181 bp, Homo sapiens
  MAP TO CHR14.3; EXPRESSED IN ADULT LIVER, SIGNAL = 1.8; EXPRESSED IN HELA, SIGNAL = 0.86; EXPRESSED IN HEART, SIGNAL = 2.1; EST_HUMAN HIT: BF738199.1, EVALUE 1.00e-21; SWISSPROT HIT: Q92794, EVALUE 2.50e+00
tggaggccaagtcttgttccccctcattatctgtgctttcacatatggttttcttacagaatgagcttcaccattagctacttccacgtagctaagcttccctggcagcatcccccaaattccatgttctaattttggttcccttgccatcttctcatccacgctcttcttttccttcatc

SEQ ID NO: 21909 - DNA, 204 bp, Homo sapiens
  MAP TO CHR14.3; EXPRESSED IN HEART, SIGNAL =  11; EXPRESSED IN FETAL LIVER, SIGNAL =   6; EXPRESSED IN BONE MARROW, SIGNAL = 4.4; EXPRESSED IN ADULT LIVER, SIGNAL = 4.8; EXPRESSED IN PLACENTA, SIGNAL = 3.8; EST_HUMAN HIT: BE619510.1, EVALUE 5.00e-43; SWISSPROT HIT: P09896, EVALUE 7.00e-17; NT HIT: gi16306564, EVALUE 1.00e-45
gaaagcagcatgacaggaagcagagtgactatggtgggcagactaggctgattttcccgaaaaagggtaaaactacaaagactgtgctgaaggttgagtgcgctgagctcaactgcagatctaagaggatgctggctattaagagatgcaagcatgctgaacccagagaagataagaagagaaagggacaattgatccagttgt

SEQ ID NO: 21910 - DNA, 125 bp, Homo sapiens
  MAP TO CHR14.3; EXPRESSED IN FETAL LIVER, SIGNAL = 0.95; EXPRESSED IN BRAIN, SIGNAL = 3.8; EXPRESSED IN ADULT LIVER, SIGNAL = 1.6; EXPRESSED IN HELA, SIGNAL = 4.6; EST_HUMAN HIT: AU122584.1, EVALUE 3.00e-64; SWISSPROT HIT: Q9JHU4, EVALUE 9.00e-20; NT HIT: gi15300984, EVALUE 2.00e-64
gtgggtgatgctgaagaatgtgcatctggccccagggtggctgatgcagctggagaagaagttgcattccctgcagccgcatgcctgcttccgactcttcctcaccatggagatcaaccccaagg

SEQ ID NO: 21911 - DNA, 144 bp, Homo sapiens
  MAP TO CHR16.3; EXPRESSED IN ADULT LIVER, SIGNAL = 6.4; EXPRESSED IN BRAIN, SIGNAL = 8.3; EXPRESSED IN PLACENTA, SIGNAL = 5.9; EXPRESSED IN HELA, SIGNAL =   7; EXPRESSED IN FETAL LIVER, SIGNAL = 4.3; EXPRESSED IN BONE MARROW, SIGNAL = 9.9; EXPRESSED IN LUNG, SIGNAL = 7.4; EST_HUMAN HIT: BI519206.1, EVALUE 1.80e-01; SWISSPROT HIT: P13993, EVALUE 9.00e-03; NT HIT: AF149247.1, EVALUE 7.60e+00
tacggctgctctatggggttacggggcgcctcccgctgctctatggggttacggggcacctcctgctgctctatggggttatggggcagctccggctgctctatggggttatgagacacctctggccactctgtggggttcatg

SEQ ID NO: 21912 - DNA, 101 bp, Homo sapiens
  MAP TO CHR16.3; EXPRESSED IN LUNG, SIGNAL = 2.3; EXPRESSED IN BONE MARROW, SIGNAL = 3.1; EXPRESSED IN ADULT LIVER, SIGNAL = 1.7; EXPRESSED IN BRAIN, SIGNAL =   2; EXPRESSED IN HELA, SIGNAL = 2.4; SWISSPROT HIT: P58225, EVALUE 9.20e-01; NT HIT: U35252.1, EVALUE 1.30e+00
cctgggcaggccaggggtgttggcattgaggggcagtcagagtctgccaggatggtgcagacagtggtaacgtggcccccatgcctgggaagattcaaatc

SEQ ID NO: 21913 - DNA, 277 bp, Homo sapiens
  MAP TO CHR16.3; EXPRESSED IN HELA, SIGNAL = 0.94; EXPRESSED IN BRAIN, SIGNAL =   2; EXPRESSED IN ADULT LIVER, SIGNAL = 1.2; EXPRESSED IN PLACENTA, SIGNAL = 1.3; SWISSPROT HIT: Q01113, EVALUE 1.00e-16; NT HIT: L39062.1, EVALUE 0.00e+00; EST_HUMAN HIT: BI261351.1, EVALUE 4.00e-41
ggcaggtactccgggtccaccaggctgacctgctccctcccagacacgcatttggaaagtgatgatgcaactgtcggacggcaggagcactgcctcgggcggcagcacaacggtgcactcactgcctcgcaaggtgcacttacgtgtcccaccatgagcctggttgctggaaagggcatgtgtcagcaccacggggctgctacactatcctggcatatctgctgccatcctggggacctcaccctcatccctgtccaggtgggcatggccctccaag

SEQ ID NO: 21914 - DNA, 140 bp, Homo sapiens
  MAP TO CHR19.3; EXPRESSED IN PLACENTA, SIGNAL = 1.4; EXPRESSED IN HELA, SIGNAL = 1.3; EXPRESSED IN BRAIN, SIGNAL = 1.9; EXPRESSED IN ADULT LIVER, SIGNAL = 2.2; SWISSPROT HIT: P98070, EVALUE 2.00e-03; NT HIT: gi14763078, EVALUE 1.00e-72; EST_HUMAN HIT: BF724566.1, EVALUE 2.00e-72
cctgatggtaatcatgtcaccacggtcgccctggatgtaccagctgcagttggtgcctggcgggtagttgaggggccaggccgggctgtagatgaccccacgccgctccgtgtgctgctccagcttcccactgcaggccg

SEQ ID NO: 21915 - DNA, 282 bp, Homo sapiens
  MAP TO CHR16.3; EXPRESSED IN PLACENTA, SIGNAL =   1; EXPRESSED IN HELA, SIGNAL = 1.4; EXPRESSED IN FETAL LIVER, SIGNAL = 1.1; EXPRESSED IN BRAIN, SIGNAL = 1.9; EXPRESSED IN ADULT LIVER, SIGNAL =   1; SWISSPROT HIT: P17437, EVALUE 2.40e-02; NT HIT: gi14778096, EVALUE 0.00e+00; EST_HUMAN HIT: BG820197.1, EVALUE 4.00e-44
gaggaagcagacctgcgacgggaccgaggaatggaggggtggtcgggtgtgtggatggcagagtgacagctagggagaagccggatgtggaaggggaggaactgtgtggtatgcccaggcccctgggcccagccctggcttggcagcccttgctccctgctgagggccctgcctttccttcccctgaaacagctcccggagccctgcctgttccctgtccatccaggccagcagctgaaggagcctcacctgcctcccttctctgagtagcacggatttgag

SEQ ID NO: 21916 - DNA, 236 bp, Homo sapiens
  MAP TO CHR14.3; EXPRESSED IN PLACENTA, SIGNAL = 1.3; EXPRESSED IN HEART, SIGNAL = 1.7; EXPRESSED IN LUNG, SIGNAL = 1.6; EXPRESSED IN ADULT LIVER, SIGNAL = 0.99; EST_HUMAN HIT: BE545362.1, EVALUE 1.20e+00; NT HIT: AF187073.1, EVALUE 2.10e-01
agagaagccaagggcttgtgaccgtcctgagtagagcagcactttcagctcaggttggtgaggttacgggtgtgaggccgggagccgctgcagtcagtgctgcatccttggtgggagtcagtccaagatcaccactgacacggggcaagggcaaggctgaaagaacatcagagacctgcggccaggggccagatcaaattgcaccagaggcagtcccacttctgcatggttctgtt

SEQ ID NO: 21917 - DNA, 161 bp, Homo sapiens
  MAP TO CHR16.3; EXPRESSED IN ADULT LIVER, SIGNAL = 5.1; EXPRESSED IN PLACENTA, SIGNAL = 7.6; EXPRESSED IN HEART, SIGNAL =   5; EXPRESSED IN HELA, SIGNAL = 6.6; EXPRESSED IN LUNG, SIGNAL = 6.3; EXPRESSED IN FETAL LIVER, SIGNAL =   3; EXPRESSED IN BONE MARROW, SIGNAL = 7.5; EXPRESSED IN BRAIN, SIGNAL = 6.1; EST_HUMAN HIT: BG207115.1, EVALUE 2.10e-01; SWISSPROT HIT: P26848, EVALUE 5.80e+00; NT HIT: X57405.1, EVALUE 2.20e+00
acgcttccatggccccaccttcatccagccccgaatacagtgggtagagccagcatcagctacagagagctgtgatctgtgctcgcagtgtagccggagagatggcatcatcatcatcatcaccgtggccagcacaaatggaacatacaccacgtaccagg

SEQ ID NO: 21918 - DNA, 194 bp, Homo sapiens
  MAP TO CHR14.3; EXPRESSED IN LUNG, SIGNAL = 1.1; EXPRESSED IN FETAL LIVER, SIGNAL = 1.6; EXPRESSED IN ADULT LIVER, SIGNAL = 1.1; EST_HUMAN HIT: AA594679.1, EVALUE 2.60e-01; SWISSPROT HIT: O36021, EVALUE 4.90e-01; NT HIT: gi14726194, EVALUE 1.70e-01
tgcaggccatcggagccgccgaaacaggcgccctgaaccacgaggaagccgtggtggctcctccccagggaatccctgcccacgtcctgtcggtggcccagctggcagacaacccgtcagccatgtggagggagacagggtggccccttgcagctgtgccagcactgctcagcctgtgccgagcaccagcgcgt

SEQ ID NO: 21919 - DNA, 157 bp, Homo sapiens
  MAP TO CHR19.3; EXPRESSED IN ADULT LIVER, SIGNAL = 1.9; EXPRESSED IN PLACENTA, SIGNAL = 1.9; EXPRESSED IN HEART, SIGNAL = 2.3; EST_HUMAN HIT: AL560094.1, EVALUE 4.00e-83; SWISSPROT HIT: Q63009, EVALUE 2.00e-24; NT HIT: Y10805.1, EVALUE 2.00e-83
ggagatgctgaaggacgaggtgcgcaccctcacttaccgcaactccatgtttcataaccggcacctcttcaaggacaaggtggtgctggacgtcggctcgggcaccggcatcctctgcatgtttgctgccaaggccggggcccgcaaggtcatcggg

SEQ ID NO: 21920 - DNA, 110 bp, Homo sapiens
  MAP TO CHR14.3; EXPRESSED IN HELA, SIGNAL = 4.8; EXPRESSED IN PLACENTA, SIGNAL = 3.9; EXPRESSED IN HEART, SIGNAL = 3.9; EXPRESSED IN FETAL LIVER, SIGNAL = 3.5; EXPRESSED IN LUNG, SIGNAL = 5.1; EXPRESSED IN BONE MARROW, SIGNAL = 4.7; EXPRESSED IN ADULT LIVER, SIGNAL = 4.6; SWISSPROT HIT: P13837, EVALUE 7.90e+00; NT HIT: AF313863.1, EVALUE 3.60e-01; EST_HUMAN HIT: BF940974.1, EVALUE 2.10e+00
gtggcctgtcaggagagcaggtgttgctgggatggtgcatgcattcaagagtcatagtgcaaatctcatcaaggcatgtatccccaaaccactcaggctggtatctctcc

SEQ ID NO: 21921 - DNA, 194 bp, Homo sapiens
  MAP TO CHR19.3; EXPRESSED IN BONE MARROW, SIGNAL = 4.5; EXPRESSED IN ADULT LIVER, SIGNAL = 2.4e+02; EXPRESSED IN BRAIN, SIGNAL =  21; EXPRESSED IN HEART, SIGNAL =   2; EXPRESSED IN FETAL LIVER, SIGNAL =  83; SWISSPROT HIT: P02649, EVALUE 6.00e-33; NT HIT: gi14755853, EVALUE 1.00e-105; EST_HUMAN HIT: BI670350.1, EVALUE 1.00e-105
ggatgccaggccaaggtggagcaagcggtggagacagagccggagcccgagctgcgccagcagaccgagtggcagagcggccagcgctgggaactggcactgggtcgcttttgggattacctgcgctgggtgcagacactgtctgagcaggtgcaggaggagctgctcagctcccaggtcacccaggaactgag

SEQ ID NO: 21922 - DNA, 175 bp, Homo sapiens
  MAP TO CHR16.3; EXPRESSED IN FETAL LIVER, SIGNAL =  67; EXPRESSED IN BONE MARROW, SIGNAL =  64; EXPRESSED IN BRAIN, SIGNAL = 9.8; EXPRESSED IN ADULT LIVER, SIGNAL =  41; EST_HUMAN HIT: BI912564.1, EVALUE 7.00e-94; SWISSPROT HIT: O18789, EVALUE 3.00e-29; NT HIT: gi14779902, EVALUE 5.00e-94
ggcatttgttgctatcggggactacaatggccacgtcggtctgggtgttaagtgctccaaggaggtggccaccgccatccgtggggccatcatcctggccaagctctccatcgtccccgtgcgcagaggctactgggggaacaagatcggcaagccccacactgtcccttgcaag

SEQ ID NO: 21923 - DNA, 285 bp, Homo sapiens
  MAP TO CHR14.3; EXPRESSED IN HELA, SIGNAL = 1.4; EXPRESSED IN PLACENTA, SIGNAL = 1.5; EXPRESSED IN LUNG, SIGNAL = 1.6; EXPRESSED IN ADULT LIVER, SIGNAL = 1.3; EST_HUMAN HIT: AI341390.1, EVALUE 0.00e+00; SWISSPROT HIT: P52917, EVALUE 3.70e-01; NT HIT: gi14784533, EVALUE 0.00e+00
cgtgtatgccacggagcagcacgtccacgccattctgatagtggttgaaggccgcctcatagtcctcactaacatcgcgctccagggccagccggatctgcgtggccgcatccaccagatagtcacgttttgtcatgtcaggcactcccagagccaccctgttgcgaatctgctccaggtacacgtgagcttgggaccgtgctcgtgagcaaggctcaggctccaggccggggctgggcaggcactcacaggccaccaggctcatggctgccctgcagctgggac

SEQ ID NO: 21924 - DNA, 342 bp, Homo sapiens
  MAP TO CHR16.3; EXPRESSED IN ADULT LIVER, SIGNAL = 1.8; EXPRESSED IN HELA, SIGNAL = 2.7; EXPRESSED IN PLACENTA, SIGNAL = 1.1; SWISSPROT HIT: P09133, EVALUE 5.10e-01; NT HIT: gi16164646, EVALUE 1.00e-83; EST_HUMAN HIT: BG485267.1, EVALUE 3.00e-76
ggctggatggagccgatccttcccgtctctccttacactcgcgcactcacgctggctggaacaagtcctccaagtagaacgaagagcgcgttttagcggcgctctagcccgccgagagcatacgccctccccacacggggcccctgattgtctgaaggttgcgctggcacgcgcaacttccgggacagaggctgtggctggaaggagctgggcatccggcctgaggcgcagcggtcgcgttagttcggcccaatggcggcaccgctgcttcacacgttgtttgtcgggagatgcggccgcttcgtcctctgcagtcaagacgctgggcgcgtcgaggactgg

SEQ ID NO: 21925 - DNA, 160 bp, Homo sapiens
  MAP TO CHR16.3; EXPRESSED IN HEART, SIGNAL =   4; EXPRESSED IN HELA, SIGNAL = 6.4; EXPRESSED IN FETAL LIVER, SIGNAL = 3.8; EXPRESSED IN LUNG, SIGNAL = 7.5; EXPRESSED IN ADULT LIVER, SIGNAL = 5.2; EXPRESSED IN PLACENTA, SIGNAL = 4.9; SWISSPROT HIT: Q14764, EVALUE 5.10e-01; NT HIT: AY036609.1, EVALUE 5.50e-01; EST_HUMAN HIT: AW935800.1, EVALUE 1.30e-02
atgcactggcaagatttcctcgacaaggcagaaatgagaaacatgacacagaagcctttaagggtgacctcagaggaaaacagaagttgctggatgatacagaagcagaaaagggaaaaccagagctccgaggcaccgcgtgtcaaccaccagatggatt

SEQ ID NO: 21926 - DNA, 174 bp, Homo sapiens
  MAP TO CHR19.3; EXPRESSED IN PLACENTA, SIGNAL = 2.2; EXPRESSED IN HELA, SIGNAL = 1.6; EXPRESSED IN HEART, SIGNAL = 1.6; EXPRESSED IN BONE MARROW, SIGNAL = 2.6; EXPRESSED IN ADULT LIVER, SIGNAL = 2.4; SWISSPROT HIT: Q02817, EVALUE 1.70e-01; NT HIT: AE004868.1, EVALUE 1.50e-01
tcagcacttggagggttggtccttttggctggtgctggccaggtcgaggctcagagccaccggtgtccagggggatccggggtggtcctcggccttcctgcaactgccagggtggtcatcagaaaggctcctgagctgctgggagttggtggaaggtgggttgtctgagatcag

SEQ ID NO: 21927 - DNA, 139 bp, Homo sapiens
  MAP TO CHR16.3; EXPRESSED IN HELA, SIGNAL = 1.4; EXPRESSED IN PLACENTA, SIGNAL = 1.1; EXPRESSED IN LUNG, SIGNAL = 1.6; EXPRESSED IN ADULT LIVER, SIGNAL = 0.99; EST_HUMAN HIT: R14785.1, EVALUE 2.00e-72; SWISSPROT HIT: Q80928, EVALUE 5.90e+00
cccagagctgtaataggtagagccagccaaatgtcaaagggatgatttgtcttgtcaccactagtttcccttttctctgccttgtatgtaacaggaatattctttagttcctccttatgttctaaagcacctccccaac

SEQ ID NO: 21928 - DNA, 272 bp, Homo sapiens
  MAP TO CHR14.3; EXPRESSED IN ADULT LIVER, SIGNAL = 3.5; EXPRESSED IN PLACENTA, SIGNAL = 2.3; EXPRESSED IN LUNG, SIGNAL = 2.3; EXPRESSED IN FETAL LIVER, SIGNAL = 2.1; NT HIT: gi14748314, EVALUE 0.00e+00; SWISSPROT HIT: P20848, EVALUE 1.00e-49
cttatgtcaaaggctctctggatattttcaaggtggctgtaggtcaatttttcttccaactgccacatcttctttggatcgggcaggatgaagaaggcagtggcgttccccacatagtgctgtgccagcacccagctggataactccctgtcccggtggatgtcaaatctacccaggtggtttatcataggcactctgatgatggtcttatcatccacatggaagccctctaccataatgcgctcagccttgaatttatctttccacttgcc

SEQ ID NO: 21929 - DNA, 116 bp, Homo sapiens
  MAP TO CHR16.3; EXPRESSED IN BRAIN, SIGNAL = 1.7; EXPRESSED IN ADULT LIVER, SIGNAL = 2.1; EXPRESSED IN PLACENTA, SIGNAL = 1.9; EXPRESSED IN HEART, SIGNAL = 1.8; EXPRESSED IN LUNG, SIGNAL =   2; NT HIT: gi15318765, EVALUE 3.00e-57; EST_HUMAN HIT: AU141271.1, EVALUE 5.00e-57; SWISSPROT HIT: P90859, EVALUE 1.00e-03
ctacttgtggaaaagatgtccacagggcagtttccgcgcagcctgcatggagtcccaacagatggcacagtcgtcattgttgacagccagctcctctggagttgcaactgcaaacc

SEQ ID NO: 21930 - DNA, 143 bp, Homo sapiens
  MAP TO CHR14.3; EXPRESSED IN HELA, SIGNAL = 4.5; EXPRESSED IN HEART, SIGNAL = 8.2; EXPRESSED IN LUNG, SIGNAL = 4.5; EXPRESSED IN FETAL LIVER, SIGNAL = 7.3; EXPRESSED IN BONE MARROW, SIGNAL = 5.3; EXPRESSED IN ADULT LIVER, SIGNAL = 4.7; EXPRESSED IN PLACENTA, SIGNAL = 3.6; SWISSPROT HIT: P25443, EVALUE 4.00e-03; NT HIT: gi14784248, EVALUE 8.00e-06; EST_HUMAN HIT: AV744001.1, EVALUE 1.00e-08
gcagcagctttttgagtgcaggacctaagatgttgacagtgcctttgggggcgagggtgaggcacatcagcacagagccgcagcagccagtcacttgcagtgcagagtgtggagcttgctgatcttgttccattggatccttg

SEQ ID NO: 21931 - DNA, 142 bp, Homo sapiens
  MAP TO CHR16.3; EXPRESSED IN HELA, SIGNAL = 1.4; EXPRESSED IN BONE MARROW, SIGNAL =   2; EXPRESSED IN BRAIN, SIGNAL = 1.5; EXPRESSED IN ADULT LIVER, SIGNAL = 1.1; SWISSPROT HIT: P07913, EVALUE 2.00e+00; NT HIT: AF293409.1, EVALUE 1.90e+00; EST_HUMAN HIT: BI829077.1, EVALUE 1.00e-73
gtccctgcttccccttctcggtgagcgcggaactggatggggtggtctgccctgcgggcactgcgaatagcaagacggaggccaaacagcaggcagcgctctctgccctctgctacatccggagtcagctggagaacccagg

SEQ ID NO: 21932 - DNA, 169 bp, Homo sapiens
  MAP TO CHR16.3; EXPRESSED IN PLACENTA, SIGNAL = 1.5; EXPRESSED IN LUNG, SIGNAL = 1.3; EXPRESSED IN ADULT LIVER, SIGNAL = 1.3; EXPRESSED IN BRAIN, SIGNAL = 1.4; SWISSPROT HIT: O76009, EVALUE 1.70e-01; NT HIT: gi9626737, EVALUE 5.90e-01; EST_HUMAN HIT: BI520541.1, EVALUE 2.00e-85
tgggcaccactcaactgggtgccactcacctgggtgttatgcacctggacaatgctagtcacgtggatgccactcgcctgggtgtcactcacctgaatgctactcacctgggtgccatttacctggatgatgtcactcacctggatgtcgtcactcacctggatgtcac

SEQ ID NO: 21933 - DNA, 148 bp, Homo sapiens
  MAP TO CHR16.3; EXPRESSED IN BONE MARROW, SIGNAL = 1.2; EXPRESSED IN ADULT LIVER, SIGNAL =   1; EXPRESSED IN BRAIN, SIGNAL = 1.6; SWISSPROT HIT: P49606, EVALUE 1.00e-05; NT HIT: gi13384629, EVALUE 5.00e-01; EST_HUMAN HIT: BG718350.1, EVALUE 3.00e-77
attttctcaactgaagggcctgaacttgtcccataataaacttgggttgtttcctatattgttatgcgagatctctaccctgactgagctcaacctttcctgtaatggatttcatgacctaccaagtcaaattggcaatctgctaaag

SEQ ID NO: 21934 - DNA, 280 bp, Homo sapiens
  MAP TO CHR19.3; EXPRESSED IN BONE MARROW, SIGNAL =  24; EXPRESSED IN ADULT LIVER, SIGNAL = 8.4; EXPRESSED IN BRAIN, SIGNAL =  11; EXPRESSED IN HEART, SIGNAL =   8; SWISSPROT HIT: Q14002, EVALUE 8.00e-50; NT HIT: gi14786807, EVALUE 0.00e+00; EST_HUMAN HIT: AW951207.1, EVALUE 0.00e+00
cagcggacattcagggtgactgggtcactgcggctggcacccactgggttctgtatttcacattcatagggtcctatgtcattctttgtggcgctgagtagaacgagggtcctgttgtcagtggagagcagcagcctgggactgaccaggaggctctgattgtttacccaccacaggtaggttgtgttctgagtctcaggttgacaggttaaaaccacaatatctttgttctccaccggattgaagttgttgctggtgatggagggcttgggtggctccg

SEQ ID NO: 21935 - DNA, 296 bp, Homo sapiens
  MAP TO CHR14.3; EXPRESSED IN FETAL LIVER, SIGNAL = 3.4; EXPRESSED IN LUNG, SIGNAL = 1.7; EXPRESSED IN ADULT LIVER, SIGNAL = 1.7; EXPRESSED IN BRAIN, SIGNAL = 2.2; EXPRESSED IN PLACENTA, SIGNAL = 1.8; EST_HUMAN HIT: BG565763.1, EVALUE 6.30e+00; SWISSPROT HIT: Q10108, EVALUE 3.50e+00
ttaactgtcagcaattttggaggaaagcccttcccagcaggggactgggaacccctgggcaatgtctttcctatgacacatggatctctatggttgaataaggggctgaaggaggaaatagacaacaggggtcagagagcaaggctagaggaggcctttgagaaaagagagttgtgcccccttttcagtgagtgtggggcctctggaggttggcaagaagaggagaaggtgaagggtttcagcactgagagaatgatgtttctggtggggctttgccagaagggggctcatcacat

SEQ ID NO: 21936 - DNA, 99 bp, Homo sapiens
  MAP TO CHR16.3; EXPRESSED IN FETAL LIVER, SIGNAL = 0.9; EXPRESSED IN ADULT LIVER, SIGNAL = 1.2; EST_HUMAN HIT: BI822673.1, EVALUE 3.00e-02; SWISSPROT HIT: Q10663, EVALUE 3.60e+00; NT HIT: X03438.1, EVALUE 2.00e-02
agggagcagacctcattctcttctaccacattgcattgcgtgaaaccactgctgacactccctcccacgatgcaggctccctgggctcccctgagcagc

SEQ ID NO: 21937 - DNA, 191 bp, Homo sapiens
  MAP TO CHR16.3; EXPRESSED IN PLACENTA, SIGNAL = 2.6; EXPRESSED IN HELA, SIGNAL = 2.7; EXPRESSED IN LUNG, SIGNAL = 2.4; EXPRESSED IN BONE MARROW, SIGNAL = 2.8; EXPRESSED IN BRAIN, SIGNAL = 3.4; EXPRESSED IN ADULT LIVER, SIGNAL = 2.4; EST_HUMAN HIT: BG165855.1, EVALUE 6.40e-02
tttcttgcttatatttatctcgtctccattctctcctttcttttcacctccctgtttctttcttccaatgaattcttttagaagccatggattctggtcaaggtagatgcaacactttggagttagtgagaagaggtcattcctccatccagctttctgctttctgatctctcttccctctgctgaccaac

SEQ ID NO: 21938 - DNA, 482 bp, Homo sapiens
  MAP TO CHR18.3; EXPRESSED IN ADULT LIVER, SIGNAL =   1; EXPRESSED IN HELA, SIGNAL = 0.99; EXPRESSED IN PLACENTA, SIGNAL = 1.3; EXPRESSED IN BONE MARROW, SIGNAL = 1.7; SWISSPROT HIT: P98161, EVALUE 6.00e-10; EST_HUMAN HIT: AI652668.1, EVALUE 0.00e+00
tcagacagaagggaagaggtctctccaggtgagtccatccccccgcttcttgtccagccacctgccacagttgaagatggtggccacgccggtgctggtgttggtgacctccaccttctccaccagccagcctgagcagtagccactgctgtcgtgctccaggcgcaccttgcgcagctcacccagctccagcgtctccaggaagaagcggtctgtgctgccccgctcgaagaggttgcgcattttctgcttcagctcccgcttgcctgtgtctccgttggccccaaagatggtcacgaagacgttggcatcagtgcctgcccctggctcatagcctgttgtcacgatgacttcgtacttgacgggcaccaggctctggaccttgctggcaaagctctctgtcgtcttggtaacctcgaataccttgaagtacttcctcttcctcttgagggggatgaggcagtcacagttaaagaagtacc

SEQ ID NO: 21939 - DNA, 135 bp, Homo sapiens
  MAP TO CHR14.3; EXPRESSED IN ADULT LIVER, SIGNAL = 3.4; EXPRESSED IN PLACENTA, SIGNAL = 2.6; EXPRESSED IN HEART, SIGNAL = 3.5; EXPRESSED IN FETAL LIVER, SIGNAL =   3; EXPRESSED IN BONE MARROW, SIGNAL = 2.6; EST_HUMAN HIT: BE901027.1, EVALUE 6.70e-01; NT HIT: AF225897.1, EVALUE 4.50e-01
cgtgccccactgagcatctgggccacctccatagtgggagacgggaggctgctttccaatcagagcttcctgattgagcgtctcgctctgtagaggcgtctctatgttggggtgaaatttccgcaggataggttc

SEQ ID NO: 21940 - DNA, 116 bp, Homo sapiens
  MAP TO CHR14.3; EXPRESSED IN HEART, SIGNAL = 2.3; EXPRESSED IN LUNG, SIGNAL = 4.8; EXPRESSED IN FETAL LIVER, SIGNAL = 2.4; EXPRESSED IN BONE MARROW, SIGNAL = 4.6; EXPRESSED IN ADULT LIVER, SIGNAL = 3.3; EXPRESSED IN PLACENTA, SIGNAL = 3.7; EXPRESSED IN HELA, SIGNAL = 4.1; EST_HUMAN HIT: H28165.1, EVALUE 2.20e+00; SWISSPROT HIT: Q10786, EVALUE 6.00e+00; NT HIT: AB010645.1, EVALUE 1.50e+00
atcctgtgctaatgaaggcatcatcagcttcagccacgcttttgttctctacaccatcccttcaaagatggaggttggggcaaggacccctccctggaaccaggccaaaggttcag

SEQ ID NO: 21941 - DNA, 132 bp, Homo sapiens
  MAP TO CHR14.3; EXPRESSED IN ADULT LIVER, SIGNAL = 1.5; EXPRESSED IN PLACENTA, SIGNAL = 1.2; EXPRESSED IN HELA, SIGNAL =   2; NT HIT: AF203100.1, EVALUE 1.70e+00; EST_HUMAN HIT: AV705360.1, EVALUE 1.60e-01
caggaagtgagtcggcggaagtgggagcgcggcaagcggatggagccagcgagaaacacatagccagggttctgtcgcatgacccccgacggcacctgctccccatcagcagcatcatactccggtaacttc

SEQ ID NO: 21942 - DNA, 131 bp, Homo sapiens
  MAP TO CHR19.3; EXPRESSED IN HELA, SIGNAL = 1.6; EXPRESSED IN LUNG, SIGNAL = 1.6; EXPRESSED IN BONE MARROW, SIGNAL = 2.3; EXPRESSED IN ADULT LIVER, SIGNAL = 1.5; EXPRESSED IN BRAIN, SIGNAL = 2.4; NT HIT: gi13375967, EVALUE 6.00e-68; EST_HUMAN HIT: AA935931.1, EVALUE 9.00e-68; SWISSPROT HIT: O75820, EVALUE 1.00e-09
ccagagaggccagaagtgtaaagttctccagcatcacattgcggtagaggagcctctgagcgtcatcaagcaatctccattcctcctgggagaagtagacagccacatcctcaaaggtcacatagccctgc

SEQ ID NO: 21943 - DNA, 156 bp, Homo sapiens
  MAP TO CHR16.3; EXPRESSED IN ADULT LIVER, SIGNAL = 1.1; EXPRESSED IN BRAIN, SIGNAL = 0.99; EXPRESSED IN PLACENTA, SIGNAL = 1.1; EXPRESSED IN LUNG, SIGNAL = 1.4; SWISSPROT HIT: Q99958, EVALUE 1.30e-01; NT HIT: AE005975.1, EVALUE 8.40e+00; EST_HUMAN HIT: AI024399.1, EVALUE 1.00e-82
ttcaactgcgggatgtccctgcacagctccatgttggggcgccgggtccggcactccagccttgtctgggccaccttcagcgggccctccttggccatgatggacctttccagcagcatgatggtgttctcggcctggaagatctcctgcagcgtc

SEQ ID NO: 21944 - DNA, 280 bp, Homo sapiens
  MAP TO CHR19.3; EXPRESSED IN ADULT LIVER, SIGNAL =  16; EXPRESSED IN BRAIN, SIGNAL =  19; EXPRESSED IN HELA, SIGNAL =  12; EXPRESSED IN HEART, SIGNAL = 9.8; SWISSPROT HIT: P06731, EVALUE 3.00e-41; NT HIT: M17303.1, EVALUE 0.00e+00; EST_HUMAN HIT: AW858762.1, EVALUE 0.00e+00
gcggagctgcccaagccctccatctccagcaacaactccaaacccgtggaggacaaggatgctgtggccttcacctgtgaacctgaggctcagaacacaacctacctgtggtgggtaaatggtcagagcctcccagtcagtcccaggctgcagctgtccaatggcaacaggaccctcactctattcaatgtcacaagaaatgacgcaagagcctatgtatgtggaatccagaactcagtgagtgcaaaccgcagtgacccagtcaccctggatgtcctct

SEQ ID NO: 21945 - DNA, 174 bp, Homo sapiens
  MAP TO CHR19.3; EXPRESSED IN HEART, SIGNAL = 1.6; EXPRESSED IN FETAL LIVER, SIGNAL =   3; EXPRESSED IN LUNG, SIGNAL = 1.7; EXPRESSED IN ADULT LIVER, SIGNAL = 1.4; EXPRESSED IN PLACENTA, SIGNAL = 1.4; SWISSPROT HIT: O09141, EVALUE 3.80e-01
atcggccgggacgcaggacgcgggacccaggacccaggacccgggcatcgccactcctctgcaccactgtccacagcacccccagcggggtctccatctccgtgttctcaaagccctggctgtctgccccccgtacccactccctctgttctggaatgctgtacacaagtcctt

SEQ ID NO: 21946 - DNA, 111 bp, Homo sapiens
  MAP TO CHR14.3; EXPRESSED IN BRAIN, SIGNAL = 3.1; EXPRESSED IN ADULT LIVER, SIGNAL = 2.4; EXPRESSED IN PLACENTA, SIGNAL = 1.7; EXPRESSED IN HELA, SIGNAL = 1.9; EXPRESSED IN LUNG, SIGNAL = 1.9; EXPRESSED IN BONE MARROW, SIGNAL =   2; NT HIT: gi16168817, EVALUE 9.10e-02
gacaaataggtttcacatcgctgtgggcactctggtctgcaatgacaagacaaagaggttccacttgtccctctgccccctgcacctgctgtcaggggatgatggttattg

SEQ ID NO: 21947 - DNA, 77 bp, Homo sapiens
  MAP TO CHR19.3; EXPRESSED IN HEART, SIGNAL =   2; EXPRESSED IN HELA, SIGNAL = 2.7; EXPRESSED IN LUNG, SIGNAL = 4.3; EXPRESSED IN FETAL LIVER, SIGNAL = 3.2; EXPRESSED IN BONE MARROW, SIGNAL = 3.4; EXPRESSED IN ADULT LIVER, SIGNAL = 2.6; EXPRESSED IN PLACENTA, SIGNAL = 3.1; EST_HUMAN HIT: AA678215.1, EVALUE 1.30e+00; NT HIT: AJ292467.1, EVALUE 3.60e+00
ggctctcagtcgagcccagagtccacatcctctgggcgcccaggctgccaaaattgcccgtcagtgtgtcccccatg

SEQ ID NO: 21948 - DNA, 163 bp, Homo sapiens
  MAP TO CHR18.3; EXPRESSED IN LUNG, SIGNAL = 8.8; EXPRESSED IN ADULT LIVER, SIGNAL = 7.8; EXPRESSED IN PLACENTA, SIGNAL =   7; EXPRESSED IN HELA, SIGNAL = 6.6; EXPRESSED IN HEART, SIGNAL =  10; NT HIT: AF180355.1, EVALUE 5.60e-01; SWISSPROT HIT: Q28983, EVALUE 3.40e+00
aaaagggaaagaacaggaaaacagaaagagtggcctgccgctaaatttctcatctctggcggctgaggacaaagacgactacacgcagaagagaaggcacccaaggattgccagaggttccgcctcttgcctccaggcccagacaggtctggaaggtttcaag

SEQ ID NO: 21949 - DNA, 135 bp, Homo sapiens
  MAP TO CHR16.3; EXPRESSED IN ADULT LIVER, SIGNAL =   2; EXPRESSED IN HELA, SIGNAL = 3.1; EXPRESSED IN PLACENTA, SIGNAL = 1.2; EXPRESSED IN HEART, SIGNAL = 1.7; EXPRESSED IN FETAL LIVER, SIGNAL =   1; NT HIT: gi14775331, EVALUE 3.00e-70; EST_HUMAN HIT: BF002288.1, EVALUE 4.00e-70; SWISSPROT HIT: P13667, EVALUE 3.00e-03
ctgatctgaaagccgacttgctgcttgctcaatttctgccctggcagcgatggactgtccacaccaaggggcatagaagaagagcagtaccacctctgaatcccgtcgaacgtactctgcataatccagctgccc

SEQ ID NO: 21950 - DNA, 166 bp, Homo sapiens
  MAP TO CHR18.3; EXPRESSED IN FETAL LIVER, SIGNAL =  12; EXPRESSED IN ADULT LIVER, SIGNAL = 1.5; EXPRESSED IN BRAIN, SIGNAL = 1.5; EXPRESSED IN HELA, SIGNAL = 2.4; SWISSPROT HIT: P22830, EVALUE 5.00e-27; NT HIT: AJ250235.1, EVALUE 1.00e-88; EST_HUMAN HIT: T87953.1, EVALUE 6.00e-88
cctccttggctaaaacttgagagtactcgatgtccagctcatacagcgtttcaatatggtcactggtaaatgctatcggaaccaagaggatattcttcctccccctctcacaaagccctttgatagattcgtctgtttgaggacccaaccagggcatcggaccaac

SEQ ID NO: 21951 - DNA, 230 bp, Homo sapiens
  MAP TO CHR19.3; EXPRESSED IN ADULT LIVER, SIGNAL = 3.9; EXPRESSED IN HELA, SIGNAL = 3.5; EXPRESSED IN HEART, SIGNAL = 4.7; EXPRESSED IN FETAL LIVER, SIGNAL = 5.1; EXPRESSED IN LUNG, SIGNAL =   4; EXPRESSED IN BONE MARROW, SIGNAL = 3.3; EXPRESSED IN BRAIN, SIGNAL = 4.7; SWISSPROT HIT: Q01546, EVALUE 3.10e-01; NT HIT: gi13430887, EVALUE 3.00e-40; EST_HUMAN HIT: BI766100.1, EVALUE 2.00e-94
ctaggcttccagggggtcctggagtcttagctgtggatctcccaaaacctgcaggtcagagggacacagagcctgggcctctaggagcagacgacacagagtagtgaagaccagacctggagctcccgctgcagcgagagacaaaggccccaccaaacccagaagtcgtcctgttcgcttcagcttcatgcctgatttgaggatttcctgcccagcgtccctgactggat

SEQ ID NO: 21952 - DNA, 279 bp, Homo sapiens
  MAP TO CHR16.3; EXPRESSED IN PLACENTA, SIGNAL = 2.9; EXPRESSED IN HELA, SIGNAL = 5.9; EXPRESSED IN LUNG, SIGNAL = 3.9; EXPRESSED IN FETAL LIVER, SIGNAL = 3.5; EXPRESSED IN ADULT LIVER, SIGNAL = 3.2; SWISSPROT HIT: Q09345, EVALUE 4.00e+00; NT HIT: gi5901921, EVALUE 3.00e-19; EST_HUMAN HIT: BE275078.1, EVALUE 9.00e-67
tagggggagcagcggaagtggaggaagccaggagctggggagatggtgtctatttttgttttctgaaaaggggcgcctaggggcttgcacacaggtggcagctgcagctggggtgggtcacgcactgacatccccgcctgtcttgggaacagcttccagcagccggtccctgaacactcctcctctccctccttggcctcgctgacctcagagttggggacccggaggccggcgtcgatacactgctgcatggggaacttggccttggtggggtccatc

SEQ ID NO: 21953 - DNA, 367 bp, Homo sapiens
  MAP TO CHR19.3; EXPRESSED IN PLACENTA, SIGNAL = 2.1; EXPRESSED IN LUNG, SIGNAL = 2.5; EXPRESSED IN ADULT LIVER, SIGNAL = 1.3; NT HIT: AF135025.2, EVALUE 0.00e+00; EST_HUMAN HIT: AI394679.1, EVALUE 7.00e-59; SWISSPROT HIT: Q9UKR0, EVALUE 9.00e-27
gggtgattctgggggccccctggtgtgtgggggagtccttcaaggtctggtgtcctgggggtctgtggggccctgtggacaagatggcatccctggagtctacacctatatttgcaagtatgtggactggatccggatgatcatgaggaacaactgacctgtttcctccacctccacccccaccccttaacttgggtacccctctggccctcagagcaccaatatctcctccatcacttcccctagctccactcttgttggcctgggaacttcttggaactttaactcctgccagcccttctaagacccacgagcggggtgagagaagtgtgcaatagtctggaataaatataaatgaaggaggggc

SEQ ID NO: 21954 - DNA, 184 bp, Homo sapiens
  MAP TO CHR19.3; EXPRESSED IN BRAIN, SIGNAL = 7.4; EXPRESSED IN ADULT LIVER, SIGNAL = 4.6; EXPRESSED IN PLACENTA, SIGNAL = 4.9; EXPRESSED IN BONE MARROW, SIGNAL = 5.9; NT HIT: gi16163024, EVALUE 2.00e-99; EST_HUMAN HIT: BE745410.1, EVALUE 3.00e-99; SWISSPROT HIT: Q12962, EVALUE 3.30e-02
ggaactgctgtgttataagtaccggggcccagagtcggggcttcctgaggcccagcacgggttccatctgctgtggcagcggagcttctccagtcccctgctggccatggctcacgtggacctgaccggggatgggctgcaggagcttgccgtggtctccctgaagggcgtgcacatcctgcag

SEQ ID NO: 21955 - DNA, 208 bp, Homo sapiens
  MAP TO CHR18.3; EXPRESSED IN LUNG, SIGNAL = 5.7; EXPRESSED IN FETAL LIVER, SIGNAL = 4.8; EXPRESSED IN BONE MARROW, SIGNAL = 5.1; EXPRESSED IN ADULT LIVER, SIGNAL = 3.7; EXPRESSED IN HEART, SIGNAL = 5.1; EXPRESSED IN HELA, SIGNAL = 8.3; NT HIT: gi14249497, EVALUE 5.00e-85; EST_HUMAN HIT: BG611706.1, EVALUE 8.00e-85; SWISSPROT HIT: P54815, EVALUE 9.00e-22
cagaactctgaacggtttcgtacaaaggagtctatttcgtctataatgatgatggacagttgtagctttatggcaagggagaagacagcagcagccagtgtttgagattctccataccacttattggtcagtgtcgaaggctcaaggttaataaatcgacagcctgcttctttggctgtggccttggcaatcaacgttttaccacagc

SEQ ID NO: 21956 - DNA, 166 bp, Homo sapiens
  MAP TO CHR16.3; EXPRESSED IN PLACENTA, SIGNAL = 1.6; EXPRESSED IN ADULT LIVER, SIGNAL = 1.2; EXPRESSED IN HELA, SIGNAL = 1.4; NT HIT: AF215668.1, EVALUE 5.70e-01; SWISSPROT HIT: O35787, EVALUE 5.80e+00
tagctttcaggaaggctaagaaggggttagtataggtgaacatctccagggtctcagattctgtctcccaagagcagatcagaagccaaggcaacacgggaaataaacgatctggaggtgaaacccacaggccgccgcttttctgatcaggttcattcttagagca

SEQ ID NO: 21957 - DNA, 98 bp, Homo sapiens
  MAP TO CHR19.3; EXPRESSED IN ADULT LIVER, SIGNAL = 8.4; EXPRESSED IN PLACENTA, SIGNAL = 8.7; EXPRESSED IN HELA, SIGNAL = 7.4; EXPRESSED IN LUNG, SIGNAL = 6.3; EXPRESSED IN BONE MARROW, SIGNAL =  18; EXPRESSED IN FETAL LIVER, SIGNAL = 6.5; EXPRESSED IN BRAIN, SIGNAL =  11; NT HIT: AF287892.1, EVALUE 2.00e-48; EST_HUMAN HIT: BI029712.1, EVALUE 4.00e-17
catgatgaagatgatgcagaaggacaggaaggccagggctgtggctccagctcccccgactgctgccagtgtcacttgtgatacaggtcttgaggtgc

SEQ ID NO: 21958 - DNA, 252 bp, Homo sapiens
  MAP TO CHR14.3; EXPRESSED IN ADULT LIVER, SIGNAL = 2.8; EXPRESSED IN HELA, SIGNAL =  10; EXPRESSED IN BONE MARROW, SIGNAL = 1.5; SWISSPROT HIT: P27008, EVALUE 4.00e-35; NT HIT: gi12725812, EVALUE 1.00e-107; EST_HUMAN HIT: BG200216.1, EVALUE 1.00e-116
ggaggcccaacaggcttaatcctgttgggagaagttgcccttggaaaatgtatgaactgaagcacgcttcacatatcagcaagttacccaagggcaagcacagtgtcaaaggtttgggcaaaactacccctgacccttcagctagtattactctggatggtgcagaggttcctcttgggactgggatttcatctggtgtgaatgacacttgtctactatataatgagtacattgtctatgatattgctcagg

SEQ ID NO: 21959 - DNA, 181 bp, Homo sapiens
  MAP TO CHR19.3; EXPRESSED IN FETAL LIVER, SIGNAL = 1.6; EXPRESSED IN LUNG, SIGNAL = 1.4; EXPRESSED IN BONE MARROW, SIGNAL =   1; EXPRESSED IN BRAIN, SIGNAL = 1.3; EXPRESSED IN ADULT LIVER, SIGNAL = 1.4; EXPRESSED IN HELA, SIGNAL =   1; NT HIT: AB002456.1, EVALUE 2.00e-13; SWISSPROT HIT: Q08477, EVALUE 1.10e-02; EST_HUMAN HIT: BG741091.1, EVALUE 4.00e-03
tgtcacatgtttctactatgctgcgctttgagggagtaagtgtggtctctggcttggagcctcaccccacacccaaagtccctccctcaccctttccatggtttctgatggtcctcattcatgtcagccaccattgcaccaaaagacgaggccttctacaagttcctgaagccctggctgg

SEQ ID NO: 21960 - DNA, 149 bp, Homo sapiens
  MAP TO CHR19.3; EXPRESSED IN HELA, SIGNAL = 3.3; EXPRESSED IN LUNG, SIGNAL = 4.1; EXPRESSED IN BONE MARROW, SIGNAL = 1.5; EXPRESSED IN ADULT LIVER, SIGNAL = 2.8; EXPRESSED IN BRAIN, SIGNAL = 2.4; EXPRESSED IN PLACENTA, SIGNAL = 2.6; EST_HUMAN HIT: W58737.1, EVALUE 2.00e-78; NT HIT: gi15301293, EVALUE 1.00e-78; SWISSPROT HIT: P49862, EVALUE 4.00e-25
gcccagggtgacaagattattgatggcgccccatgtgcaagaggctcccacccatggcaggtggccctgctcagtggcaatcagctccactgcggaggcgtcctggtcaatgagcgctgggtgctcactgccgcccactgcaagatgaa

SEQ ID NO: 21961 - DNA, 238 bp, Homo sapiens
  MAP TO CHR16.3; EXPRESSED IN HEART, SIGNAL = 2.6; EXPRESSED IN BONE MARROW, SIGNAL = 4.2; EXPRESSED IN ADULT LIVER, SIGNAL = 3.7; EXPRESSED IN BRAIN, SIGNAL = 4.5; EST_HUMAN HIT: BF031605.1, EVALUE 8.00e-02; NT HIT: AF243090.1, EVALUE 8.60e-01; SWISSPROT HIT: Q58597, EVALUE 4.30e-01
caccacccacaatcttttgaagaccacaaccagaaaccacagcaatcacgttgaaacgaagcctataactggggtcttcaccctgtctttctttgtcttcactcaatgccacttctaatttgtgtgcagacaggctgtagcctgatgaccttgtgaaatacttcttctcccagcccactgggtgtctttggcgggctttattctccatgaaaatagcagctgactccttcctcctcat

SEQ ID NO: 21962 - DNA, 322 bp, Homo sapiens
  MAP TO CHR18.3; EXPRESSED IN FETAL LIVER, SIGNAL =  17; EXPRESSED IN BRAIN, SIGNAL = 5.6; EXPRESSED IN ADULT LIVER, SIGNAL = 6.2; EXPRESSED IN HELA, SIGNAL =  51; EST_HUMAN HIT: AV726496.1, EVALUE 6.00e-62; NT HIT: X01111.1, EVALUE 4.00e-62; SWISSPROT HIT: P04406, EVALUE 4.00e-28
ggggtctgcatggaaactgtgaggaggggagagtctcagtgttgtggaggactgagtgcggcagggactccccctctctcttcctcttgtgctctcgctggggctggtgtccagctagctgctgcctttggaggccatgtggaccataaggtctactaccctgttgctgtagccaaattcattctcataccaggaaataagcttgacaaagtggttgttgagggcaatgcccaccccagctttgaaggtggaagagtgggtgatgctgttaaagtcagaggcgacaacctggtgctcagtgtagcccaggatgccctcaagg

SEQ ID NO: 21963 - DNA, 274 bp, Homo sapiens
  MAP TO CHR16.3; EXPRESSED IN LUNG, SIGNAL = 1.6; EXPRESSED IN BRAIN, SIGNAL = 1.6; EXPRESSED IN ADULT LIVER, SIGNAL = 1.4; EXPRESSED IN HELA, SIGNAL = 1.5; EXPRESSED IN PLACENTA, SIGNAL = 1.5; EXPRESSED IN HEART, SIGNAL = 2.1; NT HIT: AF036166.2, EVALUE 4.00e-03; SWISSPROT HIT: P17277, EVALUE 4.00e-04
tcagtggtttttgcagcagcagaaaagcgcctgcaggcggccgggttcctctacggtgacctccgagctggtggtaaattgcatctctcgacagaggtggctgagggaagcgccgggatcaatcctcacccggggaggacaggactggagtgctggacctgcacgaccctgagtgcagtgcggtcggggtggagggtccgctggggatcggccatgccaaaaggcatgctctggaagccaggccacgacaagtcctcccagtcccgcggaatgc

SEQ ID NO: 21964 - DNA, 228 bp, Homo sapiens
  MAP TO CHR16.3; EXPRESSED IN BONE MARROW, SIGNAL = 1.1; EXPRESSED IN BRAIN, SIGNAL = 1.2; EXPRESSED IN ADULT LIVER, SIGNAL = 1.4; SWISSPROT HIT: P75251, EVALUE 7.60e+00
agcaagcaccagtgccaatacatgggtgtaaggcagatactgccaagtgtttgcatctacgcatctgcttacatcatctagttgtgtgcttacatcatctacccatgtgcttacatcatctacccatgtgcttgcatcatctatccatgtgcttacatcatctacccaagtgcttacatcatctacccatgtgcttacatcacctacccatgtgcttacatcatctag

SEQ ID NO: 21965 - DNA, 200 bp, Homo sapiens
  MAP TO CHR18.3; EXPRESSED IN BONE MARROW, SIGNAL = 1.4; EXPRESSED IN ADULT LIVER, SIGNAL = 1.1; EXPRESSED IN PLACENTA, SIGNAL = 0.99; SWISSPROT HIT: O27131, EVALUE 1.40e+00; EST_HUMAN HIT: BG207614.1, EVALUE 2.60e-01
tctggggcttcttgagggtccagactcatacttaacaccctgattaacagcccaattgtgttttgattcatggctagagtgtttactatcatctctcctaaagagccattggtcagtaaacatgggaataaaaagtgctgcttcttgtccatgaatcatctcattttccccaccacattctttatattgttcactagatt

SEQ ID NO: 21966 - DNA, 138 bp, Homo sapiens
  MAP TO CHR18.3; EXPRESSED IN ADULT LIVER, SIGNAL = 2.3; EXPRESSED IN PLACENTA, SIGNAL = 1.9; EXPRESSED IN HELA, SIGNAL = 1.9; EXPRESSED IN LUNG, SIGNAL = 2.2; EXPRESSED IN BONE MARROW, SIGNAL = 1.5; NT HIT: X77081.1, EVALUE 1.20e-01; EST_HUMAN HIT: W39366.1, EVALUE 1.70e-01; SWISSPROT HIT: P24054, EVALUE 1.50e+00
ctcttgcttgtactgtccatctcgaacactctcacatgcctccttccctccagcatccctgctgtggtgccatgcagactgcgactgctctgtgctctcttctactctgagtcgccttcccccatggcaggggctcat

SEQ ID NO: 21967 - DNA, 105 bp, Homo sapiens
  MAP TO CHR14.3; EXPRESSED IN BRAIN, SIGNAL = 1.5; EXPRESSED IN ADULT LIVER, SIGNAL = 1.4; EXPRESSED IN PLACENTA, SIGNAL = 1.3; NT HIT: AF403567.1, EVALUE 3.40e-01; EST_HUMAN HIT: AA397628.1, EVALUE 1.30e-01; SWISSPROT HIT: P43920, EVALUE 6.10e+00
atagtccataatgatgaagcttggagtatgatttcacctgatgaactgccaatccatctattggcaatgtattcatctagaaataattatatcaatgacaattga

SEQ ID NO: 21968 - DNA, 85 bp, Homo sapiens
  MAP TO CHR18.3; EXPRESSED IN LUNG, SIGNAL = 1.6; EXPRESSED IN ADULT LIVER, SIGNAL = 1.2; EXPRESSED IN BRAIN, SIGNAL = 1.3; EXPRESSED IN PLACENTA, SIGNAL =   1; NT HIT: gi15305857, EVALUE 1.00e-40; EST_HUMAN HIT: AI025916.1, EVALUE 2.00e-40
gatccagaaatgacgctgtctgggtcaacatttcagggaggagtctgccaccagtgtaatgtatcaataaacttcatgcaagcat

SEQ ID NO: 21969 - DNA, 262 bp, Homo sapiens
  MAP TO CHR18.3; EXPRESSED IN LUNG, SIGNAL = 2.6; EXPRESSED IN BONE MARROW, SIGNAL = 1.3; EXPRESSED IN ADULT LIVER, SIGNAL = 2.3; NT HIT: gi7305360, EVALUE 9.50e-01; EST_HUMAN HIT: BF513096.1, EVALUE 8.90e-02; SWISSPROT HIT: Q9P286, EVALUE 5.20e-01
gcagggcaggcatgctgcattcagagcctgtgagacactccccagggctggtcggaaagcagctggttctgaagaggaggctgtaaggcttccaatcttggggaccccttgtgtctggaaagagggatctgggagtcctagaaaaatcttccagggcaggtctccattccagagagtaaaagctgcagccttgagcagcctcttctcctcccagctgtccccgttcaggtcagggaccagggcagtctttgtcaccagggag

SEQ ID NO: 21970 - DNA, 128 bp, Homo sapiens
  MAP TO CHR16.3; EXPRESSED IN HELA, SIGNAL = 1.1; EXPRESSED IN LUNG, SIGNAL = 1.2; EXPRESSED IN ADULT LIVER, SIGNAL = 1.2; SWISSPROT HIT: P54842, EVALUE 2.70e+00; NT HIT: AF064875.1, EVALUE 7.00e-03
gagaggaacaggagtggtggtggcatcatagatgacatttccaagatgggatggaatgagctggatcccagggatgaagcagggctgtatcagatggtgtctccacaccctgatgatgatgatgatgg

SEQ ID NO: 21971 - DNA, 141 bp, Homo sapiens
  MAP TO CHR18.3; EXPRESSED IN ADULT LIVER, SIGNAL =   1; EXPRESSED IN FETAL LIVER, SIGNAL = 1.1; EXPRESSED IN BONE MARROW, SIGNAL = 0.76; EXPRESSED IN BRAIN, SIGNAL =   1; SWISSPROT HIT: P08031, EVALUE 2.60e+00
ttctttctttccaccagtgccctcaagaacttcacacccaaactgccagccataatcctgaatggccttgggtgaggattgagccacgccggtggaaatgcacagggtggtttctggcaaccatgccctccccaacgcagg

SEQ ID NO: 21972 - DNA, 95 bp, Homo sapiens
  MAP TO CHR16.3; EXPRESSED IN ADULT LIVER, SIGNAL = 0.99; EXPRESSED IN PLACENTA, SIGNAL = 0.97; EXPRESSED IN HELA, SIGNAL = 0.89; EST_HUMAN HIT: BI194807.1, EVALUE 2.80e-02
atggcctccctccctggccccgtggcctctcctgtggacagggagcaagctgcctggcagaggccccgactctcacagcgggagctgtcagcatg

SEQ ID NO: 21973 - DNA, 174 bp, Homo sapiens
  MAP TO CHR16.3; EXPRESSED IN FETAL LIVER, SIGNAL = 6.9; EXPRESSED IN LUNG, SIGNAL = 7.7; EXPRESSED IN ADULT LIVER, SIGNAL =  10; EXPRESSED IN BRAIN, SIGNAL =   8; EXPRESSED IN PLACENTA, SIGNAL = 9.4; EXPRESSED IN HELA, SIGNAL = 8.8; SWISSPROT HIT: P18834, EVALUE 2.60e-02; NT HIT: AL022004.1, EVALUE 9.50e+00; EST_HUMAN HIT: AI190492.1, EVALUE 3.00e-68
atgcccgctggggtaggtcctgcggaccccggccactggagccactcatcatttccgacggatgggccggaggggccgccggccgccccagccagggtctcggtagcctgcaaggagagaaagaggtgggagcagcccgcgcggggccctgcgtcttgcataggcgcttctggt

SEQ ID NO: 21974 - DNA, 182 bp, Homo sapiens
  MAP TO CHR16.3; EXPRESSED IN BONE MARROW, SIGNAL = 1.5; EXPRESSED IN FETAL LIVER, SIGNAL = 1.4; EXPRESSED IN BRAIN, SIGNAL = 1.4; EXPRESSED IN ADULT LIVER, SIGNAL =   1; SWISSPROT HIT: P14078, EVALUE 1.10e+00; NT HIT: AL590464.1, EVALUE 2.50e+00
cgctgacaacctctcgttccaccccaagatgcagggtccgccgatagtggcaccctccgagaatcactttcctgaattatataagatcgcacagtgctcggccgacaccttggagcagaatgacaaagctgtctgggagcctgcaggcccctccaccccagcgtggggactggaggattttg

SEQ ID NO: 21975 - DNA, 76 bp, Homo sapiens
  MAP TO CHR18.3; EXPRESSED IN FETAL LIVER, SIGNAL = 2.2; EXPRESSED IN LUNG, SIGNAL = 3.7; EXPRESSED IN BONE MARROW, SIGNAL = 3.7; EXPRESSED IN ADULT LIVER, SIGNAL = 3.4; EXPRESSED IN PLACENTA, SIGNAL = 2.9; EXPRESSED IN HELA, SIGNAL = 2.4; NT HIT: Z99121.1, EVALUE 5.70e-02; EST_HUMAN HIT: AV700933.1, EVALUE 3.30e-01; SWISSPROT HIT: P39853, EVALUE 4.80e+00
cttaagatacacccgccaaaagaaggcactgccactgatgaagaggagcctgaggaatgggaaagatctgatgggg

SEQ ID NO: 21976 - DNA, 179 bp, Homo sapiens
  MAP TO CHR16.3; EXPRESSED IN PLACENTA, SIGNAL = 2.9; EXPRESSED IN HEART, SIGNAL = 2.5; EXPRESSED IN BONE MARROW, SIGNAL = 4.5; EXPRESSED IN FETAL LIVER, SIGNAL =   5; EXPRESSED IN ADULT LIVER, SIGNAL = 2.4; EXPRESSED IN BRAIN, SIGNAL = 3.1; SWISSPROT HIT: P25655, EVALUE 9.70e+00; NT HIT: gi14775074, EVALUE 8.00e-96; EST_HUMAN HIT: AL046037.2, EVALUE 3.00e-96
ttgtggttgtgatgggagggagttcttctggctgcttgacatctttctttggagcagagagttgctcatctaaattcttcaggcgatctttatcctttaggaggtttccaggttttagctcattgatgtctaatgcaaggttcttgcagagaacctcgatttcaaacttcaagtttaac

SEQ ID NO: 21977 - DNA, 142 bp, Homo sapiens
  MAP TO CHR18.3; EXPRESSED IN ADULT LIVER, SIGNAL = 1.2; SWISSPROT HIT: Q00742, EVALUE 1.30e-01; EST_HUMAN HIT: BF815146.1, EVALUE 2.00e-07
atgctgccactcagaaagggacctggagccaggcatgccgtctttttgactggatgcttcggcctcaatgctccaaccttgatgcaggaggaacctattcctggatgccccaggacttgtatgaccaattctatgcctattc

SEQ ID NO: 21978 - DNA, 87 bp, Homo sapiens
  MAP TO CHR16.3; EXPRESSED IN BRAIN, SIGNAL = 1.5; EXPRESSED IN ADULT LIVER, SIGNAL = 1.1; EXPRESSED IN HEART, SIGNAL = 1.6; EXPRESSED IN LUNG, SIGNAL = 1.9; NT HIT: AL591788.1, EVALUE 6.80e-02
tgatgctgacagggggtaccagcacccccaggccatcgtaattagcatctggccgtgatcccagtctcctggcagcacattcctcat

SEQ ID NO: 21979 - DNA, 256 bp, Homo sapiens
  MAP TO CHR16.3; EXPRESSED IN BRAIN, SIGNAL = 2.6; EXPRESSED IN ADULT LIVER, SIGNAL = 1.7; EXPRESSED IN PLACENTA, SIGNAL = 1.9; EXPRESSED IN HELA, SIGNAL = 1.6; EXPRESSED IN LUNG, SIGNAL = 1.3; EXPRESSED IN BONE MARROW, SIGNAL = 1.7; EXPRESSED IN FETAL LIVER, SIGNAL = 1.1; SWISSPROT HIT: P09042, EVALUE 3.00e-03; NT HIT: gi15793034, EVALUE 2.30e-01; EST_HUMAN HIT: BI764403.1, EVALUE 0.00e+00
gactggagtgacagcctggcccaactggctcaagccagggcagccctctgtggaatcccaaccccgagcctggcgtccggcctgtggcgcaccctgcaagtgggctggaacatgcagctgctgcccgcgggcttggcgtcctttgttgaagtggtcagcctatggtttgcagaggggcagcggtacagccacgcggcaggagagtgtgctcgcaacgccacctgcacccactacacgcaggtgagtgtgctgcagg

SEQ ID NO: 21980 - DNA, 99 bp, Homo sapiens
  MAP TO CHR18.3; EXPRESSED IN FETAL LIVER, SIGNAL =   1; EXPRESSED IN ADULT LIVER, SIGNAL = 1.8; EXPRESSED IN PLACENTA, SIGNAL = 0.98; EXPRESSED IN HEART, SIGNAL = 2.3; EXPRESSED IN HELA, SIGNAL = 1.3; SWISSPROT HIT: Q9ULJ7, EVALUE 1.60e-02; EST_HUMAN HIT: T74968.1, EVALUE 8.00e-49
gatggagccactgccctcttcctagctgcccaaggtggttacttggatgttattcgattactgctggcttcaggagcaaaagtcaaccagccaaggcag

SEQ ID NO: 21981 - DNA, 194 bp, Homo sapiens
  MAP TO CHR16.3; EXPRESSED IN LUNG, SIGNAL = 4.3; EXPRESSED IN ADULT LIVER, SIGNAL = 6.9; EXPRESSED IN BRAIN, SIGNAL = 6.3; EXPRESSED IN PLACENTA, SIGNAL = 6.2; EXPRESSED IN HELA, SIGNAL = 5.7; EXPRESSED IN FETAL LIVER, SIGNAL = 7.9; EST_HUMAN HIT: AA706498.1, EVALUE 7.00e-08; SWISSPROT HIT: P15265, EVALUE 5.00e-08
gaacagggcctgacagggaaaaggctgacaggcaggtcgggggactggacagcagctgcctattgggtgacaggcaggtcgggggagtggacagcagctgcctactgggtgacaggcaggtcgggggagtggacagcagctgcctactgggtgacaggcaggtcggcggagtggacagcagctgcctactgggg

SEQ ID NO: 21982 - DNA, 242 bp, Homo sapiens
  MAP TO CHR18.3; EXPRESSED IN LUNG, SIGNAL =  20; EXPRESSED IN FETAL LIVER, SIGNAL =  21; EXPRESSED IN BONE MARROW, SIGNAL = 7.3; EXPRESSED IN BRAIN, SIGNAL =   4; EXPRESSED IN ADULT LIVER, SIGNAL = 5.7; EXPRESSED IN HELA, SIGNAL =  35; EST_HUMAN HIT: BF028750.1, EVALUE 6.00e-46; SWISSPROT HIT: P50890, EVALUE 1.00e-26; NT HIT: M64923.1, EVALUE 1.00e-55
aacctgtgatgtcctgaacatgaaagaggaggatgtcctcaaatttcttgcagcaggaactcacttgggtggcaccaagattgacttccaagtggaacagtacatctgcaaaaggaaaagtgatggcatctgcgtcctaaatctgaagaggacctgggagaagcttctgctggtggctcatgccatcatcactgttgaaagccctgctgattcagtgtcatattctccaggaacactggcaa

SEQ ID NO: 21983 - DNA, 107 bp, Homo sapiens
  MAP TO CHR16.3; EXPRESSED IN BRAIN, SIGNAL = 8.6; EXPRESSED IN ADULT LIVER, SIGNAL = 8.8; EXPRESSED IN PLACENTA, SIGNAL = 7.7; EXPRESSED IN HEART, SIGNAL = 5.2; EST_HUMAN HIT: BF804358.1, EVALUE 2.00e-53; SWISSPROT HIT: P46938, EVALUE 8.00e+00; NT HIT: gi14746257, EVALUE 3.40e-01
caaaagtggacatgacatcctctgtggagaggtctatggcattgtggcctagaggaggtgatggtggggcactggggaaggcttcctggtagaggcggcaccagtac

SEQ ID NO: 21984 - DNA, 160 bp, Homo sapiens
  MAP TO CHR16.3; EXPRESSED IN HEART, SIGNAL = 1.7; EXPRESSED IN LUNG, SIGNAL = 1.5; EXPRESSED IN FETAL LIVER, SIGNAL = 0.78; EXPRESSED IN BRAIN, SIGNAL =   2; EXPRESSED IN ADULT LIVER, SIGNAL = 1.4; EXPRESSED IN PLACENTA, SIGNAL = 1.4; SWISSPROT HIT: P08054, EVALUE 2.60e+00; NT HIT: X92589.1, EVALUE 3.50e-02; EST_HUMAN HIT: BI918129.1, EVALUE 3.20e+00
gattcaaggtctttgaccctggtgacacaacaccagtacgggattttttcaaactttttgcatttattgtcgaagaagcaggggcagcaaagaatatttggctttccctggaagtcccaagggatgctggacagaacaaccccaagtggaaagacccttg

SEQ ID NO: 21985 - DNA, 283 bp, Homo sapiens
  MAP TO CHR19.3; EXPRESSED IN HELA, SIGNAL =   2; EXPRESSED IN LUNG, SIGNAL = 2.4; EXPRESSED IN BONE MARROW, SIGNAL = 3.2; EXPRESSED IN ADULT LIVER, SIGNAL =  19; SWISSPROT HIT: Q9WTS8, EVALUE 7.00e-09; NT HIT: gi7705828, EVALUE 0.00e+00; EST_HUMAN HIT: BG675225.1, EVALUE 0.00e+00
ccagagaggctcttggcgcagttcttgtccctgcggaggtcgtgatcctggtcccaagtggagaagggtacggagaggccgctgggtgggacggtggtggcgcccagctggccggccacgggtgcagtgagctgcaggctataggccgtgtcctcgccacccaggtgcacggagaactgcagcaactcggcgttgccatcccagtcccgcagctgcacggccaggcggctgttgcggtcccccgtgatgctatgcaccttctccagacccagccagaactcgc

SEQ ID NO: 21986 - DNA, 177 bp, Homo sapiens
  MAP TO CHR14.3; EXPRESSED IN BRAIN, SIGNAL =   1; EXPRESSED IN ADULT LIVER, SIGNAL = 0.92; SWISSPROT HIT: P22555, EVALUE 1.50e+00; NT HIT: gi15925705, EVALUE 2.40e+00; EST_HUMAN HIT: AA554188.1, EVALUE 2.30e-01
gtcacaggtttcccaggccccaaaatgaccctcactctctcctatttcctctgccttacacctatatataaaaagagactgggaagtgcacatcctgattccctcctggatcaggatggacaaccggattttttaatccactgtgaactggaattacagccgctcaaagccaaggtg

SEQ ID NO: 21987 - DNA, 161 bp, Homo sapiens; identical to SEQ ID NO: 14916
  MAP TO CHR18.3; EXPRESSED IN PLACENTA, SIGNAL = 1.3; EXPRESSED IN HELA, SIGNAL = 1.1; EXPRESSED IN LUNG, SIGNAL = 1.3; EXPRESSED IN BONE MARROW, SIGNAL = 1.7; EXPRESSED IN FETAL LIVER, SIGNAL = 1.5; EXPRESSED IN ADULT LIVER, SIGNAL = 1.8; SWISSPROT HIT: P34348, EVALUE 5.80e+00; NT HIT: AJ229043.1, EVALUE 8.70e+00

SEQ ID NO: 21988 - DNA, 120 bp, Homo sapiens
  MAP TO CHR16.3; EXPRESSED IN ADULT LIVER, SIGNAL = 1.2; EXPRESSED IN PLACENTA, SIGNAL = 1.5; EXPRESSED IN HEART, SIGNAL =   2; EXPRESSED IN HELA, SIGNAL = 1.5; EXPRESSED IN BONE MARROW, SIGNAL = 1.7; EXPRESSED IN FETAL LIVER, SIGNAL = 1.7; EXPRESSED IN BRAIN, SIGNAL = 1.4; EST_HUMAN HIT: BE090068.1, EVALUE 3.00e-27; SWISSPROT HIT: P43152, EVALUE 6.00e+00; NT HIT: AE000975.1, EVALUE 3.90e-01
gtgactctgaacaacgtggaagtctgcagtgaaaacatctccactctgaagaagacactggaggtacgagggaaattgcctatcagtggtcagcagccatcttttcccatgttgagatag

SEQ ID NO: 21989 - DNA, 146 bp, Homo sapiens
  MAP TO CHR18.3; EXPRESSED IN BRAIN, SIGNAL = 1.2; EXPRESSED IN ADULT LIVER, SIGNAL = 1.2; NT HIT: AF035948.1, EVALUE 2.00e+00; SWISSPROT HIT: Q96063, EVALUE 5.20e-01
tcctttgtgccttggtctccagagttcacaccaccctctttgtcattggcttcaagcccctggaaagcccggtggctggtgttgaggagcccgtggctgtggacagctgcctgccccatcctgccgtgctgtgttttcccacggag

SEQ ID NO: 21990 - DNA, 158 bp, Homo sapiens
  MAP TO CHR16.3; EXPRESSED IN LUNG, SIGNAL = 1.3; EXPRESSED IN FETAL LIVER, SIGNAL = 0.87; EXPRESSED IN BRAIN, SIGNAL = 1.1; EXPRESSED IN ADULT LIVER, SIGNAL = 1.4; EXPRESSED IN PLACENTA, SIGNAL = 1.2; EXPRESSED IN HELA, SIGNAL = 1.3; SWISSPROT HIT: P09951, EVALUE 3.90e-01; EST_HUMAN HIT: BI519027.1, EVALUE 8.00e-01
tgagggtgtggcagtgcagagaaggggccctgctgaaggacaggaaagtgggctgggagcagctccaggaagcccacttccatggcacagttagcagggatgaggtagcaagaatggaggcggcagctggtgaaacatgcctctctcattcaccccag

SEQ ID NO: 21991 - DNA, 217 bp, Homo sapiens
  MAP TO CHR14.3; EXPRESSED IN ADULT LIVER, SIGNAL = 3.3; SWISSPROT HIT: Q9ZL58, EVALUE 2.90e+00; NT HIT: gi14752922, EVALUE 1.00e-119; EST_HUMAN HIT: AI052724.1, EVALUE 1.00e-119
ccacaccactcttaaagttctcaatccttttcttccccatcttgttggttatccaccaggcccaggttggcatgtattgccacaaatatgttactaacaagaaaggttgttctgagatccaaacttctttcaaatcattggccatgctgattaacatcagccgcacacaacgactggttgtcatcttgtgggactggtctccattattgcctatagt

SEQ ID NO: 21992 - DNA, 133 bp, Homo sapiens
  MAP TO CHR19.3; EXPRESSED IN BONE MARROW, SIGNAL =   3; EXPRESSED IN ADULT LIVER, SIGNAL = 1.1; SWISSPROT HIT: Q51508, EVALUE 3.50e+00; NT HIT: AF072845.1, EVALUE 4.00e-69; EST_HUMAN HIT: BI521021.1, EVALUE 2.00e-68
ccttgggcggggctgcggcgtgggcgtgcgcacaggaacaccgcccccacgatgagcagcgatgccaccgcatcagcagccacgaggcctgccaggagcggcagagagagggacccacatccggaacaagagc

SEQ ID NO: 21993 - DNA, 238 bp, Homo sapiens
  MAP TO CHR14.3; EXPRESSED IN BONE MARROW, SIGNAL = 1.8; EXPRESSED IN ADULT LIVER, SIGNAL = 1.4; EXPRESSED IN PLACENTA, SIGNAL = 0.89; EXPRESSED IN HELA, SIGNAL = 1.6; SWISSPROT HIT: P24096, EVALUE 1.70e+00
ccccgacaaggcccaggaggcagctgatcagcaacaagtggatgggtcatgcctggactggtactcagaaaactggagctctgaactctactattaccacaagttattatctgaccatgaacctgacccttgtgtctctctctgtatggcaatattgcaattgctcacaggctatgcagaaagcattttagatgtctccgataatgatttttccaaagctttggctactgctaaccag

SEQ ID NO: 21994 - DNA, 90 bp, Homo sapiens
  MAP TO CHR14.3; EXPRESSED IN BRAIN, SIGNAL =   1; EXPRESSED IN ADULT LIVER, SIGNAL =   1; NT HIT: AE000011.2, EVALUE 1.10e+00; EST_HUMAN HIT: BE669990.1, EVALUE 4.10e-01
gtgtctatgtcaaagcagaagttgcaaaatgtaattgagatgatacccagaaagcacgcaggactgcatgtggtgcagtgtaaaccgaaa

SEQ ID NO: 21995 - DNA, 287 bp, Homo sapiens
  MAP TO CHR18.3; EXPRESSED IN HELA, SIGNAL = 2.1; EXPRESSED IN BONE MARROW, SIGNAL = 1.9; EXPRESSED IN ADULT LIVER, SIGNAL = 1.7; EXPRESSED IN BRAIN, SIGNAL = 2.1; SWISSPROT HIT: P07510, EVALUE 4.90e-01; NT HIT: AF350275.1, EVALUE 2.60e-01; EST_HUMAN HIT: BG831929.1, EVALUE 3.90e-01
ctgttcacatctgtgagctgcagggggccgccctccactagcagcagcagctggacctcctgctgcatactgtgccctttctgcagactaccaggatcaggtagattgcagccacaatactgggctctggggcttgcagccagagatctcctgcaccagctgccaccctctaaatccattttgccctttgtctgctgagggcctgatagcagtagggcccagcagcttgcagccagttcagcaaatgtgacattctctgctgaggcaaaattgcatgtagtgtctgt

SEQ ID NO: 21996 - DNA, 88 bp, Homo sapiens
  MAP TO CHR14.3; EXPRESSED IN HELA, SIGNAL = 4.9; EXPRESSED IN ADULT LIVER, SIGNAL = 4.5; EXPRESSED IN BRAIN, SIGNAL = 1.9; EST_HUMAN HIT: AI499566.1, EVALUE 3.00e-42; SWISSPROT HIT: Q06323, EVALUE 3.00e-03; NT HIT: AF079558.1, EVALUE 2.00e-42
atagaaggccctcaggtccagcaccatggccctgagctccccataggctgcctcatctcgctcatgcaccaaggcccggtaatccatc

SEQ ID NO: 21997 - DNA, 114 bp, Homo sapiens
  MAP TO CHR19.3; EXPRESSED IN ADULT LIVER, SIGNAL = 1.5; EXPRESSED IN HELA, SIGNAL = 4.2; EXPRESSED IN PLACENTA, SIGNAL = 1.8; EXPRESSED IN LUNG, SIGNAL = 2.7; EXPRESSED IN FETAL LIVER, SIGNAL = 1.5; NT HIT: gi14764315, EVALUE 3.00e-51; EST_HUMAN HIT: BE910027.1, EVALUE 3.00e-33
tcatcccaacaggactacctgggccctctgctggacggcggggtcctggggctgagcgtggagcaggtgggcacgctgtttgccaacattgaggacatctacgagttcagcagg

SEQ ID NO: 21998 - DNA, 177 bp, Homo sapiens
  MAP TO CHR19.3; EXPRESSED IN ADULT LIVER, SIGNAL = 1.6; EXPRESSED IN PLACENTA, SIGNAL = 1.2; EXPRESSED IN BRAIN, SIGNAL = 1.4; SWISSPROT HIT: P12965, EVALUE 5.00e-01; NT HIT: gi9629267, EVALUE 1.00e-02; EST_HUMAN HIT: BE731523.1, EVALUE 3.00e-90
tgtgcgctatatgcctgcctgcccgcccgctctgtggtcccgagtcgggggaccccgcaccccccgggcaagggaaggatttccgagtccctggccttgcctgcaggagcctctctccgcagcctccacggagcgcgcggcgctgctcggctgccaggacctgctgaggacaaacgg

SEQ ID NO: 21999 - DNA, 112 bp, Homo sapiens
  MAP TO CHR18.3; EXPRESSED IN FETAL LIVER, SIGNAL = 6.7; EXPRESSED IN BONE MARROW, SIGNAL = 3.7; EXPRESSED IN BRAIN, SIGNAL = 1.6; EXPRESSED IN ADULT LIVER, SIGNAL = 1.3; SWISSPROT HIT: P22830, EVALUE 3.10e-01; NT HIT: AJ250235.1, EVALUE 2.00e-52; EST_HUMAN HIT: BI551753.1, EVALUE 2.00e-40
ttatttgtacctgatgttagactcatacctcttctgcggttgaacttgaggttttgcaccctgggcatgctgggctgtttctgtggtgacggccgctgcagctgcacctgac

SEQ ID NO: 22000 - DNA, 355 bp, Homo sapiens
  MAP TO CHR19.3; EXPRESSED IN BONE MARROW, SIGNAL = 1.1; EXPRESSED IN BRAIN, SIGNAL = 1.4; EXPRESSED IN ADULT LIVER, SIGNAL = 1.7; EXPRESSED IN HELA, SIGNAL = 0.93; SWISSPROT HIT: Q9QZS3, EVALUE 2.80e-02; NT HIT: gi14766827, EVALUE 1.30e+00
ccgctctctcctgcgtggtcgctcttggattcggtgcaggaatcactggggcttcttgggcgccgggaacctttcatggtgaaaatttccagggttctccaagtcagccactgccagtgtttgtctgtctcctgcaaagatttcttcttggctcccgaatcctttagttcctttgagagagtggtgtcagccccaaagctgctcccgaaggcttgggttgtgtagcgacggggctgtggccagcggcaggtggacgaggctccgacaactgagctcttgggggaatcttgtacactgtcagcagggggtggagccaggggatttgtcagcaggaactgatgtgattggctgttcc

SEQ ID NO: 22001 - DNA, 88 bp, Homo sapiens
  MAP TO CHR16.3; EXPRESSED IN LUNG, SIGNAL = 1.3; EXPRESSED IN ADULT LIVER, SIGNAL = 1.2; EXPRESSED IN PLACENTA, SIGNAL = 1.2; EXPRESSED IN HELA, SIGNAL = 1.9; SWISSPROT HIT: O70157, EVALUE 8.10e+00; NT HIT: gi14778795, EVALUE 1.00e-40; EST_HUMAN HIT: BF870886.1, EVALUE 2.00e-40
tactcaagcttccggagccgtggtaggtgagggagaacctccacaatgttcagcaccacctggtcactgagctggttgtcccgaaaac

SEQ ID NO: 22002 - DNA, 205 bp, Homo sapiens
  MAP TO CHR16.3; EXPRESSED IN LUNG, SIGNAL = 1.1; EXPRESSED IN FETAL LIVER, SIGNAL = 0.82; EXPRESSED IN BRAIN, SIGNAL = 1.3; EXPRESSED IN ADULT LIVER, SIGNAL = 1.4; EXPRESSED IN PLACENTA, SIGNAL = 0.95; SWISSPROT HIT: Q62170, EVALUE 1.00e-04; EST_HUMAN HIT: BE970015.1, EVALUE 1.10e+00
tgtcagatggactggtggcattggaggtgacgtctctgaagttgtgtagtgtggccttgctgtcaggtggactggtggcattggaggtgacgtctctgaagttgtgtagtgtggcctcgctgtcagttggactggtggcattggaggtgacgtctctgaagttgtgtagtgtggccttgctgtcaggtggactggtggtatcatt

SEQ ID NO: 22003 - DNA, 154 bp, Homo sapiens
  MAP TO CHR16.3; EXPRESSED IN PLACENTA, SIGNAL = 1.5; EXPRESSED IN BRAIN, SIGNAL = 1.4; EXPRESSED IN ADULT LIVER, SIGNAL = 1.7; SWISSPROT HIT: P39766, EVALUE 1.20e+00; NT HIT: D88802.1, EVALUE 2.10e+00; EST_HUMAN HIT: AI002612.1, EVALUE 3.10e+00
gcacaaagacggcaccctgcatagccattttgcatgtctgcttcactgggtggactgagtcgccaatgcccagcaagacagtagggccgattttgatctctttgggaacaggcattgagtctttgacttcaatcactcgccacatcaatgtctc

SEQ ID NO: 22004 - DNA, 119 bp, Homo sapiens
  MAP TO CHR16.3; EXPRESSED IN HELA, SIGNAL = 3.5; EXPRESSED IN BONE MARROW, SIGNAL =   4; EXPRESSED IN BRAIN, SIGNAL = 4.4; EXPRESSED IN ADULT LIVER, SIGNAL = 3.6; EXPRESSED IN PLACENTA, SIGNAL = 2.9; SWISSPROT HIT: P01266, EVALUE 2.40e-01; NT HIT: Z26042.1, EVALUE 1.50e+00
tgctttccactgggaaaaggagttcagtgtaagctgtggtcagtgcagcctcactaggagaagggggccttacatgagtcacccgctctttcaaacagccagtagaggtggggatgcgc

SEQ ID NO: 22005 - DNA, 91 bp, Homo sapiens
  MAP TO CHR14.3; EXPRESSED IN PLACENTA, SIGNAL = 1.1; EXPRESSED IN LUNG, SIGNAL =   1; EXPRESSED IN FETAL LIVER, SIGNAL = 1.4; EXPRESSED IN ADULT LIVER, SIGNAL = 1.1; NT HIT: U13992.1, EVALUE 1.10e+00; EST_HUMAN HIT: AA779319.1, EVALUE 1.60e+00
tgactacctttcagatagactacatttcaggaccagatctcaggcaaacactgaacttcactctgctgacaattcgaaatcttattgtggg

SEQ ID NO: 22006 - DNA, 163 bp, Homo sapiens
  MAP TO CHR18.3; EXPRESSED IN BRAIN, SIGNAL = 1.2; EXPRESSED IN ADULT LIVER, SIGNAL = 1.2; SWISSPROT HIT: P08028, EVALUE 1.50e+00; EST_HUMAN HIT: AW615019.1, EVALUE 5.30e-02; NT HIT: U58977.1, EVALUE 5.60e-01
cattgcgaagctgggttttgggaaaccgccctaaacccacctcaagcccaagaaggctttgaccccaaatccatacaaacacctgctggaactcacagttggaagagatctcttggagagcatgttccacttgcccagtccccaggccactcttttttacagt

SEQ ID NO: 22007 - DNA, 241 bp, Homo sapiens
  MAP TO CHR18.3; EXPRESSED IN ADULT LIVER, SIGNAL = 1.1; EXPRESSED IN BRAIN, SIGNAL = 1.7; EXPRESSED IN PLACENTA, SIGNAL = 1.2; EXPRESSED IN FETAL LIVER, SIGNAL = 1.5; EXPRESSED IN BONE MARROW, SIGNAL = 0.91; SWISSPROT HIT: Q17237, EVALUE 7.60e-01
tattctgagaccctgtttgcctgccctttggcatcattggcagtttttggtggtctactgatcttcctgtttgtgcctcctggttgcccctttttcactggaatgtgccaggttgaagcaatatgtagggcccggtgggatgggccaggaggtggcctttcagatgtggctcctgcatggccctgcttgctctcttgagctgcctgcacttcagtcttaggaccacattcctgctttggcc

SEQ ID NO: 22008 - DNA, 159 bp, Homo sapiens
  MAP TO CHR16.3; EXPRESSED IN FETAL LIVER, SIGNAL = 1.4; EXPRESSED IN ADULT LIVER, SIGNAL = 1.5; EXPRESSED IN PLACENTA, SIGNAL = 1.2; EXPRESSED IN BONE MARROW, SIGNAL = 1.4; SWISSPROT HIT: Q9P2N7, EVALUE 2.00e-09; EST_HUMAN HIT: BF795046.1, EVALUE 2.00e-84; NT HIT: gi13649599, EVALUE 2.00e-84
gtggcctccatgaaccagcgccgtgtggatttctaccttgcctccatcgaagacatgctggtggccatcggcggccggaatgagaacggagcgctctcttcagtagagacgtacagtcccaagactgactcctggtcctatgtggccggcttgccaagg

SEQ ID NO: 22009 - DNA, 309 bp, Homo sapiens
  MAP TO CHR16.3; EXPRESSED IN HEART, SIGNAL = 2.7; EXPRESSED IN LUNG, SIGNAL = 4.4; EXPRESSED IN BONE MARROW, SIGNAL =   3; EXPRESSED IN FETAL LIVER, SIGNAL = 2.9; EXPRESSED IN BRAIN, SIGNAL = 3.3; EXPRESSED IN ADULT LIVER, SIGNAL = 4.4; EXPRESSED IN HELA, SIGNAL = 2.8; EXPRESSED IN PLACENTA, SIGNAL = 3.1; SWISSPROT HIT: P21538, EVALUE 1.20e+00; NT HIT: AE007439.1, EVALUE 2.90e-01
gggaaaagtacagaacatatgagtattccgaatgtttccagagcgattatgctcgctggcgagtgatcccttcatgttgccaccacatggaacgccacctgttcccccgccacggcctctttggggaaaaccaggaaggggatgcagacacgatggacatttcaacacagcgaactcaatttcaagagaaaagggccaaggaccttccgcccctccacgtttgcctctttatgtttttgatccgtattggagaccatctggccacgtttctgttctctgctgcttgtgggttggttggcgttgactctg

SEQ ID NO: 22010 - DNA, 89 bp, Homo sapiens
  MAP TO CHR18.3; EXPRESSED IN HELA, SIGNAL = 1.1; EXPRESSED IN BONE MARROW, SIGNAL = 1.1; EXPRESSED IN BRAIN, SIGNAL = 1.4; EXPRESSED IN ADULT LIVER, SIGNAL = 1.2; EXPRESSED IN PLACENTA, SIGNAL = 1.2; EST_HUMAN HIT: BE564930.1, EVALUE 4.00e-01; NT HIT: AF203977.1, EVALUE 2.80e-01
gtttaaaacccatacttcacaccagcttaccacagtgtcatacctgctgtgggccttcaaggaactctctgaacaccagtcgagattag

SEQ ID NO: 22011 - DNA, 249 bp, Homo sapiens
  MAP TO CHR14.3; EXPRESSED IN ADULT LIVER, SIGNAL = 1.4; EXPRESSED IN PLACENTA, SIGNAL = 1.1; SWISSPROT HIT: P06333, EVALUE 3.70e-01; NT HIT: AJ229043.1, EVALUE 4.00e-03
gacaaagatgcgtgcaaagagaggccttatgaccagacatgtgtatacatacatgagtacatgggcctggatgcacatgtgtgtacatgtgtgtttgagcatggtgctagggaaaagcaacatgagaagaggagattccaaatagaactccagctctccctgaaattctcaaagtgtatcattcaagttaaagcgtattctgatattaatgaagtggatgaggaaaaaaacatgaacaacacgtatggt

SEQ ID NO: 22012 - DNA, 137 bp, Homo sapiens
  MAP TO CHR18.3; EXPRESSED IN ADULT LIVER, SIGNAL = 1.6; EXPRESSED IN PLACENTA, SIGNAL =   2; EXPRESSED IN HELA, SIGNAL = 2.3; EXPRESSED IN FETAL LIVER, SIGNAL = 2.2; EXPRESSED IN LUNG, SIGNAL = 1.7; EXPRESSED IN BONE MARROW, SIGNAL = 1.8; NT HIT: AF142647.1, EVALUE 1.20e-01; SWISSPROT HIT: Q03447, EVALUE 2.60e+00
tcagccagaggcttcaaacactgggacactgctccacatctgtactgtgtgtaactgtccatttattcttgaccaggtattcacttgccctttacgttctcggcattctgctagggctgtggggattgatccaggct

SEQ ID NO: 22013 - DNA, 128 bp, Homo sapiens
  MAP TO CHR19.3; EXPRESSED IN ADULT LIVER, SIGNAL = 2.4; EXPRESSED IN BONE MARROW, SIGNAL = 1.9; SWISSPROT HIT: O75346, EVALUE 8.00e-19; NT HIT: gi14767612, EVALUE 4.00e-66; EST_HUMAN HIT: AV650072.1, EVALUE 6.00e-66
caaggaagatcaggtttctgtagttctctaacatcacatccctatatagattccgctgtgcagcgtccaggcaatgccactcctccagagagaattctatggccacatctctaaattgcaatggtccc

SEQ ID NO: 22014 - DNA, 139 bp, Homo sapiens
  MAP TO CHR14.3; EXPRESSED IN ADULT LIVER, SIGNAL = 0.96; EXPRESSED IN BONE MARROW, SIGNAL = 0.81; EXPRESSED IN FETAL LIVER, SIGNAL =   1; EST_HUMAN HIT: AA448143.1, EVALUE 2.00e-72; SWISSPROT HIT: Q13625, EVALUE 1.00e-15; NT HIT: gi14746508, EVALUE 1.00e-72
ctcatagatgatcctctgcaccagatcgaactctccttccagagacgcgtctaggagcagtgccagggggttaaaccggactctcagcccgtgccccgtccgctccgagttgggcttcttcaagttggtccgcttgttc

SEQ ID NO: 22015 - DNA, 185 bp, Homo sapiens
  MAP TO CHR19.3; EXPRESSED IN FETAL LIVER, SIGNAL = 2.9; EXPRESSED IN ADULT LIVER, SIGNAL = 1.7; EXPRESSED IN PLACENTA, SIGNAL = 2.3; EXPRESSED IN HELA, SIGNAL = 7.2; EXPRESSED IN HEART, SIGNAL = 1.9; EST_HUMAN HIT: BF748184.1, EVALUE 1.00e-36; SWISSPROT HIT: Q03111, EVALUE 3.00e-33; NT HIT: gi13633717, EVALUE 2.00e-99
ccagtgcaccgtccaggtgaggttagagctggggcatcgcgcccaactgcgcaagaagcccaccacggaggggttcactcacgactggatggtgtttgtccgcggccccgagcaatgtgacatccagcacttcgtggagaaggtggtcttctggctgcacgacagcttccccaagcccagacgcg

SEQ ID NO: 22016 - DNA, 114 bp, Homo sapiens
  MAP TO CHR14.3; EXPRESSED IN FETAL LIVER, SIGNAL = 3.2; EXPRESSED IN LUNG, SIGNAL = 2.9; EXPRESSED IN BONE MARROW, SIGNAL = 3.6; EXPRESSED IN BRAIN, SIGNAL = 2.8; EXPRESSED IN ADULT LIVER, SIGNAL = 1.8; EXPRESSED IN HELA, SIGNAL = 2.9; EXPRESSED IN HEART, SIGNAL =   2; EST_HUMAN HIT: BI819977.1, EVALUE 4.00e-51; NT HIT: Y07959.1, EVALUE 5.80e+00
cctggaagcctcacgttgcacatctcgcgaacgatggccttctccttctcactcaggtcctcctcacagctgtcctggagctgccggtccagattctcgtgtacctccaggacc

SEQ ID NO: 22017 - DNA, 124 bp, Homo sapiens
  MAP TO CHR18.3; EXPRESSED IN FETAL LIVER, SIGNAL = 1.4; EXPRESSED IN BONE MARROW, SIGNAL = 1.1; EXPRESSED IN BRAIN, SIGNAL = 1.1; EXPRESSED IN ADULT LIVER, SIGNAL =   1
ctcttgcttcatttcctctgccgctaccatctgctaattctagaatcatttctgactgaagcaaaggattagcacctttgcaacagtgcccttccaggccagcagggtgagtcctccctgtact

SEQ ID NO: 22018 - DNA, 116 bp, Homo sapiens
  MAP TO CHR18.3; EXPRESSED IN ADULT LIVER, SIGNAL = 1.2; EXPRESSED IN HEART, SIGNAL = 1.5; EXPRESSED IN HELA, SIGNAL = 1.1; EXPRESSED IN BONE MARROW, SIGNAL = 1.3; EXPRESSED IN BRAIN, SIGNAL = 1.6; NT HIT: gi6671578, EVALUE 3.80e-01
cataattgaaaatgtgctgaatctaggctccttcctagaaaagtgctcagaaatgctcacaaacgacttcagggcctttctacaatccttgaagctggctcgtgttcctgtggatg

SEQ ID NO: 22019 - DNA, 152 bp, Homo sapiens
  MAP TO CHR14.3; EXPRESSED IN ADULT LIVER, SIGNAL = 2.5; EXPRESSED IN PLACENTA, SIGNAL = 2.1; EXPRESSED IN HELA, SIGNAL = 1.4; EXPRESSED IN FETAL LIVER, SIGNAL = 1.4; EXPRESSED IN BONE MARROW, SIGNAL = 2.8; SWISSPROT HIT: Q50864, EVALUE 5.80e+00; EST_HUMAN HIT: BF526965.1, EVALUE 1.90e-01; NT HIT: M21162.1, EVALUE 5.20e-01
ctctcccttctgagaggaggctgctattccttgcaacgtatttttgtgcagctgaggatctggaggggttctgacctgaacaatgggctgggagctgagtttgggagctggagttctgcataatagagtaggatgaatttggagtttgggga

SEQ ID NO: 22020 - DNA, 229 bp, Homo sapiens
  MAP TO CHR18.3; EXPRESSED IN ADULT LIVER, SIGNAL = 0.95; SWISSPROT HIT: P42662, EVALUE 2.00e-04; EST_HUMAN HIT: BF949611.1, EVALUE 2.00e-30; NT HIT: gi16165088, EVALUE 8.20e-01
atttacttacgattcttggactatgagatgcagaattcaaatgagtgcaagaggaattttgtggctgtgtatgatggaagcagttccgtggaggatttgaaagctaagttctgtagcactgtggctaatgatgtcatgctacgcacgggtcttggggtgatccgcatgtgggcagatgagggcagtcgaaacagccgatttcagatgctcttcacatcctttcaagaac

SEQ ID NO: 22021 - DNA, 106 bp, Homo sapiens
  MAP TO CHR14.3; EXPRESSED IN HELA, SIGNAL = 0.89; EXPRESSED IN BRAIN, SIGNAL = 1.2; EXPRESSED IN ADULT LIVER, SIGNAL = 0.94; NT HIT: AE006883.1, EVALUE 8.60e-02; EST_HUMAN HIT: BF207674.1, EVALUE 5.00e-01
atggaatgtaatgaatggaagattacagaagcttcagaaggcagtgagctgaagttgagtttcatgatctatgaggaagttgctggccatcgtgaagctaagtcag

SEQ ID NO: 22022 - DNA, 110 bp, Homo sapiens
  MAP TO CHR14.3; EXPRESSED IN BRAIN, SIGNAL = 1.2; EXPRESSED IN ADULT LIVER, SIGNAL = 0.98; EXPRESSED IN PLACENTA, SIGNAL = 1.4; EXPRESSED IN HELA, SIGNAL = 0.99; NT HIT: AY051455.1, EVALUE 2.30e-02; SWISSPROT HIT: Q9PL47, EVALUE 1.60e+00
ccagcagtgtgacatggctggcagtggttgaggtggtggacttgggggatggctcagctgatgggccttgtgacgtctccatgagccaggcttctggacttgctgctgtg

SEQ ID NO: 22023 - DNA, 152 bp, Homo sapiens
  MAP TO CHR16.3; EXPRESSED IN BRAIN, SIGNAL = 1.5; EXPRESSED IN ADULT LIVER, SIGNAL = 1.5; EXPRESSED IN HELA, SIGNAL = 1.3; EST_HUMAN HIT: AA683395.1, EVALUE 3.00e-80; NT HIT: gi14777715, EVALUE 2.00e-80; SWISSPROT HIT: P93647, EVALUE 1.00e-09
gtgttggatcctgaacaaaaccataacttcacagatcattatctaaatgtggcctttgacctttctcaagttctttttatagctactgccaacaccactgctaccattccagctgccttgttggacagaatggagatcattcaggttccagg

SEQ ID NO: 22024 - DNA, 130 bp, Homo sapiens
  MAP TO CHR16.3; EXPRESSED IN LUNG, SIGNAL = 1.8; EXPRESSED IN ADULT LIVER, SIGNAL = 1.2; SWISSPROT HIT: P14187, EVALUE 3.50e+00; EST_HUMAN HIT: AW951879.1, EVALUE 4.00e-64; NT HIT: AF108457.1, EVALUE 6.00e-65
ctgatctcatcattccattggaacttcttccgaggtcccattatcctcctgccccctttttcttcatcttcttcctcatccgaacaaatccggtccctctgctccttgtcattctcctcttccagcatcc

SEQ ID NO: 22025 - DNA, 87 bp, Homo sapiens
  MAP TO CHR16.3; EXPRESSED IN ADULT LIVER, SIGNAL = 3.7; EXPRESSED IN PLACENTA, SIGNAL = 2.8; EXPRESSED IN HELA, SIGNAL = 4.5; EXPRESSED IN HEART, SIGNAL = 2.1; EST_HUMAN HIT: BG114926.1, EVALUE 4.00e-29; NT HIT: gi14785609, EVALUE 2.00e-29
gtcatgcagaacaaccacattgcctcggtgaccctgtatggcccccccaggcctggtagccacctgagaacagcggaactcccctag

SEQ ID NO: 22026 - DNA, 83 bp, Homo sapiens
  MAP TO CHR14.3; EXPRESSED IN HELA, SIGNAL =   1; EXPRESSED IN LUNG, SIGNAL = 1.7; EXPRESSED IN ADULT LIVER, SIGNAL = 1.7; EXPRESSED IN PLACENTA, SIGNAL = 1.3; SWISSPROT HIT: Q10593, EVALUE 8.20e+00; EST_HUMAN HIT: AA884737.1, EVALUE 3.70e-01; NT HIT: AL161594.2, EVALUE 1.00e+00
cccaaaactcattatcctccccaaagccaccaatatcaatacatgcaccaaatgcatcgacgcaatagttttctaccttggcc

SEQ ID NO: 22027 - DNA, 172 bp, Homo sapiens
  MAP TO CHR19.3; EXPRESSED IN BRAIN, SIGNAL =   2; EXPRESSED IN ADULT LIVER, SIGNAL = 1.2; NT HIT: U40487.1, EVALUE 2.40e+00; SWISSPROT HIT: Q9XTQ7, EVALUE 1.70e-01; EST_HUMAN HIT: BG767595.1, EVALUE 2.00e-91
atgacctacttctcaggcctcctggtgatcctggcctttgccgcctgggtggcgctggcggagggactgggtgtggccgtgtacgcagcggctgtgctgctgggtgctggctgtgccaccatcctcgtcacctcgctggccatgacggccgacctcatcggtccccacacgg

SEQ ID NO: 22028 - DNA, 92 bp, Homo sapiens
  MAP TO CHR14.3; EXPRESSED IN FETAL LIVER, SIGNAL = 9.6; EXPRESSED IN ADULT LIVER, SIGNAL = 9.5; EXPRESSED IN PLACENTA, SIGNAL =  16; EXPRESSED IN HELA, SIGNAL =  21; EXPRESSED IN HEART, SIGNAL = 8.2; EXPRESSED IN BONE MARROW, SIGNAL =  10; NT HIT: gi14150152, EVALUE 3.00e-44; EST_HUMAN HIT: BI914436.1, EVALUE 5.00e-44
aaatggatgatgaagactgtgaaagaagaagaatggaatgtttggatgaaatgtccaatcttgaaaaacagtttaccgatctcaaagatcag

SEQ ID NO: 22029 - DNA, 94 bp, Homo sapiens
  MAP TO CHR18.3; EXPRESSED IN ADULT LIVER, SIGNAL = 1.4; EXPRESSED IN BRAIN, SIGNAL = 1.3; EXPRESSED IN PLACENTA, SIGNAL = 1.3; EXPRESSED IN BONE MARROW, SIGNAL = 1.5; NT HIT: X52691.1, EVALUE 1.20e+00; EST_HUMAN HIT: BF360835.1, EVALUE 4.30e-01
ggcactgtgcacagttactcattcaggtattcatcaaagattcacacagtcaacaacacagggcccccccattatgttccagatgttgtgccag

SEQ ID NO: 22030 - DNA, 157 bp, Homo sapiens
  MAP TO CHR18.3; EXPRESSED IN LUNG, SIGNAL = 2.5; EXPRESSED IN BONE MARROW, SIGNAL =   2; EXPRESSED IN BRAIN, SIGNAL = 1.6; EXPRESSED IN ADULT LIVER, SIGNAL = 1.6; EXPRESSED IN PLACENTA, SIGNAL = 1.3; EXPRESSED IN HELA, SIGNAL = 2.2; EST_HUMAN HIT: AV733008.1, EVALUE 4.00e-83; NT HIT: gi14766071, EVALUE 7.00e-62
ctgtgtcgaggctcccctgggtgccgcttgcccggcctatggagaggctgcggtggctcaggttacggaactgggagaaagaggaggtggagtctatggtatttctccgggctccaaaggcatttgtgggtaacagaaattgggtataggaaacagt

SEQ ID NO: 22031 - DNA, 193 bp, Homo sapiens
  MAP TO CHR14.3; EXPRESSED IN HEART, SIGNAL = 2.3; EXPRESSED IN BONE MARROW, SIGNAL = 4.1; EXPRESSED IN BRAIN, SIGNAL = 4.6; EXPRESSED IN ADULT LIVER, SIGNAL = 3.1; EXPRESSED IN PLACENTA, SIGNAL =   3; EST_HUMAN HIT: H11996.1, EVALUE 2.50e-01; SWISSPROT HIT: P18727, EVALUE 3.30e+00; NT HIT: gi15809033, EVALUE 6.80e-01
agcagaatttgctgccatggtccacattcaggcagaaggctggaggtgatgaactcctgcaggtctatgcagcatgttcagtgaataagagttttgcagggaagtctagcctgataatcaacagaaggcttcatgcatctctctgcacacccttgtttggccatgatagtggcaggagggttattaagataaa

SEQ ID NO: 22032 - DNA, 171 bp, Homo sapiens
  MAP TO CHR16.3; EXPRESSED IN BONE MARROW, SIGNAL = 1.2; EXPRESSED IN ADULT LIVER, SIGNAL = 1.2; EST_HUMAN HIT: BE070250.1, EVALUE 7.00e-91; SWISSPROT HIT: O81360, EVALUE 2.50e+00; NT HIT: gi14776228, EVALUE 5.00e-91
gaccttgaggctgagcagctcttgggtgggctgcagagtaacagtcctgaagggcgccgggaagccctgaggcgccttgttccgctggcctcggacatgatctttgccagggaggtcatcagccgtaatgggctccagatactaggcaccatcattgaagatggggacgag

SEQ ID NO: 22033 - DNA, 103 bp, Homo sapiens
  MAP TO CHR14.3; EXPRESSED IN BRAIN, SIGNAL =   1; EXPRESSED IN ADULT LIVER, SIGNAL = 0.95; EST_HUMAN HIT: H06921.1, EVALUE 4.00e-51; SWISSPROT HIT: Q9IA18, EVALUE 4.70e+00; NT HIT: gi14749601, EVALUE 2.00e-51
caggaatagaccggcctggcatgctctgcagtttccggatccctggtgcctggtcctgtgcctggtccctgaatatccaagcaaataactgcttcagtacagg

SEQ ID NO: 22034 - DNA, 93 bp, Homo sapiens
  MAP TO CHR18.3; EXPRESSED IN HEART, SIGNAL = 1.8; EXPRESSED IN ADULT LIVER, SIGNAL = 1.2; EXPRESSED IN PLACENTA, SIGNAL = 1.2; EXPRESSED IN HELA, SIGNAL = 0.87; NT HIT: AF418272.1, EVALUE 2.90e-01; EST_HUMAN HIT: BE838395.1, EVALUE 4.30e-01
gaaatattcaccaccacagaacactgtggttgttttgtgcactaaggacagtgctcatatccattcacctatagatgcatttgtccagtttta

SEQ ID NO: 22035 - DNA, 88 bp, Homo sapiens
  MAP TO CHR14.3; EXPRESSED IN HEART, SIGNAL = 1.6; EXPRESSED IN LUNG, SIGNAL =   2; EXPRESSED IN FETAL LIVER, SIGNAL = 1.1; EXPRESSED IN BONE MARROW, SIGNAL = 1.2; EXPRESSED IN ADULT LIVER, SIGNAL = 1.4; EST_HUMAN HIT: BE767787.1, EVALUE 1.00e-41; NT HIT: gi14754065, EVALUE 7.00e-42
ctcctgctgctctgatgcagccacagacatcgacggggacgcttctggcttcggagcttgtgtttcttgctcactagctgagctggtc

SEQ ID NO: 22036 - DNA, 124 bp, Homo sapiens
  MAP TO CHR16.3; EXPRESSED IN LUNG, SIGNAL = 1.4; EXPRESSED IN BONE MARROW, SIGNAL = 1.4; EXPRESSED IN ADULT LIVER, SIGNAL = 1.2; EXPRESSED IN PLACENTA, SIGNAL = 1.5; EXPRESSED IN HELA, SIGNAL = 1.3; NT HIT: gi15315787, EVALUE 9.00e-64; EST_HUMAN HIT: AL135642.1, EVALUE 1.00e-63; SWISSPROT HIT: Q9SXU1, EVALUE 6.00e+00
gtcacctgtctgtgtgcccagtttgaagccgtcctgcagcatggcttgaagaggagtcgaggattggcactcacagcggcagcgatcaagcaggcagcgggctttgccagcaaaaccgaaacag

SEQ ID NO: 22037 - DNA, 193 bp, Homo sapiens
  MAP TO CHR18.3; EXPRESSED IN FETAL LIVER, SIGNAL = 1.9; EXPRESSED IN LUNG, SIGNAL = 1.9; EXPRESSED IN BONE MARROW, SIGNAL = 1.6; EXPRESSED IN ADULT LIVER, SIGNAL =   2; EXPRESSED IN BRAIN, SIGNAL = 2.2; EXPRESSED IN HELA, SIGNAL = 2.5; EXPRESSED IN PLACENTA, SIGNAL = 1.9; SWISSPROT HIT: P44773, EVALUE 5.60e+00; NT HIT: AF234171.2, EVALUE 6.80e-01; EST_HUMAN HIT: AV700065.1, EVALUE 2.50e-01
aataataatgactgcagtgcctgcgggagacttcaatctccttagggattctaaaataccaagagctattccgaatagctcagcccagctgcgacacattcctcagattggtggtagttttgaagagctgctggccagatatttcaacttgcaaactccccaacttgcaaagctgctgctgtttgcactttag

SEQ ID NO: 22038 - DNA, 212 bp, Homo sapiens
  MAP TO CHR14.3; EXPRESSED IN FETAL LIVER, SIGNAL =  99; EXPRESSED IN ADULT LIVER, SIGNAL = 6.1; EXPRESSED IN HELA, SIGNAL =  54; EXPRESSED IN HEART, SIGNAL =  27; EXPRESSED IN LUNG, SIGNAL = 9.3; SWISSPROT HIT: Q90835, EVALUE 3.00e-11; NT HIT: gi16170997, EVALUE 1.00e-11; EST_HUMAN HIT: AL565829.1, EVALUE 5.00e-12
cttgtccaactgtcaggcccttgcatctgccactccaggatgtctacagacttggtggtactgatactatctttgtgggcagagttggtggtactgatactatctttgtgggccgagcaaagcctgggtttctcaaacccggcatggtggtcacctttgctccagtcaacattgcaactaaagatgtgttgaaatgtaccatgaagctttga

SEQ ID NO: 22039 - DNA, 105 bp, Homo sapiens
  MAP TO CHR14.3; EXPRESSED IN ADULT LIVER, SIGNAL =   2; EXPRESSED IN PLACENTA, SIGNAL = 1.5; EXPRESSED IN LUNG, SIGNAL = 1.5; EXPRESSED IN BONE MARROW, SIGNAL = 1.9; SWISSPROT HIT: P70549, EVALUE 9.00e-03; NT HIT: AY009158.1, EVALUE 1.00e-16; EST_HUMAN HIT: AW997120.1, EVALUE 2.00e-09
gggtgttcatcacccatggggacgtcggggtgggcaccatcgtgggctctgctgtgttcaacatcctgtgcataattggagtgtgcggactgtttgctggccagg

SEQ ID NO: 22040 - DNA, 284 bp, Homo sapiens
  MAP TO CHR18.3; EXPRESSED IN LUNG, SIGNAL = 1.6; EXPRESSED IN BONE MARROW, SIGNAL = 1.9; EXPRESSED IN BRAIN, SIGNAL = 2.2; EXPRESSED IN ADULT LIVER, SIGNAL =   2; EXPRESSED IN PLACENTA, SIGNAL = 2.3; EXPRESSED IN HEART, SIGNAL = 1.6; EXPRESSED IN HELA, SIGNAL = 2.1; EST_HUMAN HIT: BE006248.1, EVALUE 9.70e-02; NT HIT: AJ248287.1, EVALUE 1.00e+00
agaaaggaactgaagatacagggagatgaggatgttcaagggcatcatactctctgggatctgactaactactctttcaccacaactcatgagaggacacgttcttcactaagttcaggggatggcttagcaaggtggatattaatctttgaaatgttctatggcgactatgttttcctggaccagagatcctgctttaatattgaattatcaggtctcagtgtgaatgaagaaatcatagagctataccaatcaggtggtaacaattcaccttcagagacaag

SEQ ID NO: 22041 - DNA, 184 bp, Homo sapiens
  MAP TO CHR18.3; EXPRESSED IN BONE MARROW, SIGNAL = 2.1; EXPRESSED IN BRAIN, SIGNAL = 4.8; EXPRESSED IN ADULT LIVER, SIGNAL = 2.4; EXPRESSED IN PLACENTA, SIGNAL = 3.9
ggaggaggaagacaaggagcaggaggagaaggacaaggagggaggaggaagacaaggaggaagaggagaacaaggaggaagaggaagataaggaggaggaggaggaggaagatgaggaggacgaggaggaagaggaggaggagaaagaagagaagggggggagaagcagtcaaaacaggattat

SEQ ID NO: 22042 - DNA, 146 bp, Homo sapiens
  MAP TO CHR18.3; EXPRESSED IN LUNG, SIGNAL = 1.4; EXPRESSED IN BONE MARROW, SIGNAL = 1.9; EXPRESSED IN ADULT LIVER, SIGNAL = 1.4; EXPRESSED IN BRAIN, SIGNAL = 1.8; EXPRESSED IN HELA, SIGNAL = 1.5; EXPRESSED IN PLACENTA, SIGNAL = 1.4; NT HIT: AL163278.2, EVALUE 5.00e-01; SWISSPROT HIT: P27315, EVALUE 3.00e-01
tcagatgaatttcagttttgccgcctggtgtcgaatcctgctttttaaaccttgtctctgcagagtcacccctttttctccagtcccactctcactgctgttggtctgaccctgtatgtctgtgattggatagacagcaactgtcc

SEQ ID NO: 22043 - DNA, 199 bp, Homo sapiens
  MAP TO CHR14.3; EXPRESSED IN BRAIN, SIGNAL =   2; EXPRESSED IN ADULT LIVER, SIGNAL = 1.3; EXPRESSED IN PLACENTA, SIGNAL = 1.5; EXPRESSED IN FETAL LIVER, SIGNAL = 1.3; EXPRESSED IN BONE MARROW, SIGNAL = 1.3
ttgctagctgctgatgagtgaaggagtaattaggcacaagtagttccctgacagcagctgcaaaaaaggcactggcttccttctggagagaatttccaatggcactaatgttatgacacacaggagatgcactgccctccatatggaatgaagccaagccatcaaactcatctgatttaggactgtgaacctgaattcc

SEQ ID NO: 22044 - DNA, 159 bp, Homo sapiens
  MAP TO CHR14.3; EXPRESSED IN ADULT LIVER, SIGNAL = 1.1; EXPRESSED IN PLACENTA, SIGNAL = 0.94; EXPRESSED IN HEART, SIGNAL = 1.6; SWISSPROT HIT: P12673, EVALUE 8.70e-01; NT HIT: AP001510.1, EVALUE 1.40e-01; EST_HUMAN HIT: T59085.1, EVALUE 6.00e-82
tttgctgggccacagacacagcgccgagatacatcccatcggccaaaacgcccacttccgccagctcagccagaaagggccatgttagaacacccgccgtcttccttggctcccaccagcaactgaatttgaggttctcatccttcaggtcggccttcc

SEQ ID NO: 22045 - DNA, 88 bp, Homo sapiens
  MAP TO CHR16.3; EXPRESSED IN PLACENTA, SIGNAL = 0.95; EXPRESSED IN HELA, SIGNAL = 1.1; EXPRESSED IN LUNG, SIGNAL = 0.99; EXPRESSED IN FETAL LIVER, SIGNAL = 1.2; EXPRESSED IN ADULT LIVER, SIGNAL = 0.99; EST_HUMAN HIT: BE873039.1, EVALUE 1.60e+00
ttattttctaaacctctgcatagttttcaaggtgttgccagcagggcctgggctgacagtgacacgtgttattgtcacattgctagat

SEQ ID NO: 22046 - DNA, 199 bp, Homo sapiens
  MAP TO CHR14.3; EXPRESSED IN HELA, SIGNAL = 5.5; EXPRESSED IN LUNG, SIGNAL = 5.1; EXPRESSED IN FETAL LIVER, SIGNAL = 4.2; EXPRESSED IN BRAIN, SIGNAL = 7.6; EXPRESSED IN ADULT LIVER, SIGNAL = 5.7; SWISSPROT HIT: Q99811, EVALUE 1.10e+00; EST_HUMAN HIT: AI830846.1, EVALUE 1.00e+00
atgcatcggaaagagcctggggcaaggctggaggccacaagaggagctgccaggccacataagcagggaacaaagccgatgatcacacgcccatcagtgagccaacttggtgaagggaaatgcccaagttctcagcacctgcagagcctaagacataacaagcagcatgccctgacgctcaccaaggccaggtgctgtg

SEQ ID NO: 22047 - DNA, 78 bp, Homo sapiens
  MAP TO CHR14.3; EXPRESSED IN PLACENTA, SIGNAL = 2.2; EXPRESSED IN HELA, SIGNAL = 2.2; EXPRESSED IN BONE MARROW, SIGNAL = 3.3; EXPRESSED IN ADULT LIVER, SIGNAL = 2.9; NT HIT: AJ010154.1, EVALUE 3.70e+00; EST_HUMAN HIT: BG219619.1, EVALUE 1.30e+00
ttagggcaatagacagttattgcctaggtgggtctcggttttactcatggcctgtgtcatgtaaccctcagagttctg

SEQ ID NO: 22048 - DNA, 249 bp, Homo sapiens
  MAP TO CHR19.3; EXPRESSED IN ADULT LIVER, SIGNAL = 2.5; EXPRESSED IN BRAIN, SIGNAL =   3; EXPRESSED IN HELA, SIGNAL =   3; EXPRESSED IN HEART, SIGNAL = 1.8; NT HIT: gi11425973, EVALUE 0.00e+00; EST_HUMAN HIT: AI167958.1, EVALUE 0.00e+00; SWISSPROT HIT: Q05315, EVALUE 4.00e-06
agtttggtgctgttttaatgatcaagtgtaggggaaggggtgaggagggattattctgttagtaggctctgggaatcccatggtcaggtagaaagagggattcctcaacaatgaggagtctgatcatctccctcaatcgctgataagcactctggtcagggagatatctctgaagacttgcagcatcttcacagatgctggcgggaatcgatgggcaaagttgtaaatgcgttggccatttaccattac

SEQ ID NO: 22049 - DNA, 78 bp, Homo sapiens
  MAP TO CHR18.3; EXPRESSED IN ADULT LIVER, SIGNAL = 1.2; EXPRESSED IN LUNG, SIGNAL = 1.7; NT HIT: U17837.1, EVALUE 2.30e-01
tctacgaagccaaaggcctctcagctctggaattagatggaagagcaatcctggttaatgaggatcctccaggaatgg

SEQ ID NO: 22050 - DNA, 394 bp, Homo sapiens
  MAP TO CHR14.3; EXPRESSED IN ADULT LIVER, SIGNAL = 2.3; EXPRESSED IN HELA, SIGNAL = 2.3; EXPRESSED IN PLACENTA, SIGNAL = 2.3; EXPRESSED IN LUNG, SIGNAL =   3; SWISSPROT HIT: P47150, EVALUE 3.50e-01; NT HIT: AF307160.1, EVALUE 9.40e-02; EST_HUMAN HIT: BE185656.1, EVALUE 0.00e+00
gaaaaatggccacaggcaaatatttccacttccatggccaatctacaaaatatccaaaagacagatccttcccaaaagaagggagctaacgagtacttcgctgggctgggtcctctacaaattcgaatccatgcttataaacctcctatggaggagtcttatgtcctcattctccagagggaagttgaggctctgctgttacagagccagaagcaagattcaaatctttatcttgtgtcttccaagtccttgctctttccaccaccctcccagaaaaatctgaaatctacaccggtgggcctcagaaggaatgctacacttgagaacttcacaaagccagctccggagctgctgctcttccctgggggcatttccaagcacagcatggtctatt

SEQ ID NO: 22051 - DNA, 112 bp, Homo sapiens
  MAP TO CHR14.3; EXPRESSED IN HELA, SIGNAL = 2.4; EXPRESSED IN LUNG, SIGNAL = 1.2; EXPRESSED IN BONE MARROW, SIGNAL = 1.3; EXPRESSED IN ADULT LIVER, SIGNAL = 1.5; EXPRESSED IN BRAIN, SIGNAL = 1.5; SWISSPROT HIT: P51006, EVALUE 2.00e-14; NT HIT: gi14747055, EVALUE 1.00e-56; EST_HUMAN HIT: AA625294.1, EVALUE 2.00e-56
attgatattttgtttgcaagattagcactgcagacaattcctgaagatttggatctacgagatgacagtctgctaaaaaatttagatataagatgtataagaagtcttaacg

SEQ ID NO: 22052 - DNA, 123 bp, Homo sapiens
  MAP TO CHR16.3; EXPRESSED IN HELA, SIGNAL = 1.9; EXPRESSED IN PLACENTA, SIGNAL = 1.4; EXPRESSED IN LUNG, SIGNAL = 1.5; EXPRESSED IN FETAL LIVER, SIGNAL = 1.7; EXPRESSED IN BONE MARROW, SIGNAL =   2; EXPRESSED IN BRAIN, SIGNAL =   2; EXPRESSED IN ADULT LIVER, SIGNAL =   2; SWISSPROT HIT: P51828, EVALUE 1.00e-13; NT HIT: AF184150.1, EVALUE 5.00e-53; EST_HUMAN HIT: AA604396.1, EVALUE 8.00e-56
ctcctactgaagcccaagttcagcggcgtggagaagatcaagaccatcggcagcacgtacatggcagctgcagggctcagcgtcgcctcagggcacgagaaccaggtactcaagcccaagagg

SEQ ID NO: 22053 - DNA, 287 bp, Homo sapiens
  MAP TO CHR14.3; EXPRESSED IN HELA, SIGNAL = 1.1; EXPRESSED IN ADULT LIVER, SIGNAL = 2.1; SWISSPROT HIT: P42173, EVALUE 5.00e-05; NT HIT: gi14748462, EVALUE 0.00e+00; EST_HUMAN HIT: AW166015.1, EVALUE 1.00e-121
gacaacaatctcctgagaatgacaacaccatcaaggacctgctcccagaagacgctgggatcgaccaccagacagttcaccagctgattacagtgctcatgaagttcatggccaaggatgaaagcagcgctgagtcagacatcagcagtgcaaaggccttcaacacggtcaagcgacacctgtacgtcttactcggctatgaccagcaggaaggttgcttcatgattgcacctcaaaaaatgcgcctgtcaacttgctttaatgcattcattgcaggaattgcccaa

SEQ ID NO: 22054 - DNA, 177 bp, Homo sapiens
  MAP TO CHR14.3; EXPRESSED IN ADULT LIVER, SIGNAL = 3.2; EXPRESSED IN PLACENTA, SIGNAL = 3.4; EXPRESSED IN LUNG, SIGNAL = 3.5; EXPRESSED IN FETAL LIVER, SIGNAL = 2.5; EXPRESSED IN BONE MARROW, SIGNAL = 4.8; EXPRESSED IN BRAIN, SIGNAL = 4.1; EST_HUMAN HIT: BF375810.1, EVALUE 2.30e-01; SWISSPROT HIT: P15306, EVALUE 3.30e+00; NT HIT: AF274563.1, EVALUE 2.40e+00
acaaacaaggccaaactgtttcattgctcacacagtaactctgatgaggaaaatcagggaactgcatgaaacctgggctagttccacagctgggatcttagacctgggccttctgcctcagtttctcttgaagaacagcttgttcagctaccttaataagaaaatgagtgtgagaaa

SEQ ID NO: 22055 - DNA, 137 bp, Homo sapiens
  MAP TO CHR14.3; EXPRESSED IN BRAIN, SIGNAL = 1.2; EXPRESSED IN ADULT LIVER, SIGNAL =   1; EXPRESSED IN HELA, SIGNAL = 1.1; EXPRESSED IN FETAL LIVER, SIGNAL = 1.3; EXPRESSED IN BONE MARROW, SIGNAL = 0.88; EST_HUMAN HIT: BI031307.1, EVALUE 6.00e-69; SWISSPROT HIT: P49601, EVALUE 5.90e+00; NT HIT: gi14784242, EVALUE 2.00e-71
ctgctcatagtaaaattcactccgcaccagctcattttcctcctctttgagatccaaaatccattccacctcatctgctttggggactctcaccacaaacgagtatggagggctttcattcttggagctgtctagag

SEQ ID NO: 22056 - DNA, 139 bp, Homo sapiens
  MAP TO CHR16.3; EXPRESSED IN FETAL LIVER, SIGNAL = 1.9; EXPRESSED IN ADULT LIVER, SIGNAL = 2.1; EXPRESSED IN BRAIN, SIGNAL = 3.2; EXPRESSED IN HELA, SIGNAL = 1.9; EXPRESSED IN PLACENTA, SIGNAL =   2; NT HIT: gi14757162, EVALUE 4.70e-01; EST_HUMAN HIT: AA522472.1, EVALUE 2.00e-72; SWISSPROT HIT: Q39442, EVALUE 1.00e-01
gtcatttgaggagcaatacaatgaggatcacaaaaagggtgtcattgatctcttcacagcagacagcttaaaaaccatgaccagtgacaatcgtctcctggctcaccatgtaactgtccctccagccccagaggactag

SEQ ID NO: 22057 - DNA, 328 bp, Homo sapiens
  MAP TO CHR16.3; EXPRESSED IN LUNG, SIGNAL = 4.3; EXPRESSED IN BRAIN, SIGNAL = 3.2; EXPRESSED IN BONE MARROW, SIGNAL = 2.3; EXPRESSED IN ADULT LIVER, SIGNAL = 2.7; NT HIT: L39062.1, EVALUE 0.00e+00; EST_HUMAN HIT: BG340784.1, EVALUE 1.00e-110; SWISSPROT HIT: Q01113, EVALUE 4.00e-54
acatgctgcctgagcctttccctcctcccgtgctctgttccagacttggatgggggcccacagggccggtgtgctgttgagccaggactgtgctggcaccccacagggagccttggagccctgcgtccaggaggccactgcactgctcacttgtggcccagcgcatccttggaaatctgtggccctggaggaggaacaggagggccctgggaccaggctcccggggaacctgagctcagaggatgtgctgccagcagggtgtacggagtggagggtacagacgcttgcctatctgccacaggaggactgggcccccacgtccctgact

SEQ ID NO: 22058 - DNA, 99 bp, Homo sapiens
  MAP TO CHR19.3; EXPRESSED IN ADULT LIVER, SIGNAL = 1.5; EXPRESSED IN HELA, SIGNAL = 6.2; SWISSPROT HIT: Q07886, EVALUE 3.00e-07; NT HIT: gi14766930, EVALUE 6.00e-49; EST_HUMAN HIT: BI833174.1, EVALUE 8.00e-49
gggcctggacatccctacggtacaggtggtcatcaaccacaacacccccgggctccccaagatctacatccaccgagtcggccggacggcccgtgcagg

SEQ ID NO: 22059 - DNA, 100 bp, Homo sapiens
  MAP TO CHR14.3; EXPRESSED IN ADULT LIVER, SIGNAL = 1.6; EXPRESSED IN HELA, SIGNAL = 1.6; EXPRESSED IN PLACENTA, SIGNAL = 1.3; EXPRESSED IN HEART, SIGNAL = 1.7; EXPRESSED IN LUNG, SIGNAL = 2.2; EXPRESSED IN BONE MARROW, SIGNAL = 1.6; NT HIT: AB000381.1, EVALUE 8.00e-02; EST_HUMAN HIT: H08306.1, EVALUE 4.70e-01; SWISSPROT HIT: P30796, EVALUE 6.10e+00
agccttgacggtggaagggaagaagcacagcatgaatattgccaaggttatatatgaccaggttactctgagtctggacacaacccatcgagaatcctgg

SEQ ID NO: 22060 - DNA, 188 bp, Homo sapiens
  MAP TO CHR16.3; EXPRESSED IN HELA, SIGNAL = 2.5; EXPRESSED IN LUNG, SIGNAL = 2.9; EXPRESSED IN BONE MARROW, SIGNAL = 4.4; EXPRESSED IN FETAL LIVER, SIGNAL =   4; EXPRESSED IN ADULT LIVER, SIGNAL = 2.3; EXPRESSED IN PLACENTA, SIGNAL = 2.2; NT HIT: X62477.1, EVALUE 1.70e-01; EST_HUMAN HIT: AV651321.1, EVALUE 9.70e-01; SWISSPROT HIT: P41653, EVALUE 3.30e+00
tagaatacaggaggaaatgagctggactggatagataaggctgagaggaaagccacatatgagaccactggaccactctgggatggggacacaagcccccttcatgattctgcctcttcagaaaatgggttttcccatagttctgccagaaagcctttgtcatattcttgatgctcacacacccagat

SEQ ID NO: 22061 - DNA, 103 bp, Homo sapiens
  MAP TO CHR14.3; EXPRESSED IN HELA, SIGNAL = 1.8; EXPRESSED IN LUNG, SIGNAL = 2.1; EXPRESSED IN BONE MARROW, SIGNAL = 1.4; EXPRESSED IN ADULT LIVER, SIGNAL = 2.4; NT HIT: gi14748350, EVALUE 6.00e-46; EST_HUMAN HIT: AA459718.1, EVALUE 1.90e+00; SWISSPROT HIT: P09975, EVALUE 8.00e+00
gtaaagaaatcaagaaatccaaactgattcgaagccagtcttttaataatcaagcttttcatgcaaaatatggcaacttagagaaatgtgctaggtacgatct

SEQ ID NO: 22062 - DNA, 146 bp, Homo sapiens
  MAP TO CHR18.3; EXPRESSED IN LUNG, SIGNAL = 3.9; EXPRESSED IN BONE MARROW, SIGNAL = 3.9; EXPRESSED IN BRAIN, SIGNAL = 4.2; EXPRESSED IN ADULT LIVER, SIGNAL = 3.9; NT HIT: gi4505788, EVALUE 1.00e-66; EST_HUMAN HIT: BG402793.1, EVALUE 4.00e-64; SWISSPROT HIT: P36952, EVALUE 3.00e-14
  unsure 17
  unsure 53
ccttgttgagtctgaanaggacattcttttgtttctgattcaggaaatttctntcatccacttgccaacaaagtaggcagcattaaccacaaggattttggtctggtcgttcacactgttgtcagctaaaatgttctcaaagtggc

SEQ ID NO: 22063 - DNA, 186 bp, Homo sapiens
  MAP TO CHR16.3; EXPRESSED IN PLACENTA, SIGNAL = 8.8; EXPRESSED IN LUNG, SIGNAL =  14; EXPRESSED IN FETAL LIVER, SIGNAL =  10; EXPRESSED IN BONE MARROW, SIGNAL =  12; EXPRESSED IN ADULT LIVER, SIGNAL = 9.2; EXPRESSED IN BRAIN, SIGNAL =  10; SWISSPROT HIT: Q9H3T2, EVALUE 1.30e-01; EST_HUMAN HIT: AL529222.1, EVALUE 3.80e+00
gaagggcatttttcccttgagcaggagactccacacacgcggacactgacgttgagccgcagggctggtcactgtccccgtcccgtggcaccgcacgccagggcccggcaccttctgccgtgggtcacgtggccttgggtccggcccctgccagaggctggggccccagggacccctctgggctag

SEQ ID NO: 22064 - DNA, 386 bp, Homo sapiens
  MAP TO CHR14.3; EXPRESSED IN BONE MARROW, SIGNAL = 0.92; EXPRESSED IN BRAIN, SIGNAL = 1.7; EXPRESSED IN ADULT LIVER, SIGNAL = 1.9; EXPRESSED IN PLACENTA, SIGNAL = 1.1; NT HIT: gi14746907, EVALUE 0.00e+00; EST_HUMAN HIT: BI755956.1, EVALUE 0.00e+00; SWISSPROT HIT: Q99766, EVALUE 3.00e-47
gggtggattatgatcgcatcagggatgttggccctgacagggcggcatccgagtggttgctgcgctgtggggccatggtgcgctaccatggccaggagaggtggcagaaggactacaaccaccttccaacaggccctctggacaaatacaagattcaggcgatcgacgccaccgactcttgtatcatgagcattggatttgatcacatgggtaactaccctatcgttttgctaatagaaaatgcagatgatttgcagtgaccattttgttgcagttgactcacgattatagtcataggtatgtcctttttgcccatttcattatagtcaagtttgtttcttcctgtgtttgatatttattttcaaattaaattgaggttacagaca

SEQ ID NO: 22065 - DNA, 119 bp, Homo sapiens
  MAP TO CHR18.3; EXPRESSED IN LUNG, SIGNAL = 2.2; EXPRESSED IN ADULT LIVER, SIGNAL = 1.3; EXPRESSED IN PLACENTA, SIGNAL =   1; NT HIT: AF338872.1, EVALUE 9.90e-02; SWISSPROT HIT: Q04503, EVALUE 1.60e+00
cagtgtgtgtgccatctgctagtgcggtgatggtggtgagtgtggcttggcaaacagaagagctgttctccacgcgttccaggggctgtagcttggccagggggagggcacaagggagc

SEQ ID NO: 22066 - DNA, 90 bp, Homo sapiens
  MAP TO CHR16.3; EXPRESSED IN ADULT LIVER, SIGNAL = 1.3; EXPRESSED IN PLACENTA, SIGNAL = 1.6; NT HIT: AL163218.2, EVALUE 4.40e+00
tgctgaaagtgacagacatttccagactggcagccaacacatatgatatacagctccataatagaatatatgtggtttatgatgaattag

SEQ ID NO: 22067 - DNA, 140 bp, Homo sapiens
  MAP TO CHR16.3; EXPRESSED IN FETAL LIVER, SIGNAL = 2.5; EXPRESSED IN ADULT LIVER, SIGNAL = 1.9; EXPRESSED IN PLACENTA, SIGNAL = 1.9; EXPRESSED IN LUNG, SIGNAL = 1.6; NT HIT: M15958.1, EVALUE 4.70e-01
ttcactgagcatctctgtacaggattctcttttctttggaagaaaagacctaactgaagtcatgcagagagagtcatgctttacctacaaggcagctgaagtgggcaatattgtagcaaaagaaggtgttacagttgcct

SEQ ID NO: 22068 - DNA, 234 bp, Homo sapiens
  MAP TO CHR18.3; EXPRESSED IN HEART, SIGNAL = 3.7; EXPRESSED IN HELA, SIGNAL = 7.9; EXPRESSED IN PLACENTA, SIGNAL = 6.3; EXPRESSED IN LUNG, SIGNAL = 7.1; EXPRESSED IN BONE MARROW, SIGNAL = 7.1; EXPRESSED IN ADULT LIVER, SIGNAL = 5.4; SWISSPROT HIT: P13983, EVALUE 2.40e-01; EST_HUMAN HIT: BG392284.1, EVALUE 1.00e-126; NT HIT: gi14762412, EVALUE 1.00e-129
agccctgcttctccaggcccgagagaccagcaaaccgtcgccctccgtcccgttgggccccacattcccccactgcctcacagcctcagtcacccggagacccgacgtccttggaggagcatggtggcgaggagccgcccgaggagcagccacaccgagatgcaagcttgcatggattatcacagtataattcactgtaatttgcataaccacaccatcaccatgaacaaaact

SEQ ID NO: 22069 - DNA, 386 bp, Homo sapiens
  MAP TO CHR18.3; EXPRESSED IN FETAL LIVER, SIGNAL = 3.3; EXPRESSED IN BONE MARROW, SIGNAL = 2.9; EXPRESSED IN ADULT LIVER, SIGNAL = 3.3; EXPRESSED IN PLACENTA, SIGNAL = 4.8; EXPRESSED IN HELA, SIGNAL = 5.9; EXPRESSED IN LUNG, SIGNAL = 5.5; NT HIT: gi14774731, EVALUE 1.00e-118; SWISSPROT HIT: O35165, EVALUE 1.00e-42; EST_HUMAN HIT: AL525581.1, EVALUE 1.00e-120
taaacagataataatctccaatagttgtcagaggattgtgattgagaattgttagtggtgaaggttcgagatagaagctcttcttgctgtccctcctgctgctcccttgcatagcaccagtgctggaagtttctgagagcagtctgcaggtgctgaacatcatacttaaactggtcaacccgaagtttggcattctgccttttattagggggctccttgctggacaaaatctcccgatgttctagatggctgaatatctggtctgtgcttgcttggatttcaccttctactaagtgcacagactgcttgtctgccgtctccaggtgtcccatgtgagaatgtatctcatggacctgcttgtgcgtttgctggttcaggggctccat

SEQ ID NO: 22070 - DNA, 278 bp, Homo sapiens
  MAP TO CHR18.3; EXPRESSED IN FETAL LIVER, SIGNAL = 1.3; EXPRESSED IN ADULT LIVER, SIGNAL = 2.1; EXPRESSED IN PLACENTA, SIGNAL = 2.3; EXPRESSED IN HELA, SIGNAL = 2.2; EXPRESSED IN LUNG, SIGNAL = 1.8; EXPRESSED IN BONE MARROW, SIGNAL =   4; NT HIT: gi16164058, EVALUE 0.00e+00; SWISSPROT HIT: Q9ULV0, EVALUE 2.00e-40
ctgctcatcgatcttccgctgcagctggaccaccttgttctccatgcccacgttgagacgtttcagatgctctgctgagcgggcctcaatcctgagggccttcagctcccgcctggccttgagcatccggaaggcacactggatgacaatggctgcatcccgcagccgctggaagtgcctgcgtgccatccagccccgcacgtgcttctggatggtggtggccttgtgctccatgaggacctggcgggaaacaaggatacacatcttgtgggtttgca

SEQ ID NO: 22071 - DNA, 115 bp, Homo sapiens
  MAP TO CHR18.3; EXPRESSED IN ADULT LIVER, SIGNAL =   1; EXPRESSED IN PLACENTA, SIGNAL = 1.1; EXPRESSED IN HELA, SIGNAL = 1.1; NT HIT: AF417577.1, EVALUE 3.80e-01
ttttcagttgtacagtgtcatcagcagaccagacagtcttataaccagaaacttcggagacttggttttgtttttgttgttttaaataagcatagtggtaagcacacgttggttt

SEQ ID NO: 22072 - DNA, 245 bp, Homo sapiens
  MAP TO CHR16.3; EXPRESSED IN LUNG, SIGNAL = 1.3; EXPRESSED IN ADULT LIVER, SIGNAL = 2.3; EST_HUMAN HIT: BG770233.1, EVALUE 8.30e-02; NT HIT: Z50191.1, EVALUE 2.20e-01; SWISSPROT HIT: P48634, EVALUE 2.10e-01
cagaaataatgtctcgttcaccagctattttctcagccaataatttttgtccacccccattcctccttcggaaacttgcccttcccagagccctaggagatccagaaccccataggattcttttggctctggccatggctgtgtaccaaggggttggatatgggattacagccaggccatgtggactctctcccagaaatttggagttgaaaatctctgagcttatctctggaaggtgcttgaaa

SEQ ID NO: 22073 - DNA, 120 bp, Homo sapiens
  MAP TO CHR18.3; EXPRESSED IN PLACENTA, SIGNAL =   1; EXPRESSED IN ADULT LIVER, SIGNAL =   1; EST_HUMAN HIT: BE881620.1, EVALUE 1.50e-01
ctggaacatgaagctgaagctttctttttcgacaaagagcacgcatttgcccatatagagataattttatcattgtcagctgagagcagctgattgaaattcagtctctgtgaaaggagg

SEQ ID NO: 22074 - DNA, 89 bp, Homo sapiens
  MAP TO CHR19.3; EXPRESSED IN BRAIN, SIGNAL = 3.6; EXPRESSED IN ADULT LIVER, SIGNAL = 1.7; EXPRESSED IN HELA, SIGNAL =   3; EXPRESSED IN PLACENTA, SIGNAL = 2.1; EXPRESSED IN FETAL LIVER, SIGNAL = 1.4; EXPRESSED IN BONE MARROW, SIGNAL = 1.2; NT HIT: gi11612658, EVALUE 5.00e-43; SWISSPROT HIT: P56698, EVALUE 3.20e-01; EST_HUMAN HIT: AL536602.1, EVALUE 7.00e-43
cctttgtgggggtctgggtcggggtcgccatgctgggccggagcagggggctgctggatgctttggcggcgaaggcgcgctgcagcagc

SEQ ID NO: 22075 - DNA, 149 bp, Homo sapiens
  MAP TO CHR14.3; EXPRESSED IN BONE MARROW, SIGNAL = 1.1; EXPRESSED IN ADULT LIVER, SIGNAL = 1.2; EXPRESSED IN HELA, SIGNAL = 2.2; EXPRESSED IN PLACENTA, SIGNAL = 0.94; EST_HUMAN HIT: BG169398.1, EVALUE 4.00e-67; NT HIT: gi10946801, EVALUE 5.10e-01; SWISSPROT HIT: P24785, EVALUE 5.10e-01
gcttgtttcttttcagcgttgtccattaggaagcacgatcttgaaagtgaaattacttgacatgggtgagccgagagctctgctggccactgccctttccccgcctggtctgagtgacattgagcgcaccatccttctactaaaggagg

SEQ ID NO: 22076 - DNA, 204 bp, Homo sapiens
  MAP TO CHR18.3; EXPRESSED IN FETAL LIVER, SIGNAL = 1.1; EXPRESSED IN ADULT LIVER, SIGNAL = 1.4; EST_HUMAN HIT: BG469788.1, EVALUE 4.20e+00; NT HIT: X15723.1, EVALUE 7.20e-01; SWISSPROT HIT: O57728, EVALUE 2.20e-01
acttaaggaacaaatggcacctggtgattgaccgcctcactgtgctcttcttaaaattcctggagtattttcacaagctgcaggtgttcatgtggtggattttggagttgcacatcatcaaaatcgtttcctcttacattatctgggtttctgtgaaagaggcaagtgaacatttgtcctatcatcaggctgaacagaaccaca

SEQ ID NO: 22077 - DNA, 190 bp, Homo sapiens
  MAP TO CHR18.3; EXPRESSED IN PLACENTA, SIGNAL = 1.3; EXPRESSED IN BONE MARROW, SIGNAL = 1.7; EXPRESSED IN ADULT LIVER, SIGNAL = 1.3; SWISSPROT HIT: P51400, EVALUE 2.50e+00; EST_HUMAN HIT: BG459757.1, EVALUE 9.90e-01; NT HIT: AB059405.1, EVALUE 2.60e+00
aacaggaaaaagcaagagctactgggcaaggtgtagtacaaaggtatacatgaaagctaagagtcaacaagaaactacgtttttcactagaaggccttctaatgtgaagttacaccaactgctgacatgccttctcttccaaatgcgtaccaatgggtttatttcctattcaagttgcagcaagcattaa

SEQ ID NO: 22078 - DNA, 169 bp, Homo sapiens
  MAP TO CHR18.3; EXPRESSED IN ADULT LIVER, SIGNAL = 1.2; EXPRESSED IN PLACENTA, SIGNAL = 1.1; EXPRESSED IN LUNG, SIGNAL = 1.5; SWISSPROT HIT: P09087, EVALUE 4.40e+00; NT HIT: AJ276692.1, EVALUE 2.30e+00
gggctccttgaccccgagctcaaggctggcataagtctggtgctgctgctcttgttgggccactgagcgggacattcccccggatgctgctgcttcctcctgctgtcctttccttgaaacatgcctgggtgtgccgctgtgtgcagctgagccctccaggaagtcctcc

SEQ ID NO: 22079 - DNA, 153 bp, Homo sapiens
  MAP TO CHR14.3; EXPRESSED IN ADULT LIVER, SIGNAL = 1.2; SWISSPROT HIT: P39969, EVALUE 5.80e+00; EST_HUMAN HIT: H12094.1, EVALUE 7.70e-01
acatcctctggaaagtgctgcctgatggttttgcctgcttccccatctgctgctgagagtaaatgttataccaggtctagagatcacttcaggacagaggtagttgatgcagggaaaattaagattcaagacaacgttgagactgtatatcag

SEQ ID NO: 22080 - DNA, 205 bp, Homo sapiens
  MAP TO CHR18.3; EXPRESSED IN HELA, SIGNAL = 1.5; EXPRESSED IN PLACENTA, SIGNAL = 1.7; EXPRESSED IN HEART, SIGNAL = 3.5; EXPRESSED IN BONE MARROW, SIGNAL = 1.7; EXPRESSED IN ADULT LIVER, SIGNAL = 1.5; EST_HUMAN HIT: BF885076.1, EVALUE 1.00e-111; NT HIT: Y15067.1, EVALUE 1.00e-08; SWISSPROT HIT: Q15776, EVALUE 7.00e-24
gctcaaaccttatcagacatcagagaattcatagtggggaggaaccttatcagtgtaatgaatgtggcaaaactttcaaaaggagctcagcccttgttcagcatcagagaattcattctggggatgaagcttatatatgtaatgaatgtgggaaggctttcaggcacagatcggtccttatgcgccatcaaagagtccacactat

SEQ ID NO: 22081 - DNA, 77 bp, Homo sapiens
  MAP TO CHR14.3; EXPRESSED IN ADULT LIVER, SIGNAL = 0.97; EST_HUMAN HIT: AF150199.1, EVALUE 2.00e-30; NT HIT: gi7661757, EVALUE 1.00e-30; SWISSPROT HIT: P96380, EVALUE 4.80e+00
cgtgcctcccctcttgggagaaggggcctcatgcccagatccctgcagcactagacacagctggaggcagtggcccc

SEQ ID NO: 22082 - DNA, 147 bp, Homo sapiens
  MAP TO CHR18.3; EXPRESSED IN FETAL LIVER, SIGNAL = 2.1; EXPRESSED IN ADULT LIVER, SIGNAL = 2.8; EXPRESSED IN BONE MARROW, SIGNAL =   3; SWISSPROT HIT: P57687, EVALUE 3.40e+00; NT HIT: Z18892.2, EVALUE 7.80e+00
cagaagcaattctagagctgtcttctcagcgaattgttaaccaactcagagcctggtggtgtaccgggagtggcaagttctgtcagtttatttcaggacagccagaaggtgttcggtggaactggtcccgtgcctctgcagtgcagg

SEQ ID NO: 22083 - DNA, 157 bp, Homo sapiens
  MAP TO CHR14.3; EXPRESSED IN BRAIN, SIGNAL = 2.2; EXPRESSED IN ADULT LIVER, SIGNAL = 3.2; EXPRESSED IN HELA, SIGNAL =   3; EXPRESSED IN PLACENTA, SIGNAL = 2.9; SWISSPROT HIT: P54674, EVALUE 2.00e+00; NT HIT: AJ289779.1, EVALUE 2.00e-03
aagtttatatcctgtcagaaattattatttgtgcttctctttcctgcacctagtccaaagccaaaggtgaaaggtgatgggagtgagcaggaggtcatggagcttatccctgaggacctacatggagggcatcttggaagttcaccgagaagagccg

SEQ ID NO: 22084 - DNA, 263 bp, Homo sapiens
  MAP TO CHR19.3; EXPRESSED IN ADULT LIVER, SIGNAL = 2.8; EXPRESSED IN LUNG, SIGNAL = 0.99; EXPRESSED IN FETAL LIVER, SIGNAL = 1.9; NT HIT: gi13435389, EVALUE 3.00e-47; SWISSPROT HIT: Q08477, EVALUE 3.00e-33; EST_HUMAN HIT: BF736826.1, EVALUE 1.00e-65
cttggccagcaagagcacgtcaatgaagtccaaagtcttggacttggccttggcctgcaggaagtcatcgacaccctggctagtgagggtgcgacgccgctcctggatgacagcatctgtgaagttgtgcactatgtcacaggccctgcagaagcgtcgcccattgggagtgaggaagtacaagaagtccgtgagcaggaagatgtgctggtgccgtttcagactgagggcactgagctccaagatggcatcaatatattcgc

SEQ ID NO: 22085 - DNA, 195 bp, Homo sapiens
  MAP TO CHR16.3; EXPRESSED IN BONE MARROW, SIGNAL =   2; EXPRESSED IN ADULT LIVER, SIGNAL = 3.2; EXPRESSED IN HELA, SIGNAL = 4.8; NT HIT: gi14779133, EVALUE 1.00e-106; EST_HUMAN HIT: BE466150.1, EVALUE 1.00e-105
atcctcacactgctggatgctctgagtatggtgcacagtcagaagatgaagaaggccaaggagcagcggcacctgcacaataaagagcacttcagagccaagcagaaggaggaggaggagaagctgaagtggcagaaggacctcaggaagaagctcttccaaattcaggggcagaaggaaagaagaaaccagaag

SEQ ID NO: 22086 - DNA, 190 bp, Homo sapiens
  MAP TO CHR18.3; EXPRESSED IN BONE MARROW, SIGNAL = 0.82; EXPRESSED IN ADULT LIVER, SIGNAL = 1.1; NT HIT: AB034984.1, EVALUE 1.00e-103; SWISSPROT HIT: P48594, EVALUE 5.00e-24; EST_HUMAN HIT: BG541826.1, EVALUE 1.00e-102
ccaggagttccagatcacatcgagttcaccatgaattcactcagtgaagccaacaccaagttcatgttcgacctgttccaacagttcagaaaatcaaaagagaacaacatcttctattcccctatcagcatcacatcagcattagggatggtcctcttaggagccaaagacaacactgcacaacagatta

SEQ ID NO: 22087 - DNA, 183 bp, Homo sapiens
  MAP TO CHR19.3; EXPRESSED IN PLACENTA, SIGNAL = 2.2; EXPRESSED IN FETAL LIVER, SIGNAL = 1.9; EXPRESSED IN ADULT LIVER, SIGNAL = 2.1; EXPRESSED IN BRAIN, SIGNAL = 2.2; SWISSPROT HIT: P32779, EVALUE 5.60e+00; EST_HUMAN HIT: BG954630.1, EVALUE 6.10e-02; NT HIT: AF261762.1, EVALUE 1.60e-01
cgttgcctgcctttgtgaatgcagaaggaaagtatgttgtgaaggcagccgccctgccctgggcgggccgggctgtaggcccccagtctgcggaattcatcagggcggcaggggagggcagcttggcgacctctgcatcctcagcctgccttgaactgggagagacgtactggaggcatctct

SEQ ID NO: 22088 - DNA, 88 bp, Homo sapiens
  MAP TO CHR16.3; EXPRESSED IN HEART, SIGNAL = 8.4; EXPRESSED IN HELA, SIGNAL = 6.1; EXPRESSED IN BRAIN, SIGNAL = 1.5; EXPRESSED IN ADULT LIVER, SIGNAL = 7.6; EXPRESSED IN PLACENTA, SIGNAL = 6.6; NT HIT: Y11467.1, EVALUE 1.10e+00; SWISSPROT HIT: P17401, EVALUE 2.10e+00
gggccgggagccttcctgctggcagctccagcacctcgggagggccaggagaggcactacttggcgctctctggacgttgcccagagg

SEQ ID NO: 22089 - DNA, 104 bp, Homo sapiens
  MAP TO CHR19.3; EXPRESSED IN PLACENTA, SIGNAL = 3.5; EXPRESSED IN BONE MARROW, SIGNAL =   2; EXPRESSED IN FETAL LIVER, SIGNAL = 5.1; EXPRESSED IN ADULT LIVER, SIGNAL = 2.1; SWISSPROT HIT: P53828, EVALUE 3.60e+00; EST_HUMAN HIT: BE065452.1, EVALUE 6.00e-16
ctgtgggtgcagagctgcccggagagggttccacgccagggcacagtcactgcgcagggaaaagacaggacaccccggggacccgctgtcaacgcagccgccat

SEQ ID NO: 22090 - DNA, 217 bp, Homo sapiens
  MAP TO CHR18.3; EXPRESSED IN ADULT LIVER, SIGNAL = 3.2; EXPRESSED IN PLACENTA, SIGNAL =   1; EXPRESSED IN HELA, SIGNAL = 1.2; EXPRESSED IN LUNG, SIGNAL = 1.3; EST_HUMAN HIT: AL578299.1, EVALUE 3.00e-16; NT HIT: D16307.1, EVALUE 2.00e-16; SWISSPROT HIT: Q03154, EVALUE 1.00e-17
tcaacccaggaggaacgcagcctcatgtagccactcgtcgtggtcatgcagcagcacaggtgtgtggctcatgggtgagaagccctacggcacagaagaaacagctgtcagtggcagccagagtgtgaggttcatgcccttgcagacctggctaaaagctgcccaccagaggtctgagtcattagtaggtgtcactcagagctgcatccgcttctga

SEQ ID NO: 22091 - DNA, 116 bp, Homo sapiens
  MAP TO CHR18.3; EXPRESSED IN FETAL LIVER, SIGNAL =   2; EXPRESSED IN ADULT LIVER, SIGNAL = 1.5; EXPRESSED IN PLACENTA, SIGNAL = 1.6; EXPRESSED IN HELA, SIGNAL = 1.6; EXPRESSED IN BONE MARROW, SIGNAL = 1.2; EST_HUMAN HIT: BE962779.2, EVALUE 5.60e-01; NT HIT: AF319526.1, EVALUE 9.60e-02; SWISSPROT HIT: Q00269, EVALUE 6.00e+00
atgcacgtggatgtagcttccaggaaacaggccgtgctgctcccagaactggtggtgctgggcagacagcacacgtacgccacgggtagacctcctggagacactgtgggtgaaag

SEQ ID NO: 22092 - DNA, 179 bp, Homo sapiens
  MAP TO CHR19.3; EXPRESSED IN LUNG, SIGNAL = 2.2; EXPRESSED IN HELA, SIGNAL = 2.3; EXPRESSED IN ADULT LIVER, SIGNAL = 2.1; SWISSPROT HIT: P26640, EVALUE 3.30e+00; EST_HUMAN HIT: BI462030.1, EVALUE 6.00e-70; NT HIT: gi15299355, EVALUE 4.00e-42
acaggacggcttccggatttggcggggtctttgtctctccctgcagctggagctccaggtcgtctgttcactgctctctgtcttcttctcctagaggcccagcctctgtggccctgtgtcctgcaggtattgggagatccacagctaagacgccaggaccccctggaagcctagaaatg

SEQ ID NO: 22093 - DNA, 96 bp, Homo sapiens
  MAP TO CHR14.3; EXPRESSED IN ADULT LIVER, SIGNAL = 1.5; EXPRESSED IN PLACENTA, SIGNAL = 0.93; EXPRESSED IN BONE MARROW, SIGNAL = 1.3; EST_HUMAN HIT: AA495982.1, EVALUE 2.00e-46; NT HIT: gi14750914, EVALUE 3.00e-47
caagttcttatccttagggacccagcggagaccttggttctccaggacgatgaccgggggcacacgaggctgaggcaccagtttctgattatccaa

SEQ ID NO: 22094 - DNA, 228 bp, Homo sapiens
  MAP TO CHR14.3; EXPRESSED IN HEART, SIGNAL = 1.7; EXPRESSED IN ADULT LIVER, SIGNAL = 4.8; EXPRESSED IN BRAIN, SIGNAL = 1.5; EST_HUMAN HIT: AA515265.1, EVALUE 1.00e-125; SWISSPROT HIT: Q02252, EVALUE 1.00e-13; NT HIT: gi14749380, EVALUE 1.00e-125
gaagattttagttacaatgtattccaatcccatcgatctgatctgagcaaagctgacaaatgaagctggtcaaaaataaagggagattactcaggatggagtcagtcttaaacaaacttgtttctaacggcccatggtaggcatgacaacagcaggtgaggaaagagtagcatcttcttctttccactgagaagtaatggtctttaactgagtgtagaattggatgcc

SEQ ID NO: 22095 - DNA, 304 bp, Homo sapiens
  MAP TO CHR14.3; EXPRESSED IN ADULT LIVER, SIGNAL = 1.7; EXPRESSED IN BONE MARROW, SIGNAL = 2.3; NT HIT: D87458.1, EVALUE 0.00e+00; SWISSPROT HIT: P18892, EVALUE 8.00e-04; EST_HUMAN HIT: AW950918.1, EVALUE 1.00e-38
ctgttggtgtgcgagttgttgtgcatgaaccagctccggttattgtccacatacattgcccaagctttgtcgtcttttcctaacatcacatccttcatcacgtccatgcgagccacaccaaaggcaggatcagggtggttgtcatagcgatctaccgtgagctcccagtagtggatgcccttggagaagccagtcttccctagcaccacccggtcatcatagctactacaggtcactgtcaggttgtcattggagaggatgatgtccgagtgcgccgagccagggtcgaaagcaaaccaggcca

SEQ ID NO: 22096 - DNA, 124 bp, Homo sapiens
  MAP TO CHR19.3; EXPRESSED IN PLACENTA, SIGNAL = 2.2; EXPRESSED IN HEART, SIGNAL = 1.6; EXPRESSED IN LUNG, SIGNAL = 2.2; EXPRESSED IN FETAL LIVER, SIGNAL = 2.7; EXPRESSED IN BRAIN, SIGNAL =   2; EXPRESSED IN ADULT LIVER, SIGNAL =   2; EST_HUMAN HIT: BG112509.1, EVALUE 1.50e-01; NT HIT: AE004325.1, EVALUE 4.10e-01; SWISSPROT HIT: O81919, EVALUE 1.60e+00
ttggagatacgagcacgtgacctggcgctcccagttcggtgaggtgagaagcgtgctgagaggagacactggcctgctgagcactcgctccagggatcgtggagcgccacttcggggaaggcat

SEQ ID NO: 22097 - DNA, 121 bp, Homo sapiens
  MAP TO CHR16.3; EXPRESSED IN BONE MARROW, SIGNAL = 2.3; EXPRESSED IN ADULT LIVER, SIGNAL = 3.1; EXPRESSED IN BRAIN, SIGNAL = 3.6; EXPRESSED IN PLACENTA, SIGNAL = 3.6; EXPRESSED IN HELA, SIGNAL = 2.8; NT HIT: AJ303140.1, EVALUE 5.00e-62; SWISSPROT HIT: O05831, EVALUE 3.50e+00; EST_HUMAN HIT: BG165136.1, EVALUE 3.80e-02
ttaagtgttctttctgctgactgcttcctggagagtggcctcatgtttatccacaggagccttcatcttctggggcatgatgctgctgagcacgatcttcatgctggggccctgggggacc

SEQ ID NO: 22098 - DNA, 87 bp, Homo sapiens
  MAP TO CHR14.3; EXPRESSED IN ADULT LIVER, SIGNAL = 1.3; EXPRESSED IN PLACENTA, SIGNAL = 1.3; EXPRESSED IN HELA, SIGNAL = 1.3; NT HIT: gi14753367, EVALUE 7.00e-42; EST_HUMAN HIT: BE276010.1, EVALUE 1.00e-41
tgtgcacacagctcttggtctccagacctgatgaggaaaatataagttcctatttacagctcatagacaagtgtctaattcatgagg

SEQ ID NO: 22099 - DNA, 86 bp, Homo sapiens
  MAP TO CHR18.3; EXPRESSED IN BONE MARROW, SIGNAL = 1.6; EXPRESSED IN ADULT LIVER, SIGNAL = 1.1; EXPRESSED IN FETAL LIVER, SIGNAL = 1.6; NT HIT: gi16191869, EVALUE 6.70e-02; EST_HUMAN HIT: D59747.1, EVALUE 4.00e-41
tttggtgcctggaatgctgacctagatctggaaactagcccagatgaaagcaagaatgatgaggccacagtgtccatgaaagtagg

SEQ ID NO: 22100 - DNA, 189 bp, Homo sapiens
  MAP TO CHR16.3; EXPRESSED IN ADULT LIVER, SIGNAL = 1.1; EXPRESSED IN BRAIN, SIGNAL = 1.3; EXPRESSED IN BONE MARROW, SIGNAL = 1.6; EST_HUMAN HIT: BI826354.1, EVALUE 1.00e-102; SWISSPROT HIT: Q04632, EVALUE 3.80e-01
tgagatacccggaggctgtgaaggagaagtctgaaggatttgaacgcgttcaaatgaaaacctttggttcagcaaaacaccagaaacaaattcaaaagataaaatacactccggagaagcccattctctcaacgcatctgacagttcacaaagagcaactgcagtccaacttaaaaaataaagaaaatg

SEQ ID NO: 22101 - DNA, 126 bp, Homo sapiens
  MAP TO CHR19.3; EXPRESSED IN HELA, SIGNAL = 1.5; EXPRESSED IN PLACENTA, SIGNAL =   2; EXPRESSED IN LUNG, SIGNAL = 2.3; EXPRESSED IN ADULT LIVER, SIGNAL = 2.1; EST_HUMAN HIT: BF205104.1, EVALUE 1.60e-01; SWISSPROT HIT: P24686, EVALUE 6.00e+00; NT HIT: AY011663.1, EVALUE 4.20e-01
gggtcctggtggagcggtgttctgtttgactctgccctacgcagtagagaataacgtggcctgggacatcagggtaaagctcctcaccaccaccttccacatgtccacagtttgcttcctcctcag

SEQ ID NO: 22102 - DNA, 137 bp, Homo sapiens
  MAP TO CHR14.3; EXPRESSED IN PLACENTA, SIGNAL = 2.1; EXPRESSED IN HELA, SIGNAL = 2.4; EXPRESSED IN HEART, SIGNAL = 1.9; EXPRESSED IN BONE MARROW, SIGNAL = 3.1; EXPRESSED IN ADULT LIVER, SIGNAL = 1.6; EXPRESSED IN BRAIN, SIGNAL = 2.4; SWISSPROT HIT: Q01940, EVALUE 3.40e+00; NT HIT: gi14726870, EVALUE 4.00e-17; EST_HUMAN HIT: BE837589.1, EVALUE 3.00e-71
atgggaccaaggaggccggaacctgtcactggaagccaggtcaaagccatgagcagtggcccacggcttgttgggttcgtctgtatcattgaagctgcctgtctgcatgtatcctctggctcgcgtgctgttggctc

SEQ ID NO: 22103 - DNA, 172 bp, Homo sapiens
  MAP TO CHR16.3; EXPRESSED IN BRAIN, SIGNAL = 1.3; EXPRESSED IN ADULT LIVER, SIGNAL = 1.2; NT HIT: X04650.1, EVALUE 1.50e-01; SWISSPROT HIT: P26846, EVALUE 5.00e-01; EST_HUMAN HIT: BG912728.1, EVALUE 6.00e-82
ggaccagccatgccttacctgagagcaccgtgaagacagccgcgaaggcattgagcttgagcccgtcgatgacattgctggagtggaagagctcgagacacatgaggctgaagccaaccaccagcagcagaatgtacagcacctcggagaccacagacagccacaggacccc

SEQ ID NO: 22104 - DNA, 379 bp, Homo sapiens
  MAP TO CHR14.3; EXPRESSED IN BRAIN, SIGNAL = 1.2; EXPRESSED IN ADULT LIVER, SIGNAL = 1.2; EXPRESSED IN PLACENTA, SIGNAL = 1.3; SWISSPROT HIT: Q9NYV4, EVALUE 1.80e+00; EST_HUMAN HIT: AA868481.1, EVALUE 2.10e+00
ctaattttggcctctgagttttccttctgggagacacttgctgcttcactgtggaggggtctaggggtagaaagccagctggagctgtggagctgtttataacaccccaaggactgttgttctgccccaagcagggggtttgttggggcccatgcagggggagtctcaacgggcaatcccccgttcctcgtgggatgtggtttatcattcctgctttgagtttcattaacatggaatcttgcactttcccaaccaatgacgccacaaaagaataaactatattaagtccataaatctcagactgccaagtccctggaatatcaactgatgaaactctccgctttctaacctgaggtgagtaataagtttccctcttcat

SEQ ID NO: 22105 - DNA, 90 bp, Homo sapiens
  MAP TO CHR16.3; EXPRESSED IN PLACENTA, SIGNAL = 1.2; EXPRESSED IN HELA, SIGNAL = 1.3; EXPRESSED IN LUNG, SIGNAL = 1.5; EXPRESSED IN BONE MARROW, SIGNAL = 1.7; EXPRESSED IN FETAL LIVER, SIGNAL = 0.98; EXPRESSED IN BRAIN, SIGNAL = 1.5; EXPRESSED IN ADULT LIVER, SIGNAL = 1.2; SWISSPROT HIT: P50331, EVALUE 6.20e+00; NT HIT: Z21526.1, EVALUE 2.80e-01; EST_HUMAN HIT: BE734701.1, EVALUE 1.60e+00
gtggctcgggtgaaataaccaaatgttccaagggtcagtggaatgtggccacgatgtgctcaacacagccagccacactgagtttggaag

SEQ ID NO: 22106 - DNA, 81 bp, Homo sapiens
  MAP TO CHR18.3; EXPRESSED IN BRAIN, SIGNAL = 1.1; EXPRESSED IN ADULT LIVER, SIGNAL =   1; EST_HUMAN HIT: BE393435.1, EVALUE 5.60e+00
gaagttgccatcaattcaaatcccgagaacaaggccctggacacagttaatagtccgcagcctggccagcccaggctttga

SEQ ID NO: 22107 - DNA, 148 bp, Homo sapiens
  MAP TO CHR14.3; EXPRESSED IN HEART, SIGNAL = 4.5; EXPRESSED IN ADULT LIVER, SIGNAL = 1.1; SWISSPROT HIT: P30050, EVALUE 4.00e-15; NT HIT: gi16156404, EVALUE 2.00e-25; EST_HUMAN HIT: AA343265.1, EVALUE 6.00e-14
tgtcacccaagttcaaccccaacaagatcaaagtcgtatacctgaggtgcacgagtggggaagtcagtactacatctgctctggttcctaagatcagccccctgggtctgtctccaaaaaaggccaatgaggacatcaccaagacaag

SEQ ID NO: 22108 - DNA, 104 bp, Homo sapiens
  MAP TO CHR16.3; EXPRESSED IN HEART, SIGNAL = 1.8; EXPRESSED IN FETAL LIVER, SIGNAL = 2.7; EXPRESSED IN ADULT LIVER, SIGNAL = 1.6; EXPRESSED IN HELA, SIGNAL = 2.2; EXPRESSED IN PLACENTA, SIGNAL = 2.1; EST_HUMAN HIT: BE621031.1, EVALUE 4.00e-51
agatgtatggccctggaggaggcaagtatttcagcaccactgaagactacgaccatgaaatcacagggctgcgggtgtctgtaggtcttctcctggtgaaaagg

SEQ ID NO: 22109 - DNA, 255 bp, Homo sapiens
  MAP TO CHR16.3; EXPRESSED IN HELA, SIGNAL = 3.4; EXPRESSED IN PLACENTA, SIGNAL = 2.6; EXPRESSED IN BONE MARROW, SIGNAL = 2.5; EXPRESSED IN FETAL LIVER, SIGNAL = 1.7; EXPRESSED IN ADULT LIVER, SIGNAL = 2.8; EXPRESSED IN BRAIN, SIGNAL = 3.2; SWISSPROT HIT: P55149, EVALUE 6.50e-01; NT HIT: gi14786755, EVALUE 9.20e-01; EST_HUMAN HIT: BI825551.1, EVALUE 0.00e+00
tacagacatcaaggatgcagtcgacccagagtccactcagcggccaaacccattccgtcgacaaagcattgtcttagatcccatgttacaggagggtacctttaacagccagagggcaaccttcataagagactggtccaacaagatgcctgacatggcttacgaacgcaagctaaagagcctcatggagaaaagcaccgaacctaagatggaaaccatgaggatgttgaagccagaggaggtgctgagctgccg

SEQ ID NO: 22110 - DNA, 176 bp, Homo sapiens
  MAP TO CHR18.3; EXPRESSED IN BRAIN, SIGNAL = 1.4; EXPRESSED IN ADULT LIVER, SIGNAL = 1.1; SWISSPROT HIT: P52746, EVALUE 7.40e+00; EST_HUMAN HIT: BE811007.1, EVALUE 5.80e-02
gtgtttgctgattctcaagaggcgacggactttgagaagctgagcagagcttccagcaatgctatgtgtctgggagtaagcaaaatttttggtatggcccacagagaagaagggactctgaaaaagggtctagactctcaattagaactgatggaggatgagatcttaaggcatgg

SEQ ID NO: 22111 - DNA, 84 bp, Homo sapiens
  MAP TO CHR18.3; EXPRESSED IN PLACENTA, SIGNAL =   3; EXPRESSED IN BONE MARROW, SIGNAL = 3.7; EXPRESSED IN ADULT LIVER, SIGNAL =   3; EST_HUMAN HIT: AI659940.1, EVALUE 9.50e-02
agggaaagaagactggctcggagtacatcggtggctacggaaaccagccctgtggacactggagagaagatgtttccatctaag

SEQ ID NO: 22112 - DNA, 388 bp, Homo sapiens
  MAP TO CHR16.3; EXPRESSED IN ADULT LIVER, SIGNAL = 2.3; EXPRESSED IN PLACENTA, SIGNAL = 2.2; SWISSPROT HIT: P75318, EVALUE 8.20e-01; NT HIT: gi14776310, EVALUE 0.00e+00; EST_HUMAN HIT: AW954877.1, EVALUE 0.00e+00
agtatattagatagtaatagtgggttaagagctaatgggttggcagctgcagctgtatttaatgcagcagtagaggatgtggaaggagaacttgacacagagttttctccaccattctctgaactttggctctctgtcctttctgtttttccttctgactccttagagtcacttccctttttgtcttctgtcccagattccgtaggctttgtcaggagtcctcccatgcccaacagatttggtaatccagccattcctgacagcagcatggggaacatagcagccatgtttttagcttctcctccagaaggaaggccggtaggcattcccatcaacccagcagttacttgcagtgactgcaagttttgtaggttttgttgtaaggcct

SEQ ID NO: 22113 - DNA, 316 bp, Homo sapiens
  MAP TO CHR16.3; EXPRESSED IN HELA, SIGNAL = 2.1; EXPRESSED IN PLACENTA, SIGNAL =   2; EXPRESSED IN LUNG, SIGNAL = 1.4; EXPRESSED IN BONE MARROW, SIGNAL = 1.9; EXPRESSED IN FETAL LIVER, SIGNAL = 1.7; EXPRESSED IN ADULT LIVER, SIGNAL =   2; EXPRESSED IN BRAIN, SIGNAL = 2.9; EST_HUMAN HIT: BG878309.1, EVALUE 1.70e+00; SWISSPROT HIT: gi12644096, EVALUE 2.00e-07; NT HIT: L17432.1, EVALUE 4.60e+00
cacgtctgccacagaggtccgagaagcctcagcacacacacagccaggcagggtgtccccatgctcagcacacatgtggccaggcaggctgtccccaggccgagcacacacatggccaggcggggtgtccccaggctgagcacacacgtggccaggtggagtgtccccaggccgagcacacacatggccaggtggggtgtccccaggcccagcacacacgaggccagcggggtgtccccacgctcagcacacatgtggccagccagggtgtccccagctcggggttggggtgtacccagctcggggtcagggtttt

SEQ ID NO: 22114 - DNA, 87 bp, Homo sapiens
  MAP TO CHR19.3; EXPRESSED IN BRAIN, SIGNAL = 1.9; EXPRESSED IN ADULT LIVER, SIGNAL = 1.1; EXPRESSED IN HELA, SIGNAL = 1.5; EST_HUMAN HIT: BF039002.1, EVALUE 1.00e-41; SWISSPROT HIT: P15498, EVALUE 7.00e-10; NT HIT: AF030213.1, EVALUE 7.00e-42
ctgtccatcttggagcgccgttccaccgaggtgatcttgagttccccgtcgatcttgggccggccatagtgagccagagactggtcc

SEQ ID NO: 22115 - DNA, 337 bp, Homo sapiens
  MAP TO CHR16.3; EXPRESSED IN PLACENTA, SIGNAL = 0.92; EXPRESSED IN ADULT LIVER, SIGNAL = 0.92; NT HIT: gi14775105, EVALUE 1.00e-113; EST_HUMAN HIT: AW197402.1, EVALUE 0.00e+00; SWISSPROT HIT: Q9JIQ8, EVALUE 1.00e-06
gccctagattggattatccaggtcacccccactgccagcacacacgcagccttctctgggaggaggaatgccttaactgcagatgtgggattccatcctgacacccagcagttctgcaagactggtggtgtatgcagcattctgccgaggaagcagatggactggaccaggttgccaaaatgcatcgctgtgtctgtcttcaggagggctatgttgttgctcatggagttgttatcaaagtcctcatggatgatgatggtattgactggatactctgtgtgagcaatcttgctaggatccatgttacttatacccactataacgacaatgtccttcc

SEQ ID NO: 22116 - DNA, 491 bp, Homo sapiens
  MAP TO CHR19.3; EXPRESSED IN PLACENTA, SIGNAL =   1; EXPRESSED IN HELA, SIGNAL = 2.7; EXPRESSED IN LUNG, SIGNAL = 1.9; EXPRESSED IN FETAL LIVER, SIGNAL = 0.79; EXPRESSED IN BONE MARROW, SIGNAL = 1.8; EXPRESSED IN ADULT LIVER, SIGNAL = 2.3; SWISSPROT HIT: Q10586, EVALUE 4.00e-34; NT HIT: D28468.1, EVALUE 0.00e+00; EST_HUMAN HIT: AI684518.1, EVALUE 0.00e+00
ggatgagaaatactggagccggcggtacaagaacaacgaggcagccaagcggtcccgtgacgcccggcggctcaaggagaaccagatatcggtgcgggcggccttcctggagaaggagaacgccctgctgcggcaggaagttgtggccgtgcgccaggagctgtcccactaccgcgccgtgctgtcccgataccaggcccagcacggggccctgtgaggctgccccacatccccacctggcggagctctcctccgccttgctgagacttacgccctgttcccttcctgccctgtggcccacgggccggccagctgggtgccccagggacgtgataatgcagataaatacatttatatttttaagaaaaagcgagcctcccccctcccttgcgggggcggggagggttctctgtgtgtgtccccggcacgtcagggaccctatcctcccaccgcctccgttaacacgatcctgaataaatcttgagaacccc

SEQ ID NO: 22117 - DNA, 147 bp, Homo sapiens
  MAP TO CHR16.3; EXPRESSED IN BONE MARROW, SIGNAL = 2.8; EXPRESSED IN ADULT LIVER, SIGNAL = 1.7; EXPRESSED IN BRAIN, SIGNAL = 1.8; SWISSPROT HIT: Q12968, EVALUE 4.50e+00; NT HIT: gi14775435, EVALUE 8.00e-77; EST_HUMAN HIT: AW673665.1, EVALUE 1.00e-76
cctgccccacaaggaacaagtcgacctgggctatcagccctttttgcctgcaccgcactgcggctctgttcaaatagtaaatctgactgcagtatttttaattcttgaactccgaagccttttggtaaagcagacacattctgacac

SEQ ID NO: 22118 - DNA, 95 bp, Homo sapiens
  MAP TO CHR18.3; EXPRESSED IN ADULT LIVER, SIGNAL = 1.2; EXPRESSED IN PLACENTA, SIGNAL = 1.1; EXPRESSED IN FETAL LIVER, SIGNAL = 1.3; SWISSPROT HIT: P26138, EVALUE 4.70e+00; NT HIT: gi11466954, EVALUE 1.20e+00; EST_HUMAN HIT: AV655730.1, EVALUE 4.40e-01
catggaagaggctgtgcacagcagctcagcaggcttgtgctccagaccagccagtcctgccctctgctcttcatacccaatcccatcatcatcag

SEQ ID NO: 22119 - DNA, 200 bp, Homo sapiens
  MAP TO CHR19.3; EXPRESSED IN PLACENTA, SIGNAL = 1.3; EXPRESSED IN ADULT LIVER, SIGNAL = 1.5; SWISSPROT HIT: O75792, EVALUE 1.00e-19; NT HIT: gi14759427, EVALUE 1.00e-108; EST_HUMAN HIT: AA262477.1, EVALUE 1.00e-108
tctccttaaacaattttaatgtctgggttggggaagcaggtagagcgcgtagaggcagctgctagaggctggttgctgactccaggccgcgttccaggaaatatcggtgggaagaacggggacgggcttgggacccttcattgaggaagtaggatgtgatcttcctgagtccctcctgattctcggatgctgagtcctcc

SEQ ID NO: 22120 - DNA, 170 bp, Homo sapiens
  MAP TO CHR16.3; EXPRESSED IN LUNG, SIGNAL = 1.4; EXPRESSED IN FETAL LIVER, SIGNAL = 2.5; EXPRESSED IN BRAIN, SIGNAL = 1.8; EXPRESSED IN ADULT LIVER, SIGNAL = 1.2; EST_HUMAN HIT: BF811511.1, EVALUE 7.00e-91; SWISSPROT HIT: O14834, EVALUE 3.00e-07; NT HIT: gi14779287, EVALUE 5.00e-91
ggagtgacagtgaggattcacatttgggttatttcaagatgagcttcctactgcccaagctgactagcaaaaaggaagtagaccaggcgataaaaagtactgctgagaaggtgttggttctcaggtttgggagagatgaagatcctgtctgtctgcagctagatgatatt

SEQ ID NO: 22121 - DNA, 77 bp, Homo sapiens
  MAP TO CHR14.3; EXPRESSED IN BRAIN, SIGNAL = 1.8; EXPRESSED IN ADULT LIVER, SIGNAL = 1.1; EXPRESSED IN PLACENTA, SIGNAL = 0.89; EXPRESSED IN BONE MARROW, SIGNAL = 1.2; EST_HUMAN HIT: BE905725.1, EVALUE 3.30e-01
ttggaacaatttctccctggatgatgaagcgcaggatgttcaccactttgtagcgggaagctcttcctgaagccatg

SEQ ID NO: 22122 - DNA, 99 bp, Homo sapiens
  MAP TO CHR18.3; EXPRESSED IN ADULT LIVER, SIGNAL = 1.1; EXPRESSED IN HELA, SIGNAL = 1.3; NT HIT: AF188125.1, EVALUE 6.00e-49; EST_HUMAN HIT: BF984064.1, EVALUE 8.00e-49; SWISSPROT HIT: Q9Y4E6, EVALUE 5.00e-14
ttctacatggtcagctattatgagcggaatcacagaatagcagttggagctcgccatggttcagtggccctgtacgacatccggactggaaaatgtcag

SEQ ID NO: 22123 - DNA, 117 bp, Homo sapiens
  MAP TO CHR16.3; EXPRESSED IN LUNG, SIGNAL =   4; EXPRESSED IN ADULT LIVER, SIGNAL = 2.3; EXPRESSED IN HELA, SIGNAL =   3; EXPRESSED IN PLACENTA, SIGNAL = 2.4; SWISSPROT HIT: P53131, EVALUE 7.90e+00; NT HIT: gi14738781, EVALUE 3.80e-01; EST_HUMAN HIT: AW272804.1, EVALUE 5.70e-01
tattttgtcataatgtggactaatggacacatatcctctaatttctcttcttcctgttcatcagacagccaaatttttcctttcacatctttgtccgcaacattaatgttcaaaatc

SEQ ID NO: 22124 - DNA, 174 bp, Homo sapiens
  MAP TO CHR18.3; EXPRESSED IN LUNG, SIGNAL = 1.1; EXPRESSED IN BONE MARROW, SIGNAL = 1.4; EXPRESSED IN ADULT LIVER, SIGNAL = 0.97; SWISSPROT HIT: P13868, EVALUE 2.20e-01; NT HIT: AE000503.1, EVALUE 1.50e-01
atggaggaaggagccctgggagagctcatttctagtagaactatctgctacctacaggtactgccaagtgaagtggttatacgttctgtggtagtcacagcagacaccaaccaacctgaatggttgcagttaactgccaggaaaattcctggaacatcaagagaagaggagcta

SEQ ID NO: 22125 - DNA, 202 bp, Homo sapiens
  MAP TO CHR16.3; EXPRESSED IN ADULT LIVER, SIGNAL =   1; EXPRESSED IN HELA, SIGNAL = 1.1; EXPRESSED IN PLACENTA, SIGNAL = 0.82; EXPRESSED IN BONE MARROW, SIGNAL = 1.1; NT HIT: AF162137.2, EVALUE 7.10e-01; EST_HUMAN HIT: AI761051.1, EVALUE 1.00e-110
acaactaactctgtttctaagattttaaagcgataggcaagtcgaagaagcagagatttatttggagagaaagctcctgaaaccgacccagcctttggaagaccagcccgtctgcttagaagttgggactgttgattccttcaattaatgaaatgcatttggtgtttttaatcgtatttattttactttatgagaaggggga

SEQ ID NO: 22126 - DNA, 87 bp, Homo sapiens
  MAP TO CHR18.3; EXPRESSED IN ADULT LIVER, SIGNAL = 0.98; EST_HUMAN HIT: R29126.1, EVALUE 1.50e+00; NT HIT: X70431.1, EVALUE 1.00e-03
ctcaatcatgagaaagaggagtcccagctccaggagaagcaggagcagcccaggaaggggcttctcagaccctgagaactgagccat

SEQ ID NO: 22127 - DNA, 156 bp, Homo sapiens
  MAP TO CHR16.3; EXPRESSED IN ADULT LIVER, SIGNAL = 0.94; EST_HUMAN HIT: AW086142.1, EVALUE 7.90e-01; SWISSPROT HIT: Q92617, EVALUE 3.40e+00; NT HIT: AF117732.1, EVALUE 2.10e+00
tgggagtttgaacaacagaattacaggaaaccaactctggcagctaagcatgccgacataatgtctacaatatggggaatgacagtaggggcggaaatcaagaacactggaactgggtccagagaggcagtgcttgcaatgggtgaggcagggaag

SEQ ID NO: 22128 - DNA, 142 bp, Homo sapiens
  MAP TO CHR18.3; EXPRESSED IN BONE MARROW, SIGNAL = 1.4; EXPRESSED IN ADULT LIVER, SIGNAL = 1.1; EXPRESSED IN PLACENTA, SIGNAL = 1.2; NT HIT: D64032.1, EVALUE 1.20e-01; EST_HUMAN HIT: AW771131.1, EVALUE 7.00e-72
atgcatatgccagaaatcatagcccccgtgagagagacaagcccatttttcagcagcagcagctgttggtgcatctgcagacaggttgctgtcaggagtgttgagcagagaaatttcaggagaaaggtgcacatgagaagag

SEQ ID NO: 22129 - DNA, 98 bp, Homo sapiens
  MAP TO CHR18.3; EXPRESSED IN BONE MARROW, SIGNAL = 1.7; EXPRESSED IN ADULT LIVER, SIGNAL = 1.1; NT HIT: gi11038642, EVALUE 1.20e+00; EST_HUMAN HIT: AI193860.1, EVALUE 7.00e-03
gatgtttcaactacccccaaaactgccaaaacccaaaatttatcctggagtacaacaaatatttccacaatgtcttctacatcctactattgtgactg

SEQ ID NO: 22130 - DNA, 142 bp, Homo sapiens
  MAP TO CHR14.3; EXPRESSED IN BRAIN, SIGNAL = 1.5; EXPRESSED IN ADULT LIVER, SIGNAL = 1.4; NT HIT: gi16160401, EVALUE 1.90e+00
ttgatcattcagtcgttttaatgaactcaacgtggttgtttccgatttggccttgaaagccttggcatgtcgccgtgctctgagtgggagcctcgctgcctccagcttgggtttctcagttttggcagggctttccttccca

SEQ ID NO: 22131 - DNA, 229 bp, Homo sapiens
  MAP TO CHR18.3; EXPRESSED IN PLACENTA, SIGNAL = 0.87; EXPRESSED IN ADULT LIVER, SIGNAL = 1.1; SWISSPROT HIT: O95456, EVALUE 2.00e+00; EST_HUMAN HIT: AV763158.1, EVALUE 7.70e-02
agtagcaggggatgctggatgtcagcccacggaggtctcctgttgtggctgtggcctggacacctggttctggcaaggcaagcttgccaaggagtctgaaagctcagaaagctccactggacttgtggagtgctttatccagtccaccgtctccatttcctggattcccagggcctttggaagctcccctcaggatacaatgaacaccacgattcttgatattctataa

SEQ ID NO: 22132 - DNA, 167 bp, Homo sapiens
  MAP TO CHR18.3; EXPRESSED IN ADULT LIVER, SIGNAL = 1.6; EXPRESSED IN HELA, SIGNAL = 0.9; NT HIT: AB016806.1, EVALUE 5.80e-01
gctcctttatttctcacataacaagtactctggagattatggagattcagtggtttaacattttcagtgctggcagctttacaattctctcaggtttttttaatggttgctccaattctaggcattacatttccattaaggcaggcagaaaaggggaagaggtcctg

SEQ ID NO: 22133 - DNA, 169 bp, Homo sapiens
  MAP TO CHR16.3; EXPRESSED IN HEART, SIGNAL =  13; EXPRESSED IN FETAL LIVER, SIGNAL = 4.9; EXPRESSED IN ADULT LIVER, SIGNAL =  16; EST_HUMAN HIT: BI912835.1, EVALUE 6.00e-88; NT HIT: gi14778872, EVALUE 3.00e-89; SWISSPROT HIT: P13073, EVALUE 7.00e-26
cactcgactttctcatccatggagaggctgctccaggaggccttctccttctccttcaatgccttctggctggcagacaggtgcttgacatgggccacctccggcaaggggtggtcacgccgatccatataagctgggagcgaaaagtcttcgctcttcacaacacttt

SEQ ID NO: 22134 - DNA, 174 bp, Homo sapiens
  MAP TO CHR14.3; EXPRESSED IN HELA, SIGNAL = 2.1; EXPRESSED IN HEART, SIGNAL = 1.9; EXPRESSED IN BONE MARROW, SIGNAL = 2.2; EXPRESSED IN ADULT LIVER, SIGNAL = 2.4; SWISSPROT HIT: P78358, EVALUE 4.40e-02
ctgtgacagtgagtcatgtaggtgactgtctcctcccattgggccttgatgtccttcagccgggccaggatcccgggcttctggtccccagggcagcatgccaagagggcttcagccatccgtagcacgaggtccaccctcacacgcccctcgggctccagctggcatattttc

SEQ ID NO: 22135 - DNA, 86 bp, Homo sapiens
  MAP TO CHR18.3; EXPRESSED IN ADULT LIVER, SIGNAL = 0.95; EXPRESSED IN BRAIN, SIGNAL = 1.2; NT HIT: U57050.1, EVALUE 2.70e-01; EST_HUMAN HIT: AW865251.1, EVALUE 3.90e-01
cagccttccactgtgaaggtgtaaatgttctctttcacaaaattttccacgcagtcaacagtatcattgatttcttgagtattgac

SEQ ID NO: 22136 - DNA, 122 bp, Homo sapiens
  MAP TO CHR18.3; EXPRESSED IN FETAL LIVER, SIGNAL = 1.5; EXPRESSED IN ADULT LIVER, SIGNAL = 1.2; EXPRESSED IN HELA, SIGNAL = 0.89; EXPRESSED IN BONE MARROW, SIGNAL = 1.1; SWISSPROT HIT: P39683, EVALUE 7.90e+00; NT HIT: U22361.1, EVALUE 6.30e+00; EST_HUMAN HIT: BG284504.1, EVALUE 5.90e-01
ctggcagtttccggacaccttccaagctcagattctgcctctgctctgcctcttgggatgactgcttgattaatgagctcccattcataaagctttctgatgaggaatacgcgccatggctg

SEQ ID NO: 22137 - DNA, 87 bp, Homo sapiens
  MAP TO CHR19.3; EXPRESSED IN ADULT LIVER, SIGNAL = 0.99; EXPRESSED IN FETAL LIVER, SIGNAL = 1.1; SWISSPROT HIT: Q13360, EVALUE 1.20e+00; NT HIT: gi13654802, EVALUE 7.00e-42; EST_HUMAN HIT: BG259372.1, EVALUE 2.00e-37
gctctgcctgcttaggactctgcccagccaggaaggaaacctacaggaggaagaatggctgcagggtggctgacaacctggtcacag

SEQ ID NO: 22138 - DNA, 176 bp, Homo sapiens
  MAP TO CHR18.3; EXPRESSED IN ADULT LIVER, SIGNAL = 1.1; EXPRESSED IN BRAIN, SIGNAL = 1.3; NT HIT: AF099810.1, EVALUE 3.90e-02
atcagcttccaagcgtgcagatgctaatgaaaactttgcctctggttgggaagtctgggccgatgatgagcggaggacattttctccaatgatgcttatgctcaccgtgtgcagtgaacaagcctctctgtcgggtttagaactgaaaccacctctggctcgagctaaagaacttg

SEQ ID NO: 22139 - DNA, 209 bp, Homo sapiens
  MAP TO CHR19.3; EXPRESSED IN HELA, SIGNAL = 1.9; EXPRESSED IN FETAL LIVER, SIGNAL = 1.8; EXPRESSED IN BRAIN, SIGNAL = 2.4; EXPRESSED IN ADULT LIVER, SIGNAL = 1.7; SWISSPROT HIT: P53781, EVALUE 8.60e-01; NT HIT: U37325.1, EVALUE 7.40e-01; EST_HUMAN HIT: BG284318.1, EVALUE 2.80e-01
atgatccacaaggcaggggaccggccacctccctcggaagggcctggacacctggggtggaggtggcggataaagagaagccgatcaggcccccccactccacagcctgaatgggaggatctgctggacgtggcggatgagctgcgagagagggcgccccactccagctccagacagaggggtgggaacgtgaccccgacccggggcgg

SEQ ID NO: 22140 - DNA, 115 bp, Homo sapiens
  MAP TO CHR18.3; EXPRESSED IN ADULT LIVER, SIGNAL = 2.1; EXPRESSED IN LUNG, SIGNAL = 1.9; EXPRESSED IN BONE MARROW, SIGNAL = 1.9; EXPRESSED IN FETAL LIVER, SIGNAL = 2.2; SWISSPROT HIT: Q9Y2A7, EVALUE 6.00e+00; NT HIT: AF197936.1, EVALUE 3.80e-01; EST_HUMAN HIT: AI872354.1, EVALUE 1.40e-01
gcttctgctggcaagagaacctgggaaacagaaacagggatgtgatcattgtgtctaaggctttggggcagcccaagctaccaccttccttttctctcttcaaaaacttagagag

SEQ ID NO: 22141 - DNA, 160 bp, Homo sapiens
  MAP TO CHR14.3; EXPRESSED IN FETAL LIVER, SIGNAL = 5.5; EXPRESSED IN ADULT LIVER, SIGNAL = 2.3; EST_HUMAN HIT: AL037730.1, EVALUE 2.00e-84; NT HIT: gi13647907, EVALUE 2.00e-84; SWISSPROT HIT: P25490, EVALUE 9.00e-28
gggctgcacaaagatgttcagggataactcggccatgagaaaacatctgcacacccacggtcccagagtccacgtctgtgcagaatgtggcaaagcttttgttgagagttcaaaactaaaacgacaccaactggttcatactggagagaagccctttcag

SEQ ID NO: 22142 - DNA, 150 bp, Homo sapiens
  MAP TO CHR14.3; EXPRESSED IN ADULT LIVER, SIGNAL = 2.8; NT HIT: AB050050.1, EVALUE 5.00e-29; SWISSPROT HIT: P03364, EVALUE 5.10e-01; EST_HUMAN HIT: BF035327.1, EVALUE 1.00e-36
atgcaagatgaatcagcaggtgctgatgtagaagctgcagcaagttatccagaacgtctagctaagctcattgatgaaggtggctacactaaacagcagattttcagtgtagacaaaaacagccttctgttgcaagaagaagccatctag

SEQ ID NO: 22143 - DNA, 171 bp, Homo sapiens
  MAP TO CHR18.3; EXPRESSED IN FETAL LIVER, SIGNAL = 1.7; EXPRESSED IN ADULT LIVER, SIGNAL = 1.5; EXPRESSED IN BRAIN, SIGNAL = 1.3; NT HIT: AF403769.1, EVALUE 1.50e-01; SWISSPROT HIT: P19273, EVALUE 2.90e-01; EST_HUMAN HIT: BE154850.1, EVALUE 5.60e-02
ctgtgtacattttaaattcatcacaattcaaatgaaatgtgtttctctgtcttcttgcagctgtcattttgcccaactgcaaattgacttttagtaatgaatttccattgcagttggctaattgtgggtgtgatttatcctcttgtcctccgttgatctctcttccagatt

SEQ ID NO: 22144 - DNA, 247 bp, Homo sapiens
  MAP TO CHR16.3; EXPRESSED IN BONE MARROW, SIGNAL = 1.4; EXPRESSED IN HEART, SIGNAL = 1.8; EXPRESSED IN LUNG, SIGNAL = 1.3; EXPRESSED IN ADULT LIVER, SIGNAL =   2; EXPRESSED IN PLACENTA, SIGNAL = 6.5; EST_HUMAN HIT: AA715946.1, EVALUE 4.00e-96; SWISSPROT HIT: P33151, EVALUE 1.00e-42; NT HIT: X79981.1, EVALUE 0.00e+00
gataacacggccaacatcacagtcaagtatgggcagtttgaccgggagcataccaaggtccacttcctacccgtggtcatctcagacaatgggatgccaagtcgcacgggcaccagcacgctgaccgtggccgtgtgcaagtgcaacgagcagggcgagttcaccttctgcgaggatatggccgcccaggtgggcgtgagcatccaggcagtggtagccatcttactctgcatcctcaccatcacag

SEQ ID NO: 22145 - DNA, 212 bp, Homo sapiens
  MAP TO CHR19.3; EXPRESSED IN ADULT LIVER, SIGNAL = 5.9; EXPRESSED IN BRAIN, SIGNAL = 1.2; EXPRESSED IN PLACENTA, SIGNAL =   2; EXPRESSED IN HEART, SIGNAL = 3.4; NT HIT: AF030248.1, EVALUE 6.00e-97; EST_HUMAN HIT: BI760366.1, EVALUE 7.00e-33; SWISSPROT HIT: Q13011, EVALUE 6.00e-07
cttcacctggaagaaagcatcctgggcacagtaccggatgtcacaggcggtgacaaggtccacacctaggaggtagaggccagggatgctgaatgaccaccagaaccaaccctggctcccgggaggtggggctgcctcttgggacacagtctggcccatgacagagctgaggctggatgccagtggccgcggcatcggagcagcagccccac

SEQ ID NO: 22146 - DNA, 250 bp, Homo sapiens
  MAP TO CHR19.3; EXPRESSED IN HELA, SIGNAL = 5.7; EXPRESSED IN BONE MARROW, SIGNAL = 2.8; EXPRESSED IN FETAL LIVER, SIGNAL = 2.7; EXPRESSED IN LUNG, SIGNAL = 3.6; EXPRESSED IN ADULT LIVER, SIGNAL = 2.2; SWISSPROT HIT: Q09013, EVALUE 1.00e-46; NT HIT: gi14761143, EVALUE 0.00e+00; EST_HUMAN HIT: AW410918.1, EVALUE 0.00e+00
ccatggcagtgagcccgtcctccaccaagtcgaagttgcatgtgtcggtggcaccttcgaaatccggtgtaaaggggggcacgctgtcccggagaccatcccagtcgaggccaaagaagaagggatgtgtccggaagtcgcctgctccaccccggcccagccgtgtctccgggggacacagcaaccgctgaatgaagtctcgagcctcctcagggaccccttcgtccaccagcggcagagagaggtgctc

SEQ ID NO: 22147 - DNA, 158 bp, Homo sapiens
  MAP TO CHR19.3; EXPRESSED IN FETAL LIVER, SIGNAL = 3.6; EXPRESSED IN ADULT LIVER, SIGNAL = 2.6; EXPRESSED IN HELA, SIGNAL = 4.5; EXPRESSED IN LUNG, SIGNAL = 3.7; SWISSPROT HIT: P50895, EVALUE 5.00e-24; NT HIT: gi15301706, EVALUE 2.00e-83; EST_HUMAN HIT: BG327200.1, EVALUE 4.00e-83
caggccacgcgcagctccagcgtcttggagagctgcacgtcatctgccgcgtcgtaatcctccactctgcagccataggtcccgctctggccccgggtcactccctccagggtcaagttcccctcgagattcacattcagcacttcctcctgctcatc

SEQ ID NO: 22148 - DNA, 184 bp, Homo sapiens
  MAP TO CHR14.3; EXPRESSED IN ADULT LIVER, SIGNAL = 0.93; NT HIT: gi13095578, EVALUE 6.40e-01; SWISSPROT HIT: P30210, EVALUE 5.60e+00; EST_HUMAN HIT: BE546137.1, EVALUE 6.10e-02
ctggcctgtggcccagtgtgcttggtgtctgcaaggagcccagggctagcgctggagctgacactgaacaccacaggctcgtagggaaataccaccgagtaatagatttttatccatgctctccactgaatcctttccagattgtagtggggcggctgttggtacaagtcaaacgtggattcag

SEQ ID NO: 22149 - DNA, 145 bp, Homo sapiens
  MAP TO CHR19.3; EXPRESSED IN BRAIN, SIGNAL = 1.6; EXPRESSED IN ADULT LIVER, SIGNAL = 2.5; EXPRESSED IN PLACENTA, SIGNAL = 1.7; NT HIT: gi15302551, EVALUE 3.00e-76; EST_HUMAN HIT: AW245073.1, EVALUE 5.00e-76; SWISSPROT HIT: P12107, EVALUE 7.70e+00
ctttctcttccggtggaaggctgccttgctctcatgagagttgatctgcagcgggatataagcgtctagatgatacagctgctgggggccccccatcaccaggcggttctccccgatctccagcgacagccccagggctccatcc

SEQ ID NO: 22150 - DNA, 146 bp, Homo sapiens
  MAP TO CHR16.3; EXPRESSED IN BONE MARROW, SIGNAL = 1.2; EXPRESSED IN ADULT LIVER, SIGNAL = 1.1; EXPRESSED IN PLACENTA, SIGNAL = 1.2; SWISSPROT HIT: P36113, EVALUE 5.20e-01; NT HIT: M14657.1, EVALUE 2.00e+00; EST_HUMAN HIT: BI755006.1, EVALUE 1.00e-73
ggagccgccgactgtttggcaccgttttggagagcaaagtatgcatattgctggacacgtcagggtccatgggcccctacctgcagcaggtgaagacagagctggttttgctgatttgggaacagctgcggaagtgctgtgacagg

SEQ ID NO: 22151 - DNA, 130 bp, Homo sapiens
  MAP TO CHR19.3; EXPRESSED IN FETAL LIVER, SIGNAL = 1.7; EXPRESSED IN ADULT LIVER, SIGNAL = 2.4; NT HIT: gi14211948, EVALUE 1.00e-66; SWISSPROT HIT: P34036, EVALUE 4.00e-01
atggcttctgctgcctgctccatggaccccatcgacagctttgagctcctggatctcctgtttgaccggcaggacggcatcctgagacacgtggagctgggcgagggctggggtcacgtcaaggaccagg

SEQ ID NO: 22152 - DNA, 142 bp, Homo sapiens
  MAP TO CHR18.3; EXPRESSED IN BRAIN, SIGNAL = 0.99; EXPRESSED IN ADULT LIVER, SIGNAL = 1.3; EXPRESSED IN PLACENTA, SIGNAL = 1.1; NT HIT: gi13375955, EVALUE 1.90e+00
atggctttcccggttaattctgaattcagcaaagagctccaatgggctgatgttgagcagaggtcagcggctgccagaactgtcatacttactactgtctccatgagccagactggaaaggtacacagagctgagagctcag

SEQ ID NO: 22153 - DNA, 209 bp, Homo sapiens
  MAP TO CHR16.3; EXPRESSED IN BONE MARROW, SIGNAL = 0.64; EXPRESSED IN ADULT LIVER, SIGNAL = 1.1; NT HIT: gi9257253, EVALUE 1.00e-08; SWISSPROT HIT: Q15765, EVALUE 4.00e-03; EST_HUMAN HIT: AU119623.1, EVALUE 8.00e-11
ccacattggtcccagagaaagtcaaggtcttcacccacggattcaagattcttgtggcagctgctgaattcttttccaacaatgcttgggcctcatcagcgtcatgtttatgcactaccccagccccaaccacagacatgggcaggaggaacagagctctaccgtgtagcgtcactgccagtaagagtctggctctcccatgaagcatt

SEQ ID NO: 22154 - DNA, 158 bp, Homo sapiens
  MAP TO CHR18.3; EXPRESSED IN HELA, SIGNAL = 1.2; EXPRESSED IN LUNG, SIGNAL = 1.2; EXPRESSED IN BONE MARROW, SIGNAL = 1.3; EXPRESSED IN ADULT LIVER, SIGNAL = 1.4; NT HIT: gi14771564, EVALUE 8.50e+00; SWISSPROT HIT: Q01082, EVALUE 3.40e+00; EST_HUMAN HIT: AI474946.1, EVALUE 2.00e-01
gttgccaaaccccttggataccagattctgctcctcagctatactctcctcttgcatcaacaatgtttcattttctcctacccaggcaggagacttgattcccacttctctctgagagccctgttctgctaaaagggtgggtggtgctctgtgacatc

SEQ ID NO: 22155 - DNA, 223 bp, Homo sapiens
  MAP TO CHR18.3; EXPRESSED IN ADULT LIVER, SIGNAL = 1.4; EXPRESSED IN HELA, SIGNAL = 3.6; EXPRESSED IN LUNG, SIGNAL = 2.7; EXPRESSED IN FETAL LIVER, SIGNAL = 1.8; NT HIT: gi15304151, EVALUE 3.00e-40; SWISSPROT HIT: P98195, EVALUE 1.00e-24; EST_HUMAN HIT: AW362443.1, EVALUE 6.00e-55
agccgatacactcaagccaagctgagcatgcacgacaggtccctcaaggtggccgcggtagtcgagagcctggagagggagatggaactgctgtgcctcaccggcgtggaggaccagctgcaggcagacgtgcggcccacgctggagatgctgcgcaacgccgggatcaaggtactgcaggctcacctctgctggcgcgcgctgcttttgctgaagcaaacag

SEQ ID NO: 22156 - DNA, 168 bp, Homo sapiens
  MAP TO CHR16.3; EXPRESSED IN ADULT LIVER, SIGNAL = 4.4; EXPRESSED IN HELA, SIGNAL = 3.4; EXPRESSED IN LUNG, SIGNAL =   4; NT HIT: gi15826865, EVALUE 2.30e+00; SWISSPROT HIT: Q01831, EVALUE 7.50e+00; EST_HUMAN HIT: AA523699.1, EVALUE 3.40e+00
atggcaagtgtgtttatagcatgggtcctgtcattctcaactaaactttttgtcagaattttggagttaaagaactcctttacgtgttgttatatgttgacatctaagttgggaggatcctatgaaagcttaaagggaagattgtggtacccagactgtgaaaagcag

SEQ ID NO: 22157 - DNA, 223 bp, Homo sapiens
  MAP TO CHR18.3; EXPRESSED IN ADULT LIVER, SIGNAL = 1.2; EXPRESSED IN HELA, SIGNAL = 1.2; EST_HUMAN HIT: BG741287.1, EVALUE 3.00e-01; SWISSPROT HIT: Q06455, EVALUE 2.40e+00
gcttctgcttcccagtttctcctcttcaggagagttcccacaaggccagcaggtgctggccactggtgattcctgacaattccctgcacactggatccgaagtttagattgcttgccttctactgtcaagaccacctttgcctttgccctttgcaacatggaagcaagctcctcctcttttggtgcacaggcccacatgtatctagttgtgctttggtccatg

SEQ ID NO: 22158 - DNA, 274 bp, Homo sapiens
  MAP TO CHR16.3; EXPRESSED IN HELA, SIGNAL =   1; EXPRESSED IN ADULT LIVER, SIGNAL = 1.3; SWISSPROT HIT: Q01022, EVALUE 2.60e-01; EST_HUMAN HIT: AI654903.1, EVALUE 4.00e-81; NT HIT: AF100956.1, EVALUE 3.90e+00
attgaacagtcttggttaataaatgaagaagcaaagccagaaaccctgtttaaagaactaacaaaaaaggtcatgaatgatctggtggttgttatattttcttgtttacccgaggagaagactatgctcaagcatgtattgaatccagtgatagccagaatgtcatccatactgctagcagccattagtaaggttggaatgtcttcctcaacaccatatccattttcttgcaacaccatcgtgtaaaggacaacaacagcaagagagacagcac

SEQ ID NO: 22159 - DNA, 113 bp, Homo sapiens
  MAP TO CHR19.3; EXPRESSED IN PLACENTA, SIGNAL = 1.4; EXPRESSED IN BONE MARROW, SIGNAL = 0.81; EXPRESSED IN ADULT LIVER, SIGNAL = 1.3; SWISSPROT HIT: P57735, EVALUE 6.00e+00; EST_HUMAN HIT: BE392910.1, EVALUE 3.50e-02
gtgcagtggagcctgttccaggtcacgcccggcctggccgtcatcagtctcgtggctctgaagcagccacgtcactcccccagtcccggcacctcccctgcgcctgcacctgg

SEQ ID NO: 22160 - DNA, 152 bp, Homo sapiens
  MAP TO CHR18.3; EXPRESSED IN ADULT LIVER, SIGNAL = 0.92; EXPRESSED IN HELA, SIGNAL = 1.2; SWISSPROT HIT: P10931, EVALUE 1.00e+01; EST_HUMAN HIT: AL581127.1, EVALUE 1.20e-02; NT HIT: AJ252082.1, EVALUE 5.20e-01
ctggcccttctggccacatggagcaaagtcaacaatcaaggcccaccacatgcagcagctgtcaaagcagaagtcctcagtcattgaacagctgagtattatcatagatcctagggttcccacagtgcatatgtaggggaagcagcttcttc

SEQ ID NO: 22161 - DNA, 154 bp, Homo sapiens
  MAP TO CHR16.3; EXPRESSED IN BRAIN, SIGNAL = 2.2; EXPRESSED IN ADULT LIVER, SIGNAL = 1.6; SWISSPROT HIT: Q16819, EVALUE 5.80e+00
ctggatcagagctggggcttggcaggtgggaagagtgaggctatgaacatcgggggtccaacaaacatgtgggtaggggttgtggggacaggtggaaggagctgatctaggagctgctgctgagtcagaagcactgagacaaggggctttgaca

SEQ ID NO: 22162 - DNA, 147 bp, Homo sapiens
  MAP TO CHR16.3; EXPRESSED IN ADULT LIVER, SIGNAL =   1; EXPRESSED IN PLACENTA, SIGNAL = 0.93; SWISSPROT HIT: P27584, EVALUE 3.40e+00; EST_HUMAN HIT: BE768152.1, EVALUE 1.90e-01; NT HIT: U18108.1, EVALUE 2.00e-03
tagtgcctgatgaaaccaggatgaggcaaaggcatctgctcagtgtcatagacagtaatggtcccagaaatgatcccaattgtctccatgctaatcaaatgtgggttcactgtgaggagcatgtcctgtgggtgcttgttcttcagt

SEQ ID NO: 22163 - DNA, 135 bp, Homo sapiens
  MAP TO CHR16.3; EXPRESSED IN ADULT LIVER, SIGNAL = 1.8; EXPRESSED IN PLACENTA, SIGNAL = 2.3; SWISSPROT HIT: P42744, EVALUE 2.00e-07; EST_HUMAN HIT: AL554510.1, EVALUE 2.00e-69; NT HIT: gi16164681, EVALUE 1.00e-69
cacgttttgcagttttatatatttgcctgaatctgcaatcatatcaggaattgtgcctcgaacaggtaaatttccttgaccctctttggccacaaattcctttaaggcacgagctaaaatccaaaatgatggagt

SEQ ID NO: 22164 - DNA, 142 bp, Homo sapiens
  MAP TO CHR14.3; EXPRESSED IN ADULT LIVER, SIGNAL = 0.97; EXPRESSED IN PLACENTA, SIGNAL = 1.3; SWISSPROT HIT: P41263, EVALUE 7.70e+00; EST_HUMAN HIT: BG026062.1, EVALUE 7.10e-01
attccagattgtccagtgcctcacaagtgtattatggagctgaaggtgctgattctgacgctggtgtttcagggcctttccatggccttatcccagtgtgatgtatctagttggaaatctctagtacttaatgtctatgaag

SEQ ID NO: 22165 - DNA, 150 bp, Homo sapiens
  MAP TO CHR14.3; EXPRESSED IN ADULT LIVER, SIGNAL = 2.1; EXPRESSED IN BONE MARROW, SIGNAL = 1.4; SWISSPROT HIT: P76174, EVALUE 6.70e-01; EST_HUMAN HIT: H18395.1, EVALUE 1.90e-01; NT HIT: AF230071.1, EVALUE 1.30e-01
gtcaagagaggacacttggccattgcccagacaggcagtgaccgcagttataatgtgtactctgatgagttcaggccaggcagcagacgtgacgtcatggtcctcattcatcatggggctgtggccaaaaccttggctcccatggctcag

SEQ ID NO: 22166 - DNA, 239 bp, Homo sapiens
  MAP TO CHR14.3; EXPRESSED IN FETAL LIVER, SIGNAL = 1.1; EXPRESSED IN BONE MARROW, SIGNAL = 0.91; EXPRESSED IN ADULT LIVER, SIGNAL =   1; EXPRESSED IN HELA, SIGNAL = 1.1; SWISSPROT HIT: P11710, EVALUE 5.10e+00; NT HIT: M94081.1, EVALUE 3.40e+00
catgcagggacttgtgctccattttcgtggattatgggctccgccagtccctgggaaatgaagttactatccaatatatgcagctctgctgagctgttgaaactttctaaggcaaacagattttcttcttttatttctctccaaagtttattatcattttggggaggatggagatggaacgcacaattcaatgccaccagaatgtatagggctaagtaaatctgcaacgttgttattag

SEQ ID NO: 22167 - DNA, 166 bp, Homo sapiens
  MAP TO CHR14.3; EXPRESSED IN HELA, SIGNAL = 1.7; EXPRESSED IN LUNG, SIGNAL = 1.9; EXPRESSED IN FETAL LIVER, SIGNAL = 1.8; EXPRESSED IN BONE MARROW, SIGNAL = 2.5; EXPRESSED IN ADULT LIVER, SIGNAL = 1.3; SWISSPROT HIT: P25461, EVALUE 9.90e+00; NT HIT: AF109719.2, EVALUE 5.70e-01; EST_HUMAN HIT: BI822317.1, EVALUE 2.00e-26
agcgtgtggtgctcctgccagcggcagttactggtggagctgaggccaccgctactgtcgtcgttggcgctttgcttctggaacctcccagcaagatggcactcactgtctgttcccttccgattagcacccccagccgcgctccctcctccccgggatacgtatt

SEQ ID NO: 22168 - DNA, 195 bp, Homo sapiens
  MAP TO CHR18.3; EXPRESSED IN HELA, SIGNAL = 4.4; EXPRESSED IN LUNG, SIGNAL = 3.7; EXPRESSED IN BONE MARROW, SIGNAL = 1.4; EXPRESSED IN FETAL LIVER, SIGNAL = 3.9; EXPRESSED IN ADULT LIVER, SIGNAL = 2.1; SWISSPROT HIT: P49257, EVALUE 1.00e-31; NT HIT: gi14760783, EVALUE 1.00e-106; EST_HUMAN HIT: BG292562.1, EVALUE 1.00e-105
gcggaggaaatatttgagagtgtaggagatcgagagctaagacaagtctttgaaggacagaatcgtattcatcttgaaatcaagcagctgaaccggcagttagatatgattcttgatgaacagagaagatatgtctcttccttaacagaggaaatctctaaaagaggagcaggaatgcctgggcagcatgggcag

SEQ ID NO: 22169 - DNA, 120 bp, Homo sapiens
  MAP TO CHR14.3; EXPRESSED IN ADULT LIVER, SIGNAL = 1.2; EXPRESSED IN BONE MARROW, SIGNAL = 1.3; SWISSPROT HIT: P15320, EVALUE 4.60e+00
gaagatagttgcatgcgaggccgcatctctacatctgagacagctggttccaagagtggtcctaatagcagcaaaagaactggctacctggccaggggcctgaaactatgggtggaagtg

SEQ ID NO: 22170 - DNA, 144 bp, Homo sapiens
  MAP TO CHR18.3; EXPRESSED IN ADULT LIVER, SIGNAL = 1.1; EST_HUMAN HIT: AA373844.1, EVALUE 2.00e-75; SWISSPROT HIT: P12645, EVALUE 2.00e+00; NT HIT: AJ277587.1, EVALUE 5.00e-72
cttcatgacatctctatatgaccgaatagctgagatttttctcttttcatcttcatctcccaggccttcttctgcagcctcatagccctcatcattgctaccgtcagcttccaccgtgttggccatgtgatcgataagctgctc

SEQ ID NO: 22171 - DNA, 170 bp, Homo sapiens
  MAP TO CHR19.3; EXPRESSED IN HELA, SIGNAL =  13; EXPRESSED IN LUNG, SIGNAL =  13; EXPRESSED IN FETAL LIVER, SIGNAL =  27; EXPRESSED IN ADULT LIVER, SIGNAL = 7.5; NT HIT: AF042347.1, EVALUE 5.00e-91; EST_HUMAN HIT: BG503619.1, EVALUE 7.00e-91; SWISSPROT HIT: Q9Y285, EVALUE 1.00e-27
gaagcccttcactccggtcaagtacttctccatcgaccgcgtattccggaatgagaccctggacgccacgcacctggctgagttccaccagatcgagggcgtggtggcggatcatggtctcaccttgggccacctcatgggcgttctgcgggagttcttcaccaagctgg

SEQ ID NO: 22172 - DNA, 140 bp, Homo sapiens
  MAP TO CHR16.3; EXPRESSED IN ADULT LIVER, SIGNAL = 3.4; NT HIT: AF088993.1, EVALUE 3.00e-73; EST_HUMAN HIT: BE207687.1, EVALUE 2.00e-72; SWISSPROT HIT: O96000, EVALUE 4.00e-14
ctagtccctcttccactgcatttcggcttcatacatgcacatgatgtcctcctccttgcactcagtgatgtctggcacgcggcggtactgccggtggtagtagtaatacctgttctttgcgtgctgccgctctataaatt

SEQ ID NO: 22173 - DNA, 83 bp, Homo sapiens
  MAP TO CHR19.3; EXPRESSED IN BONE MARROW, SIGNAL = 2.9; EXPRESSED IN FETAL LIVER, SIGNAL = 3.3; EXPRESSED IN ADULT LIVER, SIGNAL = 2.2; EXPRESSED IN HELA, SIGNAL = 2.3; NT HIT: gi12741394, EVALUE 6.00e-39; EST_HUMAN HIT: AL534796.1, EVALUE 1.00e-37; SWISSPROT HIT: Q9US30, EVALUE 6.20e+00
cctgagtaaaagccattcctgactcctttgctctcctcttctgggtttcttcctcatgtgccaggagtctttggaagtcaatg

SEQ ID NO: 22174 - DNA, 101 bp, Homo sapiens
  MAP TO CHR18.3; EXPRESSED IN LUNG, SIGNAL = 1.2; EXPRESSED IN ADULT LIVER, SIGNAL = 1.4; SWISSPROT HIT: P42742, EVALUE 4.70e+00; NT HIT: U21222.1, EVALUE 8.10e-02; EST_HUMAN HIT: AA528732.1, EVALUE 8.00e-03
atggtggatgcagaaggagatcactgcagtagggatgctgtaggtgcagtagaaaaggtggtggatggagcacaggggaaagctcccacccagcccggcag

SEQ ID NO: 22175 - DNA, 199 bp, Homo sapiens
  MAP TO CHR18.3; EXPRESSED IN ADULT LIVER, SIGNAL = 1.1; SWISSPROT HIT: Q9UL36, EVALUE 5.00e-32; NT HIT: AF085244.1, EVALUE 9.00e-96; EST_HUMAN HIT: BF688900.1, EVALUE 1.00e-95
gggagcggccgttccattgcacgctttgtgagaaagccttcaaccagaagagtgcgctgcaggtgcacatgaagaagcacacgggggagcggccctacaagtgtgcctactgcgtcatgggcttcacgcagaagagcaacatgaagctgcacatgaagcgggcgcacagctatgctggtgagaatgctgcacccgggag

SEQ ID NO: 22176 - DNA, 196 bp, Homo sapiens
  MAP TO CHR16.3; EXPRESSED IN ADULT LIVER, SIGNAL = 1.7; EXPRESSED IN LUNG, SIGNAL = 2.1; EXPRESSED IN BONE MARROW, SIGNAL = 1.2; NT HIT: M16844.1, EVALUE 4.40e-02; EST_HUMAN HIT: AU120774.1, EVALUE 1.00e+00
gagccagaacccttgtgccacccagatggaagctttctcccagacgcgtcctccagagtgcagccacacacggggaagctgacacaatgtcttcaaacatttttaattgccctgtcaaactgacaattatagaactaattattgaggagacaataacagatacactgactgaatcaagcgtcaaccgagtttttat

SEQ ID NO: 22177 - DNA, 162 bp, Homo sapiens
  MAP TO CHR18.3; EXPRESSED IN ADULT LIVER, SIGNAL = 1.4; EXPRESSED IN HELA, SIGNAL = 1.8; EXPRESSED IN BONE MARROW, SIGNAL = 2.5; SWISSPROT HIT: P98161, EVALUE 2.30e-01; NT HIT: D14071.1, EVALUE 1.40e-01; EST_HUMAN HIT: BI116114.1, EVALUE 8.20e-01
ctgagacatgggaactccacgttgtcgctctcaggctgcccctcctctctcaccagcactctgtccaggtaccagccgctgccggagcctttgccatcgtgtctgatcctcacccgcctcacattccgcatggtgacagactcgatagtgaactcgtcagcc

SEQ ID NO: 22178 - DNA, 107 bp, Homo sapiens
  MAP TO CHR14.3; EXPRESSED IN ADULT LIVER, SIGNAL = 1.5; EST_HUMAN HIT: BG700011.1, EVALUE 4.00e-08; NT HIT: gi15147253, EVALUE 1.00e-53; SWISSPROT HIT: Q01728, EVALUE 4.00e-07
ctttctgaaaactcatatccaccatgcgggggcccatcatctcaatgaagtaattcttgtttttctcatatgcctcatcatcaattaccttgatgtgaattgttttg

SEQ ID NO: 22179 - DNA, 115 bp, Homo sapiens
  MAP TO CHR18.3; EXPRESSED IN ADULT LIVER, SIGNAL = 1.1; NT HIT: gi4505312, EVALUE 8.00e-58; EST_HUMAN HIT: R57928.1, EVALUE 7.00e-53; SWISSPROT HIT: P52179, EVALUE 6.00e-17
cctctgttataagcagggtacatataccatccttaaagtcatgcttttcatccactgatatctccctctcatctttgtaccacacaatatgagtctccttcttaatatttgccac

SEQ ID NO: 22180 - DNA, 295 bp, Homo sapiens
  MAP TO CHR18.3; EXPRESSED IN FETAL LIVER, SIGNAL = 0.86; EXPRESSED IN ADULT LIVER, SIGNAL = 0.96; SWISSPROT HIT: P43360, EVALUE 1.20e+00; NT HIT: AB040901.1, EVALUE 0.00e+00; EST_HUMAN HIT: BF333470.1, EVALUE 0.00e+00
ctattaggtttatcaaaatgaactgtctttttacttgatagagaagaaggtggcattccttctctttctctcctggggaatgaatttggggaattctctttaggaatagtggaatcagcttcatctgatattgaaagatggatgtctgtgttttttcccttgtctgaactatttacatctggatgctgtccactgtcctcagagtctttgtggggcaactgatccaaaggaggctgaacagagtcacaaactgctgggatggcaaagtgttcatttttgaggaagtccatttcac

SEQ ID NO: 22181 - DNA, 89 bp, Homo sapiens
  MAP TO CHR18.3; EXPRESSED IN FETAL LIVER, SIGNAL = 1.2; EXPRESSED IN ADULT LIVER, SIGNAL = 1.2; NT HIT: X17078.1, EVALUE 1.10e+00
tgacaacatcacaacagccagctgttgagctaagccaggatgtgtatgattttccacttgcaatttttcaccgaaatggctcaaacaac

SEQ ID NO: 22182 - DNA, 87 bp, Homo sapiens
  MAP TO CHR16.3; EXPRESSED IN LUNG, SIGNAL = 1.4; EXPRESSED IN ADULT LIVER, SIGNAL = 1.3; EXPRESSED IN HELA, SIGNAL = 1.6; NT HIT: gi14777375, EVALUE 7.00e-42; EST_HUMAN HIT: BG749152.1, EVALUE 1.00e-41
gaaaaatttctgccgtttctggacatgttccaaaaagagagtgtgcgggtggaggtttgcaaatgcatcatggacgcctttatcaag

SEQ ID NO: 22183 - DNA, 196 bp, Homo sapiens
  MAP TO CHR16.3; EXPRESSED IN ADULT LIVER, SIGNAL = 1.2; EST_HUMAN HIT: BF380594.1, EVALUE 2.00e-05; NT HIT: U18671.1, EVALUE 6.90e-01; SWISSPROT HIT: Q00111, EVALUE 1.10e+00
ataggagctggaagctctgcaaaggaagtctggcagggatgggtgtctgtggatggcccctaatggtccctggtgtcttccactgggttcctgttgtaactcacaagatgacccacaggcttattaagagcccaggtgttggaatcagacagacctgggttcaaattcctgttctatctggaaaatgggaaggcct

SEQ ID NO: 22184 - DNA, 151 bp, Homo sapiens
  MAP TO CHR18.3; EXPRESSED IN FETAL LIVER, SIGNAL = 1.5; EXPRESSED IN ADULT LIVER, SIGNAL = 1.4; EST_HUMAN HIT: BF194901.1, EVALUE 1.00e-55; NT HIT: gi7656917, EVALUE 1.00e-29; SWISSPROT HIT: P98195, EVALUE 7.00e-26
cccaggtataaaggtaaacacattgtatttttgattttttatagaattcctgggatgtttttcttcacacttttcaggacatccaagccatactgtgcgagctttcagctctttctttcttcgacaaatatttatcagccaaccacagcaa

SEQ ID NO: 22185 - DNA, 472 bp, Homo sapiens
  MAP TO CHR19.3; EXPRESSED IN ADULT LIVER, SIGNAL = 9.3; EXPRESSED IN HELA, SIGNAL = 0.96; EXPRESSED IN FETAL LIVER, SIGNAL = 2.8; EXPRESSED IN BONE MARROW, SIGNAL =   1; EST_HUMAN HIT: BI837269.1, EVALUE 0.00e+00; NT HIT: gi14769078, EVALUE 0.00e+00; SWISSPROT HIT: P12107, EVALUE 2.80e-01
cctgcaggctgtgaaggacctcagggtccacccggctctcaggggctaacgggaggtcggtggacccctcggttccctgacaggcggacccgcacgcgctcaggcgccgctccagcgcgctcagctgactgcgggtgcgctccgcgtgttcgcgcagcccctggccgagctgcaggagtccgtgcgccaggacattcatctcgtcccaggacgcaaagcgcggcgacttggactgcacgggtccgccctgagcgctcagtagcacggcggtggcggcgcagagcatcagggctgccccggccgtcggagcaccgctcatcctcttaggtagcctgggagcggggattcggggactctcggggacgttggggttccaggtgcgaggactggagacgcggaggaccgggggtaagacccgcttggttgcagaagccgctggaaagaatcggatcacagtcgtgtgaggatccgc

SEQ ID NO: 22186 - DNA, 167 bp, Homo sapiens
  MAP TO CHR14.3; EXPRESSED IN ADULT LIVER, SIGNAL = 0.93; SWISSPROT HIT: Q92355, EVALUE 1.50e+00; EST_HUMAN HIT: BG034731.1, EVALUE 8.50e-01; NT HIT: AF111170.3, EVALUE 9.00e+00
ttacatccacagttttgtttgctgcaccttttgaaatttcaggccaggtttcctggaaacctgagctggagggaactgtggtagttcaccatagaatagatcaagtgaaggcagtaccgaggccacagctgcacgagggggaaaaactgctggctctccaaaatgac

SEQ ID NO: 22187 - DNA, 132 bp, Homo sapiens
  MAP TO CHR18.3; EXPRESSED IN FETAL LIVER, SIGNAL =  22; EXPRESSED IN ADULT LIVER, SIGNAL = 2.5e+02; SWISSPROT HIT: P02766, EVALUE 2.00e-19; EST_HUMAN HIT: BG566387.1, EVALUE 2.00e-68; NT HIT: AF162690.1, EVALUE 2.00e-68
gggcaccggtgaatccaagtgtcctctgatggtcaaagttctagatgctgtccgaggcagtcctgccatcaatgtggccgtgcatgtgttcagaaaggctgctgatgacacctgggagccatttgcctctgg

SEQ ID NO: 22188 - DNA, 174 bp, Homo sapiens
  MAP TO CHR19.3; EXPRESSED IN HELA, SIGNAL =  29; EXPRESSED IN LUNG, SIGNAL =  16; EXPRESSED IN BONE MARROW, SIGNAL =  26; EXPRESSED IN ADULT LIVER, SIGNAL =  13; SWISSPROT HIT: P54368, EVALUE 4.00e-27; EST_HUMAN HIT: AW963384.1, EVALUE 3.00e-93; NT HIT: D89870.1, EVALUE 2.00e-93
ggatgatcggctgaatgtaacagaggaactaacgtccaacgacaagacgaggattctcaacgtccagtccaggctcacagacgccaaacgcattaactggcgaacagtgctgagtggcggcagcctctacatcgagatcccgggcggcgcgctgcccgaggggagcaaggacag

SEQ ID NO: 22189 - DNA, 256 bp, Homo sapiens
  MAP TO CHR14.3; EXPRESSED IN BONE MARROW, SIGNAL =  33; EXPRESSED IN FETAL LIVER, SIGNAL = 2.6; EXPRESSED IN ADULT LIVER, SIGNAL = 1.1; EST_HUMAN HIT: AA534068.1, EVALUE 0.00e+00; NT HIT: J04990.1, EVALUE 0.00e+00; SWISSPROT HIT: P08311, EVALUE 7.00e-28
tggttatttatactctgtggacgtttattaaggctctggcaacactgtggagctggcctgtgtccccgagaagaagagtcagtcacaggggggtctccatctgatccagcagtttgaagcttctcattgttgtccttatccagggcaggaaacttgagaccctggtgaagacttctggaggaacccctgacgactttccataggagacgatgccgtgggccacattgttacacagcagggggcctccggaatcccc

SEQ ID NO: 22190 - DNA, 141 bp, Homo sapiens
  MAP TO CHR16.3; EXPRESSED IN BONE MARROW, SIGNAL = 2.5; EXPRESSED IN ADULT LIVER, SIGNAL = 2.7; EXPRESSED IN HELA, SIGNAL = 3.4; EXPRESSED IN LUNG, SIGNAL = 4.8; SWISSPROT HIT: Q11158, EVALUE 2.60e+00; EST_HUMAN HIT: AW947987.1, EVALUE 4.50e-02; NT HIT: AF179306.1, EVALUE 1.20e-01
gtgtctaacacatgttctctttctctttgatggccaaggcatggctggccaatgggatgcttctctctccaaaggagcagggagagctggagataccctccttgcaaacagcagcttgaggatccagcgcctggtgcacag

SEQ ID NO: 22191 - DNA, 105 bp, Homo sapiens
  MAP TO CHR18.3; EXPRESSED IN ADULT LIVER, SIGNAL =   1; EST_HUMAN HIT: BF986069.1, EVALUE 5.00e-01; NT HIT: D84126.1, EVALUE 1.30e+00; SWISSPROT HIT: P25823, EVALUE 8.00e+00
ctccatcctcttctagaagctgccacatggctattctaaggggacactgctcaaacttgcagtggagaataatggatgggatggggatttgcaggcgagagccat

SEQ ID NO: 22192 - DNA, 377 bp, Homo sapiens
  MAP TO CHR16.3; EXPRESSED IN LUNG, SIGNAL = 1.2; EXPRESSED IN BONE MARROW, SIGNAL = 0.97; EXPRESSED IN ADULT LIVER, SIGNAL = 1.4; SWISSPROT HIT: P30754, EVALUE 5.30e-02; EST_HUMAN HIT: BI768810.1, EVALUE 0.00e+00; NT HIT: gi13376122, EVALUE 0.00e+00
gcacgggactgaaccagctggtggtggcccgatggctggagacacccactgccccgcagagcccctggccagagaaggcactttatgggaggccctcagggcgctcctgccgcacagtaaagaagacctgaagttggacctcggggagaaagtggagaggagcgtggtgacattgttgcagcgagccactgagctcttctacgagggcaggagggacgagtgtctgcagagcagcgaggtgatcctggactactcctgggagaagctcaacacgggcacatggcaggacgtagacaaagactggcgccgggtctacgccatcggctgcctcctgaaagccctgtgtctgtgccaggcacctgaggatgccaacactg

SEQ ID NO: 22193 - DNA, 471 bp, Homo sapiens
  MAP TO CHR16.3; EXPRESSED IN HELA, SIGNAL =  50; EXPRESSED IN FETAL LIVER, SIGNAL = 1.2e+02; EXPRESSED IN LUNG, SIGNAL =  36; EXPRESSED IN BONE MARROW, SIGNAL =  95; EXPRESSED IN ADULT LIVER, SIGNAL =  53; NT HIT: gi14741509, EVALUE 0.00e+00; SWISSPROT HIT: P30640, EVALUE 1.00e-04; EST_HUMAN HIT: BG997232.1, EVALUE 0.00e+00
caacctccgcctcttgggctcgggtgatgatggttccacctcagcggccctccgcctcttgggttcgggtggtgattccacctcagcggccctccgcctcttgggttcgggtggtgattccatctcagccgctctccacctcttgggtttgggtggtttttctgcctcagcctcctgagtagctaagggaggtgtcttgagattatcatccgctgagggtggagctgagggtggaaggggagtgagcagacactcgggaggtgtcttgagattatcatccgctgagggtggaaggggagtgagcagacactcgggaggtgtcttgaggctcagggagttatcagttatagaatgttgttgagttggaggaggtggctggtggcccatcctgttttttaaagtttcagctgtgaggtagggccagtagggcaatcctgaagaatgacgatgctccgctgccgccattctgac

SEQ ID NO: 22194 - DNA, 326 bp, Homo sapiens
  MAP TO CHR16.3; EXPRESSED IN HELA, SIGNAL = 3.1; EXPRESSED IN LUNG, SIGNAL =   5; EXPRESSED IN BONE MARROW, SIGNAL = 2.8; EXPRESSED IN ADULT LIVER, SIGNAL = 3.7; EST_HUMAN HIT: BF343622.1, EVALUE 4.50e-01; NT HIT: AE001486.1, EVALUE 1.20e+00; SWISSPROT HIT: O02815, EVALUE 9.10e+00
tcacaaggagttggcgccttgtgaagtcatctccgtgagcttcatgaagcaacaccgccaagggcctgagcaaagggcgctctgctccactcgagtgaaagcaaaatgctttcggggttgaatcactgtttttcttgactccctttggagatcggcagagcccacattcggccgtgttcgtggacctgggactggaaacagctgcgctctaattacatgtaaagtgtaccaaaacatcccttttatcacagactggaaatctgttagcatctgcctctcctttgtttcttccacaagatacaagcttgtttctacatttttctcac

SEQ ID NO: 22195 - DNA, 232 bp, Homo sapiens
  MAP TO CHR14.3; EXPRESSED IN PLACENTA, SIGNAL = 1.3; EXPRESSED IN ADULT LIVER, SIGNAL = 1.1; EST_HUMAN HIT: AW629230.1, EVALUE 7.80e-02; NT HIT: D16479.1, EVALUE 2.10e-01; SWISSPROT HIT: Q9QYA2, EVALUE 2.70e-02
ccccagcacagagcaagtgctgctggccccggactgtcccccagcagcagaagtcacagtcagcaaaccgccaaggccttccccggactgcactggcttacagaacacacccagttctggtaagatgggcccgccaaggagccagtgctcctggacaacatccctagggggtggcagggccaggaagatgcctgtaggcatggccagagctctgtccttctcggcttctgcc

SEQ ID NO: 22196 - DNA, 193 bp, Homo sapiens
  MAP TO CHR18.3; EXPRESSED IN ADULT LIVER, SIGNAL = 2.4; EXPRESSED IN HELA, SIGNAL = 4.8; SWISSPROT HIT: Q06136, EVALUE 2.00e-29; EST_HUMAN HIT: T87966.1, EVALUE 1.00e-104; NT HIT: gi4503816, EVALUE 1.00e-104
aggttaatgagcatcaattacctgggcagcgtgtaccccagccgggccgtgatcaccaccatgaaggagcgccgggtgggcaggatcgtgtttgtgtcctcccaggcaggacagttgggattattcggtttcacagcctactctgcatccaagtttgccataaggggattggcagaagctttgcagatggagg

SEQ ID NO: 22197 - DNA, 118 bp, Homo sapiens
  MAP TO CHR14.3; EXPRESSED IN ADULT LIVER, SIGNAL =   1; EST_HUMAN HIT: BE798376.1, EVALUE 9.00e-03
ctgcagaaccggaaacagatggcagcaagcaccacgtgtccttgaagttttctggttttgcttttaaaattggaatttttgcatcttcttctacaatatcaccatcttgttttacaac

SEQ ID NO: 22198 - DNA, 426 bp, Homo sapiens
  MAP TO CHR14.3; EXPRESSED IN HELA, SIGNAL =   2; EXPRESSED IN FETAL LIVER, SIGNAL = 3.4; EXPRESSED IN ADULT LIVER, SIGNAL = 1.8; NT HIT: gi16163994, EVALUE 0.00e+00; EST_HUMAN HIT: BI087915.1, EVALUE 0.00e+00; SWISSPROT HIT: O60412, EVALUE 2.00e-34
tcagaggatccagaactgcagccggtcctcgctttgctctccctgtccctgtccatgtatctggtcacggtgctgaggaacctgctcagcatcctggctgtcagctctgactcccacctccacacccccatgtacttcttcctctccaacctgtgctgggctgacatcggttacacctcggccacggttcccaagatgattgtggacacgcagtcgcatggcagagtcatctctcatgctggctgcctgacacagatgtctttcttggtcctttttgcatgtatagaagacatgctcctgactgtgatggcctatgactgctttgtagccatctgttgccctctgcactacccagtcatcgtgaatcctcacctctgtgtcttcttcgttttggtgtcctttttccttagcctgttggattcccag

SEQ ID NO: 22199 - DNA, 156 bp, Homo sapiens
  MAP TO CHR18.3; EXPRESSED IN ADULT LIVER, SIGNAL = 0.96; EXPRESSED IN FETAL LIVER, SIGNAL = 1.2; EXPRESSED IN BONE MARROW, SIGNAL =   1; SWISSPROT HIT: P27466, EVALUE 2.00e+00; EST_HUMAN HIT: BE536656.1, EVALUE 7.90e-01
tggacttggacagagtcaatgaatttatccacgaatgggtatctgccttcagtccagtgaaaatcaaccaggtacttctgtacagcccgagggggaatatgtccttttctctgcctgaagttgcccatggtcatgtttgtgattatacggggtaaa

SEQ ID NO: 22200 - DNA, 149 bp, Homo sapiens
  MAP TO CHR16.3; EXPRESSED IN FETAL LIVER, SIGNAL = 2.4; EXPRESSED IN ADULT LIVER, SIGNAL = 1.6; SWISSPROT HIT: P08165, EVALUE 6.70e-01; NT HIT: gi14779824, EVALUE 4.00e-45; EST_HUMAN HIT: BE743864.1, EVALUE 5.00e-45
cagcagacggagtggcagcggtacttacggcagagcttggaggtggtggccaaagtgatggagctcctgcccacgcacgccttctccacactggtaatgtgctgtccgggggagtggagagtgtagcgatttctctgtacacagagcat

SEQ ID NO: 22201 - DNA, 209 bp, Homo sapiens
  MAP TO CHR14.3; EXPRESSED IN BONE MARROW, SIGNAL = 1.5; EXPRESSED IN FETAL LIVER, SIGNAL = 1.2; EXPRESSED IN ADULT LIVER, SIGNAL = 1.3; EST_HUMAN HIT: BI712955.1, EVALUE 1.00e-114; SWISSPROT HIT: Q9VU68, EVALUE 4.80e-01
gtgccaaaattgccagcagagctggtcacaatcaacgtatttttgtggcagaattccgaccagattcagatacccagtttgtctcagtgggagtaaaacatgtgaagttctggaccctggcaggaagagctcttcttagcaaaaaagggctactgagcacactggaagatgcccggatgcagaccatgctcgctattgcatttggtgca

SEQ ID NO: 22202 - DNA, 203 bp, Homo sapiens
  MAP TO CHR14.3; EXPRESSED IN BONE MARROW, SIGNAL = 0.99; EXPRESSED IN ADULT LIVER, SIGNAL = 1.3; NT HIT: gi15300468, EVALUE 1.00e-110; EST_HUMAN HIT: BF800489.1, EVALUE 1.00e-108; SWISSPROT HIT: O34685, EVALUE 1.40e+00
attcgattgaatagactattgaccattgatacagatttgttggagcaacaggacattgatctaagccctgacttggcagctacttacggcccaacagaagaagctgcccaaaaggttaaacactattatcgcttttggatcctaccccagctgtggattggcattaactttgacagactcacacttttggccctgtttgatag

SEQ ID NO: 22203 - DNA, 113 bp, Homo sapiens
  MAP TO CHR16.3; EXPRESSED IN HELA, SIGNAL = 1.5; EXPRESSED IN LUNG, SIGNAL = 1.2; EXPRESSED IN BONE MARROW, SIGNAL =   1; EXPRESSED IN ADULT LIVER, SIGNAL = 1.2; SWISSPROT HIT: P55194, EVALUE 8.00e-02; NT HIT: gi15318334, EVALUE 3.00e-57; EST_HUMAN HIT: AU133334.1, EVALUE 4.00e-57
cttgcactgttctactttatttccagcttcatccatctcttcctttagagtatctatttttgatggaagcccctgaaagttggttcctgaggatttgtgagcttggttccacc

SEQ ID NO: 22204 - DNA, 214 bp, Homo sapiens
  MAP TO CHR18.3; EXPRESSED IN ADULT LIVER, SIGNAL = 1.1; SWISSPROT HIT: P10637, EVALUE 1.10e+00; NT HIT: gi14760932, EVALUE 1.00e-117
tacaaatacttggaacagttggcagctgaggagcacgagaaggagctgagaagccggagtgtgagccggggcagagccgacctctccttggacctgacctcgccagcagccccagcctgcctggctcctctgagccatagcccctcatcttcagactctcaagaggctctcacggtgtctgcctcctccccaggaacccctcaccatccccaag

SEQ ID NO: 22205 - DNA, 133 bp, Homo sapiens
  MAP TO CHR18.3; EXPRESSED IN ADULT LIVER, SIGNAL = 0.98; SWISSPROT HIT: P29374, EVALUE 1.20e+00; NT HIT: AL163204.2, EVALUE 4.50e-01; EST_HUMAN HIT: BF377516.1, EVALUE 2.00e-59
aagagcaaagtactcacgctgtggcacttccagtggatgccctgtgacatcacaccatccgatcgggtggatatcagggctgtctgcctccacccagtagtcatacttatggtcccaaccatcaaaatgaacc

SEQ ID NO: 22206 - DNA, 232 bp, Homo sapiens
  MAP TO CHR16.3; EXPRESSED IN HELA, SIGNAL = 3.3; EXPRESSED IN LUNG, SIGNAL = 2.3; EXPRESSED IN ADULT LIVER, SIGNAL = 1.1; EST_HUMAN HIT: AL531351.1, EVALUE 1.00e-127; SWISSPROT HIT: P45920, EVALUE 1.40e+00; NT HIT: AB002348.2, EVALUE 1.00e-128
gccaagcccagcattcggtgcttcattaaacccaccgagacactcgagcggtcccttgagatgaacaagcacaagggcaagaggcgggtgcaaaagagacccaactacaaaaacgttggggaagaagaagatgaggagaaagggcccaccgaggatgcccaagaagacgccgagaaggctaaaggtacagagggtggttcaaaaggcatcaagacgagtggggagagtgaag

SEQ ID NO: 22207 - DNA, 366 bp, Homo sapiens
  MAP TO CHR16.3; EXPRESSED IN ADULT LIVER, SIGNAL = 5.7; EXPRESSED IN HELA, SIGNAL =  15; EXPRESSED IN BONE MARROW, SIGNAL = 5.7; EXPRESSED IN FETAL LIVER, SIGNAL = 5.3; SWISSPROT HIT: P22086, EVALUE 2.90e+00; NT HIT: gi14779831, EVALUE 0.00e+00; EST_HUMAN HIT: BI963002.1, EVALUE 0.00e+00
ctatgcccctgccttccaggacctgccctcattcacccagaatgtgcacaggctggtcaacgacctgcgctactacagactctgcaacgacagcctgccccctggcactgtgaagctctaggcctgctactgcctggggacacggacttctgctgctgccacctgcgccagccctaccttccaccacagatgtctcccagatgggccttggtcacactccttggcttctcccaccgcaagcaacgctgcctgcctctgccgctcctccacatcttgccgctgcccagcagagctggcttctgggtccacctgagcactggacggtgctcccagggcgttggagcaggcggaggggtgtgtggccag

SEQ ID NO: 22208 - DNA, 279 bp, Homo sapiens
  MAP TO CHR14.3; EXPRESSED IN ADULT LIVER, SIGNAL =   1; EXPRESSED IN LUNG, SIGNAL = 1.7; SWISSPROT HIT: P83038, EVALUE 4.10e-02; NT HIT: gi14748823, EVALUE 0.00e+00; EST_HUMAN HIT: AI939915.1, EVALUE 0.00e+00
ctctccccgagctccttgtgctccagctccagattccgatgcagtgtctttaggcagctgtgctggcggatgagggcctcgtactcggccgattgccgctcgtgcagcgtgcccaggtgctcgtggtcctgcagcagggcctcgtaggccgctgtaagttgctcctgctgcctctgcaggctttcgttctccgtctccttggccgtgtggtggttctgcagcagcgtgtactgcgcggtgagcgctgcgctctgggaactcagcgtggagttctccacc

SEQ ID NO: 22209 - DNA, 223 bp, Homo sapiens
  MAP TO CHR18.3; EXPRESSED IN LUNG, SIGNAL = 1.4; EXPRESSED IN ADULT LIVER, SIGNAL = 0.93; NT HIT: S44957.1, EVALUE 2.00e-01; SWISSPROT HIT: P11976, EVALUE 6.30e-01
tcacagccgctcctcagggctgtgcttccaagagtcctgtccttgcactttttctctgtcatatggtacatcttgctgtgagactcccctgttgctttttgcttgtgcaccaacttctaacgtctgcctgaacctttctgcagacagttgcagcacaatcctctctgacaccaaactcaacacgctccaggtcattccatccccttcctgcagaatcctcatc

SEQ ID NO: 22210 - DNA, 81 bp, Homo sapiens
  MAP TO CHR14.3; EXPRESSED IN LUNG, SIGNAL = 1.3; EXPRESSED IN FETAL LIVER, SIGNAL = 1.7; EXPRESSED IN ADULT LIVER, SIGNAL = 2.7; EST_HUMAN HIT: AA283169.1, EVALUE 4.00e-38; NT HIT: gi16162596, EVALUE 2.00e-38
cgtccacatcccgaaggccatagcgtcgagcaaggtcacaggatggcagcaccttaccactcaggctcaggatattgggat

SEQ ID NO: 22211 - DNA, 75 bp, Homo sapiens
  MAP TO CHR14.3; EXPRESSED IN HELA, SIGNAL = 1.1; EXPRESSED IN FETAL LIVER, SIGNAL = 1.9; EXPRESSED IN ADULT LIVER, SIGNAL =   1; EST_HUMAN HIT: T84298.1, EVALUE 1.00e-34; NT HIT: X61585.1, EVALUE 5.00e-30
gaacaacttgatacagagacaagtacaactcaatcagaaactattcagacagcggcttctctgttggcctctcag

SEQ ID NO: 22212 - DNA, 151 bp, Homo sapiens
  MAP TO CHR14.3; EXPRESSED IN HELA, SIGNAL = 5.4; EXPRESSED IN LUNG, SIGNAL = 3.5; EXPRESSED IN FETAL LIVER, SIGNAL = 1.6; EXPRESSED IN BONE MARROW, SIGNAL = 1.8; EXPRESSED IN ADULT LIVER, SIGNAL = 1.7; SWISSPROT HIT: P24328, EVALUE 2.60e+00; EST_HUMAN HIT: BI115874.1, EVALUE 1.00e-79
atggccggagccgagggcgccgctgggcggcagtcggagctggagcccgtggtatcgttggtcgacgtccttgaggaggacgaggagctggagaatgaggcgtgcgctgtcctgggcggcagcgactccgagaagtgctcctactctcagg

SEQ ID NO: 22213 - DNA, 216 bp, Homo sapiens
  MAP TO CHR16.3; EXPRESSED IN BONE MARROW, SIGNAL =   2; EXPRESSED IN ADULT LIVER, SIGNAL = 1.2; EXPRESSED IN HELA, SIGNAL =   2; NT HIT: AE007666.1, EVALUE 7.70e-01; EST_HUMAN HIT: AL542814.1, EVALUE 1.00e-117; SWISSPROT HIT: O75131, EVALUE 8.00e-07
actgccaggaactcctgccaccgccaccggctcccatggcccacatacccagtgggggtgccccagcagcgggggcagcccccatgggcccccagtattgcgtgtgcaaggtggagctgtcagtgagtggccagaacctactggaccgggatgttacctccaagtccgaccccttctgtgtcctctttacagagaacaatggcagatggatcgagg

SEQ ID NO: 22214 - DNA, 115 bp, Homo sapiens
  MAP TO CHR16.3; EXPRESSED IN HELA, SIGNAL =   5; EXPRESSED IN ADULT LIVER, SIGNAL = 1.4; NT HIT: M81598.1, EVALUE 8.00e-58; EST_HUMAN HIT: BI549105.1, EVALUE 1.00e-57; SWISSPROT HIT: P15559, EVALUE 2.00e-18
cccggaagggtcctttgtcatacatggcagcgtaagtgtaagcaaactctcctatgaacactcgctcaaaccagcctttcagaatggcagggactccaaaccactgcagggggaa

SEQ ID NO: 22215 - DNA, 207 bp, Homo sapiens
  MAP TO CHR16.3; EXPRESSED IN ADULT LIVER, SIGNAL = 2.3; EXPRESSED IN FETAL LIVER, SIGNAL = 2.3; EST_HUMAN HIT: BE018266.1, EVALUE 1.00e-112; NT HIT: gi14777228, EVALUE 1.00e-112; SWISSPROT HIT: P13887, EVALUE 4.90e-01
caggtcacgctcccgggatcggcgtcggaggcggtcaagatctacctcccgagagcgacggaaattgtcccggtcccggtcccgagatagacatcggcgccaccgcagccgttcccggagccacagccggggacatcgtcgggcttcccgggaccgaagtgcgaaatacaagtaactactctgactccttcggtagctgcaaccagg

SEQ ID NO: 22216 - DNA, 147 bp, Homo sapiens
  MAP TO CHR19.3; EXPRESSED IN FETAL LIVER, SIGNAL =   8; EXPRESSED IN ADULT LIVER, SIGNAL = 4.4; EST_HUMAN HIT: BF971114.1, EVALUE 3.00e-77; NT HIT: gi13651410, EVALUE 2.00e-77; SWISSPROT HIT: P35550, EVALUE 1.00e-21
ggccaactgcattgactccacagcctcagccgaggccgtgtttgcctccgaagtgaaaaagatgcaacaggagaacatgaagccgcaggagcagttgacccttgagccatatgaaagagaccatgccgtggtcgtgggagtgtacag

SEQ ID NO: 22217 - DNA, 167 bp, Homo sapiens
  MAP TO CHR16.3; EXPRESSED IN HELA, SIGNAL = 0.97; EXPRESSED IN ADULT LIVER, SIGNAL = 1.1; SWISSPROT HIT: P48435, EVALUE 2.00e-02; NT HIT: gi9629189, EVALUE 3.70e-02; EST_HUMAN HIT: BG573845.1, EVALUE 8.50e-01
tggagagagggagccaggcgcggatccttccccaggggcccctgcatgcccagagcaagcatctgcaggcatctccagcagcaaaggacaccgctgttctccccggggagcttcagtgtcatcagagcctgaaggaggaagcaactcggcaccacgtggcccagagc

SEQ ID NO: 22218 - DNA, 251 bp, Homo sapiens
  MAP TO CHR14.3; EXPRESSED IN ADULT LIVER, SIGNAL = 1.2; EXPRESSED IN HELA, SIGNAL = 1.3; EXPRESSED IN LUNG, SIGNAL = 1.3; EST_HUMAN HIT: AW971153.1, EVALUE 3.40e-01; SWISSPROT HIT: P31695, EVALUE 1.10e-02
gggcgttgccaaattcctcagccagctgccaggtactgctaattccactgcctgaacagctggagaatccatctccatgaccaccactccggcgaaggccgccactgcctgacacctgtatcaccgaggccagcagggccgcctgacagcctgcctcactcctctgatcacttctccacaccacaactaaagggacaatctgatccctgtttaagtcctccaaaagctccttgatgtcctttcgataaggt

SEQ ID NO: 22219 - DNA, 501 bp, Homo sapiens
  MAP TO CHR18.3; EXPRESSED IN FETAL LIVER, SIGNAL = 2.9; EXPRESSED IN ADULT LIVER, SIGNAL = 1.9; NT HIT: gi15306952, EVALUE 0.00e+00; EST_HUMAN HIT: BE895075.1, EVALUE 0.00e+00; SWISSPROT HIT: P54784, EVALUE 7.90e+00
cagaagggaaggtagacatcaggttctccctggagacttttcgttttcatttacgctgcggaaactgacgtttttgcctaacaccccatgtaatgtaaacgtataggcttgagtacgtgtccggccgcatgtgtagtgaaccctaaagctttcctaattgtagttagcatcgtccctaagcggaacgattttccgtgaacatgatttgtacttttctacgagccgtacagtatacggagaagctgcacaggtcctcggcaaagcgattgcttttgccatacatcgtgcttaacaaagcgtgcttgaagactgagcccagtttgagatgtgggcttcaatatcaaaagaaaacgctgcgacctagatgtattcttggagtcacccagaaaaccatctggacgcagggaccgagcccccgaaaagcaaaggaggatggcagcaaacaagtgtctgtgcacaggagtcagagagggggaaccgccgtcccaacatcacaaaaag

SEQ ID NO: 22220 - DNA, 174 bp, Homo sapiens
  MAP TO CHR16.3; EXPRESSED IN ADULT LIVER, SIGNAL = 1.6; EXPRESSED IN HELA, SIGNAL = 2.8; EXPRESSED IN BONE MARROW, SIGNAL = 0.83; NT HIT: gi15318030, EVALUE 2.00e-93; EST_HUMAN HIT: BF828492.1, EVALUE 3.00e-93; SWISSPROT HIT: O08581, EVALUE 1.10e+00
gtgggttccagtcctacaagatttcagcaataagggcacactctggggctttgtgccatttgtggatgaacagcaaccaactgaaataccaattccaattacccttcatattggagactacaatatggatggctatccagacgctctggtcatactaaagaacacatctggaag

SEQ ID NO: 22221 - DNA, 263 bp, Homo sapiens
  MAP TO CHR16.3; EXPRESSED IN ADULT LIVER, SIGNAL = 1.1; SWISSPROT HIT: O88621, EVALUE 1.60e+00; NT HIT: gi14778732, EVALUE 0.00e+00; EST_HUMAN HIT: AA181159.1, EVALUE 0.00e+00
cggcagctgttctccccatccgtgtgcagggacgtctcggcccgtcgaagacccaggcgggcaaaggagtggtacaaggtgagtgtcacgtcgctcaggctgtggatgccgtcaggctcatcgtagacattctcccagtaggagcgcaggcccggggtacctgcagggtagttcccgtacaggtaatagtccagctgcccaatgatttcctgattcaccacggcttcaaacttgcgggcaaagaaggtaggccgggctgtctg

SEQ ID NO: 22222 - DNA, 91 bp, Homo sapiens
  MAP TO CHR16.3; EXPRESSED IN HELA, SIGNAL =   5; EXPRESSED IN FETAL LIVER, SIGNAL = 4.3; EXPRESSED IN LUNG, SIGNAL = 4.7; EXPRESSED IN ADULT LIVER, SIGNAL =   3; NT HIT: gi7656923, EVALUE 1.00e-43; EST_HUMAN HIT: BG775027.1, EVALUE 2.00e-43; SWISSPROT HIT: P56945, EVALUE 2.00e-10
cctgctgcaactccagctggctcttgccctgccgcgtgatgctgcccttttccagcagctccttctgggtcttctcaaactcctccttccc

SEQ ID NO: 22223 - DNA, 476 bp, Homo sapiens
  MAP TO CHR14.3; EXPRESSED IN ADULT LIVER, SIGNAL =   2; NT HIT: gi14754147, EVALUE 0.00e+00; SWISSPROT HIT: O60548, EVALUE 4.40e-02; EST_HUMAN HIT: BG938963.1, EVALUE 0.00e+00
ctgctcagaaactcattgattttactctgaagcacccacgaatgacagattcccaggaggggcagagaaggctgagcagcaccacgtggggctggccgcgggttgtgggcatgagcacgcctggagaggccatggggctggtgacaagctctggccagaagaccccaaggtctgatcctggggtctgatccaggcctgcggcactgggtcctaggcagactgtctgcctggtgagacgtggaaggagccagtgtccgcagccgtctcaggacgtcagagagctcggtggcctgtctccagcagcatgctctccagatgcagcctgctgtcgctctccacatagggctggtgcagccacatggacaggtagctcagggtgaggtcgggatccccggtgtgggcaagctccttggccaccgtgcgcttcaggagcagctccttcctgtacatctccaagagcttatgcgaaacctcat

SEQ ID NO: 22224 - DNA, 82 bp, Homo sapiens
  MAP TO CHR19.3; EXPRESSED IN ADULT LIVER, SIGNAL = 1.3; EXPRESSED IN HELA, SIGNAL = 6.9; EXPRESSED IN BONE MARROW, SIGNAL = 1.5; EST_HUMAN HIT: BF855748.1, EVALUE 9.00e-39; SWISSPROT HIT: P57780, EVALUE 2.00e-10; NT HIT: gi14761650, EVALUE 6.00e-39
ctgccggtcgttctccacgtcgtagcccaggctgatgaggcaggccttgaactcctcgggccccagcgccccgccatgatcc

SEQ ID NO: 22225 - DNA, 489 bp, Homo sapiens
  MAP TO CHR19.3; EXPRESSED IN ADULT LIVER, SIGNAL = 1.8; NT HIT: AF135027.1, EVALUE 0.00e+00; SWISSPROT HIT: P20138, EVALUE 3.00e-33; EST_HUMAN HIT: BI518434.1, EVALUE 0.00e+00
cctgtcacattcacagagagccggtgatgtttataattccattttatacttcctttctccatacgaaagaagtatctccccgcatcacttcttctggcatctctgatgctcagggtgcaattcttggtatgtgggtccccaaggaggtggaatcggtcccgagtctcctcccacactgcccgagctgggttgtttgtggccactggagcatcctggtctgtattggccccttcccggaaccagtagccatgaactactgggccagggtaaatccagccatgcgaggggtaggagaaggagcagggcacatggacacacaggccttcctgcaccgtcacggaactctgcatcgtcagcagtttacttgtctgtccttccgccctctccctcccccagagcaggggcagcagcagcagcagcatgtctggggttagaggtgccagggccgcgagggaacgtctgttcctcagggttcttctctcaggaact

SEQ ID NO: 22226 - DNA, 212 bp, Homo sapiens
  MAP TO CHR16.3; EXPRESSED IN ADULT LIVER, SIGNAL = 1.2; NT HIT: gi15318611, EVALUE 1.00e-116; SWISSPROT HIT: P28465, EVALUE 2.10e-01; EST_HUMAN HIT: BE167597.1, EVALUE 1.00e-104
gtgaatgatgaacccacaacagccactgatcccgaagaaccttccgttgttggtgtgacgtccccacctgctgcacccttgagtgtgaccccgaatcccaacacgacttctctccctgccccagccacaccggctgaaggagaggaacccagcacttcgggtacacagcagctcccagcggctgcccaggcccccgacgctctgcctgctgg

SEQ ID NO: 22227 - DNA, 165 bp, Homo sapiens
  MAP TO CHR18.3; EXPRESSED IN BONE MARROW, SIGNAL = 0.82; EXPRESSED IN ADULT LIVER, SIGNAL = 0.91; NT HIT: X58531.1, EVALUE 1.00e-85; SWISSPROT HIT: P25391, EVALUE 4.00e-26; EST_HUMAN HIT: BG035905.1, EVALUE 1.00e-05
ctgtacagaacatctgctagtctctggaactcagcggcatggtcctcagctctgtagaccaggtcgactgcgttcctttgggacatgtgcatgaccaggtcatctatgtggtgcctgattttggcagaccataaaagtagcttatcctggtgatcctctaagtgc

SEQ ID NO: 22228 - DNA, 215 bp, Homo sapiens
  MAP TO CHR16.3; EXPRESSED IN LUNG, SIGNAL = 1.7; EXPRESSED IN ADULT LIVER, SIGNAL = 1.1; NT HIT: gi4557254, EVALUE 3.00e-40; SWISSPROT HIT: P51828, EVALUE 1.00e-09; EST_HUMAN HIT: AL580276.1, EVALUE 5.00e-40
tgggacccacccattccttcaccatcccacctgaggttctgggaccccactggtgtctacgtccacaccctcctctgggagagttggaggtggtcgctgtgctgatgcagttgtgggtatttgattccaaaagcatgtcccccaaggggcggtcggaggatgactcgtacgatgacgagatgctgtcagccattgaggggctcagctccacgagg

SEQ ID NO: 22229 - DNA, 86 bp, Homo sapiens
  MAP TO CHR19.3; EXPRESSED IN BONE MARROW, SIGNAL = 1.4; EXPRESSED IN ADULT LIVER, SIGNAL = 6.2; SWISSPROT HIT: Q9CD58, EVALUE 8.10e+00; EST_HUMAN HIT: T08135.1, EVALUE 4.00e-41
gcgccctgatctggttgtggaagtggcccatcccaaaataatccatgaatctggggcacaaatcctgcgccatgccaatctcctgg

SEQ ID NO: 22230 - DNA, 162 bp, Homo sapiens
  MAP TO CHR18.3; EXPRESSED IN BONE MARROW, SIGNAL = 1.5; EXPRESSED IN ADULT LIVER, SIGNAL = 1.1; EXPRESSED IN HELA, SIGNAL = 1.6; SWISSPROT HIT: P25391, EVALUE 2.00e-31; NT HIT: gi14762393, EVALUE 3.00e-86; EST_HUMAN HIT: AI769870.1, EVALUE 2.00e-60
ggaagcagccaggtcagtgcccatgtaaggaaggttatacaggagaaaaatgtgatcgctgccaacttggctataaggattacccgacctgtgtctcctgtgggtgcaacccagtgggcagtgccagtgatgagccctgcacagggccctgtgtttgtaagg

SEQ ID NO: 22231 - DNA, 184 bp, Homo sapiens
  MAP TO CHR14.3; EXPRESSED IN BONE MARROW, SIGNAL = 1.5; EXPRESSED IN ADULT LIVER, SIGNAL = 2.2; EXPRESSED IN HELA, SIGNAL = 1.1; SWISSPROT HIT: Q62266, EVALUE 2.20e-01; EST_HUMAN HIT: AW393040.1, EVALUE 1.50e-02
atcaaatccttactccttcatcaggacctgaaactaaacctgtaagcagcttcttccagagccttcctcttcttccccagtccacacctgcagacctgcccctcacccgtgccacccgcggtttgtacaggaatcagacaagaaggcaagggcccgaattggaagcagatgtttgggacgatga

SEQ ID NO: 22232 - DNA, 267 bp, Homo sapiens
  MAP TO CHR14.3; EXPRESSED IN ADULT LIVER, SIGNAL = 0.97; EST_HUMAN HIT: BG912213.1, EVALUE 0.00e+00; SWISSPROT HIT: Q13591, EVALUE 5.50e-01
ctacttatcctgctgcttggagctctcacttccgacattgaacatggggaccagcaggcccagcagccacctctttccgaagacctcttgtaagttcttgcgccagggccgggccctcactgccacccccttccgcacctggtggcgggtctgcccgcggaggatcaacagcagctggtggcagcagaagccggcgcaggccaggccgatggcgaaccagaggtagagcatgaggatgacgaacatttcagaacccaggacagctcc

SEQ ID NO: 22233 - DNA, 75 bp, Homo sapiens
  MAP TO CHR19.3; EXPRESSED IN BONE MARROW, SIGNAL = 3.6; EXPRESSED IN ADULT LIVER, SIGNAL = 1.5; SWISSPROT HIT: P08392, EVALUE 4.80e+00; EST_HUMAN HIT: AA516481.1, EVALUE 5.00e-34; NT HIT: AF072845.1, EVALUE 9.00e-35
cctgggagcaaaagcaggaagaggatgtgacccagatggatcatggtggactggggtctggcaggggtctggcag

SEQ ID NO: 22234 - DNA, 239 bp, Homo sapiens
  MAP TO CHR19.3; EXPRESSED IN ADULT LIVER, SIGNAL = 1.5; EST_HUMAN HIT: BG618999.1, EVALUE 4.00e-47; SWISSPROT HIT: P01026, EVALUE 3.90e+00; NT HIT: gi11425973, EVALUE 0.00e+00
cgggtagtgatgacattgttctctccttctgggcagctcttcggaattgtgtccagtcttctgtgtgaatctctgagtgggatcatttaaatgctgcaactcagagatgccctttggcttcatgccagattccaagcccctcccagcaagctttccgtgcagcaggagaaagactcaggtgtcagaaagaaactctgtcacaaccatagatgtttgcaggtctgtgtctgtaatgcagc

SEQ ID NO: 22235 - DNA, 161 bp, Homo sapiens
  MAP TO CHR18.3; EXPRESSED IN ADULT LIVER, SIGNAL = 1.6; EXPRESSED IN HELA, SIGNAL = 1.6; NT HIT: U26425.1, EVALUE 2.20e+00; EST_HUMAN HIT: BG332113.1, EVALUE 8.20e-01; SWISSPROT HIT: Q9X7E5, EVALUE 6.70e-01
tcaaggctcctgctgagacgtcttccccactggctgacggtgcataatcccaggagacccagttgcaaggactgtcccccaggatctggaccacagcgtgcacccgagcttcacattcctggacaccaagagaggcaaacgcaagttcccctaaagccatg

SEQ ID NO: 22236 - DNA, 178 bp, Homo sapiens
  MAP TO CHR19.3; EXPRESSED IN ADULT LIVER, SIGNAL = 1.6; SWISSPROT HIT: P43626, EVALUE 2.00e-29; EST_HUMAN HIT: BE091490.1, EVALUE 6.00e-79; NT HIT: AF001888.1, EVALUE 8.00e-96
gactctgatgaacaagaccctcaggaggtgacatacacacagttgaatcactgcgttttcacacagagaaaaatcactcgcccttctcagaggcccaagacacccccaacagatatcatcgtgtacacggaacttccaaatgctgagtccagatccaaagttgtctcctgcccatgag

SEQ ID NO: 22237 - DNA, 140 bp, Homo sapiens
  MAP TO CHR18.3; EXPRESSED IN BONE MARROW, SIGNAL = 1.7; EXPRESSED IN ADULT LIVER, SIGNAL = 1.6; SWISSPROT HIT: P20129, EVALUE 8.90e-01; EST_HUMAN HIT: BG565423.1, EVALUE 7.00e-01; NT HIT: gi15300835, EVALUE 1.90e+00
acgtggggaggcggagcagggagcgggagccatttgcaggggcagtttcaaagaatctaactcaccaaagcttaaatctgagtttgaaaaacgagagaattcgctagataagtttaactttcctaccgccaagcaaaatc

SEQ ID NO: 22238 - DNA, 354 bp, Homo sapiens
  MAP TO CHR19.3; EXPRESSED IN ADULT LIVER, SIGNAL = 1.8; NT HIT: AF207901.1, EVALUE 1.30e+00; SWISSPROT HIT: Q9QZS3, EVALUE 3.60e-02
ccgctctctcctgcgtggtcgctcttggattcggtgcaggaatcactggggcttcttgggcgccgggaacctttcatggtgaaaatttccagggttctccaagtcagccactgccagtgtttgtctgtctcctgcaaagatttcttcttggctcccgaatcctttagttcctttgagagagtggtgtcagccccaaagctgctcccgaaggcttgggttgtgtagcgacggggctgtggccagcggcaggtggatgaggctctgacaactgagctcttgggggaatcttgtacactgtcagcagggggtggagccaggggatttgtcagcaggaactgatgtgattggctgttc

SEQ ID NO: 22239 - DNA, 119 bp, Homo sapiens
  MAP TO CHR16.3; EXPRESSED IN BONE MARROW, SIGNAL = 1.4; EXPRESSED IN ADULT LIVER, SIGNAL = 1.2; NT HIT: gi14775539, EVALUE 8.00e-61; EST_HUMAN HIT: R56588.1, EVALUE 1.00e-60; SWISSPROT HIT: O02686, EVALUE 7.90e+00
acagaaccacatcaaacccagccacagcgcggcacagacctggtgtggaagccccactcccgcctctgcccccaaccacaagctcatggctatggaacaaggcaagacccttccatctg

SEQ ID NO: 22240 - DNA, 116 bp, Homo sapiens
  MAP TO CHR18.3; EXPRESSED IN ADULT LIVER, SIGNAL =   1; NT HIT: gi14724981, EVALUE 3.80e-01; EST_HUMAN HIT: BF374131.1, EVALUE 5.60e-01
tttttattcatctcatcttgttcacctttaggagggatataggaagtagtcaagtagccttcagctgcaagattcgtttttggtgactcaccaagtgactcttttgccaaagacat

SEQ ID NO: 22241 - DNA, 114 bp, Homo sapiens
  MAP TO CHR16.3; EXPRESSED IN ADULT LIVER, SIGNAL = 0.94; EXPRESSED IN BONE MARROW, SIGNAL =   1; NT HIT: gi5031918, EVALUE 8.00e-58; SWISSPROT HIT: Q99547, EVALUE 1.00e-04; EST_HUMAN HIT: BF028859.1, EVALUE 1.00e-57
ctctttctctttaagctctggcaaatccaagtaccagtgctcttcactaatgattttcttttcttcttcttctagttgtttcttggtttctgagtccagtcccctttgcataaa

SEQ ID NO: 22242 - DNA, 284 bp, Homo sapiens
  MAP TO CHR16.3; EXPRESSED IN ADULT LIVER, SIGNAL = 1.1; SWISSPROT HIT: O14197, EVALUE 2.10e-01; NT HIT: gi14779172, EVALUE 0.00e+00; EST_HUMAN HIT: BF975008.1, EVALUE 0.00e+00
ttccctctgctccgcctcgagcaccagttcccactcaccagcactgacattcctggacacgacgggcaaggggtcggtctcctgttcaggtttgatgaggatggagatggcagaggaggctgtgatctccctgaacacgctgctcactccttgcgtggactccttcagcaaggtcacattctgcgttgactcctttaagaggtctgaaacggtgggagcaaacttactctgcccgttcaaatccttgttgtcaatgttaatcgcaaagagtatggagttcggac

SEQ ID NO: 22243 - DNA, 235 bp, Homo sapiens
  MAP TO CHR16.3; EXPRESSED IN BONE MARROW, SIGNAL = 1.6; EXPRESSED IN ADULT LIVER, SIGNAL = 1.6; NT HIT: gi16165100, EVALUE 1.00e-129; EST_HUMAN HIT: BI861779.1, EVALUE 1.00e-102; SWISSPROT HIT: P29048, EVALUE 3.60e+00
ctcaacaaaggattctcaatgagtttcagcttttgtttcaactgttccatctccgaatacaattttaacccttccaccatggagatattttcctgctcggaatcagagttacaatttgacaaactgcttctcagatttaaaaatttcctgtaactctcctcacattgagacaacagattgtggtagtcaacaataagtcctgatggaactcggtcttcaagaatgtcataatgcc

SEQ ID NO: 22244 - DNA, 92 bp, Homo sapiens
  MAP TO CHR18.3; EXPRESSED IN ADULT LIVER, SIGNAL = 0.99; EST_HUMAN HIT: BF980351.1, EVALUE 4.20e-01; NT HIT: AJ271723.1, EVALUE 5.00e-03
ctaacccatgctcttctcaccatagctcaacacatgtgtggctgcaggggcagctgcggtgtttgctgaacttctcttgtctgtccatgacc

SEQ ID NO: 22245 - DNA, 169 bp, Homo sapiens
  MAP TO CHR18.3; EXPRESSED IN ADULT LIVER, SIGNAL = 1.3; EST_HUMAN HIT: BG330769.1, EVALUE 8.60e-01; SWISSPROT HIT: P19225, EVALUE 3.30e+00; NT HIT: gi13384869, EVALUE 9.00e-03
gaagcggaaaacaccgaagatgtcacatttgtttccaggcatatccattttaaaagaaaactcctagcccatgagagcattttaagtaagaagcttcaacatattttgggcagaatgaaggcagctaatgaagcagtcattgacacagcagaggttgaagccccttaaa

SEQ ID NO: 22246 - DNA, 238 bp, Homo sapiens
  MAP TO CHR16.3; EXPRESSED IN ADULT LIVER, SIGNAL = 2.1; EST_HUMAN HIT: AW009480.1, EVALUE 0.00e+00; NT HIT: gi4758811, EVALUE 0.00e+00; SWISSPROT HIT: P24001, EVALUE 5.00e-43
ggtcctctctgatgacatgaagaagctgaaggcccgaatggtaatgctcctccctacttctgctcaggggttgggggcctgggtctcagcgtgtgacactgaggacactgtgggacacctgggaccctggagggacaaggatccggccctttggtgccaactctgcctctcttcacagcaccaggccatagaaagattttatgataaaatgcaaaatgcagaatcaggacgtggacag

SEQ ID NO: 22247 - DNA, 174 bp, Homo sapiens
  MAP TO CHR16.3; EXPRESSED IN ADULT LIVER, SIGNAL =   1; NT HIT: AE006447.1, EVALUE 6.10e-01; EST_HUMAN HIT: BF446698.1, EVALUE 3.50e+00; SWISSPROT HIT: P53855, EVALUE 8.60e-01
cagatgaatatgcaatgcagggtctgtacatccagcaacttgttgaagtagtaggtgcctatctttggaagtgacagtcgttgccttctggtcactgtactgttctccaaaaagactgtcagaaggaaagatttgctgaactgatgaatactggcttccaaaaagaatcccatc

SEQ ID NO: 22248 - DNA, 167 bp, Homo sapiens
  MAP TO CHR18.3; EXPRESSED IN ADULT LIVER, SIGNAL = 1.6; NT HIT: AF216854.1, EVALUE 2.00e-84; EST_HUMAN HIT: AL603394.1, EVALUE 2.00e-84; SWISSPROT HIT: Q9UIV8, EVALUE 8.00e-21
  unsure 27
cctcctccaactgggaagcggtggctncctcgggtccccaggaggaccatgccaattgcagtcaagatgcccacaggggaaaagaagatgttgccatcatttgttttcttcagctctttgaaaagatcaaacccaagtcgagtgctgacggcgccaagtgaatccat

SEQ ID NO: 22249 - DNA, 151 bp, Homo sapiens
  MAP TO CHR18.3; EXPRESSED IN ADULT LIVER, SIGNAL = 1.3; SWISSPROT HIT: P07947, EVALUE 4.00e-24; EST_HUMAN HIT: BG573220.1, EVALUE 1.00e-79; NT HIT: gi4885660, EVALUE 3.00e-79
gtgcttattccctttctattcgtgattgggatgagataaggggtgacaatgtgaaacactacaaaattaggaaacttgacaatggtggatactatatcacaaccagagcacaatttgatactctgcagaaattggtgaaacactacacagg

SEQ ID NO: 22250 - DNA, 103 bp, Homo sapiens
  MAP TO CHR18.3; EXPRESSED IN ADULT LIVER, SIGNAL = 1.6; EST_HUMAN HIT: BF315424.1, EVALUE 4.80e-01
cgggaacgccgcgaacacacgtattctccagggtcctcacttggtgctggatttcaccaacagcagcaccacaggggaggtcagaggaccgtcagtcaacagg

SEQ ID NO: 22251 - DNA, 598 bp, Homo sapiens
  MAP TO AF146191.1; EXPRESSED IN BRAIN, SIGNAL = 8.8; EXPRESSED IN HELA, SIGNAL =  11; EXPRESSED IN BONE MARROW, SIGNAL = 5.2; SWISSPROT HIT: Q99867, EVALUE 1.00e-110; NT HIT: gi9910593, EVALUE 0.00e+00; EST_HUMAN HIT: BF690030.1, EVALUE 0.00e+00; SWISSPROT HIT: P11833, EVALUE 1.00e-101; NT HIT: gi14725984, EVALUE 0.00e+00
atattcagacaccaagtcgttcatgttgctctcggcctcagtgaattccatctcatccatgccctcgcccgtgtaccagtggaggaaggccttgcgcctgaacgttgctgtaaactgctctgagacccgcttgagttcctggacggctgtgttgttcccagtgaaggtgactgacatttttagcccccagggtgggatgtcacagacggctgtttttacgttgttggggaaccagtcagcaaagtagctgctgttcttatcttgaatgttgaacatctgttcatccacctccctcatgggcatgcgaccctggaaaatggcagccgccgttaggtagcggccgtgacgggggtcacgggcagccatcatgttcttagcatcaaacatctgctgggtgagctcagccacagtcaaggcccggtactgctggctgccccggctggtcagtggggcaaagccgggcatgaagaaatgcagccggggaaacgggaccatgttcatggccagcttccgcaggtcagcattcagctggtcggggaagcacaggcacgtggtgaccccactcatggtagcagacaccaggtggttcaggtcacca

SEQ ID NO: 22252 - DNA, 522 bp, Homo sapiens
  MAP TO AL049749.1; EXPRESSED IN BRAIN, SIGNAL = 2.2; EXPRESSED IN HELA, SIGNAL = 1.1; EXPRESSED IN LUNG, SIGNAL = 1.5; EXPRESSED IN BONE MARROW, SIGNAL = 2.8; EXPRESSED IN FETAL LIVER, SIGNAL = 1.4; EXPRESSED IN HEART, SIGNAL = 2.1; EST_HUMAN HIT: AA776664.1, EVALUE 4.90e-01
aatgatggtggtgttagtggtggtgatggtggtagtaattatagccatgatgcaggtggtggtgatcatgaaggtggtgctgatggtggtggtagtaattgtaaccatgatgcaggtggcagtgatcatgaaggtggtgatgattgatggtggtaataatgactgtgataaagatggtggtgatgaaagtggtgatggtgatggtggtgatggtggtggtggtgatgatggtgatgatggtggtagtgatggtggcagtgatggtggtggtaatggtgatgatggtgatgatggtggtagtgatgatggtgatggcggtggtaattatagccatgatgcaggtggcagtgatcatgaaggtggtggtgatggtggtgatggtggtggtgttgatgatggtgatggtggtggtgatgatggtggtggtagtggtggtgacagtgatggtggtggtagtgatggtggtggtaatggtggtgacggtgatggtggtggtagtgatggtggtgatggtggtggtaa

SEQ ID NO: 22253 - DNA, 991 bp, Homo sapiens
  MAP TO AC007498.2; EXPRESSED IN BRAIN, SIGNAL = 1.2; EXPRESSED IN HELA, SIGNAL = 1.8; EXPRESSED IN BONE MARROW, SIGNAL = 0.83; NT HIT: gi15316964, EVALUE 0.00e+00; SWISSPROT HIT: P39806, EVALUE 5.00e-43; EST_HUMAN HIT: AU131453.1, EVALUE 0.00e+00; NT HIT: gi11430834, EVALUE 0.00e+00
gtcctgagctccccagcggcagactgcggccccgcgggcagtgccaccaccttcaccaaccctttgttgccgctcatgtccgagcagttcaaggccaagtttccttttgggggactcctggactcagctcaggcatcagagacgtccaagcttcagcaactggtagaaaacattgacaagaaggccactgaccccaatgagtgcatcatctgccaccgggttctcagctgccagagcgccttgaaaatgcactacaggacacacactggggagaggccctttaagtgtaagatctgtggccgggctttcaccacgaaagggaatcttaaaacccactacagtgtccatcgtgctatgcccccgctcagagtccagcattcctgccccatctgccagaagaagttcacgaacgctgtggtcctgcagcagcacatccgaatgcatatgggaggccagatccccaacaccccagtccccgacagctactctgagtccatggagtctgacacaggttcctttgatgagaaaaattttgatgacctagacaacttctctgatgaaaacatggaagactgtcctgagggcagcatccctgatacacctaagtctgcagacgcctcccaagacagcttatcctcttcgcctttgcccctcgagatgtcgagcatcgctgctttggaaaatcagatgaagatgatcaatgctggcctggcagagcagctacaggccagcctgaagtcagtggagaatgggtccatcgagggggatgtcctgaccaatgattcatcctcagtgggtggtgacatggaaagccaaagtgctggcagcccagccatctcagagtctacctcttccatgcaggctctgtccccgtccaacagcacgcaggagttccacaagtcacccagcattgaggagaaaccacagagagcggtcccaagcgagtttgccaatggtttgtctcccaccccagtgaatggtggggctttgg

SEQ ID NO: 22254 - DNA, 494 bp, Homo sapiens
  MAP TO AC004624.6; EXPRESSED IN HELA, SIGNAL = 0.69; EXPRESSED IN BRAIN, SIGNAL = 0.89; EXPRESSED IN BONE MARROW, SIGNAL = 0.91; EST_HUMAN HIT: BI603218.1, EVALUE 1.70e-01; NT HIT: AE004672.1, EVALUE 4.90e+00; EST_HUMAN HIT: D53316.1, EVALUE 4.60e-01; SWISSPROT HIT: P35916, EVALUE 6.10e-01
tcatgtcacctcgggggcactgagctgacgtgagatcagggaagtcttccagagaaagcaacattcccaacaaataaagagaaagtagcaaggctttccaacagcctgagtgggggtgggcactagaagcttccagacacaggcaaggcttacaaggcagaagagcctggcacactcagggacctgcagctcagtgtgactaaggtggcatatgggggactgagcttgaaggagcagaacaccgggggccttgaatgccgtggataggaggttgaacttgatcctgaggccgtgggcagccatggtggggtgcttatggagggagatcctttgacagtcaccactgttgtccagagcaaggtgctgaagacctgcgtgtggctctcggtcctcctgggtcactcccagtcctttgaagatgcactggcagccttgggcagtcacacagcatgcgatgctctctggactctgcgacttcacagatgtgcagaggc

SEQ ID NO: 22255 - DNA, 556 bp, Homo sapiens
  MAP TO AP000353.1; EXPRESSED IN HELA, SIGNAL = 1.1; EXPRESSED IN BONE MARROW, SIGNAL = 0.84; NT HIT: gi8922131, EVALUE 8.90e-02; SWISSPROT HIT: P03291, EVALUE 9.20e-02; EST_HUMAN HIT: AW965224.1, EVALUE 1.30e-01; SWISSPROT HIT: P15276, EVALUE 6.30e-02
cagcccatggtaggctctgggcctgggggaggggagatgctcttatggcttttctttgccaacaccactgggggcagcgatgcaggggagggagaagggcaatggctccaggagaaggagtgatggtggagaggcaaggacactgagggagagcagtggggtgggctgcaggggagcagggagggaaggtcagactaatagcaggtggctgaggggaacatagggagtgaatgctcagattctttcctcaacgagaatagtgatggtgggcaacctggccacacacctgatgtctgcagataggcttcgacttagcatgcggagaactgggggccttggttgttgctgactcggccctgccccagcaggccccagctatctccaggctgctactacagtagggagagggctcagccatcgcataccacctcagagctggtgctgctggctgcttctctggcctcctccaggcaggctgtgcagggcgtgccgtgctcctgagtgcctaaggagccacagaccacaggaccccttgcctttatcccttgctccccag

SEQ ID NO: 22256 - DNA, 569 bp, Homo sapiens
  MAP TO AL022312.7; EXPRESSED IN HELA, SIGNAL = 1.3; EXPRESSED IN BONE MARROW, SIGNAL = 0.99; NT HIT: AJ400879.1, EVALUE 4.00e-05; NT HIT: AF224669.1, EVALUE 2.00e-12; EST_HUMAN HIT: AI809994.1, EVALUE 1.00e-69; SWISSPROT HIT: P39188, EVALUE 1.50e-01
ccgtctctcaggcttggcgccctgggatgctcccttgctccagctctgtgactgtccccatgagggtcctccctcagtgcagccccatctctccagcggtgctggcacgatggacccggttgactccctgcctcctgccctctccgttcagtctaaactgcacagtctaacgtaggaaccactagagcatgcagctattaaaattcaaattaaattaagctgggtatggtggtgtgagacttgtcccaactactcacgaggctgagatgggaggattgcttgagtccaggaattcacatacagcctgggtaacataggtctcgtctctaaaaaacaaaaacaaaaacattatggaatgagcctctggggatgaggagctgatgtcctgaatggaccagtgaccagtgcaggaggggtggagtcctagcaggggtagatcccagctttgggaaccaactttcccaggcacttgccggccactccgtgggaaagtcctcaggcagcctgcagggagctgggatcagctgatggggatgggtttggaggggagagagtggtgcacagggact

SEQ ID NO: 22257 - DNA, 567 bp, Homo sapiens
  MAP TO AP000345.1; EXPRESSED IN HELA, SIGNAL = 1.5; EXPRESSED IN BONE MARROW, SIGNAL = 0.84; EST_HUMAN HIT: BG433460.1, EVALUE 0.00e+00; NT HIT: Y18890.1, EVALUE 4.00e-50; SWISSPROT HIT: P10264, EVALUE 9.00e-63; EST_HUMAN HIT: M77994.1, EVALUE 4.00e-91
atggcgtctaattcaccagcaacacaggacgcggcgctgtatcctcagccgcccactgtgagacttaatcctacagcatcacgtagtggacagggtggtgcactgcatgcagtcattgatgaagccagaaaacagggcgatcttgaggcatggcggttcctggtaattttacaactggtacaggccggggaagagactcaagtaggagcgcctgcccgagctgagactagatgtgaacctttcaccatgaaaatgttaaaagatataaaggaaggagttaaacaatatggatccaactccccttatataagaacattattagattccattgctcatggaaatagacttactccttatgactgggaaattttggccaaatcttccctttcatcctctcagtatctacagtttaaaacctggtggattgatggagtacaagaacaggtacgaaaaaatcaggctactaagcccactgttaatatagacgcagaccaattgttaggaacaggtccaaattggagcaccattaaccaacaatcagtgatgcagaatgaggctattgaacaa

SEQ ID NO: 22258 - DNA, 565 bp, Homo sapiens
  MAP TO AL022319.2; EXPRESSED IN HELA, SIGNAL = 1.4; EXPRESSED IN BRAIN, SIGNAL = 0.9; EXPRESSED IN BONE MARROW, SIGNAL =   1; EXPRESSED IN FETAL LIVER, SIGNAL =   1; EXPRESSED IN LUNG, SIGNAL = 1.1; NT HIT: AF183644.1, EVALUE 1.40e+00; EST_HUMAN HIT: BF026669.1, EVALUE 2.10e+00; SWISSPROT HIT: P50505, EVALUE 5.60e-01
tggtgagggaaataacaggcaaggacaacccagcagaatcggcaccagatctgaggcaggcacagggtgtcttcagagcccagaggaggagaacaatagcccctgccttccaaatgccagtgaaggctttctgggaaaagtgacatcttagctaaatcccaagaatgagcaagattcagacaaatgaataggaatggaggacggaggcaaggggagggttttccctgctgagaagtatgcaaagcatgagagaatatggtgtttgggggaagcagttcagtgtaccaagctggaacatcagaggctgggggaagaaaggaggttaaaggtgaggctgcaggggtgagcacaggccaatgtgggaaggagcttacctgccacactaagttgttagaactttatcctaagggagcttctcagaattgtgactgatcagagcttcattttaggaatgtcctaagtctctaattctgttttgacccctgattgcttccctaacttgctcacctccagtcctttctttacaatgcattcacagtcatcttcctacagcaaggatctggct

SEQ ID NO: 22259 - DNA, 576 bp, Homo sapiens
  MAP TO AL079300.11; EXPRESSED IN BRAIN, SIGNAL = 0.82; EXPRESSED IN HELA, SIGNAL = 1.1; EXPRESSED IN LUNG, SIGNAL = 0.95; EXPRESSED IN BONE MARROW, SIGNAL =   1; EXPRESSED IN FETAL LIVER, SIGNAL = 1.1; NT HIT: AJ006345.1, EVALUE 2.00e-21; EST_HUMAN HIT: AW852946.1, EVALUE 3.00e-21; NT HIT: gi14766820, EVALUE 2.00e-22; EST_HUMAN HIT: BF832016.1, EVALUE 6.00e-17
atccactgtgcttcagggactgcaatagtttgaatgtttgtctcctcaaatttcatgttgagtttgatccccaaaactggaggtggggcccaatgggaagtgttagggtcaaagagacagattccccatgaatggctttgcgctgtcctcatggtaatgactgagttctcactcattacttcctgcaagcgctggttgttaaaaagagcctagcatctcccctgcctctctctctttcttcctctctcactgtgggatccctgcacatacactcacctttgtcttccatcatgagtggaagcagcttgaggccctcaccagatgcagatactgtttcttgtacagcctgcagaaccatgagtcaaaaaatcctcttttctttataattacgcagcctcaggaattcctttatagcaacactaaatggactaagacatggacaaagctgagatttaagggtggaaggagcaggttaaaagtattaatttgttgcatatcaacacttgtgagtaagatagctcttctctttgcctcttcacctttttaaaataagtgaccatgataaaagaaaaggtt

SEQ ID NO: 22260 - DNA, 572 bp, Homo sapiens
  MAP TO AC007262.4; EXPRESSED IN HELA, SIGNAL = 1.4; EXPRESSED IN BRAIN, SIGNAL = 1.1; EXPRESSED IN FETAL LIVER, SIGNAL = 1.1; EXPRESSED IN BONE MARROW, SIGNAL =   1; NT HIT: gi14769619, EVALUE 2.00e-10; NT HIT: gi11419715, EVALUE 4.00e-07; EST_HUMAN HIT: BI458804.1, EVALUE 4.00e-15; SWISSPROT HIT: O08796, EVALUE 3.80e+00; EST_HUMAN HIT: AW504542.1, EVALUE 4.00e-05
ggctctttcatggtgaattgttacctttttattttataatttaggattataaactcatttatcattgagaaaatggctcaaggggagttccacaattgtttccaacagcaacatcagggatttcactgctcagggatatattttatgatactatctcagcttgggaggtgtctcagccatccagtagtttaaatgccaaccaaaacacacaagtttatgggcaagggcatggttccagattctcaagaaggtttttttaaaaatagaatattgagtttgatgcagtggcgtcaggagcaggacgactctttgccattcagatcatggggaaagcagtgggaatccaagtgaggagcagccagaggacaacagaggagaggatgggaggctgatgacctgggccctgggcgtgtggaggctgtgactcttctctagctagaggactcttcttttgtgggaaggatagcatcttctgaggacccttgctatgtgagcaggctgacataggtggtgatgaggtctgttcctttctaggttcctgtagagatctgtaggtagctgttcactaggga

SEQ ID NO: 22261 - DNA, 588 bp, Homo sapiens
  MAP TO AC008166.1; EXPRESSED IN LUNG, SIGNAL = 1.2; EXPRESSED IN FETAL LIVER, SIGNAL = 1.3; EXPRESSED IN BONE MARROW, SIGNAL = 1.2; EXPRESSED IN BRAIN, SIGNAL = 1.1; EXPRESSED IN HELA, SIGNAL = 1.7; NT HIT: AE007835.1, EVALUE 1.40e-01; NT HIT: AL163303.2, EVALUE 1.50e+00; EST_HUMAN HIT: AW877112.1, EVALUE 5.60e-01; SWISSPROT HIT: P47285, EVALUE 2.60e-01
cacctggatctgccctggaagttatatatgatatatatgatatgtgtccttattcttcatttaccggaaattaggttgctccctgctgagggtctccctgtttctgtgcatcaggcatctgaggtcatatatgtccatagactgaaggcttcagcccttaaagcttctgcaaatcataatgtctgctaggaatgatcacttcccaggtggagactggcattcttcatcagggaataggacctaaccatggcacattaagggctagatatcacaaagatattctggtactttaatagttccattcccaaaaagtacccctggcccatgccttctgaagactgctcaactggagcaggattgggttggtaagttattacttcatcataaacaaagagctgaagtggtgaatttgtaagacacctttgaaattaaaaacagaacttgaggcatgccagtgatgcacaatatactattaatgtgttttccagatagtatgaatattgcttgaaaataatatgggtagaaagatttacatgtacatttaggattgaagaatggtaagattgtgaaaatggagaaaggtaagga

SEQ ID NO: 22262 - DNA, 546 bp, Homo sapiens
  MAP TO AL049758.11; EXPRESSED IN LUNG, SIGNAL = 1.3; EXPRESSED IN BONE MARROW, SIGNAL = 1.2; EXPRESSED IN FETAL LIVER, SIGNAL = 1.4; EXPRESSED IN BRAIN, SIGNAL = 1.2; NT HIT: AY044317.1, EVALUE 5.20e-01; EST_HUMAN HIT: AW008826.1, EVALUE 2.00e+00; NT HIT: AF112867.1, EVALUE 1.40e+00; SWISSPROT HIT: P04390, EVALUE 8.00e+00
cattgtgttcagcccttgagatctgggggatgtttataaccttagtataacttggcctatccagacaacacagggcatctttaaatgttatctaccacaggttacacatttcactgtctttaggtctcattccgcctggttaggcaatcacaaataacactgctgggcctagagaactgactccatacaaggagcttcttgttggcaatcccttccgtgttaagcacattcaatgaaaatgatgtaaatgatgctcattaacctcctcctggagttggatacaaagctatggatcatgatcactggaccattctggggatagtctttcagcctggagcctgcagtaaacttgatctgatttgcaagcatcccaggagagcctggccttcagatcagtttacactttaattagccaattgtcactgagcagggcattgctcagagagcagcactcagtgttggcttttggtcctgtgtgattagagaaaaatctttgaccaagagcagcaaggtctgcctggaacaggagagactgacaggcgaggt

SEQ ID NO: 22263 - DNA, 563 bp, Homo sapiens
  MAP TO AC006427.13; EXPRESSED IN HEART, SIGNAL = 1.7; EXPRESSED IN BONE MARROW, SIGNAL = 1.7; EXPRESSED IN FETAL LIVER, SIGNAL = 1.4; EXPRESSED IN HELA, SIGNAL = 1.3; EXPRESSED IN BRAIN, SIGNAL = 1.3; NT HIT: gi7019336, EVALUE 1.40e-01; NT HIT: gi11431759, EVALUE 9.00e-02; EST_HUMAN HIT: H07020.1, EVALUE 5.30e-01; SWISSPROT HIT: O42105, EVALUE 2.10e+00; EST_HUMAN HIT: BI223529.1, EVALUE 2.00e-01
tcaccattttaatgccatttcaaggataccttacatttccgttcagatctgccgttttatccagctggatttcttttcaattcaacccaattttaaccccaatgctcaagttattttttcccattatgcccacgaatagaagcaaatcataccatcttgcataaatgcagctgttttctctcctcttttctcattttagatgaaaatcttctttcttctttttttattaacaacagcaccccctccttgctccctgctgagggcctcaccattggctgtgtttgttcctcatctcctgtgctctttcctgtttcttcagggagtccctgcagagatgttttcttatgtaatcaaattataggtcaaattcatcaaaagaatagcacacaggtacattccttacgaacattaatgaatgcagtaagtaacacattctttttttaagtggaggaattggtaaataaagatgctctttggtaaagaaaaatgaagcaaggaacatagctttaaaatatgccaaatttccttgttaaactgtaaagttgtgcaaatgtttattgcca

SEQ ID NO: 22264 - DNA, 602 bp, Homo sapiens
  MAP TO AL031587.3; EXPRESSED IN BONE MARROW, SIGNAL = 0.98; EXPRESSED IN HELA, SIGNAL = 0.97; SWISSPROT HIT: Q9Z0Y8, EVALUE 3.10e+00; NT HIT: AL163209.2, EVALUE 5.80e-01; EST_HUMAN HIT: BF798784.1, EVALUE 1.00e-112; NT HIT: gi6978754, EVALUE 2.40e-02; EST_HUMAN HIT: AI817088.1, EVALUE 6.00e-04
accctggcctctgcccgtggaactgagaagtcaccatctctgtacccccagaggcctctccagctcccggagggtccacagctgtcagctgggctgtcttagccagtgcccctcaggtcacagatgggaaaatagacttagtgtggggaggtgcctctgcccctgccctcagccccttacccctcaccccagcactctcgcggcccacctcctgcctcctttgtccaggaggtggtgctgctgcccttgcctctgcaggtcctcccttcgtggtggctgcgcaggcgaggggggaggcgtgtacatgcacatttacacacgcatgcacacatgcgcacacactttccctccctggggtggccagcgaaacactcagtccccctcctaccgtcgccagtccgagtttaaaaatagcagcagctctgcagtgtgcctgtggggtagatataaatacttctagaaattgtaggctcagctgggcacactgggctttattggctaaggaagtgggggtggggactgagcttgttccaaatggtgtacaaaagtggcggctgctattttcagcctcctggtgccgtgcctataaatccctgttactg

SEQ ID NO: 22265 - DNA, 457 bp, Homo sapiens
  MAP TO AC007719.1; EXPRESSED IN HELA, SIGNAL = 0.44; EXPRESSED IN BONE MARROW, SIGNAL = 0.76; NT HIT: gi14861873, EVALUE 6.70e+00; EST_HUMAN HIT: BE968056.1, EVALUE 4.30e-01; NT HIT: AF102058.1, EVALUE 1.10e+00; SWISSPROT HIT: P15604, EVALUE 4.70e+00
cttaaatagatcattgtagtttatcaccagattgaaggaaatggcagagagctggaaataagagtcataacaattgtttaactgagaaatgattacccatatgtggctacagggcttgtgagaaattgaaaaggctaaattgctaccagtgcctccattcagctcctaatcctttctcagcatgttcatgtttttcagcttcctgactttttctcagactcaatctctatatcacacccagtgctatcacaccatatgctgctttctgcccttttacactttccaagaacacttgaaaagctaaaaatctacaatctagtctggaaagtaagaaatgctcaaaaataactgtaccacaaaggagagagtgataaatgccattgaagacaaacagataaagtgctaaaaaagtaggcacaaagattgtttccagctgtgtgtgatatgagaagtgctt

SEQ ID NO: 22266 - DNA, 485 bp, Homo sapiens
  MAP TO AP000346.1; EXPRESSED IN BONE MARROW, SIGNAL = 0.9; EXPRESSED IN HELA, SIGNAL = 1.7; EXPRESSED IN BRAIN, SIGNAL = 0.91; EST_HUMAN HIT: BI818301.1, EVALUE 1.70e-01; NT HIT: gi11436859, EVALUE 7.70e-02; EST_HUMAN HIT: BF064051.1, EVALUE 1.20e-01; SWISSPROT HIT: P35799, EVALUE 3.50e-01
tcagtgcctcagtttcactagctctaaagtggggcgagtaattgtgcctatcataaatgggtatgattttggcagtgccgggggcatcatactgaaaataagtgccttgtacattgtgggtacccaggaagccagtttacagcccctcagaggagacccatcagcaggcatctgagggagcctggagccctgcatcctgcaggtgcctggggtcttgtgcccaggagaagctgctccctcactccacagcagtctacagagcaccccctgaccaggggtacacctgtttgtgcaggtgtcagcagggagccctgggcctctctgggctctgactttccctggcaggactgtagagggcccagaaccctgccttctcccagccaggcccttccctcccttccccaaactcacggcctcctcaccgctctctgcctcagattcaggactaatctcactatgtccttcatccctgtttgcatcagggg

SEQ ID NO: 22267 - DNA, 588 bp, Homo sapiens
  MAP TO AC008166.1; EXPRESSED IN LUNG, SIGNAL = 1.1; EXPRESSED IN BONE MARROW, SIGNAL = 0.89; EXPRESSED IN FETAL LIVER, SIGNAL =   1; EXPRESSED IN HELA, SIGNAL = 1.5; NT HIT: AF163864.1, EVALUE 2.00e-49; NT HIT: AL163248.2, EVALUE 2.00e-40; EST_HUMAN HIT: H41159.1, EVALUE 1.00e-45; EST_HUMAN HIT: BF921379.1, EVALUE 0.00e+00; SWISSPROT HIT: P48651, EVALUE 6.70e+00
ctctctttgcctgccagcatctgcataagatgtgacttgctcctccttgccttcctccatgattgtgaggcctccccagccatatggaaatgtaagtccaacaaacctctttcttttgtaagttgtccagtcttgggtatgtctttatcagcagcatgaaaatgaactaatacagtgtctatgtgacaatatacccaaattattaacatttcaatatataattcatgttaagttattgcctagctaatttacaatctttttttctactaaatgtatatattttatacttacagcacactttggcttggactagcaacatttcaattgctcagtaccctcgaataactagtggctactagttccacagttagagaacacaggtggaaaacacacagaaataaaaaactttttaagacaaagataatgcttctttaggtaaaagtatgtgaataccattactttagccactctcttaataagtacttttattacagtacagtggataaataagtacagttattttatccactcccttaataagtaatataaagtctttaccatgtttaaagcccagtatcaagggaacac

SEQ ID NO: 22268 - DNA, 581 bp, Homo sapiens
  MAP TO AC008283.3; EXPRESSED IN PLACENTA, SIGNAL = 2.2; EXPRESSED IN BRAIN, SIGNAL = 2.9; EXPRESSED IN BONE MARROW, SIGNAL = 2.2; EXPRESSED IN FETAL LIVER, SIGNAL = 2.6; EXPRESSED IN LUNG, SIGNAL = 3.3; SWISSPROT HIT: P13806, EVALUE 1.00e-08; EST_HUMAN HIT: AI434840.1, EVALUE 1.00e-33; NT HIT: AF083824.1, EVALUE 0.00e+00; EST_HUMAN HIT: AW051755.1, EVALUE 8.00e-34
tccataccagctaagaggtgtagtactgagattaaatataaaacttaaagtagtccatttgaaatgaatgtgataaatgggttcacctatattaattagcattacccacttgaactcatcattttcatttacctttacctatatttacttatttttaaaaatcagatcactttcaataagtagttaatactcatcctaataataaaaaattctgactttttagcaaatatatatcttcttgcctattttatcttttcatggctagctaaaaattcttaccatggtcttctgcgtacatcataaaggtcaatcttatttggagttctactattatcaacccatggtgaagctaaaaaaaaaaaaaaaagagagatattaaatcaaaatattagatatgctctaaaaataatgagactttaaaaatcacaaaaagcaatagatacataatttcacttacgtacttcaatgttcaaatgagagatatcatttttaagcccttatattgctttaacatggaaaacaacacggcagtacaaaaaggaaatcaatgatagtcgattctctttttacgagttatttca

SEQ ID NO: 22269 - DNA, 551 bp, Homo sapiens
  MAP TO AP000053.1; EXPRESSED IN HELA, SIGNAL = 2.4; EXPRESSED IN BONE MARROW, SIGNAL = 1.3; EXPRESSED IN FETAL LIVER, SIGNAL = 1.2; EXPRESSED IN LUNG, SIGNAL = 1.2; NT HIT: AL163278.2, EVALUE 8.00e-34; NT HIT: AL163209.2, EVALUE 1.00e-40; EST_HUMAN HIT: AI190993.1, EVALUE 0.00e+00; SWISSPROT HIT: Q08210, EVALUE 3.60e+00
ggtgccataagagaggcaagcatggagcactaggcgcaggggatgggcaactggcaagcggggagatgcatgcagcgcacttagtgcctggtacataccaagtccttttagtctggatttcattatttttaaatgggtattgctatttttaaaagaatagttacaaatatttattgtgtgttttgaaataagtgggtcaagatcaataagatattgttgatcaattgatcaataagatatcttttattcttaaaaatcatattcttctggttcagtggggaagagactgccgacctgtatttacagcattatgtgataagtgttctccttttcaggtatgtattagtctgttctcatgctgtcaataaagacatacctgagactgggtaatttataaaggaaagatgcttaattgactcacaattcctcatggctgaggaggcctcaggaaacttacaatcatggcagaaaaggaagcaagcatatccttcttcgcatgatggcaggaaggagaaatacagagcaaagtggggaaagccccttataaaacc

SEQ ID NO: 22270 - DNA, 578 bp, Homo sapiens
  MAP TO AP000347.1; EXPRESSED IN HELA, SIGNAL = 1.7; EXPRESSED IN PLACENTA, SIGNAL = 2.9; EXPRESSED IN BRAIN, SIGNAL = 2.9; EXPRESSED IN HEART, SIGNAL =   3; EXPRESSED IN LUNG, SIGNAL =   3; EXPRESSED IN BONE MARROW, SIGNAL = 3.4; EXPRESSED IN FETAL LIVER, SIGNAL = 2.3; NT HIT: gi11418657, EVALUE 3.70e-01; EST_HUMAN HIT: W26785.1, EVALUE 1.00e-48; SWISSPROT HIT: P19382, EVALUE 2.90e+00
caggtgtttgtacccagcagtggaactctgtgtccagctgaaagctaactgtaaacacgcagtggctcatgtgaagtggagatggggcccaggggaggagcatgagaggtcccaccctggtcctctggagcccctgtgatcagaggactccactgaaaactctcacccagtaagctgggattcactgggttttcaaacaaaagggactggaactcacaaatctcccctgattcccaaatttacccttctttctttcctctgcccatagcaaaagcatgaaagagctaaaagaactctgcaaaaaagacactgcagtgaagagggacctactgatcaaggtacagtggagtctgggagatgcaggacaagtgtttaagggtcagagaaaagagtgagtttggaagggcattggaccaggtgtcgagtggttattttgtttggttttgacttacctactaaaagtggacttgaaaaattccctccatgcctaccttgggccaacaggaagagtggtgtgtcggtccatgggcacgtgggggcatgggggcaggaggccctggaaatgggatgtggcaatg

SEQ ID NO: 22271 - DNA, 573 bp, Homo sapiens
  MAP TO Z82201.1; EXPRESSED IN BONE MARROW, SIGNAL = 0.85; EXPRESSED IN HELA, SIGNAL = 0.76; SWISSPROT HIT: P04929, EVALUE 5.00e-02; EST_HUMAN HIT: BE278788.1, EVALUE 5.20e-02; NT HIT: gi11426388, EVALUE 2.30e-02; EST_HUMAN HIT: BE407615.1, EVALUE 3.50e-02
ctctcattagggcttgtggccccccagcaccctgggaagccctctagagtgtgtggagccaggactctgtgacgttagaagggatgttcactgtggggattgagaggtgttgagtggatctttcagtctgggttgctgtggctgtttgggctctgggtgccggcttcccacaggatgattccgacgctgccttgttctcttcgatgcctgccctctgcagaaagcatcttcccttcttgacgctgacacacagaagctcacctgggagcaccacctcaccaggaggctggttccaagcacaatatccaaggacaccagcacagtccacagcatcagtactccacacacacaagcatcattccatacatgtaggcatcataccctacacgcggtcatcattccctacgtgcaggcattattctgtacatgcaggcatcattccatacacacaggcatcattccctacacacaggcattattccctacaagcaggcatcataccctacacgcaggcatcattccctacatgcaggcatcattccctacacgcaggcatcattccgtacatgcagg

SEQ ID NO: 22272 - DNA, 469 bp, Homo sapiens
  MAP TO Z83840.7; EXPRESSED IN LUNG, SIGNAL = 0.93; EXPRESSED IN HELA, SIGNAL = 1.3; EXPRESSED IN BRAIN, SIGNAL =   1; EXPRESSED IN BONE MARROW, SIGNAL = 0.88; SWISSPROT HIT: P38996, EVALUE 2.50e-01; NT HIT: gi14779216, EVALUE 0.00e+00; EST_HUMAN HIT: BG258890.1, EVALUE 0.00e+00; EST_HUMAN HIT: BE258569.1, EVALUE 1.00e-116; NT HIT: AL161512.2, EVALUE 2.90e-01
atctggaggcttaggggaaaaaactggaggcttagagcgaagaaacagactgttaaaaagtaaagataatggaaagacccgtttatcagagtggaagaaccaggaacagggtggaggtgggaatgatgaagaaattcaaatacaggggaagagaaacctgagagggaccacagctgatgatggtacagagacccaggctcctgcaggagatgaccagggacagttaagagttgaaattgctgaagagatccaggtacaagggcaaggaaataagaatgacggtggagttgaggatgttgcagaactccaggatataggaagccagagaaagtgcacagatgaggatgttggagagcctcgagcaccaaggggaggaaacaaggatctggtcagaggagaggatgctgtgagggacagtctccaagtcgactgttctgggagtgagaggcccacaggcaggaagcacagc

SEQ ID NO: 22273 - DNA, 576 bp, Homo sapiens
  MAP TO AC008272.1; EXPRESSED IN BRAIN, SIGNAL = 1.9; EXPRESSED IN PLACENTA, SIGNAL =   2; EXPRESSED IN LUNG, SIGNAL = 2.1; EXPRESSED IN HEART, SIGNAL = 1.8; EXPRESSED IN BONE MARROW, SIGNAL = 1.8; EXPRESSED IN FETAL LIVER, SIGNAL = 1.7; EST_HUMAN HIT: BG288433.1, EVALUE 5.20e-02; NT HIT: gi12408580, EVALUE 1.40e-01; EST_HUMAN HIT: BE010985.1, EVALUE 1.40e-01; NT HIT: gi11466872, EVALUE 9.20e-02; SWISSPROT HIT: O51878, EVALUE 2.50e-01
taggctcagggcagactctcacctcccagacctggagcctcacataacttgattcacttattaatttatgtaacaaacatggaattcctgttatgttccaagctctgtgctaagctatggatttttttaaaaagtgaattagtcagcatgcctgcccccaaaatgtttctgttctagttgggaatattatcaaagtaaataataaaagctgccacttatggtatacaagtcactgtggaagctgaggatcaacgtttgaggagctagcgcaggtcacagggcacagtcagaattcaaactgcaaaacccaagctctttgcttgctgccaatgaaatcctcataatacctcattgtaccctaaaaagggttcagccaaggtacagagggaatagagtgcaaaagaagatgatcagctctactaagggcaggcagactggggaaggagatgatgtgggagagctatagagtagcctggggtaagttgccgtgtgctgagcagataaggacagaacgccatagaagcagagggctgtgcaaaggcatccagtgtgaatagcttggaacatgcaggaact

SEQ ID NO: 22274 - DNA, 555 bp, Homo sapiens
  MAP TO AC008283.3; EXPRESSED IN BONE MARROW, SIGNAL = 1.6; SWISSPROT HIT: Q08520, EVALUE 6.20e+00; EST_HUMAN HIT: W04985.1, EVALUE 3.00e-22; NT HIT: AB019004.1, EVALUE 3.00e-29; EST_HUMAN HIT: AI114527.1, EVALUE 2.00e-31
aatgtcaaagattttatttaattgtggaaatatcaatgtaaattagtagccaaataatgtttaatataaaaattccagaataaattttctttacgaaaaaacttaaaatatttttgaccgtaaaaatcctttgatttggcaagatatatttaataatatgtataacaggtgaatggtattctataaattggtattatttaaaattatattgtattttatattctcaattatatattctatgatctttttggcacagggactggttttgttaaagacaatttttccacaaatggaggtgggacatggtttcaggatgactctgttccacctcagatcatcaggcattactagatatctcataaggagcatggaacctagatcacgcacatgtgccgttcacaacagggttcatgctcctatgagaatctaatgctgctgctcacctgacagaaggcagagctcaggaagtaatgctctcctgctgcgtggcccggttcctaacaggtcagggacccagaccggtccatggcccaggggctggggacctttgttcta

SEQ ID NO: 22275 - DNA, 562 bp, Homo sapiens
  MAP TO AC009266.1; EXPRESSED IN BRAIN, SIGNAL = 0.96; EXPRESSED IN HELA, SIGNAL = 1.5; EXPRESSED IN BONE MARROW, SIGNAL = 1.1; NT HIT: AL163207.2, EVALUE 6.00e-12; EST_HUMAN HIT: AI886224.1, EVALUE 4.00e-14; SWISSPROT HIT: O14628, EVALUE 2.80e-02; NT HIT: AB044947.1, EVALUE 6.00e-13
tgaggtcaagtgatctgcccgcctcagcttcccaaagtggtagaattacaggcctaagccaccatacctggcctggccctatttataaattaattgtcactgtatttgcgaaaccatctaaagaagtaagcagcatgaaccttgtaagaaaaggtgggaaaacaactcagtgccatggtgggggcactatgtaaaacatcaccttgacaatttttttttgtaaaacacttccctgccttgaaggttccttgaatctatcctttaactcacttttcttcatgatcaggcatatgtttgtttgcctgtttttctttatgtcagaacattttgaattcatggagcagctagaaaaaattcagatgaatcttgaaaacaagttctcatctaagaaggcaaggatataggtaaatttcttttgttgcttttgcaccaccttcaataactctggaatccaaactaaaatctgaagacagatacctggaaataaattctcagacacaaattaggaatttgcactcaggataagaattttaaaaaatcttgtgtcctgcttgaaatgtgc

SEQ ID NO: 22276 - DNA, 553 bp, Homo sapiens
  MAP TO AL021707.2; EXPRESSED IN HELA, SIGNAL = 0.5; EXPRESSED IN HEART, SIGNAL = 1.2; EXPRESSED IN BONE MARROW, SIGNAL = 0.82; NT HIT: gi11545836, EVALUE 1.40e+00; EST_HUMAN HIT: BE540741.1, EVALUE 2.10e+00; SWISSPROT HIT: P27854, EVALUE 2.80e+00; EST_HUMAN HIT: BF881080.1, EVALUE 9.00e-84
gggcaaatcgcctaaaatgaatcctagtttcctaagttcatcactgataaggttgttgcaagattgttcatacatatcacaaagtactaagccattgaggtactcaccctgagtcctttccttctccctagttttagctcaggaaataatttgcaaatatctgattaggagtaggagaaatactaatggctggccaaaaggaagcatgtactgggtcctcctttcagtgacatgacctgatgatctgagacgaattattttatctcccagtgccccaggtcctgaagagtcaattctacttgctgccagataatggccatgatgcaaatgatatattagctctggtaaggcattactctggttactactggcattggaaaataattactctcattatagttttgtctgcatctggggattaacattctcctaagagtaggcctttggctctttcagggcaaatggtccatacctgtgttttacaaatcaccccaaataggttgcttccagctgtaattctggtccctatgtggcaacaatttcacttccaagc

SEQ ID NO: 22277 - DNA, 273 bp, Homo sapiens
  MAP TO AC010389.6; EXPRESSED IN BONE MARROW, SIGNAL =   1; EXPRESSED IN PLACENTA, SIGNAL = 0.85; EXPRESSED IN BRAIN, SIGNAL =   2; NT HIT: gi13642475, EVALUE 0.00e+00; SWISSPROT HIT: Q08211, EVALUE 1.00e-10
ctggaatgctctgagaagtgccatatggtcactgaaagctcctgcagtaaaacgtttcctacaaagcatagctgcacgtttttgagaggcctgagtaggtagtacaaaaggatctcgataagctagtgtgcaagcaattgtaaggatggggtccagacactttaaaacaacagcacacaagaccattttaccaagatgtggttctactggcaagtcagccaaatgatacccaagttcagtcagatcttcccatgtatccattgcatctattgt

SEQ ID NO: 22278 - DNA, 108 bp, Homo sapiens
  MAP TO AF004877.1; EXPRESSED IN BONE MARROW, SIGNAL = 1.1; EXPRESSED IN PLACENTA, SIGNAL = 2.6; EXPRESSED IN HEART, SIGNAL = 1.5; EXPRESSED IN BRAIN, SIGNAL = 0.93; EXPRESSED IN FETAL LIVER, SIGNAL = 2.1; EXPRESSED IN LUNG, SIGNAL = 2.7; EST_HUMAN HIT: AI751184.1, EVALUE 4.00e-54; NT HIT: gi15299135, EVALUE 3.00e-54; SWISSPROT HIT: Q01149, EVALUE 8.00e-04
ggtgaacctggtgtggttggtgctgtgggcactgctggtccatctggtcctagtggactcccaggagagaggggtgctgctggcatacctggaggcaagggagaaaag

SEQ ID NO: 22279 - DNA, 154 bp, Homo sapiens
  MAP TO AC008033.8; EXPRESSED IN BONE MARROW, SIGNAL = 2.7; EXPRESSED IN BRAIN, SIGNAL = 4.3; EXPRESSED IN LUNG, SIGNAL = 3.5; EXPRESSED IN FETAL LIVER, SIGNAL = 4.4; NT HIT: U36395.1, EVALUE 4.00e-60; EST_HUMAN HIT: BG288544.1, EVALUE 7.00e-60; SWISSPROT HIT: Q92524, EVALUE 2.00e-19
aagtaccctcagaaaacggacaaccaccaatagcatctatttcatccataaaaatgatgcatggtttatggttcctgggataattaaacatttctctgatcaaacaagcactttcaccaatgtacttgtctacaatagaactagatacaacctt

SEQ ID NO: 22280 - DNA, 188 bp, Homo sapiens
  MAP TO AC004171.1; EXPRESSED IN BONE MARROW, SIGNAL = 0.47; EXPRESSED IN BRAIN, SIGNAL = 0.62; NT HIT: AL163278.2, EVALUE 2.00e-04; EST_HUMAN HIT: BF591777.1, EVALUE 1.00e-09; SWISSPROT HIT: P93527, EVALUE 3.30e+00
ctgacatccacactcatgtgcctcctgtggatctgggaactgacctgcccaacctgtcacagccattgccaatatcagcatggactacacgggtcccagagggctgtcccaccactgctactgccatcacccacaccacatccactgccaaagggctcaagaattcaacttcatacctgaactactga

SEQ ID NO: 22281 - DNA, 199 bp, Homo sapiens
  MAP TO AC011517.5; EXPRESSED IN LUNG, SIGNAL = 3.9; EXPRESSED IN BONE MARROW, SIGNAL =   4; EXPRESSED IN BRAIN, SIGNAL = 2.5; EXPRESSED IN HEART, SIGNAL = 2.4; EST_HUMAN HIT: BG488791.1, EVALUE 1.00e-98; NT HIT: gi14765752, EVALUE 1.00e-108; SWISSPROT HIT: P78329, EVALUE 2.00e-19
caggccctggtgtccccaaaaccagttctgtttcgggggttgaggaaaacactggaggcggcggcagttgtcatagaaggtgtaggtccaggccaggacgcgggccaggagccaggagcctccaaccagcagcagaagcagccacggggatgctgccacgggcccgaggcccagccaggacaggctcagctgcggcatc

SEQ ID NO: 22282 - DNA, 188 bp, Homo sapiens
  MAP TO AF045450.1; EXPRESSED IN HEART, SIGNAL = 1.5; EXPRESSED IN HELA, SIGNAL = 1.3; EXPRESSED IN BRAIN, SIGNAL = 0.99; EXPRESSED IN FETAL LIVER, SIGNAL = 1.5; EXPRESSED IN PLACENTA, SIGNAL = 6.6; EXPRESSED IN BONE MARROW, SIGNAL = 1.4; SWISSPROT HIT: Q16937, EVALUE 2.50e+00; NT HIT: AL163280.2, EVALUE 1.00e-102; EST_HUMAN HIT: R27411.1, EVALUE 8.00e-57
tgcttcctgctggcctggggtgtagtaggggttgtgcagttgagatttcctcaggaggggtgccttcgatgtcgttaacattggagcatgggctgtcagggtggtccaggggtccgcggtagatcttagtcatggactgcatctggggctccatttgaagaatgatttgtagttttacagctttaatt

SEQ ID NO: 22283 - DNA, 257 bp, Homo sapiens
  MAP TO AC010327.5; EXPRESSED IN FETAL LIVER, SIGNAL = 0.58; EXPRESSED IN BONE MARROW, SIGNAL = 0.52; EXPRESSED IN HEART, SIGNAL = 1.1; SWISSPROT HIT: P97290, EVALUE 8.80e-01; EST_HUMAN HIT: BG283977.1, EVALUE 0.00e+00
gtacctggtggacgtgcggcaggagcagctgcagggattcaacacccgggtcagggagctagctcaggcagctggatttgctccacagaccggggccaggccttcagagaccttcgcacgtttctgcaagtcccaggaatcagctctgggcaacactgtcccagctgtggaacccggaactccgccccttgacatcctggcccagcctcttgaagccagcaacccagcccttgagggcctgacccagcctctgcagg

SEQ ID NO: 22284 - DNA, 360 bp, Homo sapiens
  MAP TO AC005794.1; EXPRESSED IN LUNG, SIGNAL = 0.46; EXPRESSED IN BRAIN, SIGNAL = 1.8; EXPRESSED IN BONE MARROW, SIGNAL = 2.2; EXPRESSED IN HEART, SIGNAL = 3.7; EXPRESSED IN FETAL LIVER, SIGNAL = 4.4; NT HIT: gi13632099, EVALUE 0.00e+00; SWISSPROT HIT: P40199, EVALUE 6.00e-34; EST_HUMAN HIT: AV737313.1, EVALUE 2.00e-80
ggtgtacgtggagctggccagttgcttggtcagagtcgtaactggcatttatggttcgtagggtgtaggatcctgcgtcctccagggtgatgttttggaacagcagggatccattggggtatactgtctctcgaccactgtatgcggcccctgggatatttgcttgaatgtctgttatataaccagcaatgagagggctcccttctgccgttttccccttgtgccaataataggcttgaatagtttctgaaatattgcaggccagtagaagaacatcctttccctctgcagcactggacggcagggcttcaatagtgaactggacagtggtgggcgggtgccagaaggttaaaagtgagg

SEQ ID NO: 22285 - DNA, 164 bp, Homo sapiens
  MAP TO AC026774.4; EXPRESSED IN FETAL LIVER, SIGNAL = 0.91; EXPRESSED IN BRAIN, SIGNAL = 0.75; EXPRESSED IN BONE MARROW, SIGNAL = 0.56; SWISSPROT HIT: P46223, EVALUE 2.60e+00; EST_HUMAN HIT: AV756206.1, EVALUE 2.10e-01
ctattctttgagtccttgaagattgcttctgtagttcttgtctcctgctctggtccctgcagcaacatcaccacagtgttgcccagcctgcctctcactgcccagaatgccttggttccagtgttgtggaatctgctgatgctgccctgtgctgttgatgtgcc

SEQ ID NO: 22286 - DNA, 210 bp, Homo sapiens
  MAP TO AL049779.5; EXPRESSED IN FETAL LIVER, SIGNAL = 2.5; EXPRESSED IN BONE MARROW, SIGNAL = 1.6; EXPRESSED IN PLACENTA, SIGNAL = 1.3; EXPRESSED IN BRAIN, SIGNAL = 2.4; NT HIT: gi7705790, EVALUE 1.00e-115; EST_HUMAN HIT: AA035790.1, EVALUE 1.00e-114; SWISSPROT HIT: Q39593, EVALUE 1.60e-01
cttttagtctccgggccagttcctgggtgaagaggatgttggctagcttgctgtgacagtaggccaggcctgcattgtagaatttctcgccctgcaggttatggaagtggatccttcccaggtgatgtgcgagggaagacacatttactatccttgatggggctgattcctttagtttctctagcagcagatgggttaggaggaagtgac

SEQ ID NO: 22287 - DNA, 195 bp, Homo sapiens
  MAP TO AL109944.19; EXPRESSED IN FETAL LIVER, SIGNAL = 1.2; EXPRESSED IN BONE MARROW, SIGNAL = 1.3; EXPRESSED IN PLACENTA, SIGNAL = 1.4; EST_HUMAN HIT: BF031578.1, EVALUE 4.00e+00; SWISSPROT HIT: P35639, EVALUE 1.10e+00; NT HIT: gi14786241, EVALUE 4.40e-02
atgtcaaagctttccaagagagactgtgaacagtacctggggaacaccaaaaagagagatgataaagaagggatgacaagtccctgcaggcctggaccaagtgcaacacagaacaagcaacaagaccaaaagaaagcagtgtgtcttgttaagtttctttgcaaggctttaaatcagctgtggcttcctggcagg

SEQ ID NO: 22288 - DNA, 92 bp, Homo sapiens
  MAP TO AF002991.1; EXPRESSED IN HEART, SIGNAL = 1.8; EXPRESSED IN BRAIN, SIGNAL = 0.99; EXPRESSED IN BONE MARROW, SIGNAL = 0.96; EXPRESSED IN PLACENTA, SIGNAL = 0.87; EST_HUMAN HIT: BE008056.1, EVALUE 5.00e-07; NT HIT: K03021.1, EVALUE 5.00e-03
ataacgctgacatatacactctgtgtgtcttccctttcatcctcatcgcctttgtgaaaggaaaggaaatctcaggacccccaaattactaa

SEQ ID NO: 22289 - DNA, 322 bp, Homo sapiens
  MAP TO AL031719.10; EXPRESSED IN HEART, SIGNAL = 1.6; EXPRESSED IN HELA, SIGNAL = 0.87; EXPRESSED IN BONE MARROW, SIGNAL = 0.93; EXPRESSED IN PLACENTA, SIGNAL = 1.2; SWISSPROT HIT: Q03293, EVALUE 1.80e-02; NT HIT: gi14774679, EVALUE 0.00e+00
ccttcttgccacctaagaatgacctggcctcgaggtcctccaagtacaggtccctggccccgaggtcctccaagtacaggtccctggccccaaggccctccaagtacaggtccctggccccgaggtcctccaagtacaggtccctggccctgcaggtctgggtgaacttgctccctccaggcacacgggtctctccccttcccagcaatcctgtgatatctgccccccttttgagggcagcattcccgtggcgggggcaggcctggaacacacgggcggggggaggcttgtggttcctatggtcctgggggtacctatggtc

SEQ ID NO: 22290 - DNA, 307 bp, Homo sapiens
  MAP TO AC010320.7; EXPRESSED IN HELA, SIGNAL =   1; EXPRESSED IN BRAIN, SIGNAL = 0.86; EXPRESSED IN BONE MARROW, SIGNAL = 0.87; EXPRESSED IN PLACENTA, SIGNAL = 1.1; EXPRESSED IN HEART, SIGNAL = 1.5; SWISSPROT HIT: P10266, EVALUE 4.00e-33; EST_HUMAN HIT: AI823404.1, EVALUE 1.00e-109
agctcatacaccctttccaggacctttaactgcagggaatcaaatggctgatcgcctagttgctactgcaatatctaatgccagacactttcacaatttaacccatgttaatgcctctggtctaaaacatagatacagcattacctggaaagaagctaaatctattatccagcaatgcgcaacttgccaattggtgcattcctcatcttttacaggaggagttaatcctcgaggattggaacctaattctgtttggcaaatggatgtcatttatgttccttcttttggtaaactggcttatgtgcat

SEQ ID NO: 22291 - DNA, 116 bp, Homo sapiens
  MAP TO AC008243.6; EXPRESSED IN FETAL LIVER, SIGNAL = 0.96; EXPRESSED IN BONE MARROW, SIGNAL =   1; EXPRESSED IN PLACENTA, SIGNAL = 1.2; EXPRESSED IN HEART, SIGNAL =   4; NT HIT: gi13647090, EVALUE 5.00e-59; SWISSPROT HIT: P13485, EVALUE 7.90e+00; EST_HUMAN HIT: BI050901.1, EVALUE 6.00e-44
cccaccgctgcagaaatccacaattctgtcaccaggtttggcctgatttgttaccacatagacaaggttgttcaactgttgctgcttcctcaaagctcgatcactggacattttac

SEQ ID NO: 22292 - DNA, 97 bp, Homo sapiens
  MAP TO AL121866.13; EXPRESSED IN BRAIN, SIGNAL = 0.78; EXPRESSED IN LUNG, SIGNAL =   1; EXPRESSED IN FETAL LIVER, SIGNAL = 0.79; EXPRESSED IN BONE MARROW, SIGNAL = 0.96; EXPRESSED IN PLACENTA, SIGNAL = 0.76; SWISSPROT HIT: P50111, EVALUE 4.70e+00; EST_HUMAN HIT: BG623595.1, EVALUE 1.80e+00
tctgtgcctgcttctcatttttcctaatacctgaattctccttgcctctcagattttcatcaggaggtggcttctcaatctggaaatcagggcccat

SEQ ID NO: 22293 - DNA, 183 bp, Homo sapiens
  MAP TO AC008727.5; EXPRESSED IN FETAL LIVER, SIGNAL = 0.54; EXPRESSED IN BONE MARROW, SIGNAL = 0.7; EXPRESSED IN PLACENTA, SIGNAL = 0.7; EST_HUMAN HIT: R35910.1, EVALUE 2.00e-54; SWISSPROT HIT: Q08462, EVALUE 2.00e-14; NT HIT: gi16159210, EVALUE 1.00e-54
gtcagcatccagctgagtaactggacggttgtcattgcttcacagcttctttccaagccaaaattcagtggagttgaaaagattaagaccattggcagcacatacatggcagcaacaggtctgagcgctgtgcccagccaggagcactcccaggtaagacgcgttggccacttaacggcacag

SEQ ID NO: 22294 - DNA, 188 bp, Homo sapiens
  MAP TO AC005578.1; EXPRESSED IN BONE MARROW, SIGNAL = 0.99; EXPRESSED IN PLACENTA, SIGNAL = 0.54; EXPRESSED IN HEART, SIGNAL = 0.98; EXPRESSED IN BRAIN, SIGNAL = 1.2; EST_HUMAN HIT: BI756881.1, EVALUE 1.00e-101; SWISSPROT HIT: Q03017, EVALUE 1.00e-03; NT HIT: gi14759831, EVALUE 6.60e-01
gacggccctgatgctggcctgtgagggggccagccccgaaacagtggaggtcctgctgcagggcggagcccagccgggcatcaccgatgcgctggggcaggacgcggctcactatggcgccctggcgggggacaaactcatcctgcaccttctgcaagaggcggcccagcgcccctccccacccagcg

SEQ ID NO: 22295 - DNA, 179 bp, Homo sapiens
  MAP TO AF131216.1; EXPRESSED IN BRAIN, SIGNAL = 0.61; EXPRESSED IN FETAL LIVER, SIGNAL = 0.38; EXPRESSED IN BONE MARROW, SIGNAL = 0.71; EXPRESSED IN PLACENTA, SIGNAL = 0.4; SWISSPROT HIT: P04024, EVALUE 3.30e+00; NT HIT: AJ278615.2, EVALUE 1.60e-01
agagcatgctgggtcccagggcttgtcctcaatgcaccacacgcagttggctgatgaactaggacctctgtgtcttgaagtgggagtggatggtaggaagggggagatggaaaagcaggggtacaaggctgatgctggcagcaatgaagaccttggtgattcgtggaccatagtggaga

SEQ ID NO: 22296 - DNA, 103 bp, Homo sapiens
  MAP TO AC010339.6; EXPRESSED IN BRAIN, SIGNAL = 0.59; EXPRESSED IN BONE MARROW, SIGNAL = 0.49; EXPRESSED IN PLACENTA, SIGNAL = 0.46; NT HIT: gi14731251, EVALUE 2.00e-51; EST_HUMAN HIT: BG742032.1, EVALUE 4.00e-51; SWISSPROT HIT: P16713, EVALUE 6.10e+00
catttcgcaactggtttttgttcatcgtaggattccattcctgcttgtccagatgtgttgacacaaaattatccactttctgcctcaggttttggtaagctgg

SEQ ID NO: 22297 - DNA, 180 bp, Homo sapiens
  MAP TO AC008518.3; EXPRESSED IN BONE MARROW, SIGNAL =   2; EXPRESSED IN PLACENTA, SIGNAL = 4.5; EXPRESSED IN HEART, SIGNAL = 3.9; EXPRESSED IN BRAIN, SIGNAL = 4.1; NT HIT: AF281047.1, EVALUE 6.30e-01; EST_HUMAN HIT: BE513269.1, EVALUE 1.50e-02; SWISSPROT HIT: P53735, EVALUE 7.40e+00
ggcacaaagcttaagcagtttatcagcaggctcaaacaaaaaacaaaacaaaataaaaaacgcagaaagctcttcattaaagaaatcgaactaaggagaactgaggcagatgtcatggatataaaacccacacccacttccacccacgcccagaatgaagactgttatcattttggcctg

SEQ ID NO: 22298 - DNA, 203 bp, Homo sapiens
  MAP TO AC007758.1; EXPRESSED IN BONE MARROW, SIGNAL = 0.46; EXPRESSED IN BRAIN, SIGNAL = 0.63; EXPRESSED IN PLACENTA, SIGNAL = 1.1; EXPRESSED IN HEART, SIGNAL = 1.2; EXPRESSED IN HELA, SIGNAL = 0.8; NT HIT: AL161560.2, EVALUE 2.80e+00; SWISSPROT HIT: P23378, EVALUE 1.90e+00
tctccttccacagattgctccttaatgtcctgtccatctgcatctgaaatcccactctcatgatcccatcacatgcatcaatgttggtgagattgcgcataagagtagtgggaatggaacatttaaaaagagcaaccccttgcaaggaaagtattatgggtgaggtaatgggccctgcatgaagaataggatttggatgtgag

SEQ ID NO: 22299 - DNA, 196 bp, Homo sapiens
  MAP TO AC008282.2; EXPRESSED IN BRAIN, SIGNAL = 2.1; EXPRESSED IN LUNG, SIGNAL = 1.9; EXPRESSED IN HELA, SIGNAL = 1.7; EXPRESSED IN BONE MARROW, SIGNAL = 3.3; EXPRESSED IN PLACENTA, SIGNAL = 1.4; NT HIT: gi7706239, EVALUE 1.00e-106; EST_HUMAN HIT: BG472547.1, EVALUE 1.00e-106; SWISSPROT HIT: P28481, EVALUE 6.40e-01
ctgtctctggggccaggaggctttgagaatggcttcagttctaaagaacacgaggagcttgctgtcctcctcagtcaggtgaaatgattgccccaaaatctgcagcacgtgaatgcggggccgcaccggccaggcgtcatcagcacagaaaggccgcagccactccagcaggtcctcaggtgaaaccagctcctca

SEQ ID NO: 22300 - DNA, 353 bp, Homo sapiens
  MAP TO AC020894.3; EXPRESSED IN HEART, SIGNAL = 1.2; EXPRESSED IN BRAIN, SIGNAL = 1.9; EXPRESSED IN BONE MARROW, SIGNAL = 1.2; EXPRESSED IN PLACENTA, SIGNAL = 1.2; EST_HUMAN HIT: AU128804.1, EVALUE 0.00e+00; NT HIT: gi13645784, EVALUE 0.00e+00
tgtgcgaaaatctttttcaaacttgtaagcaccacctcctgtagcacatagcaccgtctgcaatgttgagaagtttttatctcttcccatttggataaaagtaggcaggtcctgggttggaaacctgataaagtgcaagttccctcttcggccaaaaagtgttaaatctttcagttcaaggtgtacatcccgaatgccggtggatccatatgccacgttagaagtcaaatatttccgaatactttttaaactctcaacttcttcttgctcttcctctgctgtgatatcaataggttcaaagtacgagagctttactagagttcccccaatgtccatgccaaaccatgggaaag

SEQ ID NO: 22301 - DNA, 224 bp, Homo sapiens
  MAP TO AC006942.1; EXPRESSED IN BRAIN, SIGNAL = 1.2; EXPRESSED IN HELA, SIGNAL = 1.1; EXPRESSED IN BONE MARROW, SIGNAL = 2.2; EXPRESSED IN PLACENTA, SIGNAL = 0.8; NT HIT: AF289221.1, EVALUE 1.00e-123; SWISSPROT HIT: P18627, EVALUE 8.50e-01; EST_HUMAN HIT: AI129391.1, EVALUE 1.00e-123
tcaaagaagtggggtgagggcatgcagagtgtgggtggccaggcttcgcagcccatgggtgggactctggggagacagcagcagcagcagccgccgaagccccagctgcaaggccaccagacgcactcctgtgcctggttcctcagtccccaacaccaggtagcaagctctgggcagctgggcctggtagacctcatcttctgtcttctctggtggccctggct

SEQ ID NO: 22302 - DNA, 103 bp, Homo sapiens
  MAP TO AC018555.4; EXPRESSED IN HEART, SIGNAL =   1; EXPRESSED IN BRAIN, SIGNAL = 1.1; EXPRESSED IN BONE MARROW, SIGNAL = 0.93; EST_HUMAN HIT: AV727561.1, EVALUE 4.80e-01; NT HIT: U51927.1, EVALUE 3.30e-01
attagccgaagcaatttcagaatttgctttatcaaacgccgaattctctctcatcccattgaccatggtgctacttttctcataaggtgtcctcactgctttc

SEQ ID NO: 22303 - DNA, 463 bp, Homo sapiens
  MAP TO AC004171.1; EXPRESSED IN BONE MARROW, SIGNAL = 0.41; EXPRESSED IN PLACENTA, SIGNAL = 0.55; EXPRESSED IN BRAIN, SIGNAL = 0.56; SWISSPROT HIT: P58182, EVALUE 7.00e-87; EST_HUMAN HIT: AI909504.1, EVALUE 1.00e-02; NT HIT: gi11526387, EVALUE 0.00e+00
atgatggatacggttggaaccacagaagttcaagcgagaagtcattacggagtgcagcagggcatggaaaaaaccaatgacccagattgtgatggccatctgggtacagagctgagggttcatgatgacagtgtagcgaagtggcttgcagatagccacagagaggtcaaatgccatcacggcgaacaacatggactccgtgctgcccaggaagtggaagaaatgaagctggcttatgcatcccaagaaagaaattgctttgtgtgtagagagaaagttctgcagcatttttggcagtgtcaccgtagagtaacagatatccaggtaggacaggtttcccaggaagaaatacataagggaatggagtctaggatcggagatgacaatcatcagaacggctccattcccagtcacactgatgaagtagatggtgaggaaaaccacgaagagaaaaggctgcagt

SEQ ID NO: 22304 - DNA, 195 bp, Homo sapiens
  MAP TO AL109753.9; EXPRESSED IN HEART, SIGNAL = 2.6; EXPRESSED IN BRAIN, SIGNAL = 4.6; EXPRESSED IN PLACENTA, SIGNAL =   2; EXPRESSED IN HELA, SIGNAL = 2.8; EXPRESSED IN BONE MARROW, SIGNAL = 2.2; EST_HUMAN HIT: AA127403.1, EVALUE 1.00e-100; NT HIT: gi14757737, EVALUE 1.00e-106; SWISSPROT HIT: Q61687, EVALUE 6.00e-33
ctttggcagcatgggagtatccctcttcttcttcttttctgaattagggtcatctaataagtctggctcaaaagtataaagttcagtaagctcattcatagtaaaatgacgctccacctgctgctgatcaacaactcgaaaagacagtgactgcttagttacttgccgatcataaatcttatcttccatggttcc

SEQ ID NO: 22305 - DNA, 150 bp, Homo sapiens
  MAP TO AC018757.4; EXPRESSED IN HEART, SIGNAL = 3.4; EXPRESSED IN BRAIN, SIGNAL = 2.1; EXPRESSED IN HELA, SIGNAL = 2.7; EXPRESSED IN BONE MARROW, SIGNAL = 1.6; EXPRESSED IN PLACENTA, SIGNAL = 1.8; NT HIT: X98851.1, EVALUE 1.30e-01; EST_HUMAN HIT: BF793028.1, EVALUE 7.60e-01; SWISSPROT HIT: Q9UBN7, EVALUE 5.80e+00
tgctaatgaatcccccacggcagcctctgtgcagctctgcgtccagagagcagggacttgccttccctggagttcttcgaagcaccgcagacacttccagtgctcaatcagcgtttaataatcacagcaataatcctaataatgaccagg

SEQ ID NO: 22306 - DNA, 204 bp, Homo sapiens
  MAP TO AC016594.5; EXPRESSED IN BONE MARROW, SIGNAL = 1.5; EXPRESSED IN PLACENTA, SIGNAL = 1.2; EXPRESSED IN HEART, SIGNAL = 1.4; EXPRESSED IN BRAIN, SIGNAL = 1.5; EXPRESSED IN LUNG, SIGNAL =   1; NT HIT: AB020695.1, EVALUE 1.00e-111; SWISSPROT HIT: P97432, EVALUE 4.90e-01; EST_HUMAN HIT: AL133748.1, EVALUE 1.00e-111
cttatctggtgcatctacctcagggggttttgaagattctaccaccagtggaacaagatttgtagagtcttcactggaattaaaaggctgcaattttaattcttcatctaaaacttcactagtggagtcttcctcttctgttataagtgaggtcttaagagaatcgtccattatctcaccattcataggctctaattcagattc

SEQ ID NO: 22307 - DNA, 97 bp, Homo sapiens
  MAP TO AL031592.1; EXPRESSED IN HEART, SIGNAL = 1.1; EXPRESSED IN LUNG, SIGNAL = 1.7; EXPRESSED IN BRAIN, SIGNAL = 1.2; EXPRESSED IN BONE MARROW, SIGNAL = 1.5; EXPRESSED IN PLACENTA, SIGNAL = 0.99; NT HIT: gi14150046, EVALUE 3.00e-01; EST_HUMAN HIT: BI855776.1, EVALUE 4.50e-01
gtaacaggaggcaaagccacgattcaagcccttgtccatctgatcccgggtacagctctgtccatcaaaccaaagtgtctcaaaatatggcttcttc

SEQ ID NO: 22308 - DNA, 256 bp, Homo sapiens
  MAP TO AC022517.1; EXPRESSED IN HEART, SIGNAL = 7.7; EXPRESSED IN BRAIN, SIGNAL = 3.4; EXPRESSED IN LUNG, SIGNAL =   8; EXPRESSED IN HELA, SIGNAL = 4.8; EXPRESSED IN FETAL LIVER, SIGNAL = 7.6; EXPRESSED IN BONE MARROW, SIGNAL = 2.4; NT HIT: AF253324.1, EVALUE 2.30e-01; SWISSPROT HIT: O77408, EVALUE 1.90e+00; EST_HUMAN HIT: BI254163.1, EVALUE 1.40e+00
gtccatgtcagtttcctggagacggggtttgggaaacaccgcccagtgcagtagcgagtgaccccggtggaagctttacttcaacaattagccttgccaaaagtaaggtggaccgaggcgccatccgtcatgggctaattgttcttgctacactctgggtcctcttggctggcacatggccacgctgcacagatgcacagaatgatggaggcaacgtgaccagcacagctgatgttcactgcgccgagggctccag

SEQ ID NO: 22309 - DNA, 150 bp, Homo sapiens
  MAP TO AC022073.13; EXPRESSED IN BONE MARROW, SIGNAL = 0.91; EXPRESSED IN PLACENTA, SIGNAL = 0.69; EXPRESSED IN BRAIN, SIGNAL = 0.69; EXPRESSED IN FETAL LIVER, SIGNAL = 0.7; EXPRESSED IN HELA, SIGNAL = 0.64; EST_HUMAN HIT: BG612511.1, EVALUE 5.00e-79; NT HIT: gi15305555, EVALUE 3.00e-79; SWISSPROT HIT: Q19264, EVALUE 2.00e-12
atagggtttaaaccagcaggaggcatccgcagtgcaaaggattcccttgcttggctctctcttgtaaaggaggagcttggagatgagtggctgaagccagaactctttcgaataggtgccagtactctgctctcggacattgagaggcag

SEQ ID NO: 22310 - DNA, 240 bp, Homo sapiens
  MAP TO AC000395.1; EXPRESSED IN BRAIN, SIGNAL = 0.81; EXPRESSED IN BONE MARROW, SIGNAL = 0.52; EXPRESSED IN PLACENTA, SIGNAL = 0.67; SWISSPROT HIT: Q12967, EVALUE 4.00e-16; EST_HUMAN HIT: BG326520.1, EVALUE 3.00e-57; NT HIT: gi14734843, EVALUE 7.00e-57
cccgagccagcgctgccccttgttgcctccgtggtgcagctgcaccttgcgcagggagatggagtagatgactccgttgatcagctcctcaccgatctcctgcgtggagctctgtgaagacaacgcccggcagccgggcgcggggacgtcaagggcctgcctggccaccgtgcaggggatgcacctgtgtaacctgtttcccagatagggcacagactggcggctgcacagacctacagc

SEQ ID NO: 22311 - DNA, 165 bp, Homo sapiens
  MAP TO AC006131.1; EXPRESSED IN BONE MARROW, SIGNAL = 0.49; EXPRESSED IN FETAL LIVER, SIGNAL = 0.38; EXPRESSED IN BRAIN, SIGNAL = 0.66; NT HIT: gi16194902, EVALUE 3.70e-02; SWISSPROT HIT: Q24206, EVALUE 2.00e+00; EST_HUMAN HIT: BF174069.1, EVALUE 5.40e-02
cccagccaagcagcaggactcacagctctggcccatcccctatctctgggcttcctcagagagggtgtcctacagtggtcagcatgcccgcgtggggacaggagcagcttctctgaacacatgtccccagtttctcaatgcccctgcagagatggaaccttccag

SEQ ID NO: 22312 - DNA, 193 bp, Homo sapiens
  MAP TO AL049861.18; EXPRESSED IN LUNG, SIGNAL = 0.62; EXPRESSED IN BONE MARROW, SIGNAL = 1.8; EXPRESSED IN PLACENTA, SIGNAL = 0.74; SWISSPROT HIT: P27189, EVALUE 3.80e-01; NT HIT: L29215.1, EVALUE 6.80e-01
ctcatcctctgctgattctgtctctctttcacgatgtctgtagtcgtctgttaaagggcccataggcaatgtagggtgggagggagggtgctgcgtaaactgaggaactgagaaatcaatccagataggaaggcaacataaacttttgaccaggtggtcacaggaaggtagaagtaatggaaagtatgcaggt

SEQ ID NO: 22313 - DNA, 111 bp, Homo sapiens
  MAP TO AC006165.1; EXPRESSED IN HEART, SIGNAL =  14; EXPRESSED IN FETAL LIVER, SIGNAL =  13; EXPRESSED IN BRAIN, SIGNAL =  12; EXPRESSED IN BONE MARROW, SIGNAL = 4.6; EXPRESSED IN PLACENTA, SIGNAL =  13; SWISSPROT HIT: P05218, EVALUE 2.00e-15; EST_HUMAN HIT: AI524946.1, EVALUE 4.00e-54; NT HIT: AF147880.1, EVALUE 5.00e-56
caaatacaaagttgtctggtctaaagatctggccaaaaggacctgagcgaacagagtccatggtcccaggttctagatccaccaggatggcacgaggaacatatttgccac

SEQ ID NO: 22314 - DNA, 105 bp, Homo sapiens
  MAP TO AC005570.1; EXPRESSED IN LUNG, SIGNAL = 1.2; EXPRESSED IN BRAIN, SIGNAL = 0.45; EXPRESSED IN BONE MARROW, SIGNAL = 0.77; EXPRESSED IN PLACENTA, SIGNAL = 0.39; NT HIT: D50561.1, EVALUE 1.00e-10; EST_HUMAN HIT: BG565868.1, EVALUE 9.00e-09
atgctcaacacagctgaagagctgcaccgagaccatatcactgcacccatctggaaacacagccaccacaccctttccaaccagcacactaagacccaactgcag

SEQ ID NO: 22315 - DNA, 258 bp, Homo sapiens
  MAP TO AC003004.1; EXPRESSED IN BONE MARROW, SIGNAL = 0.43; EXPRESSED IN HEART, SIGNAL = 1.3; EXPRESSED IN HELA, SIGNAL = 0.71; NT HIT: gi5540099, EVALUE 0.00e+00; SWISSPROT HIT: P49641, EVALUE 1.00e-32
ctgcagctctggcttctgaccccggccccccaaagcaaactggcagtcctgcggggagatggagaagaagctgggccggggctccggtggcaccacccaggagccattgaccgtgtagtagggcagcatggcgggcgggccctctgcgttggctgtcagctccagcacggagtccttgatatggctgataatctcatggttctcctccaaaagctgctccagctgctcaatgcggttctgcagcacagaaatttggct

SEQ ID NO: 22316 - DNA, 211 bp, Homo sapiens
  MAP TO AC009145.4; EXPRESSED IN BRAIN, SIGNAL = 0.83; EXPRESSED IN HELA, SIGNAL = 1.1; EXPRESSED IN BONE MARROW, SIGNAL = 0.63; EXPRESSED IN PLACENTA, SIGNAL = 1.2; NT HIT: gi16163832, EVALUE 3.00e+00; SWISSPROT HIT: Q9ZCQ3, EVALUE 8.30e-01; EST_HUMAN HIT: BE904749.1, EVALUE 2.80e-01
gaagcatggtgatttctataaggtctatcgaggaaatagagagcatgggtatggcatgcataataaaaccgccacattaccagcagggaagcactggacgttgcatgtgcctgctacagagatccataacattccaagaatttccttctggaagcgtgagaatattcatattaatgaaaccggaattagctggcagatggagggctacgac

SEQ ID NO: 22317 - DNA, 129 bp, Homo sapiens
  MAP TO AC010629.5; EXPRESSED IN BRAIN, SIGNAL = 1.2; EXPRESSED IN BONE MARROW, SIGNAL = 1.8; EXPRESSED IN PLACENTA, SIGNAL = 1.4; EXPRESSED IN HEART, SIGNAL = 1.1; SWISSPROT HIT: P38501, EVALUE 1.20e+00; EST_HUMAN HIT: BG913290.1, EVALUE 6.30e-01
ctccttctttgagggaactgtgcctattccactggtgtaattgcacaatgggttcttcttgtcctctgcacaaataaacccgttcactgagacagcatcattgcagcaaagaaagagtttaacacaagc

SEQ ID NO: 22318 - DNA, 175 bp, Homo sapiens
  MAP TO AC002077.1; EXPRESSED IN BONE MARROW, SIGNAL = 0.46; EXPRESSED IN PLACENTA, SIGNAL = 1.3; EXPRESSED IN HEART, SIGNAL = 1.5; EXPRESSED IN BRAIN, SIGNAL = 1.5; EXPRESSED IN HELA, SIGNAL = 1.2; SWISSPROT HIT: P23685, EVALUE 3.30e+00; NT HIT: gi13649019, EVALUE 5.00e-88; EST_HUMAN HIT: AI817707.1, EVALUE 6.00e-73
ctgtcagaacctgtgagttgagcgtgaagtagctgggagtgcagaaggctgaagcctcaggctcgacctgcagctgcaccttctccttcacgatctccacgtggctgaagttgcctgtggtgttgttgaagttggggggcagtgggcagggcacgtggaactttttgtagatgac

SEQ ID NO: 22319 - DNA, 119 bp, Homo sapiens
  MAP TO AC010077.1; EXPRESSED IN BONE MARROW, SIGNAL = 0.87; EXPRESSED IN BRAIN, SIGNAL = 0.48; EXPRESSED IN HELA, SIGNAL = 0.56; NT HIT: gi14756621, EVALUE 8.00e-61; EST_HUMAN HIT: BE813907.1, EVALUE 1.00e-60; SWISSPROT HIT: P26358, EVALUE 2.00e-18
cttcaagagatgggtcatcatcatagattggttttgctgaaccagaaaagaagagttcgatattcttctcgatgaggccggtgtcgatgggacacaggtgaccgtgcttacagtacaca

SEQ ID NO: 22320 - DNA, 134 bp, Homo sapiens
  MAP TO AC008243.6; EXPRESSED IN BRAIN, SIGNAL = 0.73; EXPRESSED IN LUNG, SIGNAL = 0.87; EXPRESSED IN BONE MARROW, SIGNAL = 0.8; SWISSPROT HIT: Q03610, EVALUE 2.60e+00
ctttttggaaaattgaactttgaggtgttctgaatgaaaccataacagcaagggcatgtgacgaaggaagcccgtgttttgatacagtgctcaatcaccatgtctgttgccactccacaagcatgcaatgctac

SEQ ID NO: 22321 - DNA, 488 bp, Homo sapiens
  MAP TO AL121821.5; EXPRESSED IN HELA, SIGNAL = 1.1; EXPRESSED IN BRAIN, SIGNAL = 1.1; EXPRESSED IN BONE MARROW, SIGNAL = 1.1; EXPRESSED IN PLACENTA, SIGNAL = 0.9; SWISSPROT HIT: P52667, EVALUE 1.50e+00; NT HIT: AF180335.1, EVALUE 7.20e+00; EST_HUMAN HIT: AI633640.1, EVALUE 0.00e+00
tctggacaccataaaaaagaaaacaagttattcagcccagcgatgcaaggtcttcgggtttctcattcaacattttatactttgatccctgaggtaacggaaaatcctcatcgcctagactttcattggttcctatcagctcagctggaaagggtggcaagtgggacaatcctgaagaaaaaagagtcacccccacgtcctaaagtacttggaagtgctcgctgggatctgcctgtactccaggttggtgcaactccaccgccctccagtgaagtcccagaagcgatcaagtttaaagtgaaagggggatggaagcattttttctccctatgccttcggagtctgtggcttcagtttgctgcaggttctctccgtggacttctcagaaacctcaactttccacttcgagggacagaaagctacaaggaaaacgctgatggttttggtggagattctcctggacttcagtggtgtcctctggtacatct

SEQ ID NO: 22322 - DNA, 207 bp, Homo sapiens
  MAP TO AC010485.4; EXPRESSED IN BONE MARROW, SIGNAL = 1.9; EXPRESSED IN PLACENTA, SIGNAL = 1.1; SWISSPROT HIT: P57058, EVALUE 1.40e+00; NT HIT: U70065.1, EVALUE 2.90e+00; EST_HUMAN HIT: AA078157.1, EVALUE 6.90e-02
acctcaagctggagggtgcctttgatggtcactctgctgccctgccaagcatgtgcccactccaaactcctctacatccttcaaggctggcttgcatggccccttctctgacctctccacccccagacacagccaggccctcttctctgctgtccctgtccctgggcatttatacctccattactgtccttgtcacactgatgttta

SEQ ID NO: 22323 - DNA, 159 bp, Homo sapiens
  MAP TO AC016543.5; EXPRESSED IN HEART, SIGNAL = 4.7; EXPRESSED IN BRAIN, SIGNAL = 3.9; EXPRESSED IN LUNG, SIGNAL =   3; EXPRESSED IN FETAL LIVER, SIGNAL = 4.7; EXPRESSED IN BONE MARROW, SIGNAL = 3.5; EXPRESSED IN PLACENTA, SIGNAL = 3.7; NT HIT: AL096808.1, EVALUE 2.20e+00; SWISSPROT HIT: Q12947, EVALUE 1.10e+00
caggcagtcccagggccagcaggttctctctgtgtgccagttccccattcccgtccctctgcagggagctgggaggttccgtgaatcccaatgccggctggcccagctggaaacagctgtgcacagcagaaagatgcacagcacactccaggcactgac

SEQ ID NO: 22324 - DNA, 244 bp, Homo sapiens
  MAP TO AC016572.4; EXPRESSED IN FETAL LIVER, SIGNAL = 1.9; EXPRESSED IN LUNG, SIGNAL = 1.1; EXPRESSED IN HELA, SIGNAL = 1.2; EXPRESSED IN BONE MARROW, SIGNAL = 1.2; EXPRESSED IN PLACENTA, SIGNAL = 1.5; NT HIT: AF364606.1, EVALUE 3.50e+00; EST_HUMAN HIT: AA137097.1, EVALUE 5.10e+00; SWISSPROT HIT: P10210, EVALUE 6.00e-01
cctctccctgctcctggtgtccactccagtgcaaagcaaagttgtagccgagtccgggcactgttgtgcccagccaggtatgcatgtgctggaggcagtgctgacatgacagcttctgcctcctcagctccttctggactttgagcaccagtgagcacaggagggaggacgatggctgagggcagctctgcacaggtctgcaggtccaactcagcatgaacagcccaggtaccatggatggcat

SEQ ID NO: 22325 - DNA, 210 bp, Homo sapiens
  MAP TO AL121896.10; EXPRESSED IN FETAL LIVER, SIGNAL = 0.85; EXPRESSED IN BONE MARROW, SIGNAL = 0.91; NT HIT: gi14786693, EVALUE 1.00e-106; EST_HUMAN HIT: AW850810.1, EVALUE 1.00e-106; SWISSPROT HIT: P39720, EVALUE 3.20e+00
ctttgctagtttgtaccagagttcatagagatagcagaaaactctggcatggatcttgggtgactggatgttattcacatctccgaggatccccaagacccttcgccataacacagcagcagagtctgggtgccaaccagtgaggctccccccggcgattatactacagtcatctgtgaggcactcgctgctatctatgcagaaaaacat

SEQ ID NO: 22326 - DNA, 207 bp, Homo sapiens
  MAP TO AL117187.3; EXPRESSED IN LUNG, SIGNAL = 0.66; EXPRESSED IN BONE MARROW, SIGNAL = 0.85; EXPRESSED IN PLACENTA, SIGNAL = 0.79; NT HIT: AF394239.1, EVALUE 1.90e-01; SWISSPROT HIT: Q15319, EVALUE 3.70e-01
ctaggacttggaagtcttactagaacatggtagctccgcaccccgcatagccacgtggctggggtgtgagagcaaagaggcaggctgcaagacaagggagtttgaacacgttgtcgttgaaagaattaaaccaggtgtgtgcctgagcacctttagcccactgcctggcttcagaaatgcaagcttgcgtgccgtcccacccaggcc

SEQ ID NO: 22327 - DNA, 110 bp, Homo sapiens
  MAP TO AC016601.5; EXPRESSED IN BRAIN, SIGNAL = 1.9; EXPRESSED IN LUNG, SIGNAL = 1.5; EXPRESSED IN HELA, SIGNAL = 1.6; EXPRESSED IN BONE MARROW, SIGNAL = 1.8; EXPRESSED IN PLACENTA, SIGNAL = 2.1; EST_HUMAN HIT: AA669592.1, EVALUE 3.00e-05; NT HIT: AF324890.1, EVALUE 4.00e-04
taagaaataacagcatctgttcctgacgatggctggactgctgatctagcttggggtcagcaaacttggcctgagggccaaatccagcccactccctgttttcatatggc

SEQ ID NO: 22328 - DNA, 169 bp, Homo sapiens
  MAP TO AC000077.2; EXPRESSED IN PLACENTA, SIGNAL = 0.43; EXPRESSED IN FETAL LIVER, SIGNAL = 0.62; EXPRESSED IN HELA, SIGNAL = 0.67; EXPRESSED IN BONE MARROW, SIGNAL = 0.49; NT HIT: AF261899.1, EVALUE 9.00e-03; EST_HUMAN HIT: AI765544.1, EVALUE 1.40e-02; SWISSPROT HIT: P11369, EVALUE 6.00e-04
ttactcagcagaatgtcgtttcatccatattgtggcctgtgtcagaagttccttcctgtcaaaggcggaatgatactccatggcaggtttacaccacattttgtttttccactcatccgtggagagacactgggtgggtccctccttttggctgttgagaatgatgctg

SEQ ID NO: 22329 - DNA, 119 bp, Homo sapiens
  MAP TO AC012082.6; EXPRESSED IN BONE MARROW, SIGNAL = 1.2; EXPRESSED IN PLACENTA, SIGNAL = 2.1; SWISSPROT HIT: Q91009, EVALUE 4.60e+00; NT HIT: AL163303.2, EVALUE 7.00e-12; EST_HUMAN HIT: BF922593.1, EVALUE 6.00e-07
ggcacacttgtgcaaggggtgtgtttccaaagccttggacagctctgcctctgtggctttccagggttcagtccccacagctgctctcaagggctagtgttcagggcctgcagcttttc

SEQ ID NO: 22330 - DNA, 195 bp, Homo sapiens
  MAP TO AC010613.5; EXPRESSED IN FETAL LIVER, SIGNAL = 0.63; EXPRESSED IN BONE MARROW, SIGNAL =   1; EXPRESSED IN BRAIN, SIGNAL = 0.68; EST_HUMAN HIT: AA902848.1, EVALUE 2.60e-01; SWISSPROT HIT: Q9Y8G8, EVALUE 5.60e+00
ttgtctgtgttttggcctcttgggccatagaaaatgcagtacctttccaaatatgtttgtttagaagtttgatgatgaaatccaagtctaagtttttccttctcagagcctccaaccattccttactggaaaggctttccatatcctcaaccacctgaacatgctctataaatatgacactattattcctattac

SEQ ID NO: 22331 - DNA, 114 bp, Homo sapiens
  MAP TO AC010219.4; EXPRESSED IN BONE MARROW, SIGNAL = 1.1; EXPRESSED IN BRAIN, SIGNAL = 1.1; EXPRESSED IN PLACENTA, SIGNAL = 1.1; EXPRESSED IN HEART, SIGNAL = 1.5; EXPRESSED IN FETAL LIVER, SIGNAL = 1.1; EXPRESSED IN HELA, SIGNAL =   1; NT HIT: M13792.1, EVALUE 2.40e-02; EST_HUMAN HIT: AL137953.1, EVALUE 3.50e-02
ctctgggaacctcagtttcctcatctgtaaattggaatttgatggcaccagtttcccaggagtgctgtggtgactgtaaccaacgccgtacttgtaatgcaccgagtaccaggc

SEQ ID NO: 22332 - DNA, 103 bp, Homo sapiens
  MAP TO AC010209.13; EXPRESSED IN HELA, SIGNAL = 1.2; EXPRESSED IN BRAIN, SIGNAL = 1.1; EXPRESSED IN LUNG, SIGNAL = 1.5; EXPRESSED IN FETAL LIVER, SIGNAL = 1.4; EXPRESSED IN BONE MARROW, SIGNAL = 1.1
ctgcccccaaattgtacaagcttctggatccaccaagccaggattcagccctcagcaggacagagagagtaccctggtcgtggagctagaaggcttccaggag

SEQ ID NO: 22333 - DNA, 186 bp, Homo sapiens
  MAP TO AL118557.2; EXPRESSED IN LUNG, SIGNAL = 1.7; EXPRESSED IN BONE MARROW, SIGNAL = 1.8; EXPRESSED IN PLACENTA, SIGNAL = 1.8; EXPRESSED IN HEART, SIGNAL = 1.8; EXPRESSED IN BRAIN, SIGNAL = 1.4; EXPRESSED IN FETAL LIVER, SIGNAL = 1.7; NT HIT: gi16159560, EVALUE 2.00e-50; EST_HUMAN HIT: BG400814.1, EVALUE 1.00e-64; SWISSPROT HIT: P10267, EVALUE 8.00e-06
atgaatgtacttgttaaggaagattgcattgcagaacaggcagaggtgctgcgcaatgattcctatggaatcattattgattggccccctaaggggatgtttagcttgaattgcacctctcagtcggcatgccacagccacaccgtgttcagctggtctgaacaaaatggtcagatggtagaaatg

SEQ ID NO: 22334 - DNA, 85 bp, Homo sapiens
  MAP TO AF015725.1; EXPRESSED IN HELA, SIGNAL = 0.5; EXPRESSED IN FETAL LIVER, SIGNAL = 1.3; EXPRESSED IN BONE MARROW, SIGNAL = 1.3; EXPRESSED IN PLACENTA, SIGNAL = 1.1; EXPRESSED IN HEART, SIGNAL = 1.1; EST_HUMAN HIT: BG753703.1, EVALUE 1.50e+00; NT HIT: AL163268.2, EVALUE 1.00e-40
atgggacatgagagagctagggaggatcagcaagaggcaggtaaagaaatgatagaaattaaggtttctggcattggcgctcttg

SEQ ID NO: 22335 - DNA, 137 bp, Homo sapiens
  MAP TO AC006181.1; EXPRESSED IN PLACENTA, SIGNAL = 2.1; EXPRESSED IN HEART, SIGNAL = 1.5; EXPRESSED IN BRAIN, SIGNAL = 2.1; EXPRESSED IN BONE MARROW, SIGNAL = 1.4; NT HIT: L08861.1, EVALUE 2.00e-71; EST_HUMAN HIT: AL039459.2, EVALUE 3.00e-71
tcactcaaaggcggtaatacggttatccacagaatcaggggataacgcaggaaagaacatgtgagcaaaaggccagcaaaaggccaggaaccgtaaaaaggccgcgttgctggcgtttttccataggctccgccccc

SEQ ID NO: 22336 - DNA, 216 bp, Homo sapiens
  MAP TO AL118558.2; EXPRESSED IN BONE MARROW, SIGNAL = 1.5; EXPRESSED IN PLACENTA, SIGNAL = 2.6; EXPRESSED IN BRAIN, SIGNAL =   2; EXPRESSED IN FETAL LIVER, SIGNAL = 1.7; EXPRESSED IN LUNG, SIGNAL = 1.9; NT HIT: gi15300984, EVALUE 1.00e-118; EST_HUMAN HIT: BG760443.1, EVALUE 1.00e-118; SWISSPROT HIT: Q9JHU4, EVALUE 5.00e-34
cttaactatgcagacatgttaaagagagtggagcccctacgcaatgagctgcagaagctggaagatgacgccaaggacaaccagcagaaggccaacgaggtggagcagatgatccgagacctggaagccagcatcgcccgctacaaggaggaatacgccgtcctgatctcagaggcccaggccatcaaggcagacctggcagctgtcgaggcaaaa

SEQ ID NO: 22337 - DNA, 211 bp, Homo sapiens
  MAP TO AC010379.4; EXPRESSED IN BONE MARROW, SIGNAL = 1.1; EXPRESSED IN PLACENTA, SIGNAL = 0.69; EXPRESSED IN BRAIN, SIGNAL =   1; EXPRESSED IN FETAL LIVER, SIGNAL = 0.76; EXPRESSED IN LUNG, SIGNAL = 0.51; EST_HUMAN HIT: BG288680.1, EVALUE 1.00e-06; SWISSPROT HIT: P75610, EVALUE 1.40e+00; NT HIT: AL163227.2, EVALUE 3.00e-09
atggccagtgcagtaggaatgagggagaaagaagatctgggtaaaggacaagtaaggcaaggggatttcttccagagtaagaatactgtcagcaggagagaggcagagcaagatggcagaatagaaagctccactgatcatccccacagcaaggacaccaagttaacaactatctatgtgaaaaatcaccttcataagaaccaaaaatcag

SEQ ID NO: 22338 - DNA, 234 bp, Homo sapiens
  MAP TO AF205588.1; EXPRESSED IN BONE MARROW, SIGNAL = 0.79; EXPRESSED IN LUNG, SIGNAL = 0.9; EXPRESSED IN HELA, SIGNAL = 0.51; NT HIT: AB058702.1, EVALUE 2.00e-11; EST_HUMAN HIT: AW971819.1, EVALUE 7.00e-24; SWISSPROT HIT: O67178, EVALUE 9.40e-01
atgaaagactggaaggatgacaccactggcactgaagatggggtgactgttacagaaaaagccatagaagccattgaccccaaaacaataaattccttctggagaaaactatatccggatgttgtatatgacttcacagaatttatgacagagccaatcaaggaaatcataaaagagattgtggatatggcaaaaagaaaaaaaaaaaaaaaggtggtggaagcaggagagtaa

SEQ ID NO: 22339 - DNA, 215 bp, Homo sapiens
  MAP TO AJ012008.1; EXPRESSED IN BRAIN, SIGNAL = 2.5; EXPRESSED IN BONE MARROW, SIGNAL = 2.5; EXPRESSED IN PLACENTA, SIGNAL = 4.4; EXPRESSED IN HEART, SIGNAL = 2.6; NT HIT: AJ012008.1, EVALUE 1.00e-118; EST_HUMAN HIT: BG740000.1, EVALUE 1.00e-117; SWISSPROT HIT: O95867, EVALUE 2.00e-31
gtaagatgtgggttttctccaatctgcgctgtggcacaccagaagagccctgtcaggaggccttcaaccaaaccaaccgtaagctgggtctgacatataacaccacctgctgcaacaaggacaactgcaacagcgcaggaccccggcccactccagccctgggccttgtcttccttacctccttggctggccttggcctctggctgctgcactga

SEQ ID NO: 22340 - DNA, 141 bp, Homo sapiens
  MAP TO AC002991.1; EXPRESSED IN BONE MARROW, SIGNAL = 0.53; EXPRESSED IN PLACENTA, SIGNAL = 0.94; EXPRESSED IN HEART, SIGNAL = 1.2; EXPRESSED IN FETAL LIVER, SIGNAL = 1.1; SWISSPROT HIT: P34492, EVALUE 1.20e-02; NT HIT: gi14778138, EVALUE 7.00e-74; EST_HUMAN HIT: BF312155.1, EVALUE 1.00e-73
cttgagcttgtatgtcctcagctcatagatgttgggacccattctgggctgtggctcattccagaagctgaactcgaggagcagctggtttctcctggacagcagcatctggctccgctcccttcggaactccaggtactc

SEQ ID NO: 22341 - DNA, 200 bp, Homo sapiens
  MAP TO AC004189.1; EXPRESSED IN BONE MARROW, SIGNAL = 0.51; EXPRESSED IN PLACENTA, SIGNAL = 0.84; NT HIT: gi5453845, EVALUE 1.00e-70; SWISSPROT HIT: P38724, EVALUE 4.90e-01; EST_HUMAN HIT: T96786.1, EVALUE 8.00e-88
ttagcacagagagtagcaccttccgccaatttctacttcaaagatatcggactgaatatgacattaaagatcaagctgcaaaaggggatgaagttactccaaaacaatttcatgcatttgtaccctttctgggagagctttatcataacctggagatcagaggaacaaatggacaggttacaagggcagatattcttcag

SEQ ID NO: 22342 - DNA, 207 bp, Homo sapiens
  MAP TO AC016603.5; EXPRESSED IN BRAIN, SIGNAL = 1.2; EXPRESSED IN HELA, SIGNAL = 1.2; EXPRESSED IN BONE MARROW, SIGNAL = 0.93; SWISSPROT HIT: O75791, EVALUE 8.30e-01; EST_HUMAN HIT: BG390300.1, EVALUE 4.00e-62; NT HIT: gi8923908, EVALUE 1.00e-113
ctcttgttttgccagttcatggccttgtctaggagaacaatggggctgtgtatatggaggctggtgggccactttcagcatcaagtaatcaattagttgttctctagagggatgccttgccacagatgcctgaggggggtgatgtatttgactataatttgcctgaggcctgagaggctggcccatctgtccattactcaaaggcat

SEQ ID NO: 22343 - DNA, 210 bp, Homo sapiens
  MAP TO AC016627.5; EXPRESSED IN LUNG, SIGNAL = 3.6; EXPRESSED IN BRAIN, SIGNAL = 2.2; EXPRESSED IN BONE MARROW, SIGNAL =   2; EXPRESSED IN PLACENTA, SIGNAL = 2.3; NT HIT: gi7662075, EVALUE 1.00e-102; SWISSPROT HIT: O15063, EVALUE 1.00e-28; EST_HUMAN HIT: BF373925.1, EVALUE 9.00e-60
ctcagcagccccccgccaggaccgcacagcttcctctacttcaggtgtgtggcccatgccagataagccgccgccactgccgctgttctttttttctggcacgatgacctcagcaaagcaagagtgagccaccggctggaccttctgtaacgcatgagtcaaaaactggaaatggacttgcaccacagtcaggaaacatcgccccaacac

SEQ ID NO: 22344 - DNA, 325 bp, Homo sapiens
  MAP TO AC000068.2; EXPRESSED IN HELA, SIGNAL = 1.8; EXPRESSED IN BONE MARROW, SIGNAL = 0.97; EXPRESSED IN PLACENTA, SIGNAL = 1.2; NT HIT: AJ295637.1, EVALUE 0.00e+00; EST_HUMAN HIT: BG491858.1, EVALUE 0.00e+00; SWISSPROT HIT: P11414, EVALUE 4.60e-01
agagcggcctcaggtggagctcacctttgaggagactgagaggagagctctgcttctgaagaagtggtccttgtacaagcagcaagagcgtaagatggagagggacaccatcagggctatgctagaagcccagcaggaagctctggaggaactgcaactggaatccccgaagctccatgctgaggccatcaagcgggatcctaacctgttcccctttgagaaggaagggccacattacacaccaccgatccctaactaccaaccccctgaaggcaggtacaatgacatcaccaaggtgtacacacaagtggagtttaagagatag

SEQ ID NO: 22345 - DNA, 237 bp, Homo sapiens
  MAP TO AF207953.2; EXPRESSED IN FETAL LIVER, SIGNAL = 1.1; EXPRESSED IN BONE MARROW, SIGNAL = 0.55; NT HIT: gi15300085, EVALUE 0.00e+00; EST_HUMAN HIT: AW864523.1, EVALUE 3.00e-32; SWISSPROT HIT: Q14541, EVALUE 3.00e-36
atgcaaaagggctaagcgatccagtaaaaattaagaacatgaggttccaagtgcagatcggtttggaggactacatcaatgatcggcagtatgactcccgggggaggtttggagagttgcttctgctcctgcccacactgcagagcatcacgtggcaaatgattgagcaaatacagtttgttaaactttttgggatggttaaaattgacaatctacttcaggaaatgctattaggtg

SEQ ID NO: 22346 - DNA, 229 bp, Homo sapiens
  MAP TO AC016940.7; EXPRESSED IN HEART, SIGNAL =   1; EXPRESSED IN BRAIN, SIGNAL = 0.87; EXPRESSED IN HELA, SIGNAL = 0.78; EXPRESSED IN LUNG, SIGNAL = 0.91; EXPRESSED IN BONE MARROW, SIGNAL = 0.63; EST_HUMAN HIT: BE733495.1, EVALUE 2.00e-82; SWISSPROT HIT: Q82484, EVALUE 5.80e+00
cttggggccccaccatcaagagctcagcactattcttgattgctgcatagctacaaagaagctgcagcgagtcagcactgagaccgctttccacagggccactggtcctcataccatagtcagctgtgctctgcttgggtcgcctgaccatgatgattttattcataatgcagcaacgcagaggggccatctcaggggcttttggagcatggaagagaagaccaaccat

SEQ ID NO: 22347 - DNA, 177 bp, Homo sapiens
  MAP TO AC005276.1; EXPRESSED IN BRAIN, SIGNAL = 3.8; EXPRESSED IN LUNG, SIGNAL = 4.5; EXPRESSED IN FETAL LIVER, SIGNAL = 4.3; EXPRESSED IN BONE MARROW, SIGNAL = 2.3; NT HIT: D10083.1, EVALUE 2.00e-62; EST_HUMAN HIT: BG929453.1, EVALUE 3.00e-59; SWISSPROT HIT: P03356, EVALUE 1.00e-13
tctgataatggaccagcctttactagtcaaatcacgcaagcagtttctcaggctcttggtattcagtggaaccttcatatcccttacagtcctcagtcttcaggaaaggtagaacggactaatggtcctttaaaaacacacctcaccaagctcagccaccaatttaaaaaggactag

SEQ ID NO: 22348 - DNA, 366 bp, Homo sapiens
  MAP TO AC005791.1; EXPRESSED IN BRAIN, SIGNAL = 2.5; EXPRESSED IN BONE MARROW, SIGNAL = 3.2; EXPRESSED IN HEART, SIGNAL = 2.8; EXPRESSED IN FETAL LIVER, SIGNAL = 1.7; NT HIT: gi14764585, EVALUE 0.00e+00; EST_HUMAN HIT: AL540899.1, EVALUE 0.00e+00; SWISSPROT HIT: P11465, EVALUE 1.00e-67
ggtataaggtgaaggtgaaatatccagttactcctctagtcccatcacctcgctttatgatgtgtaaggtgtaggatcctgcgtcctcccgggtgacattctggatcagcagggatgcattggaatatgctgtttctcgtccactatatgcaggcccatatataattatttgaccgtctactacatatgatgtaatgtaatggtagaggtccctgatttgccctttgtaccagatgtagccagtaagattctggggcaaattgtggacaagtagaagaacatccttcccctcggaaacttttggtggctgggcttcaatcgtgacttgggcagtggtgggcaggttccagaagtttaaaagtgatg

SEQ ID NO: 22349 - DNA, 172 bp, Homo sapiens
  MAP TO AL022339.1; EXPRESSED IN PLACENTA, SIGNAL = 9.4; EXPRESSED IN FETAL LIVER, SIGNAL =   5; EXPRESSED IN BONE MARROW, SIGNAL = 3.5; NT HIT: AF319536.1, EVALUE 3.80e-02; SWISSPROT HIT: P28584, EVALUE 6.60e-01
gggtatgtgaccaaggcgtgtttgccgtgagagcagaacaagagttgacatttgccaaagattccttccagaaggctgtgcaatgaggaagcattcccggggctactgtgggctgatgagctgggctgtgtccacaggagcgatagccccactgggcagcagtgaggatggc

SEQ ID NO: 22350 - DNA, 210 bp, Homo sapiens
  MAP TO AL121784.2; EXPRESSED IN BRAIN, SIGNAL = 0.68; EXPRESSED IN FETAL LIVER, SIGNAL = 0.97; EXPRESSED IN HELA, SIGNAL = 0.78; EXPRESSED IN BONE MARROW, SIGNAL = 1.1; EXPRESSED IN PLACENTA, SIGNAL = 0.76; SWISSPROT HIT: Q09860, EVALUE 8.30e-01; NT HIT: gi16191240, EVALUE 1.00e-88; EST_HUMAN HIT: BF091229.1, EVALUE 8.00e-88
agaagaagagcttctggcctggtcaggctccaagccaggtcgctcaccctgggtagccggccggactgggcggccatccgagtgctcaccagcaatgacggcaaagtcagcctccacgtcgcaggcgatgacatccccgtgccgtatgtgcctcctcacagcctccttgactttacccatcccaagctcgttgcctccatcaccgactcc

SEQ ID NO: 22351 - DNA, 129 bp, Homo sapiens
  MAP TO AF004877.1; EXPRESSED IN BONE MARROW, SIGNAL = 0.86; EXPRESSED IN PLACENTA, SIGNAL = 0.75; EXPRESSED IN BRAIN, SIGNAL = 0.65; EST_HUMAN HIT: AW024045.1, EVALUE 1.00e-66; NT HIT: AB004317.1, EVALUE 1.00e-66
gatcagcttctatgaagcagaagatttcactgagctagagaatcttttcactcctttggaattatttgcaaaagcacttattgttaacacattcttagctcatgagttgaatttgaggcataagtacag

SEQ ID NO: 22352 - DNA, 131 bp, Homo sapiens
  MAP TO AF196972.1; EXPRESSED IN BRAIN, SIGNAL = 1.8; EXPRESSED IN BONE MARROW, SIGNAL = 1.9; EXPRESSED IN PLACENTA, SIGNAL =   2; SWISSPROT HIT: Q04727, EVALUE 5.20e-01; NT HIT: gi14759560, EVALUE 6.00e-68; EST_HUMAN HIT: AA531103.1, EVALUE 9.00e-68
gggtgacaacttcacagtgtgcatggaaaccatcacagcttgcctgtggggaccactcagcctgtgggtggtgatcgcctttctccgccagcatcccctccgcttcattctacagcttgtggtctctgtgg

SEQ ID NO: 22353 - DNA, 92 bp, Homo sapiens
  MAP TO AF241731.1; EXPRESSED IN BONE MARROW, SIGNAL = 1.4; EXPRESSED IN PLACENTA, SIGNAL = 0.93; EXPRESSED IN BRAIN, SIGNAL = 1.3; EXPRESSED IN LUNG, SIGNAL =   1; NT HIT: Y16791.1, EVALUE 1.10e+00; EST_HUMAN HIT: AW866741.1, EVALUE 1.70e+00
ctctgagagacgttgggtagaagttctctatttcggctctcccacttggcaaatgaggactggtgatgccaatctcatctagggacttcagt

SEQ ID NO: 22354 - DNA, 266 bp, Homo sapiens
  MAP TO AC020728.4; EXPRESSED IN LUNG, SIGNAL = 1.7; EXPRESSED IN BRAIN, SIGNAL = 1.1; EXPRESSED IN BONE MARROW, SIGNAL =   1; EST_HUMAN HIT: BE503853.1, EVALUE 0.00e+00; SWISSPROT HIT: P09914, EVALUE 3.20e-01; NT HIT: gi14721272, EVALUE 0.00e+00
cttctcctggtataagagccatccatgagtttgcaaatctcgatttactgaggatgggtgtacttgtgctttgccttgggccgtctccacaatgcaagccaatttttctgtaacatccactgactttgtatagattatcttccccacattgtcatacagtccagccaccagtacagctttaagaagggcaatttcttggaatgagagggtctgtgaggctctgtttccttcccagctggtagaagttgtggaagatgaaaatcctg

SEQ ID NO: 22355 - DNA, 267 bp, Homo sapiens
  MAP TO AL121896.10; EXPRESSED IN HELA, SIGNAL = 0.44; EXPRESSED IN BONE MARROW, SIGNAL = 0.53; EXPRESSED IN PLACENTA, SIGNAL = 0.6; SWISSPROT HIT: P94287, EVALUE 5.50e-01; EST_HUMAN HIT: BI021388.1, EVALUE 0.00e+00; NT HIT: gi14786693, EVALUE 0.00e+00
atccccctaccggtccttctgtgggtgtctgaaggtaggagatgagggtgctatcattaaatacaaacagctgcaggtttggacttctgaacacctcaaaggacagctcggagccttccacatgggcattgtcatggttctcgctgacaaggctgtgcagtatggcagggcccccactgagggggtagtgccccaggtggttcaccaggtgggccatcaccattcgagcagtcaaagggatcaactccaaacttcttctcttcttct

SEQ ID NO: 22356 - DNA, 271 bp, Homo sapiens
  MAP TO AC027329.3; EXPRESSED IN BONE MARROW, SIGNAL = 1.2; EXPRESSED IN PLACENTA, SIGNAL = 2.6; EXPRESSED IN FETAL LIVER, SIGNAL =   3; EXPRESSED IN BRAIN, SIGNAL = 2.1; SWISSPROT HIT: Q01440, EVALUE 7.40e-01; EST_HUMAN HIT: BG574805.1, EVALUE 1.40e+00; NT HIT: D64002.1, EVALUE 3.90e+00
ctgtctgccctgagctgggccagtgggaaggggagatgcctaactcgacttctccaagggtggctggtgggacctgagatagcacactacatgccccatgtctctggactgggtccccagccagggctttgtagtgaggggtggaagtagggtggaggacgtctactctctctggcaagtatacctgtggcttggactgctccagggattggttctgtgttttggggagttctctcttcttgcttccaaccttcctgagtttgatatgcat

SEQ ID NO: 22357 - DNA, 291 bp, Homo sapiens
  MAP TO AF045449.1; EXPRESSED IN FETAL LIVER, SIGNAL = 4.4; EXPRESSED IN BRAIN, SIGNAL =   3; EXPRESSED IN HELA, SIGNAL = 4.7; EXPRESSED IN BONE MARROW, SIGNAL = 2.9; EXPRESSED IN PLACENTA, SIGNAL = 3.3; SWISSPROT HIT: Q10084, EVALUE 1.10e+00; NT HIT: AL163281.2, EVALUE 0.00e+00
ctattcagattcctctcccaccaccttcacttcagaggggacacattccttccagggactgacatggcggcttctcagtctcagcaggggagagacgggttttccttggcctcggtaggcattggcctcctctgcagtgagtgttgtcccattggcacttattggttccactggccagtccaccctacccaaggacagtgtcccctcctccattgtctgctgccatatttgattcctctctactctattatgggtcagcaggggcgggggcccactgtgagccttcctcat

SEQ ID NO: 22358 - DNA, 96 bp, Homo sapiens
  MAP TO AC005328.1; EXPRESSED IN BONE MARROW, SIGNAL = 0.79; EST_HUMAN HIT: BG761947.1, EVALUE 5.00e-47; SWISSPROT HIT: Q03368, EVALUE 7.00e-07; NT HIT: gi14764682, EVALUE 3.00e-47
tcaacacttggccagcgtcgccttcatctcttctaacaagttgctcagtagcgtggagtcactgcacttcccgtcgactgagacagagttctcacc

SEQ ID NO: 22359 - DNA, 156 bp, Homo sapiens
  MAP TO AC006181.1; EXPRESSED IN HEART, SIGNAL = 1.4; EXPRESSED IN BRAIN, SIGNAL = 1.8; EXPRESSED IN BONE MARROW, SIGNAL = 1.8; SWISSPROT HIT: P14723, EVALUE 1.00e-01; NT HIT: U07978.1, EVALUE 9.00e-03; EST_HUMAN HIT: BF767564.1, EVALUE 2.00e-01
atggctcagcatcccgaaccagagcaggacggacccacggagattccagggagggcggggggagaggatcacacagaaccaggcactgggagggagctggtcgcggtgatggcactgccctcagcaggcgccgggattcggtactcccattgcaag

SEQ ID NO: 22360 - DNA, 279 bp, Homo sapiens
  MAP TO AC004151.1; EXPRESSED IN BONE MARROW, SIGNAL = 1.9; EXPRESSED IN PLACENTA, SIGNAL = 1.1; EST_HUMAN HIT: AI955072.1, EVALUE 1.00e-104; SWISSPROT HIT: Q61001, EVALUE 1.80e+00; NT HIT: gi14765643, EVALUE 1.00e-104
gccacgatctcctactaccagatgatgcatatgcagacggcgccgctgcccgtgcacttccagatgctgtgtgagagcagcaagctgtatgacccaggccagcagtacgcctcccacgtgcgccagctgcagcgggaccaggagcccgatgtgcactacgactttgagccccacgtctccgccaacgcctggtaccgccacccagctgccctgtccccggcgcacaaggccctgcctgggagccgggcttccctctgtcgggggcatgaagatgaagct

SEQ ID NO: 22361 - DNA, 126 bp, Homo sapiens
  MAP TO AL109825.23; EXPRESSED IN HELA, SIGNAL = 0.81; EXPRESSED IN BONE MARROW, SIGNAL = 0.74; EXPRESSED IN PLACENTA, SIGNAL = 0.84; EST_HUMAN HIT: BF133081.1, EVALUE 1.60e-01; SWISSPROT HIT: P24712, EVALUE 2.70e+00
ctctcgctggaacacagactggtgccccacttcgtgcttgggatgtccttcctctgtttcttggctgagtcgaacttgtgctgcttcctttctccttaaatatcctttcctctggacaggatgttc

SEQ ID NO: 22362 - DNA, 357 bp, Homo sapiens
  MAP TO AF178030.1; EXPRESSED IN PLACENTA, SIGNAL = 1.8; EXPRESSED IN HEART, SIGNAL = 1.5; EXPRESSED IN BRAIN, SIGNAL = 1.1; EXPRESSED IN LUNG, SIGNAL = 1.3; EXPRESSED IN FETAL LIVER, SIGNAL =   2; EXPRESSED IN BONE MARROW, SIGNAL = 1.2; EST_HUMAN HIT: AL521707.1, EVALUE 3.00e-82; SWISSPROT HIT: Q9V4U7, EVALUE 7.20e-01; NT HIT: AJ271736.1, EVALUE 3.00e-60
gcatgcaatgccacttgatagcattttacccacgctagaacttctttcaaaattggagtcaatcatctccaactttaatgctgctttatcaactaagttgatggaatattctaaatcttttgtcattttgacaatgttcacagcatttccaccaggaatagcttccatctcaagaaaccactttctttgcttatctttaagaaaaagcaacacctcatccattccagttttatcaggagattgcagcaattcagtcatatcttcaggctccacttctaattctagttctcttgctatttctaccacatctgcacttacttcctccactaaagtcttgaagccttccaagtcatccat

SEQ ID NO: 22363 - DNA, 429 bp, Homo sapiens
  MAP TO AC004189.1; EXPRESSED IN BONE MARROW, SIGNAL =   1; EXPRESSED IN PLACENTA, SIGNAL = 0.9; EXPRESSED IN BRAIN, SIGNAL = 0.78; EST_HUMAN HIT: AI248753.1, EVALUE 0.00e+00; SWISSPROT HIT: P19474, EVALUE 3.00e-26; NT HIT: gi14761244, EVALUE 0.00e+00
atggcctctgctgcctctgtgaccagcctggcagatgaagtcaactgccccatctgtcagggtaccctgagggagccggtcactatcgactgcggccacaacttctgccgggcctgccttacccgctactgtgagataccaggcccagacctggaggagtcccctacttgcccactctgcaaagaacccttccgtcctgggagcttccggcccaactggcagctggctaacgtggtggagaacattgagcgcctccagctggtgtccacactgggtttgggagaggaggatgtctgccaagagcacggagagaagatctacttcttctgtgaggatgatgagatgcagttgtgcgtggtgtgccgggaggctggggagcacgctacccacaccatgcgcttcctggaggatgcagcggctccctatagg

SEQ ID NO: 22364 - DNA, 202 bp, Homo sapiens
  MAP TO AC011537.6; EXPRESSED IN BONE MARROW, SIGNAL = 2.1; EST_HUMAN HIT: AW362519.1, EVALUE 4.00e-68; SWISSPROT HIT: P78329, EVALUE 2.00e-25; NT HIT: AY008841.1, EVALUE 5.00e-79
gaggcccagtgaatatattgctaccatcttggagctcagtgcccttgtagaaaaaagaaaccagcatatcctccagcacatggactttctgtattacctctcccatgacgggtggcgcttccgcagggcctgccgcctggtgcacgacttcacagatgccgtcatccaggagcggcgccatacccttcccactcagggtatt

SEQ ID NO: 22365 - DNA, 293 bp, Homo sapiens
  MAP TO AC003963.1; EXPRESSED IN BONE MARROW, SIGNAL = 0.8; EXPRESSED IN PLACENTA, SIGNAL = 0.83; EXPRESSED IN HEART, SIGNAL = 0.92; EXPRESSED IN HELA, SIGNAL = 0.86; EST_HUMAN HIT: BG822015.1, EVALUE 5.00e-87; SWISSPROT HIT: Q99558, EVALUE 3.00e-30; NT HIT: gi13654197, EVALUE 3.00e-87
gggactacatccctggcacagagacccacatggctccggaggtggtgctgggcaggagctgcgacgccaaggtggatgtctggagcagctgctgtatgatgctgcacatgctcaacggctgccacccctggactcagttcttccgagggccgctctgcctcaaggtcggtgacggcacccagcatggccaacagggggagctgcagggccctggggcccaggctgcaggctggaggggctgctctgcggtggcagatggagcaaggggaggcctggtcatccatgtgggatcc

SEQ ID NO: 22366 - DNA, 91 bp, Homo sapiens
  MAP TO AC005263.1; EXPRESSED IN FETAL LIVER, SIGNAL =   2; EXPRESSED IN LUNG, SIGNAL = 3.8; EXPRESSED IN BONE MARROW, SIGNAL = 2.6; EXPRESSED IN PLACENTA, SIGNAL = 4.6; NT HIT: gi14765802, EVALUE 3.00e-44; EST_HUMAN HIT: BF091741.1, EVALUE 4.00e-44; SWISSPROT HIT: P78314, EVALUE 4.70e+00
ctggcccgacgcagagcctccatccactcctgacactgctcctcgctgctgcactcaaagtgatacttcctctcagggtcctcaatgaagc

SEQ ID NO: 22367 - DNA, 258 bp, Homo sapiens
  MAP TO AC011718.2; EXPRESSED IN BONE MARROW, SIGNAL = 0.63; EXPRESSED IN PLACENTA, SIGNAL = 0.59; EXPRESSED IN BRAIN, SIGNAL = 0.49; NT HIT: U07659.1, EVALUE 9.30e-01; EST_HUMAN HIT: BI918659.1, EVALUE 1.40e+00; SWISSPROT HIT: P13983, EVALUE 3.00e-01
tcagacagcatcacacactccgcttttctctaccagggaggcaggtggggaaggatagcgatgggaaggcaggcggagctcagaatgtggaaggggatccagtaaggcttggaagtttgcacctgatctggtgggtggtgaggagcccttgaaggggcaaggaggcgaggagcactcagctgtgttcttacactgatctgccactggggttagagacaaacgtggtgggaatggaaagccacgcacagtcactagcgc

SEQ ID NO: 22368 - DNA, 300 bp, Homo sapiens
  MAP TO AC026743.3; EXPRESSED IN BONE MARROW, SIGNAL = 0.56; EXPRESSED IN PLACENTA, SIGNAL = 1.8; EXPRESSED IN HEART, SIGNAL = 2.8; EXPRESSED IN BRAIN, SIGNAL = 1.7; EXPRESSED IN FETAL LIVER, SIGNAL = 2.6; EST_HUMAN HIT: BF998421.1, EVALUE 1.00e-01; SWISSPROT HIT: P17139, EVALUE 1.20e+00
ggtgttctacaagttcaaggaccagaaggagacagtgttgtgggagcagaaggagaacctgggacaaaaccagatgatgaggccggacgggaggtgggcctggtccccatgctaagtgggatgggaagtcctgccaatgaagtcacacagtgtcaggtatttgggatttgccttgtttcacacaaaattatgtctatgagctccatccaggttgttgcacttaatagcgggtcattcatttttattgctatcttgctccattgtgtgacaccatcacagttgatcaattctactgtttga

SEQ ID NO: 22369 - DNA, 200 bp, Homo sapiens
  MAP TO AC016940.7; EXPRESSED IN BONE MARROW, SIGNAL = 1.1; EXPRESSED IN PLACENTA, SIGNAL = 1.1; EXPRESSED IN HEART, SIGNAL = 1.7; SWISSPROT HIT: O88935, EVALUE 4.20e+00; NT HIT: gi11067410, EVALUE 1.80e-01
taactgtaatttgcctacctgagggaagactccctgaggaggtggctccttctgggctctggaaggccataggggttgctgcaagtccaagcagaactacagctactacctctgtggtcccttcagttgcctccctgcaatctcctcctccagttctccaagcccctaaatctagccccgtatttaatcaaatccctgtc

SEQ ID NO: 22370 - DNA, 167 bp, Homo sapiens
  MAP TO AC034211.3; EXPRESSED IN BRAIN, SIGNAL =   1; EXPRESSED IN HELA, SIGNAL = 0.81; EXPRESSED IN BONE MARROW, SIGNAL = 0.99; EXPRESSED IN PLACENTA, SIGNAL = 1.5; NT HIT: gi12408648, EVALUE 3.00e-89; SWISSPROT HIT: O13890, EVALUE 2.00e-02; EST_HUMAN HIT: AL558342.1, EVALUE 4.00e-89
cgtccttgaacatcattccaatctctcagaagcctttcattttctttctgcaggtgctcatttttggcttgattttctgcaatggtgtccaagcaataacaaataagttctctaatgacttcagctgggttttcaactttctctaggttgaaggaaccaagtctgaa

SEQ ID NO: 22371 - DNA, 216 bp, Homo sapiens
  MAP TO AB014085.1; EXPRESSED IN FETAL LIVER, SIGNAL = 4.7; EXPRESSED IN BONE MARROW, SIGNAL = 0.44; EXPRESSED IN HEART, SIGNAL = 1.4; EST_HUMAN HIT: BE171914.1, EVALUE 4.50e+00; SWISSPROT HIT: P97377, EVALUE 9.90e-01; NT HIT: AE005500.1, EVALUE 3.00e+00
agatgagtatcactgtgaagtgtggggtggctatgaaagtataagattgcttctagcaactcacacagtcactcatggatgctcggcccaagaccctgatagccacggttccactccaagggaaaagaggccatctgaggagcaaatagaactctatcacaagatgagtgcaggaaacaccccaaacacagtccctaaggtcgatgcagaaacagc

SEQ ID NO: 22372 - DNA, 102 bp, Homo sapiens
  MAP TO AC005271.1; EXPRESSED IN FETAL LIVER, SIGNAL = 0.49; EXPRESSED IN BONE MARROW, SIGNAL = 0.88; EXPRESSED IN PLACENTA, SIGNAL = 0.53; EST_HUMAN HIT: BG208775.1, EVALUE 1.00e-50; SWISSPROT HIT: P34413, EVALUE 3.00e-05; NT HIT: AB020684.1, EVALUE 1.00e-50
ctctttttccataaagtcaaactccgctgcacaggtatacaataaagtatcaaaatccttataactaaagaattttgatgttagtaagttgccaatatgagc

SEQ ID NO: 22373 - DNA, 367 bp, Homo sapiens
  MAP TO AC044786.2; EXPRESSED IN FETAL LIVER, SIGNAL = 8.6; EXPRESSED IN HELA, SIGNAL = 6.6; EXPRESSED IN BONE MARROW, SIGNAL = 3.5; EXPRESSED IN HEART, SIGNAL = 5.2; EXPRESSED IN LUNG, SIGNAL = 3.7; SWISSPROT HIT: P37198, EVALUE 3.00e+00; NT HIT: AL163227.2, EVALUE 2.00e-46; EST_HUMAN HIT: AW470791.1, EVALUE 7.00e-65
atggtgtcatgggctgggcccagggccttgctgtttgtgcagtcttgggacttggtgtcctgtgtctcagttgtggctaaaagtggccaacatacagctcagaccgttgcttcagagggtgcaagccccaagccttggcagcttacacatggtgttgggtctgtgggagcacagaattcaagaactgaggtttgggaacctccatctagatttcagaggctttatggaaatgctggaatgtccaggcagaggtgtgctgcaggggtggagccttcatggagaaactctgttagggcagtgtggaatggaaatatggggtgggagcccccacacagtgtacccactggggcagtgcctagtggagctg

SEQ ID NO: 22374 - DNA, 119 bp, Homo sapiens
  MAP TO AC007096.3; EXPRESSED IN HEART, SIGNAL = 1.4; EXPRESSED IN FETAL LIVER, SIGNAL = 0.37; EXPRESSED IN BONE MARROW, SIGNAL = 0.44; EXPRESSED IN PLACENTA, SIGNAL = 0.71; SWISSPROT HIT: P42660, EVALUE 2.00e-04; EST_HUMAN HIT: AL552726.1, EVALUE 2.00e-59; NT HIT: AF106704.2, EVALUE 8.00e-61
ctgagctgggaagaaccagaagaagaggttgctgttgtaagtcttattcacggtgaggaagccggcataactcttcatgttcagtcctgggaaagggccgaccaaactcaattctcttc

SEQ ID NO: 22375 - DNA, 168 bp, Homo sapiens
  MAP TO AC004180.1; EXPRESSED IN BONE MARROW, SIGNAL = 0.41; NT HIT: L25647.1, EVALUE 7.00e-84; SWISSPROT HIT: P22607, EVALUE 6.00e-12
tcatgtgcacaatgagtggcaccgctcatgctgggtgagtcgctgcagctgcaggcccccagggtcctcgtgagaggcagtcagcacctgcagctgctgcggctccaccaggatgcattttgaggacaccagctctgcaccatccttgacccagacagtgggccccat

SEQ ID NO: 22376 - DNA, 240 bp, Homo sapiens
  MAP TO AC016955.12; EXPRESSED IN FETAL LIVER, SIGNAL = 2.4; EXPRESSED IN LUNG, SIGNAL = 1.9; EXPRESSED IN BRAIN, SIGNAL = 1.9; EXPRESSED IN BONE MARROW, SIGNAL = 1.5; EXPRESSED IN PLACENTA, SIGNAL = 2.3; NT HIT: gi14861872, EVALUE 6.00e-85; SWISSPROT HIT: P15595, EVALUE 3.90e+00; EST_HUMAN HIT: BG007849.1, EVALUE 4.00e-56
atggaagtggtccaatataattaatctgacaccaggtagcaggctgatcaccctgaggagtggtgtcatatcgagggttcagtgttggtctctgctgctggcaaattgggcactcagcagtggctgtagccaggtcagccttggtgagtggaaattcacattgctgagcccatgtgtaacctccatctctgccaccgtggccacattgttcatgggcccattgggcgatgataggggtgg

SEQ ID NO: 22377 - DNA, 150 bp, Homo sapiens
  MAP TO AC013737.4; EXPRESSED IN FETAL LIVER, SIGNAL = 0.4; EXPRESSED IN BONE MARROW, SIGNAL = 0.51; SWISSPROT HIT: O59493, EVALUE 5.80e+00; EST_HUMAN HIT: AA921811.1, EVALUE 6.00e-23; NT HIT: Y16736.1, EVALUE 2.00e-19
ctgggtatattgcatgatgttgaggtttggggtatgattgattctgtcacccagatactgagtatagtacacaatagttaatttttcaattgtctcttctccctctctccctccatagtagtccccagtgtcttttgttgccatcagcag

SEQ ID NO: 22378 - DNA, 446 bp, Homo sapiens
  MAP TO AC000094.3; EXPRESSED IN BONE MARROW, SIGNAL = 0.72; EXPRESSED IN PLACENTA, SIGNAL =  12; EXPRESSED IN HEART, SIGNAL = 1.4; EXPRESSED IN LUNG, SIGNAL =   2; EXPRESSED IN FETAL LIVER, SIGNAL = 4.7; SWISSPROT HIT: P05783, EVALUE 3.00e-58; NT HIT: gi4557887, EVALUE 0.00e+00; EST_HUMAN HIT: BF689349.1, EVALUE 1.00e-127
attgaggagagcaccacagtggtcatcacgcagtccaccgagatcagagctgctgagataacactcacagagctgagatgtccagtccagtccttggagattggcctggacttgatgagaaatctgaagatcagcttggagaacagcctaagggaggtggaggcctgctataccacgcagatggagcagctcaacagggtcctactgtacctggagtcggagctggcacagacctgggcagagggacagcgccaggcccaggagtacgaggcctggaacatccaggtcaatctggaggctgagatcaccacctaccaccgcctgctggaagatggggaggacttcaatcttggtgaggccctagacagcagcaactccatgcaaaccatccaaaagaccaccacctgcaggatagtggacggcaaagtggtgtttgagaccaacga

SEQ ID NO: 22379 - DNA, 239 bp, Homo sapiens
  MAP TO AL118558.2; EXPRESSED IN HEART, SIGNAL = 1.5; EXPRESSED IN LUNG, SIGNAL = 3.1; EXPRESSED IN HELA, SIGNAL = 2.4; EXPRESSED IN BONE MARROW, SIGNAL = 0.71; SWISSPROT HIT: Q9JHU4, EVALUE 2.00e-37; NT HIT: gi15300984, EVALUE 1.00e-119; EST_HUMAN HIT: BE882969.1, EVALUE 1.00e-119
gtgcctggtctctttgaaggagacgagtatgccaccttgatgacgcagtgcaaagagggggcacagaaggaaggcctgatgctggactcgcacgaggagctctacaagtggttcactagccaggttatccgcaacctccacgtcgtgttcaccatgaacccgtcctcggagggactcaaggaccgggcagctacatcaccagcacttttcaacaggtacgtgggcctttacttggctct

SEQ ID NO: 22380 - DNA, 192 bp, Homo sapiens
  MAP TO AL049869.5; EXPRESSED IN LUNG, SIGNAL =   3; EXPRESSED IN FETAL LIVER, SIGNAL = 1.4; EXPRESSED IN BONE MARROW, SIGNAL = 2.5; EXPRESSED IN BRAIN, SIGNAL = 1.8; EXPRESSED IN PLACENTA, SIGNAL = 1.4; SWISSPROT HIT: Q29010, EVALUE 3.30e+00; NT HIT: AF027868.1, EVALUE 1.70e-01; EST_HUMAN HIT: BG655800.1, EVALUE 1.00e-104
accggcatgggcacagagtccagagttcccacatgcttttgcatctcggctgggaatctgacgtctacttgatgatactttttctcaaagacgttttgagctttttctctgagagatggcagcagagtagacatgactggagaacgcatgttgatagcttttttaattgctgggcgttttgccatcattctc

SEQ ID NO: 22381 - DNA, 128 bp, Homo sapiens
  MAP TO AC004172.1; EXPRESSED IN HELA, SIGNAL = 0.75; EXPRESSED IN BONE MARROW, SIGNAL = 0.44; EST_HUMAN HIT: AI681250.1, EVALUE 3.00e-21; SWISSPROT HIT: Q10690, EVALUE 2.00e+00; NT HIT: AF055066.1, EVALUE 4.00e-66
agcgcgtgagcctgcaaggcctgggtcaacacctggttgggacaggagaccaccagggcagtgcacagctgagatctcagtctctggtgtcagctcctgggttcgctggctccactgagggcaactag

SEQ ID NO: 22382 - DNA, 109 bp, Homo sapiens
  MAP TO AC002484.1; EXPRESSED IN BONE MARROW, SIGNAL = 0.57; EXPRESSED IN PLACENTA, SIGNAL = 0.72; NT HIT: AF199371.1, EVALUE 1.40e+00; EST_HUMAN HIT: BF925706.1, EVALUE 3.30e-02
tcagatgacctggctgacagcttgccctctgactctctctgtaggcagtgatgcttccggaagcttccatgtggcgctcagcacttttctgtttgggtgtatcattggg

SEQ ID NO: 22383 - DNA, 204 bp, Homo sapiens
  MAP TO AC010205.5; EXPRESSED IN FETAL LIVER, SIGNAL = 1.5; EXPRESSED IN BONE MARROW, SIGNAL = 0.64; EXPRESSED IN PLACENTA, SIGNAL = 1.3; EST_HUMAN HIT: AI633523.1, EVALUE 1.00e-111; SWISSPROT HIT: P14585, EVALUE 2.50e-02
gaaacagtggagggagtcgctatattgcaggaggtggaggtactgggagtattggagttggacagccctggcagtttggtggaggaataaacagtgtctcttactgtaatcagggatgtgcgaattcctggctcgctgataagttctgtgaccaagcatgcaatgtcttgtcctgtgggtttgatgctggcgactgtgggcaag

SEQ ID NO: 22384 - DNA, 106 bp, Homo sapiens
  MAP TO AC006274.1; EXPRESSED IN BONE MARROW, SIGNAL = 0.58; EXPRESSED IN PLACENTA, SIGNAL = 1.1; EXPRESSED IN BRAIN, SIGNAL = 0.67; EST_HUMAN HIT: BF887923.1, EVALUE 5.00e-01; SWISSPROT HIT: P22292, EVALUE 2.10e+00; NT HIT: AJ241522.1, EVALUE 3.40e-01
catagatgctgcatgactgagattgcagaaccacagaacgggcgtgggtgggcttccaccggggcaccccctcctcctgcaggatccgcactgcccgggcatttcc

SEQ ID NO: 22385 - DNA, 119 bp, Homo sapiens
  MAP TO AL118521.15; EXPRESSED IN FETAL LIVER, SIGNAL = 7.9; EXPRESSED IN BONE MARROW, SIGNAL = 8.8; EXPRESSED IN PLACENTA, SIGNAL =  10; EXPRESSED IN HEART, SIGNAL = 6.3; EXPRESSED IN BRAIN, SIGNAL =   7; EST_HUMAN HIT: AL514048.1, EVALUE 9.00e+00; NT HIT: gi13652248, EVALUE 3.90e-01
tcactgcatctgaagcattccagtcctataaaagggtggaatctgtactagaaggaagacttgcttcaccaaaatatgtgctcctgtatattgcttctcatattgcttctcagatagag

SEQ ID NO: 22386 - DNA, 528 bp, Homo sapiens
  MAP TO AC004188.1; EXPRESSED IN BONE MARROW, SIGNAL = 0.54; EXPRESSED IN PLACENTA, SIGNAL = 0.57; EXPRESSED IN HELA, SIGNAL = 0.69; EXPRESSED IN FETAL LIVER, SIGNAL = 0.56; EXPRESSED IN BRAIN, SIGNAL = 0.9; SWISSPROT HIT: P14373, EVALUE 8.00e-30; EST_HUMAN HIT: AL558211.1, EVALUE 0.00e+00; NT HIT: gi10864060, EVALUE 0.00e+00
ctacctagggagtatctcatcctctgccgcttctccctttttacccacactgacatcgtgtgtctgcttccccaccttgtactcctgtgtagcatcgtccagtggcacaacggtgtgggcccggtgggtgtgggaaattgcacatatcaagcatacagcctcctggtcctcataacagaaaaggctgagggcctcatggtgttgggggcagaggctctcatcccggatcttccgcttgacggcctggagctgcttggcaatttccaccatactgcctagttgccgattaggtcggagactgcggtagcgggatgtctttcgacagacaggacaagggaagtccctctctaggtcctcccaccagcgggtgatgcaagctttgcagaagttgtgcccacactcaatgatgacaggttccttcagatactccaggcacacagagcagctcgcctccacctgtaagttctccaaagccgcagctgtagaggctgcagaggccccagcctctaacagacttgtctctgccat

SEQ ID NO: 22387 - DNA, 404 bp, Homo sapiens
  MAP TO AC009086.5; EXPRESSED IN BONE MARROW, SIGNAL = 0.78; EXPRESSED IN PLACENTA, SIGNAL = 1.5; EXPRESSED IN FETAL LIVER, SIGNAL = 2.3; SWISSPROT HIT: P28591, EVALUE 5.10e-01; EST_HUMAN HIT: AW367388.1, EVALUE 8.70e+00
cccatggggaagaaatgctccagaaccttccccaggaggaaaacagcccttgggtaaagggtccttcacagccagctcttttctttcccaccaagaggtgggaccacctggtgtgggaggtggaggctggctgggaaaacaacccctccccaggtttcctctggctgtggagccgcgcggaggaagaggatggggcgtcagagctctcagaaccgtggccttgtgaagtttctgagcaggcaaatggggcggcggggggtgatctggtcccagccccaggaggccgccccgaagccagcatcaaggcgaaggccacgtacagatcaaacggctccttgaaccgcgaggaagggctcgccccagctccatctggaccagcccgcaccattgttaacacaggttga

SEQ ID NO: 22388 - DNA, 101 bp, Homo sapiens
  MAP TO AC018359.7; EXPRESSED IN PLACENTA, SIGNAL = 0.55; EXPRESSED IN BRAIN, SIGNAL = 0.64; EXPRESSED IN BONE MARROW, SIGNAL = 0.86; EST_HUMAN HIT: AI126611.1, EVALUE 3.00e-02; NT HIT: AL163207.2, EVALUE 9.00e-08
cggtgcaggagcagaccaacagacagcggcaggccggcaggccatcaaccggcggattgatgcggagtttggccagggcagtcgaaggagagcccaggcca

SEQ ID NO: 22389 - DNA, 171 bp, Homo sapiens
  MAP TO AL118559.4; EXPRESSED IN PLACENTA, SIGNAL = 3.6; EXPRESSED IN HEART, SIGNAL = 3.8; EXPRESSED IN BRAIN, SIGNAL = 3.6; EXPRESSED IN FETAL LIVER, SIGNAL = 3.5; EXPRESSED IN BONE MARROW, SIGNAL = 4.7; NT HIT: gi10518346, EVALUE 6.00e-07; SWISSPROT HIT: O95239, EVALUE 3.80e-01; EST_HUMAN HIT: AA393627.1, EVALUE 6.00e-08
tcaccagccacaccatgatgtaggagaacacagcgatccacagcgtggcggtgatgaaggtgaccatgaagaacttctcccagcggggcttgctgcagttgggaatggtgacgcacaggaggaagatgaggggccaggtgaacacccacttgaccttgtcccctctggcct

SEQ ID NO: 22390 - DNA, 209 bp, Homo sapiens
  MAP TO AC004755.1; EXPRESSED IN BRAIN, SIGNAL = 0.61; EXPRESSED IN BONE MARROW, SIGNAL = 0.97; EXPRESSED IN PLACENTA, SIGNAL = 0.55; NT HIT: gi15294794, EVALUE 9.00e-19; SWISSPROT HIT: O60423, EVALUE 1.00e-36; EST_HUMAN HIT: AW444739.1, EVALUE 1.00e-109
catagacgcggccgctgatgcagcacttgttgaaggtcaagatgttctgcgtgagcgtgcccgtcttgtccgagaagatgtattccacctggcccaggtggtcgttgaggctggtgctgcgggccttggcaggcacgtcctgcggcttgtagtacatctgcacgtcccagtcgatgaagacgctgttccccaggtagatgaactcggac

SEQ ID NO: 22391 - DNA, 150 bp, Homo sapiens
  MAP TO AC024568.2; EXPRESSED IN BONE MARROW, SIGNAL = 0.46; EST_HUMAN HIT: BG252822.1, EVALUE 5.00e-79; NT HIT: gi15295132, EVALUE 3.00e-79
ccctgagacaggacaggcttcagttcccgcagcagaacagagccaatcacagttttctcagtgtttatgataagctgggctgtagagccttccttcagttccactgtgactagcatcaatgacccactgtgcacagttttagctgcaaac

SEQ ID NO: 22392 - DNA, 194 bp, Homo sapiens
  MAP TO AC010316.5; EXPRESSED IN BONE MARROW, SIGNAL = 1.7; EXPRESSED IN LUNG, SIGNAL = 3.7; NT HIT: gi15296472, EVALUE 1.00e-105; SWISSPROT HIT: Q63191, EVALUE 1.10e+00; EST_HUMAN HIT: AW965015.1, EVALUE 1.00e-105
tcaaatacaggctgcacattttgtcacttaatgccagtacaatctgtgttactcctaaggacttttgggattttgatgagacctgcgagggagaagacactgagaagccagtgatctgcaagcatttgctcttgtttccacatcacctctgggatatttcagctgttgtttccaaatggcaaatcatcaactaa

SEQ ID NO: 22393 - DNA, 348 bp, Homo sapiens
  MAP TO AL050328.24; EXPRESSED IN BRAIN, SIGNAL = 5.7; EXPRESSED IN LUNG, SIGNAL = 1.2; EXPRESSED IN HELA, SIGNAL = 0.82; EXPRESSED IN BONE MARROW, SIGNAL = 0.86; EXPRESSED IN PLACENTA, SIGNAL = 0.65; EST_HUMAN HIT: AL532710.1, EVALUE 0.00e+00; SWISSPROT HIT: Q16653, EVALUE 5.00e-65; NT HIT: Z48051.1, EVALUE 0.00e+00
ggcagttcagagtgataggaccaagacaccctatccgggctctggtcggggatgaagtggaattgccatgtcgcatatctcctgggaagaacgctacaggcatggaggtggggtggtaccgcccccccttctctagggtggttcatctctacagaaatggcaaggaccaagatggagaccaggcacctgaatatcggggccggacagagctgctgaaagatgctattggtgagggaaaggtgactctcaggatccggaatgtaaggttctcagatgaaggaggtttcacctgcttcttccgagatcattcttaccaagaggaggcagcaatggaattgaaagtagaag

SEQ ID NO: 22394 - DNA, 202 bp, Homo sapiens
  MAP TO AC019209.3; EXPRESSED IN FETAL LIVER, SIGNAL = 1.3; EXPRESSED IN BRAIN, SIGNAL = 1.7; EXPRESSED IN LUNG, SIGNAL = 1.2; EXPRESSED IN BONE MARROW, SIGNAL = 2.1; SWISSPROT HIT: Q54796, EVALUE 5.50e+00; EST_HUMAN HIT: BE879307.1, EVALUE 6.70e-02
ctctttatctccagcatctagaagagagatacatgcaaaatatttaataaatatttgctgaatcaaattattctttcttctcttcttagacttctcatctccttccacttgctcttcattagaagtgttataagaaatgagcacaaagttatcaccatgattgcaggctttttctatttctagaaccttcagaacatagttc

SEQ ID NO: 22395 - DNA, 177 bp, Homo sapiens
  MAP TO AC013417.4; EXPRESSED IN BONE MARROW, SIGNAL = 1.4; EXPRESSED IN PLACENTA, SIGNAL = 2.1; EXPRESSED IN HEART, SIGNAL = 1.5; EXPRESSED IN LUNG, SIGNAL = 1.7; EXPRESSED IN FETAL LIVER, SIGNAL = 1.3; EXPRESSED IN BRAIN, SIGNAL = 1.5; EST_HUMAN HIT: AI911352.1, EVALUE 2.00e-26; NT HIT: gi6680735, EVALUE 4.00e-02; SWISSPROT HIT: Q02328, EVALUE 4.30e+00
agggatatctatcagacattctacctggcgtctgctgctccatcatcactgcatccatcatcaccagaggagtctcctctccttctgtgggtgagttctggagaagacctgggcacactgagctcagccacttccccttcctggtatgggtcttccctcatgacttcaccaccacct

SEQ ID NO: 22396 - DNA, 381 bp, Homo sapiens
  MAP TO AC007559.3; EXPRESSED IN HELA, SIGNAL = 1.8; EXPRESSED IN BRAIN, SIGNAL = 1.7; EXPRESSED IN BONE MARROW, SIGNAL = 1.7; EXPRESSED IN PLACENTA, SIGNAL = 0.79; EXPRESSED IN HEART, SIGNAL = 1.2; NT HIT: AF223391.1, EVALUE 3.60e-01; SWISSPROT HIT: Q58015, EVALUE 1.70e+00
atatcttataagaaccccaaaatattcaacagaaataaccagagctgctctgacgcggtggacaagggtgtccagaatgtcaaggagctctgtggtggaatgaaggatgatcctagggccagtgcactgaccatggtaacgctacagagaggacctgcaatcctcacccaagaagtcatcactgcaacccagcttcctgaggcagtgtctaaatgtaagtcaacagctcgtaatcttaccctctgcagccagagggaacctagttctaacatcaagagttggaaccccggacatcaaaaaggtactacccctggtctagcctcttctttgtctcaggatctgaccactgacgtttccatcttgcagtgtgactgcttcccc

SEQ ID NO: 22397 - DNA, 149 bp, Homo sapiens
  MAP TO AJ250235.1; EXPRESSED IN BRAIN, SIGNAL = 0.82; EXPRESSED IN BONE MARROW, SIGNAL =   2; EST_HUMAN HIT: BI551753.1, EVALUE 2.00e-78; SWISSPROT HIT: P22830, EVALUE 6.00e-23; NT HIT: AJ250235.1, EVALUE 1.00e-78
taagctggcaccattcatcgccaaacgccgaacccccaagattcaagagcagtaccgcaggattggaggcggatcccccatcaagatatggacttccaagcagggagagggcatggtgaagctgctggatgaattgtcccccaacacag

SEQ ID NO: 22398 - DNA, 231 bp, Homo sapiens
  MAP TO AC004186.1; EXPRESSED IN BONE MARROW, SIGNAL = 0.76; EXPRESSED IN LUNG, SIGNAL = 1.5; EXPRESSED IN HELA, SIGNAL = 1.9; NT HIT: gi4508004, EVALUE 1.00e-127; EST_HUMAN HIT: BF001890.1, EVALUE 1.00e-116
aagaagctccaggaccagaggcagtacattgtggctgagtttgagcagggtcatcagttcctgagggagcgggaggaacacctgctggaacagctggcgaagctggagcaggagctcacggagggcagggagaagttcaagagccggggcgtcggggagcttgcccggctggccctggtcatctccgaactggagggcaaggcgcagcagccagctgcagagctcatgcag

SEQ ID NO: 22399 - DNA, 126 bp, Homo sapiens
  MAP TO AC036102.3; EXPRESSED IN BRAIN, SIGNAL = 1.2; EXPRESSED IN BONE MARROW, SIGNAL = 0.97; NT HIT: gi16191882, EVALUE 6.00e-65; SWISSPROT HIT: Q15647, EVALUE 7.00e-18; EST_HUMAN HIT: BI907326.1, EVALUE 9.00e-65
ctgtttagaagtagagatataatcaagaatagaattaatggatttttcagaataatttcttgtgactgcactccgaatataggtcaatagctgcttatatctattcatcatttctggaaagtttgt

SEQ ID NO: 22400 - DNA, 139 bp, Homo sapiens
  MAP TO AC026730.3; EXPRESSED IN BONE MARROW, SIGNAL = 1.2; EXPRESSED IN PLACENTA, SIGNAL = 0.51; EXPRESSED IN LUNG, SIGNAL = 0.89; EXPRESSED IN FETAL LIVER, SIGNAL = 0.37; EXPRESSED IN HELA, SIGNAL = 0.54; EXPRESSED IN BRAIN, SIGNAL = 0.43; EST_HUMAN HIT: AA046730.1, EVALUE 6.90e-01; NT HIT: gi14776254, EVALUE 4.70e-01
ttctattattttggagcccaaaatccctacagatattaataatttcagcattgttactgcctttcctaccgttgactccagtcatacatagaagagtcaccactgaacttttagtgatgctggtgtcctccttgatacc

SEQ ID NO: 22401 - DNA, 98 bp, Homo sapiens
  MAP TO AC007759.1; EXPRESSED IN BONE MARROW, SIGNAL = 2.1; EXPRESSED IN PLACENTA, SIGNAL = 1.4; EXPRESSED IN HEART, SIGNAL = 1.1; EXPRESSED IN LUNG, SIGNAL = 2.7; NT HIT: AL163302.2, EVALUE 3.10e-01
tctggatgacagagcaagacaaagaaaaagaagaagaagaagaagaggaagaagagaagaagaaggaggaggaggaggaggagaaaaataaagcttag

SEQ ID NO: 22402 - DNA, 555 bp, Homo sapiens
  MAP TO AC004177.2; EXPRESSED IN BRAIN, SIGNAL = 0.72; EXPRESSED IN BONE MARROW, SIGNAL = 0.42; EXPRESSED IN PLACENTA, SIGNAL = 0.46; EST_HUMAN HIT: N79066.1, EVALUE 5.00e-02; SWISSPROT HIT: P35410, EVALUE 6.00e-26; NT HIT: AB001523.1, EVALUE 2.10e+00
ggtgtgcccaggcagccaaggcagcccaccatggcccagtttctctcagtgttctctgggaagctggattgggacaacaggacagagaccccaggacaagtgaacatgagtcatacgggaggcgagtggttggtgggcaaacaggtggttttcatcctgacagtgctggtggccttctgtgggctggtgggcaatggtgtggtgtgctggcttttctgcttccaggtcaggagcagcccctacatgacctatgtccttaacctggccgctgctgatatggtcaacctctcctgtgtaactgtgatcctgttggagaaaatcctcatgctgtatcaccaggtgacattgcaggtggccatgtttctggagcctgtgtcctatttctctgacacagtgagtctctgtctcctggtggccatgaatattgagagctttctgtgtgtcctctgtcccacctggtgctgccaccgcccaaagcacacctctgctgtgatgagcatcctgagctgggccctggccctttctttgcatgtggttagccaggtttgtgagtaa

SEQ ID NO: 22403 - DNA, 105 bp, Homo sapiens
  MAP TO AC008775.5; EXPRESSED IN BONE MARROW, SIGNAL = 0.46; EXPRESSED IN PLACENTA, SIGNAL = 0.64; EST_HUMAN HIT: BF315353.1, EVALUE 2.00e+00
atgcacgaggaagcgaaggtcttctgcactgcacagcttggtcacagtggggctagggtctgccactcgcatcatagcctgtatgaacgcacactcaggaatcat

SEQ ID NO: 22404 - DNA, 270 bp, Homo sapiens
  MAP TO AC004191.1; EXPRESSED IN BONE MARROW, SIGNAL =  11; EXPRESSED IN PLACENTA, SIGNAL = 7.8; EXPRESSED IN FETAL LIVER, SIGNAL =  13; EXPRESSED IN LUNG, SIGNAL =  11; SWISSPROT HIT: P17693, EVALUE 2.00e-37; EST_HUMAN HIT: AL554250.1, EVALUE 1.00e-87; NT HIT: M63870.1, EVALUE 0.00e+00
cggcctcgctctggttgtaatagcggagcagggtccgcaggttcactcggtaaatctgcgcgtggcccttggcgttccgtgtctcctggtcccaatactccagcccctcctgctccacccacggcgcccgccgctccatcctcggactcacggagtcgctgtcgaaccgcacgaactctgtgtcgtccacgtagcccacggcgatgaaccggggctccccgcggccgggctgggacactgcggtgctgaaatacctcaaggagtgggagc

SEQ ID NO: 22405 - DNA, 128 bp, Homo sapiens
  MAP TO AL096754.1; EXPRESSED IN FETAL LIVER, SIGNAL = 0.94; EXPRESSED IN BRAIN, SIGNAL = 0.78; EXPRESSED IN BONE MARROW, SIGNAL = 0.8; EST_HUMAN HIT: BF573531.1, EVALUE 2.50e+00; SWISSPROT HIT: O35621, EVALUE 6.00e+00; NT HIT: AE008686.1, EVALUE 1.70e+00
atcaagaccaacatcacctccccttcctctctctagtcccttttccaaaaacttcccatccactgccatggcataattggctctatctacctgcttagatgaaggttctgactgttccagggatgcac

SEQ ID NO: 22406 - DNA, 116 bp, Homo sapiens
  MAP TO AC010238.4; EXPRESSED IN FETAL LIVER, SIGNAL = 0.52; EXPRESSED IN BRAIN, SIGNAL = 1.2; EXPRESSED IN HELA, SIGNAL = 0.75; EXPRESSED IN BONE MARROW, SIGNAL = 1.1; EXPRESSED IN PLACENTA, SIGNAL = 0.94; EXPRESSED IN HEART, SIGNAL = 1.5; EST_HUMAN HIT: BE152986.1, EVALUE 1.00e-54; NT HIT: AB048520.1, EVALUE 3.80e-01
gagcccaagaagctggtcaacagtgcttccttggcagagtctcctgcccaggcgtctgggcagatgtgtggccacaggctctgccaagcagggggaatgccatttggaagaagtgg

SEQ ID NO: 22407 - DNA, 203 bp, Homo sapiens
  MAP TO AC005570.1; EXPRESSED IN BONE MARROW, SIGNAL = 0.46; EXPRESSED IN PLACENTA, SIGNAL = 0.39; EXPRESSED IN FETAL LIVER, SIGNAL = 0.4; EXPRESSED IN LUNG, SIGNAL = 0.39; SWISSPROT HIT: Q9JHJ7, EVALUE 2.00e-16; EST_HUMAN HIT: AW450670.1, EVALUE 8.00e-11; NT HIT: AB041645.1, EVALUE 7.00e-04
tgccactggggctgattaacccccagccggtcacccagcagtccggccggtgcacgaagttgaaggtggaagactcgatgcaaatgggctggatgtacgcattgtaggtgacagaagaggccagtctcagcagggcaatgtcattgcgtaaaaccccaagtgcgtcagggttcacaatgatgtcctgcactttgtaacgactg

SEQ ID NO: 22408 - DNA, 143 bp, Homo sapiens
  MAP TO AC004789.1; EXPRESSED IN BONE MARROW, SIGNAL = 0.88; EXPRESSED IN PLACENTA, SIGNAL =   1; NT HIT: gi13648926, EVALUE 5.00e-75; SWISSPROT HIT: P57737, EVALUE 5.00e-22; EST_HUMAN HIT: BG767631.1, EVALUE 7.00e-75
gccacacggagaagatctgctccctgcgcttccacccactggcagccaatgtgctggcctcgtcctcctatgacctcactgttcgcatctgggaccttcaggctggagctgatcggctgaagctgcagggccaccaagaccag

SEQ ID NO: 22409 - DNA, 366 bp, Homo sapiens
  MAP TO AC008546.5; EXPRESSED IN BRAIN, SIGNAL = 1.1; EXPRESSED IN BONE MARROW, SIGNAL = 0.66; EXPRESSED IN PLACENTA, SIGNAL = 1.5; EST_HUMAN HIT: BG573328.1, EVALUE 0.00e+00; NT HIT: M95739.1, EVALUE 3.40e-01; SWISSPROT HIT: P25193, EVALUE 2.20e+00
agttccaggtccggacccactggcttcacttctctcccgtggaacatactcttccagggcataagctgtgcttggaatgtttgctgaatgctcctttttgcttgtaggacttgctgtctccttgtcatcttctagaggccaggtgatcttcaagaaactctgggaaatgtcgggaaggaactttgtatttacaccagatctgcccaaccacagctctttgagccagttggtgtgcttttcgctcacaagtgctatctcagaagttttctctttcagcgtctgctcagagggatggcaccagccgcacttgaaacccacatgtgtgagaaagcaaatgaccacagaaacattcaatgtgacctttaa

SEQ ID NO: 22410 - DNA, 181 bp, Homo sapiens
  MAP TO AC005567.1; EXPRESSED IN HELA, SIGNAL = 0.57; EXPRESSED IN FETAL LIVER, SIGNAL = 0.64; EXPRESSED IN BONE MARROW, SIGNAL = 0.68; NT HIT: Z83075.1, EVALUE 1.00e-97; SWISSPROT HIT: O15360, EVALUE 5.00e-16; EST_HUMAN HIT: T99040.1, EVALUE 4.00e-74
ctctttgtgatgctgagtgcagaggagttggttggccatttgcaagaagttctggaaacgcaggaggttcactggcagagagtgctctcctttgtgtctgccctggttgtctgctttccagaagcgcagcagctgcttgaaggtgagcttttacgcgagcccggtggtgctggtcaagagt

SEQ ID NO: 22411 - DNA, 146 bp, Homo sapiens
  MAP TO AC007782.20; EXPRESSED IN BRAIN, SIGNAL = 0.85; EXPRESSED IN BONE MARROW, SIGNAL = 0.95; EST_HUMAN HIT: AA192509.1, EVALUE 1.00e-76; NT HIT: AJ242978.1, EVALUE 8.00e-77
atgaattttctagacgaaaacgttctaaatcagaagacatggacaatgtacagtctaaacgtcgtcgatatatggaagaagaatatgaggcagaatttcaagtaaagattacagccaaaggagacattaaccagaaacttcaaaag

SEQ ID NO: 22412 - DNA, 152 bp, Homo sapiens
  MAP TO AC016965.10; EXPRESSED IN HEART, SIGNAL = 3.6; EXPRESSED IN FETAL LIVER, SIGNAL = 2.3; EXPRESSED IN BONE MARROW, SIGNAL = 0.91; EXPRESSED IN PLACENTA, SIGNAL = 0.93; NT HIT: AB030615.1, EVALUE 5.20e-01; SWISSPROT HIT: O60584, EVALUE 1.50e+00
gcaagaagcaactttatctgcctcgaatgcattaccattttggttgatggcctctgaacgttttccatcacagtcttctgcctctcctccatattctttgctaaataacatgttgggaatggtctccttgtcttccacatcaaataatttaa

SEQ ID NO: 22413 - DNA, 234 bp, Homo sapiens
  MAP TO AL118558.2; EXPRESSED IN LUNG, SIGNAL = 2.6; EXPRESSED IN FETAL LIVER, SIGNAL = 2.1; EXPRESSED IN BONE MARROW, SIGNAL = 1.5; SWISSPROT HIT: Q9JHU4, EVALUE 1.00e-41; EST_HUMAN HIT: BE838950.1, EVALUE 1.00e-129; NT HIT: gi14754250, EVALUE 1.00e-129
gtgtccatcagcggagaatggtctccgtggcaggccaaggtgcctcagattgaagtggagacgcacaaggtggcagcccctgatgtcgtcgtgccaacgctggacacagtccgccacgaagccctcttgtacacttggctggccgaacacaagcccctggtcttgtgtggccctcctgggtctggcaagaccatgacactcttcagcgccctccgggccttgcctgacatggag

SEQ ID NO: 22414 - DNA, 122 bp, Homo sapiens
  MAP TO AC004211.1; EXPRESSED IN HELA, SIGNAL = 0.59; EXPRESSED IN BONE MARROW, SIGNAL = 0.51; SWISSPROT HIT: P26640, EVALUE 4.00e-09; EST_HUMAN HIT: BI829652.1, EVALUE 2.00e-62; NT HIT: gi15304389, EVALUE 1.00e-62
cagcgcacgagggcatcctgtatggccaccgtgagtgcgtggccaatgtgcagggagccagtgacattgggaggtgggatacacatggaaaaggtctcccctgtagcttggggcagccgggc

SEQ ID NO: 22415 - DNA, 271 bp, Homo sapiens
  MAP TO AC004180.1; EXPRESSED IN BONE MARROW, SIGNAL = 2.5; EXPRESSED IN PLACENTA, SIGNAL =   3; EXPRESSED IN BRAIN, SIGNAL = 3.1; NT HIT: X92841.1, EVALUE 0.00e+00; SWISSPROT HIT: P70387, EVALUE 4.00e-04; EST_HUMAN HIT: BI870729.1, EVALUE 0.00e+00
ctcttctcctcaggactacgctggattctagatatcgccgtagttcctgcaggcagtctgcatgcatagcgtgatagtgtgtcttggtcttcatggcatcttccttcaagaaattcctgacgttcatggccaaggtctgagctctggaggactggggcactgtccattcctcagtctccacgttttgggagaggaagagctccccatcgtagtagaaatgctgggagctcctggtgctgttgtcttcatggatctcacagaccctaatctc

SEQ ID NO: 22416 - DNA, 182 bp, Homo sapiens
  MAP TO AC018427.3; EXPRESSED IN BRAIN, SIGNAL = 1.2; EXPRESSED IN HELA, SIGNAL = 1.1; EXPRESSED IN BONE MARROW, SIGNAL = 1.1; EXPRESSED IN PLACENTA, SIGNAL = 1.1; EST_HUMAN HIT: AA826014.1, EVALUE 3.70e+00; NT HIT: AL114215.1, EVALUE 1.60e-01; SWISSPROT HIT: P31695, EVALUE 3.80e-01
cattccaagttcattgctggccagattacaaccagcaacggtgccatcaggatgaggcacaggtgcacttgggactctcaggtcactctacagtcagcccagatgcaaactgtttacctgccccaggttacgactcccctgtaaaccctgcaccttctcagttgacctctgagcaccaccag

SEQ ID NO: 22417 - DNA, 348 bp, Homo sapiens
  MAP TO AC022424.3; EXPRESSED IN BONE MARROW, SIGNAL = 0.81; EXPRESSED IN PLACENTA, SIGNAL = 1.1; EXPRESSED IN HEART, SIGNAL = 1.6; EXPRESSED IN FETAL LIVER, SIGNAL = 2.7; SWISSPROT HIT: P97857, EVALUE 3.00e-07; NT HIT: AJ296304.1, EVALUE 3.20e-01
ctggggcttgcgctgtactcaccaagccttggcaggttgaaagggccactgaggagtttctgtgtgatcgcaaagagccttgatagaaacagaagtcctctggcggtaaagtctgcacagacttagtgcctgtctttcccaacgtctgcacaataaagccaggagccactaggctgctggaagtcctcagatccatgtggaagtcgtgcctggagcctttcagccgaaggtgaagagactcaacctcggacacgggcactgctcttctccgccgctgatggtgcatgatttcatgggacacgtaatcgcccctgtggtcaacctcgtaggcagagaccaggtcatatt

SEQ ID NO: 22418 - DNA, 310 bp, Homo sapiens
  MAP TO AC013737.4; EXPRESSED IN BRAIN, SIGNAL = 1.6; EXPRESSED IN LUNG, SIGNAL = 2.1; EXPRESSED IN BONE MARROW, SIGNAL = 0.97; EXPRESSED IN PLACENTA, SIGNAL = 1.3; EXPRESSED IN HEART, SIGNAL = 1.3; EST_HUMAN HIT: AA668227.1, EVALUE 9.00e-98; SWISSPROT HIT: P10264, EVALUE 4.00e-08; NT HIT: X57147.1, EVALUE 1.00e-95
ggaccaagaggaaccggcccaaaaggaaaagcgagatcagagaaagactgcagccttagtcatggccctcagacaaacctaccttgctggttcagagaggacagaaaatggagcaggccaatcacccagtggggcttgttaccagtgtggcttgcaaggacaccttaaaaaaggttgtccaatgagaaacaagctgccccctcatccatgtccactgtgcagaggcaatcactggaaggcacactgccccagagggcaaaggttctctgggccagaagcccccaaccagatgatccaacaacaggactga

SEQ ID NO: 22419 - DNA, 164 bp, Homo sapiens
  MAP TO AC025761.3; EXPRESSED IN HEART, SIGNAL = 3.3; EXPRESSED IN FETAL LIVER, SIGNAL =   3; EXPRESSED IN BONE MARROW, SIGNAL = 2.5; EXPRESSED IN BRAIN, SIGNAL = 2.3; EXPRESSED IN PLACENTA, SIGNAL = 2.6; SWISSPROT HIT: P21974, EVALUE 5.80e+00
ctggcttaatagcattcttgcttgtagcagccatagagatgaggagaagtgggctgattggaggtagaacagacttaccagtggatagaatgtggcaggtaagggcaagggccaatacaaagatgattgatggggttctggttggagcaactgagtgtgttgta

SEQ ID NO: 22420 - DNA, 130 bp, Homo sapiens
  MAP TO AC003005.1; EXPRESSED IN HELA, SIGNAL = 0.78; EXPRESSED IN BONE MARROW, SIGNAL = 0.44; EXPRESSED IN PLACENTA, SIGNAL = 0.7; SWISSPROT HIT: O75820, EVALUE 1.00e-09; NT HIT: gi13375967, EVALUE 6.00e-65; EST_HUMAN HIT: BE266260.1, EVALUE 4.00e-67
cagggctatgtgacctttgaggacgtggctgtctacttctcccaggaggaatggagattgcttgatgacgctcagaggctcctctaccgcaatgtgatgctggagaactttacacttctggcctctctgg

SEQ ID NO: 22421 - DNA, 171 bp, Homo sapiens
  MAP TO AC005862.1; EXPRESSED IN BONE MARROW, SIGNAL = 0.72; EXPRESSED IN PLACENTA, SIGNAL = 1.3; EXPRESSED IN HEART, SIGNAL = 1.4; EXPRESSED IN FETAL LIVER, SIGNAL = 0.74; SWISSPROT HIT: P01266, EVALUE 5.70e+00; NT HIT: AB035345.1, EVALUE 3.80e-02; EST_HUMAN HIT: BF869492.1, EVALUE 5.60e-02
atggccagcagtacaaattctagcaccaggaaccaaactctgcttcctggtgtggagatgaaaagggagagttccctggtccatccatcacaggacatgggacaggggtatggctctctgttcagcttcctcaagctcaaactccttataggagggggagcatgcagaagg

SEQ ID NO: 22422 - DNA, 165 bp, Homo sapiens
  MAP TO AF235097.1; EXPRESSED IN LUNG, SIGNAL = 1.5; EXPRESSED IN BRAIN, SIGNAL = 2.2; EXPRESSED IN FETAL LIVER, SIGNAL = 1.5; EXPRESSED IN BONE MARROW, SIGNAL = 2.1; EXPRESSED IN PLACENTA, SIGNAL = 1.3; NT HIT: U93305.1, EVALUE 4.00e-88; SWISSPROT HIT: O60840, EVALUE 3.00e-10
ccacgtgaaagggaaccccgggatagaggtgagggaaggtgtatagggcgagagtggattagtggaaaggccagttctcacattgacttcagtgacggcaatatccactatgctgcccaccacaataagagcgtcaaacgtgttccaggcatcagtgaagtaatg

SEQ ID NO: 22423 - DNA, 186 bp, Homo sapiens
  MAP TO AC006182.1; EXPRESSED IN BRAIN, SIGNAL = 1.4; EXPRESSED IN BONE MARROW, SIGNAL = 1.1; EXPRESSED IN PLACENTA, SIGNAL = 1.5; NT HIT: AJ003122.1, EVALUE 3.00e-03; EST_HUMAN HIT: BE543927.1, EVALUE 2.40e-01; SWISSPROT HIT: P39083, EVALUE 6.50e-01
gccatccccagacatagccggagggagctgtccaaaaagcctgtgtttcctactgtgcttagggtgactgcctggggtttcctggtgcccttctcctggggaggcctgggctccaacctcccactgagggagccactggttggtgctgcaggaaccagaggaaagagcctggcagccgcagggaag

SEQ ID NO: 22424 - DNA, 114 bp, Homo sapiens
  MAP TO AC020923.4; EXPRESSED IN LUNG, SIGNAL = 2.2; EXPRESSED IN BRAIN, SIGNAL = 1.4; EXPRESSED IN BONE MARROW, SIGNAL = 2.1; EXPRESSED IN PLACENTA, SIGNAL = 1.8; EST_HUMAN HIT: BI765695.1, EVALUE 1.00e-57; SWISSPROT HIT: P20810, EVALUE 9.00e-16; NT HIT: M86258.1, EVALUE 8.00e-58
ccaaaaagcctacccaagcaggcatcagatacaggaagtaacgatgctcacaataaaaaagcagtttccagatcagctgaacagcagccatcagagaaatcaacagaaccaaag

SEQ ID NO: 22425 - DNA, 127 bp, Homo sapiens
  MAP TO AC008806.4; EXPRESSED IN BONE MARROW, SIGNAL = 0.75; EXPRESSED IN PLACENTA, SIGNAL = 1.4; EXPRESSED IN HEART, SIGNAL = 2.1; EXPRESSED IN FETAL LIVER, SIGNAL = 2.6; NT HIT: gi11427700, EVALUE 1.00e-13; EST_HUMAN HIT: BE960634.1, EVALUE 2.00e-65; SWISSPROT HIT: P52738, EVALUE 3.00e-13
caagccataccaagttcctgtagttctccaacatgacatctctgtataaatccttctgagatggcttcagccattcccactcttcttgggaaaagtctagcgccacatctctgaaggtcaccaaccc

SEQ ID NO: 22426 - DNA, 226 bp, Homo sapiens
  MAP TO AC008428.4; EXPRESSED IN BONE MARROW, SIGNAL = 1.1; EXPRESSED IN PLACENTA, SIGNAL = 4.3; EXPRESSED IN HEART, SIGNAL = 3.7; EXPRESSED IN FETAL LIVER, SIGNAL = 6.9; NT HIT: AL163249.2, EVALUE 2.00e-47; EST_HUMAN HIT: BE882039.1, EVALUE 2.00e-54; SWISSPROT HIT: P08125, EVALUE 1.50e+00
ggcttgggacctgcagcctgccatgcctgagcctccccccaacctgtgggctcctgcgcagcccgagcctccccaacaagtgccaccccctgcttcacggcacccagtcccatcgaccacccaagggctgaggagtgtgggcgcatggcatgggactggcaggcagctccacctgcagcccccatgcaggatccactgggtgaagccagctgggctcctgagtctg

SEQ ID NO: 22427 - DNA, 286 bp, Homo sapiens
  MAP TO AC005788.1; EXPRESSED IN PLACENTA, SIGNAL = 1.5; EXPRESSED IN HEART, SIGNAL = 2.2; EXPRESSED IN BONE MARROW, SIGNAL = 3.7; EST_HUMAN HIT: AL134734.1, EVALUE 0.00e+00; SWISSPROT HIT: P23468, EVALUE 3.00e-44; NT HIT: gi4506326, EVALUE 0.00e+00
cttgaactcgagttccatgccagtgacgtgttcgccaggctccacctgggccagcttctggatgtaggcatagaggctgcgtgcgggcacttctgtgttgccacagcccacggcctccagcagggcctcgtggatgaagctgtactggtcctccgtctgcaccatgtagttgcgctgggacctcatgagcgtcacgtggccatagacatcgactgtcttctctggcttgatccgctcaagcatggcgtcgatgacgataaagcagcctgtgcggcccacaccggca

SEQ ID NO: 22428 - DNA, 193 bp, Homo sapiens
  MAP TO AC011605.3; EXPRESSED IN HEART, SIGNAL = 1.4; EXPRESSED IN BRAIN, SIGNAL = 1.5; EXPRESSED IN FETAL LIVER, SIGNAL = 1.7; EXPRESSED IN BONE MARROW, SIGNAL =   1; SWISSPROT HIT: O00187, EVALUE 5.60e+00; NT HIT: AF177767.1, EVALUE 6.80e-01
gcacgaacaaggccaacactgcaggcagacagctggtgagagaacacatggtccagaatcttctcctcctcctcttccatctaaatttgcttgtcttgtgttccattcccttgaggctcaactctctgctctcattgatgccacccagtctgatgaaccagcatttcccaaagatgtgtgttttacaagctgt

SEQ ID NO: 22429 - DNA, 384 bp, Homo sapiens
  MAP TO AC004493.1; EXPRESSED IN BONE MARROW, SIGNAL = 3.7; EXPRESSED IN FETAL LIVER, SIGNAL = 7.5; NT HIT: gi16165294, EVALUE 4.00e-53; SWISSPROT HIT: P04706, EVALUE 1.30e-01; EST_HUMAN HIT: BG740043.1, EVALUE 1.00e-109
ctccgctcgccagggggtggcttcttggggcttgcaggtttgggcaaggcctgagggccaggcttagcaggggaaggggaggaagacgacgaggaggaggaagatgaggaggaagaagaagaagaggaagaggaggaggaagaagaggaggaggaggaggaggaggaagatgaagaggaggagctggaactggaactgctagagcgcctcttccgtttggctggggttggctccggaggacgtccctctcgaacagcctcctttggggctggggtggggctggggaccctgtgggaggagaggagtgtcacaaggagacaagctgccccagccccaaccctaccttccttggcctggaggaacggcagtggggggaggggtgcc

SEQ ID NO: 22430 - DNA, 255 bp, Homo sapiens
  MAP TO AC004497.1; EXPRESSED IN BONE MARROW, SIGNAL = 0.53; EXPRESSED IN PLACENTA, SIGNAL = 1.3; SWISSPROT HIT: P20592, EVALUE 1.00e-43; EST_HUMAN HIT: AL551630.1, EVALUE 0.00e+00; NT HIT: gi15320233, EVALUE 0.00e+00
caagaagtaggcattcaggtggatgcctatttcagtaaaggaggaaaccgaagactcattactgggaaaatgagagttcaacttcatattctgtgaaggcgtccccagagggttaaaaatctcttctcggactttcttcagaacaacactgtaaatctgatcttgacaaaaaaccatctgctccattctgaactgaagttggatcatgttttctgcctttgctgtgtgtttcacttttatgtcttcaatcgtgct

SEQ ID NO: 22431 - DNA, 134 bp, Homo sapiens
  MAP TO AC000402.1; EXPRESSED IN HELA, SIGNAL = 1.8; EXPRESSED IN BONE MARROW, SIGNAL = 0.97; NT HIT: gi13627576, EVALUE 1.80e+00; SWISSPROT HIT: Q03610, EVALUE 2.00e+00; EST_HUMAN HIT: BE712010.1, EVALUE 6.60e-01
ctgaggctattggtccaggcgtttcccagggcagtgccgctcctgtcttgggtgctgattgctttcacaggcagcgtctgcccggagcactgtgcagagacagctgcagaggccagtgtcttcagcaggggcat

SEQ ID NO: 22432 - DNA, 166 bp, Homo sapiens
  MAP TO AC004494.1; EXPRESSED IN BONE MARROW, SIGNAL = 2.2; EXPRESSED IN HEART, SIGNAL = 1.2; EXPRESSED IN BRAIN, SIGNAL = 0.46; NT HIT: gi14778034, EVALUE 2.00e-34; EST_HUMAN HIT: AU134106.1, EVALUE 3.00e-34
ttccactcttgagcaggcgcttctcttcctccttgagcttgttctgtatcaggcagagagtgtttttagcttcctgtggaagaggaaatacagactcaggagagatggcccttttctggactgttctattcttcttcaccactgtgtaaggactgctaagtttgtg

SEQ ID NO: 22433 - DNA, 291 bp, Homo sapiens
  MAP TO AL121919.19; EXPRESSED IN FETAL LIVER, SIGNAL = 1.1; EXPRESSED IN BRAIN, SIGNAL = 0.69; EXPRESSED IN BONE MARROW, SIGNAL = 0.88; EXPRESSED IN HELA, SIGNAL = 0.88; SWISSPROT HIT: O83823, EVALUE 8.60e-01; NT HIT: gi14783067, EVALUE 2.70e-01
tcagtagactcccatggaaagagtaactgattcctcatggtgggaagcacttgagctgggagccgtacttcctttggtctgccagcagcctgggaaggatgggaaactagccaatgggcactggagctgtcctaggtcctgaacagccttctttcctccgtgaaaggcctgaatctggtttgtgttctcttcttccccaataccccctacccccacatttaaggtagtgtttccaaagcttgggattcgtagccgtggaagagcacaagatgacgttagggtgcgcagaac

SEQ ID NO: 22434 - DNA, 165 bp, Homo sapiens
  MAP TO AL109617.2; EXPRESSED IN BONE MARROW, SIGNAL = 1.8; EXPRESSED IN PLACENTA, SIGNAL = 1.6; EXPRESSED IN HEART, SIGNAL = 1.9; EXPRESSED IN BRAIN, SIGNAL = 1.3; EST_HUMAN HIT: BE144526.1, EVALUE 2.00e-14; SWISSPROT HIT: P11369, EVALUE 4.00e-11; NT HIT: AJ277557.1, EVALUE 2.00e-19
atgaaggaaaataaccatatgattatttcaactgacactaaaaaagcatttgatattattcagtatccttttatcataaaaaccttcaaaaacctgggtatagaaggaacatacctcaacaatataaaggccatgtacaacagacacagctcatatcatactgaa

SEQ ID NO: 22435 - DNA, 203 bp, Homo sapiens
  MAP TO AC010252.3; EXPRESSED IN FETAL LIVER, SIGNAL = 0.61; EXPRESSED IN BRAIN, SIGNAL = 0.86; EXPRESSED IN BONE MARROW, SIGNAL =   1; EXPRESSED IN PLACENTA, SIGNAL = 0.71; EXPRESSED IN HEART, SIGNAL = 1.1; SWISSPROT HIT: P04073, EVALUE 6.40e-01; EST_HUMAN HIT: BF572590.1, EVALUE 1.10e+00
gggatgtgtggcagacagcccatctcccggtgggtcaagagataagctggagtcaaaccctgattgatgactacagaaagaatcagttgggttgtggcttctgttctgtattaaagatcacaggacttattgatctaaagctggcaggctctctgcaggccagcaatgagttgagccagttgccaaagcagcaagaagaatga

SEQ ID NO: 22436 - DNA, 140 bp, Homo sapiens
  MAP TO AC010336.5; EXPRESSED IN HELA, SIGNAL = 0.83; EXPRESSED IN BRAIN, SIGNAL = 0.86; EXPRESSED IN LUNG, SIGNAL = 1.2; EXPRESSED IN BONE MARROW, SIGNAL = 0.86; EXPRESSED IN PLACENTA, SIGNAL = 0.55; SWISSPROT HIT: O43615, EVALUE 2.00e-19; NT HIT: gi14757909, EVALUE 3.00e-73; EST_HUMAN HIT: AV728034.1, EVALUE 4.00e-73
ggggtggagtccgtgaagaaggaaattgacgacagcgtcctgggacagaccgggccctaccggaggccccagcgactccggaagagaacggagtttgcgggagataagttcaaggaggagaaagtgtttgagccaaacga

SEQ ID NO: 22437 - DNA, 208 bp, Homo sapiens
  MAP TO AC000094.3; EXPRESSED IN BRAIN, SIGNAL = 0.54; EXPRESSED IN BONE MARROW, SIGNAL = 0.62; SWISSPROT HIT: P53675, EVALUE 4.00e-33; NT HIT: gi14776991, EVALUE 1.00e-113; EST_HUMAN HIT: BG324557.1, EVALUE 4.00e-37
ctttcagagctatcaccttagaggctggattcatgatggcactctctgcagagataggccgtcggatcggagccattgggtcactcatgtcaatgatcgtgacctgtgcctgctcaccaactttctctcggatacatatgaacttgtcagattccatggtcagtgtgctgaatccaatgttagctggattaattccaaggttttggag

SEQ ID NO: 22438 - DNA, 274 bp, Homo sapiens
  MAP TO AC016656.5; EXPRESSED IN BONE MARROW, SIGNAL = 0.44; EXPRESSED IN PLACENTA, SIGNAL = 0.88; EST_HUMAN HIT: AA999778.1, EVALUE 3.70e-01; SWISSPROT HIT: P21133, EVALUE 1.30e+00; NT HIT: AF009516.1, EVALUE 6.40e-02
gctgaacctggaaagccagaaacaagctttctgctcagggattgccttccccacctttctggcatacttcggagtttctgttcatcctgatgcccctgggaatttgaccttaacaagcaatgaagtctctctccttccccttctatctgttgggacttccctcacaccagatcctccttgttccctgcttcagcctcacagcatgctctcggtagaggagaggctaccagaagagaaggaggaggaggaggaaggggaggaggatgtggattaa

SEQ ID NO: 22439 - DNA, 127 bp, Homo sapiens
  MAP TO AC008806.4; EXPRESSED IN BRAIN, SIGNAL = 0.5; EXPRESSED IN BONE MARROW, SIGNAL = 0.67; SWISSPROT HIT: P52738, EVALUE 5.00e-12; NT HIT: gi16164416, EVALUE 1.10e-01; EST_HUMAN HIT: AI431925.1, EVALUE 2.00e-65
ggaacagtaacattcaaagatgtggctatcgacttcactcaggaggagtggaagagattggatcctgctcagagaaaactgtaccggaatgtgatgctagaaaactataacaacttaatcacagtag

SEQ ID NO: 22440 - DNA, 223 bp, Homo sapiens
  MAP TO AL049747.1; EXPRESSED IN BONE MARROW, SIGNAL = 4.6; EXPRESSED IN PLACENTA, SIGNAL = 4.8; EXPRESSED IN HEART, SIGNAL =  42; EXPRESSED IN BRAIN, SIGNAL = 4.4; NT HIT: gi11418037, EVALUE 1.00e-122; EST_HUMAN HIT: C05534.1, EVALUE 1.00e-122; SWISSPROT HIT: P02148, EVALUE 2.00e-38
ctccaggtacttcacggggatcttgtgcttggtggcatgcgactgtgccaggggcttaatctctgcctcatgatgccccttcttcttaaggatgccacccagggcggtgagcacggtggcaccatgcttctttaagtcctcagacgccttcatctcgtcctctgacttcaggtgcttgaacttgtcaaacttctccagagtctctgggtgacccttaaagagc

SEQ ID NO: 22441 - DNA, 172 bp, Homo sapiens
  MAP TO AC016830.5; EXPRESSED IN FETAL LIVER, SIGNAL = 0.64; EXPRESSED IN BONE MARROW, SIGNAL = 0.46; EXPRESSED IN PLACENTA, SIGNAL = 0.71; EXPRESSED IN HEART, SIGNAL = 0.93; EST_HUMAN HIT: BG774082.1, EVALUE 3.50e+00
acacagagcagcaccctctctcaaagcgcttcttctccaggccttccaggcccacagccgacccataagctcctctctcaatggctacagcctccgcctcctgtactgcctcctcctcctgttctctaattgtcctgggtctttccaccacttctgtctccacattgtggtc

SEQ ID NO: 22442 - DNA, 129 bp, Homo sapiens
  MAP TO AC006930.1; EXPRESSED IN HEART, SIGNAL = 3.4; EXPRESSED IN FETAL LIVER, SIGNAL = 2.5; EXPRESSED IN BRAIN, SIGNAL =   4; EXPRESSED IN LUNG, SIGNAL = 4.7; EXPRESSED IN BONE MARROW, SIGNAL = 4.6; EXPRESSED IN PLACENTA, SIGNAL = 3.8; NT HIT: L35931.1, EVALUE 4.30e-01; EST_HUMAN HIT: AW732965.1, EVALUE 2.00e-50
aggcagctgagcctccactgctgctcccaggtgcaagagctacagcagttgctggtggagagacaagaggagaaggagagcctgggacgggaggtggagagtttgcagagccggctgtccctgctggag

SEQ ID NO: 22443 - DNA, 225 bp, Homo sapiens
  MAP TO AC008901.4; EXPRESSED IN BRAIN, SIGNAL = 0.68; EXPRESSED IN LUNG, SIGNAL = 0.8; EXPRESSED IN BONE MARROW, SIGNAL = 0.58; NT HIT: gi7242221, EVALUE 1.00e-124; SWISSPROT HIT: P19883, EVALUE 8.00e-42; EST_HUMAN HIT: BG611931.1, EVALUE 1.00e-123
agacttgtcgggatgttttctgtccaggcagctccacatgtgtggtggaccagaccaataatgcctactgtgtgacctgtaatcggatttgcccagagcctgcttcctctgagcaatatctctgtgggaatgatggagtcacctactccagtgcctgccacctgagaaaggctacctgcctgctgggcagatctattggattagcctatgagggaaagtgtatca

SEQ ID NO: 22444 - DNA, 128 bp, Homo sapiens
  MAP TO AC003968.1; EXPRESSED IN PLACENTA, SIGNAL =  11; EXPRESSED IN FETAL LIVER, SIGNAL = 9.8; EXPRESSED IN BRAIN, SIGNAL = 8.3; EXPRESSED IN LUNG, SIGNAL = 4.3; EXPRESSED IN BONE MARROW, SIGNAL = 3.9; SWISSPROT HIT: P54259, EVALUE 9.00e-01; NT HIT: gi9790082, EVALUE 4.30e-01; EST_HUMAN HIT: AW510359.1, EVALUE 1.60e-01
ggatgctaaaggaaccaaacagatacccaatccttctaatgatgagatgtcacagccattcccaatgccgtatcttcccacctgtgcttcatcccatgccaccaccagtaataattggaatcatcatg

SEQ ID NO: 22445 - DNA, 243 bp, Homo sapiens
  MAP TO AC004509.1; EXPRESSED IN HEART, SIGNAL = 2.2; EXPRESSED IN FETAL LIVER, SIGNAL = 1.3; EXPRESSED IN BONE MARROW, SIGNAL = 0.96; EXPRESSED IN PLACENTA, SIGNAL = 1.6; NT HIT: U85962.3, EVALUE 0.00e+00; EST_HUMAN HIT: BE932404.1, EVALUE 0.00e+00; SWISSPROT HIT: Q92793, EVALUE 4.00e-24
ccatcctggggtctccagctagtggaattcaaaacacaattggttctgttggcacagggcaacagaatgccacttctttaagtaacccaaatcccatagaccccagctccatgcagcgagcctatgctgctctcggactcccctacatgaaccagccccagacgcagctgcagcctcaggttcctggccagcaaccagcacagcctcaaacccaccagcagatgaggactctcaaccccctgg

SEQ ID NO: 22446 - DNA, 153 bp, Homo sapiens
  MAP TO AC016639.5; EXPRESSED IN BRAIN, SIGNAL = 1.2; EXPRESSED IN FETAL LIVER, SIGNAL = 2.4; EXPRESSED IN BONE MARROW, SIGNAL = 1.1; EXPRESSED IN PLACENTA, SIGNAL = 1.6; EXPRESSED IN HEART, SIGNAL = 2.5; EST_HUMAN HIT: AI687433.1, EVALUE 1.30e-02; SWISSPROT HIT: Q64060, EVALUE 7.00e-24; NT HIT: gi16156979, EVALUE 6.00e-81
agtcttcccagaccctgtttgagcgcaagccatcaaatctcgtcctgcaagtatgataggaatactgtatttttgcacaggagtaagcttagtataaccagctttagcaatgttgttattcagtgtctgacagagattagcttcttcaaaagt

SEQ ID NO: 22447 - DNA, 197 bp, Homo sapiens
  MAP TO AC004143.1; EXPRESSED IN HEART, SIGNAL = 1.5; EXPRESSED IN BRAIN, SIGNAL = 1.5; EXPRESSED IN BONE MARROW, SIGNAL = 1.5; NT HIT: AL161509.2, EVALUE 7.00e-01; EST_HUMAN HIT: AW384196.1, EVALUE 1.00e+00; SWISSPROT HIT: O60879, EVALUE 1.30e+00
atgcagcccatcacaaatcaccctgtacctaggatgtgcatgttggtaccccttcctacctgggctgagggtggagtggtggagcctctctgctcccacggccccaaatactccatcatgggatggaggacgccagccaccctctattccaccaaaagccccacttgtgatgtgaatccaaccagcccagccacctg

SEQ ID NO: 22448 - DNA, 139 bp, Homo sapiens
  MAP TO AF134576.1; EXPRESSED IN FETAL LIVER, SIGNAL = 1.4; EXPRESSED IN HELA, SIGNAL = 1.4; EXPRESSED IN BONE MARROW, SIGNAL = 0.83; EXPRESSED IN PLACENTA, SIGNAL = 0.92; NT HIT: U10689.1, EVALUE 1.00e-72; EST_HUMAN HIT: BG179514.1, EVALUE 8.00e-16; SWISSPROT HIT: P47148, EVALUE 7.70e+00
cctctctactgtcagtcctgcagaatcagcctctgcttgcttgtgtaccctgaggtgccctctcactttttccttcaggttctcaggggacaggctgaccaggatcaccaggaagctccagaggatccccaggaggccc

SEQ ID NO: 22449 - DNA, 172 bp, Homo sapiens
  MAP TO AF254983.1; EXPRESSED IN FETAL LIVER, SIGNAL = 0.95; EXPRESSED IN LUNG, SIGNAL =   1; EXPRESSED IN BONE MARROW, SIGNAL = 0.81; EXPRESSED IN PLACENTA, SIGNAL = 0.95; SWISSPROT HIT: P55200, EVALUE 2.00e-04; EST_HUMAN HIT: AI138404.1, EVALUE 6.00e-82; NT HIT: AL163201.2, EVALUE 3.00e-92
ccctttcagcgatgtgcattttgtaagcactttggagccactatcaaatgctgtgaagagaaatgtacccagatgtatcattatccttgtgctgcaggagccgacacctttcaggatttcagtcacatcttcctgctttgtccagaacacattgaccaagctcctgaaagat

SEQ ID NO: 22450 - DNA, 332 bp, Homo sapiens
  MAP TO AF176815.1; EXPRESSED IN HEART, SIGNAL = 2.5; EXPRESSED IN FETAL LIVER, SIGNAL = 3.2; EXPRESSED IN BRAIN, SIGNAL = 2.1; EXPRESSED IN BONE MARROW, SIGNAL = 2.7; EXPRESSED IN PLACENTA, SIGNAL =   3; EST_HUMAN HIT: AL134968.1, EVALUE 0.00e+00; NT HIT: gi4757865, EVALUE 0.00e+00; SWISSPROT HIT: P55201, EVALUE 2.00e-41
atgagctatgcacaggcccagcgcatggtggaggtggacttgcatggccgcgtccaccgcatcagcatctttgacaacctggatgtggtgtcagaggatgaggaagcccccgaggaggcccctgagaatggcagcaacaaggagaacactgagacaccagctgctactcccaagtcaggcaaacataagaacaaggagaagcgcaaggactccaaccatcaccaccaccacaatgtttctgcgagcaccactcccaagctgccagaggtggtctatcgggagctggaacaggacacccctgatgccccaccccggccaacttcctattaccg

SEQ ID NO: 22451 - DNA, 222 bp, Homo sapiens
  MAP TO AD000091.1; EXPRESSED IN BONE MARROW, SIGNAL = 3.1; EXPRESSED IN PLACENTA, SIGNAL = 1.9; EXPRESSED IN HEART, SIGNAL = 2.1; EXPRESSED IN LUNG, SIGNAL = 2.9; EXPRESSED IN HELA, SIGNAL = 1.9; EXPRESSED IN FETAL LIVER, SIGNAL =   2; EXPRESSED IN BRAIN, SIGNAL = 2.1; EST_HUMAN HIT: AV655184.1, EVALUE 2.00e-51; NT HIT: gi14765713, EVALUE 1.00e-51; SWISSPROT HIT: P78329, EVALUE 4.00e-23
atgggggtcctgggcacagtcagagtccccaccccctcccccgggaactgcatcggccagacgttcgccatggctgagatgaaggtggtcctggcgctcactctgctgcgcttccgcgtcctgccggaccacgcggagccccgcaggaagttggagctgatcgtgcgcgcggaggatggactttggctacgggtggagcccctgagcgcggatctgcagtga

SEQ ID NO: 22452 - DNA, 83 bp, Homo sapiens
  MAP TO AC010379.4; EXPRESSED IN BRAIN, SIGNAL = 0.82; EXPRESSED IN LUNG, SIGNAL = 0.65; EXPRESSED IN BONE MARROW, SIGNAL = 0.99; EXPRESSED IN PLACENTA, SIGNAL = 0.87; EST_HUMAN HIT: BF806013.1, EVALUE 5.00e-19; NT HIT: AL163246.2, EVALUE 1.00e-15
tttacggctaaagaatttgcggcagtgggctcatgctcatggaattcactggtgttgccatgttcctcatcatcctgaagcag

SEQ ID NO: 22453 - DNA, 174 bp, Homo sapiens
  MAP TO AC012000.3; EXPRESSED IN HEART, SIGNAL =   1; EXPRESSED IN FETAL LIVER, SIGNAL = 0.53; EXPRESSED IN BONE MARROW, SIGNAL = 0.93; EXPRESSED IN PLACENTA, SIGNAL = 0.81; NT HIT: gi14721097, EVALUE 2.00e-93; SWISSPROT HIT: P36297, EVALUE 1.10e+00; EST_HUMAN HIT: BE940082.1, EVALUE 8.90e-01
tcagaatacgatgtcccaggccacattttccatgatcagggaaacagatcccttctgatgccagccatcggtagcacattggatcctcacaaggaacagactccaccaaatgagggcaatgccctgcaggccctgtagattccatgaggacatggcgctgcctcgttctaaatc

SEQ ID NO: 22454 - DNA, 200 bp, Homo sapiens
  MAP TO AC018766.2; EXPRESSED IN LUNG, SIGNAL = 0.98; EXPRESSED IN HELA, SIGNAL = 1.3; EXPRESSED IN BONE MARROW, SIGNAL = 1.2; EXPRESSED IN PLACENTA, SIGNAL = 0.9; SWISSPROT HIT: Q01109, EVALUE 2.50e+00; EST_HUMAN HIT: AI630720.1, EVALUE 1.00e-106; NT HIT: AB034704.1, EVALUE 7.10e-01
tacagacagcgtcatgacagggggacttggcaggacaccttgatccaaggcgacagcatttggcaaggacacggaagttgggtcgttgcatccatcatcaggagttgacttgttctgagcaactgaacagaacacaccgcgatgctctcgacacttccgctcctggacttcagtcacgagtgagttgatggtgacttgac

SEQ ID NO: 22455 - DNA, 117 bp, Homo sapiens
  MAP TO AC005174.1; EXPRESSED IN HEART, SIGNAL = 4.6; EXPRESSED IN BRAIN, SIGNAL = 2.6; EXPRESSED IN FETAL LIVER, SIGNAL = 2.1; EXPRESSED IN HELA, SIGNAL = 4.2; EXPRESSED IN BONE MARROW, SIGNAL = 2.9; EXPRESSED IN PLACENTA, SIGNAL =   2; NT HIT: gi14784356, EVALUE 4.00e-44; SWISSPROT HIT: P54198, EVALUE 2.70e+00; EST_HUMAN HIT: AI590753.1, EVALUE 6.00e-44
ttgactcatcacttgagaagacaacttttggtttcttttcggaagctcgctgctgggtgttcggatgccgatgggtagtacgacggggctctggtgtgacgaagtcattgtctgagg

SEQ ID NO: 22456 - DNA, 210 bp, Homo sapiens
  MAP TO AC011311.11; EXPRESSED IN LUNG, SIGNAL = 1.2; EXPRESSED IN HELA, SIGNAL = 2.4; EXPRESSED IN BRAIN, SIGNAL = 1.5; EXPRESSED IN BONE MARROW, SIGNAL = 0.73; EXPRESSED IN HEART, SIGNAL = 2.4; SWISSPROT HIT: Q01634, EVALUE 7.20e+00; EST_HUMAN HIT: AI087820.1, EVALUE 1.00e-06; NT HIT: AF111710.1, EVALUE 4.80e-02
agttctgaatacgtgattttgaccatttttgctaggcttcatgttgcctttatggaggagagaattttcagaggtccttactctgttaatttcactgatgtcactaaagttacagttttaactcttatgggtatctatcttttcaggcaatgtcagtttagtaaaagggacaggatgttagcaaaggaaggcattaccagcaataagaag

SEQ ID NO: 22457 - DNA, 121 bp, Homo sapiens
  MAP TO AC012083.6; EXPRESSED IN HEART, SIGNAL = 1.3; EXPRESSED IN BRAIN, SIGNAL = 1.3; EXPRESSED IN HELA, SIGNAL = 1.5; EXPRESSED IN BONE MARROW, SIGNAL = 1.2; EXPRESSED IN PLACENTA, SIGNAL = 1.3; NT HIT: AF147497.1, EVALUE 6.20e+00; EST_HUMAN HIT: AI222376.1, EVALUE 2.00e-03
ttattgtattattgtgttgagggtccccaacataatcagtgtttgcagtattattgtgttgatggtccccaacatcacgtctaggtttgatgattcattagaattcacaggactcagtata

SEQ ID NO: 22458 - DNA, 378 bp, Homo sapiens
  MAP TO AC008626.5; EXPRESSED IN PLACENTA, SIGNAL = 0.59; EXPRESSED IN HEART, SIGNAL = 0.94; EXPRESSED IN BONE MARROW, SIGNAL = 0.69; NT HIT: gi13430887, EVALUE 1.00e-96; SWISSPROT HIT: Q05481, EVALUE 1.00e-58; EST_HUMAN HIT: AI566486.1, EVALUE 1.00e-91
cacactcttcacatttgtagggtttctttccagtatgaattatcctatgtttagtaaggcgtgagaaatggctaaaagctttgccacgttcttcacatttgtagggtttctctccagtatgaattgatttatgtttagtaaggtgtgaggattgcttaaaagctttgccacattcttcacatttgtacggtttctccccagtatgaattatcttatgtttcataagggtcgagaaattgttaaaacctttgccacattcttcacatttgtacggtttctccccagtatgaattatcttatgtttcataagggttgaggaattgttaaaagctttgccacattcttcacatttgtagggtttctttccagtataattat

SEQ ID NO: 22459 - DNA, 196 bp, Homo sapiens
  MAP TO AC010596.5; EXPRESSED IN BONE MARROW, SIGNAL = 1.1; EXPRESSED IN PLACENTA, SIGNAL = 0.77; EXPRESSED IN BRAIN, SIGNAL = 0.79; EXPRESSED IN FETAL LIVER, SIGNAL = 0.63; NT HIT: gi13644446, EVALUE 2.00e-07; SWISSPROT HIT: Q9I9E1, EVALUE 3.30e+00; EST_HUMAN HIT: AV718651.1, EVALUE 2.00e-05
gtggtgtatctggatagccaaattcacagcgacagaaaatagaatggtagttgccaagggttacaggaaaggaaagaatggggaggtaacgtttaatgagtatagagtttcttctgttggagaagatgaaaaagttctggaggtagatgatggtgattgttgcaataacaacttgcatgtgcttaatgccaaagga

SEQ ID NO: 22460 - DNA, 264 bp, Homo sapiens
  MAP TO AC012152.12; EXPRESSED IN HELA, SIGNAL = 1.2; EXPRESSED IN BRAIN, SIGNAL = 1.3; EXPRESSED IN BONE MARROW, SIGNAL = 0.95; EXPRESSED IN PLACENTA, SIGNAL = 1.2; NT HIT: AL161555.2, EVALUE 2.40e-01
caatgatctgcaggaaaagaactccacttttctatgattcctactttcagtctggcagtggtgctgtagcaaggatatggcggtgacgttattaacagcaatagcagtagtggtgatggaaaccctggtggcagtagtgatgatgacagcactctggtggcaggaatggtggcaatcaagaaagcagcagcagccagtgaatgcaggcttctggattctttcttagtcacccaagtctccaagagagctgacttagtgttacag

SEQ ID NO: 22461 - DNA, 168 bp, Homo sapiens
  MAP TO AC000072.2; EXPRESSED IN HEART, SIGNAL = 0.93; EXPRESSED IN BRAIN, SIGNAL = 0.99; EXPRESSED IN FETAL LIVER, SIGNAL = 0.5; EXPRESSED IN BONE MARROW, SIGNAL = 0.89; EXPRESSED IN PLACENTA, SIGNAL = 0.86; SWISSPROT HIT: P53675, EVALUE 3.00e-18; NT HIT: U41763.1, EVALUE 7.00e-90; EST_HUMAN HIT: H55707.1, EVALUE 1.00e-89
ctttgggatgttgacacgggaccagaaaagctccagatgctccagcatcttctgtggcttgaatttggagtagaggatggccagctcagtgaacatgcccatgtgggcccgctccaggcccagggccgcttccaacagcaagatcagctcctcaaagtagccacgatc

SEQ ID NO: 22462 - DNA, 288 bp, Homo sapiens
  MAP TO AC011452.5; EXPRESSED IN BONE MARROW, SIGNAL = 1.2; EXPRESSED IN PLACENTA, SIGNAL = 0.97; EXPRESSED IN HEART, SIGNAL =   1; EXPRESSED IN BRAIN, SIGNAL = 0.44; EXPRESSED IN FETAL LIVER, SIGNAL = 1.5; SWISSPROT HIT: Q10571, EVALUE 2.50e+00; NT HIT: AF337818.1, EVALUE 0.00e+00; EST_HUMAN HIT: BF663289.1, EVALUE 1.00e-104
accctccacagctgctgggcccctcctgctcctgggaggctgagggtctgcactgcagctgctcctcccaggccagcccggccccctctctgcgctggtggcttggggaggagctgctggaggggaacagcagtcagggctccttcgaggtcacccccagctcagccgggccctgggccaacagctccctgagcctccatggagggctcagctccggcctcaggctccgctgtaaggcctggaacgtccacggggcccagagtggctctgtcttccagctgctaccag

SEQ ID NO: 22463 - DNA, 235 bp, Homo sapiens
  MAP TO AC008705.4; EXPRESSED IN FETAL LIVER, SIGNAL = 0.58; EXPRESSED IN HELA, SIGNAL = 0.51; EXPRESSED IN BRAIN, SIGNAL = 0.71; EXPRESSED IN BONE MARROW, SIGNAL = 0.59; EXPRESSED IN PLACENTA, SIGNAL = 0.63; SWISSPROT HIT: P25823, EVALUE 6.00e-03; NT HIT: gi9910319, EVALUE 9.00e-78; EST_HUMAN HIT: BF363040.1, EVALUE 4.00e-62
cgggtctccagtggcacgttgctgtttagcacccagctgtcctgaagctgaacggactctggtgtggtggccaggtcattgggcgctggggccggggcgtggatctgactccgccgattggtcagtgagttcctgttgagggagttggcggacgagtggtgatgggacagcgtgtggttgtgagggggtgggagagggggcctcagagtcgactggctgtggtggttcggagggc

SEQ ID NO: 22464 - DNA, 173 bp, Homo sapiens
  MAP TO AC009145.4; EXPRESSED IN BONE MARROW, SIGNAL = 0.64; EXPRESSED IN BRAIN, SIGNAL = 0.9; EXPRESSED IN FETAL LIVER, SIGNAL = 1.7; SWISSPROT HIT: P22543, EVALUE 1.50e+00
ctaaatcacaacataattggagccctgtttgtcttcaacctgaacactgatcatgtagaaggagcggtattggttactgtcctctccctctgccacctcctgccaatgcaagccagtgctgaggaatgtctggtccagggtaaccaaaaagaaggcgcacatactcttcatgt

SEQ ID NO: 22465 - DNA, 96 bp, Homo sapiens
  MAP TO AL031713.6; EXPRESSED IN BONE MARROW, SIGNAL = 5.6; EXPRESSED IN PLACENTA, SIGNAL = 7.9; EXPRESSED IN HEART, SIGNAL =   7; EXPRESSED IN BRAIN, SIGNAL =   5; EXPRESSED IN LUNG, SIGNAL = 7.6; EXPRESSED IN FETAL LIVER, SIGNAL = 7.1; EST_HUMAN HIT: BI039715.1, EVALUE 2.00e-31; NT HIT: AL163283.2, EVALUE 3.00e-01
aataccccaccccttaataccatcacagtgaccatcagcttcagcataggaattctgggggcacattccgaccacagcacctaccttatggctaca

SEQ ID NO: 22466 - DNA, 146 bp, Homo sapiens
  MAP TO AC022150.5; EXPRESSED IN LUNG, SIGNAL = 0.85; EXPRESSED IN FETAL LIVER, SIGNAL = 1.6; EXPRESSED IN BONE MARROW, SIGNAL = 0.51; EXPRESSED IN PLACENTA, SIGNAL = 1.6; EXPRESSED IN HEART, SIGNAL =   2; EST_HUMAN HIT: BG614965.1, EVALUE 7.30e-01; NT HIT: AE003888.1, EVALUE 1.30e-01; SWISSPROT HIT: O60437, EVALUE 4.50e+00
gcagggctttgcattttacattcttgtttgcatccccgttccagacaattccagggctttcgaatcgtgcttcagccttcctgaccgctctcgcctccaaagcccgaaaaatagagtcgctgggagcgaggctgagagacgcacag

SEQ ID NO: 22467 - DNA, 474 bp, Homo sapiens
  MAP TO AC010451.5; EXPRESSED IN BONE MARROW, SIGNAL = 0.9; EXPRESSED IN PLACENTA, SIGNAL = 0.46; EST_HUMAN HIT: AW889906.1, EVALUE 6.60e-01; SWISSPROT HIT: P47081, EVALUE 2.50e+00; NT HIT: X76078.1, EVALUE 4.50e-01
atatcagattcacctagcgctacctatggagattctaagacttatcccactgattatcagtggtttcttcatcacaaaccaggtcaccatgtggtaggttggttgcagaaagatcctaataagtctccccatatctactccttcagttctataatttttacttctctccaactctgccttggactcagccatgtgacttacattaaccaattggatgcgaagaaaatcacatcaacgtacactaaatttccatgtgcctttttgcataattgggcttgctgggttttggctctctgcatttaccgtgatgacatgtgtggagggactgaggaatgtgagagtcccgtggatgagagcccagttgtctcagccattgcaactgaaaccatcataaactggtcacagccactgaccccaaacatgtcaggcagcccagcctccatcagcagaggcactcaccagacctgcagctga

SEQ ID NO: 22468 - DNA, 119 bp, Homo sapiens
  MAP TO AC002114.1; EXPRESSED IN BONE MARROW, SIGNAL = 0.39; NT HIT: U00691.1, EVALUE 1.50e+00
atatccaggttgcggtgacagttgcatacagtatcttaatttcaggaagagatggaattttccaaaattgactaacagtgaggagtgggaggttgctccaattaagcactcggtcctct

SEQ ID NO: 22469 - DNA, 457 bp, Homo sapiens
  MAP TO AL031903.1; EXPRESSED IN HEART, SIGNAL =   1; EXPRESSED IN BRAIN, SIGNAL = 0.63; EXPRESSED IN FETAL LIVER, SIGNAL = 5.1; EXPRESSED IN LUNG, SIGNAL = 4.3; EXPRESSED IN BONE MARROW, SIGNAL = 1.1; EXPRESSED IN PLACENTA, SIGNAL =  13; SWISSPROT HIT: P05783, EVALUE 4.00e-59; EST_HUMAN HIT: BE621583.1, EVALUE 0.00e+00; NT HIT: gi4557887, EVALUE 0.00e+00
ctatcctgcgggtggtggtcttttggatggtttgcatgaagttgctgctgtacagggcatcaccaagattgaagtccttccttcttcccccaggtagtggtaggtggtgatctcagcctccagcttgaccttgatgttcagcagggcctcgtactcctgggcctggtgctgcccctctgcccgtgtctgtgctagctcagactccaggtgcagcaggaccccactgagttgcttcatctgcatggtgtagtgggcctctgcttccctcaggctgttctccaagctggccttcagatttctcatcgagtccaggttaatctccaaggactggactgtatgtctcagctctgtgagtatcatctcagcaactccgatctcagcagcctgcttggtgaccactgtggtgctctcctcaatctgctgggaccagtacatgtccagctcttctgggttcttc

SEQ ID NO: 22470 - DNA, 206 bp, Homo sapiens
  MAP TO AC010328.4; EXPRESSED IN LUNG, SIGNAL = 1.6; EXPRESSED IN BRAIN, SIGNAL = 0.94; EXPRESSED IN BONE MARROW, SIGNAL = 0.89; EXPRESSED IN HEART, SIGNAL = 0.95; SWISSPROT HIT: P33725, EVALUE 2.80e-01
gaagggtggcgagaagttcagaagctaagtgggccatgaaggaggcactccctaaacagcgggggaattttgcaggggactgtgagtggagagacaaggggacaatggcagcctccctcatgagatctggggcctctctttttcttggacatcctccgccagctcaatccggccaatcttcacctgcctttaaactggattccatg

SEQ ID NO: 22471 - DNA, 192 bp, Homo sapiens
  MAP TO AC008762.5; EXPRESSED IN BRAIN, SIGNAL = 0.51; EXPRESSED IN LUNG, SIGNAL = 0.96; EXPRESSED IN BONE MARROW, SIGNAL = 1.3; EXPRESSED IN PLACENTA, SIGNAL = 0.9; NT HIT: L03532.1, EVALUE 1.00e-104; EST_HUMAN HIT: BI551891.1, EVALUE 1.00e-104; SWISSPROT HIT: P52272, EVALUE 3.00e-08
atttgctacaaatactgtgcttccaagtcttccagcctgtaatgcatggataatctcatttgggatgttgggattatttaggatactgggtgggatagtaatcattcctgggccacctggtcccatacccatcccaccagtcgtagccatcaccttttgcattgctctcctggcatgttcaccatcaggatc

SEQ ID NO: 22472 - DNA, 146 bp, Homo sapiens
  MAP TO AC011891.2; EXPRESSED IN BONE MARROW, SIGNAL = 2.2; EXPRESSED IN PLACENTA, SIGNAL = 1.8; EXPRESSED IN HEART, SIGNAL = 1.6; EXPRESSED IN FETAL LIVER, SIGNAL = 1.5; SWISSPROT HIT: Q08427, EVALUE 2.30e-01; EST_HUMAN HIT: BE297082.1, EVALUE 2.90e+00
ctccacctcctcctccatcagaacggcgaggcaaacgcgcagaacagaaaggggctgtggggcagcggccagattggattttctctccgcagccccaaagggatgtttctaatgacccaaggaaaattagtggtggtcctggaact

SEQ ID NO: 22473 - DNA, 115 bp, Homo sapiens
  MAP TO AC003980.1; EXPRESSED IN BONE MARROW, SIGNAL = 0.61; NT HIT: AL163285.2, EVALUE 2.00e-09; EST_HUMAN HIT: AI678205.1, EVALUE 2.00e-07
ttaattatgttgatgctttttattcctttgctcaatttcatttagttctgctctgatctttttcttttcttctgcaagctcgaagtaggtttgttcttgtttttctagttccttg

SEQ ID NO: 22474 - DNA, 203 bp, Homo sapiens
  MAP TO AC004391.1; EXPRESSED IN BONE MARROW, SIGNAL = 0.53; EXPRESSED IN PLACENTA, SIGNAL = 0.53; NT HIT: AF267747.1, EVALUE 1.80e-01; EST_HUMAN HIT: BF530852.1, EVALUE 2.70e-01; SWISSPROT HIT: Q9Y6D6, EVALUE 1.90e+00
aacctggggtagttggagagaaacaacaaaatcagcctatacttgaatggactccaaagagacattatgtgctcaatgtccagccaggtcctactgagaataagaagacaaagggcaaaccaagtttagggatttttgatgaaatagtatgggagtttggtgagggaggactgaattcgagagagcttgttgaaggagtctgg

SEQ ID NO: 22475 - DNA, 376 bp, Homo sapiens
  MAP TO AF205588.1; EXPRESSED IN BONE MARROW, SIGNAL = 0.65; EXPRESSED IN PLACENTA, SIGNAL = 0.75; EXPRESSED IN FETAL LIVER, SIGNAL = 0.57; SWISSPROT HIT: P17013, EVALUE 2.00e-20; NT HIT: AJ245588.1, EVALUE 0.00e+00; EST_HUMAN HIT: AL568291.1, EVALUE 8.00e-03
atgcctcatgacctcagtgcatatggaaaactattcctcaatagtaaccatgaaaaaactcatatggaagagaaaccttatgagtttattcaaaatggaaaatgtctcagtcataaggaggacttcatttcatatctgagaattcaaaatttagagcaatcttttgaatataaggaatgtgaaaaggatttctatggaaaggcagttttcattacatataagcaagcttacacaggagcgagtccttgtgtacacaatgaatgtaataaagtgttctgtaataattcaactctcatggtccataaaatgtcagaaaaaagagaaaacttttatgagtttaatgaatatgaaaaaacctttgagaagtcccctttct

SEQ ID NO: 22476 - DNA, 108 bp, Homo sapiens
  MAP TO AC008563.4; EXPRESSED IN HEART, SIGNAL = 1.3; EXPRESSED IN FETAL LIVER, SIGNAL = 1.1; EXPRESSED IN BONE MARROW, SIGNAL = 0.88; EXPRESSED IN PLACENTA, SIGNAL = 1.3; NT HIT: gi16158809, EVALUE 3.00e-54; EST_HUMAN HIT: BE163581.1, EVALUE 4.00e-54
ttatgaggaaacttctcgtacaatgatgagttcaactgtattctggaaagtttttagcaaggacactgcttgtccatgttcaatatttataaaactgtagccattagc

SEQ ID NO: 22477 - DNA, 140 bp, Homo sapiens
  MAP TO AC022073.13; EXPRESSED IN HEART, SIGNAL = 3.8; EXPRESSED IN PLACENTA, SIGNAL = 4.3; EXPRESSED IN LUNG, SIGNAL = 7.1; EXPRESSED IN FETAL LIVER, SIGNAL = 4.1; EXPRESSED IN BRAIN, SIGNAL = 4.4; EXPRESSED IN BONE MARROW, SIGNAL = 5.3; SWISSPROT HIT: Q92628, EVALUE 2.00e+00; NT HIT: AL163249.2, EVALUE 5.00e-47; EST_HUMAN HIT: BF756324.1, EVALUE 2.00e-56
agctgtaacactcaccacgaaggtctgcagcttcactcctgaagccagcgagaccacgaacccaccgggaggaacaaacaactccagacacgccaccttaagagctgtaacactcaccgcgaaggtccgcagcttcactc

SEQ ID NO: 22478 - DNA, 180 bp, Homo sapiens
  MAP TO AC016630.5; EXPRESSED IN LUNG, SIGNAL = 1.8; EXPRESSED IN BONE MARROW, SIGNAL =   3; EXPRESSED IN PLACENTA, SIGNAL = 2.5; EXPRESSED IN HEART, SIGNAL = 3.5; SWISSPROT HIT: O14177, EVALUE 4.00e-04; NT HIT: gi14755620, EVALUE 5.00e-97; EST_HUMAN HIT: BG654480.1, EVALUE 8.00e-97
gatgctgttcgcatcatggcaaaagacttggtgcgcacccggcgctatgtgcgcaagtttgtattgatgcgggccaacatccaggctgtgtccctcaagatccagacactcaagtccaacaactcgatggcacaagccatgaagggtgtcaccaaggccatgggcaccatgaacagacag

SEQ ID NO: 22479 - DNA, 444 bp, Homo sapiens
  MAP TO AC010168.6; EXPRESSED IN BONE MARROW, SIGNAL = 7.1; EXPRESSED IN FETAL LIVER, SIGNAL = 7.6; EST_HUMAN HIT: BG721557.1, EVALUE 0.00e+00; SWISSPROT HIT: P02263, EVALUE 2.00e-60; NT HIT: gi14754397, EVALUE 0.00e+00
tcatttgctcttcgtcttctgactctccgtcttcttgggcagcagcacggcctggatgttgggcaggacgccgccctgagcgatggtcactttgcccagcagcttgtttaactcctcgtcgttgcggatggcgagctgcaggtggcggggaattatcctggtcttcttgttgtcacgcgcggcgttgccagccagctccaggatctccgccgtaaggtactccaacaccgccgccaggtacaccggcgccccggcgcccactcgctccgcgtagttccctttgcgcagcagtctgtgcactcggcccaccgggaactgcaggcccgcgcgggaggagcgggatttggcctttgctcgcactttgccgccctgtttcccgcgaccggacatgatcacctctcgcctacaactccagagacggagacaaaccgctctcggcgtccg

SEQ ID NO: 22480 - DNA, 173 bp, Homo sapiens
  MAP TO AL121928.13; EXPRESSED IN BRAIN, SIGNAL = 0.98; EXPRESSED IN LUNG, SIGNAL = 2.2; EXPRESSED IN BONE MARROW, SIGNAL = 1.2; EXPRESSED IN PLACENTA, SIGNAL = 1.1; EXPRESSED IN FETAL LIVER, SIGNAL = 1.2; SWISSPROT HIT: Q00653, EVALUE 8.00e-27; NT HIT: S76638.1, EVALUE 8.00e-93; EST_HUMAN HIT: BE772586.1, EVALUE 1.00e-92
ggccgggactgtcacttggtgatacagctctgcagaacctggagcagctgctagacgggccagaagcccagggcagctgggcagagctggcagagcgtctggggctgcgcagcctggtagacacgtaccgacagacaacctcacccagtggcagcctcctgcgcagctacgag

SEQ ID NO: 22481 - DNA, 179 bp, Homo sapiens
  MAP TO AC010389.6; EXPRESSED IN FETAL LIVER, SIGNAL = 0.84; EXPRESSED IN LUNG, SIGNAL = 1.3; EXPRESSED IN BONE MARROW, SIGNAL =   1; EXPRESSED IN PLACENTA, SIGNAL = 0.78; SWISSPROT HIT: Q10731, EVALUE 5.00e-01; NT HIT: AJ278581.1, EVALUE 2.00e-19; EST_HUMAN HIT: AA601759.1, EVALUE 2.00e-17
tgtttctgctgctccatcagtgagcgcaactattccaatcagcaacgtccagggactgctgcaggttcttgggcaggggttatttctgctgatgcattgttgggcacaactattctgatcagcagggtccagggaccgttgtgggttcttgggcaagaggtgtttctgctgctgcgtcg

SEQ ID NO: 22482 - DNA, 546 bp, Homo sapiens
  MAP TO AC004826.3; EXPRESSED IN BONE MARROW, SIGNAL = 1.1; EXPRESSED IN FETAL LIVER, SIGNAL = 0.61; EST_HUMAN HIT: AI741277.1, EVALUE 1.20e-02; SWISSPROT HIT: Q9H1J5, EVALUE 1.00e-107; NT HIT: gi14781158, EVALUE 0.00e+00
gcagtgagagccaccatgaaaaggacatgcaaatgtcatggcatctctgggagctgcagcatacagacatgctggctgcagctggctgaattccgggagatgggagactacctaaaggccaagtatgaccaggcgctgaaaattgaaatggataagcggcagctgagagctgggaacagcgccgagggccactgggtgcccgctgaggccttccttcctagcgcagaggcggaactgatctttttagaggaatcaccagattactgtacctgcaattccagcctgggcatctatggcacagagggtcgtgagtgcctacagaacagccacaacacatccaggtgggagcgacgtagctgtgggcgcctgtgcactgagtgtgggctgcaggtggaagagaggaaaactgaggtcataagcagctgtaactgcaaattccagtggtgctgtacggtcaagtgtgaccagtgtaggcatgtggtgagcaagtattactgcgcacgctccccaggcagtgcccagtccctgggtaagggcagtgcctga

SEQ ID NO: 22483 - DNA, 92 bp, Homo sapiens
  MAP TO AC007793.1; EXPRESSED IN HEART, SIGNAL =   2; EXPRESSED IN LUNG, SIGNAL = 7.5; EXPRESSED IN BONE MARROW, SIGNAL = 2.8; NT HIT: L78810.1, EVALUE 5.00e-40; EST_HUMAN HIT: AI961087.1, EVALUE 2.00e-37; SWISSPROT HIT: Q15811, EVALUE 8.10e+00
atgcctgagcctcccacccactccatgggctcctgtgcggcccgagcctccccgacgagcaccaccccctgctccacggcgcccagtcccat

SEQ ID NO: 22484 - DNA, 255 bp, Homo sapiens
  MAP TO AC004858.2; EXPRESSED IN BONE MARROW, SIGNAL =   1; EXPRESSED IN HELA, SIGNAL = 0.95; EXPRESSED IN FETAL LIVER, SIGNAL = 0.59; NT HIT: D84149.1, EVALUE 0.00e+00; EST_HUMAN HIT: BI753252.1, EVALUE 0.00e+00; SWISSPROT HIT: P49768, EVALUE 1.00e-35
gtacagctgcccatccttccgggtataaaagctgactgacttaatggtagccacgaccaccaccatgcagagagtcacagggacaaagagcatgatcacatgcttggcgccatatttcaatgtcagctcctcatcttcttcctcatcttgctccaccacctgccgggagttaccctggggtcgtccattagataatggctcagggtggccaaggctccgtctgtcgttgtgctcctgccgttctctattgtcatt

SEQ ID NO: 22485 - DNA, 208 bp, Homo sapiens
  MAP TO AC010336.5; EXPRESSED IN FETAL LIVER, SIGNAL = 0.5; EXPRESSED IN BONE MARROW, SIGNAL = 0.5; SWISSPROT HIT: Q9KQ30, EVALUE 4.20e+00; NT HIT: AB055110.1, EVALUE 1.90e-01
ttacccagcattctcagcctggctcaaattccaaagctggcctgccttccttgaggtttctggcttgaagacaaggctggggaagcttctctggacggaatggagctgaattttaaaatccagctctagaaatcccatcatacagtcggtcctgctcttgatggggcgggctatatgggcggtggggttgggtgaactgctccttagc

SEQ ID NO: 22486 - DNA, 287 bp, Homo sapiens
  MAP TO AL049764.4; EXPRESSED IN BONE MARROW, SIGNAL = 4.1; EXPRESSED IN PLACENTA, SIGNAL = 4.3; EXPRESSED IN HEART, SIGNAL =   3; EXPRESSED IN BRAIN, SIGNAL = 3.9; EXPRESSED IN FETAL LIVER, SIGNAL = 4.4; EXPRESSED IN LUNG, SIGNAL = 4.1; EST_HUMAN HIT: AW083950.1, EVALUE 0.00e+00; SWISSPROT HIT: O43808, EVALUE 3.00e-21; NT HIT: gi16168476, EVALUE 0.00e+00
aagccaatgagggtaacatttgtggtggcaggagccagagtcaagggagaatcacttctcttcactcaggaggaaacctccctcttgagcatcttcggaatttttcatgggaaggcgtctcagtgttggtgtgcacgcttcagccccataactgtgaaggtggcagctgtcagtttctcataaacaaggaacatgagagcagcagtgaggactgtctgcagcagtttggcttcaaggcctttgtagagtcccattattccaaaacgtctaaagggaaagaggtttga

SEQ ID NO: 22487 - DNA, 305 bp, Homo sapiens
  MAP TO AC025436.2; EXPRESSED IN FETAL LIVER, SIGNAL = 1.6; EXPRESSED IN BONE MARROW, SIGNAL = 0.64; EXPRESSED IN PLACENTA, SIGNAL = 1.3; SWISSPROT HIT: O29366, EVALUE 9.50e-01; NT HIT: gi14861873, EVALUE 0.00e+00; EST_HUMAN HIT: BG289708.1, EVALUE 1.60e+00
ttcgactttgcttacacaagaaacagctgcctccccttgcggaagtcggaagccaagcgcatttcaaaacagcttctgtggccgcaatttttctcaggctcttacagaatagatttcaaaacagttttaattaattcaataaaaagttcagctaaacttaggtatcaattggtcgctcagttagtgcagtacgcagaaagacaagaaagtccgcggaatccgctaagaccgagactacctgaagtcgctgtggctagcacttccggtaccggccctaaaagcggtcctaccagaaggaagaggaa

SEQ ID NO: 22488 - DNA, 162 bp, Homo sapiens
  MAP TO AF238380.1; EXPRESSED IN BONE MARROW, SIGNAL = 0.87; EXPRESSED IN PLACENTA, SIGNAL = 1.4; NT HIT: AF330054.1, EVALUE 1.40e-01; EST_HUMAN HIT: AW894425.1, EVALUE 2.10e-01; SWISSPROT HIT: P30414, EVALUE 4.40e+00
ggattgtgtagactctacactgtagaggatttgggaatcaaagctataagggtatattgtcagctctctgaagagtttgatggtctattttccagtacatgttttctatggctctttgaggaagggttctgtgccccagaatgtgaggtatctgaacttttg

SEQ ID NO: 22489 - DNA, 121 bp, Homo sapiens
  MAP TO AC010422.6; EXPRESSED IN BONE MARROW, SIGNAL = 1.3; EXPRESSED IN PLACENTA, SIGNAL = 1.2; EXPRESSED IN HEART, SIGNAL = 1.1; EXPRESSED IN HELA, SIGNAL = 1.6; EXPRESSED IN BRAIN, SIGNAL = 1.4; SWISSPROT HIT: P25387, EVALUE 1.00e-03; NT HIT: gi14759592, EVALUE 5.00e-62; EST_HUMAN HIT: BG325972.1, EVALUE 8.00e-62
ccggccgcatccagcacctcgtagccgtggccgctgtacgtccgcagcagcgtcccccgaagcgggttccacagcttcagcgtcttgtcactgccgcacgtcaggcagtaattgccatcca

SEQ ID NO: 22490 - DNA, 300 bp, Homo sapiens
  MAP TO AC010077.1; EXPRESSED IN LUNG, SIGNAL = 0.6; EXPRESSED IN PLACENTA, SIGNAL = 0.65; EXPRESSED IN BONE MARROW, SIGNAL = 0.62; EST_HUMAN HIT: AW392332.1, EVALUE 0.00e+00; SWISSPROT HIT: P26358, EVALUE 3.00e-34; NT HIT: AF202574.1, EVALUE 0.00e+00
aaaagctgaaaccctgcagccaagccgccttgtgtataacccgacatcagactccttctggccaactttgaccccgaagccttccctctagcaagcaggggcaccacctcgaggaagtagaagcggttggggccgcccatggagtacacctggacgcactcgggcaggtcctccccatactccacggtgcagcggccctgcacagccttgaagtccaccacggcctcctcgtcgctccagtagagcaggttgatgtctgcgtggtagctcgctggagtggacttgtgggtgttctcaggc

SEQ ID NO: 22491 - DNA, 196 bp, Homo sapiens
  MAP TO AC005605.1; EXPRESSED IN BONE MARROW, SIGNAL = 0.44; NT HIT: AE000718.1, EVALUE 4.40e-02; EST_HUMAN HIT: BI035310.1, EVALUE 1.00e-24; SWISSPROT HIT: O95013, EVALUE 3.00e-04
gttgcttcacagtcttcccttctatctgattcagtggaccaagtaaatgactctctggtaacagaatttgtattacttggacttgcacaatccttggaaatgcagtttttcctttttctcttcttctctttattctatgtgggaattatcctgggaaacctcttcattgtgttcacagtgatctttgatcctcact

SEQ ID NO: 22492 - DNA, 290 bp, Homo sapiens
  MAP TO AC021689.3; EXPRESSED IN FETAL LIVER, SIGNAL = 1.1; EXPRESSED IN BONE MARROW, SIGNAL =   1; EXPRESSED IN PLACENTA, SIGNAL =   1; NT HIT: AF288814.1, EVALUE 2.00e-76; EST_HUMAN HIT: AW104003.1, EVALUE 2.00e-73; SWISSPROT HIT: Q01514, EVALUE 1.00e-26
aaagattaccacaagcttcttctgaaattcctggcttttatctttgaaggagtactccatgaagactgcaatggcttccctctcacaaactgcatgcacgtccagcagctcctggagtgtgtctgtggggaatctcacttgctgggccatctgctggctgtagtggttggctgccctctgcacggctgctgagttctcacactgggccagaactgccattgcattctccagacaaggagtcgctccactgttgatggcatccaggtaggtctccaccagcatccccagcc

SEQ ID NO: 22493 - DNA, 165 bp, Homo sapiens
  MAP TO AC025761.3; EXPRESSED IN LUNG, SIGNAL = 2.1; EXPRESSED IN BONE MARROW, SIGNAL = 0.68; EXPRESSED IN PLACENTA, SIGNAL =   1; EXPRESSED IN HEART, SIGNAL = 1.2; EST_HUMAN HIT: BF573000.1, EVALUE 8.40e-01; SWISSPROT HIT: Q99338, EVALUE 2.60e+00; NT HIT: AF192767.1, EVALUE 5.70e-01
ttaatcaacttcgatgaacgtttctttttcggtttgatcaacagctttggcacagggagtagcactcactaaaatgatttcgtggatcacttttcttgtttctacagtttttgtgtagctgttcatgttgtataggacatgaacaaaatgaggtgggagccgcct

SEQ ID NO: 22494 - DNA, 182 bp, Homo sapiens
  MAP TO AB014080.1; EXPRESSED IN PLACENTA, SIGNAL = 1.2; EXPRESSED IN LUNG, SIGNAL = 0.99; EXPRESSED IN HELA, SIGNAL = 1.8; EXPRESSED IN BONE MARROW, SIGNAL = 0.65; EXPRESSED IN BRAIN, SIGNAL = 1.2; NT HIT: gi14759138, EVALUE 7.00e-81; EST_HUMAN HIT: AA306600.1, EVALUE 1.00e-80; SWISSPROT HIT: P99507, EVALUE 4.00e-04
tcactttgccacatatcctttgggaacagagacaccagtttcttgcaataattccatactcatgtattcatgtagtgagagattcctttgctgttgctgctgtacttggagtccatggttattaaacaatccagaacttcccagaacctgagcagcagcccgcagtgtggtccgaagggtgg

SEQ ID NO: 22495 - DNA, 264 bp, Homo sapiens
  MAP TO AC020948.6; EXPRESSED IN BRAIN, SIGNAL = 1.2; EXPRESSED IN BONE MARROW, SIGNAL = 1.2; SWISSPROT HIT: P56341, EVALUE 3.60e+00; NT HIT: gi15296404, EVALUE 3.00e-28; EST_HUMAN HIT: BF063684.1, EVALUE 5.00e-28
ctactgagcggtgtcgctggtagtgcactggaaggagtaggggttctcctgccacttgaggccatagagccacagagccacgcacagcttgtccccgtccttcacagagcccaacgcctcgccaagcacaaggcctccctgcctgacttgacaggtggggaagcggttgagactgcgcctcatggtggccaagctgttgccaccacgggggctcagggagccactgaggaccaggtgtgaaccgccactaggctcatccaccat

SEQ ID NO: 22496 - DNA, 429 bp, Homo sapiens
  MAP TO AC022103.4; EXPRESSED IN LUNG, SIGNAL = 1.1; EXPRESSED IN BONE MARROW, SIGNAL = 0.94; EXPRESSED IN PLACENTA, SIGNAL = 1.1; SWISSPROT HIT: P23942, EVALUE 1.20e+00; NT HIT: gi13376530, EVALUE 2.60e-02; EST_HUMAN HIT: BI769199.1, EVALUE 1.00e-23
gaattaggcaaacagtgccgccagcatccaggggaacctctgtccgcctggacagccacgtggactgtgtggaatgacgctggtgaaataccagaaactgtcagtagatggcagtcgtatacagatttggtgcaagtcattcgggagatgggcatgcggcaggctatgtttgacctgaatatctgggggccagatgatgaacgtttcaccttccacatgacggatctcctgttgggttctgcgtccccaagtgctttcagctccctagctgctgtcctcgccctgtacgtagggtgctgcatacatgaagtgaccactgctatggcggctctcggggaagcagcagaccatcactgggaccgcgccctaaagaaggagaagctgccccacccacaggagactccccccagaggagaaaacggagcccca

SEQ ID NO: 22497 - DNA, 106 bp, Homo sapiens
  MAP TO AL035535.1; EXPRESSED IN LUNG, SIGNAL = 2.6; EXPRESSED IN FETAL LIVER, SIGNAL =   3; EXPRESSED IN BONE MARROW, SIGNAL = 2.8; EXPRESSED IN PLACENTA, SIGNAL = 2.6; EXPRESSED IN HELA, SIGNAL = 2.7; EST_HUMAN HIT: BF922594.1, EVALUE 5.00e-32; SWISSPROT HIT: Q57809, EVALUE 3.60e+00; NT HIT: AL163227.2, EVALUE 3.00e-26
atgtgggaaaatttggaacttcctagagacttgttgaatgcatttgatgaaaatgctgatagtgataaggacaatgaaatccaggctgaggtggtctcagatggag

SEQ ID NO: 22498 - DNA, 218 bp, Homo sapiens
  MAP TO AC007023.3; EXPRESSED IN BONE MARROW, SIGNAL = 0.4; SWISSPROT HIT: Q28689, EVALUE 2.30e+00
gtctcttgcctgctttgggtccccagggaattatagacaatagccagagaaattacatgagaaaagaagatctagcttctctaaaacccaatggggaagtactcttctgtgaaaaggtccttaatatcgaattaaaaaataaagtacaggacagagaaaataaagtccagaacagggaaggaaacttatccaagcatataaatgaaatactgagctag

SEQ ID NO: 22499 - DNA, 210 bp, Homo sapiens
  MAP TO AC012313.5; EXPRESSED IN BONE MARROW, SIGNAL = 5.6; EXPRESSED IN HEART, SIGNAL =  11; EXPRESSED IN FETAL LIVER, SIGNAL =  12; EXPRESSED IN LUNG, SIGNAL = 4.2; EST_HUMAN HIT: BF026562.1, EVALUE 1.00e-114; NT HIT: gi16162724, EVALUE 1.00e-115; SWISSPROT HIT: P97461, EVALUE 6.00e-36
ctcgcctgtgagcaggtgtatgatctcgaaggcatgcttgacgatgcgcacagtcatgagcttcttgccgttgttgcggccgtgcatcatcatggagttagtgaggcgctccacaatgggacactgagctttgcggaagcgtttggcggcataccgccctgcactgtgaggcaggtacttggcatacttctccttcactgcaatgtaatc

SEQ ID NO: 22500 - DNA, 76 bp, Homo sapiens
  MAP TO AF015721.1; EXPRESSED IN LUNG, SIGNAL =   1; EXPRESSED IN FETAL LIVER, SIGNAL = 0.97; EXPRESSED IN PLACENTA, SIGNAL =   1; EXPRESSED IN BONE MARROW, SIGNAL = 1.1; NT HIT: AJ229043.1, EVALUE 2.00e-35; EST_HUMAN HIT: BE735195.1, EVALUE 3.30e-01
gatgctgcccttacaggctctggcatcaaggggctcctggtgctggttctagctccactgtttactcagctagcaa

SEQ ID NO: 22501 - DNA, 180 bp, Homo sapiens
  MAP TO AB015355.1; EXPRESSED IN HEART, SIGNAL = 4.8; EXPRESSED IN HELA, SIGNAL = 2.7; EXPRESSED IN FETAL LIVER, SIGNAL = 5.8; EXPRESSED IN BONE MARROW, SIGNAL = 0.69; EXPRESSED IN PLACENTA, SIGNAL = 2.7; SWISSPROT HIT: P49281, EVALUE 2.00e-22; NT HIT: AB015355.1, EVALUE 5.00e-97; EST_HUMAN HIT: AU133061.1, EVALUE 4.00e-80
acagtcatctgctcctatgttttcttccagggattcctgaacctaaagtggtcacgctttgcccgagtggttctgactcgctctattgccatcatccccactctgcttgttgctgtcttccaagatgtagagcatctaacagggatgaatgactttctgaatgttctacagagcttacag

SEQ ID NO: 22502 - DNA, 436 bp, Homo sapiens
  MAP TO AC010387.4; EXPRESSED IN FETAL LIVER, SIGNAL = 0.62; EXPRESSED IN BRAIN, SIGNAL = 1.1; EXPRESSED IN PLACENTA, SIGNAL = 0.78; EXPRESSED IN BONE MARROW, SIGNAL = 0.63; EST_HUMAN HIT: AA082659.1, EVALUE 0.00e+00; SWISSPROT HIT: Q9Y6N8, EVALUE 2.00e-72; NT HIT: AF039747.1, EVALUE 0.00e+00
ttatagtagtactgtttgcagctctgaaaagacagcgaaaaaaagagcctctgatcttgtcaaaagaagatatcagagacaacattgtgagctataacgatgagggtggtggagaggaggacacccaggcctttgatatcggcaccctgaggaatcctgcagccattgaggaaaaaaagctccggcgagatattattccagaaacgttatttattcctcggaggactcctacagctccagataacacggacgtccgggatttcattaatgaaaggctaaaagagcatgatcttgaccccaccgcacccccctacgactcacttgcaacctatgcctatgaaggaaatgattccattgctgaatctctgagttcattagaatcaggtactactgaaggagaccaaaactacgattacctccgagaatggggccctcg

SEQ ID NO: 22503 - DNA, 91 bp, Homo sapiens
  MAP TO AL078614.2; EXPRESSED IN LUNG, SIGNAL =   3; EXPRESSED IN BRAIN, SIGNAL = 6.5; EXPRESSED IN BONE MARROW, SIGNAL = 5.4; EXPRESSED IN HEART, SIGNAL = 4.8; EST_HUMAN HIT: BG339551.1, EVALUE 1.60e+00
atgtggcccctttctgtcttcaaaggcagcaacaatacactgaacccttcttgtgattcaaatcactttgacttctcgggctgcaagccag

SEQ ID NO: 22504 - DNA, 358 bp, Homo sapiens
  MAP TO AC010339.6; EXPRESSED IN BONE MARROW, SIGNAL = 0.48; EXPRESSED IN LUNG, SIGNAL = 0.39; EXPRESSED IN FETAL LIVER, SIGNAL = 0.39; EST_HUMAN HIT: BE151500.1, EVALUE 1.00e-10; SWISSPROT HIT: Q9R098, EVALUE 1.20e+00; NT HIT: AB038490.1, EVALUE 9.00e-11
aacaattacattctgccccagactggcacacccccaggcttcttgttgctcggttctgtgcttaaccaagcaccatcttctcaaaagaacatccaaatctctgccctctgggaggcctcctccaccccagtcaagtggttcgtgaagggggactccttcaaacacagttttctaaagacgggtcttggccgtgcaatccccaccatcattaggaaccaacacttccagacgttaagggctgaattgtatctcccccagattcacatgttcaagacccaacccctagtgtctcagaatgggactgtgtttggagacagggactttatcgaggtgattaaggtaaaatggggtcatatgg

SEQ ID NO: 22505 - DNA, 205 bp, Homo sapiens
  MAP TO AC011311.11; EXPRESSED IN LUNG, SIGNAL =   1; EXPRESSED IN FETAL LIVER, SIGNAL = 0.72; EXPRESSED IN BONE MARROW, SIGNAL = 1.5; EXPRESSED IN PLACENTA, SIGNAL = 0.54; EST_HUMAN HIT: BF963117.1, EVALUE 8.00e-88; SWISSPROT HIT: P29164, EVALUE 2.80e-01; NT HIT: L27223.1, EVALUE 7.30e-01
cgagcaccctcgctgtctgagtcattaagcaaacccggaggcttgtcgtgggtgtgggtccccttccatctgagaacgaatgggatgagtttctggagagacttggccggagaagggccggggcagctcgggaagtagtctgcctcacagaagaattcaggaaggcctcctgggagagtacctttgtgccgagccttgatagatt

SEQ ID NO: 22506 - DNA, 153 bp, Homo sapiens
  MAP TO AC008859.4; EXPRESSED IN BONE MARROW, SIGNAL = 0.74; EXPRESSED IN PLACENTA, SIGNAL = 0.62; EXPRESSED IN BRAIN, SIGNAL = 0.82; SWISSPROT HIT: Q10130, EVALUE 1.50e+00; EST_HUMAN HIT: Z39118.1, EVALUE 2.00e-16
tcagtctgaggtgagtgcctgagattcggcgatcccgatcctaatgagctcccaagacgaggtagctgctgctggtgcatacatcacaccaatagcaaggcctgggcaccacacccagatgcagacgctcaccagctggcagctgggtccaca

SEQ ID NO: 22507 - DNA, 191 bp, Homo sapiens
  MAP TO AC005580.1; EXPRESSED IN FETAL LIVER, SIGNAL = 0.77; EXPRESSED IN HELA, SIGNAL = 0.77; EXPRESSED IN BRAIN, SIGNAL = 0.79; EXPRESSED IN BONE MARROW, SIGNAL = 0.98; NT HIT: X70985.1, EVALUE 1.70e-01; SWISSPROT HIT: P39844, EVALUE 5.60e+00
atggagaacgaaaccaagaagagaaatcggggaactgagcctgcagggcagtcaacaaagatctttgaccaaatgttgaagactttggggtatatcctgaaggcgatgaggagccatggaaggagtttcagcaataatcagatttacatgttaatcacatacctttggctacagtgtgagggacagcaggt

SEQ ID NO: 22508 - DNA, 159 bp, Homo sapiens
  MAP TO AC000031.5; EXPRESSED IN BRAIN, SIGNAL = 0.44; EXPRESSED IN BONE MARROW, SIGNAL = 0.92; EXPRESSED IN PLACENTA, SIGNAL = 0.46; EXPRESSED IN FETAL LIVER, SIGNAL = 3.2; SWISSPROT HIT: P18124, EVALUE 2.00e-09; NT HIT: X52967.1, EVALUE 2.00e-53; EST_HUMAN HIT: BG571111.1, EVALUE 2.00e-53
agataagtttcctccttgccttttgaagcatcttttgggcaaacttatttctcaggcacttgatctttagctctgcaaaattccttttctttttctgaagggtttctggcacagcaggaaccttcttcttcttctctttgacaccctctatggttccag

SEQ ID NO: 22509 - DNA, 239 bp, Homo sapiens
  MAP TO AL121929.17; EXPRESSED IN BONE MARROW, SIGNAL = 0.95; EXPRESSED IN PLACENTA, SIGNAL = 1.4; EXPRESSED IN FETAL LIVER, SIGNAL = 0.61; SWISSPROT HIT: O10296, EVALUE 1.00e-06; EST_HUMAN HIT: AW804455.1, EVALUE 0.00e+00; NT HIT: AF029729.1, EVALUE 0.00e+00
ggacagcccccaattcgccagtgagcctgcccgagtcgccagtgaccccaggtctgggccagtggagcgatgagtgcaccatttgctatgaacacgcggtggacacggtcatctacacatgtggccacatgtgcctctgctacgcctgtggcctgcgcctcaagaaggctctgcacgcctgctgccccatctgccgccgccccatcaaggacatcatcaagacctaccgcagctcctag

SEQ ID NO: 22510 - DNA, 116 bp, Homo sapiens
  MAP TO AL109944.19; EXPRESSED IN FETAL LIVER, SIGNAL = 1.6; EXPRESSED IN BRAIN, SIGNAL = 0.54; EXPRESSED IN BONE MARROW, SIGNAL = 0.76; EXPRESSED IN PLACENTA, SIGNAL = 1.8; NT HIT: U70876.1, EVALUE 1.50e+00; EST_HUMAN HIT: AA435789.1, EVALUE 5.00e-57
ctcctcagtgaagccttccatggtttcataccacccatccctatcggaatgaatgtatccttgttctccgttatcccagtattttgcctgggcttctgtcacactactttcaatgt

SEQ ID NO: 22511 - DNA, 147 bp, Homo sapiens
  MAP TO AF254983.1; EXPRESSED IN BONE MARROW, SIGNAL = 2.7; EXPRESSED IN BRAIN, SIGNAL = 1.5; NT HIT: AL163201.2, EVALUE 2.00e-77; SWISSPROT HIT: P20849, EVALUE 4.50e+00
atgacacttgtctgtgaaggagaaggccaagctgactcacacgctgagtgccccaaggatgaagggggtccccggagtgggtaccgcacctccctctttgcagacaaggagggggcggctctgagacccacagggatgtaccagaga

SEQ ID NO: 22512 - DNA, 162 bp, Homo sapiens
  MAP TO AL031600.4; EXPRESSED IN LUNG, SIGNAL = 2.1; EXPRESSED IN BONE MARROW, SIGNAL = 3.3; EXPRESSED IN PLACENTA, SIGNAL = 4.7; EXPRESSED IN HEART, SIGNAL = 4.4; NT HIT: gi14774663, EVALUE 4.00e-39; EST_HUMAN HIT: AL548493.1, EVALUE 5.00e-39; SWISSPROT HIT: P51798, EVALUE 9.00e-11
cttgagccgcaccacgtgggggatcttcaccccgttgaggaagcacttgatctgggggattccgctgccagcagccaccggctgaaagaggggaagcacggctgagtgggtcacggccaggctgagacagatgcagcccctcagccccaggagccccaggag

SEQ ID NO: 22513 - DNA, 460 bp, Homo sapiens
  MAP TO AC004496.1; EXPRESSED IN HEART, SIGNAL = 2.2; EXPRESSED IN BRAIN, SIGNAL =   2; EXPRESSED IN HELA, SIGNAL = 2.2; EXPRESSED IN BONE MARROW, SIGNAL = 0.7; EST_HUMAN HIT: AA326325.1, EVALUE 0.00e+00; SWISSPROT HIT: Q9Y210, EVALUE 7.00e+00; NT HIT: gi14778042, EVALUE 0.00e+00
gccaggctccatgggacccgtagacaccttccttcctttaaagaggctcatggtctcaggggctggagagaaaggggttgcacaacgtcctggtctggctcttttcagttcttcctcctgtgagtttggagcggcatttgagtctgcaggtgaagaggagggcgagggggaggtcagtgcctcgcaggcagccgtgcaggcggcggacacagacgaggcgctgaggtgctacatccgctccaagccggccctgtaccagaaggtgctgctgtaccagccctttgagctgcgggagctgcaggcagagctgaggcagaacggcctccgtgtgtcctcgcgcaggctgttggacttcctggacacccactgtatcaccttcaccactgccgccacccgcagggagaagctccagggcaggaggcggcagcctcggggcaagaagaaggtggagcggaactga

SEQ ID NO: 22514 - DNA, 227 bp, Homo sapiens
  MAP TO AC008719.5; EXPRESSED IN BONE MARROW, SIGNAL = 2.7; EXPRESSED IN PLACENTA, SIGNAL = 2.8; EXPRESSED IN HEART, SIGNAL = 3.6; EXPRESSED IN BRAIN, SIGNAL = 3.1; EXPRESSED IN LUNG, SIGNAL = 2.4; SWISSPROT HIT: P17800, EVALUE 1.50e+00; NT HIT: AL163213.2, EVALUE 3.00e-96; EST_HUMAN HIT: AI522161.1, EVALUE 4.00e-93
tcagttaaggcaggaaccggccatctggatgtgtacgtgcaggtcacaggggatatgatggctgagcttgggctcagaggcctgacattcctgtcttcttatattaataagaaaaatgaaatagtggtaaagtgttgggacggcgaaaattttgggggatggtatggagagataatgggcgatgtttctcagggctgcttcgagcgggattggggcggcgtgggaac

SEQ ID NO: 22515 - DNA, 111 bp, Homo sapiens
  MAP TO AF270510.1; EXPRESSED IN BRAIN, SIGNAL = 3.9; EXPRESSED IN FETAL LIVER, SIGNAL = 2.7; EXPRESSED IN BONE MARROW, SIGNAL = 1.4; SWISSPROT HIT: P35624, EVALUE 1.20e+00; NT HIT: AF025309.2, EVALUE 9.10e-02; EST_HUMAN HIT: BG957228.1, EVALUE 1.30e-01
atgcctgctctggctgcaagcccctcacagagcttgctcctgtgtcagcagagtggctggctggatcttgcactcgcttactcatatgctgcctcctgcaaggagcctagg

SEQ ID NO: 22516 - DNA, 128 bp, Homo sapiens
  MAP TO AC022516.3; EXPRESSED IN HEART, SIGNAL = 1.3; EXPRESSED IN BRAIN, SIGNAL = 0.98; EXPRESSED IN BONE MARROW, SIGNAL = 0.84; EST_HUMAN HIT: BE075365.1, EVALUE 7.00e-10; SWISSPROT HIT: Q23256, EVALUE 3.50e+00; NT HIT: U04323.1, EVALUE 1.00e-04
ctgtgtccctcatgatgatgccattatcataagatggggtcttcgggtggggagatgcaccagccaccggcatctcacttagactctgcccaattcgggctaatttaatcaaattgtagttgtgtttc

SEQ ID NO: 22517 - DNA, 190 bp, Homo sapiens
  MAP TO AC011452.5; EXPRESSED IN PLACENTA, SIGNAL = 2.4; EXPRESSED IN LUNG, SIGNAL = 2.5; EXPRESSED IN BONE MARROW, SIGNAL = 2.2; NT HIT: gi14786937, EVALUE 3.00e-37; SWISSPROT HIT: P98009, EVALUE 1.90e+00; EST_HUMAN HIT: BI090450.1, EVALUE 1.00e-101
ctcagccatggccaactggggttcagtagcctcttttaagctcctcctccttcccctccgtgttcccggctggcagggctgtgggaagcacaagggagctgtgagaaagcctcccttccacccatggctgactcgctgtccatgctgacgagcccccaaaatgtccaggaggaggaggacaagtcccaat

SEQ ID NO: 22518 - DNA, 231 bp, Homo sapiens
  MAP TO AC007619.22; EXPRESSED IN BONE MARROW, SIGNAL = 1.1; EXPRESSED IN PLACENTA, SIGNAL = 1.3; EST_HUMAN HIT: AL046201.1, EVALUE 7.80e-02; NT HIT: AF334400.1, EVALUE 1.30e-02; SWISSPROT HIT: Q03018, EVALUE 1.80e-01
cagctgctgaagtgtggggggcacccaagtggcctgttcttccaggatggcattcattcttccaggcaagtgggacaaagtgggctttctgccttcactcagtgagagctgttgaaagattttctcatctgaattgtgaatgtttgtaatgtttattttcacagtaagagtgagggccttctcactttgaatatattcctttttgcaaataattttgaagtagtcctgatc

SEQ ID NO: 22519 - DNA, 327 bp, Homo sapiens
  MAP TO AC004204.1; EXPRESSED IN BONE MARROW, SIGNAL = 0.52; EXPRESSED IN FETAL LIVER, SIGNAL = 6.5; EST_HUMAN HIT: AW503369.1, EVALUE 0.00e+00; SWISSPROT HIT: P40818, EVALUE 2.00e-54; NT HIT: gi14785296, EVALUE 0.00e+00
catatactccacattccccctcttcttccatgtatctatagaatcatctgggaggtgtgcttcaatccagctagcagtgactcctggactgatggctttttcaggaacactgagagaatgtaaaatacaggaatcctgataatcctgcattctttgagcatccattataatcaagctgatgtttttatccatcatcattgtgtatagttcctttgctgtgattgctcctttctctttggtctcacatttttcattcttttcaccattgctcttttgggttttgtctttggaatccaatacaatctccaaagaacctttagccaacat

SEQ ID NO: 22520 - DNA, 164 bp, Homo sapiens
  MAP TO AL121825.19; EXPRESSED IN FETAL LIVER, SIGNAL = 0.85; EXPRESSED IN BONE MARROW, SIGNAL = 0.89; EXPRESSED IN PLACENTA, SIGNAL = 0.78; EST_HUMAN HIT: BG576566.1, EVALUE 2.00e-87; SWISSPROT HIT: O96017, EVALUE 2.00e-26; NT HIT: gi14778014, EVALUE 2.00e-87
cagataaaaagaataactcctaaactccagcagtccacagcacggttatacccagcagtcccaacagaaacaagaacttcaggcgccaagtaggtgggggttccacataaggttctcatgagagaggtctctcccaaaatcttggagtgcccaaaatcagtaat

SEQ ID NO: 22521 - DNA, 166 bp, Homo sapiens
  MAP TO AL121902.13; EXPRESSED IN BONE MARROW, SIGNAL = 0.62; EXPRESSED IN PLACENTA, SIGNAL = 0.73; EXPRESSED IN BRAIN, SIGNAL = 0.48; SWISSPROT HIT: O59742, EVALUE 2.00e+00; NT HIT: AF144692.1, EVALUE 9.00e+00; EST_HUMAN HIT: BF238053.1, EVALUE 8.50e-01
ttttcagctgctgcatgcttctgaactgctccacattcagccattcataaatatttgctgggttcttaccgtaaggaaggcactgtcctagaagccggaagttttctagagctggcttgcaccatcttgcaagggtgaatttctgcatctctttccaagcctgcat

SEQ ID NO: 22522 - DNA, 501 bp, Homo sapiens
  MAP TO AC011522.6; EXPRESSED IN BONE MARROW, SIGNAL = 0.52; EXPRESSED IN PLACENTA, SIGNAL = 0.44; EXPRESSED IN LUNG, SIGNAL = 0.69; SWISSPROT HIT: O10341, EVALUE 4.00e-12; NT HIT: M17440.1, EVALUE 1.90e+00; EST_HUMAN HIT: AL520580.1, EVALUE 2.80e+00
atcgacgggtgaaaggtgggggcggctggttggggggggcagctggggactgactacagatccctgtgatcgaggggtgaaaggtgggggcggctggtggggtggggagttggggactctgactacagatcgctgtgatcgaggggtgaaaggtgggggccgctggtggggtggggagctggggactctgactgcagatccctgtgatcgaggggtgaaacgtgggggccgctggtggggtggggagctggggactctgactgcagatccctgtgatcgaggggtgaaaggtgggggccgctggtggggtagggagctggggactctgactgcagatccctgtgatcgaggggtgaaaggtgggggccgctggtggggtggggagttggggactctgactacagatccctgtgatcgaggggtgaaaggtgggggccgctggtggggtggggagctggggactctgactgcagatctctgtgattgaggggtgggagcttc

SEQ ID NO: 22523 - DNA, 116 bp, Homo sapiens
  MAP TO AC004199.1; EXPRESSED IN BRAIN, SIGNAL = 1.1; EXPRESSED IN BONE MARROW, SIGNAL = 0.51; EST_HUMAN HIT: BF810120.1, EVALUE 4.00e-08; NT HIT: AF055066.1, EVALUE 5.00e-59
acccaaaagaagttaaagcagagaccaagcagatatttgtacatcatgtttataacaacattattcacaactgccaaaaggtagaagcaacagagtatacatccatcgatggatga

SEQ ID NO: 22524 - DNA, 181 bp, Homo sapiens
  MAP TO AC019183.3; EXPRESSED IN LUNG, SIGNAL = 0.54; EXPRESSED IN HELA, SIGNAL = 0.89; EXPRESSED IN FETAL LIVER, SIGNAL =   1; EXPRESSED IN BONE MARROW, SIGNAL = 0.79; NT HIT: gi14785442, EVALUE 6.30e-01; EST_HUMAN HIT: BG547600.1, EVALUE 2.40e-01; SWISSPROT HIT: Q9JLC8, EVALUE 7.40e+00
ttttcatcaatatctcttgaatgtggtcaagagccagaagctcagctgcatcaattatgtgaacttgtgtgaatcctttgattataatcatgttgtcaagatccaattatgtttcattgataaagcaagaaatggcaataataaccagaaatattctagaactggagctttcaactacttg

SEQ ID NO: 22525 - DNA, 91 bp, Homo sapiens
  MAP TO AC005307.1; EXPRESSED IN BRAIN, SIGNAL = 0.4; EXPRESSED IN BONE MARROW, SIGNAL = 0.42; EST_HUMAN HIT: BF184186.1, EVALUE 4.20e-01; NT HIT: U71201.1, EVALUE 4.40e+00
atggttgtgggacaggagaaagaattagggatgctctttgcctctgacatgaatactggatatgtggtgattgttcatgccagatacgcag

SEQ ID NO: 22526 - DNA, 181 bp, Homo sapiens
  MAP TO AC007165.3; EXPRESSED IN BRAIN, SIGNAL = 1.4; EXPRESSED IN BONE MARROW, SIGNAL = 1.5; NT HIT: gi14736450, EVALUE 1.00e-97; EST_HUMAN HIT: AW844971.1, EVALUE 2.00e-97; SWISSPROT HIT: P27930, EVALUE 3.00e-30
cttgtaccattgaatcttcacgtcagttttgtcacgggtgaattcactcaggtcagggcatactaataccccagaggttgacaaggttaaaatttgcgggtatgagatgaacggcaggaaagcatctgtattctcaaaaactctgagctcaatggacattttgtcacagtaagaagcattt

SEQ ID NO: 22527 - DNA, 240 bp, Homo sapiens
  MAP TO AC020626.6; EXPRESSED IN BRAIN, SIGNAL = 1.1; EXPRESSED IN PLACENTA, SIGNAL = 0.94; EXPRESSED IN BONE MARROW, SIGNAL = 1.1; EXPRESSED IN HEART, SIGNAL = 1.1; EXPRESSED IN HELA, SIGNAL = 1.4; EXPRESSED IN FETAL LIVER, SIGNAL = 0.95; NT HIT: AB023185.1, EVALUE 2.20e-01; EST_HUMAN HIT: AL119079.1, EVALUE 3.20e-01; SWISSPROT HIT: P46237, EVALUE 7.60e-01
tgatgtttatattcctgtctccatagttactgagatgcctcagaagccagcagctgggttgcatcccaagctgaatacgcacaagtgtctggagacctggggtgatcaaggccaggtggaagttttggaggctgacactgctgcacatgtcatttcctcgtggacctaatgcccagagccagcttgtcacagaatcaaacttagcttgtcggaactctgagctcttcttcagcctgcagg

SEQ ID NO: 22528 - DNA, 99 bp, Homo sapiens
  MAP TO AL121925.10; EXPRESSED IN BONE MARROW, SIGNAL = 0.98; EXPRESSED IN BRAIN, SIGNAL = 0.6; EXPRESSED IN PLACENTA, SIGNAL = 0.82; NT HIT: Y12025.1, EVALUE 3.10e-01; EST_HUMAN HIT: AI201661.1, EVALUE 4.60e-01; SWISSPROT HIT: P07359, EVALUE 4.70e+00
tcactgtcggccatggctggggctttggccagcacttgctggggactggggtgccagtaccagtgggaaataaggggaacctctgctaggaggccctga

SEQ ID NO: 22529 - DNA, 320 bp, Homo sapiens
  MAP TO AL031278.1; EXPRESSED IN LUNG, SIGNAL = 0.8; EXPRESSED IN HELA, SIGNAL = 0.77; EXPRESSED IN BONE MARROW, SIGNAL = 0.96; EST_HUMAN HIT: AI298477.1, EVALUE 2.80e-02; SWISSPROT HIT: O28212, EVALUE 6.90e+00; NT HIT: AF293416.1, EVALUE 3.00e-01
gagctgaacttcaaaagtaggaaacagggaggtattgacagtgatagtgatagtaatagtgaaaacagtcagttaggttctggagagaatctgagaacagcaagattgtctgagaaagacgaccctctaagggatagagaacttctaagagcactggtagactggccaaagcctataaacagagcatggaggctgcagaatacttggaccttaaaaccagaagatacagcaaaatttgagggcatcagtagtggttgccaagaagaccagccaaatctcagtgaacacaacaagcacaggatatttagtgaccaggtcaa

SEQ ID NO: 22530 - DNA, 142 bp, Homo sapiens
  MAP TO AC007996.6; EXPRESSED IN BONE MARROW, SIGNAL = 0.48; EST_HUMAN HIT: AI792351.1, EVALUE 3.00e-74; NT HIT: M22382.1, EVALUE 4.80e-01
gtgtgaaaaccaaggcttaaagcatgcaagttatttgcccgaggtttttcagccacaaatgaagaagctgggtctgctccacacctgtgaaccaggctatttccaccataacctgaactcagatgagcaccagcccatggag

SEQ ID NO: 22531 - DNA, 85 bp, Homo sapiens
  MAP TO AL033544.15; EXPRESSED IN BONE MARROW, SIGNAL = 0.98; EXPRESSED IN PLACENTA, SIGNAL = 0.68; EXPRESSED IN LUNG, SIGNAL = 0.54; NT HIT: AF195953.1, EVALUE 1.00e-03; SWISSPROT HIT: Q03560, EVALUE 6.20e+00; EST_HUMAN HIT: BG121873.1, EVALUE 5.90e+00
ccagtttccaaatagttccttctttttctctcttttctgcctcacatggttgcttttgggggctcctgagtcccttgagaagccc

SEQ ID NO: 22532 - DNA, 348 bp, Homo sapiens
  MAP TO AC006162.1; EXPRESSED IN HELA, SIGNAL = 0.44; EXPRESSED IN BONE MARROW, SIGNAL = 0.62; SWISSPROT HIT: Q16653, EVALUE 5.00e-65; NT HIT: Z48051.1, EVALUE 0.00e+00; EST_HUMAN HIT: AL532710.1, EVALUE 0.00e+00
cttctactttcaattccattgctgcctcctcttggtaagaatgatctcggaagaagcaggtgaaacctccttcatctgagaaccttacattccggatcctgagagtcacctttccctcaccaatagcatctttcagcagctctgtccggccccgatattcaggtgcctggtctccatcttggtccttgccatttctgtagagatgaaccaccctagagaagggggggcggtaccaccccacctccatgcctgtagcgttcttcccaggagatatgcgacatggcaattccacttcatccccgaccagagcccggatagggtgtcttggtcctatcactctgaactgcc

SEQ ID NO: 22533 - DNA, 165 bp, Homo sapiens
  MAP TO AL117380.28; EXPRESSED IN BRAIN, SIGNAL = 2.3; EXPRESSED IN HELA, SIGNAL = 2.6; EXPRESSED IN FETAL LIVER, SIGNAL = 2.7; EXPRESSED IN BONE MARROW, SIGNAL = 1.3; SWISSPROT HIT: P54151, EVALUE 3.40e+00; NT HIT: AF065912.1, EVALUE 2.30e+00
ttatctgtcactgagcagcccagaagggtagccctgctcagaactgagaagcttcttcatgtggctctcgaagctgtcaaacaggccctctgcaaactgagactgaggccgtgtcaaatgcttgtggtttacctcgggctttgttatgtcccagagtctggaatc

SEQ ID NO: 22534 - DNA, 188 bp, Homo sapiens
  MAP TO AC023172.1; EXPRESSED IN FETAL LIVER, SIGNAL = 1.1; EXPRESSED IN BRAIN, SIGNAL = 0.66; EXPRESSED IN BONE MARROW, SIGNAL = 0.45; NT HIT: X06399.1, EVALUE 1.00e-102; SWISSPROT HIT: P20813, EVALUE 4.00e-32; EST_HUMAN HIT: BE826649.1, EVALUE 1.00e-77
agagagtctacagggagattgaacaggtgattggcccacatcgccctccagagcttcatgaccgagccaaaatgccatacacagaggcagtcatctatgagattcagagattttccgaccttctccccatgggtgtgccccacattgtcacccaacacaccagcttccgagggtacatcatccccaag

SEQ ID NO: 22535 - DNA, 124 bp, Homo sapiens
  MAP TO AC027329.3; EXPRESSED IN BRAIN, SIGNAL = 1.6; EXPRESSED IN FETAL LIVER, SIGNAL = 0.95; EXPRESSED IN BONE MARROW, SIGNAL = 1.2; NT HIT: gi4826749, EVALUE 2.60e-02; EST_HUMAN HIT: AL041664.1, EVALUE 3.90e-02
tcttctcattccctatgcccttgctctgcctcatcccctgaggggatcactcatcatgaacgcagacccatggatcatgattggatgggagaatgtggaaatatatacagaacaacacattcag

SEQ ID NO: 22536 - DNA, 190 bp, Homo sapiens
  MAP TO AC005329.1; EXPRESSED IN BONE MARROW, SIGNAL = 0.42; EST_HUMAN HIT: BG752840.1, EVALUE 1.00e-77; SWISSPROT HIT: Q14353, EVALUE 4.00e-24; NT HIT: AF010247.1, EVALUE 1.00e-103
cccaaggagtgggggtcctggagggcctgcgggcagaggggcaccttgtgtgtctgccgtggggcccagtcccggagccgctggaagacgccgtcattgcactcgatgatccaatgctcatcaatgggcgcctcctgcacctttgacgctgcgatggccatgccaaagcccacctccaggacccggcccc

SEQ ID NO: 22537 - DNA, 170 bp, Homo sapiens
  MAP TO AC008964.4; EXPRESSED IN LUNG, SIGNAL = 1.1; EXPRESSED IN BONE MARROW, SIGNAL = 1.1; EXPRESSED IN PLACENTA, SIGNAL = 0.59; SWISSPROT HIT: P35659, EVALUE 3.30e+00; NT HIT: U08860.1, EVALUE 5.90e-01; EST_HUMAN HIT: BI601569.1, EVALUE 5.00e-70
cacttcagaatccagaggtggtggcccttcgaggtggactaaacaccatcttgaaaaatgtgatcgattgccaattaagtcgaataaatgaggccctaattactacaattttgcaccttcttaatcatccaaagactcgacagtatgtgcgagctgatgtagaattagag

SEQ ID NO: 22538 - DNA, 224 bp, Homo sapiens
  MAP TO AC008509.5; EXPRESSED IN HELA, SIGNAL = 0.77; EXPRESSED IN BONE MARROW, SIGNAL = 0.66; EXPRESSED IN PLACENTA, SIGNAL = 0.62; SWISSPROT HIT: P33896, EVALUE 1.50e+00; NT HIT: gi14734568, EVALUE 1.00e-123; EST_HUMAN HIT: AL528867.1, EVALUE 1.00e-120
atattcagctttaccatagtgaaacattggagcttatgctacgtagatggtccaagttagagaaagactttaaaacaaagaatggaagatatgatattagtaaaatccctgacatatatgactgtataaaatatgatgtccagcataatggttccttgaaattagaaaacacaatggaattatataggctttcgaaggcattagcagatattgttatccctcag

SEQ ID NO: 22539 - DNA, 193 bp, Homo sapiens
  MAP TO AC008648.4; EXPRESSED IN BONE MARROW, SIGNAL = 0.5; SWISSPROT HIT: Q64733, EVALUE 1.50e+00; NT HIT: U49055.1, EVALUE 1.70e-01
gaacggaggctggatgtgctcctcccgcttaaaaatcattctttcagcctgcagaacacttgcctctggttctctcggcccccaaggcttttcttcagcagccagcacctctggcttttgcttattgtttggattcgcccacggcctccgtcctttgtgcagcctgatttttcttgactcgtccttatttgca

SEQ ID NO: 22540 - DNA, 185 bp, Homo sapiens
  MAP TO AC002988.1; EXPRESSED IN BONE MARROW, SIGNAL = 0.46; NT HIT: gi14768167, EVALUE 4.00e-39; EST_HUMAN HIT: AA758739.1, EVALUE 5.00e-21; SWISSPROT HIT: O76100, EVALUE 6.00e-16
ttctggaaaatggccctcctgtttctgctctctgaagaatcgattcagagctctgtttatgtctttattcctcaggctgtagatgaaggggttcagcatggaggtgaccacagtgtacatcaccgaggctgcagcatttgagagtgagttatgggttgcagcagaactaaggtacacacctacgc

SEQ ID NO: 22541 - DNA, 287 bp, Homo sapiens
  MAP TO AC004858.2; EXPRESSED IN BONE MARROW, SIGNAL = 1.1; EXPRESSED IN HEART, SIGNAL = 1.8; EST_HUMAN HIT: AW858464.1, EVALUE 7.00e-15; NT HIT: AF109907.1, EVALUE 5.00e-15
cttgatcgactgcgatccttattacgatctgagctcctttctctatcccggtcacgatctctctctcgatcccgatctcggtctctctcttttgtccggtcacggtccctatcccgttctcgttcccgctcccgttctttctccttttctcgttcacgttctctttccctttctcgttcccgttctcgcctttctcgttccctttcacgctccctctctctttctctccgttctttctcaatttcctgtctttctttttcctttttgcctttctcttcttccagttt

SEQ ID NO: 22542 - DNA, 115 bp, Homo sapiens
  MAP TO AC004143.1; EXPRESSED IN BONE MARROW, SIGNAL = 0.62; NT HIT: gi16156585, EVALUE 5.90e+00; SWISSPROT HIT: P04295, EVALUE 4.60e+00; EST_HUMAN HIT: BG469985.1, EVALUE 5.50e-01
taccgatagagcccgtgaaggtgtgcctccgcagagcatgtacgcagcgagcatgtacgcagcaagcatgcagcaagcacacagagggagtgacatacgaatgtccagcagctaa

SEQ ID NO: 22543 - DNA, 252 bp, Homo sapiens
  MAP TO AC008488.6; EXPRESSED IN HELA, SIGNAL = 0.66; EXPRESSED IN BONE MARROW, SIGNAL = 0.49; NT HIT: gi13376014, EVALUE 1.00e-03; SWISSPROT HIT: P34534, EVALUE 4.80e-01; EST_HUMAN HIT: AL602285.1, EVALUE 9.00e-05
ctgggcaagctgcataacctctctgtacttcggtttctgtatctgaaaaatgagggtaggaattcgctcactgagaattaaattaacgtaggtgctattcttatcctcatttttcagatagagaaactgaagcacagagaggttatgcagctttcccaggttcatgtagctggtaagaacagagtccatgttcttatcactcaagatgttctgttggggacggcatgccatggtcttaaggtaagaaagggc

SEQ ID NO: 22544 - DNA, 101 bp, Homo sapiens
  MAP TO AC004213.1; EXPRESSED IN BONE MARROW, SIGNAL = 0.72; EST_HUMAN HIT: BE838956.1, EVALUE 1.20e-01; SWISSPROT HIT: P43704, EVALUE 6.10e+00; NT HIT: AF055066.1, EVALUE 5.00e-06
atgtcaagcagtgcccttgttggctgctgcctgttctgacaccaccgtctattaaccttccccacaactccctgcagatcaagctgcctcagctgctcctc

SEQ ID NO: 22545 - DNA, 198 bp, Homo sapiens
  MAP TO AC006129.1; EXPRESSED IN FETAL LIVER, SIGNAL = 0.38; EXPRESSED IN BONE MARROW, SIGNAL = 0.5; EST_HUMAN HIT: BG334898.1, EVALUE 1.00e+00; SWISSPROT HIT: P50314, EVALUE 5.60e+00
atggctgggaccaggacttttgtcatcaaaagccagctggagggtataggcagtaaaattggaatgcagcaaagggaggctgacctgcaaagcactaggagggatctcataaaacctgttacccttagaggcaagacaggtggaaaaagagtaagtatgtcacttagtagacataatcaagaggagcagaaagccaag

SEQ ID NO: 22546 - DNA, 217 bp, Homo sapiens
  MAP TO AC010077.1; EXPRESSED IN HELA, SIGNAL = 5.1; EXPRESSED IN FETAL LIVER, SIGNAL = 2.2; EXPRESSED IN BONE MARROW, SIGNAL = 1.8; SWISSPROT HIT: P26358, EVALUE 2.00e-27; EST_HUMAN HIT: AW503375.1, EVALUE 1.00e-102; NT HIT: AF202566.1, EVALUE 1.00e-119
ctcacagacgccacatcgccggcgcttaaaggcgttctccttgtcttctctgtcatccttttcaatttgctctgcgaagaaagtatcgaagatctggtagaccagcttggtggtggtggctttcgtgggtcccctgtccttctccctggtagaatgcctgatggtctgccgcctcgcctgggctcgcctacgggagaggttccagcatctcagagga

SEQ ID NO: 22547 - DNA, 192 bp, Homo sapiens
  MAP TO AC010285.4; EXPRESSED IN BONE MARROW, SIGNAL = 3.3; NT HIT: AL163302.2, EVALUE 2.70e+00; SWISSPROT HIT: P46538, EVALUE 1.90e+00
gtaaaagcgtgtgcagacacgtcatgtccagaggagtaaggaggaaggatgggtctgtggagtctgggcagttctcagaggagcgggagggaaggttagctggcatggcggacactaggcacagcagccaggaggggtgtggctcctccaggccctgcagctgtgtggtccggctgaaggccaggctgtgag

SEQ ID NO: 22548 - DNA, 285 bp, Homo sapiens
  MAP TO AC010276.5; EXPRESSED IN FETAL LIVER, SIGNAL = 0.4; EXPRESSED IN BONE MARROW, SIGNAL =   1; NT HIT: AJ271735.1, EVALUE 3.00e-04; EST_HUMAN HIT: AV751859.1, EVALUE 2.00e-09; SWISSPROT HIT: P08547, EVALUE 1.10e-02
ggtttcattaattttctcaacattctgttttctattctgttgatttttgctgtcttcattgaatctttttttctatttacattgagagtttttgttgctcctcgtctttgtctccttctttcttctcttttccttgtcattcttcttttgactttttaaggtaaaaacagagatcattaatttgagaactttcttcttttctaatataagcacgtaaacctgtaaatttctctctaaggacggctttaactgcatccagcagatttcaatatattgtattttcat

SEQ ID NO: 22549 - DNA, 201 bp, Homo sapiens
  MAP TO AC010271.5; EXPRESSED IN FETAL LIVER, SIGNAL = 3.4; EXPRESSED IN BONE MARROW, SIGNAL = 2.8; SWISSPROT HIT: P18377, EVALUE 2.00e-11; EST_HUMAN HIT: BG105346.1, EVALUE 1.00e-109; NT HIT: gi14787068, EVALUE 1.00e-109
cgccaggtaggccagagcaggggttccattgaggcagatctccattggtgtctcttggttgtagcgggtgtcatagaaccggggccaagttgatgggatggagctgcctgcctggcccaggaaccagtaggcctcaaagatcttggtcaggtctcgagccaggcagctgcagttgtacatgaccacgcccagctccttgac

SEQ ID NO: 22550 - DNA, 258 bp, Homo sapiens
  MAP TO AC004712.1; EXPRESSED IN BONE MARROW, SIGNAL = 0.62; NT HIT: AP002923.1, EVALUE 2.40e-01; EST_HUMAN HIT: BE769580.1, EVALUE 1.40e+00; SWISSPROT HIT: Q01484, EVALUE 3.40e+00
ttaaatgtagagttcgtgaaaaagatcatttaagttctcttcaaaaagcgacctcatcgccagagaggggatgaagtaaggaaaagggaacactgaccctgcctcagaaagtgtgtgctcagccctcatgcataagtgtctgcatatgaccaggggtgagggggaggagtagtcaatggcactgggtgtcacttctgcactgacgtgaagaatcagatatgtctcccggactctggccacaggcagaagcagctgagg

SEQ ID NO: 22551 - DNA, 133 bp, Homo sapiens
  MAP TO AL022353.1; EXPRESSED IN BONE MARROW, SIGNAL = 0.73; EXPRESSED IN BRAIN, SIGNAL = 0.58; EXPRESSED IN LUNG, SIGNAL = 0.88; EXPRESSED IN PLACENTA, SIGNAL = 0.88; EST_HUMAN HIT: BI669578.1, EVALUE 4.20e-02; SWISSPROT HIT: P11369, EVALUE 2.30e-01; NT HIT: AE000583.1, EVALUE 1.10e-01
aaatgatgctcgtttcttccattttgatactgacatttttaatttctcttgcttgttttactgtgatggctaggacctccactacaaagctgacgtagcaaggagaactgatgtccttttcttccaccttatt

SEQ ID NO: 22552 - DNA, 125 bp, Homo sapiens
  MAP TO AF107259.1; EXPRESSED IN BONE MARROW, SIGNAL = 0.62; EXPRESSED IN PLACENTA, SIGNAL = 1.3; EST_HUMAN HIT: BF438763.1, EVALUE 8.00e-62; NT HIT: AF332957.1, EVALUE 1.00e-01
ccaacatcccatgcaccatcgtggagactggctggatgccctgtgctctatcagggcatgtcagaccaacagaggggcaaatcagagtgaagaggaagccagaagatgggagagacatttttgaa

SEQ ID NO: 22553 - DNA, 163 bp, Homo sapiens
  MAP TO AC004523.1; EXPRESSED IN BONE MARROW, SIGNAL = 0.62; NT HIT: gi14767694, EVALUE 7.00e-87; SWISSPROT HIT: P78329, EVALUE 3.00e-21; EST_HUMAN HIT: AA494546.1, EVALUE 3.00e-77
gaactgcatcgggcaggcgttcgccatggcggagatgaaagtggtcctggcgttgatgctgctgcacttccggttcctgccagaccacactgagccccgcaggaagctggaattgatcatgcgcgccgagggcgggctttggctgcgggtggagcccctgaat

SEQ ID NO: 22554 - DNA, 168 bp, Homo sapiens
  MAP TO AC011248.8; EXPRESSED IN FETAL LIVER, SIGNAL = 0.44; EXPRESSED IN BONE MARROW, SIGNAL = 1.5; EST_HUMAN HIT: Z40250.1, EVALUE 1.00e-89; SWISSPROT HIT: P55602, EVALUE 4.40e+00; NT HIT: AF145204.1, EVALUE 7.00e-90
aatttagcctatgaaatcatcctaaccctgggacaggcattcgaagtcgcttaccagctagcactacaagcaagaaaagggggacactcctccacacttccagaaagctttgaaaacaaaccctccaaacccatccccaagccccgcgttagcattcgcaagtccgtg

SEQ ID NO: 22555 - DNA, 294 bp, Homo sapiens
  MAP TO AC006293.1; EXPRESSED IN LUNG, SIGNAL = 0.53; EXPRESSED IN BONE MARROW, SIGNAL = 0.89; NT HIT: AF133898.1, EVALUE 0.00e+00; SWISSPROT HIT: P43631, EVALUE 1.00e-53; EST_HUMAN HIT: BI912561.1, EVALUE 0.00e+00
gtctatatgagaaaccttctctctcagcccagccgggccccacggttctggcaggagagagcgtgaccttgtcctgcagctcccggagctcctatgacatgtaccatctatccagggagggggaggcccatgaacgtaggttctctgcagggcccaaggtcaacggaacattccaggccgactttcctctgggccctgccacccacggaggaacctacagatgcttcggctctttccgtgactctccatacgagtggtcaaactcgagtgacccactgcttgtttctgtcacag

SEQ ID NO: 22556 - DNA, 185 bp, Homo sapiens
  MAP TO AL096870.3; EXPRESSED IN BRAIN, SIGNAL = 0.4; EXPRESSED IN BONE MARROW, SIGNAL = 0.41; EST_HUMAN HIT: BI765026.1, EVALUE 1.00e-100; NT HIT: gi9506372, EVALUE 2.00e-38; SWISSPROT HIT: P26770, EVALUE 6.00e-10
tactccatgcactgctgcacgctgggcttcctctcctgctccctctttctgcacatgagcttcgagctgaagctgctgctgctcctgctgtggctggcggcatcctgctccctcttcctgcactcccatgcctggctgtcggaatgcctcatcgtccgcctctatctgggccccttggactccag

SEQ ID NO: 22557 - DNA, 527 bp, Homo sapiens
  MAP TO AC005525.1; EXPRESSED IN BONE MARROW, SIGNAL = 0.83; EXPRESSED IN HELA, SIGNAL = 0.64; SWISSPROT HIT: P47179, EVALUE 3.00e-04; EST_HUMAN HIT: BG720339.1, EVALUE 0.00e+00
tcacacagttggcctgtgacaggcaatcaggtcatcgtccacggctaccaggtgtttcatgtctactgtgacttccaggaccacaagcccttttgcgcccaccatgtcttcacctaagagatcttcaaagcccagtatgtctctggcacccagtggatcctccatgcccactgcggatcccaagcctcctgcctccttgaagtccaccaaatcagcaacacccaacagatccttagtgcccaccaaaccagcgacatcccgtaactcagtcatgagcccaagcagttccaagtccaccaaatcgaccagtacaaaaagagccccttctaaccggcccagcagcaggtcccgagtccgcagcaaagcaagaacacccagcagggtgagcaccgacaccaggaccagcaaagccagcaaggccagcgacgtgagatgccaccagcggaggggcacacacagccggggtaggacacctggcagaaggggaagccgcagctccaagaggtcacccagcagggccagcactc

SEQ ID NO: 22558 - DNA, 139 bp, Homo sapiens
  MAP TO AC008507.6; EXPRESSED IN BONE MARROW, SIGNAL = 0.72; SWISSPROT HIT: P09853, EVALUE 6.80e-01; NT HIT: U07142.1, EVALUE 4.70e-01; EST_HUMAN HIT: AV699342.1, EVALUE 6.90e-01
aagaggcgaggtgagtaccattcacctctcccaagtggtccagtggcagtggggcccccacgcactctacaccgttgttgtgttgctagaggaaggagagcagctgagccctggggacctggggacgggcttcatttga

SEQ ID NO: 22559 - DNA, 190 bp, Homo sapiens
  MAP TO AC010163.7; EXPRESSED IN BONE MARROW, SIGNAL = 1.3; EXPRESSED IN LUNG, SIGNAL = 1.5; EXPRESSED IN BRAIN, SIGNAL = 1.3; SWISSPROT HIT: P09119, EVALUE 1.90e+00; NT HIT: AF131205.1, EVALUE 4.30e-02
tcacaggatggcctctgcagctgcaaatatcacatcctcacatggaaacatctcaggtagaaggatgagcataggttggaaaagatgaaagatgttccttctcacacccctgtcctttaaccttggaggaaaactctctccgaaagctccaagcatgcttcccactgcatcttcttggccagaaccatag

SEQ ID NO: 22560 - DNA, 124 bp, Homo sapiens
  MAP TO AC005685.1; EXPRESSED IN BONE MARROW, SIGNAL = 0.4; EST_HUMAN HIT: AW276053.1, EVALUE 4.00e-05; SWISSPROT HIT: P40889, EVALUE 6.90e-01; NT HIT: AL163246.2, EVALUE 6.40e+00
ggttagtgctggaattagttaagacttttgggttggtgctggaattagttaagacttttgggttggtgctggaattagttaagacttttgtggctcttgagatggggctgttggaggggcgaat

SEQ ID NO: 22561 - DNA, 292 bp, Homo sapiens
  MAP TO AC010336.5; EXPRESSED IN BONE MARROW, SIGNAL = 1.2; SWISSPROT HIT: Q15717, EVALUE 7.00e-54; NT HIT: gi14757941, EVALUE 0.00e+00; EST_HUMAN HIT: AU123765.1, EVALUE 0.00e+00
gttctcccccatgggcgtcgatcacatgagcgggctctctggcgtcaacgtgccaggaaacgcctcctccggctggtgcattttcatctacaacctggggcaggatgccgacgaggggatcctctggcagatgtttgggccgtttggtgccgtcaccaatgtgaaagtgatccgcgacttcaacaccaacaagtgcaaagggtttggctttgtgaccatgacaaactatgaagaagccgcgatggccatagccagcctgaacggctaccgcctgggggacaaaatcttacag

SEQ ID NO: 22562 - DNA, 105 bp, Homo sapiens
  MAP TO AL023801.1; EXPRESSED IN BONE MARROW, SIGNAL =   2; EXPRESSED IN LUNG, SIGNAL = 2.1; EXPRESSED IN PLACENTA, SIGNAL = 1.6; EST_HUMAN HIT: BF878449.1, EVALUE 1.00e-10; SWISSPROT HIT: P08548, EVALUE 4.00e-04; NT HIT: AF029308.1, EVALUE 4.00e-10
tcaatccgtaagcatagaatattttttccacttatttgtgtcatctctagtttctttcagcactgttttgtgcttcttcttgtagagatctttcacctccttggt

SEQ ID NO: 22563 - DNA, 138 bp, Homo sapiens
  MAP TO AC010186.6; EXPRESSED IN BONE MARROW, SIGNAL = 0.53; NT HIT: gi16164509, EVALUE 2.00e-55; SWISSPROT HIT: P00505, EVALUE 1.00e-15; EST_HUMAN HIT: BE559966.1, EVALUE 3.00e-55
cgtccccaaggcagaggcccagattgccacaaaaagtttggacaaggaatacctgtccactgggggactggctgaattttgcaaggcatctgcagaactagcccttggtgagaacagcgaagtcttgaaaagtggccg

SEQ ID NO: 22564 - DNA, 126 bp, Homo sapiens
  MAP TO AC006479.2; EXPRESSED IN BONE MARROW, SIGNAL = 0.49; EST_HUMAN HIT: BG541687.1, EVALUE 1.00e-05; SWISSPROT HIT: P42836, EVALUE 4.00e-01; NT HIT: AB036934.1, EVALUE 3.00e-11
agtttgcaggctgtgcaggaagcacagtgctggcatcttcttctggtgagggcctcacagtgctggcatcttcttctggtgagggcctcaggaggcttccaatcattgtggaagacaaaggggagc

SEQ ID NO: 22565 - DNA, 223 bp, Homo sapiens
  MAP TO AC008449.4; EXPRESSED IN BONE MARROW, SIGNAL = 0.51; NT HIT: AB010276.1, EVALUE 8.00e-01; EST_HUMAN HIT: BI012232.1, EVALUE 3.00e-01; SWISSPROT HIT: P21964, EVALUE 8.20e-01
agagatgcttaatcagtctgtgctgattcgaattcactttccttccttcctctctgtgtttttcagtgtagagtatgattttcggcagcaggaaggcaggttccatgaagttttgcagagtctggaggaagcagagccagttgaggaggcatcgcccccaccaaagtccccagcagaacccccagccccggaaaagcaggacttaaggcggaaaaccaagaag

SEQ ID NO: 22566 - DNA, 145 bp, Homo sapiens
  MAP TO AC010339.6; EXPRESSED IN BONE MARROW, SIGNAL = 0.42; NT HIT: M16708.1, EVALUE 1.20e-01; SWISSPROT HIT: Q61068, EVALUE 2.60e+00
ctggctgctgaggataaaagcgcagggtggtttcactccagagctccgattcaggcagccgctgcctccctccctcctgcacatcttccaaatggctggggggccttggctttccaccaatgtccaggtgcaccctctccaacag

SEQ ID NO: 22567 - DNA, 358 bp, Homo sapiens
  MAP TO AC004204.1; EXPRESSED IN BONE MARROW, SIGNAL = 0.9; NT HIT: gi14785296, EVALUE 0.00e+00; EST_HUMAN HIT: AA769858.1, EVALUE 0.00e+00; SWISSPROT HIT: P40818, EVALUE 3.00e-57
gagacaaatacatgaaggcctcaagtgtcctagactttttgtgacgggtgaggcactgtactgtagatttgaattgaccctgaaaaagtgcaacaataatagactcatagagccgcttgtgtttctgccaggcatgttctgcagctttaaagtcattgagatgatcattattttcttctttatatgtcttccgattatcagttttatttagatcttcatggagaccatccattaggaacagaagaaattcttgtgaatcttgactgtatcctgcaaactggtaattgatcttcccaatggtgactttaaggtcttttggactgatatatctatactgtcctgtccacggggctttcat

SEQ ID NO: 22568 - DNA, 674 bp, Homo sapiens
  MAP TO Z49866.2; EXPRESSED IN BRAIN, SIGNAL = 1.4; EXPRESSED IN HELA, SIGNAL = 2.6; EXPRESSED IN BONE MARROW, SIGNAL = 1.2; EXPRESSED IN FETAL LIVER, SIGNAL = 0.98; NT HIT: AL163218.2, EVALUE 1.00e-106; EST_HUMAN HIT: BE420422.1, EVALUE 2.00e-69; SWISSPROT HIT: P43563, EVALUE 1.80e+00
agatttgtagaaacttgaacttgagagagaagattgagagagatgatttagggcatctggcagaagaaatttctaaacagcaaagcgttcaagaggtgacttgggtgctgttaaaagcattcagttttaagtattcacaaagatatggtttggaattggaatttatgtttacaagagaagcaaagcataaaagttttgaaaatctgcagcctgataatgcaatagaaaagaaaaaccctttttctgataagaaattcaagcctgctgcagaaatttgcctaagtaatgaggagccaaatgttaattgccaagacaatgaggaaaatgtctccagggcaagtcagaggtcttcacagcagcccctcacatcacaggcttggaggcctaggaggaaaaaatggtttcgtgggtcaggcccagggccttgctgctttctgctgtctcaggacttggtgccctgtgtcccagccgtggctaaaaggagccaacatagagctcaggccattgcttcggagggtgcaaggctgaagccttggtggcttccacatgctgttgggcctgggggtaaagagaagtcaataattgagatttgggaacccctgcctggatttcacaggatgtatggaaatgcctggatgtccaggcagatgtctgctacaggggcagagccttca

SEQ ID NO: 22569 - DNA, 932 bp, Homo sapiens
  MAP TO AL050303.2; EXPRESSED IN BONE MARROW, SIGNAL = 1.3; EXPRESSED IN HELA, SIGNAL = 1.8; EXPRESSED IN BRAIN, SIGNAL = 1.5; EXPRESSED IN LUNG, SIGNAL = 1.1; NT HIT: AL163204.2, EVALUE 0.00e+00; EST_HUMAN HIT: BG740106.1, EVALUE 0.00e+00; SWISSPROT HIT: P17221, EVALUE 9.00e-22
atggaagccttggaattgctgggatctacctatgtggataagaaacgagatctgcttggggcccttaaacactggaggcgggccatggagctgcgtcaccaggggggtgagtacctgcccaaactggagcccccacagctggtcctggcctatgactattccagggaggtcaacaccaccgaggagctggaggcgctgatcaccgacgccgatgagatgcgtatgcaggccttgttgatccgggagcgcatcctcagtccctcgcaccccgacacttcctattgtatccgttacaggggcgcagtgtacgccgactcggggaatatcgagtgctacatccgcttgtggaagtacgccctggacatgcaacagagcaacctggagcctctgagccccatgagcgccagcagcttcctctccttcgccgaactcttctcctacgtgctgcaggacccggctgccaaaggcagcctgggcacccagatcggctttgcagacctcatgggggtcctcaccaaaggggtccgggaagtggaatgggccctgcagctgctcagggagcctagagactcggcccagttcaacaaggcgctggccatcatcctccacctgctctacctgctggagaaagtggagtgcacccccagccaggagcacctgaagcaccagaccatctatcgcctgctcaagtgcgcacccaggggcaagaacggcttcacgcctctgcacatggctgtggacaaggacaccacaaacgtgggccgctaccccgtgggcagattcccctcgttgcacgtggtcaaagtgctgttcgactgcggggccgaccgggacagcagggattttgacaacaacaccccgctacacatagcagcccagaacaactgcccggccatcgtgaatgccctgactgaagcaggggcccacatgga

SEQ ID NO: 22570 - DNA, 560 bp, Homo sapiens
  MAP TO AL163204.2; EXPRESSED IN PLACENTA, SIGNAL = 2.2; EXPRESSED IN BRAIN, SIGNAL = 1.4; EXPRESSED IN BONE MARROW, SIGNAL = 1.1; EXPRESSED IN HEART, SIGNAL = 1.3; EXPRESSED IN FETAL LIVER, SIGNAL = 0.94; EXPRESSED IN LUNG, SIGNAL = 1.2; SWISSPROT HIT: P54274, EVALUE 2.00e-90; NT HIT: AL163204.2, EVALUE 0.00e+00; EST_HUMAN HIT: BG618982.1, EVALUE 0.00e+00
ccctgatgatttggggttcaactgaaaaggaacatgacaaacttcaagaagaaatacagaatttaattaaaattcaggctatagctgtttgtatggaaaatggcaactttaaagaagcagaagtctttgaaagaatatttggtgatccaaattcttatatgcctctcaaaagcaaattgcttatgataatctctcagaaagatacatttcattccttttttcaacacttcagctacaatcacatgatggagaaaattaagagttatgtgaattatgtgctaagtgaaaaatcatcaacctttctaatgaaggcagcagcaaaagtagtagaaagtaaaagaacaagaacaataacttctcaagataaagctaatgaaaattatgttgaaacggaaactgaagctaatttggatacaagaaaaaggtctcacaagaatcttttcttatctaagttacaacatgggacccagcaacaagaccttaataagaaagaaagaagagtaggaactcttcaaagtacaaaaaagaaaaaagaaagcagaagagccactgaaagctga

SEQ ID NO: 22571 - DNA, 2612 bp, Homo sapiens
  MAP TO Z84487.2; EXPRESSED IN HEART, SIGNAL = 1.5; EXPRESSED IN BONE MARROW, SIGNAL = 0.74; EXPRESSED IN LUNG, SIGNAL = 1.1; EXPRESSED IN PLACENTA, SIGNAL = 1.8; NT HIT: gi14757764, EVALUE 0.00e+00; EST_HUMAN HIT: AW769265.1, EVALUE 0.00e+00; SWISSPROT HIT: P46100, EVALUE 0.00e+00
gcaggcaacagataattcagaaatcagttctgctacaaaattacgtcagcttaaggcttttaagtctgtgttggctgatattaagaaggctcatcttgcattggaagaagacttaaattccgagtttcgagcgatggatgctgtaaacaaagagaaaaataccaaagagcataaagtcatagatgctaagtttgaaacaaaagcacgaaaaggagaaaaaccttgtgctttggaaaagaaggatatttcaaagtcagaagctaaactttcaagaaaacaggtagatagtgagcacatgcatcagaatgttccaacagaggaacaaagaacaaataaaagtaccggtggtgaacataagaaatctgatagaaaagaagaacctcaatatgaacctgccaacacttctgaagatttagacatggatattgtgtctgttccttcctcagttccagaagacatttttgagaatcttgagactgctatggaagttcagagttcagttgatcatcaaggggatggcagcagtggaactgaacaagaagtggagagttcatctgtaaaattaaatatttcttcaaaagacaacagaggaggtattaaatcaaaaactacagctaaagtaacaaaagaattatatgttaaactcactcctgtttccctttctaattccccaattaaaggtgctgattgtcaggaagttccacaagataaagatggctataaaagttgtggtctgaaccccaagttagagaaatgtggacttggacaggaaaacagtgataatgagcatttggttgaaaatgaagtttcattacttttagaggaatctgatcttcgaagatccccacgtgtaaagactacacccttgaggcgaccgacagaaactaaccctgtaacatctaattcagatgaagaatgtaatgaaacagttaaggagaaacaaaaactatcagttccagtgagaaaaaaggataagcgtaattcttctgacagtgctatagataatcctaagcctaataaattgccaaaatctaagcaatcagagactgtggatcaaaattcagattctgatgaaatgctagcaatcctcaaagaggtgagcaggatgagtcacagttcttcttcagatactgatattaatgaaattcatacaaaccataagactttgtatgatttaaagactcaggcggggaaagatgataaaggaaaaaggaaacgaaaaagttctacatctggctcagattttgatactaaaaagggcaaatcagctaagagctctataatttctaaaaagaaacgacaaacccagtctgagtcttctaattatgactcagaattagaaaaagagataaagagcatgagtaaaattggtgctgccagaaccaccaaaaaaagaattccaaatacaaaagattttgactcttctgaagatgagaaacacagcaaaaaaggaatggataatcaagggcacaaaaatttgaagacctcacaagaaggatcatctgatgatgctgaaagaaaacaagagagagagactttctcttcagcagaaggcacagttgataaagacacgaccatcatggaattaagagatcgacttcctaagaagcagcaagcaagtgcttccactgatggtgtcgataagctttctgggaaagagcagagttttacttctttggaagttagaaaagttgctgaaactaaagaaaagagcaagcatctcaaaaccaaaacatgtaaaaaagtacaggatggcttatctgatattgcagagaaattcctaaagaaagaccagagcgatgaaacttctgaagatgataaaaagcagagcaaaaagggaactgaagaaaaaaagaaaccttcagactttaagaaaaaagtaattaaaatggaacaacagtatgaatcttcatctgatggcactgaaaagttacctgagcgagaagaaatttgtcattttcctaagggcataaaacaaattaagaatggaacaactgatggagaaaagaaaagtaaaaaaataagagataaaacttctaaaaagaaggatgaattatctgattatgctgagaagtcaacagggaaaggagatagttgtgactcttcagaggataaaaagagtaagaatggagcatatggtagagagaagaaaaggtgcaagttgcttggaaagagttcaaggaagagacaagattgttcatcatctgatactgagaaatattccatgaaagaagatggttgtaactcttctgataagagactgaaaagaatagaattgagggaaagaagaaatttaagttcaaagagaaatactaaggaaatacaaagtggctcatcatcatctgatgctgaggaaagttctgaagataataaaaagaagaagcaaagaacttcatctaaaaagaaggcagtcattgtcaaggagaaaaagagaaactccctaagaacaagcactaaaaggaagcaagctgacattacatcctcatcttcttctgatatagaagatgatgatcagaattctataggtgagggaagcagcgatgaacagaaaattaagcctgtgactgaaaatttagtgctgtcttcacatactggattttgccaatcttcag

SEQ ID NO: 22572 - DNA, 918 bp, Homo sapiens
  MAP TO AC005336.1; EXPRESSED IN HEART, SIGNAL = 1.3; EXPRESSED IN BONE MARROW, SIGNAL = 0.83; EST_HUMAN HIT: BG470447.1, EVALUE 0.00e+00; SWISSPROT HIT: O00411, EVALUE 0.00e+00; NT HIT: gi14790137, EVALUE 0.00e+00
tcagctgaagaagtaggtggaacgcttcaccagctccaggtcgaaggcccctggcttgggcaccacctgcagtgtctccttcatctggctggcctccaagatcttctggggctcagagcagaaccgcctgaccaggaacctggacaggtcctgcaggatggactcgctgtgcaagcaaactgctcccggcacacctggttcatgatggagacatcagctgcatgggtccggtaacagtcgtgcacagagacgaaggtcaggcccttcctgtagcagtgcagggtggtgagcatcatgtgtgaggagtccagcgagtggatgaagttgggccggaagccgttcttctgcttaggtgtgttgggcttccggctgatgtctctgttgtgggtgtaagtgatgctctgaattccacctcctgattgcttgaccttggactccaggcgatacggctggatgatggggacgcccaggggggtgacccactccaccacagagcccgtgtgggagacgaggtgggcgctctcgatcagccagtgctggatggcccgggtccccgagaacatctcctgtagactcctgaagacctggcgtacgaggtagtgggaggcctcccacacgaactcctggggaaagtcgttcagctcccggaggcgcttctcaatctgcaggcgcccaccgtagcgggtgaccccgtacaccacggtcatcactgtctgcttcaccaccttgcgggtgatgaaggcttccagcacctgtgccacccgcatgccccgctgggcgtcctgcctacggaacacctccacctgcgcggccacgccgctgtacacgtcctgcggcacatccgagggctccaggttgactgaggcggcgcccacgctgtcgcggcccagggcagcataatgctgtaggccgttgcat

SEQ ID NO: 22573 - DNA, 705 bp, Homo sapiens
  MAP TO AL121827.9; EXPRESSED IN BRAIN, SIGNAL = 2.1; EXPRESSED IN HELA, SIGNAL = 1.1; EXPRESSED IN BONE MARROW, SIGNAL = 0.87; EST_HUMAN HIT: AL535991.1, EVALUE 0.00e+00; SWISSPROT HIT: O43526, EVALUE 0.00e+00; NT HIT: gi14769907, EVALUE 0.00e+00
gtcaccaaagggaccctcgccggtggccgagcgtggcgggggcccgcacggggtacagaggtcggagtcggtgtctgactctccctccgcaatgtagggcctgactttggcacaaggcgccacggccgcgtagcagctgttgagagcatccaggttctccttggactgggagatgctgaagccgctgaaggaacgctccagctcctcgtggtccacggacgggatggagatggacgtgtcgctgtcccgcaggttcccctcggggggcctgcagcccggggtgtcctcctgccgcaggaactccatgctggcgcggttgcccccgccgtaggcggacagcgaccgctcgtgggcaggcggcggcgggatgcgcaccagggagccgtggtcccccacgggggaggtgccgtggccctggcgcgggtggctctgtggctgccaggaggtggagggcggacactggacagggggcgcggccgggggcgccgagaagttcttctggcccgtggagctgctggagcgcacgatcttgacaatgcagccgtgcctgtcgacatgctcccggctgtcttccgggctgtggtacggcggcgccggctccggctctttggccccaaagtaggcctcggtctctgtcggggggatgcccatccgctgcatgtagatattcaccaggaagtccagcttcttctccatggacaagac

SEQ ID NO: 22574 - DNA, 1215 bp, Homo sapiens
  MAP TO AL121747.19; EXPRESSED IN HELA, SIGNAL = 1.2; EXPRESSED IN BRAIN, SIGNAL = 1.4; EXPRESSED IN PLACENTA, SIGNAL = 1.6; EXPRESSED IN LUNG, SIGNAL = 1.3; EXPRESSED IN HEART, SIGNAL = 1.6; EXPRESSED IN BONE MARROW, SIGNAL = 1.5; NT HIT: gi15305601, EVALUE 0.00e+00; EST_HUMAN HIT: BI549411.1, EVALUE 0.00e+00; SWISSPROT HIT: Q04832, EVALUE 3.00e-08
atggccaccggcggcggcgcggaggaagagaggaaacgggggcggccgcagcttctgccccccgcgcggcccgcggcccggggcgaggaggccgacggcggccgcgagaagatgggctgggcccaggtggtgaagaatctagccgagaagaagggcgaattccgcgagccgcggccgccgcggcgggaggaggaaagcggcggcggtggagggagcgccgggctcggcggccccgcgggcctggcggcgccggacctcggcgacttcccaccggctggccgcggggatccgaagggccgtcggagagatccggccggcgaggcggtggacccccgcaaaaagaagggcgctgcggaggcgggcaggaggaagaaggccgaggcggcggcggccgccatggcgaccccggccaggcccggcgaggccgaggacgcggccgagcggcccctccaggatgagccggcggcggcggcggcaggcccgggcaagggtcgcttcctcgtccgcatctgtttccagggagacgagggcgcctgcccgacccgggacttcgtggtaggagcgcttatcctgcgctccatcggcatggacccgagcgacatctacgcggtcatccagatcccgggcagccgcgaattcgacgtgagcttccgctcagcggagaagctggccctgttcctacgcgtctacgaggagaagcgggagcaggaggactgctgggagaactttgtggtgctggggcggagcaagtccagcttgaagacgctcttcatcctcttccggaacgagacggtggacgtggaggacattgtgacttggctcaagcgccactgcgacgtgctggccgtgccggtgaaagtgaccgacaggtttgggatctggaccggggagtacaaatgcgagatcgagctgcgccagggggagggcggggtcaggcacttgccaggggccttcttcctgggggccgagaggggctacagctggtacaaggggcagcccaagacatgctttaaatgtggttcccggacccacatgagcggcagctgcacgcaggacaggtgcttcaggtgcggggaggaggggcacctgagcccttactgccggaagggcatcgtgtgcaacctctgtggcaagcgaggacacgcctttgcccagtgtcccaaagcagtgcacaattccgtggcagctcagctaaccggcgtggccgggcactaa

SEQ ID NO: 22575 - DNA, 523 bp, Homo sapiens
  MAP TO AC006213.1; EXPRESSED IN HELA, SIGNAL = 2.2; EXPRESSED IN BRAIN, SIGNAL = 0.95; EXPRESSED IN BONE MARROW, SIGNAL = 1.1; EXPRESSED IN FETAL LIVER, SIGNAL =   1; SWISSPROT HIT: Q14585, EVALUE 8.00e-68; NT HIT: gi8923786, EVALUE 3.00e-21; EST_HUMAN HIT: N47183.1, EVALUE 1.00e-130
aaaccctacaaatgtaaagaatgtggaaaggcttttggtcatcgttcaagtctttaccaacataagaaaattcattctggtgagaaaccatataaatgtgaacaatgtgaaaaggcctttgttcgcagctatctacttgttgaacatcaaagaagtcatactggtgagaaacctcatgaatgcatggaatgtggaaaggcttttagtaagggctcaagccttcttaaacataagagaattcatagtagtgagaaactctatgattgtaaggattgtggaaaggccttttgtagaggctctcaacttacacagcatcagagaattcatactggtgagaagccacatgaatgtaaagaatgtgggaagacttttaagcttcattcatatcttattcaacatcagataattcatactgatttgaagccatatgaatgtaagcaatgtgggaaagccttcagtcgtgttggagaccttaagacacatcaatcaattcatgctggggagaaaccctatgaatgtaagg

SEQ ID NO: 22576 - DNA, 483 bp, Homo sapiens; identical to SEQ ID NO: 14283
  MAP TO AP001743.1; EXPRESSED IN HELA, SIGNAL = 0.98; EXPRESSED IN PLACENTA, SIGNAL = 3.8; EXPRESSED IN BRAIN, SIGNAL = 1.7; EXPRESSED IN BONE MARROW, SIGNAL = 1.7; EXPRESSED IN LUNG, SIGNAL = 1.6; EST_HUMAN HIT: AW978385.1, EVALUE 0.00e+00; SWISSPROT HIT: Q09602, EVALUE 3.30e+00; NT HIT: gi14780528, EVALUE 0.00e+00

SEQ ID NO: 22577 - DNA, 471 bp, Homo sapiens
  MAP TO AL355840.2; EXPRESSED IN BRAIN, SIGNAL = 1.1; EXPRESSED IN HELA, SIGNAL = 2.2; EXPRESSED IN BONE MARROW, SIGNAL = 1.1; EXPRESSED IN LUNG, SIGNAL = 1.1; EST_HUMAN HIT: BI821351.1, EVALUE 0.00e+00; SWISSPROT HIT: P17588, EVALUE 6.40e-01; NT HIT: AB049737.1, EVALUE 0.00e+00
gccggcgctggccgaggcttccccgcctgcgctcgttgtcagagccgctccggcgcgtgcgcgcgttatctccggccgacccgagcagccggttccctcctctccaggccccctccccatcccacccccgccgcctggccccagccgacccgtcccttcgtctccccgcggaatggggccggcactgctcagggtcgcgcgccctggacccagctcgctctcggtctcgcgctgtcagcgactgcccggctcgcgccgcctcgcgctctgcctcagtcagtggcgccgaaggctccgttaagcggcggcggcggttcctgtttccgtttcttcctctccgttcggtcgggagtagcatcctccactcagccacccttcccactcccccatcgtggggcagctgcggctgagggctgtggctttggcagctgcgacggggagcggcggagaccgcctctgctcccgcctggg

SEQ ID NO: 22578 - DNA, 1076 bp, Homo sapiens
  MAP TO AC026405.1; EXPRESSED IN BONE MARROW, SIGNAL = 1.3; EXPRESSED IN BRAIN, SIGNAL = 2.6; EXPRESSED IN HELA, SIGNAL = 1.8; SWISSPROT HIT: O14682, EVALUE 0.00e+00; NT HIT: gi14781330, EVALUE 0.00e+00; EST_HUMAN HIT: BF683990.1, EVALUE 0.00e+00
agaccccattttcagacccccgccccccagtaatgtacactttgcagccaatcgcacatgcactaaactcttttcttgggctgggaatgtcagccttgggaatgatttctttggccttctggtctaccagatacaacttgtcacacatgaaagtctgtcctcccagaaggaagagggcatggccagttttccgaggtcgggcacagaggctggttaccacaccgtcattctgcaggattttcagtttgcacctgatggcctcttccacaatttccttactctttctctgcttggtgatgagttcctccatggccacattctccatgagatagatggctggcagaagtgccagccttactgtctgcaacagttctgggaggtagcaatagcgcttcttcaggtcatagctgatccagttaattgcagactcgtacacaagcctttcatcctctgtctccagctcttcactggacaagagttgcactaccatgtcctggggcagctggaggaaatcttcattcttcctgatggtttggaagttgctgagacacattctccaagatagttcgtacagcttggtgcactggtgtgcatcagacagcagcagcatgcccaggcagttggtgggatgcaggttcttttccaggaactctgcacatgcatcccggatgtcttgaaactccagcatgtcaccagcttccaggagcgattctgcattttcttcattgatgatgacccgggaggagtacgcatagtcaagcagcagctccaagacttctgggtggatggaattgtcaaagttgacctcactgtcctggctctctttcaggccaccactgaacatggcctcaaagtagcgactgcatgcagccagcactgcccggtggcaagggaaggtcctatttccggcatggagaaggacgtcagtgaagagacgctgctggcgtaaaagattcaggtgagtgaggacgctgtcagcgtaggaggacttgtgaaacagatagatgttaatggagccgctgctggccctggacttgcggttctcatgcacactgactgacattttgtttccactc

SEQ ID NO: 22579 - DNA, 536 bp, Homo sapiens
  MAP TO Z68165.1; EXPRESSED IN HELA, SIGNAL =   1; EXPRESSED IN LUNG, SIGNAL = 0.92; EXPRESSED IN BONE MARROW, SIGNAL =   1; EST_HUMAN HIT: BG424059.1, EVALUE 0.00e+00; SWISSPROT HIT: P05227, EVALUE 2.60e-01; NT HIT: gi14732254, EVALUE 0.00e+00
cagtgcctacggtatggggacctgctgcaggccagcagctggccagagtccagacatcttatctgcgagtctggaaaggcctgagaccactggccttgttcctctggctggggcttctggggcctgtgccttggctgggggccacagggagttcttgtcagagggtagcaggacagagaaggggagctgagcctgtcacctccaggagcactagggtttgggaacagggtgggggtccagccccctcaccaggccccggtctacttgcagccccatcttcccgggaagccagccgcccaccagaggagcccagcgccccgagccccacgttgccagcgcagttcaagcagcgggcgcccatgtacaacagcggcctgagccctgccacacccacgcctgcggcgcccacctcgcctctgacacccaccacacctccggctgtcgcccctaccactcagacacccccggttgccatggtggccccgcagacccaggcccctgctcagcagcagcctaagaagaacctgtccctcacg

SEQ ID NO: 22580 - DNA, 588 bp, Homo sapiens
  MAP TO AC015525.3; EXPRESSED IN BRAIN, SIGNAL = 1.7; EXPRESSED IN BONE MARROW, SIGNAL = 1.9; EXPRESSED IN LUNG, SIGNAL = 1.9; EXPRESSED IN HELA, SIGNAL = 1.4; EST_HUMAN HIT: AW013827.1, EVALUE 0.00e+00; SWISSPROT HIT: P10266, EVALUE 4.00e-72; NT HIT: M14123.1, EVALUE 0.00e+00
ataggtacttctaccaaccaattttggactgtgggcattaaacatcctggtgctctccctaggcaaataggaggataacgatacccaatggaaatatttatcatcatcccttcttcctcaggtttggcagggcagcgatcatctgtggggccaggtacccatacactatcattaacatatacttctataggattatccatccatgtgactggtgttaccatctccgtggaggcccttttctttgcatctccgatgggttcattgtagaacttcaaatgtctagtgggtatccaaacaggaagctgattttctcctggtgaaacacaagcaaaacctctcccccacgttatcaccttccctatttcccatgtcttatttttattatctttccaccaaattagttttccttcatgtgggctgttctttttaccagtaagatgttgttctgcagaagtagtagtctgatttctataaatgtttaaaaaatttaaagtatagagtgctagattaagttgcatctgaggagtggtacactccttactgtctcccccttctttttgtttaactaattgagttttgagtgttcta

SEQ ID NO: 22581 - DNA, 814 bp, Homo sapiens
  MAP TO AL117328.5; EXPRESSED IN BRAIN, SIGNAL = 1.1; EXPRESSED IN HELA, SIGNAL = 1.1; EXPRESSED IN BONE MARROW, SIGNAL =   1; EXPRESSED IN LUNG, SIGNAL =   1; SWISSPROT HIT: P07897, EVALUE 8.70e-02; NT HIT: gi11418333, EVALUE 0.00e+00; EST_HUMAN HIT: AW411142.1, EVALUE 0.00e+00
tgacatgtccgtttcggagaagtgcggcagagaagaagccctggtggggtcgtctccccacctccctgctctccattacgatgaacctgcagagaacttagcggagaagagccttccacttccaaagagcacctctgggtccaggagaaggtccgctgtctggaagcacttctacctgtcgccactggacaactccaaagctgtctgcattcactgcatgaacgagttcagccgggggaagaatgggaaggacctgggcacgagctgcctcatcaggcacatgtggagggcacaccgcgccatcgtgttgcaggagaacgggggcacgggcatcccgccactgtactccacccctcccactctgctgccttccttgctgccgccggagggggagctcagctctgtgtcctcgtctccagtaaagccggtcagagagtccccttcggcctcctcctcccctgacaggctgactgaggacttgcagtctcacttgaaccctggagatgggctgatggaagacgtggcggccttctcatcttccgatgacataggggaggcctcggcgtcctctcctgagaagcagcaggctgatgggctgagtcctagattgtttgaatctggcgccatcttccagcagaataaaaaggtcatgaaaagactgaagtcggaggtctggcatcacttctccctggcccccatggacagcctcaaggccgagtgtcggtactgcggctgtgccatcagccgggggaagaagggtgatgtgggcaccagctgcctgatgagacatctctaccggcgccatccagaagtt

SEQ ID NO: 22582 - DNA, 724 bp, Homo sapiens
  MAP TO AC027307.3; EXPRESSED IN BONE MARROW, SIGNAL = 2.3; EXPRESSED IN HEART, SIGNAL = 2.7; EXPRESSED IN PLACENTA, SIGNAL = 2.8; EXPRESSED IN BRAIN, SIGNAL = 2.1; EXPRESSED IN HELA, SIGNAL = 0.94; EST_HUMAN HIT: BE745584.1, EVALUE 0.00e+00; SWISSPROT HIT: P03181, EVALUE 4.00e-03; NT HIT: gi14769653, EVALUE 0.00e+00
tcaagccaagccagaccccgcagccgaaggacaagtgaagcagccccctgagcctcacaaggacctcctggctggtgaggagggggccgcgccaggctcccaggcctccacagagtcttcagcgcatcccccaacagcagcccctgccagtccctcgggtccaggcaaggccctgggggtctccttaaatgccacctcgggcaagtcccagtcccagtcctcggccacccccagctctggatcccagggccagctgccctctggctctggctgtggctcccgcctgtccggcagggcccagggccagcgtcgggcacagggcagctcccactggtctcggcaacacacccagccgcctggtacttcctccagcccctcccagtcagccctcccgtcctcggggcccctgcagccacccaacgtcacctccagcccggtctcacccatggtccagtctcccagcagcagcaacatccccacgcagccccccagcaagtcctctggcaagccggaggacgcagcccccaagaccagcggacagcgccagaaggaatcgtcgaaacagcctgccagcagcgcctcagtgcccgagctggtcccctgccattccgggacctctctggagtacacttcggagtccaccaccgagatcacctgcagctggccacaccacaggcccccgtgcctgcagcactactggtgcctgaaacacctggcctgctag

SEQ ID NO: 22583 - DNA, 594 bp, Homo sapiens
  MAP TO AC009948.2; EXPRESSED IN HELA, SIGNAL = 1.6; EXPRESSED IN BONE MARROW, SIGNAL = 0.87; EXPRESSED IN HEART, SIGNAL = 4.1; EST_HUMAN HIT: BG420554.1, EVALUE 3.30e+00; SWISSPROT HIT: Q14324, EVALUE 4.00e-24; NT HIT: gi16157781, EVALUE 0.00e+00
atactcctggtccctgtccttcagtgaaagttaaggaagtatcaagagattctgtgactataacttgggaaattcccacgattgatggtggagctccagtcaacaattacatcgttgagaagcgtgaagctgctatgagagcattcaaaacagtaactaccaaatgcagcaagacactttacagaatttctggacttgtagaaggaaccatgtactatttcagagtgctgccagaaaatatttatggcattggagaaccttgtgaaacatctgatgcagtactggtctcagaagtgcctttggtgcctgcaaagctagaagtggtcgatgtcaccaaatccactgttacccttgcctgggaaaaaccactctacgatggtggtagccgactcactggatatgttctcgaggcctgcaaagctggcacagagagatggatgaaggttgtcaccttaaaacccacagtcctagagcacactgttacttccttaaatgaaggtgaacaatacttatttagaataagggcacaaaatgagaaaggtgtgtcagaaccaagagagactgtcacagccgtgactgtacaagacctcagag

SEQ ID NO: 22584 - DNA, 719 bp, Homo sapiens
  MAP TO AC022423.2; EXPRESSED IN LUNG, SIGNAL = 1.6; EXPRESSED IN BONE MARROW, SIGNAL = 1.2; EXPRESSED IN FETAL LIVER, SIGNAL = 1.3; EXPRESSED IN HELA, SIGNAL = 0.72; EXPRESSED IN HEART, SIGNAL = 1.7; EST_HUMAN HIT: BG007916.1, EVALUE 0.00e+00; SWISSPROT HIT: P49606, EVALUE 5.40e-02; NT HIT: gi16171325, EVALUE 0.00e+00
cagcggatcaagtcttttgagaacctggccaatgctgaccggcctgtagccaagtccggggcttccccatttttgtcggtgagctccaagcctcccattgggaggcggtcttccggcagcattgtttccgggagcctgggccacccaggtgacgcagcagcaaggttgttgagacgcagcttgagttcctgcagcgaaaaccaaagcgaagccggcaccctcctgccccagatggccaagtctccctcaatcatgacactgaccatctctcggcagaacccaccagagaccagtagcaagggctctgattcggaactaaagaaatcacttggtcctttgggaattcccaccccaacgatgaccctggcttctcctgttaagaggaacaagtcctcggtacgccacacgcagccctcgcccgtgtcccgctccaagctccaggagctgagagccttgagcatgcctgaccttgacaagctctgcagcgaggattactcagcagggccgagcgccgtgctcttcaaaactgagctggagatcacccccaggaggtcacctggccctcctgctggaggcgtttcgtgtcccgagaagggcgggaacagggcctgtccaggaggaagtggccctaaaaccagtgctgctgagacacccagttcagccagtgatacgggtgaagctgcccaggatctgccttttagaagaagctggtcagttaa

SEQ ID NO: 22585 - DNA, 588 bp, Homo sapiens
  MAP TO AL035662.21; EXPRESSED IN BRAIN, SIGNAL = 1.3; EXPRESSED IN HELA, SIGNAL = 1.7; EXPRESSED IN LUNG, SIGNAL = 1.1; EXPRESSED IN BONE MARROW, SIGNAL = 1.1; NT HIT: gi14786168, EVALUE 0.00e+00; SWISSPROT HIT: P55286, EVALUE 3.00e-22; EST_HUMAN HIT: BF356215.1, EVALUE 1.00e-42
cctcaggcgccaccacaagagccacctgagctcggacgaggatgaagacatgcgggacaacgtcatcaaatacaacgacgaaggcggcggcgagcaggacaccgaagcctacgacatgtcggcgctgcggagcctctacgacttcggcgagctcaagggcggcgacgggggcggcagcgcgggcgggggagcgggcgggggctcgggcgggggcgcgggcagccccccgcaggcccacctgccctccgagcgccactcgctgccgcaggggccgccgagccccgagccagacttctcagtgttcagggacttcatcagccgcaaggtggcactggcggacggggacctgtcggtgccgccctacgacgccttccagacctacgccttcgagggcgcggactcgccggccgcctcgctcagctccctgcacagcggctcgtcgggctccgagcaggacttcgcctatctcagcagctggggtccgcgcttccggcccctggccgcgctctacgccggccaccgcggggacgacgaggcccaggcctcctagcccctcgccctgccgtcggggcgcggctgctcacccgc

SEQ ID NO: 22586 - DNA, 690 bp, Homo sapiens
  MAP TO AL133325.13; EXPRESSED IN HELA, SIGNAL = 0.6; EXPRESSED IN BONE MARROW, SIGNAL = 0.98; EXPRESSED IN LUNG, SIGNAL = 0.95; EST_HUMAN HIT: BI962557.1, EVALUE 0.00e+00; SWISSPROT HIT: O95096, EVALUE 4.00e-92; NT HIT: gi11421408, EVALUE 0.00e+00
tgcacggtctggctgccggggcgccccctcaggactcaagctccaagtccccggagccctcggccgacgagtcaccggacaatgacaaggagaccccgggcggcgggggggacgccggcaagaagcgaaagcggcgagtgcttttctccaaggcgcagacctacgagctggagcggcgctttcggcagcagcggtacctgtcggcgcccgagcgcgaacacctggccagcctcatccgcctcacgcccacgcaggtcaagatctggttccagaaccaccgctacaagatgaagcgcgcccgggccgagaaaggtatggaggtgacgcccctgccctcgccgcgccgggtggccgtgcccgtcttggtcagggacggcaaaccatgtcacgcgctcaaagcccaggacctggcagccgccaccttccaggcgggcattcccttttctgcctacagcgcgcagtcgctgcagcacatgcagtacaacgcccagtacagctcggccagcaccccccagtacccgacagcacaccccctggtccaggcccagcagtggacttggtgagcgccgccccaacgagactcgcggccccaggcccaggccccaccccggcggcggtggcggcgaggaggcctcggtccttatggtggttattattattattataattattattatggagtcgagttga

SEQ ID NO: 22587 - DNA, 577 bp, Homo sapiens
  MAP TO AC004032.7; EXPRESSED IN BRAIN, SIGNAL = 1.3; EXPRESSED IN HEART, SIGNAL = 1.5; EXPRESSED IN BONE MARROW, SIGNAL = 1.4; EXPRESSED IN LUNG, SIGNAL = 1.3; EXPRESSED IN HELA, SIGNAL = 0.52; EST_HUMAN HIT: BF362394.1, EVALUE 8.10e-01; NT HIT: gi14748241, EVALUE 5.50e-01; SWISSPROT HIT: P48552, EVALUE 2.20e-01
gcaaggaaagactgcaggacagtttttaaggacagctatggccagaaagaaccacctcacactccatgcccagggtcaaggcccagagctgagacagacacccctgctctttctcctcccaaaagcactcctcagcttttcttcatggcacaaatcctcgctgatcttccggcctcttcctactaccccgtcacccctgccctgaacaccacagcacttcatttggtcatcatactgcagaggttcagtctgccccctgctcaccccgctgcgatcacgagacccacgttggattctgtcttccaaacttctccatccacaatggagacagtcagttccattaagggaaggagagaaccaggagcaggtgccaaaaaaagcaattgcgtgaataactcaactcactccgtttctcttacagggttcaacaatgatagtggccaccattcgtggagcaaggaacttttgtacatcacttcagctctcagaacctcggttctaggaaatgggggaaataataggaccggccgtgatggaggcagttaggagaattaagtgaaatgatccatgcaaaacg

SEQ ID NO: 22588 - DNA, 725 bp, Homo sapiens
  MAP TO AP001052.1; EXPRESSED IN HELA, SIGNAL = 0.93; EXPRESSED IN BRAIN, SIGNAL = 0.94; EXPRESSED IN BONE MARROW, SIGNAL = 0.95; EST_HUMAN HIT: AW273228.1, EVALUE 0.00e+00; SWISSPROT HIT: Q14684, EVALUE 1.00e-102; NT HIT: gi14780631, EVALUE 0.00e+00
gaagcagagtcttttgtgtagaggaagaggacagtgaaagcagtcttcaaaagagaagaaggaagaagaagaagaagcaccacctgcagcctgaaaatccaggcccagggggtgcagccccatccctggaacagaaccggggcagggagcccgaggcctctgggctgaaagccctgaaggcacgtgtggccgagccaggtgcagaggccacgtccagcactggggaggagagtggctccgagcatcctccagccgtccccatgcacaataaaaggaaacggccacggaagaagagcccgagggcccacagggaaatgttggaatcagcagtgttgcccccagaggacatgtctcagagtggcccgagtggcagtcatcctcagggacctagagggtccccgacaggtggagcccaactcctaaaaaggaagcggaaacttggagttgtgcccgtcaatggcagtggcctgtccacgccggcctggcctccattgcagcaggaaggccctcccacaggccccgcagagggggcgaacagccacaccacgctgccccagcgcaggaggctgcagaaaaagaaggcagggcccggcagcctggagctctgtggcctgcccagccagaaaacagcaagtttgaaaaagaggaagaaaatgagagtgatgtcaaacttggtggagcacaacggggtgctggagtccgaagctgggcaaccccaggctctg

SEQ ID NO: 22589 - DNA, 588 bp, Homo sapiens
  MAP TO AF166490.1; EXPRESSED IN BRAIN, SIGNAL = 0.77; EXPRESSED IN HELA, SIGNAL = 0.65; EXPRESSED IN BONE MARROW, SIGNAL = 0.77; SWISSPROT HIT: P52742, EVALUE 5.00e-75; NT HIT: gi14760087, EVALUE 2.00e-13; EST_HUMAN HIT: BF845120.1, EVALUE 0.00e+00
aggttaaaaaatttactaaaggctttcccacatagaggacatacatatggtttctctccagtgtgaactcttctatgaagtctaaagttgtaacttctattgaaggctttaccacatatattgcattcatatggtttctctccagtgtgagttctctcatgtcgtctaaggacagaagagtgattgaaggcttttccgcatagatggcattcatatggtttttctccagtgtgagttctctcatgtcgtctgaggtcagaagattcagtgaaggctttcccacatacatggcactcatatggtttctctccagtgtgaattctctcatgtcgtttaagcacagaagattcagtgaatgctttcccacatagatgacatccatgtggtttctctccattgtgacttcgctcatgttgtctaaggtgagaacaatgagagaaggcttttccacatagatgacattcatatggtttctctccattgtgagttctttcatgttgtctaaggtaagaacatttactgaaagccttcccacataggagacatccatatggtttatctcctaagtgagttctctcatgttttcta

SEQ ID NO: 22590 - DNA, 572 bp, Homo sapiens
  MAP TO AC004624.6; EXPRESSED IN HELA, SIGNAL = 0.66; EXPRESSED IN BRAIN, SIGNAL = 0.79; EXPRESSED IN BONE MARROW, SIGNAL = 0.74; EXPRESSED IN FETAL LIVER, SIGNAL = 0.92; NT HIT: gi14786703, EVALUE 1.40e-01; EST_HUMAN HIT: AW514737.1, EVALUE 3.00e-03
agtctccagaaatctggtattttcaaaagagtattgcaaaacctacatttttttttcccaaagagaaggaattcaaacctgcattacagtgatttttttcccctccaggaacataaaaattaacgttttaaagtttatatatggaaagctatgatgcagcattaggagccataggctctcgggtcagacaggtttttattcaaatcctgcccctagttatggtgtgacctgaggcaagttagttcacctccgtgagcctcaattttcttgtctgtagaatgggtacaatcaacacacacaacttgaagtgttgcggtcaatggagaatttatctaaagtgctcacaaagtaagcactcaatgaatattagctaacatttgctgcacttggcttttctaacccaacctaatcattatcatgtcttctctcacctttatattcatcataatccctaacactcatgtattcaacacgggcgacactacctaacacaaccaggtgctctggcaacactcaccccacttctgatctggcccaagcactagctacccgcttcaaccatggacagaccc

SEQ ID NO: 22591 - DNA, 457 bp, Homo sapiens
  MAP TO AC005752.1; EXPRESSED IN BRAIN, SIGNAL = 2.6; EXPRESSED IN HELA, SIGNAL = 2.3; EXPRESSED IN LUNG, SIGNAL = 1.8; EXPRESSED IN HEART, SIGNAL = 1.8; EXPRESSED IN BONE MARROW, SIGNAL = 1.1; SWISSPROT HIT: Q9Y5F2, EVALUE 2.00e-83; NT HIT: gi14727743, EVALUE 0.00e+00; EST_HUMAN HIT: BG718561.1, EVALUE 0.00e+00
gggctgggagaagccgtccaccaggagcacttgcagcgtggcggtggccgagcgcggaggctcgccattgtccttgaccagcaccaccagcctgtgcttggccgcgtcgcgctcgctcagcagcctggcggtgcgcacctcgccattgtgcgcccacacgccgaatagcccgggctccgtggccttgagcagctggtacgacagccaggcgttctggcccgagtcgccgtccaccgccaccaccttggtcaccaggtagcccggctcggccgcccggggcaccagctcggtgcagggcgcggagccgttctgcagcgggtacagcacgaagggcgagttgtcgttggcgtccagcaccagcacgcgcaccagcgcctcgctgctcaaagccggggagccgcggtctgtggcgcccacgcggaagtcgaaagcctgcagggcctcgtagtccagcgac

SEQ ID NO: 22592 - DNA, 455 bp, Homo sapiens
  MAP TO AL021938.1; EXPRESSED IN BONE MARROW, SIGNAL = 1.3; EXPRESSED IN FETAL LIVER, SIGNAL = 1.1; EXPRESSED IN HELA, SIGNAL = 0.96; SWISSPROT HIT: Q92833, EVALUE 7.00e-55; NT HIT: gi11863151, EVALUE 0.00e+00; EST_HUMAN HIT: AL041595.1, EVALUE 0.00e+00
cttgaggccattgacggcgggcccagtggacttggacgcccccccgagggatagcacctgtttgcgggtttttgcattgctactttcagttttccctgagattgtgtggttgacagcggaactgggcttgtggtgattgggtttggtgtccttgaccagttctctcttggctttggtgtatgtgacagcccccttcgtcaccgtggcagtgtacttcacagttttggatggtgaaggtctgacctcgcgcatctttttggcactggttacacctgcacccagagatgacattcgagtgactccgtttaccttagaaacctgtggagcagcagaagcagaggtggaaaaaaacgcagaattagtacctgccactaaaatgaccggcccacccgtgagaaaggaccctggatgctggggatgaacagagccagcagcctgtagtgtgataagaagag

SEQ ID NO: 22593 - DNA, 492 bp, Homo sapiens
  MAP TO AC005000.1; EXPRESSED IN HELA, SIGNAL = 0.76; EXPRESSED IN PLACENTA, SIGNAL = 1.7; EXPRESSED IN BRAIN, SIGNAL = 1.5; EXPRESSED IN BONE MARROW, SIGNAL = 1.4; EST_HUMAN HIT: BE378581.1, EVALUE 0.00e+00; SWISSPROT HIT: P00966, EVALUE 1.00e-74; NT HIT: gi4557336, EVALUE 0.00e+00
aatgagcatggtaaacgatggtgtctgctggggtctcatagatacctggggacttcattccagtgaagtggttctccttgatgtcaatacggcccaagctgtacttgcccacgtcttcgttcaggtacaggaagagctccaaggaggtctggtgggtggtgccatccttgacgttggtcactttcatggggactccttatttgaactcgatctcgagaatgtcaggggttctgggggctttggccgggtcctgggtcttcgtggagagacctggaaatgcttggttcttagggttctccaagattccagcctcattgctgatctgcatgaggttctcgtccatgttccacaggttcttgggagtgactgggatgggaatcccgtgttgctttgtgtgttccataaggtcatttcggaccttgaacctgttgtagaacttgggcatcctccagggagcaatgacctttatctgggggggccagagagtagcag

SEQ ID NO: 22594 - DNA, 758 bp, Homo sapiens
  MAP TO AC002094.1; EXPRESSED IN BONE MARROW, SIGNAL = 1.2; EXPRESSED IN HELA, SIGNAL = 2.5; EXPRESSED IN BRAIN, SIGNAL =   1; EST_HUMAN HIT: BI260947.1, EVALUE 0.00e+00; SWISSPROT HIT: P04004, EVALUE 1.00e-107; NT HIT: AF382388.1, EVALUE 0.00e+00
agtcatgcaagggccgctgcactgagggcttcaacgtggacaagaagtgccagtgtgacgagctctgctcttactaccagagctgctgcacagactatacggctgagtgcaagccccaaggtgtgttcagagcccaggtgggtgggctggggtgccccctgctgctggagactcactaccatccactctctgcagtgactcgcggggatgtgttcactatgccggaggatgagtacacggtctatgacgatggcgaggagaaaaacaatgccactgtccatgaacaggtggggggcccctccctgacctctgacctccaggcccagtccaaagggaatcctgagcagacacctgttctgaaacctgaggaagaggcccctgcgcctgaggtgggcgcctctaagcctgaggggatagactcaaggcctgagacccttcatccagggagacctcagcccccagcagaggaggagctgtgcagtgggaagcccttcgacgccttcaccgacctcaagaacggttccctctttgccttccgaggtgaatccagggcaggtactggggatgcgggtctgccccaggagcgtccctgctctcacaccatctcctccactctagggcagtactgctatgaactggacgaaaaggcagtgaggcctgggtaccccaagctcatccgagatgtctggggcatcgagggccccatcgatgccgccttcacccgcatcaactgtcaggggaagacctacctcttcaag

SEQ ID NO: 22595 - DNA, 1152 bp, Homo sapiens
  MAP TO AL122018.4; EXPRESSED IN HELA, SIGNAL = 1.3; EXPRESSED IN BRAIN, SIGNAL = 4.3; EXPRESSED IN HEART, SIGNAL =  10; EXPRESSED IN BONE MARROW, SIGNAL = 2.2; EXPRESSED IN LUNG, SIGNAL = 2.5; NT HIT: gi16168524, EVALUE 0.00e+00; EST_HUMAN HIT: BG769305.1, EVALUE 0.00e+00; SWISSPROT HIT: Q99798, EVALUE 0.00e+00
tcactgctgcagctccttcattctgttgagggcactgccggcacagaaccacttgatccgcatctcattgaaggtgtggttcaggaggatggtctcctgggtcccattggggtgcttgatgatgcacttcaggggcttgtcaggggcgaagtccttcaggccctgaatagtcagcttgtccacagggtgaaccttgttgtagtcgcctgggtcagcaaaagtcaggggcagcaggccctgcttcttcgggttggtcttgtggatcctggcaaagctcttggtgatgatggcctggccccagaggtggggaggctccagcactgcgtgctcccggctcgagttctcgtccccgatcaccacccacctgatgccatgtttcttgtagtagcgggcagtgtcagggacggggccaaactcctgggtgttttcaatgttggcactgcacacggagttggcctggctgttttcaatgttgatggcaccagtgagcaggttgttggagatgttgtccaagtgcccacaaaacttgagccaggggccagcagccgagatgtggtcagtagtacacttccctttgaccttgatgagtatctgcgggtcctccaggtccttgctatcccacttgtcaaaagcctccaggagctgcaggcgctggctagtggggctcacatccacgtgctggccactgctgtcctgtggggggtgctggtaggggtcctgccctgggtcaaactcctcttggggaaggtcgtctgcatccagagcctctagcttgaacttcttcctatctttgcccatcaggtagttggtctctgggttgaacttgaggattcccacaatggccagggctgtgacaatctctggggacgtgacgaagacatgggtctcagggttcgcatcattgcagcccgtgaagttcctgttgtaggaggtgacgattgtgtacttcttccccttcttgatgtccttcgtgtcccagcggccaatgcaggggccacaagcattggccaggacgatgccacccacattcctcaaaatctgtgcgtagctgtcccgctcaatggtggcgtggatctgctcggagcctggagtgatggtgaagtgggacttgcacttgaagtcatgggccagtgcctgcttggccacagctgc

SEQ ID NO: 22596 - DNA, 669 bp, Homo sapiens
  MAP TO AC007608.2; EXPRESSED IN HELA, SIGNAL = 3.8; EXPRESSED IN BRAIN, SIGNAL = 2.3; EXPRESSED IN BONE MARROW, SIGNAL =   3; EXPRESSED IN LUNG, SIGNAL = 2.6; EXPRESSED IN FETAL LIVER, SIGNAL = 2.7; SWISSPROT HIT: Q9NRS6, EVALUE 2.00e-03; NT HIT: AJ303140.1, EVALUE 0.00e+00; EST_HUMAN HIT: AI004982.1, EVALUE 0.00e+00
gtgtaccaaatcatcgtcatccagactgggagctttgacaacaacaaggccgtcctggaacggcgctattccgacttcgcgaagctccagaaagcgctgctgaagacgttcagggaggagatcgaagacgtggagtttcccaggaagcacctgactgggaacttcgctgaggagatgatctgtgagcgtcggcgcgccctgcaggagtacctgggcctgctctacgccatccgctgcgtgcgccgctcccgggagttcctggacttcctcacgcggccggagctgcgcgaggctttcggctgcctgcgggccggccagtacccgcgcgccctggagctgctgctgcgcgtgctgccgctgcaggagaagctcaccgcccactgccctgcggccgccgtcccggccctgtgcgccgtgctgctgtgccaccgcgacctcgaccgccccgccgaggccttcgcggccggagagagggccctgcagcgcctgcaggcccgggagggccatcgctactatgcgcctctgctggacgccatggtccgcctggcctacgcgctgggcaaggacttcgtgactctgcaggagaggctggaggagagccagctccggaggcccacgccccgaggcatcaccctgaaggagctcactgtgcgagaatacctgcactga

SEQ ID NO: 22597 - DNA, 538 bp, Homo sapiens
  MAP TO AL359236.1; EXPRESSED IN BONE MARROW, SIGNAL = 3.3; EXPRESSED IN LUNG, SIGNAL = 3.3; EXPRESSED IN PLACENTA, SIGNAL = 3.8; EXPRESSED IN BRAIN, SIGNAL = 2.2; EST_HUMAN HIT: BI260784.1, EVALUE 0.00e+00; SWISSPROT HIT: P26599, EVALUE 3.00e-49; NT HIT: AB072380.1, EVALUE 0.00e+00
tcggggaacctggcctggactgccccggcggcacgtagacgcagggatggcgatggccgggcagagcctggtgctcaggatcatcgtggagaacctcttctaccccacgaccctggatgtgctgcaccagattttctccaagttcggcacagtgaagaccatcacattcatcaaggacaaccagttccaggccctgctgcagtacacggaccccgagaacgcccagcataccaagctgtcgctggattggcagaacacctacaacgcctgccacacgctgtgcatcgacttctccaagctcatcagcctcaacgtaaagtacaacaacgacaagagccgcgactaccacgcccggacctgccctccggggacagctagccctcgctggaccagacatggccgtggccttcgacctttcagttcccaacatccacggagccctggccccccggccatcccctcggcggtggcggcagctgcagcggcaggccagatcgccatcctgggcctggcggggacaggaaattctgtcttgctg

SEQ ID NO: 22598 - DNA, 883 bp, Homo sapiens
  MAP TO AC002119.1; EXPRESSED IN HELA, SIGNAL = 0.47; EXPRESSED IN BRAIN, SIGNAL = 3.9; EXPRESSED IN BONE MARROW, SIGNAL = 0.81; EXPRESSED IN FETAL LIVER, SIGNAL = 0.99; SWISSPROT HIT: Q15078, EVALUE 0.00e+00; NT HIT: gi13633783, EVALUE 0.00e+00; EST_HUMAN HIT: AL134682.1, EVALUE 0.00e+00
gcctaggaggagccgcttcttgtcctcctggccgctctcgttcttcaggtcggagaagacctgtgtgaagtagtgtgggtcggcatttatctgcagcatctttgagctcatgaggttgatgacagagaggcaacggtcccaaaaggcctccttgcagctctccaccaggaagggcttgagcgggtaggagatctcgttgcccatgtaggagtaggagaggtacaggcatgtcagcaggacggcctggagctcgtgatccgagcccacctcggaggagataacatccctgcagagcatgtagaggaagaccacgttggccggcgtgatgaagccctggtcctgccagccctgcagaagcagcgagcggtccacgctgcgcagccagagcacggggtccgtgggggacaggtgcttcaggcggtagcaccggcggcagagaaactcacccaggcagcgaagcagctcactggtggacgcctggacgatgacccgtttgggcgtccctgcggaggtgacggcagggtgaggggctttcttgactgaggaggagcccccggtctgggaacccgagagctggctggccgggggtgcaggcggctgggccggtgggggctgggcgaatgtggacaggttggcgcacgacagcgacttcttcaggttctcattgttgaggtgcgtgatgttgttctggtagctgctgttgggctgcaccttcttggagttcttcttcttggccgacacggccacgattctcttccaaggcagcacggagatgatggagtggcgcttcaggttcttgtccttggcgttcttgctgttctgtacggccgtatagtggcccacggtggccgcgccatcctcaaacagcgtggccttccggtag

SEQ ID NO: 22599 - DNA, 832 bp, Homo sapiens
  MAP TO AP000344.1; EXPRESSED IN PLACENTA, SIGNAL = 1.8; EXPRESSED IN BRAIN, SIGNAL = 0.87; EXPRESSED IN HEART, SIGNAL = 1.2; EXPRESSED IN BONE MARROW, SIGNAL = 0.82; SWISSPROT HIT: P10162, EVALUE 8.00e-28
atgggccccagggcccacagcagataagaggggcagcctcacaggagggcgggcctgcatctccggccctcctcaccccgcatccccagcatcacattgccctaagcgtggcgctccacgaaacgtcacccccagcagcatgggcctcgcctgggtgggaggtgaaaaggcgcagaggctgctgacgtcctctcctgttctcattcggctacatctggaaagggtggtgctgtctagcctgggcccaggaggggaggaccccacagccaggcagggctcaggaggggaggaccccacagccaggtggggctcagaaggggagaaccccacaaccgggccgggctcaggaggggaggaccccacagccaggcggggcccaggaggggaggaccccacagccaggcggggcccaggaggggaggaccccacagccaggtggggctcaggaggggagaaccccacagccaggcggggcccaggaggggaggaccccacagccaggcggggcccaggaggggaggaccccacacccaggccgggcccaggaggggaggaccccacacccaggcggggcccaggaggggaggactccacagccaggcggggcccgggaggggaggaccccacacccgggccgggctcaggaggggaggatcctacagccaggcggggcccaggaggggaggaccccacacccgggccgggcccaagaggggaggaccccacagccaggcggggctcaggaggggaggaccccacagccaggccgggctcaggaggggaggaccccacagccacgcggggctcaggaggggaggaccccacacccggg

SEQ ID NO: 22600 - DNA, 836 bp, Homo sapiens
  MAP TO AL121749.7; EXPRESSED IN LUNG, SIGNAL = 2.3; EXPRESSED IN HEART, SIGNAL = 2.7; EXPRESSED IN FETAL LIVER, SIGNAL = 1.9; EXPRESSED IN BONE MARROW, SIGNAL = 1.8; EXPRESSED IN HELA, SIGNAL = 1.2; EST_HUMAN HIT: BF087133.1, EVALUE 1.00e-113; NT HIT: gi14741148, EVALUE 0.00e+00; SWISSPROT HIT: P18537, EVALUE 2.00e-56
ccgcgtcaagacaggccagatcgctaactgcgcgctgccctgccacaacccctttttcagccaggacgagcgcgccttcaccgtcttctggatcggcctgtggtcggtgctctgcttcgtgtccaccttcgccaccgtctccaccttccttatcgacatggagcgcttcaagtacccggagcggcccattatcttcctctcggcctgctacctcttcgtgtcggtgggctacctagtgcgcctggtggcgggccacgagaaggtggcgtgcagcggtggcgcgccgggcgcggggggcgctgggggcgcgggcggcgcggcggcgggcgcgggcgcggcgggcgcgggcgcgggcggcccgggcgggcgcggcgagtacgaggagctgggcgcggtggagcagcacgtgcgctacgagaccaccggccccgcgctgtgcaccgtggtcttcttgctggtctacttcttcggcatggccagctccatctggtgggtgatcttgtcgctcacatggttcctggcggccggtatgaagtggggcaacgaagccatcgccggctactcgcagtacttccacctggccgcgtggcttgtgcccagcgtcaagtccatcgcggtgctggcgctcagctcggtggacggcgacccggtggcgggcatctgctacgtgggcaaccagagcctggacaacctgcgcggcttcgtgctggcgccgctggtcatctacctcttcatcggcaccatgttcctgctggccggcttcgtgtccctcttccgcatccgctcggtcatcaagcaacaggacggccccaccaagacgcacaagctggagaagc

SEQ ID NO: 22601 - DNA, 491 bp, Homo sapiens
  MAP TO AP001046.1; EXPRESSED IN FETAL LIVER, SIGNAL = 1.6; EXPRESSED IN BONE MARROW, SIGNAL = 1.6; EXPRESSED IN LUNG, SIGNAL = 1.7; EXPRESSED IN PLACENTA, SIGNAL = 1.5; EXPRESSED IN BRAIN, SIGNAL = 1.5; EXPRESSED IN HELA, SIGNAL = 0.68; SWISSPROT HIT: P11976, EVALUE 1.00e-05; EST_HUMAN HIT: BI008162.1, EVALUE 2.00e-59
agaacagacggtttacatacacggatatacgtttagacaacaggcagtttacatacacggatatatgtttagagaacaggcggtttacatacacggatatacgtttagagaacaggcggtttacatacacggatatacgtttagagaacaggcggtttacatacacggatatacgtttagacaacaggcggtttacatacacggatatacgtttagagaacaggcggtttacatacacggatatatgtttagacaacaacaggcggtttacatacacggatatatgtttagacaacaggcggtttacatacacggatatatgtttagacaacaggcggtttacatacacggatatatgtttagacaacaggcggtttacatacacggatatatgtttagacaacaggcggtttacatacacggatatatgtttagacaacaggcggtttacatacacggatatatgtttagacaacaggcggtttacctag

SEQ ID NO: 22602 - DNA, 572 bp, Homo sapiens
  MAP TO AP000537.1; EXPRESSED IN PLACENTA, SIGNAL = 1.7; EXPRESSED IN HEART, SIGNAL = 1.4; EXPRESSED IN LUNG, SIGNAL = 1.3; EXPRESSED IN BONE MARROW, SIGNAL = 1.4; EXPRESSED IN FETAL LIVER, SIGNAL = 1.6; EXPRESSED IN HELA, SIGNAL = 1.9; EXPRESSED IN BRAIN, SIGNAL =   2; SWISSPROT HIT: P18175, EVALUE 6.00e-03; EST_HUMAN HIT: BG009093.1, EVALUE 5.00e-76; NT HIT: AL163202.2, EVALUE 1.00e-129
atggacaaacattcagaccgtcctagaagtgttctgaaatcctatgtgagggacaaacactcagaacccagcagcagtgttctggaatcctttgtgatggacaaacattcagaccgtcctagaagtgttctgaaatcctatgtgagggacaaacactcagaacccagcagcagtgttctggaatcctttgtgatggacaaacattcagaccgtcctagaagtgttctggaatcatatgtgagggacaaactctcagaacccagcagcagtgttctggaatcctatgtgagggacaaacactcagaaaatggcagcagtgttttggaatcctgtgtgatcgagaaagattcagaaattcgtaacagtgttctggaatcccatgtgagggctaaacactcagaaccctgcagcagtgttctggaatcctatgtgagggaaaaacactcacaacccagcagcagtgttctcaaatcgtatgtgagggacaacactcataacccaccagcagtgttctggaatcctctgtttgggacaaacattcagaaactcatagcagtgttctggattcgtat

SEQ ID NO: 22603 - DNA, 1721 bp, Homo sapiens
  MAP TO AC002469.7; EXPRESSED IN HELA, SIGNAL = 1.5; EXPRESSED IN BRAIN, SIGNAL = 1.5; EXPRESSED IN BONE MARROW, SIGNAL = 1.1; EXPRESSED IN LUNG, SIGNAL = 0.98; SWISSPROT HIT: O75820, EVALUE 0.00e+00; EST_HUMAN HIT: BG257667.1, EVALUE 0.00e+00; NT HIT: gi14738300, EVALUE 0.00e+00
ttattgcatccatgctgtgtgcaatttctgatgctgaataagagaaatacggcaattaaaggcttcaccacaagcgtcacattcatgggtttcttgggttttcacctctgcatggatcttctgatggttgacaagactgcgctgttgactgaaacttttgtcgcacttctcacacttataaggtttctctcctgtgtgtattctctgatgctgaataagacccgagttccggctaaaggcctttccacattcatcacatttatggggtttattacctgtgtgaacaccctgatgtcgaataagattacaaagctgactaaagctttttccacactgtctgcacagatagggtctctcaccagtgtggattctctgatgttcaataagaaatgagctccggctgaagcttttcccacagacagtacatagatagggcttttcaccagtgtggattctttgatgttgtacaagatgagcactaacactaaaagttttcccacattcatcacatttataagatttctccttagggtagacttcctgctgtataacaagactgcaatttggatcaaaactttccttagtttcattgtatggataagtcttctccctggtgtgaattctctgatgctgaataagacctgagcttctactaaaggcttttccacattcctcacatttatggggcttgtctcctgtgtgaattctctgatgacgagtaaggttgcaaagctgactgaaacttttcccacactctttgcactgataaggtctttcaccagtatggatcctctgatgttcaataaggaatgagctccgactgaaactttttccacactcaatacaaagaaaaggcttctcgccagtgtgaattttttggtgttgtataaggtatgtgcttaatcgaaaggctttcccacattcaccacatttatggggtctttccccagtgtgaattctttgatgctcaacaagcaatgaatttcgactaaagctcttcttacatttggtacagtgataaggtttctcaccagtgtgagttctttgatgctcaataaggtgtgatttccaactgaaggctttcccacagtcactacatttatggggtttctcacctgtatgaatcctttgatgtttaacaaggctccttctctggctgaagctctgtttacactgattacactgatagggtctttctccagtgtggattctctgatgtctaataagggttgagctcacactaaaggtttttccacagtaattacactcatagggcctttccccagtgtgaattctctgatgttcaataacaaatgaactgcgactaaaacttttcccacattcattgcactgaaaaggtttctcaccagtatggaccctttgatgttgaatgaaatgggccttgcggacaaaaccctttccacattcttcacatttatggcatttctcttctgagtttggtcttttacggataatgttagtgttttctctgaacattctctgttcctgggtcaaagattcccttggtatttcccataggaagatccctctttgtttatctaacctaccaacaagttcaaatgtttctctacccataggatcctggtcaatttcacttttgattcttgtaactattacaccctgtggttccacttcttcctcaatttcttcaatctcttgttttacagttggctcctcatccttatctctgttcaaaacat

SEQ ID NO: 22604 - DNA, 469 bp, Homo sapiens
  MAP TO AL021392.5; EXPRESSED IN HELA, SIGNAL = 0.55; EXPRESSED IN BONE MARROW, SIGNAL = 0.86; EXPRESSED IN LUNG, SIGNAL = 1.3; EXPRESSED IN HEART, SIGNAL = 1.3; NT HIT: gi11418322, EVALUE 0.00e+00; SWISSPROT HIT: Q14517, EVALUE 2.00e-16; EST_HUMAN HIT: BE311696.1, EVALUE 6.00e-69
aggatgtccagaaatactcgctgagcattaaggcccaggatgggggccggcccccgctcatcaattcttcaggggtggtgtctgtgcaggtgctggatgtcaacgacaacgagcctatctttgtgagcagccccttccaggccacggtgctggagaatgtgcccctgggctaccccgtggtgcacattcaggcggtggacgcggactctggagagaacgcccggctgcactatcgcctggtggacacggcctccacctttctggggggcggcagcgctgggcctaagaatcctgcccccacccctgacttccccttccagatccacaacagctccggttggatcacagtgtgtgccgagctggaccgcgaggaggtggagcactacagcttcggggtggaggcggtggaccacggctcgccccccatgagctcctccaccagcgtgtccatcacggtgctggacgtgaa

SEQ ID NO: 22605 - DNA, 974 bp, Homo sapiens
  MAP TO AL132654.12; EXPRESSED IN HELA, SIGNAL = 0.87; EXPRESSED IN BONE MARROW, SIGNAL = 0.96; SWISSPROT HIT: Q09455, EVALUE 2.00e-06; EST_HUMAN HIT: BE783857.1, EVALUE 0.00e+00; NT HIT: gi14770873, EVALUE 0.00e+00
ctagttggcttgccctgcccgcacctgctcagccagctgggcctggcagtccagtaggtcatcccggaggcgggcaatgtcctgcgtgtgctgggccagcgtacgattcagctggtccacatggctccacaggccctctctgggcctcagtggctcagtgggcaagctgtccaggcccgcggccagcaggcccagcctcctgcacgcaccctccacttgtgccacccgctggtcaaagtgtcccactgtgtgctgaagtttctgggctgtgtcctggcagcggctcagcccactggccaccttggccacaccagccttgagttgctccagctccccacgcaggttcaggacctgcctgtggccagcctgaagcctggagccttggctgctgacctgctcctggatggcctggacttcggcttccaccttgcgttcccgctcatccagggacgtgttggcagccaagaaggcatcagagtactggctgacagagtcactgaggcctgtgagcgacttgctcactgagttcagattgaccttgagcagagtgatctcgccttgaagtgagctgcccgtcccttctgccagctgtccctggacctcggccacagtgccattgagctgctggagcagtgctgcgtggctggccacctggcgtaggagggcctcgctccggctctgccaggccttcacctctgccacgaggctgtccaggatggctgaggtggtgctcggggtgcacgaagtctccagtgagaccaaccgttgctctagcacagccagctctgtctgtacaaggggccgagctgacctgcccggagaggcgctgtcatggcttagctccccagccaatgttgctaggcgctcctcgaggctctgcacgcgctcttccagcatggtcccaaagccgcccactccccacccccccatgtccaacctcagacagcatccccttgctccaccctctgtcccat

SEQ ID NO: 22606 - DNA, 779 bp, Homo sapiens
  MAP TO U73643.1; EXPRESSED IN HELA, SIGNAL = 0.57; EXPRESSED IN BONE MARROW, SIGNAL = 0.91; EXPRESSED IN LUNG, SIGNAL =   1; EXPRESSED IN FETAL LIVER, SIGNAL = 1.1; SWISSPROT HIT: Q13829, EVALUE 1.00e-14; EST_HUMAN HIT: BI457894.1, EVALUE 0.00e+00; NT HIT: gi14783991, EVALUE 4.80e-02
ctgtaccgtattaatcgaataatcttattgttcataaaatccagagcatgtgggtgagaagaatcgatgcagaagccatcgctcagagcgattttcagtacctcttccacgaagacctggaagctgttgatctgcttgttggcgggcaccacccagagcctcttgaggttctgcttggtgtactcctcctctggcaggccctccacattggccacccagtccagagtcaggtggttggggtcctgcaagtggctggtgatggaggagagattgccattggagcagtagaagagcttagagccaaggagcttgaggaagaggcaggaggtgctgaagatgttggcgttgaagacctccatgctggaagaggagaggctgtagatctggggtgcctcgcgcacagtgaagtggaccgtctgcacacgctggttcagtgtgatgttgagcatggcattcttctcggccttggagagctccacttccttctcctgcagggcctcaatcaggggctgcacctggtagaagtcggcctccctgcggagcagccccatctcctggaagtcctcaggcaggtcaaggtgggaggtccgcaggaagttgaggatatagcggaacactttgccgtcacggtcaatgaagcagttgccctggctgtccctcttggtgggcatcttcccgctgaacatggcgcctagcatggagtcagggaagctggtcagggtcgccagtgaggttgtatagagcttccccccgacgttcagcgtgatggggtcggacat

SEQ ID NO: 22607 - DNA, 521 bp, Homo sapiens
  MAP TO AC005848.1; EXPRESSED IN BONE MARROW, SIGNAL = 1.5; NT HIT: gi14150136, EVALUE 0.00e+00; SWISSPROT HIT: P47845, EVALUE 8.00e-05; EST_HUMAN HIT: BI752814.1, EVALUE 0.00e+00
ctgaggctcagggtgcccaccaggtacgtccaccagcccaggggcctcagccacctgccgggagcggcgcaggaagacaaggaagtcatcggctgtggctagtgcagcgcccacccccagtgggtccgccagataggcctgcgtgtcaccccagtcggtggcaccctgctgtcgcagccaggcagctgagctggaccagttggtgcccaggaagtctcggtaggaagtaaggcccaggcgcaggagcagctgtggcccccgagagccaataggcgccagggtggctgagtgcaggcggaacttgggggcgtcgaagagccagggttgggcctttagccgggtctcccagatggcagtgatggcctcgtccccacctggcagtgggcgacggtcatgggcggggctcagctcggcctgtatctgctcctggggcaggcccccgccagggcactgcagcagcaaggtcacctcaggatccatggtctgaacggggcagctctgggggaggatacggccaggcc

SEQ ID NO: 22608 - DNA, 603 bp, Homo sapiens
  MAP TO AL139378.15; EXPRESSED IN PLACENTA, SIGNAL = 9.5; EXPRESSED IN HELA, SIGNAL = 6.5; EXPRESSED IN BONE MARROW, SIGNAL =  13; EXPRESSED IN HEART, SIGNAL = 8.7; EXPRESSED IN LUNG, SIGNAL = 5.1; EXPRESSED IN BRAIN, SIGNAL = 4.4; SWISSPROT HIT: P23821, EVALUE 1.00e-103; EST_HUMAN HIT: BI194804.1, EVALUE 0.00e+00; NT HIT: gi14753571, EVALUE 0.00e+00
ttatgtagtcatttttgtttgtaattgaaactctgggaattcaaaattaacatccttgcccgtgagcttcttatagacaccagaaaaagtttcaaccttgtgttccacattgttctgctgtgctttgtccaaatgaacctttatgagccggctgccatctagtttcacgcggattctcttgcccacaatttcgcttgggaagaccaagtcctcaaggatggcatcgtgcacagctgtcagagtatggctcctgggacgcttttgcttattttttgtacggctttttcgagttggcttaggcagaattcttctctgaacgataaagacgacatgcttcccactgaactttttctccaattcgcgtactagccggacttgaattttctggaaagatttcagttgaggaatgggaacaaagattatgatagctttccgaccaccaccaagttcaatttccttggctgccgtaatattcagctccctgagctgagctttgaggtccgagttcatctccagctccagaagagcctgggagatgccggactcgaactcgtccggcttctcatcattgggcttcacgatcttggcgctcgaactgaacat

SEQ ID NO: 22609 - DNA, 719 bp, Homo sapiens
  MAP TO AC004126.1; EXPRESSED IN BRAIN, SIGNAL = 0.93; EXPRESSED IN HELA, SIGNAL = 1.6; EXPRESSED IN HEART, SIGNAL = 1.2; EXPRESSED IN BONE MARROW, SIGNAL = 0.79; SWISSPROT HIT: Q9DC04, EVALUE 2.00e-07; NT HIT: gi14784783, EVALUE 0.00e+00; EST_HUMAN HIT: BE795793.1, EVALUE 0.00e+00
cttttcttggagcggtccttccacactcgccccgatttgggcttccccttcgggattacaggaagctcctctttattcaacttcttggacgctggggcctgggatgaagaaccttttcgcttctttgccccgaagccgcctgtcaccgtctccccagctggaggtggcttgctcggctcatgctgaccccggggggagccaggtgccctgggtgtcagctccagtagtggctgagagggctccggaccgggagcttgctgaccggggtaaggctctggtgatcctgggaccggcggtagctgatgctggggggcccccggggtcagctcctccttattctgggccaactccgaggccagtactccctggtcctgagaacactttggtgcctcctcacttggcttcggctgacatcgtggggattcaggactgtactctggctgtctttgaggcgactccaggtgtaggtcttgctgacgctggggggacgctgcgcctggctctggctgcccttggggtgactccaagcctgcaccctgctgcagacggggtgatcctgggcttgtcttcggcggcctttcgggggaccccaggccagcccgctgcacactcggaggagacccgggctccctcgtttcttctgggttcgactcgaactccacaagggcccgtctcgtccgcgaaactgaggtgaggctctcgggggattcgggccttag

SEQ ID NO: 22610 - DNA, 771 bp, Homo sapiens
  MAP TO AC005696.1; EXPRESSED IN PLACENTA, SIGNAL = 1.9; EXPRESSED IN HELA, SIGNAL = 0.72; EXPRESSED IN BRAIN, SIGNAL = 1.6; EXPRESSED IN LUNG, SIGNAL = 1.3; EXPRESSED IN BONE MARROW, SIGNAL = 1.1; EST_HUMAN HIT: BE887306.1, EVALUE 0.00e+00; SWISSPROT HIT: O75153, EVALUE 0.00e+00; NT HIT: gi14771279, EVALUE 0.00e+00
ctgtgctccacgaaggcgtccaccagctcctggcgcaggcagcagagcttgtgccggtgggcgcgggggaagccggcgcgggcgcattcctcaggcagctcctcgccaggcacgggcaggaagttgaggtccggggggaaggtgcgcagcaggtcgaggatgtagtggcgcccgtcgttgccaatgatgcccttgcactcgaccgaggagcagagctccacctcctcgtcacggtcgttgagcacctggtgccgcaggatcttgaggggccgactcgtgcgctccagcagctccaggtaccgcgggtgtgacaccacggtcttgccgaagtcgatggagccgtagatgacgctctgctcctggtcccgctccaggatgccggggatgatggactgggccgtgacccggtagccgcggtaatccaccaccaccgtgcccagcgtgtacagcccctccacgtccaccgcgttgtacgtgcggacgccattcaggtcgttggtgggcgccacgtaggccgccacgtcccccccgaagtccttgtagtggtctcggacgtcgaagcccaggctgaagaagatgttgttccagatgaacatctgcatcttggtctcctcgctggggttgatggccatcacgttgccgtcaatgacggccatggcgcccctggtggctgccgcggtgaagtcgctgtgcacctggcgggggtcgaggagggcagggttagaggccgcgcccacaagagcctgcatccacctggccaagcgcacgcac

SEQ ID NO: 22611 - DNA, 754 bp, Homo sapiens
  MAP TO AC016212.3; EXPRESSED IN HELA, SIGNAL = 1.4; EXPRESSED IN BRAIN, SIGNAL = 1.6; EXPRESSED IN BONE MARROW, SIGNAL = 1.1; EXPRESSED IN LUNG, SIGNAL = 1.2; SWISSPROT HIT: Q53193, EVALUE 1.50e+00; NT HIT: gi14740100, EVALUE 0.00e+00; EST_HUMAN HIT: BF036875.1, EVALUE 0.00e+00
tcaagggaagaccttgggacctggatagggttctccctcgcaccagaagtcatcggcctgtggggtctccaggagccacacctctcgaggcaggtcacaggccgagctggaggcctccttgggcctgaccggctccagcacccggtaatagtggcagtcccggccatcgtccgggtcgtagggcggggccaggatgtccaggaaggcggcaggcccttccacggcgtcgatctggtgcaggttgtcccggtgcggtgtgaggatgcaggggccgctggcctcggtgtactcggcccgcgaacgcagcacgcccggccgcacggcttctcgctcccggggctgcagcggcggctcgaactgctgctcgggcggcaaggcccgcggccgttgcccgccgcccgcgtctagcttgtccatgcagctgatgcgcacggtgccgtacagcaccttgagcatgccgtgcatgcccgggtggtcgtgcagcgggatggacgtgccgctcttgagcaggaacacgcccaggctgaagccgtccgtctcgtagatgtgcatgtaggtgactggcggcaggttgggcggcagcggctgcagtgtggccttgcgcggggcgatgttcaagtcctcggcgcggagctgggtcaggaggctcttcagcttgctcaggttctcggggaagcccggctgcatcggcgcctccgggccagaagccgcgtcgcgatcggaagcgccgcggccgcccccgctgccccggaag

SEQ ID NO: 22612 - DNA, 501 bp, Homo sapiens
  MAP TO AC005618.1; EXPRESSED IN BRAIN, SIGNAL = 1.9; EXPRESSED IN HELA, SIGNAL = 0.63; EXPRESSED IN LUNG, SIGNAL = 1.2; EXPRESSED IN HEART, SIGNAL = 2.2; EXPRESSED IN BONE MARROW, SIGNAL = 0.78; SWISSPROT HIT: Q9UN66, EVALUE 1.00e-48; EST_HUMAN HIT: BI087139.1, EVALUE 0.00e+00; NT HIT: gi14724458, EVALUE 0.00e+00
acctggagccgcgggagctgttgtcctacgtgtccgtgagcccgcagagcggggtggtgttcgcgcagcgcgccttcgaccacgagcagctgcgcgccttcgagctcacactgcaggccagggaccagggctcccccgcgctcagcgccaacgtgagcctgcgcgtgttggtgggcgacctcaatgacaatgcgccacgggtgctgtaccccgcgctggggcctgatggctccgccctcttcgatatggtgccacgcgccgcagagcccggctacctggtgaccaaggtggtggcggtggacgcagactcaggacacaacgcttggctgtcctaccacgtgctgcaggccagcgagcccgggctcttcagcctggggttgcgcacgggtgaggtgcgcacagcgcgtgccttgggcgacagggacgcggcccgccagcgcctgctggtcgctgtgcgtgatggaggacagccgccactctccgccaccgccacgctgcacc

SEQ ID NO: 22613 - DNA, 990 bp, Homo sapiens
  MAP TO AC008103.27; EXPRESSED IN HELA, SIGNAL = 0.87; EXPRESSED IN PLACENTA, SIGNAL = 1.4; EXPRESSED IN BRAIN, SIGNAL =   1; EXPRESSED IN BONE MARROW, SIGNAL = 1.2; EXPRESSED IN LUNG, SIGNAL = 1.2; SWISSPROT HIT: P28481, EVALUE 7.00e-12; EST_HUMAN HIT: AL110383.1, EVALUE 0.00e+00; NT HIT: gi14756466, EVALUE 0.00e+00
tgtcgtgtacagcgtccacgttagcgtgccttgtcggtgccattagcaatgtcgtataaagcgccctcattggtgatgtcttgtacagtgccctcattagcgatgttgtgtacagtgtacttgttagcgacggcttgtagggtgtcctcgttagcgatgtcgtatacagctcgttggcgatgccgtgggcggcgtcctctttggcgatgccctgggcggcgtcctcgttggcgatgccctgggcggcgtcctcgttggcgatgccctgggcggcatcctccttggcgatgccctggacggcgtcctcgctggcgatgccgtgggcggcgtcctcgctggcgattccgtgggcggcgtcctcgttggcgatgccctgggcggcgtcctcgttggcgatgccctgggcggcgtcctctttggcgatgccctgggcggcgccctcgttggcgatgccctgggcggcgtcctccttggcgatgccctgggcggcgtcctccttggcgatgccctgggcggcgtcctcgttggcgatgccctgggcggcgtcctccttggcgatgccctggacggcgtcctcgctggcgatgccgtgggcggcgtcctcgctggcgattccgtgggcggagtcctcgttggcgatgccgtgggcggcgtcctccttggcgatgccctgggcggcgccctccttggcgatgccctgggcggcgtcctccttggcgatgccctgggcggcgtcctccctggcgatgccctgggcggcgtcctcgctggcgatgccctgggcggcgtcctcgctggcgatgccgtgggcggcgtcctcgctggcgattccgtgggcggcgtcctcgctggcgatgccgtgggcggcgtcctcgttggcgatgcccttgtcggcggcctcgttagcgatgtcgtgtacagtatcctcgttagcgatgtcgtgtgtggcgtcctcgttagtgatgtcgtgtacggtgtcctcatggggag

SEQ ID NO: 22614 - DNA, 534 bp, Homo sapiens
  MAP TO AJ239329.2; EXPRESSED IN HELA, SIGNAL = 1.1; EXPRESSED IN BRAIN, SIGNAL = 1.3; EXPRESSED IN PLACENTA, SIGNAL = 2.3; EXPRESSED IN HEART, SIGNAL = 1.3; EXPRESSED IN BONE MARROW, SIGNAL = 1.2; EXPRESSED IN LUNG, SIGNAL = 0.99; NT HIT: gi13994243, EVALUE 0.00e+00; EST_HUMAN HIT: BG194971.1, EVALUE 0.00e+00; SWISSPROT HIT: P02794, EVALUE 9.00e-63
taccaccatcccagctgtgaggctgccatcaacacccacatcagcctggagctccacgcatcctatgtgtacctgtccatggccttctacttcgaccaggacgacgcggccctggagcactttgaccgctacttcctgcgccagtcgcaggagaaaagggagcacgcccaggagctgatgagcctgcagaacctgcgcggtggccgcatctgccttcatgacatcaggaagccagagggccaaggctgggagagcgggctcaaggccatggagtgcaccttccacctggagaagaacatcaaccagagcctcctggagctgcaccagctggccagggagaacggcgacccccagctctgcgacttcctggagaacgacttcctgaaccagcaggccaagaccatcaaagagctgggtggctacctgagcaacctgcacaagatgggggccccggaagcaggcctggcagagtacctctttaacaagctcaccctgggccgcagccagaaacacaccagagcccagacaggcccc

SEQ ID NO: 22615 - DNA, 536 bp, Homo sapiens
  MAP TO Z77852.1; EXPRESSED IN HELA, SIGNAL = 1.8; EXPRESSED IN PLACENTA, SIGNAL = 5.8; EXPRESSED IN BRAIN, SIGNAL = 2.4; EXPRESSED IN HEART, SIGNAL = 3.1; EXPRESSED IN LUNG, SIGNAL = 4.5; EXPRESSED IN BONE MARROW, SIGNAL =   3; EXPRESSED IN FETAL LIVER, SIGNAL = 3.6; NT HIT: gi14737156, EVALUE 0.00e+00; EST_HUMAN HIT: BG697340.1, EVALUE 0.00e+00; SWISSPROT HIT: Q9NSE2, EVALUE 1.00e-76
gctggtattggggttccattacggccagcgaggcccgacaacacctgcagaagatgccagaaggcacgttcttagtacgtgacagcacgcaccccagctacctgttcacgctgtcagtgaaaaccactcgtggccccaccaatgtacgcattgagtatgccgactccagcttccgtctggactccaactgcttgtccaggccacgcatcctggcctttccggatgtggtcagccttgtgcagcactatgtggcctcctgcactgctgatacccgaagcgacagccccgatcctgctcccaccccggccctgcctatgcctaaggaggatgcgcctagtgacccagcactgcctgctcctccaccagccactgctgtacacctaaaactggtgcagccctttgtacgcagaagcagtgcccgcagcctgcaacacctgtgccgccttgtcatcaaccgtctggtggccgacgtggactgcctgccactgccccggcgcatggccgactacctccgacagtaccccttccagctctga

SEQ ID NO: 22616 - DNA, 982 bp, Homo sapiens
  MAP TO AL035704.7; EXPRESSED IN BONE MARROW, SIGNAL = 0.83; EXPRESSED IN HELA, SIGNAL = 0.91; EXPRESSED IN BRAIN, SIGNAL = 0.8; SWISSPROT HIT: P46127, EVALUE 1.60e-02; NT HIT: gi15595198, EVALUE 3.80e+00
tcactgggtcttgaacaccggcttgccccgcagccgcagcactctgtacgtgttgaggccgggcacgtcgaagccgggtgacagcccgtggtgatccaaggggtagaagttgaccagctgcccgtgctgggcctcgagcgagagccacgcgtcgccgagtggcagtgcgcaggggaactcgtgggccacgtgcagctggaagacgcggccgtgcaggtggcgcagcgccagggtgcggaacgctggaggcaccagcgcctccacgcgcggcccgaactggcgcaggcgcagctcgcccgccggcccggcgcgcacctcgtagaaggtcaggttggcgaaggtgaagtagccggcgaaggggtgcgcggtgggcggcggagccgggccgggctcggcctcccggagggcgcgctccagggcgggcaggagctcatcgtaggcccgcgccaccaggtcgggcccgggcggccgtggccctgccagcagcagcaccaggcccagacgcagcgggggcaccagcgagaaggtggcggcgtagccgtccagatcgccgtccttgcgcaccacgcggtagccccgctgcgcgtggaactcccacggcgtgcccgtctcgttggcgaagtaggcgcccgggcaggccagcagcggcgccagcagcgtcttggccgcgtcgggccgcaggagccgccggggcccgccgcccaggagcgccacggccagcttggccaggtcggcggcggtagagtacatctggcccgacggccggtaccagcccaggtcatagagtggcgccggccgcccgctgccgtagaagcccgcggccaggcgcgcgcgcacgtcgggcgtgaggtcaaagcccgtgtctgccatccccagcggctccagcacgttctccgagacccagcgctggtagtcgccctgggcggtgtgagctgccaggacgtgggccaggagcgagaaggccagcgtgctgtaatggcat

SEQ ID NO: 22617 - DNA, 612 bp, Homo sapiens
  MAP TO AC005756.1; EXPRESSED IN BRAIN, SIGNAL = 3.7; EXPRESSED IN HELA, SIGNAL = 4.6; EXPRESSED IN HEART, SIGNAL = 3.1; EXPRESSED IN BONE MARROW, SIGNAL = 3.5; SWISSPROT HIT: Q92870, EVALUE 6.90e-01
atgcagacacacgcaggcacacgcagacaggcaggcacacgcagacacacgcaggcacacgcagacacgcaggcacacgcagacacgcaggcacacgcaggcacacacagacatgcaggcacacacaggcacacgcagacacgcaggcacacgcaggcacatgcagacacgcaggcacacgcagacacacgcagacaggcaggcacacgcagacacgcaggcacacgcacacgcaggcacacgcagacacgcaggcacacgcaggcacatgcagacacgcaggcacacacagacatgcagacacacgcaggcacacgcagacaggcaggcacacgcagacacgcaggcacacgcagacacaggcacacgcaggcacacgcagacacgcaggcacacgcaggcatacacagacacacaggcacatacagacacacaaaggcagacacatgcagacacaggcacatgcaggcagacacacacatgctcacactcaggtacacgcagacatgcagacacacacacagacacacacagacacatgctcacactcaggtacacgcagacatgcagacacacacacagacacacacagaaccagacacacagatgcat

SEQ ID NO: 22618 - DNA, 1173 bp, Homo sapiens
  MAP TO AP001731.1; EXPRESSED IN HELA, SIGNAL = 1.1; EXPRESSED IN BONE MARROW, SIGNAL = 1.5; SWISSPROT HIT: Q99712, EVALUE 0.00e+00; EST_HUMAN HIT: BI832561.1, EVALUE 0.00e+00; NT HIT: gi16170738, EVALUE 0.00e+00
atgaaacatctttgtcatttctctaagtgtttccagagcctggcaatggatgccattcacatcggcatgtccagcacccccctggtgaagcacactgctggggctgggctcaaggccaacagaccccgcgtcatgtccaagagtgggcacagcaacgtgagaattgacaaagtggatggcatatacctactctacctgcaagacctgtggaccacagttatcgacatgaagtggagatacaaactcaccctgttcgctgccacttttgtgatgacctggttcctttttggagtcatctactatgccatcgcgtttattcatggggacttagaacccggtgagcccatttcaaatcataccccctgcatcatgaaagtggactctctcactggggcgtttctcttttccctggaatcccagacaaccattggctatggagtccgttccatcacagaggaatgtcctcatgccatcttcctgttggttgctcagttggtcatcacgaccttgattgagatcttcatcaccggaaccttcctggccaaaatcgccagacccaaaaagcgggctgagaccatcaagttcagccactgtgcagtcatcaccaagcagaatgggaagctgtgcttggtgattcaggtagccaatatgaggaagagcctcttgattcagtgccagctctctggcaagctcctgcagacccacgtcaccaaggagggggagcggattctcctcaaccaagccactgtcaaattccacgtggactcctcctctgagagccccttcctcattctgcccatgacattctaccatgtgctggatgagacgagccccctgagagacctcacaccccaaaacctaaaggagaaggagtttgagcttgtggtcctcctcaatgccactgtggaatccaccagcgctgtctgccagagccgaacatcttatatcccagaggaaatctactggggttttgagtttgtgcctgtggtatctctctccaaaaatggaaaatatgtggctgatttcagtcagtttgaacagattcggaaaagcccagattgcacattttactgtgcagattctgagaaacagcaactcgaggagaagtacaggcaggaggatcagagggaaagagaactgaggacacttttattacaacagagcaatgtctga

SEQ ID NO: 22619 - DNA, 581 bp, Homo sapiens
  MAP TO AL021937.1; EXPRESSED IN PLACENTA, SIGNAL = 1.6; EXPRESSED IN BRAIN, SIGNAL = 2.7; EXPRESSED IN HELA, SIGNAL = 0.57; EXPRESSED IN HEART, SIGNAL = 1.8; EXPRESSED IN BONE MARROW, SIGNAL = 1.6; EXPRESSED IN LUNG, SIGNAL =   2; EXPRESSED IN FETAL LIVER, SIGNAL = 1.8; SWISSPROT HIT: P14373, EVALUE 7.00e-36; EST_HUMAN HIT: BG720986.1, EVALUE 0.00e+00; NT HIT: gi16168151, EVALUE 0.00e+00
tggatatgaccttggatgccgacacagccaacaacttcctcctcatttctgacgacctcaggagcgtccgaagtgggctcatcacacagaatcggcaagaccttgccgagagatttgacgtgtccgtttgcatcctgggctcccctcgctttacctgtggccgccactactgggaggtggacgtgggaacaagcacagaatgggacctgggagtctgcagagaatctgttcactgcaaagggaagatccagctgaccacagagcttggattctggactgtgagtttgagggatggaagccgcctctctgccagcacggtgccgctgactttcctcttagtagaccgcaagttacagcgagtggggatttttctggatatgggcatgcagaacgtttccttttttgatgctgaaagtggttcccatgtctatacattcaggagcgtctctgctgaggagccactgcgcccatttttggctccttcaattccacctaatggtgatcaaggtgtcttgagcatctgtcctttgatgaactcaggcactactgatgctccagtccgtcctggggaggccaaataa

SEQ ID NO: 22620 - DNA, 572 bp, Homo sapiens
  MAP TO AL121760.4; EXPRESSED IN BONE MARROW, SIGNAL = 1.3; EXPRESSED IN LUNG, SIGNAL = 1.2; EXPRESSED IN FETAL LIVER, SIGNAL = 1.4; EXPRESSED IN HELA, SIGNAL = 1.2; SWISSPROT HIT: P32583, EVALUE 2.00e-12; EST_HUMAN HIT: AA843788.1, EVALUE 1.30e-02
gcgaatgtcacctcctcagagaagtgttccctgactaccctaaccggttcctccaccgagtcactcttagctgttgctttgttcctatatttattgtcttccgagtcactcttagctgttgctttgttcctgtatttattgtcttccgagtcactcttagctgttgctttgttcctatatttattgtcttccgagtcactcttagctgttgctttgttcctatatttattgtcttccgagtcactcttagctgttgctttgttcctatatttattgtcttccgagtcactcttcgctgttgctttgttcctgtatttactatcttccgagtcactcttagctgttgctttgttcctatatttattgtcttccgagtcactcttcgctgttgctttgttcctgtatttactgtcttccgagtcactcttcgctgttgctttgttcctgtatttactgtcttccgagtcactcttagctgttgctttgttcctatatttattgtcttccgagtcactcttagctgttgctttgttcctgtatttattgtcttccgaaggagactgtgagcttcc

SEQ ID NO: 22621 - DNA, 746 bp, Homo sapiens
  MAP TO Z73417.1; EXPRESSED IN HELA, SIGNAL = 0.81; EXPRESSED IN BRAIN, SIGNAL = 0.84; EXPRESSED IN HEART, SIGNAL = 1.2; EXPRESSED IN BONE MARROW, SIGNAL = 0.89; EXPRESSED IN FETAL LIVER, SIGNAL =   1; EST_HUMAN HIT: BG675952.1, EVALUE 0.00e+00; NT HIT: Z97339.2, EVALUE 4.60e-02; SWISSPROT HIT: P51811, EVALUE 2.00e-48
ttgtgctaatggtattttccctggtatctgtcacctatggggccaccctttgcaatatgttggctatccagatcaagtacgatgactacaagattcgccttgggccactagaagtcctctgcatcaccatctggcggacattggagatcacttcccgcctcctgattctggtgctcttctcagccactttgaaattgaaggctgtgcccttcctagtgctcaacttcctgatcatcctctttgagccctggattaagttctggagaagtggtgcccagatgcccaataacattgagaaaaacttcagccgggtcggcactctggtggtcctgatttcagtcaccatcctctatgctggcatcaacttctcttgctggtcagctttgcagttgaggttggcagacagagatctcgtcgacaaagggcagaactggggacatatgggcctgcactatagtgtgaggttggtagagaatgtgatcatggtcttggtttttaagttctttggagtgaaagtgttactgaattactgtcattccttgattgccttgcagctcattattgcttatctgatttccattggcttcatgctccttttcttccagtacttgcatccattgcgctcactcttcacccataatgtagtagactacctccattgtgtctgctgtcaccagcaccctcggaccagggttgagaactcagagccaccctttgagactgaagcaaggcaaagtgttgtctga

SEQ ID NO: 22622 - DNA, 960 bp, Homo sapiens
  MAP TO AC005070.1; EXPRESSED IN HELA, SIGNAL = 1.6; EXPRESSED IN BONE MARROW, SIGNAL = 2.7; EXPRESSED IN FETAL LIVER, SIGNAL = 1.7; SWISSPROT HIT: P05143, EVALUE 4.00e-07; NT HIT: X04335.1, EVALUE 9.30e-01; EST_HUMAN HIT: BG675396.1, EVALUE 0.00e+00
aacagcacggcaccaccccctccacctcctccacctccttcttcgtcttactatcaaaaccagcagccctctgcaaactttcagaattataatcagctcaaaggtagtctttctcaacaaactgtgtttacatcaggaccaaatcaagcacttcctggcaccacaagccagcaaacagttccaggacaccacgtgactccagggcattttttgccctctcagaaccctaccattcaccatcaaactgctgctgccgtagtcccccctcctcctccaccaccacctgctccaggaccgcaccttgtacaacagccgaattcccatcagcaacactctgtagcacatgtagtagggcctgttcatgcggtcacccctgggtcgcatattcattctcaaactgctggacaccacttacccccacccccaccccctcctggtcctgcccctcatcaccatccaccaccccatccatccacaggactccaaggtctacaagcacaacaccagcatgttgtaaattcagcacccccaccaccccctccgccgccaccttccagtgttttggcttctgggcatcataccacatcagctcaagccttacaccacccacctcatcaaggacctccactttttccttcgagtgctcatccaactgtaccaccgtatccctcacaagctacacatcataccactttgggaccgggaccccagcaccagccttctggaacagggccacattgtccattacctgtcacaggtcctcatctccagccccaaggaccaaacagtattccaacacctactgcttcagggttctgtcctcatcctggctctgtggccctgccacatggggttcaaggacctcagcaggcatctccagtgcctggacagattccaattcacagagcacaggtgccaccaacatttcaaaacaattaccatgggtcagggtggcattaa

SEQ ID NO: 22623 - DNA, 1107 bp, Homo sapiens
  MAP TO AC012571.3; EXPRESSED IN PLACENTA, SIGNAL = 1.6; EXPRESSED IN BRAIN, SIGNAL = 1.5; EXPRESSED IN HELA, SIGNAL = 2.6; EXPRESSED IN HEART, SIGNAL =   2; EXPRESSED IN BONE MARROW, SIGNAL = 1.1; EXPRESSED IN LUNG, SIGNAL = 1.5; EST_HUMAN HIT: BF036478.1, EVALUE 0.00e+00; SWISSPROT HIT: P18709, EVALUE 1.40e-02; NT HIT: gi16159875, EVALUE 0.00e+00
atgtgcttgctgccccgcggcttcgagccccaagctcccgaggacttggcgcagcggagtttggtggagctgcgggaaatgttgaagctccaggagagacttttgcgcaacgaaaaattcatttgcaaattgcccgacaaaggtaaaaagatctttgactcttttgccaaactgaaagccgccattgcagaatgtgaagaagttagaagaaaaaatgaactgtttcaccctgttagtttagactgtaagctaaggcaaaaagcaattgcagaagttgatgtgggtacagataaggcccggaattctgacccgatacttgatacttcatcactagttcctggatgttcctctgtagataacatcaagtcatctcaaacctcacaaaaccagggacttggacgtcctactcttgaaggtgatgaagagacttcagaggttgagtacacagtgaataagggcccagcttccagcaacagagacagggtaccaccttcatctgaagctagtgagcatcacccgcagcatcgtgtttcaagtcaggcagaagatacttccagcagctttgacaacctttttattgacaggttacagaggatcaccattgcggaccaaggtgaacaacagtcagaagaaaacgcaagtactaagaacttgacaggcctttctagtgggactcagaagaaacctcattatatggaagtgctagaaatgcgagccaaaaacccagggccccagctgcgtaaatttaaaaccaatgtgttaccttttcgacaaaatgattcatctagtcattgccagaagagtgggtctcctatttcctcaaaagagcggcggcgcagggataagcagcatcttgatgacatcacagcagctcggcttctaccacttcaccatatgcccacgcagctgctctccatagaagaatccttggcacttcagaaacagcagaaacagaattatgaggagatgcaagcaaagctcgcagcgcaaaaattagctgaaagaccgaatattaaaatgcggagttataatccagaaggggagtcttcagggagataccgagaagtaagggatgaagatgacgattggtcctctgatgaattctga

SEQ ID NO: 22624 - DNA, 487 bp, Homo sapiens
  MAP TO AP001629.1; EXPRESSED IN HELA, SIGNAL = 0.88; EXPRESSED IN LUNG, SIGNAL = 1.3; EXPRESSED IN BONE MARROW, SIGNAL = 1.4; NT HIT: AB038163.1, EVALUE 0.00e+00; EST_HUMAN HIT: AW853429.1, EVALUE 0.00e+00; SWISSPROT HIT: P56181, EVALUE 4.00e-20
ggttgatgaagaatgcttggtaggtaagcgcctgtgtgtgagccgagtcattcataaagagctgttcacagatagggttgatgaagaatgcttggtaggtaagcacctgtgtgtgagccgagtcattcataaagagctgttcacagatagggttgatgaagaatgcttggtaggtaagcgcctgtatgtgagccaagtcattcataaagagctgttcacagatagggatgatgaagaatgcttggtaggtaagcgcctgtgtgtgagccgagtcattcataaagagctgtccttgtgttggtctcatgggcatcgtgtttcctccgcagagccagccccagtgcctgctgagccgtttgacaacactacctacaagaacctgcagcatcatgactacagcacgtacaccttcttagacctcaacctcgaactctcaaaattcaggatgcctcagccctcctcaggccgggagtcacctcgacactga

SEQ ID NO: 22625 - DNA, 702 bp, Homo sapiens
  MAP TO AL136293.3; EXPRESSED IN PLACENTA, SIGNAL = 1.9; EXPRESSED IN HELA, SIGNAL = 2.4; EXPRESSED IN BRAIN, SIGNAL = 2.2; EXPRESSED IN BONE MARROW, SIGNAL = 2.4; SWISSPROT HIT: O15040, EVALUE 0.00e+00; NT HIT: gi15300999, EVALUE 0.00e+00; EST_HUMAN HIT: BF364208.1, EVALUE 1.00e-116
aaggtggaagcaggagcacctgtcacagctccctggaatcgacaccctgctccgaatttcctggggacagtccccagtccttgaacacagacttgctgtcgatgacctcaagtgtcctgggcagtagcgtggatcagttaagtgcagagtctccagaccaggaaagcagcttcaatggtgaagtgaacggtgtcccacaggaaaatactgaccccgaaacgtttaatgtcctggaggtgtcaggatcaatgcctgattctctggctgaggaagatgacattagaactgaaatgccacactgtcaccatgcacatgggcgggagctgctcaatggagcgagggaagatgtgggaggcagtgatgtcacgggactcggagatgagccgtgtcctgcagatgatggaccaaatagcacacagttacccttccaagaacaggacagctctcctggggcgcatgatggggaagacatccaacccattggcccccaaagcactttttgtgaagtccccctcctgaactcactcactgtgccttccagcctcagctgggccccaagtgctgaacagtggctgcctgggaccagagctgatgaaggcagccccgtggagcccagccaagagcaggacatcctaaccagcatggaggcctctggccacctcagcacaaatctctggcatgctgtcactgatgatgacacag

SEQ ID NO: 22626 - DNA, 2790 bp, Homo sapiens
  MAP TO AC004032.7; EXPRESSED IN HELA, SIGNAL =   1; EXPRESSED IN LUNG, SIGNAL =   1; EXPRESSED IN HEART, SIGNAL = 1.4; EXPRESSED IN BONE MARROW, SIGNAL = 0.75; SWISSPROT HIT: Q10571, EVALUE 0.00e+00; EST_HUMAN HIT: BG752514.1, EVALUE 0.00e+00; NT HIT: gi14777993, EVALUE 0.00e+00
tcacccgggaagtgagaggaaaacgagtgtgcatataccttctttgctgttggggttctggggtttggccttctcccagggcgccaacgtcttgtcgtcgtccgcgctgtccaccagggccttgtcagcgggcatgtaccaggcagcgctgtgctctgccatcagcgagtccaggtcaatggtgctcatggcgctcttgaccgcctcggagcagcagctgcccagctcgctgtcgccattctgcgcccctgaggccccgacggcgcactcacccttcttgccacccttcagccccagaggctggtcctcggagatgctgaactgctgcctctgtagctggatctgcgcctgaaggatctccagggggtggatctcgtcgggtggcggggcgccgctgctgctcgtcggggtgcggacctgctccaggcccggagtgcccggatggcccgggcccccaccgccgccgtagctgtcaggggtcgaggtagagttagacatgatgcccaggccgagggcgggcgggggcgccttcggtccgtgttccccggcgcctaccccacggggagggagtttgggcgagccggtcaccaggggactcctgctcgctttaactagtgcctgggggttgtcagagctggacgacacctcgtcctcattggcgtagctcgtgctcacctcgtccgaggcgaactcacccacgtttggcgaactactgtccgacttggccccgccgtccagggacccaatgaggtccggctgatcccccaggagcaactcagcccccttcccccaggatggcgacgtgagcgccttttcgtggggcgtcggtgccccgcgcgtctcgcctgcggagcttcccccgacggctgcgcctgacgcttgctgctgccctgggctcaccccaggtgcgcccccgctgtccggagccgccgagtacttgtcaaagaaggtgccagggctcacgtgaccactgtccctttttctgcgaccccgtccccggccgccgcccccggagaccggcttgccgtcattccccgacgtggattccagggtgtagttgggggagaggctggtgccgtccccctgggctggagggttgggcggccccgaggctttggagccgctgctactggtcccggacgggcctccgggtcctggggccccaggagcagtccctcctgggaagtaatccgagcccgggttgccggccactgccgcgccgtcggtctcgttctggctcagtttcctcttgccctctggcgggttcttcttgttgaaggtcacgttgaggttgggggccccgaggctggcgatcatgttctggcaagcggtggagagcgcagccaggcagctctggccgaacaggttgtccttggagctgggcttgttgaaggagcccagcgagagcgcgcccaatttactggccgaggtgcgctggctgggctggaaatcaggctgcggcgggtaggcacccccgccaccgccgccaccagagctgccaccgccccctcccgcgctggggggcgagttcacgcctggaccgctgtgcggcgtggactgccggccggctgcaccaaacggaaagcccggctggcccccgagcgcagacgtagcaaagtccggcggcgggggccggcgctccgaagcagcgctggggagccccacgcccgccccgggcgactgcagctgacccaggcctcccagactgcccccgaactgcaggcccggtgaaggcagcgcgggcacgtggccctctccgggcatcctcatcggctcctgcagagggccccggaacagcacccccgagccaccaggcggaggagggggcgccaggctggggtcgtgcgggccacagtcagcgggcagacccgagccgcccatcctacggggcagcaggtctccgggcggcggatgcggacctgagaaccacgcgctctcttgcgccaagtgcggcgcctgctgctcgaaggtgcccagacgcccggcgcccgtgctgccgccttcgcgctcaaagttcggctgggccaagccgcccaccgggccgccatgcaccaggccgccctggcccacgtccccggggtggcctagctgagccaggttgggctggcgcagccgctgctgctgattccgcgacgccatctgcttaatcatgagggccgcgttttggcgctgctgctgctgctgctgttgctgttgctgttgctgctgctgctgctgctgttgctgctgctgctgctgctgctgctgctgttgcagggactggtggtccggggccggatgctgcaggggcggccccgaagggaagctgtcgggcacaggcggtgtgaactcgccgggtaggcctgggtaggcggaaggggagaggtgattatccagagcgccgttgtgcatgctgccgttccacgaagcgcagcggtccactcccgcgctgcccggaaagtcgaagcgcggcctcttggccacgttcatgtaggggggcgcgtcgaaatgctgcagccgctggttgggcgcctgctgcggaggaggatgctgcatgctgaaaacaggctcggaataagggtgcatgctccggttctccagccggtggatgggatactcgaattgcgcgtgctggctgggcagcatggggcctccgtcctgcaggccgccgctgggcgtgcccgcctcgccctgctggggccgagggagcgcaggcgggcacgaattttgtcggactagaagcccgggtggcggcggcggctgctgctgtggcggctgctgcgggggctgctgctgagggggtggcggggc

SEQ ID NO: 22627 - DNA, 785 bp, Homo sapiens
  MAP TO AC007540.3; EXPRESSED IN LUNG, SIGNAL = 0.94; EXPRESSED IN BONE MARROW, SIGNAL = 1.1; EXPRESSED IN PLACENTA, SIGNAL = 1.5; EXPRESSED IN HELA, SIGNAL = 0.73; EST_HUMAN HIT: BE767903.1, EVALUE 1.00e-03; NT HIT: AJ252124.1, EVALUE 1.20e-02
ttaataagaattcagtactattattctttgtatcactaccatcaccatcttcatcttcatcaccatccccatcaccatcatcattgccatcatgtacatcatcatgattatcgtctctgtcatcatcaccatcatcatcaccatcactgtcacatcatcaccatcaccatcatcatcaccatcatctccatcattatcgccatcaccatcatctccatcatcatcatcaccatcaccatcatcatcaccatcaccatcatcatcaacatgaccaccatcatcatctccatcattatcaccatcaccatcatcatctccatcatcatcatcaccatcaccatcatcatcaccatcaccatcatcactaccatcatctccgtcattatcgccatcaccatcatctccatcataatcatcaccgtcaccatcatcatcaccatcaccaccacctccattacatcactatcaccatcatcatctccatcatcatcatcaccatcaccattatcatcaccaccatcatctcagacatcaccatcatcatcaccaaaatcatctctgtcaccatcaccatcactaccatcatcatctccatcatcatcactatcaccataatcatcattatcaccatcaccatcatcatctccatcatcatcactatcaccataatcatcatcatcaccatcaccatcatcatcaccatgaccaccgtcatcatctccatcaccgtcaccatcactgccaccatcatcaccaacggcagcagcagtagcaacagcagcagc

SEQ ID NO: 22628 - DNA, 485 bp, Homo sapiens
  MAP TO D87018.1; EXPRESSED IN BRAIN, SIGNAL = 0.91; EXPRESSED IN BONE MARROW, SIGNAL = 1.1; NT HIT: gi14777653, EVALUE 0.00e+00; SWISSPROT HIT: P12018, EVALUE 1.00e-24; EST_HUMAN HIT: BF663660.1, EVALUE 0.00e+00
gttccctctcccagcctgtgctgactcagccatcttcccattctgcatcttctggagcatcagtcagactcacctgcatgctgagcagtggcttcagtgttggggacttctggataaggtggtaccaacaaaagccagggaaccctccccggtatctcctgtactaccactcagactccaataagggccaaggctctggagttcccagccgcttctctggatccaacgatgcatcagccaatgcagggattctgcgtatctctgggctccagcctgaggatgaggctgactattactgtggtacatggcacagcaactctaagactcacacagtgctccagacccatgaggaagtaagacaaaaccctcccctctactctcctggtctagtgaaatcacccctgctggtggctctgaccaaatctagctcagggggtgacatctgttgtctcatcgacagcactggagctcccacggagaagtag

SEQ ID NO: 22629 - DNA, 1142 bp, Homo sapiens
  MAP TO AC005020.1; EXPRESSED IN LUNG, SIGNAL = 1.1; EXPRESSED IN PLACENTA, SIGNAL = 1.9; EXPRESSED IN HELA, SIGNAL = 2.1; EXPRESSED IN BONE MARROW, SIGNAL = 1.2; EXPRESSED IN FETAL LIVER, SIGNAL = 1.1; SWISSPROT HIT: Q9Y2L8, EVALUE 0.00e+00; EST_HUMAN HIT: AW609229.1, EVALUE 0.00e+00; NT HIT: gi13937343, EVALUE 0.00e+00
gcagtgacaaaagaagtaagaacacaaaattaagtgttaagaagaaaatttcagaatattcagaagcagacatggaactatctggaaaaacccaaagaaatgtttctcaagttcaagattttggagaaggctgtgagtttcaaggcaagctggatagaaagcagggaattcccatgaaagagatactaggacaaccatcttcaaagaggatgaactacagtgaagtcccatatgtccacaaaaaatcctccactggagagagaccacataaatgtaacgagtgtgggaaaagcttcattcagagtgcacatcttattcaacatcaaagaatacacactggggagaaaccattcaggtgtgaggaatgtgggaaaagctacaaccaacgcgtgcacctaactcagcatcagcgcgtccacacaggtgagaagccctacacctgtcccttatgtgggaaagccttcagagtgaggtcccaccttgttcagcatcagagcgtgcacagtggggagagacccttcaagtgtaacgaatgtgggaaaggctttgggaggcgttcccacctggctggacatcttcgactccactcccgagagaaatcccatcagtgtcgtgaatgtggggaaatcttttttcagtacgttagcctaattgaacatcaggtgctccacatgggtcagaaaaatgaaaaaaatggcatctgtgaggaagcatatagttggaacttgacagtgattgaagacaagaagattgagttacaagagcagccttatcagtgtgatatctgtggaaaagcctttggttatagctcagacctcattcagcattacagaactcatacagcagagaagccctatcaatgtgatatatgtagagaaaatgttggccagtgttcccacaccaaacaacatcaaaaaatctactccagcacaaaatcccatcaatgtcatgaatgtggcagaggcttcactctgaagtcacatcttaatcaacatcagagaatccatactggtgagaaaccttttcaatgtaaagaatgtggaatgaatttcagctggagttgtagcctctttaaacacctgagaagccatgagaggacagatcccataaataccttaagtgtagaggggtctctgttgtag

SEQ ID NO: 22630 - DNA, 1075 bp, Homo sapiens
  MAP TO AC004794.1; EXPRESSED IN BRAIN, SIGNAL = 0.78; EXPRESSED IN HELA, SIGNAL = 1.3; EXPRESSED IN BONE MARROW, SIGNAL = 0.78; SWISSPROT HIT: O60431, EVALUE 0.00e+00; EST_HUMAN HIT: BG204873.1, EVALUE 2.00e-09; NT HIT: AF262715.1, EVALUE 1.00e-15
accatacatggaaccagaaaagcaaaccgaaatctcagaattcttcctccagggactctcagaaaagccagagcatcagaccctcctcttcacaatgttcctctccacatacctggtcaccatcattggaaatgccctcattatcctggccatcatcacggactctcacctccacacacccatgtacttctttctcttcaacctctcactcgttgacaccctattatcctccaccaccgtccccaagatgctagcgaacatccaggctcagagcagagccatcccctttgtgggctgcctcacccagatgtatgccttccacctgttcgggaccatggacagctttctcctggcagtaatggccatcgaccgcttcgtggccattgtccacccacagcgttacttggttctcatgtgctcccctgtctgtgggctgctgctgggagcatcatggatgatcaccaacctccagtctctcatacacacctgcctcatggctcaactgaccttctgcgccggctctgaaatctcccacttcttctgtgacctcatgcccctgctgaagctctccggctcagacacgcacaccaacgagctggtgatctttgcttttggcattgtcgtgggcaccagcccattctcctgcatccttctctcgtacatccgcattttctggacagtctttaagatcccttctactcggggcaagtggaaagccttctccacctgtggcttacacctcactgtggtgtcactgtcctatgggaccatctttgctgtgtacttacagcccacatcccccagctcctcccagaaggacaaggcagccgccctaatgtgtggggtgttcatccccatgctcaacccctttatctacagcatacggaacaaggatatgaaggcagccctggggaagctcatcggcaaagtggccgtcccctgtcctaggccagaacagttattggatgtttatcatgttccaggatcactgttggctgctagggacacagagatgcatcccatcccctaccctggaggagttcagagtctagctgggaacagagacatggaataa

SEQ ID NO: 22631 - DNA, 466 bp, Homo sapiens
  MAP TO AC010680.2; EXPRESSED IN HELA, SIGNAL = 0.96; EXPRESSED IN BONE MARROW, SIGNAL = 0.79; SWISSPROT HIT: gi127997, EVALUE 3.00e-43; EST_HUMAN HIT: BF824977.1, EVALUE 1.00e-130; NT HIT: gi4507720, EVALUE 0.00e+00
agtgttgtgttgttttgttgttgtagttattaaagaattgcaaatgaaaagtcctttgtaagaagaatacttacgcacgacattcaggttacaggaagtcttaaaatccttagcatcacaagtgtatgttttaatatcctctggggtacagtcatgtataacaagttttctgaccctgccatcagcaacaatttcatacttcttgcttttgaggatttctgtcccatttttgaaccatttcaccttagcattttctctggagacttcacactccagcactgcagtggctccctcttcgaccgtctggtcctcaagaggcttagtgaattcaactgggggttctgaaagaatcatactcattagccaaggtactcctttccttctccaagagttttggtaccttctcaactttcccctgccatctccagggctttgttctgtcctaagttttattttcaagttttga

SEQ ID NO: 22632 - DNA, 734 bp, Homo sapiens
  MAP TO L76568.1; EXPRESSED IN BONE MARROW, SIGNAL = 0.86; EXPRESSED IN BRAIN, SIGNAL = 0.85; EXPRESSED IN HELA, SIGNAL = 0.63; SWISSPROT HIT: Q92889, EVALUE 0.00e+00; NT HIT: gi14774941, EVALUE 0.00e+00; EST_HUMAN HIT: AA770518.1, EVALUE 0.00e+00
gtggccaggaacagaatggtacacagcaaagcatagttgtggatatgcgtgaatttcgaagtgagcttccatctctgatccatcgtcggggcattgacattgaacccgtgactttagaggttggagattacatcctcactccagaaatgtgcgtggagcgcaagagtatcagtgatttaatcggctctttaaataacggccgcctctacagccagtgcatctccatgtcccgctactacaagcgtcccgtgcttctgattgagtttgaccctagcaagcctttctctctcacttcccgaggtgccttgtttcaggagatctccagcaatgacattagttccaaactcactcttcttacacttcacttccccagactacggattctctggtgcccctctcctcatgcaacggcggagttgtttgaggagctgaaacaaagcaagccacagcctgatgcggcgacagcactggccattacagcagattctgaaacccttcccgagtcagagaagtataatcctggtccccaagacttcttgttaaaaatgccaggggtgaatgccaaaaactgccgctccttgatgcaccacgttaagaacatcgcagaattagcagccctgtcacaagacgagctcacgagtattctggggaatgctgcaaatgccaaacagctttatgatttcattcacacctcttttgcagaagtcgtatcaaaaggaaaagggaaaaagtga

SEQ ID NO: 22633 - DNA, 459 bp, Homo sapiens
  MAP TO AL163248.2; EXPRESSED IN BRAIN, SIGNAL = 1.5; EXPRESSED IN HELA, SIGNAL = 1.5; EXPRESSED IN BONE MARROW, SIGNAL = 1.2; SWISSPROT HIT: P53072, EVALUE 8.00e-03; NT HIT: AL163248.2, EVALUE 0.00e+00; EST_HUMAN HIT: BF219939.1, EVALUE 0.00e+00
tcaagatttgtacacaatctgaaatgtccctttgtttggagctttaaaccagggttccaaaaatgtttctgcatattttttcatatcttttaaaaaagctttgcatgtgcctgagatgggtaacattcgtagaataacttgagtcttcttggttttgtactcatcctggagaatatgatgcaccagtttctcaggttctttcccaagtgtcctgatgaaggcgacgttatttgctccactttccactgactggaatcctcttaggctcatctctgtagatgcctcaatgtcaccaacttctttcttcaagacagcctccacatcatcatcttctccctcacttccagagggctgctgatccttgtctgtaaacttttctggcccatacatgtcatcgccatattcgttgagcagggtgtaagcctcctccacacacttggcgctggttcatgttgcagg

SEQ ID NO: 22634 - DNA, 562 bp, Homo sapiens
  MAP TO AC016212.3; EXPRESSED IN HELA, SIGNAL = 3.4; EXPRESSED IN BRAIN, SIGNAL = 1.7; EXPRESSED IN BONE MARROW, SIGNAL = 1.9; EXPRESSED IN LUNG, SIGNAL = 2.3; SWISSPROT HIT: P11161, EVALUE 1.00e-100; NT HIT: gi9845523, EVALUE 0.00e+00; EST_HUMAN HIT: BG680727.1, EVALUE 0.00e+00
tgccagagagacctacatggtacagctggcccagaccgtaagccctttccctgcccactggacaccctgcgggtgccccctccactcactccactctctacaatccgtaactttaccctggggggccccagtgctggggtgaccggaccaggggccagtggaggcagcgagggaccccggctgcctggtagcagctcagcagcagcagcagccgccgccgccgccgcctataacccacaccacctgccactgcggcccattctgaggcctcgcaagtaccccaacagacccagcaagacgccggtgcacgagaggccctacccgtgcccagcagaaggctgcgaccggcggttctcccgctctgacgagctgacacggcacatccgaatccacactgggcataagcccttccagtgtcggatctgcatgcgcaacttcagccgcagtgaccacctcaccacccatatccgcacccacaccggtgagaagcccttcgcctgtgactactgtggccgaaagtttgcccggagtgatgagaggaagcgccacaccaagatccacc

SEQ ID NO: 22635 - DNA, 872 bp, Homo sapiens
  MAP TO AC007228.1; EXPRESSED IN HELA, SIGNAL = 1.5; EXPRESSED IN BRAIN, SIGNAL = 0.89; EXPRESSED IN BONE MARROW, SIGNAL = 0.85; EST_HUMAN HIT: AI744391.1, EVALUE 0.00e+00; SWISSPROT HIT: P10078, EVALUE 1.00e-125; NT HIT: gi14768101, EVALUE 3.00e-74
atgtgtgtgggaaggcttttagccatggctcatctctgacagtacatcagagaattcatacaggagagaaaccttatgaatgcaatatctgtgagaaagccttcagccatcgtgggtctcttactcttcatcagagagttcatactggagagaaaccctatgaatgtaaagaatgtgggaaagctttccggcagagcacgcatctggctcatcatcagagaattcatactggagagaaaccttatgaatgtaaggaatgcagcaaaaccttcagccagaatgcacacctcgcgcaacatcagaaaatacacactggggagaaaccttatgaatgtaaggaatgtggtaaggccttcagtcagattgcacaccttgttcagcaccagagagttcatactggtgagaagccttacgaatgtattgaatgtgggaaggcctttagtgatggctcatatcttgttcaacatcagagactccacagtggcaaaagaccgtatgaatgtcttgaatgtgggaaggcattcaggcagagggcatccttgatttgtcatcagagatgtcatactggtgagaaaccttatgaatgtaatgtttgtgggaaagcctttagccatcgtaaatcccttactctgcatcagagaattcatacaggagagaaaccttatgagtgtaaggaatgtagcaaagccttcagccaggttgcccatcttactctacataagagaattcatactggagaaaggccctatgagtgtaaagaatgtggaaaagccttcaggcagagtgtacatcttgctcatcatcagcgaattcataccggagagtcatcagttattctctcctctgccctcccataccaccaagtcctatag

SEQ ID NO: 22636 - DNA, 911 bp, Homo sapiens
  MAP TO AC011467.3; EXPRESSED IN BONE MARROW, SIGNAL = 2.2; EXPRESSED IN BRAIN, SIGNAL = 2.3; EXPRESSED IN HELA, SIGNAL = 1.1; EXPRESSED IN PLACENTA, SIGNAL =   2; SWISSPROT HIT: Q03923, EVALUE 0.00e+00; NT HIT: gi16163761, EVALUE 0.00e+00; EST_HUMAN HIT: BG819130.1, EVALUE 0.00e+00
ttgtatgttcttattttgcccaagacttttggccaaagcagggcataaaaaattgtttccaaaaagtgatactgaaaagatataaaaaatgtggacatgaaaatttacagttaggaaaatactgtaaaagcatggatgagtgtaaggtgcacgaagaatgttacaatggacttaaccagtgtttgagaactacccagagcaaaatattacaatgtgataaatatgtgaaagtctttcataaattttcaaattcaaacagatataagataagacatactggaaagaaacctttcaaatgtaaagaatgtgaaaagtcattttgcatgctttcacacttagctcaacataaaagaattcatactagagagaaaccctacaaatgtaaagaatgtgggaaagcctataatgaggcctcaaacctttctacacataagagaattcatactggaaagaaaccctacaaatgcgaacagtgtggaaaagcctttaaccggctctcacaccttactacacataagataattcatactggaaagaaaccctacatatgtgaggactgtggcaaagcttttaaccaatctgcaaaccttactacacataagagaattcatactggagagaaaccctacaaatgtgaagaaagtggcaaagcttttagccagtcctcaacccttactacacataagataattcatgctggagagaaaccctacaaatatgaagaatgtggcaaatcttttaaccaatcctcaacccttactacacgtaagataattcatactggagagaaattctgcaaatgtgaagaatggggcaaggcctttagccggttatcccaccttactacacataagagaattcattctggagagaaaccctacaaatgtgaagaatgtggcaaagcttttaaa

SEQ ID NO: 22637 - DNA, 1204 bp, Homo sapiens
  MAP TO AC004616.1; EXPRESSED IN BONE MARROW, SIGNAL = 0.89; EXPRESSED IN LUNG, SIGNAL =   1; EXPRESSED IN HELA, SIGNAL = 0.83; NT HIT: gi14766611, EVALUE 0.00e+00; EST_HUMAN HIT: AW410893.1, EVALUE 0.00e+00; SWISSPROT HIT: P31569, EVALUE 2.40e-01
agtgcttagactacttttcacaaggtggatgttgtctgtcagtccttgtagatgtgattggcctgggacacctggttcccctatagtagaatcctcaaataactgtgatgtactggagtcattaacccagatggtgggggttggagtaaggtgtgcaaaggtgtcttctttcatcttatcctcatctggttgtgacttagtctccaaatctgggtcaaagtattgcatgggctcagactcagccaaggagacagcatccaatggaggctcatactcactggatgtgggctctggtgacgatccaacatctgctgcagaccaaccctctgttgccgtctcttcatgggtgggcttttcatagactgtgtctaatgtgtgcagagtaggagatggttcataaggctcagatataagtgtaggggctgctgtccccttcaggtctccttcagtggaagttatctcctcagtcttctcggaaaggtcatcaacaacttcctccagaggtgtgcttgttacttcaggttcaacaagaataactccattgtggttgtgttctagccccatgctggctgaggaaatggtacccaaaacgtgctcttcttcaccaagtagaggtacatctgctgaggattcttcagcactggttactgtctgcacaggagatgctgaggggggagaaatagcaggaaaaggtggtgtgacttctagactcaaggatggaggacttgtggttttaatcaatgggggtacttctgtgcccttagggagatttttcccacggactttggctaaaatatcagcccagcgctccggattaatctgtttgtttgccatgtttatccttcgtctagattcaaacactctgcgaccttctgcaacattggtctctggttctttttccgaatgcttccagagtttcagctttcttctccctttcttggctttcttgtctccattgatggcatcatcctttgttttgaggaacacctcttggtcctttggatgcagaagtctccttgaagtgttctcttcatctcccatgcccgagcccccttcatcctccacgatgtcttctctgactctggaaagagcctttgcacctgggcgtctgcctcttttggatggcaagccagaccctttcttggtcactgtgattcccaccgtaaaatggtctgccccttgctggttgacagccacacatctg

SEQ ID NO: 22638 - DNA, 934 bp, Homo sapiens
  MAP TO AF123462.1; EXPRESSED IN HELA, SIGNAL = 0.54; EXPRESSED IN BONE MARROW, SIGNAL = 0.97; EXPRESSED IN LUNG, SIGNAL = 1.1; SWISSPROT HIT: P87059, EVALUE 3.40e+00; NT HIT: L27869.1, EVALUE 0.00e+00; EST_HUMAN HIT: BE891703.1, EVALUE 0.00e+00
gaggtgaattagttatccctcttcttgtagaagaccctttagctacccctcctattgctactcgtgcaccttccattacactcccccctacctttcgccccctcctcaccattattgagaccaccaaagattccctgtccatgacctctgaggcggggttaccttgcttgtcggaccaaggcagcgatggttgtgatgatgatggcttggtgatatctgggtatggctcaggggaaacctttgactctaacctgccccctactgatgatgaagatttttacaccaccttctccttggtaacagataagagtctttccacttcaatcttcgaaggtggctacaaagcacatgcgcccaagtgggaatccaaggactttagacctaacaaagtctccgaaactagtaggactactaccacatctttatcccctgagctgatccgcttcacagcttcctcctcgtctgggatggtgcccaaattgccagctggcaaaatgaataaccgtgatctcaaaccccagcctgatatagtcttgcttccgttgcccactgcctatgagctagacagcaccaaactgaagagcccactaattacttcccccatgttccgtaatgtgcccacagcaaaccccacggagccgggaatcagacgggttccgggggcctcagaggtgatccgggagtcgagcagcacaacagggatggtcgtcggcattgtggctgctgccgccctctgcatcttgatcctcctgtacgccatgtacaagtacaggaacagggacgaggggtcctatcaagtggacgagacgcggaactacatcagcaactccgcccagagcaacggcacgctcatgaaggagaagcagcagagctcgaagagcggccacaagaaacagaaaaacaaggacagggagtattacgtgtaaacatgcga

SEQ ID NO: 22639 - DNA, 590 bp, Homo sapiens
  MAP TO AC009290.1; EXPRESSED IN BRAIN, SIGNAL = 0.85; EXPRESSED IN HELA, SIGNAL = 1.7; EXPRESSED IN LUNG, SIGNAL = 0.94; EXPRESSED IN BONE MARROW, SIGNAL = 0.97; EST_HUMAN HIT: AW875912.1, EVALUE 4.00e-80
  unsure 364
  unsure 371
tagggcatagagaagcatagaagatataaatgctaagttctttacaaaacagcaagtcaaggataaaaagacaagcaattaggtgataaaacaagaaacagacaaaacaaaacatacatacacacgtgacagtggaaaagaggatcatagaacagacagcatgacatcaggtatagctttaaaaggagttagctgaatgcattacaaccagactccattaatgaatctccacaggttccagaagcactctgagggccctaaagaactaccctgctgacaaaattaatatgtatggaagataagaaagctgaggatatcaggaattaccagcagcagtttggggctatttccagtcttggtgggnagtgccnataatgactaggtttgattgttggcagtctctttcaagtcaatgaggattcaaaacttccagttcccaataaacgcaggaaatgcctggagatagtactttataatctgttcagcagaaagtaatgatatgtgatgggggatacttattttggaaaatcctggcagtgtttggtgaaactgctaggggccagatggagtcaatctgacctgcacagtgc

SEQ ID NO: 22640 - DNA, 581 bp, Homo sapiens
  MAP TO AL357153.1; EXPRESSED IN BONE MARROW, SIGNAL = 0.8; EXPRESSED IN HELA, SIGNAL = 1.3; EXPRESSED IN BRAIN, SIGNAL = 0.77; SWISSPROT HIT: Q9UKF2, EVALUE 2.00e-49; NT HIT: U22058.1, EVALUE 3.00e-12; EST_HUMAN HIT: AA608973.1, EVALUE 6.00e-17
gccaaagcatttttcttcttttatgtcgtgtactaatatattacaaaatgtagtgtgctcacctccaccgggaatgtggctgacaccgctacagtgcaacattccacaaaaaacatcatcttcttcacatggaaaaggtctacttccccctcgccgtagaataaccccacagtttccaaatcggttaccaatcctattcaattttcgatagcacgctggggaaccgtctttcacttggtagccaaaaagggcttgacactgcatatcacggtcactgcagtttcctcttatacaaacagatactgctgaacatggggttccatcctggatgtagatgtcatttggacactcttcctttttcccatcacagtattccggtagatcacatataccacccaagtctctgcaaaccactccaggggcagcatatttacacttatggcagcaaagtcctgtattgcaaacactgccaagagaaagggtacaagaggtctcacaacatctatcactggcacaatctttaagggagccacagtcacattcttccctctgatttttgatcttgtctccacaacgaggag

SEQ ID NO: 22641 - DNA, 1115 bp, Homo sapiens
  MAP TO AL049840.4; EXPRESSED IN HELA, SIGNAL = 0.98; EXPRESSED IN BONE MARROW, SIGNAL = 0.81; NT HIT: AJ318887.1, EVALUE 0.00e+00; SWISSPROT HIT: Q13625, EVALUE 3.00e-28; EST_HUMAN HIT: AW300631.1, EVALUE 0.00e+00
tgtatggtaagcccgttttaccttcgggttcaacctctccatcgccgctgccgtttcttcacgggtcactgtccacgggcacaccacagcctcagccaccttcagaaagtactgagaaagagcctgagcaggatggccccgccgcccccgcagatggcagcaccgtggagagcctgccacggccactcagccccaccaagctcacgcccatcgtgcattcgccactgcgctaccagagtgatgcagacctggaggccctccgcaggaagctggccaacgcgccccggcccctgaaaaagcgcagctccatcacagagcccgagggccccggcgggcccaacatccagaagctgctgtaccagcgcttcaacaccctggccggtggcatggagggcacccctttctaccagcccagcccctcccaggacttcatgggcaccttggccgatgtggacaatggaaacaccaatgccaatggaaacctggaagagctcccccctgcccagcccacagccccactccccgctgagcctgccccgtcatcagatgccaatgataatgagttaccttcccccgaaccagaggagctcatctgtccccaaaccacccaccaaactgccgagccggcagaggacaataacaacaacgtggccacggtccccaccacggagcagatcccgagtcctgtggctgaggccccatctccaggggaagagcaggtccctccagcacctcttccccctgccagccaccctcctgccacctccacggtgggtgtcattgctagaccaaagcctggccttcctggtcattcatgcaaccaggacctctggggtccttcccttggtcaggctgtgctgggagcagtgggaaccagggatgtccctgagttacgtcttgtagggaggacggacagtcacacagacaaatggggcatgaaaaggcatgacaaatggggctcggccacacaaatgcacaatgtggccaagcctttcccagacagctggtcagggagctccagaggctttcctgaggaaggggagctgtcgctggcacctgaaggtcctgtagagagacgagggaagaagcatctagacaaaggccctgggtgggag

SEQ ID NO: 22642 - DNA, 660 bp, Homo sapiens
  MAP TO AC010395.3; EXPRESSED IN BONE MARROW, SIGNAL =   1; EXPRESSED IN HELA, SIGNAL = 1.2; SWISSPROT HIT: Q27969, EVALUE 6.00e-24; NT HIT: gi14766803, EVALUE 0.00e+00; EST_HUMAN HIT: AL530787.1, EVALUE 0.00e+00
gcctgtatgcctgcccagggatgcaacagctcctgcctcgtatatgtcactttcaaccagaagatctatgtgtactgggaggtgcagttggagtggatggagtctaccaatctgctgaatgactggagaccaagcctgagtaccatagcctgctgcaggagctgggcatggatcctgacaacctccctgtggctcatgccctgcttcaccaaacactctaccatccgaccaaccaccacagtgtgttccctcaagcctccaggatcccacctagctgtacttgcctcacagctggtgaaggattcttctgaacccctaccctacctcctcaagctatctttgatattggcaggatggggaatacacattacagaagtgcaggatttgactctgggcatgaaagatggcagcagccctagggtgaccacaagctatacacctcatggtctttttggtgaaagaagggacaagttgaccctttgcccattttcttatggacctcacccatcacaccagcaaggtcataggaccctggccttgttccagatcatctgggacatgtcccactccccactttcactgtgtagaaaacagagacttgtttgcgtggccccaatacccataaggaaaccaggctttaggcccaggggagcagtggag

SEQ ID NO: 22643 - DNA, 488 bp, Homo sapiens
  MAP TO AL163853.3; EXPRESSED IN LUNG, SIGNAL = 1.4; EXPRESSED IN BONE MARROW, SIGNAL = 1.4; EXPRESSED IN FETAL LIVER, SIGNAL = 1.3; EXPRESSED IN BRAIN, SIGNAL = 1.3; NT HIT: U03990.1, EVALUE 1.20e-01; EST_HUMAN HIT: BI224637.1, EVALUE 1.00e-127
gttattagtaatgttcatcatgtctgctggaacagctatagcatcatatttcattccaagcactgttggtgtggttcttttcatgactggatttggtttcttgctgagtctgaacttaagtgatatgggtcacaaaattggaaccaaatctaaggatttacccagtggtccagaaaaacatttttcatggaaggaatgccttttctacatcattatattagtcttggctcttttagaaactagtttgcttcatcactttgctggcttctcacagatttctaaaagcaattcccaggctattgtgggctatggtttgatgatattacttataatactgtggatacttagagaaattcaaagcatatatatcattggaattttccgaaatcccttttatccgaaggatgtgcaaactgtgactgtattctttgagaagcaaactaggctcatgaagattggtattgtcagacggattttgctaactttag

SEQ ID NO: 22644 - DNA, 2329 bp, Homo sapiens
  MAP TO AL031115.2; EXPRESSED IN PLACENTA, SIGNAL =   2; EXPRESSED IN BRAIN, SIGNAL = 1.4; EXPRESSED IN HELA, SIGNAL =   2; EXPRESSED IN BONE MARROW, SIGNAL = 1.5; EXPRESSED IN FETAL LIVER, SIGNAL = 1.9; EXPRESSED IN LUNG, SIGNAL = 1.1; EXPRESSED IN HEART, SIGNAL = 2.2; SWISSPROT HIT: P98169, EVALUE 0.00e+00; NT HIT: gi14765404, EVALUE 0.00e+00; EST_HUMAN HIT: BG120060.1, EVALUE 0.00e+00
caaactgggtttctccctcctgtccaaagaagtcagagtcaggatgtacgttccactccgctttggttggtgtcagtagttctgagacactgttttcacaaagggtgctcgaaggagtcagagcatctgtgtccactgttagcttactgctgggtgtcaaagcctgaggctctggactggagtttttcatggccaaagagtccagagatcccaatggccccacacttacacttgagacctcatccatatttaaggagctctgctgaaaaccagtggccgccgttccaaaaaagagagaggtatccagactttgaggagggtcgctggtggccatcaaggacggagggtccacagcctgccctacggaattattattattagcagggaggtgccctgccagagtcgagctcacagaagccacatcaatagtcaagattccagagttcaccaatgctgtgtccagcaatgcagcagaagtactgtcaggtacatcagagaagagagacactatctctgcatcactgagatcattctgtctctggctggtaagttcactgctgggtgtgagagaatttgctgcttctagctgagctaagagatcctggcccaccttatgccttttaaccatgtgcgtcttcatgctgtgcttggatgtgaagagtttattacaagaggagatcgggcaacggcttttccaagtgtccacatcctgcaggtgtttcttggagtgaatgtagaggctactgcgagcagagaacctggcacagcagcctgccacaggacacacgaaaggctttgtgcccaggtgggttatgctgtggcctttcagatgttccgccctcgtgaaagatttcccacagccttccacagggcacatgaacctccggtcatcgtcgtgctttcttttgtgccttaagagtttggacatgctagtgaagttccagccacagccatcaaagtcacaaaggaaaggtctctcgccggtgtgactccgcaggtgaattttcagcctacaagccttgtcatattgtttgctgcagccaggaaaagagcaggaaaacagttcctgttccctgaaatgggcgcggttatgggaaaacagagcactcactgtgataaatgtcttcttgcagccagaaaacgcgcactggtaaggcctctccggttcgaagtggctgcgctggtgggcgctgagtttggcctgcgtggggaagctctcctcgcacacctcgcatttgaatgagttctcctgctcatggcccttcatgtgcgccttgaggttgtacactgtggtgaagctcttgccacagccctctgccgggcagccaaagggccgcagtttgtcgtgcgactgcaggtgcctcttgagcttgtaagaggtggtgaaggtccagccgcagccacccagggggcatttgaagggcctctggccctggctgctgctgtgcgtcagcaggtgcaccttcagctggtgcttcttggcgaaggtttgcccgcactgcgcctcggggcacaagtacagcaccacgcctgggccggagcccagcggtccgcgggggcccagggcggcggccgggccctccgcctcctcctcaggcgccggagctggcgcgggttcggccggctcagctagcaggaggtctggcggcagctctgggcagtcacccgggtgcgcggcatgcgggaacccagcttgcggggcgatcagacacccgggctgctgggcaggagcggcccctggctcccaggcgtgtggtgggggcgtggccagggtgaggacgccgttctcaaagcgcaacagcaggtcctggttgtggatagtgactgtgcccgcgaaggccgcggcggggccgggggcggagatcggggccggagtgggaaccgcggacaggcagcgggggcctagcgcagtgggccccgcgggattcgcgccgctctcgcccccctggagccccgggccctcctcggcctcctccctcaacacaggccctgcggcctgaccggagcccgcggtctccacgtcgccacccaccgggtcaagcagcaccaggaagaagtcgtcgccgccgccgccgccgccgccgctaggttgatcggtcctcggcgccaacaggcttgggccagggccccgtgatgccgtgctggcctcctcgcgccgccgcccgggcccgccatcttgggggccccggagcagcaggaggcggcgcgtggggacctggccagccggcgagtcagggcctcggtggactcggccgccacccgcggggataccgccgccgccgccgccctgtagtgtcccgcgagccgggagcagcttcgggatttccat

SEQ ID NO: 22645 - DNA, 816 bp, Homo sapiens
  MAP TO AC005332.1; EXPRESSED IN BRAIN, SIGNAL = 1.1; EXPRESSED IN HELA, SIGNAL = 0.6; EXPRESSED IN BONE MARROW, SIGNAL =   1; EXPRESSED IN LUNG, SIGNAL = 1.1; NT HIT: gi13651733, EVALUE 0.00e+00; EST_HUMAN HIT: AL135199.1, EVALUE 0.00e+00; SWISSPROT HIT: O15403, EVALUE 0.00e+00
caatcatggctctgaaggagcgcattggctggagatacagcctcctcttcgtgggcctactacagttaaacattgtcatcttcggagcactgctcagacccatctttatcagaggaccagcgtcaccgaaaatagtcatccaggaaaatcggaaagaagcgcagtatatgcttgaaaatgagaaaacacgaacctcaatagactccattgactcaggagtagaactaactacctcacctaaaaatgtgcctactcacactaacctggaactggagccgaaggccgacatgcagcaggtcctggtgaagaccagccccaggccaagcgaaaagaaagccccgctattagacttctccattttgaaagagaaaagttttatttgttatgcattatttggtctctttgcaacactgggattctttgcaccttccttgtacatcattcctctgggcattagtctgggcattgaccaggaccgcgctgcttttttattatctacgatggccattgcagaagttttcggaaggatcggagctggttttgtcctcaacagggagcccattcgtaagatttacattgagctcatctgcgtcatcttattgactgtgtctctgtttgcctttacttttgctactgaattctggggtctaatgtcatgcagcatattttttgggtttatggttggaacaataggagggactcacattccactgcttgctgaggatgatgtcgtgggcattgagaagatgtcttctgcagctggggtctacatcttcattcagagcatagcaggactggctggaccgccccttgcag

SEQ ID NO: 22646 - DNA, 669 bp, Homo sapiens
  MAP TO AF051976.2; EXPRESSED IN HELA, SIGNAL = 1.1; EXPRESSED IN BRAIN, SIGNAL = 1.6; EXPRESSED IN HEART, SIGNAL = 1.4; EXPRESSED IN BONE MARROW, SIGNAL = 1.3; NT HIT: gi14775687, EVALUE 0.00e+00; SWISSPROT HIT: Q9UKN7, EVALUE 2.00e-16
acgacgcgcgccgcccgcccgcgccacagcccgcgcccaggaccctctcccactggagcgcgctcctgtctccgcccgtgcccccgcggcccccaagctccgggcccccgcccgcgccgccgctctccccggcgctctcgggcctgccccggccggcctcgccctacggctccctccgccgccacccgccgccctgggccgccccagcgcacgtgccaccggcgccgcaggccagcgggtgggccttcgtggagccccctgccgtgagcccggaggtgccccccgacctactagccttcccagggccccgaccctcgttcaggggctcccgccggagaggggcggctttcggcttccccggggcctctccacgggcgtcgcggaggcgagcttggtcaccgctggcctcgccccagccctcgctgaggagctcgccgggcctcggctactgctcacccttggcgcccccgtcgcctcagctgtccttgcgcacgggccccttccagccgcccttcctgcccccggcccgccggccccgctcgctgcaggagtccccagccccacgccgagccgctgggcgcctgggcccacccggctcgccgctgccgggctcacccaggccgccctcgccgcccctggggctctgccacagcccgcggcgcagctccc

SEQ ID NO: 22647 - DNA, 591 bp, Homo sapiens
  MAP TO AL137799.2; EXPRESSED IN HEART, SIGNAL = 1.3; EXPRESSED IN HELA, SIGNAL = 0.64; EXPRESSED IN BONE MARROW, SIGNAL = 1.1; EXPRESSED IN LUNG, SIGNAL = 1.2; EXPRESSED IN FETAL LIVER, SIGNAL = 1.1; SWISSPROT HIT: P31792, EVALUE 1.00e-35; NT HIT: AF009668.1, EVALUE 0.00e+00; EST_HUMAN HIT: AU134310.1, EVALUE 0.00e+00
gttttgccagctgagcgctagttcctggagtgaggggattattttcaagtattccattatcactgaccactgcataccctgcttttcgaagtcttttttctacaaaggaacttccatcaatatacaagttgaggtcaggatcagtcaaaggaacctctagaaggtttcctcgagcggcataggtttgagcaatcacctgttgacagttacgttctatctttttttcaatgtctggaagaaatgtggctgggttaagagttgcccaagtgcacagttgcagcactggcccttcaagtaatagaccctggtatttaagtaaatggctgtctgacagccacaggtctcctttagcagtgagtatgctgttcacatcatgagatgtccacacagtaagatctctttcctgtattattttaactgcttcagatactaagattgctactgccaccattacccataaacaatgaggccaaccctttgccactacatcaatttccttactcaggtctgccacgggttgcaagctcgttccttggacctgtgtaaggactcctagagttattcctgtttttttctgtgacatataaagaa

SEQ ID NO: 22648 - DNA, 1578 bp, Homo sapiens
  MAP TO Z98304.1; EXPRESSED IN PLACENTA, SIGNAL = 2.6; EXPRESSED IN BRAIN, SIGNAL = 2.3; EXPRESSED IN HELA, SIGNAL = 2.3; EXPRESSED IN LUNG, SIGNAL = 2.4; EXPRESSED IN HEART, SIGNAL = 2.6; EXPRESSED IN BONE MARROW, SIGNAL = 2.6; EXPRESSED IN FETAL LIVER, SIGNAL = 2.3; SWISSPROT HIT: P51523, EVALUE 0.00e+00; NT HIT: gi14758278, EVALUE 0.00e+00; EST_HUMAN HIT: BG436394.1, EVALUE 0.00e+00
acagagtgaaaggccttgaatcttcccagcagatcatttctggagaacttttatttcaaagggagatactagaaagagccccaaaggataattcattgtactctgttttaaaaatctggcatattgataatcagatggatagatatcaaggaaatcaagacagagttttgaggcaggtcacagtcatcagtcgtgaaacattgactgatgagatgggttccaagtacagtgcatttgggaaaatgttcaatcggtgcacagaccttgctcctttaagtcaaaaattccataagtttgattcatgtgaaaatagcttgaagtctaattcagacttactaaattataacaggagctatgcaagaaagaaccccactaagagatttagatgtgggagaccacctaagtataatgcttcctgttctgtgcctgagaaggaaggcttcattcatactggaatggagccctatggagatagtcaatgtgaaaaagttctcagtcataagcaagcccatgttcagtataagaaatttcaagccagagagaaacccaatgtttgtagtatgtgtgggaaagcctttatcaagaagtcacagctcattatacatcaaagaattcatactggagagaaaccatatgtatgtggagattgtaggaaagccttcagtgagaaatcacacctcattgtgcatcagaggattcatactggggagaaaccctatgaatgtactaagtatggaagagcattctcccggaagtcacctttcactgttcatcagagagtccatactggagagaaaccctatgagtgttttgagtgtccaaaagctttctcccagaagtcacatctaattatacatcagagagttcataccagagagaagccctttgaatgcagtgaatgcaggaaagccttctgtgagatgtctcacctttttatacaccagataactcatactgggaagaagccctatgaatgtactgaatgtgggaagaccttccctcggaaaacacagctcattatacatcagagaacgcatactggagagaagccctataagtgtggtgaatgtgggaaaactttctgccaacagtcccacctcataggacatcaaagaattcatacaggagaaaaaccttatgtgtgtactgactgtgggaaggccttttcccagaagtcacacctcactggccatcaaagacttcatactggagagaaaccttatatgtgtactgaatgtggaaaatccttctctcagaaatcacctcttatcatacaccagagaattcatacaggggagaaaccttatcagtgtggtgaatgtggcaaaaccttctcccagaaatcactcctcattattcatctgagagttcacacaggggagaaaccctatgagtgtactgagtgtgggagggccttttccctgaagtcacatctcattctacatcagagaggtcatactggagagaaaccctatgaatgtagtgaatgtggaaaggccttctgtggaaagtctccactcattatacatcagaaaactcatcctagggagaaaacccctgaatgtgctgagtctggaa

SEQ ID NO: 22649 - DNA, 1237 bp, Homo sapiens
  MAP TO AC012331.9; EXPRESSED IN BONE MARROW, SIGNAL = 2.7; EXPRESSED IN LUNG, SIGNAL = 1.4; EXPRESSED IN HELA, SIGNAL = 0.57; EXPRESSED IN BRAIN, SIGNAL = 1.6; EXPRESSED IN HEART, SIGNAL = 1.4; SWISSPROT HIT: Q9Y2N3, EVALUE 3.00e-27; NT HIT: gi16167547, EVALUE 0.00e+00; EST_HUMAN HIT: AL045185.1, EVALUE 0.00e+00
atggactctctgtggggcccaggagccgggagtcacccctttggggtccacaacacccggctgtccccagacttgtgtccagggaagatagtgttgagggccctcaaggagagcggggcagggatgcctgagcaggacaaggaccctagagtccaagagaatcctggtgatcagagaagggtcccggaggtcaccggggatgcaccgtctgcatttcggcccctgcgggacaatggaggcctctctccctttgtgcccgggcccgggcctctgcagacagacctccatgcccagaggtcagaaatcagatataaccagacatcccagacctcctggacgagctcctgcaccaaccgaaatgccatctccagctcctacagctccacgggaggcttgccggggctaaagcggaggagggggccagcctcatcccactgccagctgaccctcagttcctcaaagacagtgagtgaggacaggcctcaggctgtctcttcaggtcacacccagtgtgaaaaggcagcagatatagcaccagggcagacactcaccctcaggaatgactcctccacatccgaggcctctaggcccagtacacacaagtttcccctgctgccatgcaggcgaggggagcctttgatgctgccacctcccttagagctggggtaccgggtcactgttgaagaccttgaccgggagaaggaggcggcattccagcgcatcaacagtgcactgcaagttgaggacaaggccatctcggactgcagaccctcacggccttcccacactttgtcctcacttgcaacaggggcttctggtctgcctgccgtttctaaagcacccagtatggatgcacagcaggagacacacaagtcccaagactgcctgggcctactggcccccttagcatctgctgcagaggtcccctctacagctcccatgtctgggaagaagcacagaccaccaggccccctgttctcctcctcagatccccttcctgccacctcttcccattcccaggactcagcccaggtcacctcgctgattcctgcccccttcccagctgcaagcatggatgcgggcatgagaagaacaaggcgtggcacttctgctcctgcagctgccgcagcagcccctcccccctccgcattgaaccccacgttggggtcactactggagtggatggaggcccttcacatttctgggcctcagccacagctgcagcaggtgcccagag

SEQ ID NO: 22650 - DNA, 551 bp, Homo sapiens
  MAP TO AL008728.1; EXPRESSED IN BRAIN, SIGNAL = 0.92; EXPRESSED IN HELA, SIGNAL = 1.2; EXPRESSED IN BONE MARROW, SIGNAL = 0.87; NT HIT: X60469.1, EVALUE 5.20e-01; EST_HUMAN HIT: D82202.1, EVALUE 5.00e-02
gatgtttgatgttgaggatgatgggaggaggaggaggatggtgctagagatgacaataaggatgatggtgaggaggaagaggatggtgatgaagatgacagtgagaatgatgatgaggaggatggtaatggagatgataaggataatggtgaggaggaagaggatggtgatgaagacgattgatgaggatgaggaggaggaggatggtgattaaaattatgttgaggatgatggggaggaggaagaggatggtgatgaagatgattatgaggatgaggaggaggatggtgattaaaatgatgttgaggatgatggggaggaggaagaggatggtgatgaagatgattatgatgaggatgatgatgagaaggaggagatggggatgaagataacgatgaggatgatgatgaggaggaggtgatgatgaaaatgatgaggtgatagggatgacgacaacgatgcagctgcattctttcagtttccacaccatgctcttccaggtcccgtcgagctgggctgctgtctgaaggcgcagggctggcatctcctgt

SEQ ID NO: 22651 - DNA, 757 bp, Homo sapiens
  MAP TO AL138761.3; EXPRESSED IN LUNG, SIGNAL = 1.1; EXPRESSED IN HEART, SIGNAL = 1.6; EXPRESSED IN BONE MARROW, SIGNAL = 0.75; EXPRESSED IN HELA, SIGNAL = 0.93; EST_HUMAN HIT: AL046816.1, EVALUE 0.00e+00; NT HIT: gi16156731, EVALUE 0.00e+00; SWISSPROT HIT: Q01550, EVALUE 2.00e-04
atttctggcctacttcgaccacttctttcccatcattactctgcgtatcctcagcactgtcttcatccactttctgagccacatctgctgcctcacatgttcctatcacatcacttgtattgctgatcacatctttttgagttttgtcgtcttcccccaatttctcttgggtgtcttcctttgtaagcccaacttcactatcaactgcctgaatatttgcctctttttctccagtctcttgagaaactaaatctactgtttgcaaaatagtatctttaatttcttcagattttataagcttattttcaaacatctgttgcttttcctgatccttttcttcctcagattttagattatgttcaatatttgtttctaaggttatcattatattattctcttttccttcactgactgaattaatgtccacagtttcttggtcttctgtgtcaggcagattttcaagcttgggcctcttctctctttcattctccttgattactgctgttctgtcatggagttcagtcattgcttctaactgagcatcggtaatatgttcattaatatcctccacagccttttcaggttcatcagtggtgggtttttcattaagaattttgctgttgagtttatcttcagagttactacgttctgttttttctgagacagactccaaaatacaagcattttgtgaaagtttatcttcttcagagctggcgatactaaggtcagaagatgcacgcttacttgcaggtattgg

SEQ ID NO: 22652 - DNA, 481 bp, Homo sapiens
  MAP TO AL023773.1; EXPRESSED IN BONE MARROW, SIGNAL = 0.74; EXPRESSED IN HELA, SIGNAL = 0.38; SWISSPROT HIT: P43363, EVALUE 4.00e-47; EST_HUMAN HIT: BF026372.1, EVALUE 0.00e+00; NT HIT: AF116195.1, EVALUE 0.00e+00
aatgggctcttggaccccacaggaattcataacgtggaggagaactgttgggcacctcccaatactccaggtaatgttcctgcacccaaactttagtgaggagctccctgggctccccatagacgaagtgctccctcccagcatacacccctattgccttcagcacttcccagatgacctcctcaggggcacagctgcccgttatgaagatcacactcagaataagaatcaggaggcagttctcaggcctgcccgtgtcatcactaccctcatcggcgaggtctactgtgtttgcaaacacatagaaatggtcagggcccacttctatcagggaaaggccaaaaagaagctctatgaactcacaggctttctcgagtatcacaggaaagtagtctttgtacttggtgatgacaatcgtcagcatctctgactctgttataggctcctttgtttgatatttgaggagcaggaactccactca

SEQ ID NO: 22653 - DNA, 1057 bp, Homo sapiens
  MAP TO AL023584.1; EXPRESSED IN PLACENTA, SIGNAL = 2.3; EXPRESSED IN BRAIN, SIGNAL = 2.1; EXPRESSED IN HEART, SIGNAL = 1.5; EXPRESSED IN LUNG, SIGNAL = 1.5; EXPRESSED IN BONE MARROW, SIGNAL = 1.3; SWISSPROT HIT: P31629, EVALUE 0.00e+00; NT HIT: gi14747529, EVALUE 0.00e+00; EST_HUMAN HIT: BE931142.1, EVALUE 0.00e+00
acacttccataggatggtacgtgcgtctggatccgaacaggaaccactgttcctgggagggactgcaaagacccagcatttgccgaggcaaaatcttcttgaagaacctgctcagagggcgtttcagttgacttactgctctggtctgatggaaactttggaagaaggttctttgggtgtagccctgatgctcctgaataacatgggtaggtctgctctttcgtgtgtgcatactcagcaggtttctttccagtgtgctctgccacatgctctaagggatagctcgaatggatttctgtctgaaaagagggcttgccatagctcttctgagggtgctgagcaaagggatgtgggaaatgtgcctgccaccagggaggctgctgagctggtaaatgaaccatacaaactgtaggatactgaaactgaaacaaggcattctggattggagaaaatggaattgtctcttgatgtggaaataagtgtggctgttcaggtaagtgcttgcttgtcatataggatgttggttggatcaagggatttctcaaagattcctgactgtccatgtgcatgatctgtggctgggccaggtgcagtggccccgagctcagcgggggacaaggacccgccacctgcttccctgggtcctcttgctgaagaggaggcagcacagcaggcgggccatggtgccacccggaccggaggccagcatgcaggtgctccagctgctcttgcttcacgctctgatccatgccaacctcgccctgggagatttctggggagccactgaaggaagcttgccgcaccagaaagcatttcttcctctccctggacggtgataccgtggaggctgctgctcccgacacaggagcatgggacagattcccataatcaaatgatttgctccgaacttctgggacttccgctgggtgaggacaaggcatctgctctgatgagcagcgtcgcatctctttctggtggtgatggcctgggacagacaatgagtatgaaccagcagggacagtcagaaactctgaatgcttcccaaactcatcctgct

SEQ ID NO: 22654 - DNA, 693 bp, Homo sapiens
  MAP TO AC010680.3; EXPRESSED IN BRAIN, SIGNAL = 0.8; EXPRESSED IN HELA, SIGNAL = 1.3; EXPRESSED IN BONE MARROW, SIGNAL = 0.96; EST_HUMAN HIT: BF902247.1, EVALUE 7.00e-42; NT HIT: gi16157781, EVALUE 0.00e+00; SWISSPROT HIT: P52179, EVALUE 3.00e-26
atactcctgggccacctgtcaatgtgactgttaaggaaatatccaaagactctgcttatgttacctgggagcctcccattattgatggcggaagccccatcataaactatgtggtacaaaaacgtgatgcagagaggaaatcctggtctacagtgacaactgagtgctccaaaacaagcttcagagtagctaatttggaggagggaaaatcctacttcttccgagtgtttgctgaaaatgagtatggcattggtgatcccggtgaaactcgtgatgctgtcaaagcttcccgtaagcaaatgaaccatcatcccatcattttgagttatatccttcctttgttatatggggcttacacttatcatttctcctttgctttagaaactcctggaccagttgtggacctgaaagtgaggtctgtatctaagtcatcctgtagcattggctggaaaaagcctcacagtgatggtggaagtcggattattggatatgtagttgatttcctgactgaagaaaataagtggcaacgagttatgaaatccttaagcctacagtactctgcaaaagatttgactgaagggaaggaatataccttcagagtgagtgctgagaatgaaaatggagaaggaaccccaagcgaaatcactgttgtggcaagggatgatgttggtaaggctctatgcacacatcttc

SEQ ID NO: 22655 - DNA, 518 bp, Homo sapiens
  MAP TO AC011482.1; EXPRESSED IN HELA, SIGNAL = 1.9; EXPRESSED IN BRAIN, SIGNAL = 1.1; EXPRESSED IN FETAL LIVER, SIGNAL = 1.5; EXPRESSED IN LUNG, SIGNAL = 1.1; EXPRESSED IN BONE MARROW, SIGNAL = 1.2; EST_HUMAN HIT: AI791535.1, EVALUE 0.00e+00; NT HIT: gi15627000, EVALUE 0.00e+00; SWISSPROT HIT: Q9Y2Q1, EVALUE 7.00e-84
cttatgttgagtaaggtgtgaagaccggttaaaagcttttccacactcttcacatttgtagggtttctctccagtatgagtcatcttatgtcgagtaagagctgaggactggttaaaggctttgccacattcttcacatttgtgggaattctctctaatatgaattctcttatgtcgagttagttgtgaaagcatgcaaaatgatttgccacattctttacatttgcaagttttcttttcagtatgtcttatcttatgtctatctgaatttgaaaacttatagaagacttttacatatttatcacattgatacattttgctctgggtagttatcagacattggttaagtccattataacctcctttgcacaccttacactcatccacacttttacagccctttcttaattgtaaattctcatgttcacatttatcatatctcctcagtatgactttttggaaaaaatattttatgtctcgctctgggcaaaggtcttcagcaatatgagaacacataa

SEQ ID NO: 22656 - DNA, 462 bp, Homo sapiens
  MAP TO AF023268.1; EXPRESSED IN LUNG, SIGNAL = 1.3; EXPRESSED IN HEART, SIGNAL = 1.4; EXPRESSED IN FETAL LIVER, SIGNAL = 1.5; EXPRESSED IN HELA, SIGNAL = 0.58; EXPRESSED IN BONE MARROW, SIGNAL = 1.2; SWISSPROT HIT: P49746, EVALUE 1.00e-50; EST_HUMAN HIT: AL522617.1, EVALUE 0.00e+00; NT HIT: AF023268.1, EVALUE 0.00e+00
tactggtgcgataccagcgggaggatggcaaagtccacgccgtgaacctacagcaagcgggcctggctgatgggcgcacacacacagttctcctgcgactccgaggtccctccagacccagccctgccctacatctctacgtggactgcaaactgggtgaccaacatgcaggccttccagcactggcccccattcctccagcggaggtcgatgggctggagattaggactggacagaaggcgtatttgaggatgcaggtgagccgggaggagcctctgagttctgtggaaatagagtttgcaccagctggggaaggggttggtagaccttcccaccttactctgctgctatccccccagggctttgtggaatctatgaaaattattctgggtgggtccatggcccgggtaggagccctgagtgagtgtccattccaaggggacgagtccatccacagtgcag

SEQ ID NO: 22657 - DNA, 2380 bp, Homo sapiens
  MAP TO AC025436.2; EXPRESSED IN BRAIN, SIGNAL = 1.1; EXPRESSED IN HELA, SIGNAL = 1.8; EXPRESSED IN LUNG, SIGNAL =   1; EXPRESSED IN BONE MARROW, SIGNAL = 1.1; SWISSPROT HIT: Q9Y5E4, EVALUE 0.00e+00; NT HIT: gi16171257, EVALUE 0.00e+00; EST_HUMAN HIT: BG718561.1, EVALUE 0.00e+00
atggagacgccgctccccaaagcaccagagaaaaggcaagtgaccgccattattttcttattactactgtgggaggcgggcagcgctacgattaagtattcagttctagaagagagggacagcggctcttttgtggccaacttagcaaaagatctggggctgggtgtaggggaactggccgcgagaggcgcccggattctttccaaagggaacaaacagtatttgcagctcgaacggaagagtgggaatttgctcctaaaagaaaaattggaccgggaagagttgtgcggtgacatagatccatgtatactacatttccagatgttactgaaaaatccggtgcagtttattcaaggtgaactacagctccaagatgtaaatgaccatgccccagaattcttggaaaatgaaatcctcctgaaaatctccgaaggcagccatccagggacttcatttcctttgaaaatagctcaagatttggacgtaggtagcaacacagttcagaactactcaattagcaccaactcctatttccaccttttcactcgcaatcacagcgacggcaagaaatacccagagctcgtgctggatcaagcgctggacctcgaggagcagccccagctcaggttaaccctcacagcgctggatggtgggtcaccgcccagaactgggacttcccaggttctcatagtgattgtagatatcaatgacaacgtccctgaatttgctcagcggcgctacgaggtgcaggtcccagagaacacccctataggttcccttgtcatcaccgtctctgccagggatttagatgctgggacccacggggagctctcctattcattttttcaatactccaatcaaatcattcaggcctttgaaataaactcaatcacgggagaaattagatttaaaaaggcgttggattttgaggaaattcaatcttatcacatggaagttgaggcctcagacggtgggggtctttcaggaaaatgcaccgtagccatagaggtaatggatataaacgacaacgcaccggaacttactatgtccttacttatcagtgatatcctagaaaactccccagaaacagtggtcgctgttttcggaatttcggatccggactccgggaacaatggaaaaatgatgtgttccatccaagaccatctccctttccttctaaaacctaccttagaaaatttctacactttgttaacagaaggagcgctagacagagagagcagggccgagtacaacatcaccattactgtcacagacttggggacacccaggctgaaaaccgagtacaacataaccctgcgggtctccgacgtcaatgacaacgcccccgccttcacccaaacctcctacaccctgttcgtccgcgagaacaacagccccgccctgcacatcggcagtgtcagcgctacagacagagactcaggcaccaacgctcaggtcacctactcgctgctgccgccccagaacccgcacctgcccctcgcctccctggtctccatcaacacagacaacggccacctgtttgccctcaggtcgctggactacgaggccctgcaggagttcgagttccgcgtgggcgcctcagaccgcggttctccggctttgagcagcgaggcgctggtgcgcgtgctggtgtgctggacgccaacgacaactcgcccttcgtgctgtacccgctgcagaacggctccgcgccctgcaccgagctggtgccccgggcggccgagccgggctacctggtgaccaaggtggtggcggtggacggtgactcgggccagaacgcctggctgtcgtaccagctgctcaaggccacggagcccgggctattcggcgtgtgggcgcacaatggcgaggtgcgcaccgccaggctgctgagcgagcgcgacgcggccaagcacaggctggtggtgctggtcaaggacaatggcgagcctccgcgctcggccaccgccacgctgcacgtgctcctggtggacggcttctcccagccctacttgcctctccctgaggcggccccggcccaggcccaggccgactcgctcaccgtctacctggtggtggcgttggcttcggtgtcttcgctcttcctcttctcggtgctcctgttcgtggcggtgcggctgtgcagaaggagcagggcggcctcggtgggtcgctactcggtgcccgagggcccctttccagggcatctggtggacgtgagtggcaccaggaccctgtcccagaattatcagtatgaagtttacctggcagaaagctctgagagccagttaaagtttcttaaaccggtacttcccaacttcttgggtgaagggactggtggggacagcgaggcaaactccaactctaggaatcattttgg

SEQ ID NO: 22658 - DNA, 525 bp, Homo sapiens
  MAP TO Z77249.1; EXPRESSED IN HELA, SIGNAL = 0.77; EXPRESSED IN BONE MARROW, SIGNAL = 1.1; EXPRESSED IN FETAL LIVER, SIGNAL = 1.4; NT HIT: gi14763911, EVALUE 0.00e+00; EST_HUMAN HIT: AI126424.1, EVALUE 0.00e+00; SWISSPROT HIT: Q14186, EVALUE 9.00e-65
tgaggtcgtcatcgttgttgtcctcctcctcttcctcctcgactgctggggtctccaccctggagccactgtactgagatccaccggagcttgtggccagcatcccaatcgcaatgttggtcaggtcactggcagaaagccacgtgccattagacctggaacctgccgtcgtgaacacacctccaaaagttccctgagccatttctgtcacgtacggctccagagcctttgggaccaaatttctggccattttaaggtcttcggcagagcagctcccggactctagcccaaaagtcatgcccatccacatcagcacttctgtgtcatcgtggatttcaaaggagctgttaaacttaaacagatattctgatttgtcgtcggagatgctgcagttgatgacggtcttcttgctactgctgatgatgatgaagggcacgtggatgactgagttgggcagcggccgctggctgacctgctcctccacatactggtttctcagcaccaggttcttgaaagcaatttgct

SEQ ID NO: 22659 - DNA, 633 bp, Homo sapiens
  MAP TO AL158150.2; EXPRESSED IN HELA, SIGNAL = 1.1; EXPRESSED IN BRAIN, SIGNAL = 0.97; EXPRESSED IN BONE MARROW, SIGNAL = 0.83; SWISSPROT HIT: Q9SFU0, EVALUE 1.30e-02; EST_HUMAN HIT: AW274676.1, EVALUE 0.00e+00; NT HIT: gi9632547, EVALUE 6.10e-01
tcaggctaacacttccaactccctctggttggggttttctgaatcatctacagaaagatggctgctctgctgagagcctgcctgggaaactggtttgtatatcctgtgacccaaagcatccacttcctcaaaggtgtagccaggaggctcaggatatgaagctaggcacctgcccatttccttgggagtaaagctgatggtgtaggtggtctggctttccacagggacatttcctcgagggccagaccaatgaggcttacagcttttggtattgataggcaggtggggcacatagtgggcccgagtggtggtcaggcagtccaggggctcggtgggcaagtccagctggggaacgggcttgactggctctgtgcgcatgctggaccactgcttgtagtcatccttggtggtggaagagccttcaaagcgaccgcacttcttaatctgaagtgcaggtcggcaggactgagctggggcacccttagggcatgtgtaatgggcctgcactgttgtcagaagatccatcctgtcttcgggagggacgtaggtgatgggagctttggagaacatccggggcattggccaagcttggtacttatctcgaaactcagtggtgttacagaaaggcatgtc

SEQ ID NO: 22660 - DNA, 1735 bp, Homo sapiens
  MAP TO AF238280.1; EXPRESSED IN BRAIN, SIGNAL = 1.1; EXPRESSED IN HELA, SIGNAL = 1.8; EXPRESSED IN LUNG, SIGNAL = 1.3; EXPRESSED IN BONE MARROW, SIGNAL = 1.5; EXPRESSED IN FETAL LIVER, SIGNAL = 1.2; SWISSPROT HIT: P52742, EVALUE 0.00e+00; NT HIT: gi11177859, EVALUE 0.00e+00; EST_HUMAN HIT: BG283656.1, EVALUE 0.00e+00
cactgccttccaagtgatattctatttattgtttcagattgtgacaccaggactgaagacaaggagtttcttcacaaggaagacattcatgaagatttggaatcacaggcagaaatatcagaaaactatgctggtgatgtttcccaggtacccgagcttggagatctgtgtgatgatgtatcagaaagagactggggagtccccgaaggcaggaggctgccacagtccctctcccaggagggggacttcacaccagctgccatggggctccttaggggccccttaggggagaaagatctggactgtaatggttttgacagtcgcttcagtctgagcccaaacctgatggcatgtcaggaaatccctacagaagagaggccacatccatatgacatgggtggccagagtttccagcacagtgtggacctaactggtcatgagggggttcccacagctgaaagtccactcatatgtaatgagtgtgggaaaaccttccaaggaaatcctgaccttattcagcgtcaaatagtccacactggggaggcttcctttatgtgtgatgattgtgggaaaaccttcagccagaactcagttcttaaaaaccgtcatcgatctcatatgagtgagaaagcttaccagtgcagcgaatgtgggaaagccttccgagggcactcagacttttctaggcatcagagtcaccacagcagtgagaggccttatatgtgtaatgaatgtggaaaagccttcagccagaactcgagccttaaaaagcaccaaaagtctcacatgagtgagaagccctatgaatgcaatgaatgtgggaaggcttttaggcggagctcaaacctcatccaacatcaaagaatccattctggggagaaaccgtatgtgtgcagtgagtgtgggaaggccttcaggcgaagctcaaacctcatcaaacaccacaggactcacacaggagagaagccttttgagtgtggcgagtgtgggaaagccttcagccagagtgcacacctgaggaagcaccagagggtccacactggagagaagccttatgagtgtaatgattgtggcaagcccttcagtcgggtctccaacctcattaagcaccacagggttcacactggagagaagccctataagtgcagtgactgtgggaaagcatttagtcagagctccagccttattcagcatcggagaattcacactggagaaaagcctcacgtgtgtaatgtatgtggaaaagcctttagttatagctcagtgctccgaaagcaccagatcatccacacgggagagaagccgtacagatgcagtgtctgtgggaaggccttcagccacagctcagccctcattcagcaccagggcgtgcacacaggcgacaagccctacgcctgccacgagtgtgggaagacctttggtcgcagctccaacctcatccttcaccagcgagtccacactggagagaagccctatgaatgtactgaatgtggaaaaaccttcagccagagctcaaccctcattcagcatcagaggattcataatgggctgaagccccatgaatgtaaccagtgtggtaaagccttcaaccgaagctcaaatctcattcaccaccagaaagttcatactggggaaaaaccctacacctgtgttgaatgtggtaagggcttcagccaaagctcacacctcattcagcatcagataatccacacgggcgagcgcccctacaaatgca

SEQ ID NO: 22661 - DNA, 1839 bp, Homo sapiens
  MAP TO AC004017.1; EXPRESSED IN HELA, SIGNAL = 0.4; EXPRESSED IN BONE MARROW, SIGNAL = 0.76; EST_HUMAN HIT: BF797956.1, EVALUE 0.00e+00; NT HIT: gi14766439, EVALUE 0.00e+00; SWISSPROT HIT: P52740, EVALUE 0.00e+00
atgcatttcatcagcatttctctgctttcaggttattgccatggaatggagaatgaggcgatagcttctgagcagagtgtatctatacaggtcaggacttctaagggcaatacacccacccagaaaactcacctcagtgagattaagatgtgtgtcccagtcttgaaagacattttgcctgcggctgagcaccaaaccacatcccctgtgcaaaagtcatacttgggtagcacaagcatgagaggcttctgcttcagtgctgaccttcaccagcatcaaaagcattacaatgaagaagagccctggaaaaggaaggtggatgaggctacatttgtgaccggctgcagattccatgtgttgaattatttcacctgtggggaggccttcccagcccccacggacctactccaacacgaagccactcccagtggtgaggagccacacagtagcagcagcaagcatatacaggcatttttcaatgcaaaaagttattacaagtggggtgaatacagaaaagcttcaagccacaaacacacacttgttcagcatcagagtgtctgttctgaaggagggctttatgagtgtagcaaatgtgagaaagccttcacttgcaagaacacacttgttcagcaccagcaaattcacactggacaaaagatgtttgagtgtagtgaatgtgaggaatcctttagcaaaaagtgccacctaatcttacacaagataattcacactggagaaaggccttatgaatgcagtgatcgtgagaaagcctttatccataaatctgaattcattcaccaccagagacgtcacactggaggagtgcgtcatgagtgtggtgaatgtaggaaaacctttagctacaaatctaacctcattgaacaccagagagttcacactggagaaaggccttatgaatgtggcgagtgcgggaaatcctttagacaaagctctagcctttttcgacaccagagagttcactctggagaaaggccttatcagtgctgtgagtgtgggaaatcctttagacaaatcttcaatctcattcgacatagaagagttcacactggagaaatgccttatcagtgcagtgattgtgggaaatcttttagctgcaaatcggaactcattcaacaccagagaattcacagtggagaaagaccttatgaatgcagagaatgtgggaaatcctttagacaattctctaacctcattcgacaccgcagcattcacactggtgataggccttatgagtgcagtgaatgtgagaaatcctttagccgcaaatttatcctgattcaacaccaaagagttcacactggagaaagaccttatgaatgcagtgaatgtggaaaatcctttacccgcaaatctgacctcattcaacaccggagaattcatactggcacaagaccttatgagtgcagtgaatgtggcaaatcttttagacagcgctctggcctcattcagcaccggagacttcatactggagaaaggccttatgaatgtagtgaatgtggaaagtcttttagccaaagtgctagcctcattcaacaccagagagttcacactggagaaaggccttatgaatgtagtgaatgtgggaaatcctttagccagagctctagcctcattcaacaccagagaggtcacactggagaaagaccttatgagtgcagtcaatgtgggaaaccctttacccacaaatcagaccttattcagcaccaaagagttcacactggagaaaggccttatgaatgcagtgaatgtgggaaatcctttagccgcaaatctaacctcattcgacatcggagagttcacactgaagaaaggccttaa

SEQ ID NO: 22662 - DNA, 468 bp, Homo sapiens
  MAP TO Z70227.1; EXPRESSED IN BONE MARROW, SIGNAL = 1.4; EXPRESSED IN FETAL LIVER, SIGNAL = 1.3; EXPRESSED IN LUNG, SIGNAL = 1.3; EXPRESSED IN HELA, SIGNAL = 2.1; EXPRESSED IN PLACENTA, SIGNAL = 1.4; EXPRESSED IN BRAIN, SIGNAL = 1.4; EXPRESSED IN HEART, SIGNAL = 1.6; SWISSPROT HIT: Q9F234, EVALUE 1.10e+00; EST_HUMAN HIT: AW959452.1, EVALUE 0.00e+00; NT HIT: gi14737017, EVALUE 8.00e-09
ttatggctgaagtggcttggtgtcttgattctctattctagcattctcagaaggatcccatccgttagacacgcagaaactgcagggacatttgaatggtcttgattccttcttaactcccttaggctcctcgtttgttggtcttctttcatgcatacgaactctgccgagtaacatgtatctcgatcttgccatcttttctctctgcacagacagcaatgttcttactcctctcctgctgtaaagccactcatcttcgatttccctgaggacttctgctcctacagactctcgacggagtaaagcttccgatagaggggaaacagattcgctactagtgttgatagtcaagttactaaggttctttatcaacgtctcggagcagatttgagaggcccctgaatcgtcccgggaattttcttcggtgagcatttgtggagactctgggatgtaggttggattaaactt

SEQ ID NO: 22663 - DNA, 1974 bp, Homo sapiens
  MAP TO Z97184.1; EXPRESSED IN HELA, SIGNAL = 2.2; EXPRESSED IN BONE MARROW, SIGNAL =   1; SWISSPROT HIT: P18730, EVALUE 6.00e-15; NT HIT: gi11417515, EVALUE 0.00e+00; EST_HUMAN HIT: AL523145.1, EVALUE 0.00e+00
agacccccccggccgccctcctcctttctttgttcctgtggctgggggggtatcccctccctccacaacatggagccatctcctctgtctcccagtggggcagcacttcccctgccgctgtcgctggctccgcccccactacccctgccagcagctgcagtggtacatgtgtccttccctgaggtgaccagtgccctcttggagtccctcaatcagcagcgtctgcagggccagctctgcgatgtatctatcagagtgcagggccgggagttccgggctcatcgggctgtcctggctgcctcctccccttacttccatgatcaggtcctactcaaaggcatgacctccatctcgctgcccagtgtcatggacccaggcgcctttgagactgtcctagcctccgcttacactggccgcctcagcatggctgctgctgacattgtcaacttccttacagtggggtctgtgctccaaatgtggcacattgtggacaagtgcactgaactactccgagaaggccgggcctcagctaccaccaccatcactactgctgcagccacctctgtcactgtccctggtgctggggtgccatccgggagtgggggcactgtggcccctgctaccatgggctctgcgcgctcccatgcctccagccgggccagtgagaatcaatctcccagcagcagcaactacttcagccccagggagtccactgatttctcatcttcctcccaagaggcatttgcagcttctgcagtgggcagtggggagcgtcgaggaggtggccctgtattcccagcccctgtcgttggcagtggaggggccacatctggaaagctgctgctggaggcagatgagctgtgcgatgatggtggggatgggaggggggcagtggttcctggggctgggctccggagacccacctacacaccccctagcatcatgccacagaaacactgggtatacgtgaagcgaggtggtaattgcccagcgccaacacccctggttccccaagacccagatctggaggaggaagaggaggaggaagatctggtgttgacctgtgaggatgatgaagatgaagaactagggggtagctccagggttccagtggggggagggcctgaggctaccctcagcataagtgatgtccgtaccctgagtgagcccccagacaagggggaggagcaggtcaacttctgtgagtcctccaatgactttggcccatatgagggtgggggtcctgtggcaggtcttgatgactcaggggggccaactccctcttcctatgccccctcccaccctcctcgaccgctccttcccttggacatgcagggcaaccagatcctggtcttcccgtcgtcgtcttcatcctcatcctcacaggctcctggccaaccaccagggaaccaagcagaacacggggcagtgaccgtggggggcacgtcggtggggagcctgggtgtgccgggtagcgttggtggggtccctggagggactggcagtggggacgggaataagatctttctgtgccattgtgggaaggccttctcccacaagagcatgcgggaccggcacgtgaacatgcacctcaatctgcggccgtttgactgccccgtgtgcaacaaaaagttcaagatgaagcaccatctgactgagcacatgaagacgcacacaggtctcaagccctacgagtgcggagtctgcgccaagaagttcatgtggcgagacagcttcatgcgccaccgaggacactgtgagcgccggcaccgcctgggcggggtcggggccgtacctgggcctgggactcccacggggccatccttgccgtccaagagagagtctcccggagtgggcgggggcagcggcgacgaagcgagtgcggccacgcccccgtccagcagacgtgtctggtccccacccagagtccacaaggtggagatgggcttcggtggaggtggaggagcaaactga

SEQ ID NO: 22664 - DNA, 1221 bp, Homo sapiens
  MAP TO AL121935.12; EXPRESSED IN LUNG, SIGNAL = 2.6; EXPRESSED IN PLACENTA, SIGNAL = 2.6; EXPRESSED IN HELA, SIGNAL = 4.7; EXPRESSED IN BONE MARROW, SIGNAL = 2.9; EXPRESSED IN FETAL LIVER, SIGNAL = 2.8; SWISSPROT HIT: P51684, EVALUE 0.00e+00; NT HIT: U45984.1, EVALUE 0.00e+00; EST_HUMAN HIT: AW855262.1, EVALUE 0.00e+00
atgagcggggtaagatttttatttttggcaaggggtataatttgggttcactgtggctacttgaacactacactgcagctaactctatctttgtttcctttccaggaatcaatgaatttcagcgatgttttcgactccagtgaagattattttgtgtcagtcaatacttcatattactcagttgattctgagatgttactgtgctccttgcaggaggtcaggcagttctccaggctatttgtaccgattgcctactccttgatctgtgtctttggcctcctggggaatattctggtggtgatcacctttgctttttataagaaggccaggtctatgacagacgtctatctcttgaacatggccattgcagacatcctctttgttcttactctcccattctgggcagtgagtcatgccaccggtgcgtgggttttcagcaatgccacgtgcaagttgctaaaaggcatctatgccatcaactttaactgcgggatgctgctcctgacttgcattagcatggaccggtacatcgccattgtacaggcgactaagtcattccggctccgatccagaacactaccgcgcagcaaaatcatctgccttgttgtgtgggggctgtcagtcatcatctccagctcaacttttgtcttcaaccaaaaatacaacacccaaggcagcgatgtctgtgaacccaagtaccagactgtctcggagcccatcaggtggaagctgctgatgttggggcttgagctactctttggtttctttatccctttgatgttcatgatattttgttacacgttcattgtcaaaaccttggtgcaagctcagaattctaaaaggcacaaagccatccgtgtaatcatagctgtggtgcttgtgtttctggcttgtcagattcctcataacatggtcctgcttgtgacggctgcaaatttgggtaaaatgaaccgatcctgccagagcgaaaagctaattggctatacgaaaactgtcacagaagtcctggctttcctgcactgctgcctgaaccctgtgctctacgcttttattgggcagaagttcagaaactactttctgaagatcttgaaggacctgtggtgtgtgagaaggaagtacaagtcctcaggcttctcctgtgccgggaggtactcagaaaacatttctcggcagaccagtgagaccgcagataacgacaatgcgtcgtccttcactatgtga

SEQ ID NO: 22665 - DNA, 462 bp, Homo sapiens
  MAP TO AL135999.2; EXPRESSED IN BRAIN, SIGNAL = 1.6; EXPRESSED IN HELA, SIGNAL = 1.6; EXPRESSED IN PLACENTA, SIGNAL = 1.9; EXPRESSED IN BONE MARROW, SIGNAL = 1.4; EXPRESSED IN LUNG, SIGNAL = 1.4; EXPRESSED IN HEART, SIGNAL = 1.6; EXPRESSED IN FETAL LIVER, SIGNAL = 1.1; SWISSPROT HIT: P28167, EVALUE 2.00e-19; NT HIT: gi14751069, EVALUE 0.00e+00; EST_HUMAN HIT: BI224235.1, EVALUE 7.00e-04
cttatagatttggctgttttcttcgtgggctgcacccctggcatgcagctgcatcttctccttgctgttggactcaaagtcacagatgttgcagcgcaggtgtagtggggagacagacccataaggagccccatctcccagggatgctggggaaggggtgcccatggctccacccccctcccgcaggtgggctgccagctggtacttctgagcatgtttgtcagtcttgaggtggagttggaagttggccttgagctgggtgccatagcagcaaagcttgcagcggtgggtgtcaccagccacctccttccattcagcttccgggaggctccggcctatgctgcagtggtagagcagcagctccaggctgtctgtgctgaaggcctggcacactaggcagcggaacaccttcagggacaggctgtcgtctgggggtggtgaggtgggcaggctgtcagatga

SEQ ID NO: 22666 - DNA, 1622 bp, Homo sapiens
  MAP TO AL133445.2; EXPRESSED IN HELA, SIGNAL = 1.5; EXPRESSED IN HEART, SIGNAL = 1.3; EXPRESSED IN BONE MARROW, SIGNAL = 1.2; EXPRESSED IN LUNG, SIGNAL = 1.1; SWISSPROT HIT: Q05175, EVALUE 4.90e+00; NT HIT: gi15595198, EVALUE 1.60e+00; EST_HUMAN HIT: AA700990.1, EVALUE 0.00e+00
tcagctcccgcttctcccgctgcagctggccctcctgccgctgcttggcgcgggccgccgctgggcgcgctccctgcggatctgctcagcccgctcccgcccttcctgtagaccttcctcacgttgcttcaggttctgctcctgctgaagcttgcgcagccgatcctcccgggccgcgcgctccgcccgctcccgccgcaggaggccctggcgttcggccagctcccgccgccgctcctcgctgcgctcgtactgccgctgccgccgccgcgccgcctcgcgctcttcgcggccacggcggcctcgccgctcctccacctgcgcggcccaggctcggcggccctgctctagggcgcgctgcttctcccgctcctcgcgctcccgccgctgcttggcgtgcacgcgctgcagctcccactggccgtgggcagccgcgcgttgctccagcagcaggagctcctcctggtgccgcgccagcatgagcgccgcgatcttccggtcacgctccggcaccccgcgcaggccgcgctctgcacgcacttgacgcacgatgcgctccacgtgctgagcggtctgcggcgaatggctcaggtcgccgaggctgaagctgcggccggtgatcggaaccagggtcagggcagacgggcggcccggagcgttggtggtggaggacgccgaccccgctgggcagctgttcctggccgaggcccgaggcggccagcgcagctccctcaagctttccccactgtaggatgacgacgatgcgcccgactcggagctgagggcgccctcacgccggcgggacagtgagtccagcgaatggctcttcctgcctgttcgagaacccgctggcggaggttgggtccgggcggaggagggactaggggaagccttgcgggccgcacgcggcgcgggcgaggccgggaggctggcgctgctgcagctgctgctgctgcccgcgctcggggccgaggccgcggcggcggcggcggcggcggcggccgcggggctcaaaggcgtgaaaagacgccgcttctcctcgcgcatgatgcgctcgcgctcggcccggcattgctgcagcttggcgcgccgctccgcctcgtaggcctcatacaggccggtggccacccgcatggagcggcccggagcctctcgcaccaggtcggccagggcccgtggcagcagctccaccggcttgaccgcacagcgggcgcaggcctctagcgagcgggggctggtcagcacgtagcggctgccctccgcctctgggcagtcgaagttgaagaggtcgaggtgcagcagcggggactgctcccgccgcccgccttctgcggctgcacatgggacttctgccttgcggggcaccgccgcggaggccgaggccgaggccgaggaagctgcgggctcctgtgcgccctgggaatcagggggcacggacgccacggcctcgtcccctccagagtcgccgggttccgctcctgccttctcttcttcaggcactgggtccaccatggctgagccccgtcctttgttggaatctctgcagatcacaaggagggacatcgaggaatacgtctgagagctcttcccccctcctcatccatagtcaccccatcccaact

SEQ ID NO: 22667 - DNA, 1543 bp, Homo sapiens
  MAP TO AC009144.4; EXPRESSED IN BONE MARROW, SIGNAL = 1.7; EXPRESSED IN HEART, SIGNAL = 1.8; EXPRESSED IN FETAL LIVER, SIGNAL = 2.1; EXPRESSED IN LUNG, SIGNAL = 1.5; EXPRESSED IN PLACENTA, SIGNAL = 2.5; EXPRESSED IN HELA, SIGNAL = 0.78; EXPRESSED IN BRAIN, SIGNAL = 1.7; SWISSPROT HIT: Q57368, EVALUE 2.00e-07; NT HIT: gi14746462, EVALUE 0.00e+00; EST_HUMAN HIT: AU130216.1, EVALUE 0.00e+00
atggcggcgcgccgcagcctcagcgctcgcggccgggggatcctgcaggcggctgcggggcggctgctgccgctgctcctgctgagctgctgctgcggtgcgggcggctgcgcagcggtgggcgagaatgaggagacggtgatcatcgggctgcgactggaggacacgaacgacgtgtcgttcatggaagggggggcgctgcgggtgagcgaacggacccgggtcaagctgcgggtgtacgggcagaacatcaataacgagacgtggtcccgcatcgccttcaccgagcacgagcggcggcgccacagcccgggggagcgcgggctggggggccccgcgccgccagagccggacagcggcccccagcgatgcggcatccgcacctcagacatcatcatcttgccccacatcattctcaaccgccgcacctcgggcatcatcgagatcgagatcaaaccgctacgcaagatggagaagagcaagtcctattacctgtgcacgtcgctctccacgcccgccctgggcgccggcggctcggggtccacgggtggcgccgtcgggggcaagggtggctcgggggtggccgggctcccgccgcccccgtgggccgagaccacctggatttaccacgacggcgaggacaccaagatgatcgtaggcgaagagaagaagttcctgctgcccttctggctgcaggtgatcttcatttcgctgctgctgtgcctgtcgggcatgttcagcggcctcaacctggggctcatggccctggacccgatggagctgcgcatcgtgcagaactgcggcacggagaaggagaagaattacgccaagcgcatcgagccggtgcgcaggcagggcaactacctgctgtgctcactgctgctgggcaacgtgctggtcaacaccacgctcaccatcctgctcgacgacatcgccggctcgggcctcgtggccgtggtagtctccaccatcggtatcgtcatcttcggagagatcgtgccccaggccatctgctcccggcatggcctggctgtgggggccaacaccatcttcctcaccaagtttttcatgatgatgaccttccccgcttcctacccggtcagcaagctgctggactgcgtcctgggccaggagataggcaccgtctataaccgggaaaaactgctggagatgctccgggtcaccgatccctacaacgacctcgttaaggaggagctgaacatcatccaaggggcgctggagctccgcaccaagacggtggaggacgtgatgaccccactccgggactgcttcatgatcaccggcgaagccatcctggacttcaacaccatgtctgagatcatggagagcggctacacccgcattccagtgtttgaaggggagcgctccaatatcgtggacctgctgtttgtcaaagacttggccttcgtggatcccgatgactgtacccccctgaaaaccatcaccaaattttataaccaccccttgcactttgttttcaatgacaccaagttggacgctatgctggaagaatttaagaaag

SEQ ID NO: 22668 - DNA, 460 bp, Homo sapiens
  MAP TO AL135785.2; EXPRESSED IN BONE MARROW, SIGNAL = 0.81; EXPRESSED IN HELA, SIGNAL = 1.3; SWISSPROT HIT: P25304, EVALUE 1.00e-03; NT HIT: gi9055245, EVALUE 6.00e-65; EST_HUMAN HIT: AW129076.1, EVALUE 1.00e-88
cgaactcgcaagggccgtcgcgcgccttgtgcaggtgaccggggtgcgcgcggggcgtgtgccgagcgcgcaggcgcagcgcgcagacgctggggtacgagcgaccgtcggagccgcagacggtgccgcgctgcgcgcacacgcagagcccggtgccctcgggcgctgccccagcggcctggctcgcgcataccaggccggggccacagcgcccgccggcgcggcccccgcagctcgcgccctcggctcccaggcagcgggcgcagcagccgcactcgtcgagcgccgagatcccgggcgccgggcagggcgcaggcgccgggcagccctctggccggcacggaccacacttggggcgccgaccgcccacgtcgcggatcccaaggctcggggacagcggcggcagcagcggcagcagcagcagaagcagcagcggcaagagcagagacaagcgcggcat

SEQ ID NO: 22669 - DNA, 747 bp, Homo sapiens
  MAP TO AL035079.14; EXPRESSED IN HELA, SIGNAL = 1.4; EXPRESSED IN BONE MARROW, SIGNAL = 0.85; EXPRESSED IN FETAL LIVER, SIGNAL = 0.92; SWISSPROT HIT: P04912, EVALUE 3.50e-02; NT HIT: AB000216.1, EVALUE 0.00e+00; EST_HUMAN HIT: AI167201.1, EVALUE 8.00e-91
actccggctccatgaacagccgccacaacagctgggacacggtgaacacggtgctgcccgaggaccccgaagtggccgacctcttctcgcgctgtccgcggctccccgagctggaggagttcccctggaccgaaggagacgtggcccgggtgctccgcaaaggcgctggcggccggcggctgccccagttctccgccgaggcggtgaggcgcctggccgggctgctccgcagggcactgatccgcgtggcccgcgaggcgcagcgcctgagcgtgctgcacgccaagtgcacccgctttgaggtgcagagcgccgtgcgcctggtgcacagctgggcgctggccgagagctgcgcgctggcagccgtcaaggcgctgtccctgtacagcatgagcgccggcgacgggctgcgccggggcaagtccgcgcgctgcggcctcaccttctcagtgggtcgctttttccgctggatggtggacacccgaatctccgtgcgcatccacgagtacgcagccatctccctcaccgcctgcatggagaacctggtggaggagatccgggccagggtgatggccagccacagccctgatggcggaggggccggaggcggggaggtgtctgctgaggccctggagatggtcatcaacaacgacgccgagctctggggcgtcttgcagccctatgagcatctcatctgcggcaagaacgccaatggtaagcgcgcgggcctcggactggcagactggg

SEQ ID NO: 22670 - DNA, 1059 bp, Homo sapiens
  MAP TO AL009173.1; EXPRESSED IN PLACENTA, SIGNAL = 3.3; EXPRESSED IN BRAIN, SIGNAL = 7.2; EXPRESSED IN HELA, SIGNAL = 1.3; EXPRESSED IN LUNG, SIGNAL = 1.9; EXPRESSED IN HEART, SIGNAL = 2.3; EXPRESSED IN BONE MARROW, SIGNAL = 2.2; SWISSPROT HIT: Q99457, EVALUE 1.00e-123; NT HIT: gi13652184, EVALUE 0.00e+00; EST_HUMAN HIT: AL534617.1, EVALUE 0.00e+00
atggcagaagcagattttaaaatggtctcggaacctgtcgcccatggggttgccgaagaggagatggctagctcgactagtgattctggggaagaatctgacagcagtagctctagcagcagcactagtgacagcagcagcagcagcagcactagtggcagcagcagcggcagcggcagcagcagcagcagcagcggcagcactagcagccgcagccgcttgtatagaaagaagagggtacctgagccttccagaagggcgcggcgggccccgttgggaacaaatttcgtggataggctgcctcaggcagttagaaatcgtgtgcaagcgcttagaaacattcaagatgaatgtgacaaggtagataccctgttcttaaaagcaattcatgatcttgaaagaaaatatgctgaactcaacaagcctctgtatgataggcggtttcaaatcatcaatgcagaatacgagcctacagaagaagaatgtgaatggaattcagaggatgaggagttcagcagtgatgaggaggtgcaggataacacccctagtgaaatgcctcccttagagggtgaggaagaagaaaaccctaaagaaaacccagaggtgaaagctgaagagaaggaagttcctaaagaaattcctgaggtgaaggatgaagaaaaggaagttcctaaagaaattcctgaggtaaaggctgaagaaaaagcagattctaaagactgtatggaggcaacccctgaagtaaaagaagatcctaaagaagtcccccaggtaaaggcagatgataaagaacagcctaaagcaacagaggctaaggcaagggctgcagtaagagagactcataaaagagttcctgaggaaaggcttcaggacagtgtagatcttaaaagagctaggaagggaaagcctaaaagagaagaccctaaaggcattcctgactattggctgattgttttaaagaatgttgacaagctcgggcctatgattcagaagtatgatgagcccattctgaagttcttgtcggatgttagcctgaagttctcaaaacctggccagcct

SEQ ID NO: 22671 - DNA, 536 bp, Homo sapiens
  MAP TO AC011497.3; EXPRESSED IN BONE MARROW, SIGNAL = 1.2; EXPRESSED IN LUNG, SIGNAL = 0.97; EXPRESSED IN BRAIN, SIGNAL = 1.4; EXPRESSED IN HELA, SIGNAL = 0.93; NT HIT: gi11525931, EVALUE 0.00e+00; EST_HUMAN HIT: BI520246.1, EVALUE 0.00e+00; SWISSPROT HIT: Q05469, EVALUE 8.00e-90
cctcaaggctcatccacaacatggacctgcgcacaatgacacagtcgctggtgactctggcggaggacaacatagccttcttctcgagccagggtcctggggaaacggcccagcggctgtcaggcgtttttgccggtgtacgggagcaggcgctggggctggagccggccctgggccgcctgctgggtgtggcgcacctctttgacctggacccagagacaccggccaacgggtaccgcagcctagtgcacacagcccgctgctgcctggcgcacctcctgcacaaatcccgctatgtggcctccaaccgccgcagcatcttcttccgcaccagccacaacctggccgagctggaggcctacctggctgccctcacccagctccgcgctctggtctactacgcccagcgcctgctggttaccaatcggccgggggtactcttctttgagggcgacgaggggctcaccgccgacttcctccgggagtatgtcacgctgcataagggatgcttctatggccgctgcctgggcttccag

SEQ ID NO: 22672 - DNA, 567 bp, Homo sapiens
  MAP TO AC003072.1; EXPRESSED IN LUNG, SIGNAL = 1.1; EXPRESSED IN BONE MARROW, SIGNAL = 1.1; EXPRESSED IN BRAIN, SIGNAL = 0.87; EXPRESSED IN HELA, SIGNAL = 0.42; SWISSPROT HIT: Q64623, EVALUE 1.00e-21; NT HIT: gi14778260, EVALUE 0.00e+00; EST_HUMAN HIT: BE222374.1, EVALUE 0.00e+00
tcacagtggaatcatcaaacggacttccttctcatagatgtcagggatcattcccactggggaactgaccatgtgcacagtgttcttgccaaacaattggaactcatagtggatgagctgctcccaaaagccgctgttgggtcggatgatgggccggcatgacttggtccacgtgtgggcgtccagcagggacatggcgtggtacttcatgaggtaggcgaggcacagggcagctgagcggctcacaccagcagcacagtgcagcaaagtacggccctgcttcatctccacgctgtggatatggtcagcaatagggtcaaagaagtcacagagacgtgagttaggggagtcagccacaggtacctgcatgtactggatatcctcatacaaggtgttcactacctccactgagacattgatgaccatggtgatctggttgctagacagcatgagcttgttgttggcggccacaccattgctgatatacaggcttttggttatctgcgagaggccgctgactgagggctgccggaactgaactgggaaggcacacgagggtgctgtcat

SEQ ID NO: 22673 - DNA, 1191 bp, Homo sapiens
  MAP TO AC005180.1; EXPRESSED IN HELA, SIGNAL = 1.2; EXPRESSED IN PLACENTA, SIGNAL =   2; EXPRESSED IN HEART, SIGNAL = 2.1; EXPRESSED IN BONE MARROW, SIGNAL = 1.1; NT HIT: gi11426102, EVALUE 0.00e+00; EST_HUMAN HIT: BF846719.1, EVALUE 0.00e+00; SWISSPROT HIT: P36383, EVALUE 0.00e+00
cttcccatcccctgatttgctactggcagtgcttttgttggacccagctttggaccccactttggccttcttctcccggggaccatgagggttgttttggtgactgtaggcctgaactgccagatccaagcgttcctgagccatcctgatctcccgctgcagagcctccaggtcagctgggaggttctcctcatggctgccatactgctgttcctgggctgtgttggccttgttttgcttgtaggcgatcttagcattggacagttcggtgtactggatttgatctggtttgacagcaatgttatagccagggggagcagatggtgtattccaagtgaaaggataattataagcacccggatcctcaagttccctccttttactgtttagtgagtctcgaatggtcccaaaccctaaatgaagcatctcccaaatgttaagcaagaggcaaaggcctgtaacaccatacattatcagaaggaagatggtcttttcagtgggtctagaaataaagcagtctatcttatgaggacaaggaagtctgctgcacacataaaacgggtggacttggaagccatacagaaaatactgccctatcagaaaacccacctcaaacacggtccttgccagcaactgcagcacatagattttcatgagcccatcttcccgaatccgtcgtcggccatcatgcttaggtttgggttggctctgctctttattttccttatcactttctaactccatctctggatacatcataggatcctcttcgttgtcctcctccgtttcttccagagcccggtgttgtttccagcgcattgcatagggcttgctccgagctgccttcttgtctgcttcaccgtgctccattttggcaatcttgtggatagcatagcccaggtacatcacagagggagttgccaccaggatgatctggaacacccagaagcgtacatgggagagaggtgcaaacgcatcataacagacattctcacagcccggctgttctgtgttgcacacaaatttgctttgctcatcgtaatagatggattctcctcctacagctgtaaggacgatccggaagacaatcagaacagtgagccagatcttccccacaaatgtggaatggttgtgaatctcctctagcaggcgagtcaggaagctccaactcatggtgattgaattggtatg

SEQ ID NO: 22674 - DNA, 644 bp, Homo sapiens
  MAP TO AC004501.1; EXPRESSED IN LUNG, SIGNAL = 1.8; EXPRESSED IN HEART, SIGNAL = 2.3; EXPRESSED IN BONE MARROW, SIGNAL = 2.3; EXPRESSED IN PLACENTA, SIGNAL =   2; EXPRESSED IN HELA, SIGNAL = 2.7; NT HIT: AF041260.1, EVALUE 0.00e+00; SWISSPROT HIT: O75363, EVALUE 6.00e-79; EST_HUMAN HIT: BI549901.1, EVALUE 0.00e+00
ttatcccattagcgcccccgagcatgcattcagaaccaagtggatacaccttggcacacttaccttccctgcagggacatcatcggactgccctgataagccaggaacctcatccaccttgtcttgatgctctgccctcttggcttcctgttggctgtcacctggcaccttttcctgtcccttgtccagcttgaagaatttgtcaaaaaagctggagtccttgggcttggagggagcttctcctcctgctccccctgtctcaggtgggagaagcgtgggatccctggcggcagagaggaccttgtcttgggccggggcgtgccctggggttttatctgtgtcctgccccggtccagctgccaccggaagtgtccagctctcacttgggtctttgttcgctggagctttattggagctgacatcaagcttcactgatccaagggatgaatctgcggcttggtctccggtacgtcctggtacaggccgagagagcatcaagaaaaaacgagatttagcagctggtgcctcgggtttggcctctttcccaagattctttccgttggcatccgcaacagcacttatctccgttgtctcgggggaagaagtggccacattatccgtcttgacacttattcccaagtcga

SEQ ID NO: 22675 - DNA, 567 bp, Homo sapiens
  MAP TO AF196972.1; EXPRESSED IN HELA, SIGNAL =   2; EXPRESSED IN BONE MARROW, SIGNAL = 1.5; EXPRESSED IN FETAL LIVER, SIGNAL = 2.2; EST_HUMAN HIT: AL553802.1, EVALUE 0.00e+00; NT HIT: gi4557808, EVALUE 0.00e+00; SWISSPROT HIT: P04181, EVALUE 7.00e-98
ctatcctgactgtatttcatcagcaatatacagatcctggtgcctggtgcagagctctcgcactcccattaagtaacctggatctggaacaacacctgcttcaccctgaattggttctaccatgaatgcagccacatttggattctgaaaagcactctccagtgcaggcagatcattgcagggaatgacgtcgaagccaggcataaacggtccaaaaccatcataactcgtcaggtctgtggaactggagatagcagaaaacgtcctaccccaaaagtttccagctgcggaaataacctttgctttgtatttctgaatgcccttcacagtatagccccacttatgagctagtttacaggcagtctctccagcttccattcctgtattcataggaagaactttgtggtagttgaaaagtttagtaatatactcctcatattcaccaagtacgttattatagaaagctctagaggttaaggtcaatttcttcccttgactctttagtgcattcacaatcttggggtgacaatgcccttggttgacagcactgtaagaactcagaaagtc

SEQ ID NO: 22676 - DNA, 632 bp, Homo sapiens
  MAP TO AC023490.4; EXPRESSED IN HELA, SIGNAL = 0.67; EXPRESSED IN BONE MARROW, SIGNAL = 0.91; NT HIT: gi14777593, EVALUE 0.00e+00; EST_HUMAN HIT: AA311249.1, EVALUE 1.00e-122; SWISSPROT HIT: P08122, EVALUE 2.10e+00
ctcgaggtgggccacagaaggcaggttcccttgggccggagaacgccacctcctatcagtctgctctgtccccacctccatctcagccactaggcgcccggggatattgcccacttgcctgttgcactcgctgaggtagaaatcatgggtgtcctgagagccccacactcttagcaactgccttttctggaagaccagctcctcctctgcagccttgaggttggcagacatcaccagggggttgtaatcagagagggccacaaagaccctggctggagtgttggcccccgtccccagctgttgggggccacccctgggcatcttgatgactttggcggatggagctggacacagtgccgagctgggctcatggagctggcaccctctcttcacccccagagcttgtccttgcctgctgtggggctcaggctccctcctctcctctcgcctctctgtgccccacagatccaagcacagtgcctcctgctcctccttcaaaacgttatggaagtcagatgcatactgttggctggcgcccagctggggaggtgtgaacccttgggcatcttgcttttgccgaagtaccctctcaagggcagccttttcctgacacggttctttcctgggcccac

SEQ ID NO: 22677 - DNA, 584 bp, Homo sapiens
  MAP TO AC022150.5; EXPRESSED IN HELA, SIGNAL = 0.85; EXPRESSED IN BONE MARROW, SIGNAL = 0.78; SWISSPROT HIT: P52743, EVALUE 1.00e-119; NT HIT: U09414.1, EVALUE 0.00e+00; EST_HUMAN HIT: AA805052.1, EVALUE 0.00e+00
atgaatgtggcaaggtttttagtagaaaagcacaccttgcatgtcatcatagacttcatactgtctaaggtttctaatcaacaatcaaaccttgcacaacatcagagagtttatactggagagaaaccttacaagtgtaatgagtggggcaaagccttaagtgggaagtcgtcacttttttatcatcaagcaatccatggtgtagggaaactttgcaaatgtaatgattgtcacaaagtcttcagtaatgctacaaccattgcaaatcactggagaatccataatgaagacagatcttacaagtgtaataaatgtggtaaaattttcagacatcgatcatatcttgcagtttatcagcgaactcatactggagagaaaccttacaaatatcatgactgtggcaaggtcttcagtcaagcttcatcctatgcaaaacataggagaattcatacaggagagaaacctcacaagtgtgatgattgtggcaaagtcttgacttcacgttcacacctcattagacatcagagaatccatactggacagaaatcttacaaatgtcttaagtgtggcaaggtcttcagtct

SEQ ID NO: 22678 - DNA, 564 bp, Homo sapiens
  MAP TO AL163300.2; EXPRESSED IN BONE MARROW, SIGNAL = 1.7; EXPRESSED IN FETAL LIVER, SIGNAL = 1.7; EXPRESSED IN LUNG, SIGNAL = 1.3; EXPRESSED IN HELA, SIGNAL = 1.8; EXPRESSED IN HEART, SIGNAL = 2.7; EXPRESSED IN BRAIN, SIGNAL = 1.5; EST_HUMAN HIT: AL537054.1, EVALUE 0.00e+00; NT HIT: AL163300.2, EVALUE 0.00e+00; SWISSPROT HIT: P81695, EVALUE 8.10e-01
ctcttctttggctttgagaagggcattggcagcttcatctactgcctttctgtgttccttcaacgcaccttgcactgtgtggcacttagcagacttcttcttgccctcaatctcagaattgtccatggcggctttcaatatgttggagtgtgcattgacagcctggaccacagtgttctgagctgcaatcgcctgcagagtgacatttgcagtttgcctcagagcatcttcaaagctcttggctagagactcagttttaacttgttcttgtttttcctcttgtgcaaggcaagctgcaatttcttcacatggtcgttcccttatagaagatgaggatgcttcttctgaaagtgcaggtgtgggttttccttcatcaattgcagggtgatcagtttttaaagattcctcatgctgaaccccagggaccaacactgtatcacctgcggttgctgaagctggagtatctcccttttgtttttggagttgtgaggcaggctgtttaaattcttttgttacttctgatacactagagatttttagtggaccagactgagttgatttctt

SEQ ID NO: 22679 - DNA, 1157 bp, Homo sapiens
  MAP TO AL163279.2; EXPRESSED IN BRAIN, SIGNAL = 0.91; EXPRESSED IN HELA, SIGNAL = 1.1; EXPRESSED IN BONE MARROW, SIGNAL =   1; EST_HUMAN HIT: BG168789.1, EVALUE 0.00e+00; NT HIT: gi16170755, EVALUE 0.00e+00; SWISSPROT HIT: Q9NSI6, EVALUE 0.00e+00
tcataaggtgcaaccattgaaatctaacacattttctaaacttctgtcatcatccccatcatggtatctcacagtccttctaccctgatttctcgtttttatttttgaacgtcgaagaactcttttagattttgcatagtccaaatcctcccagtcattatcatccacacttaacctagggcgtttgctttgtctttgacgtctcacagttttagatatgttagctgtaaaagttttaccttttctaactacttttgcttttcctttcgttttcctccttttggtttttgtattatcagtacagtcaatatctgattcagttacagatcccaaatctgatgatttggaactagtatcaggtctaaactttgaattcccagttgtttcagagattttcacattttccaattcaggatgcgatctcttcctttttacttccttctctgctgtttcctgtgaatcatgaatcacttttgtcttactaaaaggagcctttccataggtcctgagtcttctgccattccacctgcgcagcccataattcagttccacttcaaaattattctctgcagtagctttttgtgccaaggttgactctgaagaaaatgtcctatcagtctcactccctggaatatgactttttgaatcttctcctgaagatgtaacagaggaactttttcttttagaaggtgcatctattttgtgaatattggtatgcctgtgcttgtgttctgaattcaacatatcttcagagtctgagtctccatttagagcctgactaagcacttttgtactaccttcggagtcaggatcaggtggcttgccttcacaggcatactgttcacttggtacttcacaatgtacacttccttcacaatcactcaatttcttcttagctgtagtacaagcaagatggagaggttttttccttccatttttgcttctagtgtgcacattttctaaactgacatcttctacatcactcatgagcttgatcttattggcagccgtagctgcacatcttcgagtaatcctcaggagacctgttctggcttttgatgatttcttaaccacctgtaaactactgtctgagtcactggaacagacccttttcctggaaatttttctgcttagtccattgtcttgtgatgcagaat

SEQ ID NO: 22680 - DNA, 1441 bp, Homo sapiens
  MAP TO Z98044.10; EXPRESSED IN LUNG, SIGNAL =   1; EXPRESSED IN HELA, SIGNAL = 1.1; EXPRESSED IN HEART, SIGNAL = 1.5; EXPRESSED IN BONE MARROW, SIGNAL = 1.2; NT HIT: gi14726996, EVALUE 0.00e+00; EST_HUMAN HIT: BE746508.1, EVALUE 0.00e+00; SWISSPROT HIT: O95479, EVALUE 0.00e+00
tcatcccaggaaggcgtcgtagtccatgtaccacaccagctggccggagtgcggcaggacacccgagatgggccacttcttgggctcatggcccacccggctcaccagcgtggtgatctcacgcttcatcctgcccatgaccaggactgccaccttcttggcgcggttgatgagaggcaggctaaggctcatgcggcggtgtggctgggaggggctcgtggtcagcacgaccagctgctcgccatccaggccagtgggtgactgtgggaagagggaggctgtgtgcccgtcggcacccatgcccagcagcaccaggtcgaagctgctgttggccaccagggctgagatctccctggcatagatctgggcgccctggtcctcctcggcgcagagccgctgctgcaggtgcacaggcatggggtggatgttgtagtaggggatccggacgtgctgcagcaggtgggcctgcaggccctggaagttggactccgggtctgagagtgggacgcagcgctcgtcaaccagccacaggtgcgtgtgggcccaggggaagccatagtgcgccgtggccagctgctggaacagggccacggggctcgagccccccgacagtgccaggtggaactggccaaagcgccgcacggctcgcacagcggtggcctcgatgtcattagccagcttagagatcagctcctcggaccaggcggagaccagcgggctctctcggtacttggccctgaggacctggaagtcactgggcattggggccggccctggccctggcaccagctgctccggctgctgctgggaaaagaacaaccggccgctactgaactcaaagtccaacagacggccattctcagctcctccagggtagaggcgtggggccttatgggccaggctctccagcagaggggtccagaagttccaggaggccagcaagttctctgtggtgatgaagaaattcttccggccatggaagatatgggataagaggacggagtgggcgtcccgctcccgcacagggctgtaggcgtagtaatcggacagagggctgccgaaaaggcggagcccaggtggtccctccatttccttccagctggagggcagggagggcctgaacaggttcctgctgaccagcacggcagggctgcccaggtcgccatggccgatgtggaagacgagctgccggggcaggcactggctctgcgccgcggcccagtgcttttcgctctgcacacagcaggcctggttcttgaacaagatccgagcgtagcccactctctcgtccaaggctttgccagacatcaggatgaaaggcacgccctcccagcgaaggttgtcaatgtgcactaggacggctggggtgagggaacagcagagggtgactctctggcacagaccaggactctccggccagccctctcctctccttgccggc

SEQ ID NO: 22681 - DNA, 2403 bp, Homo sapiens
  MAP TO AL035669.27; EXPRESSED IN BRAIN, SIGNAL = 0.82; EXPRESSED IN BONE MARROW, SIGNAL = 1.1; EXPRESSED IN FETAL LIVER, SIGNAL = 1.1; NT HIT: gi14769822, EVALUE 0.00e+00; EST_HUMAN HIT: AL042507.1, EVALUE 0.00e+00; SWISSPROT HIT: P04280, EVALUE 2.00e-11
atgacctgcccaacaggatgtgtgccgacgtgagaaggaactccgtggagaggcctgccgagccggtggccggggctgcgacgccctccctggtggagcaacagaagatgctagaagagctgaacaaacagatcgaggagcagaagagacagctggaggagcaagaagaagctctcaggcagcagagggccgccgtcggggtctccatggcccacttctcggtgtcggacgccttgatgtctccaccaccaaagtcgtccttgcccaaggcagagctgttccagcaagagcagcagtctgcagacaagcccgcctcactgccccccgccagccaggcgtcaaaccacagggacccccggcaggcgaggcgcctggccactgagaccggtgagggggagggggagcctctctccaggctctcggcacgtggtgcccagggtgccctgcccgagagagatgcttccaggggtggcctcgtgggccaggcgcccatgccagtcccggaggaaaaagagccagcctcttccccctgggcttcgggcgaaaagcccccagcggggtccgagcaggacggctggaaggcagagcctggggagggcacccgccccgccacggttggagacagctcggccaggcctgcccggagggtgctgctgcccacaccgccttgcggcgccctgcagcccggcttcccgctgcagcacgacggtgagagggaccctttcacctgcccggggttcgcgtcgcaggacaaggctctcggctcagcccagtatgaggacccaagaaatcttcattctgctggaaggagcagcagccctgcaggtgaaacagagggggacagagagccacaggccagacccggcgagggcaccgccccgctccccccaccaggacagaaagtggggggctctcagcccccgtttcagggtcagcgggaacctggacctcatgctttggggatgtcagggcttcacggccccaatttcccgggaccaagggggccagcccctccgtttccagaagagaatatcgcttctaacgatgggccacgagggcctccgccagccagattcggagcccagaaggggcccatcccttccttattctcggggcaacatgggccacctccttatggggacagcagaggcccctcaccctcttaccttggtggaccacgaggagtggcaccatcccaatttgaagaacgcaaggatccccatggggagaagagggagttccaggacgccccgtataacgaggtgacgggcgcccccgcccagtttgaagggacagagcaagccccatttctgggaagcagaggcggcgcgcctttccagttcggaggccagagaaggccactgctgtctcagctgaaaggcccccgaggcggcccccctccctctcagtttggaggtcagagaggaccaccccctggtcatttcgtgggcccaagagggccccatcctagtcagtttgaaactgcccggggccctcatcccaaccagtttgaaggacccagaggccaagcgcctaactttatgccaggtcccaggggcattcagcctcagcagttcgaagaccagagggtccattcaccaccaagattcacaaaccaaagggcgcctgcacccctgcagtttggtggactacgggggtccgcacccttttctgaaaaaaatgagcagaccccttcgcgatttcacttccagggccaggccccgcaggtgatgaagccgggccccaggcccctgctggagcttcccagccaccccccgcagcaccggaaggaccgctgggaggaggccgggccgccctccgcgctctcctccagtgcgcccggacagggccccgaggccgacggacagtgggcatcggccgacttccgagaggggaaaggccacgaatacagaaaccagactttcgaagggaggcagagagagcggtttgacgtggggcccaaagagaagccgctggaggagcccgacgcccagggccgggcgtccgaggacaggaggagagagcgcgagcgcggccgaaactggagccgagagcgggactgggaccggccccgggagtgggaccgacaccgggacaaggactccagccgggactgggacagaaaccgggagaggagcgccaaccgcgaccgagagcgcgaggccgaccggggcaaggagtgggaccgcagccgggagcggagcaggaaccgagagcgcgagcgagaccggaggcgcgaccgggaccggtcccggagcagagagcgggaccgagacaaggccagggacagggagcggggccgcgaccgcaaggaccggagcaagagcaaagagagcgctcgggacccgaagcccgaggcctcgagggcctccgacgctggcaccgcctcgcaggcctagacgc

SEQ ID NO: 22682 - DNA, 922 bp, Homo sapiens
  MAP TO AL135904.11; EXPRESSED IN LUNG, SIGNAL = 1.5; EXPRESSED IN HEART, SIGNAL = 1.8; EXPRESSED IN BONE MARROW, SIGNAL = 1.5; EXPRESSED IN BRAIN, SIGNAL = 1.3; EXPRESSED IN HELA, SIGNAL = 1.1; NT HIT: gi15300431, EVALUE 0.00e+00; SWISSPROT HIT: O95047, EVALUE 0.00e+00; EST_HUMAN HIT: AI339565.1, EVALUE 0.00e+00
agttcctaagactacagataaggggattgagcatgggattaaagaggctgtgaaacagcaggagatatttcttctgctccttggggttcccatatctgggtccaacatacatgataatggctgtgccataaacgagtccaatcacacagaggtgggagaagcaggtgcggaaggctttcctctgaacttcccttgattggatctgaaggatagcacagaggatgcacatatatgaaactacaattgtggacaagggtcccaccagcccagaaattgctccggccaagaccatgttctcattgatgtgggtatctgcacaggcaagtttgagaacagccaagatttcacaaaaaaagtgataaattttctggggcctacagaagggtaaaggtagaagtaacacaagatgaatcaaggataaaaggactccagtggtccaggaagtcaccgcgagggtgatgcagactctccaggtcatgatggccaaatatcggagggggtggcagatggccacgtacagatcataggacatcaccaccaggaggagacattctgtgacagcaaaagtggaaaacagaaaggtctgcatcatgcggcccgcaaaggagatgggcttggctggatgcaggaggttcaccagcatccggggcaccgtgttgcaggcgtaggcgatgtcgacgaccgccaggtgtgagaggaagaagtacatgggggcgtgcagtctggagtccagtgagatgagccccagtatggtcccgttccccagcagggtgaagacgtagaacagggagaagagcccaaagaggagcatctgaatccttgggccaacgggaaatcccagtaggaggaactctctgatggatgttatattgtctcccatatccctatgacagaggaaatcaagttaatgctcatggtttag

SEQ ID NO: 22683 - DNA, 761 bp, Homo sapiens
  MAP TO AL035462.12; EXPRESSED IN BRAIN, SIGNAL = 0.91; EXPRESSED IN HELA, SIGNAL = 1.7; EXPRESSED IN LUNG, SIGNAL = 1.1; EXPRESSED IN BONE MARROW, SIGNAL = 0.86; EXPRESSED IN FETAL LIVER, SIGNAL = 0.96; NT HIT: AB024444.1, EVALUE 0.00e+00; EST_HUMAN HIT: BI559806.1, EVALUE 0.00e+00
atgcgccatggctacggagtacgccagagcgtgccctacgggatggccgtggtggtgcgctcgccgctgcgcacgtcgctgtcgtccctgcgcagcgagcacagcaacggcacggtggccccggactctcccgcctcgccggcctccgacggccccgcgctgccctcgcccgccatcccgcgtggcggcttcgcgctcagcctcctggccaatgccgaggcggccgcgcgggcgcccaagggcggcggcctcttccagcggggcgcgctgctgggcaagctgcggcgcgcagagtcgcgcacgtccgtgggtagccagcgcagccgtgtcagcttccttaagagcgacctcagctcgggcgccagcgacgccgcgtccaccgccagcctgggagaggccgccgagggcgccgacgaggccgcacccttcgaggccgatatcgacgccaccaccaccgagacctacatgggcgagtggaagaacgacaaacgctcgggcttcggcgtgagcgaacgctccagtggcctccgctacgagggcgagtggctggacaacctgcgccacggctatggctgcaccacgctgcccgacggccaccgcgaggagggcaagtaccgccacaacgtgctggtcaaggacaccaagcgccgcatgctgcagctcaagagcaacaaggtccgccagaaagtggagcacagtgtggagggtgcccagcgcgccgctgctatcgcgcgccagaaggccgagattgccgcctccag

SEQ ID NO: 22684 - DNA, 498 bp, Homo sapiens
  MAP TO AL133409.14; EXPRESSED IN HEART, SIGNAL = 3.3; EXPRESSED IN FETAL LIVER, SIGNAL = 3.5; EXPRESSED IN PLACENTA, SIGNAL = 3.6; EXPRESSED IN HELA, SIGNAL = 5.4; EXPRESSED IN BONE MARROW, SIGNAL = 3.8; NT HIT: AL163209.2, EVALUE 7.00e-65; SWISSPROT HIT: P70213, EVALUE 1.00e-19; EST_HUMAN HIT: AA055018.1, EVALUE 2.00e-69
atgatgaaagaaaatgatgagctcagaatttctaactcctggcttcagaagcagatacttagcctcaaatctgctaagattaccctgagtgagagtcttaactcctgtagagaaagagctgaaattgtggaaaaacagacacaagctcttatcatgcgagtggctgacctgcagcaaaaggtgcatgcaaaaccttgccacgtgtctactgttaaattgagggcattgactgaaaaagaatgggaccctgcaacatggaatgggaacgtgtgggaggacactgacgaagcacatgaacaaagtggccatggtggcagggatggaggttatacatgggctcagccacatggacttccagttacccaggctgacctggctatggccaagtgcccagtttgtcagcagcagacaccaacactgagccctggatatggcacgattcctccgggtgatcagccagctacctggtggcaggttgattatactggacctcttcta

SEQ ID NO: 22685 - DNA, 610 bp, Homo sapiens
  MAP TO AC022085.4; EXPRESSED IN HELA, SIGNAL = 1.1; EXPRESSED IN BONE MARROW, SIGNAL = 0.92; EXPRESSED IN FETAL LIVER, SIGNAL = 1.1; EST_HUMAN HIT: AW501795.1, EVALUE 0.00e+00; NT HIT: gi16160730, EVALUE 0.00e+00; SWISSPROT HIT: P38112, EVALUE 4.60e-02
cttacagggatgccatctttatagcgagtgccaatttcactggtagagctaacttcatcacacccagaacgagacgtttctagtgggttttgctctgtagagttccaaatatcctttttagatgggctgtctggtttctcttctcctgattctgaagaatcaatggctactacttctaactgaggattaggaatttctaggacttccagagacgagtcactatctggctcatctctgacactctcctgctcccgaccagtcctgctgtcttcccaagtggaggttgttactttcccccctttaattaactttccagcttttactttccttacaggtttaacagtcaaaacatcctgttcagtgtcactattctcaggaacatgggcagcccgtagacttttcttcttccggagtttcttctttttcttgcttcccctagtctcagctgatgtcaaagtggattctgcctgttgttcaggctggtcagctggagagtggggttccttctccaaaggggtttctgaagcaaaagacaatcttagaaaagaactggtacaggcttcagacccactattgcctttggttggctcttccccttctttatttatgc

SEQ ID NO: 22686 - DNA, 1064 bp, Homo sapiens
  MAP TO AC010645.5; EXPRESSED IN HELA, SIGNAL = 0.78; EXPRESSED IN BRAIN, SIGNAL = 0.9; EXPRESSED IN BONE MARROW, SIGNAL = 1.1; SWISSPROT HIT: Q9Y2P7, EVALUE 2.00e-75; EST_HUMAN HIT: BE177455.1, EVALUE 0.00e+00; NT HIT: gi14755408, EVALUE 0.00e+00
gttgttggtgtggagtggaagatgaggcggcaccttctaagcagagtatttatatacaaagagagactcaggtcaggactcctatggcaggtgtgtctcccaagaaggcccacccctgtgagatgtgtggcccgatcttgggagacattttgcatgtggcagatcatcagggaacacatcacaagcagaaactgcacaggtgtgaggcctgggggaataaattgtatgacagtggaaactttcatcagcaccagaatgagcacattggagagaaaccctacagagggagtgttgaggaggcgttgtttgcgaagaggtgtaagttgcatgtgtcaggggagtcatctgtcttcagtgagagtgggaaagactttttgctcaggtcaggattactccagcaagaggccactcacactgggaagtcaaacagcaaaactgagtgtgtgtctctgtttcatgggggaaaaagccattacagctgtggaggatgcatgaaacattttagcaccaaagatatactcagtcagcacgagagactgctccctacagaagaaccttctgtgtggtgtgaatgtgggaaatcctctagcaaatatgacagcttcagtaatcatcaaggagttcacactagagaaaaaccttatacgtgtgggatatgtgggaaattatttaacagtaagtcccacctccttgtacaccagagaattcacactggagagaagccatatgagtgtgaggtttgtcagaaattttttaggcacaagtaccacctcattgcacaccagagagttcacactggagaaaggccatatgaatgcagtgattgtgggaagtcatttacccacagctctacattccgtgttcataagagagttcacactggtcagaagccttatgagtgcagtgaatgtgggaaatcttttgccgaaagctccagtctcactaaacacaggagagttcacactggagaaaagccttacgggtgcagtgaatgtgaaaaaaaatttaggcaaatctcttcacttcgtcatcatcagagagttcacaaaagaaagggcttatga

SEQ ID NO: 22687 - DNA, 515 bp, Homo sapiens
  MAP TO AL163279.2; EXPRESSED IN HELA, SIGNAL = 1.2; EXPRESSED IN BONE MARROW, SIGNAL = 0.99; EST_HUMAN HIT: BG772755.1, EVALUE 0.00e+00; NT HIT: AL163279.2, EVALUE 0.00e+00; SWISSPROT HIT: O95447, EVALUE 2.00e-92
ctgtatttttttgtcatttgcgtccatttttgttgtgataatagataatttatgagtgagttcttccctttctgcaaggtttttgtcttcagaaagtttctgcagtgcctgcaagatatctttagtcttcagtaactggctgtcagtttctctaagtttcctagatagagttctttccttttcctgggatttcctaagtagttgccttaaattttttacttcattctgatgtttagccataatttgaggtagattattttgtgaattctcatattttcctatagctttcaaatgcctaagctgaagttgtttcaaaaattggttttctgtaaggatggcttccaatttatgatgcatatcagctaattcattttttagtcctttaattttatgaagccttgctgagagtattcgatgagccatagcatctcttctttgggcaatcatatggatttgagaattaaagagtgatgcattccaggtgtgctttttttcaactgatatttccttctggc

SEQ ID NO: 22688 - DNA, 497 bp, Homo sapiens
  MAP TO AC002381.1; EXPRESSED IN BRAIN, SIGNAL = 2.1; EXPRESSED IN LUNG, SIGNAL = 2.1; EXPRESSED IN BONE MARROW, SIGNAL =   2; EXPRESSED IN FETAL LIVER, SIGNAL = 2.4; SWISSPROT HIT: Q99680, EVALUE 6.00e-85; NT HIT: U66581.1, EVALUE 0.00e+00; EST_HUMAN HIT: BF968206.1, EVALUE 0.00e+00
ggaaaaaaaccaactgctccaaaagaatgtgtttttctcccattctggaaatcaacatgcagtctgaatctaacattacagtgcgagatgacattgatgacatcaacaccaatatgtaccaaccactatcatatccgttaagctttcaagtgtctctcaccggatttcttatgttagaaattgtgttgggacttggcagcaacctcactgtattggtactttactgcatgaaatccaacttaatcaactctgtcagtaacattattacaatgaatcttcatgtacttgatgtaataatttgtgtgggatgtattcctctaactatagttatccttctgctttcactggagagtaacactgctctcatttgctgtttccatgaggcttgtgtatcttttgcaagtgtctcaacagcaatcaacgtttttgctatcactttggacagatatgacatctctgtaaaacctgcaaaccgaattctgacaatgggcagagct

SEQ ID NO: 22689 - DNA, 2388 bp, Homo sapiens
  MAP TO AC025436.2; EXPRESSED IN BRAIN, SIGNAL = 1.2; EXPRESSED IN HELA, SIGNAL = 1.8; EXPRESSED IN LUNG, SIGNAL = 1.2; EXPRESSED IN HEART, SIGNAL = 1.3; EXPRESSED IN BONE MARROW, SIGNAL = 1.4; EXPRESSED IN FETAL LIVER, SIGNAL = 1.4; EST_HUMAN HIT: BI831368.1, EVALUE 0.00e+00; NT HIT: gi15295799, EVALUE 0.00e+00; SWISSPROT HIT: Q9Y5E4, EVALUE 0.00e+00
atggagactgcgctagcaaaaacgccacagaaaaggcaagttatgtttcttgctatattgttgcttttgtgggaggctggctctgaggcagttaggtattccataccagaagaaacagaaagtggctattctgtggccaacctggcaaaagacctgggtcttggggtgggggaactggccactcggggcgcgcgaatgcattacaaaggaaacaaagagctcttgcagcttgatataaagaccggcaatttgcttctatatgaaaaactagaccgggaggtgatgtgcggggcgacagaaccctgtatattgcatttccagctcttactagaaaatccagtgcagttttttcaaactgatctgcagctcacagatataaatgaccatgccccagagttcccagagaaggaaatgctcctaaaaatcccagagagcacccagccagggactgtgtttcccttaaaaatagcccaggactttgacataggtagcaacactgttcagaactacacaatcagcccaaattcacactttcatgttgctacgcataatcgcggagatggcagaaaatacccagagctggtgctggacaaagcgctggaccgggaggagcggcctgagctcagcttaacactcactgcactggacggtggggctccgcccaggtccgggaccaccacaattcgcattgtcgtcttggataataatgacaacgcccccgaatttttacaatcattctatgaggtacaggtgcccgagaacagcccccttaactccttagttgtcgttgtctccgctcgagatttagatgcaggagcatatgggagtgtagcctatgctctattccaaggcgatgaagttactcaaccatttgtaatagacgagaaaacagcagaaattcgcctgaaaagggcattggatttcgaggcaactccatattataacgtggaaattgtagccacagatggtgggggcctttcaggaaaatgcactgtggctatagaagtggtggatgtgaatgacaacgcccctgaactcaccatgtctacgctctccagccctaccccagaaaatgccccggaaactgtagttgccgttttcagtgtttctgatccagactccggggacaacggtaggatgatttgctccatccagaatgatctcccctttcttttgaagcccacattaaaaaacttttacaccctagtgacacagagaacactggacagagagagccaagccgagtacaacatcaccatcactgtcaccgacatggggacacccaggctgaaaaccgagcacaacataacggtcctggtctccgacgtcaatgacaacgcccccgccttcacccaaacctcctacaccctgttcgtccgagagaacaacagccctgccctgcacatcggcagtgtcagcgccacagacagagactcaggcaccaacgcccaggtcacctactcgctgctgccgccccagaacccacacctgcgcctcgcctccctggtctccatcaacgcggacaacggccacctgtttgccctcaggtcgctggactacgaggccctgcaggcgttcgagttccgcgtgggagccacagaccgcggctccccggcgctgagcagcgaggcgctggtgcgcgtgctggtgctggacgccaacgacaactcgcccttcgtgctgtatccgctgcagaacggctcggcgccttgcaccgagctggtgccccgggcggccgagccgggctacctggtgaccaaggtggtggcggtggacggtgactcgggccagaacgcctggctgtcgtaccagctgctcaaggccacggagcccgggctgttcagcatgtgggcgcacaatggcgaggtgcgcaccgccaggctgctgagcgagcgcgacgcggccaagcacaggctggtggtgctggtcaaggacaatggcgagcctccgcgctcggccaccgccacgctgcacgtgctcctggtggacggcttctcccagccctacctgccgctgccggaggcggccccggcccaggcccaggccgactcgctcactgtctacctggtggtggcattggcctcggtgtcgtcgctcttcctcttttcggtgctcctgttcgtggcagtgcggctgtgcaggaggagcagggcggccccggtcggtcgctgctcggtgcccgagggcccctttccagggcatctggtggacgtgagcggcaccgggaccctatcccagagctaccactacgaggtgtgtttgaccggagactcaggggccggcgagttcaagttcctgaagccgattattcctaaccttttgccccagggcgctggtgaagaaatagggaaaactgctgccttccggaatagctttggattaaattag

SEQ ID NO: 22690 - DNA, 641 bp, Homo sapiens
  MAP TO AL109984.8; EXPRESSED IN BRAIN, SIGNAL = 1.1; EXPRESSED IN BONE MARROW, SIGNAL = 0.98; EST_HUMAN HIT: AI568689.1, EVALUE 0.00e+00; SWISSPROT HIT: Q9NYT6, EVALUE 6.00e-30; NT HIT: gi12742246, EVALUE 0.00e+00
agttcttgttctcactctgatcactgtgctgcttcttgtggcatctcagagagtcatccctgacgaaggaggcgccgcaggtctcacagcggaaggccctctgcgtcacgatcttggccacgtgctgggagctgccctctctgagcccttccttgcccagaggggcccggttctccgtcttggcctcgtccctgtgcaccttgtcgacgtgcttggccaggctgctgggccgcttcgtgtcgaagctgcagaagtcacacttgaagggacggtccttacagtggactctgctgtgcacgcgcagggcggccgcgctggagcaggagtagctgcactctggacacttctccgggtggtcggcctggtgcagccggctgtgctccaggaggtcagcccggtcccggccctggaaggcacagtgcagacatttgaaggtgtgcttgatgcggatgtgcgatttgagattcgccttcatggtgcagcggacgtcgcagaactcgcacttgaaaggcttctcccccgagtgcacgatcatgtgccttttcaagtccgagctgattttgaacttggcgctacagagccagcactggaagggggtatcccctagcaatggaaggtgtgtttccattagaacaggcagg

SEQ ID NO: 22691 - DNA, 940 bp, Homo sapiens
  MAP TO AB016897.1; EXPRESSED IN HELA, SIGNAL = 1.4; EXPRESSED IN BRAIN, SIGNAL = 0.87; EXPRESSED IN LUNG, SIGNAL = 0.97; EXPRESSED IN BONE MARROW, SIGNAL = 0.97; EXPRESSED IN FETAL LIVER, SIGNAL =   1; SWISSPROT HIT: Q02817, EVALUE 1.00e-17; EST_HUMAN HIT: AA305243.1, EVALUE 3.40e-01; NT HIT: AB011399.1, EVALUE 1.00e-108
agtggggggagggaggagggacccccctcagaggctccacgcggaggcctgggagaatcgggtgggctggaggctttcactggatggtagccagctttggacgcaaacgtcccacgtgacctgtcccctctcgtctaggcttccaggacctaggggtggtggacctgctctgtcctcccacccctggacttccctggtgatctcctctcccctcccaccagggacctcctacccccttccccctcccccctcccacaccggagccttctctcccctcccacccgggacctcttctcccctcccacccggggcctcctctcccctcccacccgggacctcttctccccccatccggggccttgctgtcccctcccacccgggacctcttctcccctcccatccggggcctcctctcccctcccacccgggacctcttctcccctcccatccggggcctcctctcccctcccacccgggacctcttctcccctcccatccggggcctcctctcccctcccacccgggacctcttctcccctcccatccggggcctcctctcccctcccacccgggacctcttctcccctcccatccggggcctcctctcccctcccacccgggacctcttctcccctcccatccggggcctcctctcccctcccacccgggacctcttctcccctcccatccggggcctcctctcccctcccatccgggacctcttctcccctcccatccggggcctcctctcccctcccacccgggacctcttctcccctcccatccggggcctcctctcccctcccacccgggacctcttctcccctcccatccggggcctcctctcccctcccacccgggacctcttctcccctcccatccggggcctgctgtcccctcccacccgggacctcttctcccctcccatccggggcctcct

SEQ ID NO: 22692 - DNA, 729 bp, Homo sapiens
  MAP TO AL049542.5; EXPRESSED IN HEART, SIGNAL = 1.8; EXPRESSED IN LUNG, SIGNAL = 1.9; EXPRESSED IN BONE MARROW, SIGNAL = 2.1; EXPRESSED IN FETAL LIVER, SIGNAL = 1.3; EXPRESSED IN HELA, SIGNAL =   2; NT HIT: gi13648149, EVALUE 0.00e+00; SWISSPROT HIT: P27398, EVALUE 3.00e-06; EST_HUMAN HIT: BE244620.1, EVALUE 9.00e-66
aacaaccccgtgccgcgcagccgacgcgaggttcccccccagctgcagccaccggtgcctgaggctgcccagccgtcaccctctgccggctgcaggggagccccccagggctcgggctgggctggggcctcccgcctagcagagttgctgtctggcaagcggctgagtgtgctggaggaagaggccacggagggtggcaccagccgcgtagaggccggcagctccacctcgggcagtgacatcattgacctggccggagacaccgtgcgttacacgcccgccagcccctccagccccgacttcaccacctggtcatgtgccaagtgcacgctcagaaaccccacagtggcccccaggtgctcggcctgcggctgctccaaactgcacggcttccaggagcatggcgagccccccacccactgccccgactgtggggccgacaagcccagcccctgcggcagaagctgcggacgggtgtcctcggcccagaaggccgcccgcgtcctgcccgagcgcccgggccagtgggcctgccctgcctgtaccctgctcaacgcactgcgggccaagcactgcgccgcctgccacacgcctcagctcctggtggcccagcggcggggggccgcgcccctgaggcgcagggagagcatgcacgtggagcagcggcggcagacagacgagggcgaggccaaggcactctgggagaacatcgtggccttctgccgggag

SEQ ID NO: 22693 - DNA, 677 bp, Homo sapiens
  MAP TO Z99757.11; EXPRESSED IN BRAIN, SIGNAL = 1.2; EXPRESSED IN HEART, SIGNAL = 1.5; EXPRESSED IN LUNG, SIGNAL = 1.1; EXPRESSED IN BONE MARROW, SIGNAL = 1.2; EXPRESSED IN HELA, SIGNAL = 0.85; EST_HUMAN HIT: BG820712.1, EVALUE 0.00e+00; NT HIT: gi14777063, EVALUE 0.00e+00; SWISSPROT HIT: P57073, EVALUE 6.00e-78
ggcagacccacgggccgcccaccccgcccaccacccccaagacggagctgcagcaggcgggcgccaagccggagctgaagctggagggacgccggccggtggacagcgggcgccagaacatcgacttcagcaacgtggacatctcggagctcagcagcgaggtcatgggcaccatggacgccttcgacgtccacgagttcgaccagtacctgcccctgggcggccccgccccacccgagccgggccaggcctatgggggcgcctacttccacgccggggcgtcccccgtgtgggcccacaagagtgccccgtcggcctccgcgtcgcccaccgagacgggtcccccacggccgcacatcaagacggagcagccgagccccggccactacggcgaccagccccgaggctcgcccgactacggttcctgcagcggccagtccagcgccaccccggccgcccccgccggccccttcgccggctcacagggcgactatggcgacctgcaggcctccagctactatggtgcctaccctggctacgcacccggcctctaccagtacccctgcttccactcgccgcgccggccctacgcctcacccctgctcaacggcctggccctgccgcccgcccacagccccaccagtcactgggaccagccggtgtacaccaccctgacc

SEQ ID NO: 22694 - DNA, 1776 bp, Homo sapiens
  MAP TO AC005049.2; EXPRESSED IN BRAIN, SIGNAL = 1.1; EXPRESSED IN HELA, SIGNAL = 0.95; EXPRESSED IN FETAL LIVER, SIGNAL = 1.7; EXPRESSED IN LUNG, SIGNAL =   1; EXPRESSED IN BONE MARROW, SIGNAL = 1.3; EST_HUMAN HIT: AW148871.1, EVALUE 0.00e+00; NT HIT: gi13626785, EVALUE 0.00e+00; SWISSPROT HIT: P18537, EVALUE 1.00e-94
ctagaggtgtgtggggttctccaaagaggggtccgtcttagtcatgtgcaagaccacggtgggagccttatagtggcagtgcgtgccacgtccgtagctcccgggggcgcggcaggccttggcccgggcccggccagctgctatcttgcggtagcacaggctctgccaggtctggaaagtcttggagctccacacccagacgccgctggtgatccccaccaccagtgacatgaaaattttgagcatgaagaccgccacggtgggcaccgagccccctggcagcgagcagtccctccggcctccgggccccgcggccgctgcgcatggctgctctgtggcccgaaggcgccagaagtccatgttgaggcgttcgtagacatagcaaacgatgacgcaggtggcgggcaccgtgtagaggatggagaagaccccgatcttgaccatgagcttctccagcttctctgtgttggtgccgcccgtcttcatgatcttgcggatgtggaagagggccacgaagccggtcaggaggaaactactgcccagcaccaggtagccagagaggggcaccagcacgaagcccgtgagcgctgctgcatccgtgctggccacgtagcaaagcccagtcagctcatcacccgccaccttgcgcagggtcaggatgacgatggtcttgagcgcgggcaggccccaggcagccatgtggaaatagctgccgtgggcctcgatggcctcgtggccccatttcttcccggcagccaggaaccaggtgagcgtcaggaccacccaccagagcgagctggccatgccgaagtagtagagcagtaggaagaccagcgtgcagcccgtgttctccaggccctcctggatcacgtagagcgcgcccgcctcctggtcacaggccacgctctgcgctccggccaccgcacggatcaggaaggccagcgagtagacgttgtagcacatggagaggaagatgatggggcgctcggggtactggaagcggtggggctccagcaagaaggtgagcacagtgaaggcggtggagaagaagcacagcgccgaccacacggccatccagaccagcgcgaagtccttgtcgcgccgggaccagaacacctcgacgccgggcccgcagcgcggtgcgcacgagcggctcttctccacgtactggaacttctcggggttctcgcaggtgccactgccgcccgcgcccgggcccaggtctccgggagggcgcgcgggccgcggcgccacgggcagcatgcccaggcccttgtggggctccgcggggccggccgtggcgttctcgggcgcctccatgcacagcgcgtgcgggtcgttgcgcgtgggcagccgggcgcagtcgagcgagtccggccagccgaagttgaactgctccatgatgggcgcgcagcgcaggcgcgcctgctcgcacatgggccggcaggcgggaatgggcgtcgagacctggtcggtgcacatgggcgcgtagagcgagcacaggaagaagcgcaggtggctgtggcagccgtactgcaccagcggcgcgaactccgctagctcggcagccgcctcgccctgcgacgtgtggcccagcaggttgggcatgcgggtcaggttgtagccgatgccgcggcacatggggatctccaccgcctggcacggcgcagccccgcgcccgcgctccgggtcgaagcggccgatctccagtgccgcgccgcccgccgccagcagctgccacagcagcagcgccccccgcagaggcgccacggccat

SEQ ID NO: 22695 - DNA, 570 bp, Homo sapiens
  MAP TO AL132654.12; EXPRESSED IN PLACENTA, SIGNAL = 1.6; EXPRESSED IN HELA, SIGNAL = 2.2; EXPRESSED IN BONE MARROW, SIGNAL = 1.3; EXPRESSED IN HEART, SIGNAL = 1.4; SWISSPROT HIT: P25247, EVALUE 5.50e+00; NT HIT: AB037756.1, EVALUE 1.00e-23; EST_HUMAN HIT: BF801218.1, EVALUE 1.00e-109
catacatcatgctctctaaggactcaggcagcagactttcatcatggttgatggaaatgacatcctgaactttagaaataaagttttcacatgtcacatcaggcaggctgagatgatcatctctgctttctactctcactagattttcaggttcattttcaagggactctgaagtcctactcatttgagaatatgtaagagattcatataacttggagttggtctggtaaaggcaacagagatttcctggtgcctgggtgccagatcttttatgctgggcatagtttctataggcatccaggaaggacagctgggggtcgttcatgatgtaacagtcagtgcggttcagcccatgtttggcagtgccgatgagcaggtctcgatcatgcttcccacactcccaccagactgggaggtagaggctgggcctgcacagctggaggcgttcatgcagctgagggcacttgagcacttgctctcggactttccgtaacagttcaatgcggtacagagttcttgcagcacgttcctcagtgatgggttcaacgtagatggtggtatctgggggac

SEQ ID NO: 22696 - DNA, 1228 bp, Homo sapiens
  MAP TO AL139187.4; EXPRESSED IN LUNG, SIGNAL = 1.3; EXPRESSED IN BRAIN, SIGNAL = 0.91; EXPRESSED IN BONE MARROW, SIGNAL = 0.77; SWISSPROT HIT: Q01643, EVALUE 1.60e-02; NT HIT: gi15301770, EVALUE 0.00e+00; EST_HUMAN HIT: BE275645.1, EVALUE 0.00e+00
atgagcattttccttggtgctctgcagggtgacgactccgatgaggaagatctttgtatcagcaacaaatggactttccaaagaaccagtcgcaggtggtctcgtgtggacgacctctacacgctgctccctcgaggagacagaaatgggtcaccgggaggcacggggatgaggaacacgaccagcagtgagagcgtcctcacagacctgagcgagcctgaggtctgctccattcacagcgaaagcagtggaggcagcgacagtcgcagccagccgggccagtgctgtacagacaacccggtcatgctggatgccccactcgtcagcagcagcctcccacagccccccagagatgtcctcaaccaccccttccaccccaagaatgagaagcccacgagggctagggccaaatcatttttgaaacgcatggaaacactccgagggaagggagcccacgggaggcataaggggtctgggcggacaggtggcctggtgatcagtgggcccatgttgcagcaggagccagagtcctttaaggctatgcagtgcatccaaataccaaatggagatctccagaattcgccgccacctgcctgcagaaaagggctcccatgctctggcaagtcgagtggcgagagcagcccgtcggagcacagcagcagcggggtgagcacgccctgcctgaaggaacgcaagtgccacgaggccaacaagcgcgggggcatgtacttggaggacctagatgtgctggcggggacagcactgccggatgcaggggaccaaagccgtatgcatgaatttcactcccaagagaatttggtggtgcatattcccaaggatcacaaaccaggaacattccccaaggcactttctattgaaagcctctctcccacagatagtagcaatggggttaattggaggaccggtagcatctccctgggcagagagcaggtccctggtgccagggagccccggctcatggcgtcctgccacagagccagccgagtcagtatctatgacaatgtccctggctcccatctgtatgccagcacaggagatcttttggacttggagaaagatgaccttttccctcacttggatgacattctgcagcatgtcaatgggctccaagaggtagtcgatgactggtccaaagatgtcttgcctgaactgcaaactcatgatacattggttggggaacctggcttatccacctttccatctccta

SEQ ID NO: 22697 - DNA, 1194 bp, Homo sapiens
  MAP TO AC010205.5; EXPRESSED IN HELA, SIGNAL = 1.7; EXPRESSED IN BRAIN, SIGNAL = 1.5; EXPRESSED IN BONE MARROW, SIGNAL = 1.4; EXPRESSED IN FETAL LIVER, SIGNAL = 1.1; EXPRESSED IN LUNG, SIGNAL = 1.9; NT HIT: gi14766988, EVALUE 0.00e+00; EST_HUMAN HIT: AI499228.1, EVALUE 0.00e+00; SWISSPROT HIT: P36166, EVALUE 4.00e-01
atgtttctgttttttcctctagatcattttcatgaattgtataaagtgatccttctcccaaaccagactcactatattattccaaaaggtgaatgcctgccttatttcagctttgcagaagtagccaaaagaggagttgaaggtgcctatagtgacaatccaataattcgacatgcttctattgccaacaagtggaaaaccatccacctcataatgcacagtggaatgaatgccaccacaatacattttaatctcacgtttcaaaatacaaacgatgaagagttcaaaatgcagataacagtggaggtggacacaagggagggaccaaaactgaattctacagcccagaagggttacgaaaatttagttagtcccataacacttcttccagaggcggaaatcctttttgaggatattcccaaagaaaaacgcttcccgaagtttaagagacatgatgttaactcaacaaggagagcccaggaagaggtgaaaattcccctggtaaatatttcactccttccaaaagacgcccagttgagtctcaataccttggatttgcaactggaacatggagacatcactttgaaaggatacaatttgtccaagtcagccttgctgagatcatttctgatgaactcacagcatgctaaaataaaaaatcaagctataataacagatgaaacaaatgacagtttggtggctccacaggaaaaacaggttcataaaagcatcttgccaaacagcttaggagtgtctgaaagattgcagaggttgacttttcctgcagtgagtgtaaaagtgaatggtcatgaccagggtcagaatccacccctggacttggagaccacagcaagatttagagtggaaactcacacccaaaaaaccataggcggaaatgtgacaaaagaaaagcccccatctctgattgttccactggaaagccagatgacaaaagaaaagaaaatcacagggaaagaaaaagagaacagtagaatggaggaaaatgctgaaaatcacataggcgttactgaagtgttacttggaagaaagctgcagcattacacagatagttacttgggctttttgccatgggagaaaaaaaagtatttccaagatcttctcgacgtaagtaacatccagcctcattctttctcatgctcaggaagagtaaataatctcatgataatatcatta

SEQ ID NO: 22698 - DNA, 764 bp, Homo sapiens
  MAP TO Z98883.3; EXPRESSED IN HEART, SIGNAL = 1.3; EXPRESSED IN BONE MARROW, SIGNAL = 1.4; EXPRESSED IN BRAIN, SIGNAL = 1.1; EXPRESSED IN HELA, SIGNAL = 0.36; EST_HUMAN HIT: BI092779.1, EVALUE 4.30e+00; NT HIT: AF418272.1, EVALUE 1.90e-01; SWISSPROT HIT: P20481, EVALUE 1.40e-01
ctgattcctgcctgagaggagccgccaggtcagctgatgccagcaggacccacttcaccaggtcagcaaggaggaggcagcttcccttggggccacgccgtgcctcctccgtgtgcgctgctgccatggctgcttctgtcgataggcatgtacgtgaaaatgcacacccgtgggtgttcgctactgtcagcgtggattcagcaaggttttgttccctcgtggcatcagtcagcgtggattcagcaaggttttgttacctcgtggcattaatcagcgtggattcagcaaggttttgttcccttgtggcatcagtcagcgtggattcgcaaggttttgttccctcgtggcatcagtcagcgtggattcgcaaggttttgttccctcgtggcatcagtcagcgtggattcgcaaggttttgttccctcgtggcatcagtcagcgtggattcgcaaggttttgttccctcgtggcatcagtcagcgtggattcgcaaggttttgttccctcgtggcatcagtcagcgtggattcgcaaggttttgttccctcgtggcatcagtcagcgtggattcgcaaggttttgttccctcgtggcatcagtcagcgtggattcgcaaggttttgttccctcgtggcatcagtcagcgtggattcgcaaggttttgttccctcgtggcatcagtcagcgtggatttgcaaagttttgttcccttgtggcatcatactcctttcctgtttggtttgggactcccatggcccccttga

SEQ ID NO: 22699 - DNA, 542 bp, Homo sapiens
  MAP TO AP000406.1; EXPRESSED IN LUNG, SIGNAL = 1.3; EXPRESSED IN FETAL LIVER, SIGNAL = 1.1; EXPRESSED IN BONE MARROW, SIGNAL =   1; EXPRESSED IN HELA, SIGNAL = 1.6; SWISSPROT HIT: O15230, EVALUE 4.50e-01; EST_HUMAN HIT: AA029509.1, EVALUE 1.00e-127; NT HIT: gi14784891, EVALUE 0.00e+00
gtgctgtccagtggcttggccccagagcctggcagtgggggtagcttgaccactccaggaggcggcatgttcttgcgggtcactggcagctgtaggggcccagtgctgccattgaccacggctgccttaacactcatcaccaagacacactggggacaggagcagggggacatggggggcgaggtggctggcccagggctgactggccaggactgagccttaggcaaggtccctgtgaccatggggtagatgaggtcgaggcgccggcggacgcggcgttggcgctgggtctgacggttgatctggcccatggtgttgaagtcaattacgtagctaaagccaatggaagtgaggtcgatccaggggtgctgcttctcataggcatgctggatggtgatgcccacttccatgtcgtagggcgtccaggagccattgtcgttctcccactcccacaccacgcccttcccaggggccgaggaggggtcgtagtagttgcggcgaactgggcggagagttcctgccagggtgggataggggagagg

SEQ ID NO: 22700 - DNA, 883 bp, Homo sapiens
  MAP TO AL049734.11; EXPRESSED IN FETAL LIVER, SIGNAL = 1.3; EXPRESSED IN BRAIN, SIGNAL = 1.2; EXPRESSED IN LUNG, SIGNAL = 1.2; EXPRESSED IN BONE MARROW, SIGNAL = 1.2; SWISSPROT HIT: Q9NQN1, EVALUE 2.00e-65; NT HIT: AF262707.1, EVALUE 9.00e-04
tggcatttctaactatcctcaatggagagacacgtttttcacattagtgctgataatttacctcagcacattgttggggaatggatttatgatctttcttattcactttgaccccaacctccacactccaatctacttcttccttagtaacctgtctttcttagacctttgttatggaacagcttccatgccccaggctttggtgcattgtttctctacccatccctacctctcttatccccgatgtttggctcaaacgagtgtctccttggctttggccacagcagagtgcctcctactggctgccatggcctatgaccgtgtggttgctatcagcaatcccctgcgttattcagtggttatgaatggcccagtatgtgtctgcttggttgctacctcatgggggacatcacttgtgctcactgccatgctcatcctatccctgaggcttcacttctgtggggctaatgtcatcaaccattttgcctgtgagattctctccctcattaagctgacctgttctgataccagcctcaatgaatttatgatcctcatcaccagtatcttcaccctgctgctaccatttgggtttgttctcctctcctacatacgaattgctatggctatcataaggattcgctcactccagggcaggctcaaggcctttaccacatgtggctctcacctgaccgtggtgacaatcttctatgggtcagccatctccatgtatatgaaaactcagtccaagtcctaccctgaccaggacaagtttatctcagtgttttatggagctttgacacccatgttgaaccccctgatatatagcctgagaaaaaaagatgttaaacgggcaataaggaaagttatgttgaaaaggacatga

SEQ ID NO: 22701 - DNA, 1511 bp, Homo sapiens
  MAP TO AC012313.5; EXPRESSED IN LUNG, SIGNAL =   1; EXPRESSED IN BONE MARROW, SIGNAL = 1.1; EXPRESSED IN FETAL LIVER, SIGNAL = 1.4; EXPRESSED IN PLACENTA, SIGNAL = 1.9; EXPRESSED IN BRAIN, SIGNAL = 1.2; SWISSPROT HIT: P51523, EVALUE 0.00e+00; EST_HUMAN HIT: AW572299.1, EVALUE 0.00e+00; NT HIT: AF064790.1, EVALUE 0.00e+00
gtcacaggcgcgagatggagtccccaagagggtggaccctgcaggtggccccagaggaaggccaggtcctctgcaatgtgaagactgccacgaggggcctctctgagggggctgtgtctggaggctggggggcctgggaaaactccacggaggttccgagggaggcaggggacggccagcggcagcaagccacactgggggcggcggacgaacagggaggccccggcagggagctgggccccgcagacggtgggcgggacggggctgggcccaggagcgagcctgcagaccgggcgttgcgcccttcgcctctcccagaggagccgggctgccggtgcggggagtgcggcaaggcgttcagccagggctcttacttgctgcagcatcggcgcgtgcacacaggcgagaagccgtacacgtgccccgagtgcggcaaggccttcgcctggagctccaacctcagccagcaccagcgcatccacagcggcgagaagccctacgcttgcagggagtgcggcaaggccttccgcgcgcactcgcagctcatccaccaccaggagacacacagcggcctgaagcccttccgctgcccggactgcggcaagtccttcggccgaagcaccacgctggtgcagcaccgacgcacgcacacgggcgagaagccctacgagtgcccggagtgcggcaaggccttcagctggaactccaatttcctggagcaccggcgcgtgcacacgggcgcgcggccgcacgcctgccgggactgtggcaaggccttcagccagagctccaacctggccgagcacctgaagatccacgcgggcgcacggccacacgcctgtcccgactgcggcaaggccttcgtgcgtgtggcggggctgcggcagcaccggcgcacgcacagcagcgagaagcccttcccctgcgccgagtgcggaaaggctttccgcgagagctcgcagctcctgcagcaccagcgcacgcacactggtgagcggcccttcgagtgcgccgagtgcggccaggctttcgtcatgggctcctacctggcggagcaccggcgcgtgcacacgggcgagaagcctcatgcgtgcgcccagtgcggcaaggccttcagccagcgctccaacctactgagccaccggcgcacgcactcgggcgccaagcccttcgcctgcgccgactgcggcaaggccttccgcggcagttccggcctggcgcaccaccggctttcgcacacgggagagcgacccttcgcctgcgcagaatgcggcaaggccttccgcggcagctccgagctgcgccagcaccagcgcctgcactctggcgagaggccgttcgtctgcgcccactgcagcaaggccttcgtgcgcaagtcggagctcttaagccaccggcgcacgcacacgggcgagaggccctacgcttgcggcgagtgcgggaagcctttcagccaccgttgcaacctcaacgagcaccagaagcggcacgggggccgcgctgcgccctga

SEQ ID NO: 22702 - DNA, 734 bp, Homo sapiens
  MAP TO AL163303.2; EXPRESSED IN HELA, SIGNAL = 0.97; EXPRESSED IN LUNG, SIGNAL = 0.95; EXPRESSED IN BONE MARROW, SIGNAL =   1; SWISSPROT HIT: Q99102, EVALUE 2.00e-20; EST_HUMAN HIT: BG948920.1, EVALUE 4.10e+00; NT HIT: AL163303.2, EVALUE 0.00e+00
gcgtccttggctccgcccgggccatgcggagctgggtcccatgcagctccatgaccgggggctccgacacctcttttctgctcctgctgggtctaggtgtaattccagtgctgggggaagaagttaccctcagataaacggtcggtgtaattccagtgctgggggaagaagttaccctcagataaaccgtcggtgtaattccagtgctgggggaagaagttaccctcagataaaccgtcggtgtaattccagtgctgggggaagaagttactctcagataaaccgtcggtgtaattccagtgctggaggaagaagttactctcagataaacggtcggtgtaattccagtgctgggggaagaagttaccctcagataaaccattggtgtaattccagtgctgggggaagaagttaccctcagataaaccgtcggtgtaattccagtgctggaggaagaagttaccctcagataaaccactggtgtaattccagtgctggaggaagaagttactctcagataaactgtcggtgtaattccagtgctggaggaagaagttactctcagataaacggtcggtgtaattccagtgctgggggaagaagttaccctcagataaaccattggtgtaattccagtgctgagggaagaagttaccctcagataaaccactggtgtaattccagtgctggaggaagaagttactctcagataaaccgtcggtgtaattccagtg

SEQ ID NO: 22703 - DNA, 1231 bp, Homo sapiens
  MAP TO AC016572.4; EXPRESSED IN HELA, SIGNAL = 1.6; EXPRESSED IN BONE MARROW, SIGNAL = 1.1; EXPRESSED IN FETAL LIVER, SIGNAL = 0.93; SWISSPROT HIT: P17038, EVALUE 0.00e+00; EST_HUMAN HIT: AI879243.1, EVALUE 0.00e+00; NT HIT: gi14729266, EVALUE 0.00e+00
ccttaaaaatcacaaaggaatccaccttggggagaagccctataaatgtagctattgtgagaaatccttcaactacagctctgcccttgaacagcataaaaggattcataccagggaaaaaccctttgggtgtgatgagtgtggtaaagctttcagaaataattctggccttaaagtacataaacgaatccacactggggaacgaccttacaaatgtgaagaatgtgggaaagcatacatctctctctcgagccttataaatcataaaagtgtacaccctggggagaagccctttaagtgtgacgagtgtgagaaggccttcatcacataccgaacccttacaaaccacaaaaaagttcatcttggggagaagccctacaaatgtgatgtgtgtgagaaatcttttaattacacatcgctcctttctcagcacagaagggtccacactagagagaaaccctatgaatgtgacaggtgtgagaaggtcttcagaaacaactcaagccttaaagttcataaaagaatccatactggggagaggccctatgaatgtgatgtgtgtggaaaagcctacatctcacactcaagccttattaaccataagagtacccaccctggcaagacaccccatacatgtgatgaatgtggaaaagcttttttctcaagcagaactcttataagccataaaagagtccatcttggggagaaacccttcaagtgtgttgagtgtgggaaatctttcagttacagctctctcctttctcagcacaagaggatccacacaggggagaaaccctatgtgtgtgataggtgtgggaaggccttcaggaacagctcaggcctcacagtgcataaaaggatccacacaggtgagaaaccctatgaatgtgatgagtgtgggaaggcatacatctcacactcaagtcttatcaatcataaaagtgtccaccaggggaagcagccctataattgtgagtgtgggaaatccttcaattatagatcagtccttgaccagcacaaaaggatccacactggaaagaagccataccgatgtaatgagtgtggtaaggcttttaatatcagatcaaatctcaccaagcataaaagaacccatactggagaggaatctttaaatgtgatatatgtgggaagttatagtggcacatcccagaagagaacctatgagggagggaatgccctggatgggggcaggatgaggatgcctctgtag

SEQ ID NO: 22704 - DNA, 686 bp, Homo sapiens
  MAP TO AL132795.12; EXPRESSED IN HELA, SIGNAL =   2; EXPRESSED IN BRAIN, SIGNAL = 0.87; EXPRESSED IN HEART, SIGNAL = 1.2; EXPRESSED IN LUNG, SIGNAL =   1; EXPRESSED IN BONE MARROW, SIGNAL = 1.1; EXPRESSED IN FETAL LIVER, SIGNAL = 1.2; SWISSPROT HIT: Q16643, EVALUE 1.70e+00; EST_HUMAN HIT: BG717128.1, EVALUE 0.00e+00; NT HIT: AF220542.1, EVALUE 4.20e-02
atggaggactcaacctccccgaagcaagaaaaagaaaaccaagaagaactaggggaaacaaggcggccatgggaaggaaagacagcagcttctccccaatattctgagcctgagtcgtctgagcccttggaggcgaagcaggggccagaaactggacgccagtcccgaagcagccgtccttggagcccgcagtctagagccaagacgcctctgggtggccccgcgggaccagaaacatcatcacctgctcctgtctctccgcgggagccctcttcctctccttctcccctggctccggccagacaagacctcgcggcaccacctcagtcggacaggaccacgagtgtgattcctgaagctgggacaccttatcctgatcctttggaacaatcatctgataaaagagaatcaactcctcatcacacaagccagtcagaaggaaacacctttcaacagtctcagcaacccaaaccccacctgtgtggacgaagggacgtgagctataacaacgctaaacagaaagagctgagatttgacgtttttcaggaggaagactcaaacagtgactatgatttacagcagccggcgcctgggggctctgaagtggcccccagcatgcttgagatcaccattcagaatgctaaggcttacctgctgaagactagcagcaattcgggctttaatct

SEQ ID NO: 22705 - DNA, 467 bp, Homo sapiens
  MAP TO AC022085.4; EXPRESSED IN HEART, SIGNAL = 1.7; EXPRESSED IN BONE MARROW, SIGNAL = 0.83; EXPRESSED IN BRAIN, SIGNAL =   1; NT HIT: gi11968022, EVALUE 0.00e+00; SWISSPROT HIT: P54049, EVALUE 4.80e-01; EST_HUMAN HIT: BI862240.1, EVALUE 0.00e+00
ctgggtaagcctttgcccagctcttgctttttcttggttacttgctgaatgacctgttcccagttgacatttctccgagatgcatttagaatctgccgtagggttggcttgagcccagactccttctctgtctcactctttcggtgaccgctaatattgcgaatgcggcgggcactattgaggtttggctcaggaaggtgtactccagttttgctcttcaaactaatgtgccgggttagatccctctgaagtgaggcaggaaagccaagcttacttagttcaggcaggagagggcccgagggctgactgatgtcacttttttgaagctctgcatccaagctagcactctcaaagccttctgtttcataagatacatgagatttaatagagtcatcaacctgtgcatcttctagagaggttttcaagtctagcaataagccagggtgtggactggctgcagatgtcat

SEQ ID NO: 22706 - DNA, 609 bp, Homo sapiens
  MAP TO AL121963.10; EXPRESSED IN HELA, SIGNAL = 1.2; EXPRESSED IN BONE MARROW, SIGNAL = 0.83; SWISSPROT HIT: Q03692, EVALUE 1.00e-15; NT HIT: gi13642313, EVALUE 0.00e+00; EST_HUMAN HIT: BI522315.1, EVALUE 8.00e-29
tcctgggaagccaggtctgactggaccccctgggaatatgggaccccaaggaccaaaaggcatcccgggtagccatggtctcccaggccctaaaggtgagacagggccagctgggcctgcaggataccctggggctaagggtgaaaggggttcccctgggtcagatggaaaaccagggtacccaggaaaaccaggtctcgatggtcctaagggtaacccagggttaccaggtccaaaaggtgatcctggagttggaggacctcctggtctcccaggccctgtgggcccagcaggagcaaagggaatgcccggacacaatggagaggctggcccaagaggtgcccctggaataccaggtactagaggccctattgggccaccaggcattccaggattccctgggtctaaaggggatccaggaagtcccggtcctcctggcccagctggcatagcaactaagggcctcaatggacccaccgggccaccagggcctccaggtccaagaggccactctggagagcctggtcttccagggccccctgggcctccaggcccaccaggtcaagcagtcatgcctgagggttttataaaggcaggccaaaggcccag

SEQ ID NO: 22707 - DNA, 1171 bp, Homo sapiens
  MAP TO AC009000.5; EXPRESSED IN HELA, SIGNAL = 0.91; EXPRESSED IN HEART, SIGNAL =   2; EXPRESSED IN LUNG, SIGNAL = 1.3; EXPRESSED IN BONE MARROW, SIGNAL =   1; SWISSPROT HIT: P02460, EVALUE 5.10e-01; NT HIT: gi14759847, EVALUE 0.00e+00; EST_HUMAN HIT: BG333679.1, EVALUE 0.00e+00
ctgctgctccatcgcagcttcgctctgtgatgctaatcttcttcaccatatggacgttgctggtagctgcagcgggcactgggcacattgtctccaccacctcctggctgcggaacacaggtgggctctcaggcctaccaggcattgccagggccctcagccctgtgccgtaaggctccaggctctgggcccgctgtgcgggggcgccagcggctgtgctggccaccacctccacctcccgtggcccttctaccacccggactgtatccacgcggaccgggctgtccggcggtggccaggcctggggctgggggtcagcctgccgggcctgagctgcctgcagctcctgcagcgccttcttgagctgggtctccagcacagcgaccttggcggcgagggcagcctccccatcaggcatgcccaagtcccgttctcgaacccaggtgcccacactccgggtctccagtgccactgggtcctctgggggatcggggaggtccaggcagagctcgctgcgaccccggcccgctgtggggtggcccaggaacttctggctcttaagttgtactgtgagctgccgcttttcctcctggagcaccgagagcttcacctggagcacagggatcagcttcacctgctcctccagctgccgcagcttccgcagggcacccgccatctgctcccgcacgtgggccaggtgcccggcactgggaggcaccggtgtggacagtcctgaactccgtggtgtcgggggtggcaaccccacgcccaccagggaggctgtcgagccggccgcactgggggtcagggagcccaggccggtgggtgtggccgcctggtcctcgagacggcgacgggcatccagcagcgtgcgctccacccgcggattgaagccaccgcgggtctccagagcaccatactgagggtagaagccacggccgcagtaggaataggctgagtggcggctgtccccactggcattggagcacagcgactcagtggacgtccaccaggagccagggccacggggcagcgagctcaggcgggggcggcgctgcactgccacgcgtcgcagcgtgtggcccttctcgatgtcatccacgtacttgaggaagtccaggtccaggcggtagccatagggggtctccacggagtagggtggatcggggtc

SEQ ID NO: 22708 - DNA, 1142 bp, Homo sapiens
  MAP TO AL035214.2; EXPRESSED IN PLACENTA, SIGNAL = 2.2; EXPRESSED IN HELA, SIGNAL = 1.5; EXPRESSED IN BONE MARROW, SIGNAL = 2.4; EXPRESSED IN LUNG, SIGNAL = 2.2; EXPRESSED IN HEART, SIGNAL = 2.7; EXPRESSED IN FETAL LIVER, SIGNAL = 2.1; SWISSPROT HIT: Q13563, EVALUE 8.60e-01; NT HIT: AF063606.1, EVALUE 0.00e+00; EST_HUMAN HIT: AL568222.1, EVALUE 0.00e+00
gtctgcgcgtctgttgttcccagcgctctgagaggcctgaaaaggaagagcaacctgtccagaatccccgcaggtccgtgaaagcagggggctgcatggacaggggcccacaagggttgagagtgtggagggcacagtcagggccgaattggggcccctgcccatccccttacctacatgaacacacaccttaccaggctgaaccagtgcagagaaggtggcagggcctgccagggaacagctggctcacgtgtgtgggaggagtggtgggctacgtggtgggcagaaggccctcttggaggcccagtcagcttaggggaaccctcaccaggggtgagatgcaagtagtatccagacctgcattccaccccatgccctcagtctcccatgtctcctctttgtctcctcttccctccacacccatcccccaggaaaggaaaaggaggggaaatctcgacatggaaaaactcttcaatgaaaatgaaggaatgccttcgaatcaaggaaagatagacaatgaagaacagccaccgcacgagggaaagccagaagtagcttgtattctggaagacaagaagttagaaaacgagggaaacacagaaaacacgggcaagagagttgaggaaccgttaaaggataaagaaaagccagagagtgcgggaaaggcaaaaggagaaggaaagtcagagaggaagggaaagtcagagatgcagggaggatcaaagacagagggaaagccagagagagggggaagggcagagggtgaaggagagccagacagtgaaagagagccagagagtgagggagagccagaaagtgaaacaagggctgcaggaaagcgcccagctgaggatgatatacccaggaaagccaaaagaaaaaccaacaaggggctggctcagtacctcaagcaatataaggaagccatacatgatatgaatttcagcaatgaggacatgataagagaatttgacaacatggctagggtggaggataaaaggagaaaaagcaaacagaaattgggggcgtttttgtggatgcaaagaaatttacaggaccccttctatcctaggggtccaagggaattcaggggtggctgcagggccccacgaagggacactgaagacattccttatgtgtag

SEQ ID NO: 22709 - DNA, 549 bp, Homo sapiens
  MAP TO AC007262.4; EXPRESSED IN BRAIN, SIGNAL =   1; EXPRESSED IN HELA, SIGNAL = 2.5; EXPRESSED IN BONE MARROW, SIGNAL = 1.2; EXPRESSED IN LUNG, SIGNAL = 0.94; SWISSPROT HIT: P16473, EVALUE 2.00e-07; NT HIT: M73747.1, EVALUE 8.00e-31; EST_HUMAN HIT: BG997748.1, EVALUE 1.00e-30
cttccagaaactagaatggcgtagaaaggttctccaggagcctggcgaagtttggcaagtgaaggacattttagaaatactcattaaatgaaatcctttaatccttttatcctgaccttcttaaaggtccatgcatgtagaaaactctagttgttgtggacaaagtgttgcagattcgggagaagcctctcaaatccatctgcctaccccaagatgaggattaagtcagggacctccacccacacctaaagctctcacttaccccacatttgggctccaggtgcatgtcatctaggacagctctcaccacctcaccagacctctgagccactagcggttaagaagggtcagtgaaacttaaaaagaaataagattaagctatattgtgtcctgttatttaagtgcatatgcgcagcaagacccctgctgcagaaggaaagcattttttcattaagtgtttttgtccctctctcttgcagtgaaattacagacaacccttacatgacgtcaatccctgtgaatgcttttcagggactatgcaatgaaacc

SEQ ID NO: 22710 - DNA, 1452 bp, Homo sapiens
  MAP TO AC005261.1; EXPRESSED IN BRAIN, SIGNAL = 1.1; EXPRESSED IN HELA, SIGNAL = 1.2; EXPRESSED IN BONE MARROW, SIGNAL =   1; EXPRESSED IN FETAL LIVER, SIGNAL = 1.1; NT HIT: gi11426566, EVALUE 0.00e+00; EST_HUMAN HIT: BG249309.1, EVALUE 0.00e+00; SWISSPROT HIT: O43296, EVALUE 0.00e+00
gtgacaacacaaaacccaagaccacagagcctaccttttctcacctggccttgcctgaggaagtcttactccaggaacaactgacacaaggagcctcaaagaactcccaattagggcaatccaaggatcaggatgggccatctgaaatgcaagaagtccacttgaaaatagggataggcccccagcgggggaagctgctggagaaaatgagttctgaacgtgatggtttggggtcagatgatggtgtatgtacaaagattacacagaaacaagtttcaacagaaggtgatctctatgaatgtgattcacatggaccagttacagatgccttgattcgcgaagagaaaaattcctataaatgtgaggaatgcgggaaagtgtttaaaaagaatgccctccttgttcagcatgaacggattcacactcaagtgaagccctatgaatgcacagagtgtgggaaaacctttagcaagagcactcatcttcttcagcacctcatcatccacactggggagaagccctataagtgcatggagtgtgggaaggcttttaaccgcaggtcacacctcacacggcaccagcggattcacagtggagagaagccttataagtgcagtgaatgtggaaaggccttcacccaccgctccacttttgtcttgcatcacaggagccacactggagaaaaaccctttgtgtgcaaagagtgtggcaaagcctttcgagataggccaggtttcattcgacactacatcatccacacgggagagaagccctatgagtgcattgagtgtgggaaggccttcaaccgccggtcatacctcacgtggcaccaacagattcacactggagtgaaaccctttgaatgcaacgagtgtggaaaagctttttgcgagagtgcagacctcattcaacactacattatccacactggggagaagccctataagtgcatggagtgtgggaaggcgttcaaccgtaggtcacacctcaagcagcatcaacggattcacactggggagaagccttatgaatgcagtgaatgtggaaaggccttcacccactgctccacttttgtcttgcataaaaggacccacacaggagaaaaaccctatgaatgcaaagaatgtggaaaagcctttagtgatagggcagacctcattcgccacttcagcatccacactggagagaaaccctatgagtgcgtggagtgtggaaaggccttcaaccgcagctcacacctcacgaggcaccaacagattcacactggagagaaaccctatgaatgcatccagtgtgggaaagccttttgccggagcgcaaaccttattcgacactccatcattcacactggagagaagccgtatgaatgcagtgagtgtggaaaggcttttaatcgcggctcatccctcacacatcatcaaaggattcatactgggagaaaccctaccattg

SEQ ID NO: 22711 - DNA, 960 bp, Homo sapiens
  MAP TO AL132986.2; EXPRESSED IN BRAIN, SIGNAL = 1.7; EXPRESSED IN HELA, SIGNAL = 1.2; EXPRESSED IN BONE MARROW, SIGNAL = 1.2; EXPRESSED IN LUNG, SIGNAL = 3.6; SWISSPROT HIT: Q07352, EVALUE 0.00e+00; NT HIT: gi15812179, EVALUE 0.00e+00; EST_HUMAN HIT: BG818519.1, EVALUE 0.00e+00
ggtaacaagatgctcaactatagtgctcccagtgcagggggttgcctgctggacagaaaggcagtgggcacccctgctggtgggggcttccctcggaggcactcagtcaccctgcccagctccaagttccaccagaaccagctcctcagcagcctcaagggtgagccagcccccgctctgagctcgcgagacagccgcttccgagaccgctccttctcggaagggggcgagcggctgctgcccacccagaagcagcccgggggcggccaggtcaactccagccgctacaagacggagctgtgccgcccctttgaggaaaacggtgcctgtaagtacggggacaagtgccagttcgcacacggcatccacgagctccgcagcctgacccgccaccccaagtacaagacggagctgtgccgcaccttccacaccatcggcttttgcccctacgggccccgctgccacttcatccacaacgctgaagagcgccgtgccctggccggggcccgggacctctccgctgaccgtccccgcctccagcatagctttagctttgctgggtttcccagtgccgctgccaccgccgctgccaccgggctgctggacagccccacgtccatcaccccaccccctattctgagcgccgatgacctcctgggctcacctaccctgcccgatggcaccaataacccttttgccttctccagccaggagctggcaagcctctttgcccctagcatggggctgcccgggggtggctccccgaccaccttcctcttccggcccatgtccgagtcccctcacatgtttgactctccccccagccctcaggattctctctcggaccaggagggctacctgagcagctccagcagcagccacagtggctcagactccccgaccttggacaactcaagacgcctgcccatcttcagcagactttccatctcagatgactaa

SEQ ID NO: 22712 - DNA, 882 bp, Homo sapiens
  MAP TO AP000538.1; EXPRESSED IN BRAIN, SIGNAL = 1.1; EXPRESSED IN BONE MARROW, SIGNAL = 0.85; SWISSPROT HIT: O60583, EVALUE 3.10e-02; NT HIT: AL163202.2, EVALUE 0.00e+00; EST_HUMAN HIT: BG009093.1, EVALUE 1.00e-40
gtgagggacaaacacactgaacccagcagcattgttttggaatcccatgtgaggcagaaacactcagaactcagcagcagtgttctggaatcctatgtgagtgaaaaacactcagaacccagcagcagtgttctagaatcctttgtgggcaaaaaaccttcagaccctagaatcagtgttctggaatcctatgtgatgaacaaacactcagaacccagcagcagtgtttttgattcctttgttttggagaaacattcagaccattgtagcactgttccactatcctatgtgagggacaaactctcagaacccagtagcagtgctctagaatcctatgtgagggacaaacactcagaacccagcagcagggttctggaatcctatgtgagggtcaaacactcagaaggcagcagcagtgttctggaatcctatgtgagggagaaacactcagaacccagtcactgtgtgctggaatcctatgtgagggagaaacattcagaacccagtcactgtgtgctggaatcctatctcaaggacaaacattcagaccattgtagcactgttccgctatcctatgtgagggacaaactctcagaacccagtagcagtgctctagaatcctatgtgagggacaaacactcagaacccagcagcagggctctggaatcctatgtgagggtcaaacactcagaaggcagcagcagtattctggaatcctatgtgagggagaaacattcagaacccagtcactgtgtgctggaatcctatgtgagggagaaacactcacaactcagtcactgtgtgctggaatcctatctgagggacaaacattcagacatgtgtagaagtgtcctggaatcctatgtgagggacaaacactga

SEQ ID NO: 22713 - DNA, 530 bp, Homo sapiens
  MAP TO U51559.1; EXPRESSED IN LUNG, SIGNAL = 1.1; EXPRESSED IN BONE MARROW, SIGNAL = 1.2; EXPRESSED IN FETAL LIVER, SIGNAL = 1.4; EXPRESSED IN HELA, SIGNAL = 0.68; EXPRESSED IN HEART, SIGNAL = 1.5; SWISSPROT HIT: Q02788, EVALUE 7.00e-12; EST_HUMAN HIT: BF974765.1, EVALUE 1.90e-01
ggcaccagggtctggggtcccccccgcctctcctgggatacacttgcctcaccctcacccacacactgaaacaccctccttgccctgtgttactgaagcaaggcccttcaaagggcctcagtttctcagggcagctttccaggtgcgccacacccctctgagtaaccccgtctgggtgccccaccctcaggtaccccacacccccctgggtgccccaccctcgggaccctcccttgggagcacttggctttccactgccttgtgctgtctgctgacggggtgtggggtgtgcccctgtccccacgggtgtgaggtgtgcccctgtccccgcgggtgtggggtgtgcccctgtccccgcgggtgtggggtgtgcccctgtccccgcgggtgtggggtgtgcccctgtccccgcgggtgtggggtgtgcccctgtccccgcgggtgtggggtgtgcccctgtccccgcgggtgtgggggttgcccctgtccccgcgggtgtggggtgtgcccctgtccccgcgggtgtgggg

SEQ ID NO: 22714 - DNA, 706 bp, Homo sapiens
  MAP TO AL158175.6; EXPRESSED IN HEART, SIGNAL = 2.3; EXPRESSED IN BONE MARROW, SIGNAL = 2.3; EXPRESSED IN HELA, SIGNAL =  12; EXPRESSED IN BRAIN, SIGNAL =   2; NT HIT: gi4557887, EVALUE 0.00e+00; SWISSPROT HIT: P05783, EVALUE 2.00e-97; EST_HUMAN HIT: BG823362.1, EVALUE 0.00e+00
ctccatggtcaacccagagttggtaatctgggcttgtaggccttttatttcctctttgtggttcttcttcatgaagagcagctcctccttgagagccttgatctgtctccagctgcagccgagtgacattcgtgtcatcaatgaccttgcagagcccatggaggtagctctctacagattggagcatggccagctctgtctcatacttgactctaaagtcatcagcagcaagatgggcattgtcaatctgcagaacgatgtgggcattgtccacagtatttgcaaagatctgagccctcaggtcctctatggtcttgaagtaatgcccccagtctctgacctggggtcccttcttctccaattgctcacagattttgctctccagcctctggttcttggtctccaggctcctcactctgtccaggtaggagatcaggtggtcattcaggctttgcctggtctccttcttgttctggatgccttccattcctgccagactctcagccatccccacagccagagctctggacaccatgccgcccccgaagctggtggagtgggacatggagatcagggaaccagaggccccagcaccttcatagacgctggccttgctgctgaccagccgggcaccatagcttggcatctggacagagcccagggaccagtagttggtggagaaggtggagcgagtggtgaagctcat

SEQ ID NO: 22715 - DNA, 694 bp, Homo sapiens
  MAP TO AL121929.17; EXPRESSED IN HELA, SIGNAL =   2; EXPRESSED IN BONE MARROW, SIGNAL = 1.1; NT HIT: gi14746644, EVALUE 0.00e+00; SWISSPROT HIT: P29503, EVALUE 3.00e-10; EST_HUMAN HIT: AW340823.1, EVALUE 0.00e+00
atagcgagctggtgctcccggactgtctgcggccgcgctccttcaccgccctgcggcggccgtcgctgcggcgcgaggcggacgacgcgcgcctctcggtgagcctatgcgacctcaacgtgccgggcgcggacggcgacgaggccgcgccggccgccggctgccccatcccgcagaactcactcaactcgcagcacagccgcgcgctgccggcgcagctcgacggcgacctgcgtttccacgccctgcgcgccggcgcgcacgtccgcatcctcgacgagcagacggtggcgcgcgtggagcacgggcgcgacgagcgcgcgctcgtcttcaccagccggcccgtgcgcgtggccgagaccatcttcgtcaaggtcacgcgctcgggtggcgcgcggcccggcgcgctgtcgttcggcgtcaccacgtgcgaccccggcacgctgcggccggccgacctgcctttcagccctgaggccctggtggaccgcaaggaattctgggccgtgtgccgcgtgcccgggcccctgcacagcggcgacatcctgggcctggtggtcaacgccgacggcgagctgcacctcagccacaatggcgcggccgccggcatgcagctgtgcgtggacgcctcgcagccgctttggatgctcttcggcctgcacgggaccatcacgcagatccgcatcctcggtga

SEQ ID NO: 22716 - DNA, 1070 bp, Homo sapiens
  MAP TO AC011311.11; EXPRESSED IN BRAIN, SIGNAL = 1.2; EXPRESSED IN HELA, SIGNAL = 4.7; EXPRESSED IN LUNG, SIGNAL = 1.1; EXPRESSED IN HEART, SIGNAL = 1.7; EXPRESSED IN BONE MARROW, SIGNAL = 1.3; NT HIT: gi8923089, EVALUE 6.60e-02; SWISSPROT HIT: Q9Y2M5, EVALUE 2.00e-40; EST_HUMAN HIT: BI559446.1, EVALUE 9.80e-02
ctataaatttcaacattcttgttcttttgtctagagagtttagaggcacttgcttctccagccacaattatagtattattttccatgacaacaccagtacacacagttcctaaaccctctccgtacttgggagatgagatgaaataggttttccgtgatacaggatcataacaaaaactggcatccccatagctcctatgtcttgatctgattcctgaagaattgttgccaatgcaaagcagaagactggtagtctccataccatagcgcagatttagagagtgctgttggggtgtcttgatggctttgaatgcattttgaattatgtcaacacaatctgcatcacacagaagcattgtgttccttcttagggcttgtcttaaaaaagaaggatttacaagttccaatctgacttgcttcaaaagctcaacaagatgcactgtacgcaattctttgttatgatttacccatctcagaactaagtccagaatgctctcttctctggatatgttaagatcatctgatttaataagtgtcaaaaattggtgcacttcgatttctagtatttcttcatgtaagctcacctcggcaaagtgctgatataaatatttctttgatcgatcagataaatcttcagctccaatctgctttgcaaaataatagatacctaaacagttggaggcatccatgtggtccatcatatatttttgacacacactgaagacttcttccatctgcataaaataggcagccatagctacagtctgtacattggcattattgatctccaaagctgcattgtacatgtaatttaataacaccgacacactttctgctgtgatgtcataaagtatgacttccctttgattacattcaagtagtccacaggtgaacatagctttgaaataagggctaaatgcagccaggaccagtctgtggcaaggaaatttctctccttctgctgtgagtaccacatcaatcatttctgctaattctttcatgttctgaattttattcagtaaattcaagctatgttggtatttttcttttccctcaatcttgcactccat

SEQ ID NO: 22717 - DNA, 711 bp, Homo sapiens
  MAP TO U34879.1; EXPRESSED IN LUNG, SIGNAL =   2; EXPRESSED IN BRAIN, SIGNAL = 1.8; EXPRESSED IN HELA, SIGNAL = 2.7; EXPRESSED IN PLACENTA, SIGNAL = 1.9; EXPRESSED IN HEART, SIGNAL = 2.2; EXPRESSED IN BONE MARROW, SIGNAL = 2.7; NT HIT: U34879.1, EVALUE 0.00e+00; SWISSPROT HIT: P53332, EVALUE 2.00e-04; EST_HUMAN HIT: BG325740.1, EVALUE 0.00e+00
gcctgggcagcatggccgtattccggtcgggtctcctggtgctgacgacgccgctggcctccctagcccctcgcctggcctccatcctgacctcggcggcccggctggtgaatcacacactctatgttcacctgcagccgggcatgagcctggagggcccggctcagccccagtacagccccgtgcaggccacgtttgaggttcttgatttcatcacgcacctctatgctggcgccgacgtccacaggcacttggacgtcagaatcctactgaccaatatccgaaccaagagcacctttctccctcccctgcccacctcagtccagaatctcgcccacccgccagaagtcgtgttgacagatttccagaccctggatggaagccagtacaacccggtcaaacagcagctagtgcgttacgccaccagctgttacagctgttgtccgcgactggcctcggtgctgctatactccgattatgggataggagaagtgcccgtggagcccctggatgtccccttaccctccacgatcaggccagcttcccccgtggccgggtctccaaagcagccggtgcgtggctactaccgtggcgctgtcggtggcacgtttgaccgcctgcacaacgcccacaaggtgttgctcagtgtcgcgtgcatcctggcccaggagcagcttgtggtgggagtagcagacaaagatctgttgaaga

SEQ ID NO: 22718 - DNA, 834 bp, Homo sapiens
  MAP TO AC018725.1; EXPRESSED IN BRAIN, SIGNAL = 3.2; EXPRESSED IN HEART, SIGNAL = 2.6; EXPRESSED IN LUNG, SIGNAL = 3.5; EXPRESSED IN BONE MARROW, SIGNAL = 3.9; EXPRESSED IN FETAL LIVER, SIGNAL = 2.9; EST_HUMAN HIT: AU122309.1, EVALUE 0.00e+00; NT HIT: gi14764517, EVALUE 0.00e+00; SWISSPROT HIT: Q12901, EVALUE 0.00e+00
gaggcaagatccaaactgagttggagtctgttccagaagcaggagcacatgaagagtggtcctgccagcaaatctgggaacaaattgcaaaagacttaaccaggtctcaggactctatcataaataactctcagttctttgaaaatggtgatgtcccctcccaggttgaagcaggactacccacaattcatacaggacagaaaccttcccagggtgggaagtgtaaacagtccttcagtgatgttcccatctttgatcttcctcagcagttatactcagaagagaagtcttatacatgtgatgagtgtggaaaaagcatctgttacatctcagctcttcatgttcatcagagagtccacgtgggagagaaactctttatgtgtgatgtgtgtggcaaggaatttagtcaaagctcacatctgcaaactcatcagagagtccacactggagagaaaccattcaaatgtgagcaatgtgggaaaggtttcagtcgtagatcagcacttaatgttcatcataaattacacacaggagagaaaccttacatttgtgaggcatgtgggaaggccttcattcatgattcccagcttaaggaacataagagaatccatactggggagaaaccattcaaatgtgatatatgtggtaagaccttctattttaggtcaagacttaagagccattccatggttcacacaggagaaaaaccatttaggtgtgatacatgtgataagagctttcatcagagatcagcacttaataggcattgcatggtccacacaggagagaaaccgtacagatgtgagcagtgtggaaaaggctttattggtaggc

SEQ ID NO: 22719 - DNA, 2439 bp, Homo sapiens
  MAP TO AC025436.2; EXPRESSED IN BONE MARROW, SIGNAL = 1.9; EXPRESSED IN LUNG, SIGNAL = 2.3; EXPRESSED IN FETAL LIVER, SIGNAL =   2; EXPRESSED IN HELA, SIGNAL = 2.3; EXPRESSED IN PLACENTA, SIGNAL = 1.6; EXPRESSED IN HEART, SIGNAL = 2.4; EXPRESSED IN BRAIN, SIGNAL = 2.1; SWISSPROT HIT: Q9Y5E6, EVALUE 0.00e+00; EST_HUMAN HIT: BG718561.1, EVALUE 0.00e+00; NT HIT: gi14861873, EVALUE 0.00e+00
gccgtctacaaaggttgtggggcaaaagactgtttcccagctctgtctgaggttcagcttggcgacattccctggaagagcgtgacggaaagtgcaatggaggcgggaggagagcgatttcttagacaaaggcaagtcttgcttctctttgtttttctgggagggtctctggctgggtccgagtcaagacgctattctgtggctgaggaaaaagagaggggctttttaatagccaacctagcaaaggatctgggactaagggtagaggaactggccgcgaggggggcccaagttgtgtccaaagggaacaaacagcattttcagctcagtcatcagacaggtgatttgctcctgaatgagaaattggaccgggaggagctatgcggccccacagaaccatgcatactacattttcagatattactgcaaaaccctttgcaattcgttacaaacgagctccgtatcatagatgtaaatgaccattctccggtattctttgaaaatgaaatgcatctgaaaatcctagaaagcactctgccaggaacagtaattcctttgggaaatgctgaggacttggatgtgggaagaaacagcctccaaaactacactatcactccgaattcccacttccacgtactcactcgcagtcgtagggacggaaggaagtacccggaactagtactggataaagcgctcgatcgggaggagcagccggaactcagcttaacgctcaccgcgctggacggcggctctccccctcggtctgggacagcccagataaacatccaggtcttagatataaacgacaatgcaccagaatttgcacagccgctctatgaggttgcagttctagagaatacccccgttaactctgtcattgtcactgtctcggcttctgacttagatacaggaagttttgggacaatatcatatgcattttttcatgcttctgaagaaattcgcaaaacttttcagctaaatccaattactggtgatatgcaactggtcaaatatttgaattttgaagcgattaatagttatgaagtcgacatcgaggccaaggatggcggaggcctatccggaaagtctacagtcatagtccaggtggttgatgtcaacgacaacccaccggaactgaccttgtcttcagtaaacagccctattcctgagaactcgggagagactgtactggctgttttcagtgtttctgatctagactctggagacaacggaagagtgatgtgttccattgagaacaatctccccttcttcctgaaaccatctgtagagaatttttacaccctagtgtcagaaggcgcgctggacagagagaccagatccgagtacaacattaccatcactatcactgacctggggacacccaggctgaaaaccaagtacaacataaccgtgctggtctccgacgtcaatgacaacgcccccgccttcacccaaatctcctacaccctgttcgtccgcgagaacaacagccccgccctgcacatcggcagtgtcagcgccacagacagagactcaggcaccaacgcccaggtaacctactcgctgctgccgccccaggacccgcacctgcccctctcttccctggtctccatcaacgcggacaacggccacctgtttgccctcaggtcgctggactacgaggccctgcaggcgttcgagttccgcgtgggcgccacagaccgtggctccccggctttgagcagcgaggcgctggtgcgcgtgctggtgctggacgccaacgacaactcgcccttcgtgctgtacccgctgcagaacggctccgcgccctgcaccgagctggtgccccgggcggctgagccgggctacctggtgaccaaggtggtggcggtggacggcgactcgggccagaacgcctggctgtcgtaccagctgctcaaggccacggagcccgggctgttcggcgtgtgggcgcacaatggcgaagtgcgcaccgccaggctgctgagcgagcgcgacgcggccaagcacaggctggtggtgctggtcaaggacaatggcgagcctccgcgctcggccaccgccacgctgcatgtgctcctggtggacggcttctcccagccctacctgcctctcccggaggcggcaccggcccaggcccaggccgacttgctcaccgtctacctggtggtggcattggcctcggtgtcttcgctcttcctcttttcggtgctcctgttcgtggcggtgcggctgtgcaggaggagcagggcggcctcggtgggtcgctgctcggtgcccgagggcccctttccagggcagatggtggacgtgagcggcaccgggaccctgtcccagagctaccaatacgaggtgtgtctgactggaggctccgggacaaatgagttcaagttcctgaagccaattatccccaacttcgttgctcagggtgcagagagg

SEQ ID NO: 22720 - DNA, 836 bp, Homo sapiens
  MAP TO AC006285.11; EXPRESSED IN BRAIN, SIGNAL = 2.2; EXPRESSED IN BONE MARROW, SIGNAL = 1.6; EXPRESSED IN FETAL LIVER, SIGNAL = 1.3; EXPRESSED IN LUNG, SIGNAL = 1.9; EXPRESSED IN HEART, SIGNAL = 2.9; SWISSPROT HIT: P34926, EVALUE 2.40e-01; EST_HUMAN HIT: BG478377.1, EVALUE 0.00e+00; NT HIT: gi14776852, EVALUE 0.00e+00
ggcactgtgtttagtcttgagtcagaggaggaggaataccctggaatcactgcagaagatagcaatgacatttacatcctgcccagcgacaactctggacaagtcagtcccccagagtctccaactgtgaccacttcctggcagtctgagagcttacctgtgtcactgtcagctagccagagttggcacacagaaagcctgccagtgtcactaggccctgagtcctggcagcagattgcaatggatcctgaagaagtgaaaagcttagacagcaacggagctggagagaagagtgagaacaactcctctaattctgacattgtgcacgtggagaaagaagaggtgcccgagggcatggaagaggctgctgtggcttctgtggtcttgccagcgcgggagctgcaagaggcacttcctgaagccccagctcccttgcttccacatatcactgccacctccctgctggggacaagggaacctgacacagaagtgatcacagttgagaaatccagccctgctacatctctgtttgtagaacttgatgaagaagaggtgaaagcagcaacaactgaacctactgaagtggaggaggtggtccccgcactggaacccacagaaacgctgctgagtgagaaggagataaacgcaagggaagagagccttgtggaagagctgtcccctgccagcgagaagaagcccgtgccgccgtctgagggcaagtctagactgtcccccgccggtgagatgaagcccatgccgctgtctgagggcaagtctatactgctgtttggaggggctgctgctgttgccatcctggcagtggccatcggggtagc

SEQ ID NO: 22721 - DNA, 641 bp, Homo sapiens
  MAP TO AC007111.1; EXPRESSED IN BONE MARROW, SIGNAL = 0.77; EXPRESSED IN BRAIN, SIGNAL = 0.83; NT HIT: gi16164989, EVALUE 8.00e-59; SWISSPROT HIT: Q92874, EVALUE 3.00e-57; EST_HUMAN HIT: BG740560.1, EVALUE 3.00e-50
atcctggctggctatgacctcgcgctggtgcaggaggtgcgagacccagacctcagcgccgtgtccgcgctcatggagcagatcaacaggtgtggtgggcagggcccctcgtcgcgaccccccgccgggatctcgccccggcgcggcgccccgaccctgagcgggcccctgtctccgcagcgtgtccgagcacgagtacagctttgtgagcagccagcccctgggccgggaccagtacaaggagatgtacctgttcgtgtacaggtgaggggcgggccgcagggaggggcgcgcggggccgcaggtcgggggctcagcgggtcctccccatctcctaggaaagacgcggtgtcggtcgtggacacctacctgtacccagaccccgaggacgtcttcagccgcgagcccttcgtggtcaagttctcggcccccggcaccggtgagcgggccccgcccctcccctcccgccgagctctgacgcccccaccccttcccgcagcagcacagaacctggtgctgatcccgctgcacgcggcgccgcatcaagccgtggcggagatcgacgcgctctacgacgtgtacctggacgtgatcgacaagtggggcaccgacgtaagcccacccctcggtcccggggtccc

SEQ ID NO: 22722 - DNA, 678 bp, Homo sapiens
  MAP TO AP000884.1; EXPRESSED IN HELA, SIGNAL = 0.97; EXPRESSED IN BONE MARROW, SIGNAL = 1.2; EXPRESSED IN FETAL LIVER, SIGNAL = 0.96; EXPRESSED IN LUNG, SIGNAL = 1.2; SWISSPROT HIT: P56748, EVALUE 1.00e-120; NT HIT: gi14780163, EVALUE 0.00e+00; EST_HUMAN HIT: AU121779.1, EVALUE 0.00e+00
ctacacatactgacttctggagtagacgctcggtgacttctttccggtgtgataacttttttgggttgtgcgatgggaaggtatcgagtatctgtagctactgctcttttcgttgcaacaaaaaacgcagcagaacagagctcctccaacaatcagcaccagtgccgtggtccatcctaagtagagagcttctccaagctcacgtttttgggcaacattcactattgagttatagaaatctctgatgatggcattggcaacccagctcacagggatgagcaccaccatgcccgtgatgatgaagatgattccagccgtcagcagaatgtgagccttcaccttctcattgtcccccgtgcacctggtgcatttcatgccaaggatggccatcatgaaagccaagaaggacatcacggaagcagcacacatcagtcctctggctgcctgtaggtccggagaaagagccagcagggaatcatagattttgcactgcatcctgatgttagcctgcctcacgcaattcatccacagtccttcccagaagttttcaaaaaccacgatgttgttttcaatgaaggccgacactctccactgaggcatgacagtgacagccactgtgcccaccattccaacaccaccaagaaacagcccagcgatttctaaggcatgggttgccat

SEQ ID NO: 22723 - DNA, 573 bp, Homo sapiens
  MAP TO AC007556.2; EXPRESSED IN HELA, SIGNAL = 0.83; EXPRESSED IN BONE MARROW, SIGNAL = 0.8; EXPRESSED IN FETAL LIVER, SIGNAL = 0.98; EST_HUMAN HIT: AW804620.1, EVALUE 3.20e+00
ttcattctttgtgctattatgtgttgaatatctgctaagatgttatctatggagattatagaaggcaagagacaattaagcaagatagacagttacaagggtcttagaaatggcacagataaaattctatggaggttcagagaaaagaaatttcttctagttggaggattcaagtaggacttcatacagtataattctgatggatctataatcttcacagactggaaacctatactcacatgatttgttatttgcccactttttgttttaaatggattttagacttgcaaaaactcatcagtgagttgatcatttgtttgaacaatggtgttttagaccaaaaaagtaagttttcatgaattctcctcctgcgtcagaaaggtagtgtgtaaagccatggattaaaaagaaaagttaaataaaatgcttatatactttatagtttgcacaacatctagaaattactaatcactaattttcctgtttcacattaaaaacataaaattctgtgatgagctgaggttaaactgtcaattgccgctggcttgctgttgccttgtgagatccctggta

SEQ ID NO: 22724 - DNA, 558 bp, Homo sapiens
  MAP TO AC004886.1; EXPRESSED IN LUNG, SIGNAL = 1.5; EXPRESSED IN BONE MARROW, SIGNAL = 1.6; EXPRESSED IN PLACENTA, SIGNAL = 2.2; EXPRESSED IN HELA, SIGNAL = 1.2; SWISSPROT HIT: P20471, EVALUE 4.00e+00; NT HIT: Y19185.2, EVALUE 0.00e+00; EST_HUMAN HIT: H86807.1, EVALUE 5.00e-76
aagctgtggtggttgcatcttcagttgcccaaaattgactgccttccagagcagcatactgaccttccaaaattgcctgctctgtagtggtttgtggagaagcagttccagaagggtcatagttatactggtagatctgccgaatcttttgctcctccagctgctggtgaagctgttgttgcagctgttggatctgctcaagctgtaactgttgctgagctaacgtctcctgcctcatcatgaactgggcttgccgctcttcttcttgctgaaagagaaggtgttgcttcatagactgcagctcctccaactttttctgaaccatgatcttttcttgttctcggaacctttgaatttcctgacgttcccactccaattcctcagcaaagcgctgttgcttaattttctccagttccaggagctcacgctccaagtctagctgctgctgttgtttatcttcttcagggacaattaaaagagcactttcatctcccaccacttcaggaaacacttcggatgctgtggttaaagtgggaacagagtctatcgtctcagcag

SEQ ID NO: 22725 - DNA, 1137 bp, Homo sapiens
  MAP TO AC007845.12; EXPRESSED IN HEART, SIGNAL = 2.9; EXPRESSED IN BONE MARROW, SIGNAL = 2.3; EXPRESSED IN HELA, SIGNAL = 0.73; EXPRESSED IN PLACENTA, SIGNAL = 2.6; EST_HUMAN HIT: AL045865.2, EVALUE 0.00e+00; SWISSPROT HIT: Q00975, EVALUE 2.00e-03; NT HIT: gi14776874, EVALUE 0.00e+00
ctgcccttacgacgggaagcaccctgtgctttccagagtccaccgtggccccgctggagggggtgctggggcaggacttgtcgtcggccttcttcttcttgtccttcttgtacccggagaagacggacttccacagggacttgggtttggcggcggcttcttctaggaggttggagctgggcttctccgggggccggccctcgcctttggacttcttctccttcttgtttctgcggggggagaagagtgacgacctcttcttgctcttcccactggagccctcggatgaagtgaaagagccatctgggccccctgagtccgacggcggggagaggacctcctcgctggtggcttcatgcttcagggtgggctcctcggagcccctgagagtggggcgtgtgggggagtcaggccggcgctccttgccctgggagggtgctgaggacgccttgcggggcctgggggcgcctgaggccagctccatctgctgcatcctgctcagctgcctggccatggcgtcccgcagcgcctggctcttcacggacttctccctggctcgcatgcgctcctcggccaactccttggcttccgcggacaccaagggcagccccctcttctgtggctgcagcgtcccctccagagcaggcagcctcccgttctccttggccaggggcgggtggcgaggcttctcggggcgcggccagcaggacgggggcgtgaagaatttctcctgcaggcttgagtcctcagtcttgtcgtcataggtgtcctccacatcatcagcaaagggaatctcctccacgctctccacaaacgacttccgcacctcctctctggggggctgagcaggctcccgggggggccgcatccaggtggcgggcaagggcggcgggaccaccgaggcattgggctcggcctccctgagcttcctccgcaaggtggcgggctcctcgcccgggggtggcggtgggggcgggctggaggggggcgtgagcatggcggagtccgaggtgttgaagctctggctgcccagtgtcttcatgttggaggagctcccgtgcaggcccaggccagagctgctggacagctccctgcgctcctcctgggcgctgcgtagctctctgtcggacggggacc

SEQ ID NO: 22726 - DNA, 1055 bp, Homo sapiens
  MAP TO AP000540.2; EXPRESSED IN BRAIN, SIGNAL = 0.87; EXPRESSED IN HELA, SIGNAL = 0.46; EXPRESSED IN BONE MARROW, SIGNAL = 0.89; EXPRESSED IN FETAL LIVER, SIGNAL =   1; EXPRESSED IN LUNG, SIGNAL = 0.96; SWISSPROT HIT: P04275, EVALUE 7.00e-04; NT HIT: AL163202.2, EVALUE 1.00e-124; EST_HUMAN HIT: BG009093.1, EVALUE 6.00e-68
ttaatgtttatcaatcacataggattccagaacactactgcagggttctgagtgtctgtccctcacataggaatccagaaaactgctgcaatgttctgagggattgtccctcacgtagaattccagaacacacatgcagggttctgatggcctgtggctcacatacgattctagaatcctgctacgagggtctgaatatctgtccttcacagagcattccaaaacagtgctatgagggtctgaaagcttgtccctcacataggattccagaacactgctgcaggtttctgagcttttgtccctcacattggattccacaacaatgctccgagggtttgaatgattgtccttcacaaaggattccagaaatctgctgctgggttctgcttgtttgtacctcacaaggcaatccagagcactgcttctggtttctgagggtttgtccttcaaataggataccaccacactgctacgacagtctgaatgtttgtccgtgacaaatgaatccagaacactgttgcagggttccgagtgtttgtccctcacgtaggattccagaacacagctgcggatttcggagtgtttgtccctcacatgggactcaaaaacactgctgctgctcggttcacagttgtcccttacatatgattgctgaacactgctatgaggttctgaatgcttgtccctcacaaaggattccagaacactgctgctgggttctgagtgtttgacactcacatagcattccagaacactgctgctgggttctgagtgtttgtccttcacataggattgaagaacactgcagctgggttctgagtgtttgtccctcacattggattccagaacactcctaagaacttctgaatgtttgtccctcacataggattccagaacattgctgctgggttctgagtgtttgtccctcacataggattccagaacaatgttgctgggttctgagtgtttttccctcacataggactccagaacactgcttcgaaggtctgaatgtttttccctcacaaaggattcaagaacactgctgctgggtt

SEQ ID NO: 22727 - DNA, 771 bp, Homo sapiens
  MAP TO AP001760.1; EXPRESSED IN HELA, SIGNAL = 0.79; EXPRESSED IN BONE MARROW, SIGNAL = 1.2; EXPRESSED IN LUNG, SIGNAL = 1.2; EXPRESSED IN FETAL LIVER, SIGNAL = 1.3; SWISSPROT HIT: O95613, EVALUE 0.00e+00; NT HIT: gi16166512, EVALUE 0.00e+00; EST_HUMAN HIT: AL044798.1, EVALUE 0.00e+00
ggtaaagaaaaagtactggaagattgtcagctgccgaaggtcgatctcgtagctcaggtgaaacagcttcaggaaaaactgaaccgtttgctgtattccatgaccttccagaatgtggatgctgccgacaccaaatctctgtggcccatggcctcagcacacctgttggagagcagctggagtgatgattcctgtgacggagaagagcctgacatatcaccccacatagacacatgtgatgccaatacagccacggggggtgtaactgatgttatcaaaaatcaggccatagacgcgtgtgatgccaatacaaccccagggggtgtaactgatgttatcaaaaattgggattccttgataccagatgaaatgccagattctcccattcaagaaaaatcagaatgtcaggacatgtctctttcttcaccgaccagcgtacttggtggctcccgccaccagagccacactgcagaggctgggccccggaagagcccggtcgggatgctggacctgtcttcctggagctcccctgaggtcctcaggaaggactggaccctggagccctggcccagcctccccgtgacaccccactcaggagccctgagcctgtgcagtgccgacacatccctgggggacagggcggacacctcgctgccacagacccaggggccggggctgctttgttccccaggcgtgtctgcagcagcgctggcactgcagtgggccgagtctccgccggctgacgaccaccatgtgcagaggacggctgtg

SEQ ID NO: 22728 - DNA, 537 bp, Homo sapiens
  MAP TO Z69923.1; EXPRESSED IN PLACENTA, SIGNAL =   3; EXPRESSED IN BRAIN, SIGNAL = 1.6; EXPRESSED IN BONE MARROW, SIGNAL = 1.2; EXPRESSED IN FETAL LIVER, SIGNAL = 1.3; EXPRESSED IN LUNG, SIGNAL = 1.1; EXPRESSED IN HEART, SIGNAL = 1.3; EST_HUMAN HIT: AW998611.1, EVALUE 1.00e-106; SWISSPROT HIT: P23074, EVALUE 3.00e-15; NT HIT: AL163209.2, EVALUE 0.00e+00
atggtggggaaggccaaatggaagccattagagctgcctctacctacaaaaagagtaaatcaaaaacaatatcacatccctggagggtctgcagagattagtgccaccatcaaggacttgaaagacgcaggggtggtgattcccaccacatccccactcaactctcccatttggcctgtgcagaagacagatggatcttggggaatgacagtggattaccgtaagcttaagcaagtggtcactccagttgcagctgctgtaccagatgtggtttcattgcttgagcaaattaacacatctcctggtacctggtatgcagccattgtcttggcaaatgcctttttctccattcctgtccataaggcccaccagaagcaatttgccttcagctggcaaaggcagcaatatacctttactgtcctcctcaggggtatatcaactctccggctttgtgtcataatcttattcggagagaccttgatcgcttttcgcttctgcaagatatcacactggttcattacattgatgacattacag

SEQ ID NO: 22729 - DNA, 891 bp, Homo sapiens
  MAP TO AL049576.19; EXPRESSED IN BRAIN, SIGNAL = 0.92; EXPRESSED IN HELA, SIGNAL =   1; EXPRESSED IN LUNG, SIGNAL = 0.94; EXPRESSED IN BONE MARROW, SIGNAL = 0.99; SWISSPROT HIT: P28221, EVALUE 0.00e+00; NT HIT: gi14726872, EVALUE 0.00e+00; EST_HUMAN HIT: BF196846.1, EVALUE 0.00e+00
cgaaactcttcattaaacacagtgtagattattggattgatgagggagtttaaatagcctagccaggtgaagaagtcaaagagcgccgggtggatccagcaggagtcccggcagatggggaggaccagagacaccacgaagaagggcagccagcagatgataaaggcccccagaatgatgcccaggattttagtggctttcctttctcgagcagcagaaatcctcttgcgttccagggcactgtcagcaagcttgattttcacgtggttgaaaaagagaggggagccagccgagtgcgagtgcccctcatggaggctggagttgagcgagcagagcgaggacccggcagagcctgtgatgaggtgggccgtggtgaagcgcttcccatagagtgagggtggattcaggatgcggttccgggcagcccggtagatccggccatataggatgatgagcaacaccgagggaatgtagaaggccccacaggtggagtagatggtgtaggagatctgagaggtgttcaccagacagtccgacatctcctcctgggccttggcctgccgccagaagagcggggggatggagatgcagatggagatggcccagacaatggcgatcatggtggccgcgtggccagccgtcctgcgtttactgtattccagggcatctgtgattgcccagtacctgtccagagcaatgacacagagatgcaggatggaggctgtgcagcacgtgatgtcagaggacagccagatgtcacacaagatttggccaaagttccaggtgtgggtgatggtataggcgatgctgatgggcattaccaagatggaaaccaagaggtcggtggtggccagggagccaatcaggtagttggcaggggtgtggagcttc

SEQ ID NO: 22730 - DNA, 823 bp, Homo sapiens
  MAP TO AC023123.3; EXPRESSED IN PLACENTA, SIGNAL = 1.5; EXPRESSED IN BRAIN, SIGNAL = 1.1; EXPRESSED IN LUNG, SIGNAL = 0.94; EXPRESSED IN BONE MARROW, SIGNAL = 0.8; SWISSPROT HIT: Q12830, EVALUE 0.00e+00; NT HIT: gi14770720, EVALUE 0.00e+00; EST_HUMAN HIT: BF925278.1, EVALUE 0.00e+00
gtaggcgaaaaccaagagtacatcggcctcgttctcctatattggaagaaaaagacatcccgccccttgaatttcccaagtcctctgaggatttaatggtgcctaatgagcatataatgaatgtcattgccatttacgaggtactgcggaactttggcactgttttgagattatctccttttcgctttgaggacttttgtgcagctctggtgagccaagagcagtgcacactcatggcagagatgcatgttgtgcttttgaaagcagttctgcgtgaagaagacacttccaatactacctttggacctgctgatctgaaagatagcgttaattccacactgtatttcatagatgggatgacgtggccagaggtgctgcgggtgtactgtgagagtgataaggagtaccatcacgttcttccttaccaagaggcagaggactacccatatggaccagtagagaacaagatcaaagttctacagtttctagtcgatcagtttcttacaacaaatattgctcgagaggaattgatgtctgaaggggtgatacagtatgatgaccattgtagggtttgtcacaaacttggggatttgctttgctgtgagacatgttcagcagtataccatttggaatgtgtgaagccacctcttgaggaggtgccagaggacgagtggcagtgtgaagtctgtgtagcacacaaggtgcctggtgtgactgactgtgttgctgaaatccaaaaaaataaaccatatattcgacatgaacctattggatatgatagaagtcggaggaaatactggttcttgaaccgaagactcataat

SEQ ID NO: 22731 - DNA, 1577 bp, Homo sapiens
  MAP TO AC010872.2; EXPRESSED IN BONE MARROW, SIGNAL =   1; EXPRESSED IN HELA, SIGNAL = 1.5; EXPRESSED IN BRAIN, SIGNAL = 0.89; SWISSPROT HIT: P04114, EVALUE 0.00e+00; NT HIT: gi14722693, EVALUE 0.00e+00; EST_HUMAN HIT: R06764.1, EVALUE 0.00e+00
aatagtctccttcaacttgtattggtgggccaactctactaatttatccattaaaacctggatttgttggtctacttcatacctctcgattaactcatggactttggctctgaaggcattgattttctcagctacttcaaaatccccaataagatttataacaaagtgtttgacatgctcaagaatgtcatttattctttcaaatgaaattgtagttcccaattgatctaaaagcactctaacatcaatagcctcaatgtgttgttttaactttccagctaggtgctggatgtctatattctgtatgtgtctcttaagctgctgcagtttttcttgtatctggattctgatttggtacttagtatccacattttgaatccaggatgcagtactacttccacttttgttaaaatcaatattttcaataaacaaatgtagatcatggattgtttttactaaatttacacggatatgatagtgctcatcaagactttttaatttttcaatgatttcatcaataatattagcaatagctattttcaaatcatgtaaatcataactatctttaatatactgatcaaattgtatcatatatgtctgcagttgagatagtttttcattaaagttgattttggcatcatctaatgcaatttgtatatcattttctgtaattctatacttttttgtgagagcagtcagtttctccttggcatgtgaaacttgtctctcccaattgaatgaattcagataatcattagcttgctgtgggagttttcccagggctgctctgtattttcttacaaattgatcaatattgatgtgcttcaggtttctctgtacgttttccagtacaactataatggtttgtcgattcctctcaaaatattcttgcaaggtctcaaaaaatgggaggttaatggagtgaacatcttggtttttatcatactttacaaaagcaacaattgtaaattcttggggcttctcaacggcatctctcatctctaaagcatcaatgatattgatgggctcactgagtaaaagtggcactttaattggggagtctagtagagttaggtcagccagagttcgtccagtaagctccacgccaattttatctttagtgttgtaagcatccaagtcctggctgtattcattgttgttaaattgggtcttgagtttccaggtgcctgtctgctcagctggagtaagcagggcactgactttgtgttcaagagctgcactgatgcttttcctagacacgagatgatgacttgtggagcctttgtaatcatgagagaaagtaaatgccagaggttctgctttcaacaggaatttgctatacagctgcccagtatgttctccccagagagcgagtttcccattgccatttgtatgtgcatcgatggtcatggtaaacggggccattacagaacggaagacattgctgaaatgcagtgagtctgaattatagtttgtgctcatgtcaatggctgaagccagcccagcgatgtctgtgttgagccgatggctaaactccacaccctgaaccttagcaacagtgtctgctttatagcttg

SEQ ID NO: 22732 - DNA, 756 bp, Homo sapiens
  MAP TO AL035703.17; EXPRESSED IN BONE MARROW, SIGNAL = 1.8; EXPRESSED IN LUNG, SIGNAL = 1.9; EXPRESSED IN HEART, SIGNAL = 1.6; EXPRESSED IN BRAIN, SIGNAL = 1.9; EXPRESSED IN HELA, SIGNAL = 3.2; EST_HUMAN HIT: AA806623.1, EVALUE 0.00e+00; SWISSPROT HIT: Q60821, EVALUE 8.00e-17; NT HIT: AF055716.1, EVALUE 2.90e+00
tggaatataaaacaatgactgttacctggttctgtgcttgtcttctttgcctcactaaaggtttgcacagcaggggagggggaacaagcttcagctgtagtaggagtctccgctggggtttctgcattcctctggctctcctgggctgtgggagaattcacactcatctcttgtgaaactgaatgggctgcttcctcagtctcagctttcacagggccccctggagtggcagcaagctctggggaagaatgaggctctccagcaccttcagatgaaaggatttctacttgaggcttctctggttcctttctgaatgtctctgaggatggcgcagagacatcccttaccacctgaccctgaaccgagcagtttacaaggctggtcagaagatttttgcagctaacagctacatcaaacatctgtagactgtctgctaaggagatgattttggagaagttgtgcttgcccacaggtagtttgcccgtgtacatcatttccaacaagagcgcaaactcctcggggctcaccacagatgcatcgatggagatggtatctgtgttatccagcagggttttgaacaggaggctggcagcagccaggacaagcttgtgagccctgaagtaaatggtaccaatggagatggtgcaatcacagaactgctgctccttgcacagagtgtacagctgctgcagcagctgccggctgtagttggggagctccattgcgtcaactctgccccaagaactgctcttcctc

SEQ ID NO: 22733 - DNA, 735 bp, Homo sapiens
  MAP TO AC017024.3; EXPRESSED IN BRAIN, SIGNAL = 1.7; EXPRESSED IN HEART, SIGNAL = 1.7; EXPRESSED IN LUNG, SIGNAL = 1.8; EXPRESSED IN FETAL LIVER, SIGNAL = 1.6; EXPRESSED IN BONE MARROW, SIGNAL = 1.5; EXPRESSED IN PLACENTA, SIGNAL = 1.9; EXPRESSED IN HELA, SIGNAL = 2.3; EST_HUMAN HIT: BI819643.1, EVALUE 3.00e-87; SWISSPROT HIT: P03360, EVALUE 5.00e-40; NT HIT: AF196779.1, EVALUE 0.00e+00
atgcattgtaaaggacatcagcaagccaccacttctgttgccttaggaaattctcaagcagactcagaagcttacaaagcagcatccacccaataccgagcatcagtcacagccgccttgctccctcaggcacctgatctagtgcctgcttattctaaagaggaaagagactttttccaggcagagggggagcaagcgataaaggaaggaaggatccagttaccagacggaagagtagccgtgccacagctactgggagctgcagctgtgctggctgtgcatgagaccacctatctaggccaagagtcacttgaaaagttgttaggctggtacttctacatttcacgtctgtcggcccttgccaaaacggtaacagagcaaggtgtcacctgccggcagcacaatgttaggcagggtccaactgtcccgcctggcatacaagcttatggatcagccctctttgaagatctccaagtggatttcactgagatgcctaagtgtggaggtaacaagtatctgctaggtctagtgtgtacctactctggatgggtagaggcctatccaacacgaactgaaaaagctcgtgaagtaacccgtgtgcttctccaagatttcatccctagatttggactgcccttacagatcggctcacacaacaggctggtgtttgtggctgactcggtacagaagacacagaaggtattggggatcacatggaaactgcatgccacctac

SEQ ID NO: 22734 - DNA, 570 bp, Homo sapiens
  MAP TO AC005785.1; EXPRESSED IN HELA, SIGNAL = 0.43; EXPRESSED IN BONE MARROW, SIGNAL = 0.84; NT HIT: gi5031578, EVALUE 0.00e+00; SWISSPROT HIT: O43823, EVALUE 2.00e-74; EST_HUMAN HIT: AI266184.1, EVALUE 0.00e+00
ccgatcccgatcccgcatccgaggctgcgagcggccacatccgtagggcatggtgctgtcatagccgcccgccccctgcatgcccatcacgccgtagtcgggagccatggactgggagaagagggacggaggtggccggctgggggagggccctcccaggccccgtccacccacgtagttcagctcgttccagggcgtggacaggggctcagaggacgcagcggggggcacgaaggggtcgctgcgcatgaaggtgccagggttgctccggtcctggaagcggccctggccccggccccgcatgaagccatcaagggagccccgctcccgggctgggtctcggcattcactgtactgccccccaaagctgccattgcggtcggaccccaggtcgaactcatagtcgtagctgtagctggggcggtaggggttgtgctccggcaggcagggcctggagtcataggactcgaacggctggaagcggaaggagctgcaacagaagcacagcccatcaggggcggtcaccccgatcacccactgccacactccctcagtataacctcgacgccc

SEQ ID NO: 22735 - DNA, 885 bp, Homo sapiens
  MAP TO AP000536.1; EXPRESSED IN BONE MARROW, SIGNAL = 1.5; EXPRESSED IN HELA, SIGNAL =   3; EXPRESSED IN HEART, SIGNAL = 1.3; EXPRESSED IN LUNG, SIGNAL = 1.2; EST_HUMAN HIT: BG009093.1, EVALUE 9.00e-48; NT HIT: AL163202.2, EVALUE 1.00e-123; SWISSPROT HIT: P41891, EVALUE 5.00e-05
gagcagtgttgtggagtcctatgtgaggacaaacattcagaacccagtggcagtgatctggaaatctatgtgagggacaaacactcagaaaccagccactgtgttctggtttcctatatgagggacaaacattcagacactcgtagaggtgttctggaatcctatgtgagggacaaagactcagaaaccaatagctgtgctctggaaacctttgtgagggacaaacacacagacctcagcagcagtattctggaatcctttgtgagggaaaaacattgcgaccctcctagcagtgttctggaatcctacgtgagggacaaaaactcaggacccagcagcagtgttccggactcctatgtgagggataaacactcagaaaccagcagcagtgctcaggaatcctttgtgaggaacaaacatacagaactgagcagcagtgttttggaatcctacgtgagggacaaacattcagtacatcttaagagtattctgaaatcgtatgtgagggacaaacactcgcaacccagcaacagttttctggaatcctatgtgagtgacatacactcagaccccagcagctctgttctagaatcctatgtgaggaacaaacactcagaacccagcagtagtgttctagaatactttgtgagggacaaatgctcagaacccagcagcagtgttctagaatcctttgtgagggacaaacgctcagaacccagcagcagtgttctagaatcctttgtgagagacaaacacacagaagccatcagcagtgttctagaatcctttgtgagggacaaacactctgaacccagcagcagtgttttggaatctcatgtgagggacaaacactcagaacccagcagcagagttctggaatcttat

SEQ ID NO: 22736 - DNA, 661 bp, Homo sapiens
  MAP TO AF042089.1; EXPRESSED IN BRAIN, SIGNAL = 1.3; EXPRESSED IN HELA, SIGNAL = 1.2; EXPRESSED IN BONE MARROW, SIGNAL = 1.1; EXPRESSED IN FETAL LIVER, SIGNAL = 1.3; EXPRESSED IN LUNG, SIGNAL = 1.2; NT HIT: gi14760973, EVALUE 0.00e+00; SWISSPROT HIT: P03340, EVALUE 7.00e-29; EST_HUMAN HIT: AW867015.1, EVALUE 0.00e+00
atccagacccacaaccccacctgggctgattggcaccagttgctcatgttcctctttaacagcgaagaaaggcggagagtcctccaagcagcaactaagtggccagaggaatatgcaccagctgattatcaaaacccccaagagtatggaaggactcagtggccaggaaccgacgcccagttggacccacatgaaagagaggatatggaaaggctaaaccgagacagggaagctctcttggaaggattaacgagtggagctcagaaggccacaaacattaacaagctctctgaggtcattcagggaaaagaagaaagtccagcacaattgtacgagagactgtgggaggcctatcgtatgtatactctctttgatcccgataaccctgaaaatcagcgcatgattcacatggctttagtccgtcaaagcgcagaagacatgagaagaaaactgcagaaacaggctgggcttgcagggatgaatacatcacaattactagaaatagctagccaggtgtttgtaaacagggatgcagtaagccgtaaggaaaacggcaaagagaatggaggtcaggcccggcgacacgccgacctgtttgtcagctgcagcaatcagaggggcctccccaaagaggcaagggaaggggggccctgggaaagaa

SEQ ID NO: 22737 - DNA, 965 bp, Homo sapiens
  MAP TO AF238380.1; EXPRESSED IN BRAIN, SIGNAL = 1.1; EXPRESSED IN HELA, SIGNAL = 0.98; EXPRESSED IN BONE MARROW, SIGNAL =   1; EXPRESSED IN LUNG, SIGNAL = 0.97; EXPRESSED IN FETAL LIVER, SIGNAL =   1; EST_HUMAN HIT: BE502601.1, EVALUE 4.00e-47; NT HIT: AF229643.1, EVALUE 1.00e-126; SWISSPROT HIT: Q09738, EVALUE 1.00e-07
gccgggcgggggacaccccaggtctgcgtggcccccgcgccgccacgcccagtggccgcccgagccctgcgagcagggggaggagccgccgccagtggaggcggaggaggtagaggaggcggagacggcggagaaggcggagaggaaggtggaggcggaggcgaaggtggaggggaaggcggaggcggcggggaaggcggaggcggcggggaaggtggacgccaccgagaaggtggagacggcggggaaggtggacgccgctgggaaggtggagacggcggagggtccgggccgccgggctgagctcaagctggagcccgaacccgagccggtccgggaggcggagcaggagccgaagcaggagctggaggatgagaacccagcgcggagcggcggtggcggcaacagcgacgaggttcctccccccacccttccctccgatccaccgcggccccccgatccctctccgcgtcgcagtcgtgcgccgcgccgccgaccccggccccggccccagacccggctccgtaccccgccgcagcctaggccccggcccccgccccggccccggccccggcgcggccctgggggcggatgcctggatgtggattttgccgtggggccaccaggctgttctcacgtgaacagctttaaggtgggagagaactggaggcaggaactgcgggttatctaccagtgcttcgtgtggtgtggaaccccagagaccaggaaaagcaaggcaaagtcctgcatctgccatgtgtgtggcacccatctgaacagactccactcttgcctttcctgtgtcttctttggctgcttcacggagaaacacattcacgagcacgcagagacgaaacaacacaacttagcagtagacctgtattacggaggtatatactgctttatgtgtaaggactatgtatatgacaaagacattgagcaaattgccaaagaagagcaaggag

SEQ ID NO: 22738 - DNA, 678 bp, Homo sapiens
  MAP TO AC021287.4; EXPRESSED IN LUNG, SIGNAL = 1.4; EXPRESSED IN HEART, SIGNAL =   4; EXPRESSED IN PLACENTA, SIGNAL = 1.4; EXPRESSED IN BRAIN, SIGNAL = 1.2; EXPRESSED IN HELA, SIGNAL = 1.8; EXPRESSED IN BONE MARROW, SIGNAL = 0.99; EXPRESSED IN FETAL LIVER, SIGNAL =   1; EST_HUMAN HIT: AL603363.1, EVALUE 0.00e+00; NT HIT: gi14732352, EVALUE 0.00e+00; SWISSPROT HIT: P37370, EVALUE 5.00e-02
agtgggagaggagctcagctctttgctaaaaggcagtcgagaatggagaagtatgtggtcgattcagacacggtgcaggcccacgctgctcgagctcagtctcccactccatctctcccggccagttggaagtactcctccaatgtccgagcacctcctcctgtggcctataatcctatccactcgccgtcttacccactggctgctctcaagtctcagccatcagctgcacagccctccaaaatgggcaagaaaaagggaaagaaacccctcaatgcattagatgtcatgaagcaccaaccgtatcagctcaatgcatccttgtttactttccaacctccagatgcaaaggatggcctcccccagaagtcatcagtcaaggtcaattcagccctggccatgaagcaagctcttcctccccggccagtgaatgctgcctcacctacgaatgtgcaggcttcgtcagtgtactcggtaccagcctatacctctcctccttccttctttgcagaggcctcctcaccagtcagtgcatccccagtgcctgtgggcattcccacctcgccaaagcaagaatcagcctcatcatcttattttgtggcaccaaggccaaagttctcagccaagaaaagtggtgtcacaattcaggtgtggaaaccatctgttgtggaagagtaa

SEQ ID NO: 22739 - DNA, 615 bp, Homo sapiens
  MAP TO AL132709.2; EXPRESSED IN HELA, SIGNAL = 1.1; EXPRESSED IN BONE MARROW, SIGNAL = 0.97; EXPRESSED IN FETAL LIVER, SIGNAL =   1; EST_HUMAN HIT: BE142745.1, EVALUE 8.00e-35; NT HIT: AL163281.2, EVALUE 2.00e-31; SWISSPROT HIT: P21952, EVALUE 4.10e-01
gcatcacctcccaaggtggtcccggaacgcaccggagtcagcaggagtggaacagatgacatgcaccgtgggtacaatcgggcctgtcccatgggcggccctcaggcacctgccctggagagggctccggctgcaggccgcctcctgagggtgctgttgcttctggaaattctccaggtagggtttgatctgaaaagaaagccatgtgcaatgctggtcaccaacaaagcaggccagcaaacaacgagctctttccacagccccagcaaggtttttgaccttggaaacatcaactccagaatgactttcagcctctatgaccaaatgacattcggcaccaacgaagggcacgtccttggggccagcatggaaccatgtaaggtatcaacagcagagtctgaggaaggactgaaccccagaatgttcctggatgcctgtgtgttcatcaatagccttggaagtgtgaaaggaaagttatctcgggcccctaaaatcactaaggaaaactcaagctggaagctgctcaggataaacctgcctctcattccattcaaagtcatccctctgctcactgagacagatgcgtatctgatttgcctcctttggaaaggctca

SEQ ID NO: 22740 - DNA, 609 bp, Homo sapiens
  MAP TO AC003986.1; EXPRESSED IN BRAIN, SIGNAL = 0.98; EXPRESSED IN BONE MARROW, SIGNAL = 0.87; EXPRESSED IN FETAL LIVER, SIGNAL =   1; EXPRESSED IN HEART, SIGNAL = 1.2; SWISSPROT HIT: P26687, EVALUE 8.00e-51; EST_HUMAN HIT: AL514480.1, EVALUE 0.00e+00; NT HIT: U80998.1, EVALUE 0.00e+00
catggaccaggccccctccatcctccagaccgagaaggcgtagctgagccgctcgtgagccacatagctgcagcttgccatcttggagtccagctcgtcgctctggaggacctggtagaggaagtcgatgtacctggccgccagcttgagggtctgaatcttgctcagcttgtccgagggcagcgtggggatgatcttccgcagcgcggcgaacgcctcgttcagcgactgggtgcgctggcgctcccgcacgttggccatgacccgctgcgtctgcagctcctcgtaagactgcggactcccgccgccgctgctgctgccgccgccgccgcccgcgccgccgccgccgccacagcccgcagacttcttgccgcgcttgccctgggccgggctgcccggctcgtcgccgcctccgacgcccccacccgcggctccgccgggccccgcgccgccgcccgcgctgcgcctgctgctgcgccgcttgcgtcccccgcgcttgccgctcggcggctgctgccggtctggctcttcctcgctgttgctcaggctgtcgtcggccggcgagactggcgagctggacacgtcctgcatcatctctcgagcggcgac

SEQ ID NO: 22741 - DNA, 563 bp, Homo sapiens
  MAP TO AL133485.1; EXPRESSED IN PLACENTA, SIGNAL = 4.8; EXPRESSED IN HELA, SIGNAL =  17; EXPRESSED IN BONE MARROW, SIGNAL =  14; EXPRESSED IN FETAL LIVER, SIGNAL =  12; EXPRESSED IN LUNG, SIGNAL =  13; SWISSPROT HIT: P30622, EVALUE 3.00e-03; EST_HUMAN HIT: BG106833.1, EVALUE 0.00e+00; NT HIT: AF223937.1, EVALUE 0.00e+00
cttccctcctgaagctccctttggtgcttttccaagagctcttttcttaactcctctttctcaagagtgtgtttctccaccaggcttgtcagctgctcctggtgaaactgctctagttcctgagtcaagcctctcaccttctcttctgtccaggcgctactctgaaggccttccctctcccgctcaaagcttgcttgagcctgtgtcagtctagccttgagctccatctcatgttgcagcctcagcttctcctgcaggtgagtcttttcctcctcaagcttcacttgcagttgttttttctcctcctcatgcctgcaagtggcctcatgatgtgcctccttgagcactgctgcttgcccctgaagttcagcaatttcatttttaaggtcacttatttgtttttctaaggtgtgcgtttcgttctcatgcctttgcttcatgttctcctgtgccttcttgcagctgaccacggtttcgtccagctgcttttcataatggcgcacctgaaggcacagagtgacaccaccacaagattactcagctcaaggtcactgaaagtgaag

SEQ ID NO: 22742 - DNA, 526 bp, Homo sapiens
  MAP TO AC011531.6; EXPRESSED IN BRAIN, SIGNAL = 1.3; EXPRESSED IN HELA, SIGNAL = 1.1; EXPRESSED IN HEART, SIGNAL = 1.3; EXPRESSED IN BONE MARROW, SIGNAL = 1.3; EXPRESSED IN FETAL LIVER, SIGNAL = 1.3; EXPRESSED IN LUNG, SIGNAL = 1.1; NT HIT: gi14762685, EVALUE 0.00e+00; SWISSPROT HIT: P18835, EVALUE 1.50e-01; EST_HUMAN HIT: BG472669.1, EVALUE 0.00e+00
ggccgccttcaacaacaacgtgagcgtggcctacgagtgcctgagcgccggcgggcgcaggaagaggccggggctggacgggcgcacctacagcgagctgctcaggcgcatctgccgggacggccaagcccccgaggaggtggtggcgccgctgctgcgcaaggtgcagtgccgtgaccacgaggcggtgccgctgagcgtcttccgcgcgggcacactcacctgcttcgtgctgctggagttcgtggcgcgcgccggcgcgctcttccagctgctggaggactcggccgccgccgtggccgaccgccgcgtgggccaggccgtgctggacaccctggagggcgcgctgcaggccagcgacgccgccgcgcccgcgcgcttcctggaggccggctcgcgcttggggcccgacagcctggcgctggcgctggaccgcgccgtcggggggcggcggcccagcgcgcccatgacccgcgaggagtttctggagagggccgccgcgctcttcatcgcgaaggtcaagccg

SEQ ID NO: 22743 - DNA, 1608 bp, Homo sapiens
  MAP TO AL132641.2; EXPRESSED IN BRAIN, SIGNAL = 1.5; EXPRESSED IN HELA, SIGNAL = 2.3; EXPRESSED IN HEART, SIGNAL = 1.4; EXPRESSED IN BONE MARROW, SIGNAL = 1.1; EXPRESSED IN LUNG, SIGNAL = 1.2; EXPRESSED IN FETAL LIVER, SIGNAL = 0.96; SWISSPROT HIT: P21809, EVALUE 1.00e-18; EST_HUMAN HIT: AU118229.1, EVALUE 0.00e+00; NT HIT: gi13648109, EVALUE 0.00e+00
tcacgtatggcagtgctccaggtctggcacgctgctgttgcagtatcgcatgttgttggggatatggcagtctgtgtaattaatgcccccatttggggtgtaaatgggctgcagtctgaaatctcctttaaggagttgatcgttatttaaggagacgatctgaaaactggtttctgtcatctccaggatggagttgtccttcttggtgcctgcctcgcaataatcatctttccgccggccccggttgtatttccacttctgggaggtgtagcgcccctttttgtgcatatgccagcaaaagacgctgagcaagaccaccagcacaaatatcaccgcgcccccgatcaagcccgccagcagaaagggggagcccatgctgtgggacgtcgtctgctcatggctggacgctgtgttgctgccgttgttcagataggaggcatgggtggtggcctctgaacaaatggtgtcttctaccgcgcggtagttaaaagcatccagtggcactaaacaaatccgataggtggatcggggctctaagttaaccaggctcaggtgttgcttctcaccgctgactatgcgctcctgaacgatgccccctactaaactgtggcccattttcacccatgtgagtttgtatgccatcacggtgaagagagagagccagctgacttgaatggaagtatcattcacaaaatggatagagagctggatccgttcagaaataggtggggtcactctttctctgccatcccagtcaggaatcgtgggaagtttcgatgtggtaggagttggaggcgtgtagcttctgctagggtttggaatagagagggtgggaggctgagtggtcggagaagctgtacttggggctggggtgaagagaggcaggccgggggtcgtggtgggacaggacaaaagattcatatttaattccctgacggccatcccccggacttgttcaggaccttggcacatgaaaccccgcacgttgagagatgaagggatatatttgagccattctgtgacccatttaatactgcagtcacaaaaccaagggttattccgagcagtgagctgcttcaggttggagagattatcaaaaaccccttgagtcagcatccgcagttggttgttggatatatccagccgttccagcttacgcagatttgagaaggctgtcaaaggaatgtggtttatctggttgtcctgcaaatagagcctgatcagatgcgtacctgggagatcgggaggagggtgggacagcgaattacgtacaattgaaaattccttgagcttggtgagatggctgaaggtgccctcggcgatacccttgttggtcaggaggttcccgtccacaataagacgctccaagctcgtgagattctggaaggccatgtcggatatgacagcaattcgattttcatccactctcagctcttgcaagtccacaggaagcccaacaggcacactgctcaggtgattcttagacaaaaacaacaatttgaggctaatagcctcccggaaggccccgtcttccacccccactgtggatatggagttgtcatccaggtgcagctcttcaagcttcaagagctgggcaagagcagcccg

SEQ ID NO: 22744 - DNA, 948 bp, Homo sapiens
  MAP TO AL049748.1; EXPRESSED IN HELA, SIGNAL = 0.71; EXPRESSED IN BONE MARROW, SIGNAL = 0.77; EST_HUMAN HIT: AL045458.1, EVALUE 0.00e+00; SWISSPROT HIT: O95236, EVALUE 9.00e-20; NT HIT: gi13655032, EVALUE 0.00e+00
cttctggtttaaccacacgggatcctcgaacagccctgccccgggagctggaacaggtctggctcgccttctgcggcaggtgccggtggtgctgggtgagccggtccagctcctgctccagcttcttagcaagtgctctcagttcctctgctgtctccgtccttgccccatcctccaggtgcttccagctctgcaggaagctgctcatgtctttcataagtaagaagccagccccagcagcacccatcacccaggcaccattggtcatggccagagttgtgccctcaaaggctctctgcacccctctagccgtccagaaagggatgtgtctcttggccacaaaattcttgaccatagccatgaagccagagttggatttggccatctggtaggcatgaagatccttgatgccctggatagcttttacacacttattaacacaaaagccagcagcctcgatttcagaccaatttattcctccgaaagcctcatgtgatgttgtcagaggccccagtcggctggctttgtctcttgctgctgaattgcttctattttctaagacatttgttactatgttggtgatggcagctgctgcccccaaccctgtcccagttgctgagagcatgagactgcctcctgctgtcacaggtgctagggccaaacccaggatgttcatgaccccagaaacagccccggaagagctggccaccaggctggtcttggtaagcaactcgtgagtggtgtcaacttggtccgcaagggtgttaagttctttgatgttctgttctagctcaaacttgtgcaaaggaaaatatgagagaaacaatttttcctcctctgacagatttccatctggcatggaatctttgtcacatcgcatcagctcttcaaacagaaagtaggacagcataccagcctcatcactgtggacagttgacatcaaattgt

SEQ ID NO: 22745 - DNA, 549 bp, Homo sapiens
  MAP TO U69568.1; EXPRESSED IN BRAIN, SIGNAL = 0.94; EXPRESSED IN BONE MARROW, SIGNAL =   1; EXPRESSED IN HEART, SIGNAL = 1.2; EXPRESSED IN HELA, SIGNAL = 0.34; EST_HUMAN HIT: BG288125.1, EVALUE 0.00e+00; SWISSPROT HIT: P43362, EVALUE 1.00e-91; NT HIT: gi14766894, EVALUE 0.00e+00
atgctggagagcgtcatcaaaaattacaagcgctactttcctgtgatcttcggcaaagcctccgagttcatgcaggtgatctttggcactgatgtgaaggaggtggaccccgccggccactcctacatccttgtcactgctcttggcctctcgtgcgatagcatgctgggtgatggtcatagcatgcccaaggccgccctcctgatcattgtcctgggtgtgatcctaaccaaagacaactgcgcccctgaagaggttatctgggaagcgttgagtgtgatgggggtgtatgttgggtaggagcacatgttctacggggagcccaggaagctgctcacccaagattgggtgcaggaaaactacctggagtaccggcaggtgcccggcagtgatcctgcgcactacgagttcctgtggggttccaaggcccacgctgaaaccagctatgagaaggtcataaattatttggtcatgctcaatgcaagagagcccatctgctacccatccctttatgaagaggttttgggagaggagcaagagggagtctga

SEQ ID NO: 22746 - DNA, 455 bp, Homo sapiens
  MAP TO AF030453.1; EXPRESSED IN HELA, SIGNAL = 0.9; EXPRESSED IN PLACENTA, SIGNAL = 1.8; EXPRESSED IN BRAIN, SIGNAL = 1.9; EXPRESSED IN HEART, SIGNAL = 2.5; EXPRESSED IN LUNG, SIGNAL =   2; EXPRESSED IN BONE MARROW, SIGNAL = 2.4; NT HIT: gi14739530, EVALUE 5.00e-53; EST_HUMAN HIT: AI937524.1, EVALUE 5.00e-48; SWISSPROT HIT: Q99469, EVALUE 9.00e+00
agccgggccccacgccccctgccgcgcccgcgtccccggcctgctggagcgactcgcccggccagcactacttctccagcctcgccgcggccgcctgcccgcctgcctcgccctccgacgccgccggcgcctcctcgtcttccgcctcgtcgtcctctgccgcgtcggggcccgcccccccgcgccccgtcgagggccagctcagcgcgcggagccgcagcaacagcgccgagcgcctgctggaggccgtggccgccaccgccgccgaggagcccccggaggccgcgcccggccgcgcgcgcgccgtggagaaccagtactccttctactagcccgcggcgccgcccgggtgggacacgccaagctcttcagtgaagacacgatgttattaaaagcctgttttagggactgcacccggctctcctgtcgtcctttctcccacggggaaggcgggg

SEQ ID NO: 22747 - DNA, 672 bp, Homo sapiens
  MAP TO AC005338.1; EXPRESSED IN BRAIN, SIGNAL = 2.4; EXPRESSED IN HELA, SIGNAL = 2.2; EXPRESSED IN LUNG, SIGNAL = 1.3; EXPRESSED IN HEART, SIGNAL = 1.3; EXPRESSED IN BONE MARROW, SIGNAL = 0.97; NT HIT: gi14765222, EVALUE 0.00e+00; EST_HUMAN HIT: AI283502.1, EVALUE 0.00e+00; SWISSPROT HIT: P23468, EVALUE 2.00e-74
acccacaaaccgctctgcggcttccagggagcatgcaaagaaccaagccgcacggccggggccccgagtcctgccgaccccacgcctcacctccctgctgcgtcttgacctggatggggtccgagaggggcccgtcgccgacggaggtgaaggcgagcacccgcacggtgtaggtctcgtcctccagcaggctgcccacggtggtcagcaggctgtcgtccacgttgtgcttctgccagttgcccacggggtgctccggttccatggtgtagtagacgcggtagccgcggatcaggccgttgggctccaccggctcctcccactgcacaatcatggtggtcgcgctgagcatccgggcttgcacgttccgcggcgcgctggccggggcctgctcgcctgtgcgggtgaccacggactcgctggggggcccctggccgatggagttgacggccgacacccagatctcgtactccgagttggggctcaggccgccgatgctgtaacgtgtggtggtgatgtcctctttaatctgatacggcccgtcttggctcttggatttatattcgatgacgtaataggacacaggatctgggttgcccgagtcccacgtgatggtgatgctggtggctgtgttctcagtcaccatgggagtcccgggagctttggggagag

SEQ ID NO: 22748 - DNA, 464 bp, Homo sapiens
  MAP TO Z73639.1; EXPRESSED IN LUNG, SIGNAL = 1.7; EXPRESSED IN BONE MARROW, SIGNAL = 1.8; EXPRESSED IN FETAL LIVER, SIGNAL = 1.8; EXPRESSED IN HELA, SIGNAL = 3.4; SWISSPROT HIT: Q02926, EVALUE 1.40e+00; NT HIT: gi14767967, EVALUE 0.00e+00; EST_HUMAN HIT: AL544567.1, EVALUE 0.00e+00
ggggaatggccgctgttttattgggtgtgctcggttggccttgcctccccctgagggcctgtcctcagtgccacctggggccccaggttcagtccaatccccatcctcagtccagggccgagccatagtttcaaaatcaaaccaaatatcaggctcctcctcatccagctcctggtcatcgtcccactcctcttccccctcctcctccagcttctcactgtcatctcttcctatggtcagtttgtaaacgcagtagcaggcaccagccccaatcatcagtcctgccgccatccaacccacttcccgagcccggcccatgctcaagtctgtgccagccttggggcaggacaggagagggccttgctccacctgattgaagaggtctctcaggtccagggtgagtaaggatggagggtagcagtcttcagcttcttccaggctcttgtagctctcttgtgatgaat

SEQ ID NO: 22749 - DNA, 638 bp, Homo sapiens
  MAP TO AC007227.3; EXPRESSED IN HELA, SIGNAL = 4.1; EXPRESSED IN PLACENTA, SIGNAL = 1.9; EXPRESSED IN BONE MARROW, SIGNAL = 2.2; EXPRESSED IN LUNG, SIGNAL =   2; EXPRESSED IN FETAL LIVER, SIGNAL = 2.1; NT HIT: gi14750145, EVALUE 0.00e+00; SWISSPROT HIT: P32007, EVALUE 9.00e-12; EST_HUMAN HIT: BG761419.1, EVALUE 0.00e+00
aagggccaccagacagcactgtttgggatataggtaagcagtgaagccacatagcctcgatagaagccgcgaagtccatcagcctgcaggatctgcctgatgatgtccttggtttggccaaaggcaactaccccttgtccctctgggttcccccgcacctgaaagcggcccattttctcacccttgcgttgcatcatcaggtgctgggagactacatcaatgggcactgtgatgctctgggccacaagggaggctgagccaccagccaccagtgatttgactgtgttactctggctgtagtcagctacaaacttccgggtgagctcataagtggtgacataacactggccagagatgagggtgaaggtattgaccaggaaccctcggtagaggccagtgataccatctgctcgcaggatcttgatgaaggcatcgaaggtcccatggtagaggctcttccccttctgaacttgcaaccgggtgcggatgagggtgaatgggtagacactgacacggatcatcattgtcattgccacaccaaacacgtagaacttcttcttgtccaggtgttcccactcgatgatctggatgttgcgtttgtcctccatggtgcctgaagacctgggatttgagcagta

SEQ ID NO: 22750 - DNA, 702 bp, Homo sapiens
  MAP TO Z85996.1; EXPRESSED IN HELA, SIGNAL = 1.1; EXPRESSED IN BONE MARROW, SIGNAL = 0.84; SWISSPROT HIT: O77621, EVALUE 8.00e-06; EST_HUMAN HIT: BI523322.1, EVALUE 1.60e-02
gctccactccctgacccacagcctcatgatgaacatcacgccatctgacctgctcttcctggcctgcgtggtgcctgtgctgctgctgagcttcctgcagcacaactggtggctgggccctgccatctgcaccattagccaggccaccaacacagccaccacgttctgcatcttctatagcatggtggccacagctctcctgcgccatgtggctgtggcccggcctgacctggccttcccagccggctggggcaccctcttgctgctctgtggggccatgtgggccctgggccttacagaatccctgcccaactggctgttccagagggtggcagtggaggaggagacagcgggggctcccaagacccaggcctgcctcttgctcctgagccctgctgggacctcctgctacatcagcctgctgggagccctggccttcctgccatgcacgctggggctgggctgctctttcagccacgtgggctggctcctgtggacccagccccaaggtcccatgggagagagcatccaggagcattaagagaacatagggctcagccttgtggtgctggtggtttttgtgctgatgtgggggccctgctccatgctgggttatgtggcagccatgggctacctgcctgccacaccggctgcttttgtggcctccagcctctgcaccatcctggcctactccaattgcgc

SEQ ID NO: 22751 - DNA, 959 bp, Homo sapiens
  MAP TO AL096708.11; EXPRESSED IN BRAIN, SIGNAL =   1; EXPRESSED IN HEART, SIGNAL = 1.3; EXPRESSED IN BONE MARROW, SIGNAL =   1; EXPRESSED IN HELA, SIGNAL =   1; SWISSPROT HIT: O30611, EVALUE 2.00e-24; NT HIT: gi13937343, EVALUE 5.90e-02
agattggcacattgctgatttccaggctgccgtgggaaggctggtggtgggtatccaggttgctgtagcggggtggagagaaagcacctcctgttttccaatgtggaggcaatctggccatgacatctgtgtccctgcccgccacggtggaggagggcctggatgcccggctttgtgtgcccctggccgccacggtggaggagggcctggatgcccggctttgtgtgcccctggccgccacggtggaggagggcctggatgcccggctttgtgtgcccctgcccttcacggtggaggagggcctggatgcccggctttgtgtgcccctgcccgccacagtggaggagggcctggatgcccagctttgtgtgcccctgcctgccacggtggaggagggcctggatgcccggctttgtgtgcccctgcccgtcacggtggaggagggcctggatgcccggctttgtgtgcccctgcccttcatggtggaggagggcctggatgcccagctttgtgtgcccctggccgccacggtggaggagggcctggatgcccggctttgtgtgcccctgcccgtcacggtggaggagggcctggatgcccggctttgtgtgcccctgcccttcacggtggaggagggcctggatgcccggctttgtgtgcccctggccgccacggtggaggagggcctggatgcccggctttgtgtgcccctgcctgccacggtggaggagggcctggatgcccggctttgtgtgcccctggccgccatggtggaggagggcctggatgcccggctttgtgtgcccctggccgccacggtggaggagggcctggatgcccggctttgtgtgtccctgctgtggctgcgtggttgtcaggtgaccatcctctccagggaggggagagctgccccttgctgagggagggtgtgcatggcttgttcccctgccagaatgtcc

SEQ ID NO: 22752 - DNA, 596 bp, Homo sapiens
  MAP TO AP000346.1; EXPRESSED IN BRAIN, SIGNAL = 0.86; EXPRESSED IN HELA, SIGNAL = 1.5; EXPRESSED IN BONE MARROW, SIGNAL = 0.89; NT HIT: AF000573.1, EVALUE 3.60e-02; EST_HUMAN HIT: AL520748.1, EVALUE 2.10e-01; SWISSPROT HIT: P48301, EVALUE 6.70e-01
ccttcatccctgtttgcatcaggggctgcaagaagctcagctcacctctccctcaaggccatgaatactccttttctgaccccatctgctgcaaccttttctccaagccctctggaggccctccctggaacattctttcctttcttgcttggactgaaacctagctctcccaagacctgcttcccctccctgggcatcctcctatgtggggctgctttcctccctccctgcccctcatgccttcactggagtgggacaggtccttacgaaccatctcctatgcccgttctgaggagccctctggttctgaatccctgcacaagctctgttgccctggccgtctctcctccccagcaccacaccaccagattgctcttgtagggcacgacgtggtctccatgtggctgagcccaaccgccagtcctcaggcctcatgtttctttggtcatgaggatttcctcacctcaccacctccccgtccctgaaacacttccaggaaatgaggccacttctctgcaattttggttgttcagtaatgtgctattgtgctctttaagaaactgatacacatcttggtgtgtttaagcctttaggga

SEQ ID NO: 22753 - DNA, 1192 bp, Homo sapiens
  MAP TO AL138688.11; EXPRESSED IN HELA, SIGNAL = 0.28; EXPRESSED IN BONE MARROW, SIGNAL = 0.76; EXPRESSED IN HEART, SIGNAL = 1.8; NT HIT: gi14753410, EVALUE 0.00e+00; EST_HUMAN HIT: BI758124.1, EVALUE 5.00e-16; SWISSPROT HIT: Q9Y6H8, EVALUE 0.00e+00
atgggcgactggagctttctgggaagactcttagaaaatgcacaggagcactccacggtcatcggcaaggtttggctgaccgtgctgttcatcttccgcatcttggtgctgggggccgcggcggaggacgtgtggggcgatgagcagtcagacttcacctgcaacacccagcagccgggctgcgagaacgtctgctacgacagggccttccccatctcccacatccgcttctgggcgctgcagatcatcttcgtgtccacgcccaccctcatctacctgggccacgtgctgcacatcgtgcgcatggaagagaagaagaaagagagggaggaggaggagcagctgaagagagagagccccagccccaaggagccaccgcaggacaatccctcgtcgcgggacgaccgcggcagggtgcgcatggccggggcgctgctgcggacctacgtcttcaacatcatcttcaagacgctgttcgaggtgggcttcatcgccggccagtactttctgtacggcttcgagctgaagccgctctaccgctgcgaccgctggccctgccccaacacggtggactgcttcatctccaggcccacggagaagaccatcttcatcatcttcatgctggcggtggcctgcgcgtccctgctgctcaacatgctggagatctaccacctgggctggaagaagctcaagcagggcgtgaccagccgcctcggcccggacgcctccgaggccccgctggggacagccgatcccccgcccctgccccccagctcccggccgcccgccgttgccatcgggttcccaccctactatgcgcacaccgctgcgcccctgggacaggcccgcgccgtgggctaccccggggccccgccaccagccgcggacttcaaactgctagccctgaccgaggcgcgcggaaagggccagtccgccaagctctacaacggccaccaccacctgctgatgactgagcagaactgggccaaccaggcggccgagcggcagcccccggcgctcaaggcttacccggcagcgtccacgcctgcagcccccagccccgtcggcagcagctccccgccactcgcgcacgaggctgaggcgggcgcggcgcccctgctgctggatgggagcggcagcagtctggaggggagcgccctggcagggacccccgaggaggaggagcaggccg

SEQ ID NO: 22754 - DNA, 648 bp, Homo sapiens
  MAP TO AC007255.2; EXPRESSED IN LUNG, SIGNAL = 0.92; EXPRESSED IN BONE MARROW, SIGNAL = 0.99; EXPRESSED IN FETAL LIVER, SIGNAL = 1.1; EXPRESSED IN HELA, SIGNAL = 2.6; EST_HUMAN HIT: AI285527.1, EVALUE 4.00e-52; SWISSPROT HIT: P08548, EVALUE 4.00e-37; NT HIT: AF260225.1, EVALUE 6.00e-29
acatttcatccaatggctgaatacactttcttttcctcagtacatggatcaatctcaaagataaatcatatgttaggtcacaaaataagtcttaaaacattcaaaaaaattgaaataatatcaagtattgtctctgaccacagtggaataaaactagaaatcagtaacaagagaaattttggaaactatacaaatacatggaaattaaacaatatgttcgtgaatgaccagtgggtcattaaagaaattaaaaaggaaattgaaaaatttcttgaaataaataatgaaaacacaacatatcagaacctgtgggatacagtaaaagctgtactaaggggaaaatttatagctataagtgcctacatcaaaaaagaaaaacttcaaataaacaagccaacaatgcatcttgaagaactagaaaagcatctcgcaggctgtgacgctttattaagaaataaagtctcctctccttttcaaattaaaaaagatttagaaaagcaagagcaaacaaaacccaaaataagtagaagaaaagaaataataaagattggagaagaaataaatgaaattgaaatgaagaaacaacatagaagatcaaggaaacaaaaaattggtttcttgaaaaataaaacaagattgacaaacctt

SEQ ID NO: 22755 - DNA, 1787 bp, Homo sapiens
  MAP TO AF186192.1; EXPRESSED IN HELA, SIGNAL = 3.1; EXPRESSED IN FETAL LIVER, SIGNAL = 1.4; EXPRESSED IN BONE MARROW, SIGNAL = 1.7; EXPRESSED IN LUNG, SIGNAL = 1.5; SWISSPROT HIT: Q99676, EVALUE 0.00e+00; NT HIT: gi16178799, EVALUE 0.00e+00; EST_HUMAN HIT: BE741684.1, EVALUE 0.00e+00
ctgatggaaggttttctctagtaactcatttatatttttctttaacagattctgaggttgggaccaagaaggaactatctattttaaaccaaaaattttccgaagaagtaaaaaccccagaatttgtatcaagaagactcttaagggataatgcacaggccgctgagtttcgggaagcatggggccgtgagggcaaactcaaagagcgcgtgggaaattctgccgggcagagtttgaacaaacccaatattcacaagagagttttaacagaagctaccgtgggcagggaaagatctttgggagaaagaacccaagagtgtagtgcatttgatagaaacttgaatctggaccaaaatgttgttagacttcaaagaaataaaacaggagagagggtctttaaatgtgatatatgcagcaaaaccttcaaatataattcagacctaagtagacaccagagaagtcacactggggagaagccgtacgaatgtggccggtgtgggcgagcctttactcacagctcaaatcttgttctgcaccatcacattcacactggaaataaaccatttaaatgtgatgaatgtgggaaaacttttggactcaattctcacctccgtcttcatcggagaattcacactggagaaaaaccctttggctgtggtgagtgtgggaaggctttcagtcgaagctcaactcttattcaacatcggatcattcacacaggagagaaaccctacaagtgtaatgaatgtggaagaggctttagccagagcccccagttaactcagcatcagagaattcacactggagagaagccgcatgaatgcagtcactgtgggaaggccttcagtcgaagctccagccttattcagcatgagagaattcacactggagagaagccccataaatgcaatcagtgtgggaaggccttcagtcagagctcaagccttttcctccatcatcgggttcatactggagagaaaccctatgtatgtaatgaatgcggcagagcctttggttttaactctcatcttactgaacacgtaaggattcacacaggagaaaaaccctatgtttgtaatgagtgcggcaaagcctttcgtcggagttccactcttgttcagcatcgaagagttcacactggggagaagccctaccagtgcgttgaatgtgggaaagctttcagccagagctcccagctcaccctacatcagcgagttcacactggagagaagccctatgactgtggtgactgtgggaaggccttcagccggaggtcaaccctcattcagcatcagaaagttcacagcggagagactcgtaagtgcagaaaacatggtccagcctttgttcatggctccagcctcacagcagatggacagattcccactggagagaagcacggcagagcctttaaccatggtgcaaatctcattctgcgctggacagttcacactggtgagaaatcctttggatgtaatgaatatggaaaagctttcagtcccacctcacgacccactgaagatcagataatgcatgctggggaaaagccctataaatgtcaagaatgtggaaacgccttcagtggaaagtcaacccttattcaacatcaggtaactcacactggtcagaaaccatgtcattgcagtgtgtatgggaaagccttcagccagagttcacagctcacaccacctcagcagactcgtgttggagagaaacctgctttaaatgatggctctaaaagatactttattcatatcaagaagattttccaagaaagacatttttaa

SEQ ID NO: 22756 - DNA, 603 bp, Homo sapiens
  MAP TO AH009144.1; EXPRESSED IN BRAIN, SIGNAL = 1.3; EXPRESSED IN HELA, SIGNAL = 1.2; EXPRESSED IN BONE MARROW, SIGNAL = 1.3; EXPRESSED IN LUNG, SIGNAL =   1; EXPRESSED IN FETAL LIVER, SIGNAL = 1.3; SWISSPROT HIT: P08547, EVALUE 8.00e-72; NT HIT: AF213884.1, EVALUE 0.00e+00; EST_HUMAN HIT: BG562823.1, EVALUE 1.00e-104
attaaaccaggaagatatagaaacactgaacagaccaataacaagaagcaagattgaaatggttaaaaaaaatgccaataaaaatagtccaggaccagaaggattcacagctgaattctatcaggcattcaaagaagaattggtaccaatcctactgacactattccaaaagatagagaaagaggaaattttccctaagtcattctatgaagtcagcatcacccttataccagaaccaggaagggacacaacaaaaaaagaaaactatagaccaatatccctgatgaacatagatgcaaaagtcctcaacaaaatactagtgagccaaatccaacagcatatcaaaaagataatccaccatgatcaactgggtttcagaccagggatgcagggatggtttaacataggcaagtcaataactgtgatacaccacacaaacagaattaaaaacaaaaatcacatgatcatctcaagagacacagaaaaagcatttgacgaaatccagcatccttttatgattaaaaccctcagcaaaattggcacagaagagacatgccttaaggtaataaaagccacctgcgagaaacccacagccaacattat

SEQ ID NO: 22757 - DNA, 682 bp, Homo sapiens
  MAP TO Z69638.1; EXPRESSED IN HELA, SIGNAL = 2.1; EXPRESSED IN PLACENTA, SIGNAL = 2.3; EXPRESSED IN BRAIN, SIGNAL = 1.7; EXPRESSED IN BONE MARROW, SIGNAL = 1.9; EXPRESSED IN LUNG, SIGNAL = 1.5; EXPRESSED IN HEART, SIGNAL = 2.1; EXPRESSED IN FETAL LIVER, SIGNAL = 1.6; SWISSPROT HIT: P75330, EVALUE 9.00e-06; NT HIT: AJ277253.2, EVALUE 1.70e-01
tgccaggcagtgtgccccacgcccagctctgcccccacccctacctgttgctgccaccagtgccaggcagtgtgcccacgcccagctctgcccccacccctacctgttgctgccaccagtgccaggcagtgtgcccacgcccagctctgcccccacccctacctgttgctgccaccagtgccaggcagtgtgcccacgcccagctctgcccccacccctacctgttgctgccaccagtgccaggcagtgtgccccacgcccagctctgcccccacccctacctgttgctgccaccagtgccaggcagtgtgccccacgcccagctctgcccccacccctacctgttgctgccaccagtgccaggcagtgtgccccacgcccagctctgcccccacccccgagcccagagccaacatgcagatgtgccttggtggggggggctccgccctggctgccccccaggccacagctctctcaggcctctgtccctgcctcagttattcccccagggcacattcctcaagagtgtgggtggccaggggacaagcagccctcgcccagccacctcctccttgccagccaaggcctgggggtgctgcaagtggtgacccagacacctcctctcctcgttctccttgtgcgggatcccctcaggagtcccggagccccttctgggagctaa

SEQ ID NO: 22758 - DNA, 2084 bp, Homo sapiens
  MAP TO AC010680.2; EXPRESSED IN BRAIN, SIGNAL = 0.98; EXPRESSED IN HELA, SIGNAL = 0.51; EXPRESSED IN BONE MARROW, SIGNAL =   1; EXPRESSED IN HEART, SIGNAL = 4.6; SWISSPROT HIT: Q90688, EVALUE 2.00e-52; NT HIT: gi16157781, EVALUE 0.00e+00; EST_HUMAN HIT: BE835668.1, EVALUE 0.00e+00
tgcctccatccgtggagctagatgtgaaattaattgaaggtcttgtggtaaaggctggaaccacagtcagattccctgctattataagaggtgtgcctgttcctactgcaaagtggacaaccgatgggagtgagattaaaaccgatgagcactacacagttgaaacagacaacttctcatcagtacttaccattaagaactgcttaaggagagacactggggaatatcaaatcacagtttccaatgcagccggtagcaaaacagtagccgtacatcttactgttcttgatgttcctgggccaccaacaggtcctattaatattctggatgttactcctgaacacatgactatctcatggcagccacctaaggatgatggaggaagccctgtgataaattatattgttgagaaacaagatacaaggaaagacacgtggggtgttgtctcttccggaagcagtaagacaaagctgaaaatcccacatctgcagaagggctgtgaatatgttttccgagttagagcagagaataagataggtgttggtcctccccttgactccacacctactgttgctaagcataaatttagtcctccgtctcctcctggtaaaccagtggttactgacattactgaaaatgcagcaacagtgtcttggaccctgccaaaatctgatggtggcagtccaataactggctactatatggaacgtcgagaagtaactggcaaatgggtgagggtcaacaaaacacctatcgctgacctgaagttcagagtgactggactctatgaaggaaatacatatgagtttagagtttttgctgaaaatcttgcaggactaagcaaaccatccccaagttctgatccaataaaagcttgccggcccatcaaaccacctggaccacctattaatcctaaactgaaagacaagagcagagaaacagctgatttggtgtggacaaagcctctcagtgatggtggtagccccattctaggatatgtagtggaatgtcagaaacctggcacagcacaatggaacaggattaataaagatgaactcattaggcaatgtgcctttagggtacctggactaattgaaggaaatgagtacagattccgtataaaggcagctaatattgtaggagagggtgagccaagagaactagcagaatctgtgattgcaaaagatatccttcatcctccagaagtagaacttgatgttacttgtcgtgatgttattaccgtgagagtaggccaaactatccgcattctagctcgagtcaaaggcagacctgaaccagacataacttggactaaggaaggcaaagtattggtccgagaaaagagggtggaccttattcaggatctacctcgtgttgagttacaaattaaagaagctgttagagctgatcatggcaagtatatcatctcagctaagaacagcagtggacatgcccaaggttcagccatcgttaacgtccttgacagacctgggccttgccagaatttgaaggttaccaatgtaaccaaagagaactgtacaatttcttgggaaaacccactagataatggtggctcagaaataacaaacttcatagtagaatatcgcaaaccaaaccagaaaggctggtcaattgttgcatcagatgtcactaaacgattaatcaaggccaaccttttagccaacaatgaatactatttccgagtttgtgcagagaataaagtaggtgttgggccaaccatcgaaacaaaaactcccattctggctattaaccctattgacagaccaggtgagcctgaaaaccttcacattgcagataaaggaaagacatttgtctatctaaagtggcggaggcctgactatgatggtggcagtccaaatctgtcatatcatgttgagagaaggcttaagggctccgatgactgggaaagagtgcataaaggaagcattaaagaaactcactacatggttgacagatgtgttgaaaaccagatttatgagttcagagtgcaaacaaagaatgaaggtggggaaagtgactgggtgaagacagaggaagttgttgtgaaagaagacttacaaaaa

SEQ ID NO: 22759 - DNA, 1062 bp, Homo sapiens
  MAP TO AC006272.1; EXPRESSED IN LUNG, SIGNAL = 1.2; EXPRESSED IN FETAL LIVER, SIGNAL = 0.94; EXPRESSED IN PLACENTA, SIGNAL = 1.6; EXPRESSED IN BRAIN, SIGNAL =   1; EXPRESSED IN HELA, SIGNAL = 1.3; EXPRESSED IN BONE MARROW, SIGNAL = 0.91; EST_HUMAN HIT: BI912536.1, EVALUE 1.00e-107; NT HIT: gi11426996, EVALUE 0.00e+00; SWISSPROT HIT: P25089, EVALUE 0.00e+00
atggaaaccaacttctccattcctctgaatgaaactgaggaggtgctccctgagcctgctggccacaccgttctgtggatcttctcattgctagtccacggagtcacctttgtcttcggggtcctgggcaatgggcttgtgatctgggtggctggattccggatgacacgcacagtcaacaccatctgttacctgaacctggccctagctgacttctctttcagtgccatcctaccattccgaatggtctcagtcgccatgagagaaaaatggccttttggctcattcctatgtaagttagttcatgttatgatagacatcaacctgtttgtcagtgtctacctgatcaccatcattgctctggaccgctgtatttgtgtcctgcatccagcctgggcccagaaccatcgcaccatgagtctggccaagagggtgatgacgggactctggattttcaccatagtccttaccttaccaaatttcatcttctggactacaataagtactacgaatggggacacatactgtattttcaactttgcattctggggtgacactgctgtagagaggttgaacgtgttcattaccatggccaaggtctttctgatcctccacttcattattggcttcagcgtgcctatgtccatcatcacagtctgctatgggatcatcgctgccaaaattcacagaaaccacatgattaaatccagccgtcccttacgtgtcttcgctgctgtggtggcttctttcttcatctgttggttcccttatgaactaattggcattctaatggcagtctggctcaaagagatgttgttaaatggcaaatacaaaatcattcttgtcctgattaacccaacaagctccttggccttttttaacagctgcctcaacccaattctctacgtctttatgggtcgtaacttccaagaaagactgattcgctctttgcccactagtttggagagggccctgactgaggtccctgactcagcccagaccagcaacacagacaccacttctgcttcacctcctgaggagacggagttacaagcaatgtga

SEQ ID NO: 22760 - DNA, 1335 bp, Homo sapiens
  MAP TO AP001705.1; EXPRESSED IN BONE MARROW, SIGNAL = 0.77; EXPRESSED IN HELA, SIGNAL = 0.8; EST_HUMAN HIT: AU135531.1, EVALUE 0.00e+00; SWISSPROT HIT: O14867, EVALUE 0.00e+00; NT HIT: gi6680763, EVALUE 2.00e-92
gtgacagttaaaggatttgaacctttaattcagtttgcctacactgctaaactgattttaagtaaagagaatgtggatgaagtgtgcaaatgtgtggagtttttaagtgtacataatattgaggaatcctgctttcagtttctgaaatttaagtttttggactccactgcagaccagcaagaatgcccaagaaaaaaatgcttttcatcacactgtcagaaaacagaccttaaactttcacttttggaccagagggatctagaaactgatgaagtggaggaatttctggaaaataaaaatgttcagactcctcagtgtaaactccgcaggtatcaaggaaatgcaaaagcctcacctcctctacaagacagtgccagtcagacatatgagtccatgtgcttagagaaggatgctgctctggccttgccttctttatgccccaaatacagaaaattccaaaaagcatttggaactgacagagtccgtactggggaatctagtgtcaaagacattcatgcttctgttcagccaaatgaaaggtctgaaaatgaatgcctgggaggagtcccggagtgtagagatttgcaggtgatgttaaaatgtgacgaaagtaaattagcaatggaacctgaagaaacgaagaaagatcctgcttctcagtgcccaactgaaaaatcagaagtgactcctttcccccacaattcttccatagaccctcatggactttattctttgtctcttttacacacatatgaccaatatggtgacttgaattttgctggtatgcaaaacacaacagtgttaacagaaaagcctttgtcaggtacagacgtccaagaaaaaacatttggtgaaagtcaggatttacctttgaaatccgacttgggcaccagggaagatagtagtgttgcatctagtgataggagtagtgtggagcgagaagtggcagaacacctagcaaaaggcttctggagtgacatttgcagcacggacactccttgccaaatgcagttatcacctgctgtggccaaagatggctcagaacagatctcacagaaacggtctgagtgtccgtggttaggtatcaggattagtgagagcccagaaccaggtcaaaggactttcacaacattaagttctgtcaactgcccttttataagtactctgagtactgaaggctgttcaagcaatttggaaattggaaacgatgattatgtttcagaaccccagcaagaaccttgcccatatgcttgtgtcattagcttgggagacgactctgagacggacaccgaaggagacagtgaatcctgttcagccagagaacaagaatgtgag

SEQ ID NO: 22761 - DNA, 605 bp, Homo sapiens
  MAP TO AC007159.4; EXPRESSED IN PLACENTA, SIGNAL = 2.2; EXPRESSED IN HELA, SIGNAL = 0.79; EXPRESSED IN LUNG, SIGNAL = 1.5; EXPRESSED IN HEART, SIGNAL = 1.8; EXPRESSED IN BONE MARROW, SIGNAL = 1.5; EST_HUMAN HIT: AI884987.1, EVALUE 5.00e-70; SWISSPROT HIT: O95416, EVALUE 1.00e-104; NT HIT: gi11435092, EVALUE 0.00e+00
atgtccaaaccttcagaccacatcaagcggcccatgaacgccttcatggtatggtcccggggccagcggcgcaagatggcccaggaaaaccccaagatgcacaactcggagatcagcaaacgcctaggtgccgaatggaagcttctgtccgaggcagagaagcggccatacatcgatgaagccaagcggctacgcgcccagcacatgaaggagcaccctgactacaagtaccgacctcggcgcaagcccaagaacctgctcaagaaggacaggtatgtcttccccttgccctacctgggcgacacggacccgctcaaggcggctggcctgcccgtgggggcctccgacggcctcctgagcgcgcccgagaaagcccgggccttcttgccgccggcctcggcgccctactccctgctggaccccgcgcagtttagctcgagcgccatccagaagatgggcgaagtgccccacaccttggctaccggcgctctgccctacgcgtccaccctgggctaccagaacggcgccttcggcagcctcagctgccccagccagcacacgcacacgcacccgtcccccaccaaccctggctacgtggtgccctg

SEQ ID NO: 22762 - DNA, 1034 bp, Homo sapiens
  MAP TO AP000287.1; EXPRESSED IN HELA, SIGNAL = 0.48; EXPRESSED IN BONE MARROW, SIGNAL = 0.88; SWISSPROT HIT: Q13516, EVALUE 1.00e-121; EST_HUMAN HIT: AI553817.1, EVALUE 0.00e+00; NT HIT: AF221520.1, EVALUE 0.00e+00
ttttcgggtccgagggaaggaggaccctgcgaaagctgcgacgactatcttcccctggggccatggactcggacgccagcctggtgtccagccgcccgtcgtcgccagagcccgatgacctttttctgccggcccggagtaagggcagcagcggcagcgccttcactgggggcaccgtgtcctcgtccaccccgagtgactgcccgccggagctgagcgccgagctgcgcggcgctatgggctctgcgggcgcgcatcctggggacaagctaggaggcagtggcttcaagtcatcctcgtccagcacctcgtcgtctacgtcgtcggcggctgcgtcgtccaccaagaaggacaagaagcaaatgacagagccggagctgcagcagctgcgtctcaagatcaacagccgcgagcgcaagcgcatgcacgacctcaacatcgccatggatggcctccgcgaggtcatgccgtacgcacacggcccttcggtgcgcaagctttccaagatcgccacgctgctgctggcgcgcaactacatcctcatgctcaccaactcgctggaggagatgaagcgactggtgagcgagatctacgggggccaccacgctggcttccacccgtcggcctgcggcggcctggcgcactccgcgcccctgcccgccgccaccgcgcacccggcagcagcagcgcacgccgcacatcaccccgcggtgcaccaccccatcctgccgcccgccgccgcagcggctgctgccgccgctgcagccgcggctgtgtccagcgcctctctgcccggatccgggctgccgtcggtcggctccatccgtccaccgcacggcctactcaagtctccgtctgctgccgcggccgccccgctggggggcgggggcggcggcagtggggcgagcgggggcttccagcactggggcggcatgccctgcccctgcagcatgtgccaggtgccgccgccgcaccaccacgtgtcggctatgggcgccggcagcctgccgcgcctcacctccgacgccaagtga

SEQ ID NO: 22763 - DNA, 691 bp, Homo sapiens
  MAP TO AL109928.12; EXPRESSED IN HELA, SIGNAL = 1.2; EXPRESSED IN BONE MARROW, SIGNAL = 0.91; EXPRESSED IN BRAIN, SIGNAL = 0.92; EST_HUMAN HIT: AL532901.1, EVALUE 0.00e+00; NT HIT: gi14786541, EVALUE 0.00e+00; SWISSPROT HIT: P40036, EVALUE 6.00e-03
cctgggatcccggaagctcggcccccggagcctcagctgcctgtcggacctggacggcggcgtggccctggagccgcgggcctgtaggccccctgggagcccgggccgcgcgccgccgccaacgccagcgccgtcgggctgcgacccccgcctgcggcccatcatcctgcggcgggcgcgctcactgcccagctcccccgagcgccgccagaaggccgcgggcgcgccgggcgctgcgtgtcggccgggctgcagccagaagctccgcgtgcgcttcgccgacgccctgggcttggagctggcacaggtcaaggtgttcaacgcgggagacgacccgtccgtgccgctgcacgtgctgtcgcggctcgcaatcaactcggacctgtgctgcagcagccaggacctggagttcaccctgcattgcctggtgcccgatttcccgccgcccgtcgaggccgccgactttggcgagcgcctgcagcggcagctcgtgtgcctggagcgtgtcacttgctcggaccttggcatcagcggtacggtgcgcgtgtgcaacgtggccttcgagaagcaggtggctgtgcgctacactttctcgggctggcgcagtacccacgaggcggtggcgcggtggcgcgggcccgcaggccccgagggcacggaggacgttttcaccttcggctttccagtaccg

SEQ ID NO: 22764 - DNA, 618 bp, Homo sapiens
  MAP TO AC016786.4; EXPRESSED IN BRAIN, SIGNAL = 1.2; EXPRESSED IN BONE MARROW, SIGNAL = 1.3; EXPRESSED IN FETAL LIVER, SIGNAL =   1; EXPRESSED IN LUNG, SIGNAL = 1.1; EXPRESSED IN HELA, SIGNAL = 1.4; EST_HUMAN HIT: AA249856.1, EVALUE 1.00e-107; NT HIT: gi15302306, EVALUE 0.00e+00; SWISSPROT HIT: P24563, EVALUE 2.40e-01
agatcgacccgtccagcggcgagatccgcacgctgcaccctttctgggaggacgtgacgcccgtggtggagctggtggtgaaggtgaccgaccacggcaagcctaccctgtccgcagtggccaagctcatcatccgctcggtgagcggatcccttcccgagggggtaccacgggtgaatggcgagcagcaccactgggacatgtcgctgccgctcatcgtgactctgagcactatctccatcatcctcctagcggccatgatcaccatcgccgtcaagtgcaagcgcgagaacaaggagatccgcacttacaactgccgcatcgccgagtacagccacccgcagctgggtgggggcaagggcaagaagaagaagatcaacaaaaatgatatcatgctggtgcagagcgaagtggaggagaggaacgccatgaacgtcatgaacgtggtgagcagcccctccctggccacctcccccatgtacttcgactaccagacccgcctgcccctcagctcgccccggtcggaggtgatgtatctcaaaccggcctccaacaacctgactgtccctcaggggcacgcgggctgccacaccagcttcaccggacaagggactaatg

SEQ ID NO: 22765 - DNA, 1167 bp, Homo sapiens
  MAP TO AP001717.1; EXPRESSED IN BRAIN, SIGNAL = 0.94; EXPRESSED IN HELA, SIGNAL = 0.57; EXPRESSED IN BONE MARROW, SIGNAL = 0.84; EXPRESSED IN HEART, SIGNAL = 1.2; EST_HUMAN HIT: AI678113.1, EVALUE 0.00e+00; NT HIT: gi14780241, EVALUE 0.00e+00; SWISSPROT HIT: P92029, EVALUE 3.00e-06
tcaaaatgatcgtattttaataaatttccacagattcatccagtttaaaaaacctttcttgatttcaggtgttttctctccttctccttgatcaaggttatttgggtttctatctgtgacttcttttgtttttataagggtctcgtatattttctgggctctgacaatttctttctgagcatcaaaatggactttttgcctggtcaggatgggaacaattaaattaaaatcattaattcgcttgtttaattttctgatgttttcttgaaactgctcacaaacatggttccactgtttcttttcagttggtgtcattggattcccaagttttttcctagacactaaaattgcctctctgagttgctcaatagtatcgcttatttccttttgcttaaggatccattctggttggtatccattatcgatcagtattcggttcaggttgtgagtcatgggatcaatgtaagaacagtcagaaaactttttcagaggttttcctttcccactgagattgtcaaagtctccttttgccatggattcttgaatgaggtcctccactaaacgttctatagcttgcgttatcttttgctgtttgctctgtcttatatttttaacaattacactatcaggaaaatactggctttgtagtttctgcttttgatattccatcacttgttcagcagcacggtctgccctaaattgcctataatgcttctctcgttgagttggagtcccaaaaccaataccttcaaaacttaaataatgtcggtgttggggtgttttatatttgaatttttctacatcttcttcttcttcacctttactctgactggcatttgtttgttctatcacatgggagagcacctttctataagctttttcaatccttataaatgttgcagaatcagcagtattagagccactgtcaggatgatattgcttggcaagcttatgaaaagattccctgacttcatctgcagagcatccttcctccacgttcagcagtctataatattctctgatcttctttttggatttatgggttgacatcattctatttctaatgataccaaaatatggaagcattttcactcgattaggaatcactgtagcctttatcaggtgagatcttaagatctgagccatcatcacatacattgtattcat

SEQ ID NO: 22766 - DNA, 502 bp, Homo sapiens
  MAP TO AC008462.5; EXPRESSED IN BONE MARROW, SIGNAL = 0.88; EXPRESSED IN HELA, SIGNAL = 0.93; EXPRESSED IN BRAIN, SIGNAL = 1.2; EST_HUMAN HIT: BI827744.1, EVALUE 3.00e-03; SWISSPROT HIT: Q91637, EVALUE 4.10e-01
cgccgccgccgccgccgccgcagcccccgccgccgcagcggggctgcttgcagggggtgcaggcggggaccccggcccccttccgcttgcacaccatttcggggggcgtagggagctcggccggtgacggtgtcggcccccggaagagctgcacggcggcgggcggccccaggaagcgcaccggccccaagctggccaggaagagacttcggccctgctgctcccaggcggcggccgcagccagccccaactctttgcagcaggaggcgggcgacgaagccgaggcggcagcggcggcggcggcggcggccgaggatagcaggaagcggcgggcagcagcggcgcagtcctcggcggccagggccgcgtagcgccgcgccaggtgctgagaggaggaggcggcagcgtaggccccgtcccgcggcggcggcgagagcggcggctcctcctctgggccggcgggggcgggcgcgccgggactgtgcacgatgaagcagagcat

SEQ ID NO: 22767 - DNA, 591 bp, Homo sapiens
  MAP TO AL035701.13; EXPRESSED IN PLACENTA, SIGNAL = 1.6; EXPRESSED IN BRAIN, SIGNAL = 0.99; EXPRESSED IN HELA, SIGNAL = 1.2; EXPRESSED IN BONE MARROW, SIGNAL = 0.9; EXPRESSED IN FETAL LIVER, SIGNAL =   1; SWISSPROT HIT: O08582, EVALUE 2.60e+00; EST_HUMAN HIT: AI267482.1, EVALUE 5.30e-02; NT HIT: U62631.1, EVALUE 3.60e-02
tcaccagggttgtaaaaggggaggctgaaagactacttgacaaaataatgactaaaaacttctccaacttgactagacacaaatctacagatccaagaagctgagtgaatgcccaaacagaataaacccaaataaatccacacctaggtacattgtaggtaaacttgttaaaaagggccccccactcaacaacttaaaagaaaaatcttgaaagtagccaaagagaagcaatgcattacttatagaacaccaagtctgatgacagcagattcttacctgaaatcatggaggccagaggcaatggcacagtatttctcaagtgcttaaaaaagaagtgactttcataaattctgtataccatgaaactatcctaaagaatgaaggggaaataaaatcattctctgaactagagaaattaaaagaagtggctgctagcagaagacccacttttaaagataggtaaagaatgttcttcagacataaaggaaatggtaataaaaaaagaatcttagagtgtcagtaaggaagatggaaaaatgagaacagcagacacttgagtacatacaatagactatcctttttctcatgagt

SEQ ID NO: 22768 - DNA, 979 bp, Homo sapiens
  MAP TO AC002326.1; EXPRESSED IN HELA, SIGNAL = 0.49; EXPRESSED IN BRAIN, SIGNAL = 1.6; EXPRESSED IN BONE MARROW, SIGNAL = 0.86; NT HIT: gi14761775, EVALUE 0.00e+00; EST_HUMAN HIT: BI046526.1, EVALUE 1.00e-100; SWISSPROT HIT: P54253, EVALUE 0.00e+00
atgaaatccaaccaagagcggagcaacgaatgcctgcctcccaagaagcgcgagatccccgccaccagccggtcctccgaggagaaggcccctaccctgcccagcgacaaccaccgggtggagggcacagcatggctcccgggcaaccctggtggccggggccacgggggcgggaggcatgggccggcagggacctcggtggagcttggtttacaacagggaataggtttacacaaagcattgtccacagggctggactactccccgcccagcgctcccaggtctgtccccgtggccaccacgctgcctgccgcgtacgccaccccgcagccagggaccccggtgtcccccgtgcagtacgctcacctgccgcacaccttccagttcattgggtcctcccaatacagtggaacctatgccagcttcatcccatcacagctgatccccccaaccgccaaccccgtcaccagtgcagtggcctcggccgcaggggccaccactccatcccagcgctcccagctggaggcctattccactctgctggccaacatgggcagtctgagccagacgccgggacacaaggctgagcagcagcagcagcagcagcagcagcagcagcagcagcatcagcatcagcagcagcagcagcagcagcagcagcagcagcagcagcagcagcacctcagcagggctccggggctcatcaccccggggtcccccccaccagcccagcagaaccagtacgtccacatttccagttctccgcagaacaccggccgcaccgcctctcctccggccatccccgtccacctccacccccaccagacgatgatcccacacacgctcaccctggggcccccctcccaggtcgtcatgcaatacgccgactccggcagccactttgtccctcgggaggccaccaagaaagccgagagcagccggctgcagcaggccatccaggccaaggaggtcctgaacg

SEQ ID NO: 22769 - DNA, 813 bp, Homo sapiens
  MAP TO AC011334.1; EXPRESSED IN PLACENTA, SIGNAL = 1.6; EXPRESSED IN BRAIN, SIGNAL =   1; EXPRESSED IN HELA, SIGNAL =   2; EXPRESSED IN BONE MARROW, SIGNAL = 1.1; NT HIT: gi15718673, EVALUE 0.00e+00; EST_HUMAN HIT: AL576640.1, EVALUE 0.00e+00; SWISSPROT HIT: P07550, EVALUE 0.00e+00
atggtgtggattgtgtcaggccttacctccttcttgcccattcagatgcactggtaccgggccacccaccaggaagccatcaactgctatgccaatgagacctgctgtgacttcttcacgaaccaagcctatgccattgcctcttccatcgtgtccttctacgttcccctggtgatcatggtcttcgtctactccagggtctttcaggaggccaaaaggcagctccagaagattgacaaatctgagggccgcttccatgtccagaaccttagccaggtggagcaggatgggcggacggggcatggactccgcagatcttccaagttctgcttgaaggagcacaaagccctcaagacgttaggcatcatcatgggcactttcaccctctgctggctgcccttcttcatcgttaacattgtgcatgtgatccaggataacctcatccgtaaggaagtttacatcctcctaaattggataggctatgtcaattctggtttcaatccccttatctactgccggagcccagatttcaggattgccttccaggagcttctgtgcctgcgcaggtcttctttgaaggcctatgggaatggctactccagcaacggcaacacaggggagcagagtggatatcacgtggaacaggagaaagaaaataaactgctgtgtgaagacctcccaggcacggaagactttgtgggccatcaaggtactgtgcctagcgataacattgattcacaagggaggaattgtagtacaaatgactcactgctgtaaagcagtttttctacttttaaagacccccccccccaa

SEQ ID NO: 22770 - DNA, 780 bp, Homo sapiens
  MAP TO Z84480.1; EXPRESSED IN HELA, SIGNAL = 1.8; EXPRESSED IN BRAIN, SIGNAL = 1.1; EXPRESSED IN BONE MARROW, SIGNAL = 8.8; SWISSPROT HIT: Q99439, EVALUE 1.00e-117; NT HIT: gi14765608, EVALUE 0.00e+00; EST_HUMAN HIT: BG682800.1, EVALUE 0.00e+00
ggccccgacttccagaagggcctgaaggacgggattagtttatggacactcatgaacaagctacagccgggctcagtcctcaagatcaaccgttccatgcagaactggcaccaactagaaaacctctccaatttcatcaaggccatggtcagctacggcatgaacaccgtggacctgttcgatgccaacgacctgtttgagagtgggaacatgacgcagctgcaggtgtctcttctcgccctggtgagtaaggccaggactaaggggctgcagagcggggtggacatcggccttaagtactcggagaagcaggagccgaacttcgacgacgccaccatgaaggctggccagtgcaccatcgggctgcagatgggcaccaacaaatgcaccagccagtcgggcatgaccgcgtacagcacaaggaggcatctctacgaccccaagaaccacatcctgccccccatggacaacttaaccatcagcctccagatgggtacaaacaagtgtgccagccaggtgggcatgacggctccgggacccggttgacaccaagctgggaaccgacaagtgtgacaactcctccatgtcgctgcagatgggctacacgcagggcgccaagcaaagcggccaggtctttggcctgggccggcagatacatgaccccaagttctgcccagaaggcacagtggccgacagggctccctcgggcgcgcaggctcgggggaggtccctgaatatcccccttactaccaggaggaggctggctactgaggctcccag

SEQ ID NO: 22771 - DNA, 745 bp, Homo sapiens
  MAP TO AL359400.1; EXPRESSED IN BRAIN, SIGNAL = 1.7; EXPRESSED IN HELA, SIGNAL = 1.2; EXPRESSED IN LUNG, SIGNAL = 1.4; EXPRESSED IN BONE MARROW, SIGNAL = 1.6; NT HIT: AJ278581.1, EVALUE 0.00e+00; EST_HUMAN HIT: AV730925.1, EVALUE 0.00e+00; SWISSPROT HIT: P03341, EVALUE 2.00e-12
cgggtgattggcctgctccattttctgtcctctctgaaccaccaaggtttgtttgtctgagggccatgactaaggctgcggtctttctctgatcttgcttttccttttgggcctgttcctcttggtccctgttatagaatactgaggttgccaggtttaataatgtctccaaattttgtttagggcccagggcttgcttttggaactttctcctgatatctgtggctgattgggtaataaacttatcttttagaatcaattgaccctcaagtgatttggttgacaggggagtatattttcttaaggcctcccatagccgctcgagggaggcagaaggattttcttcctttccctgagttatggtggacatcattgaataattcatgtactttttcctaattctccttagtccttctagaacacaggtcaacagatgtttgcaactgcagtccccatgatctgagtcaaggtcccagtggggatccatactggggacagcttgctgaccgttagggattttgcccctttcttcagctgtcattctgtcatttacttgactaagataccaagtatctccaaactcttgggctgcagctaaagctgcattcttttcattaaaggccagggtttgatctaacaatagcatgacatctctccaaatgagatagaagatttgtcctagaccctgtaggacatttatgtacctatcaggatcatctgaaaaattccccaggtctgccttgat

SEQ ID NO: 22772 - DNA, 497 bp, Homo sapiens
  MAP TO AC004616.1; EXPRESSED IN BONE MARROW, SIGNAL = 0.83; EXPRESSED IN PLACENTA, SIGNAL = 2.1; EXPRESSED IN BRAIN, SIGNAL =   1; EXPRESSED IN HELA, SIGNAL = 1.7; SWISSPROT HIT: P09034, EVALUE 4.00e-58; NT HIT: gi14740519, EVALUE 0.00e+00; EST_HUMAN HIT: BF725480.1, EVALUE 0.00e+00
gtgcccggggtcctagtggttcactgcactgtgaagacagattccagatgcagggaactcacacctccaatcccagacgctgtgtccagcaaaggctccatggttctggcccacagtggtggcctggacacctcctgcatcctcatgtggctgaaggaacaaggccatgatgtcattgcctacctggccaaaatcagccagaaggaagacttcgaggatgacaggaagaaggcatggaagcttggggccaaaaaggtgttcattgatgatgtcagcagggactttgtggaggagttcatctggccagccatccagtccagcatcctgtatgaggactactacctcctgggcacctctctggctaggccctgcatcgcccacaaacaagtggaaatcacccagcaggaggggaccaagtatgtatcctacggcgtcatgggaaaggggaacgatcatgtcctgtttgagctcacctgctcactggccctcagattaag

SEQ ID NO: 22773 - DNA, 667 bp, Homo sapiens
  MAP TO Z54335.1; EXPRESSED IN BRAIN, SIGNAL =   1; EXPRESSED IN HELA, SIGNAL = 1.5; EXPRESSED IN LUNG, SIGNAL = 0.98; EXPRESSED IN HEART, SIGNAL = 1.4; EXPRESSED IN BONE MARROW, SIGNAL = 1.2; EST_HUMAN HIT: AI311472.1, EVALUE 6.00e-02; SWISSPROT HIT: P19246, EVALUE 2.00e-05; NT HIT: Z73568.1, EVALUE 6.40e-01
gcacacggcatcctgacggtgggacaagaagaagatgcctggagaagagcacagagcacgtgagagccccggaaacccgcgcagagcacgcgagagtcctggaaaccaacccacacagagcacgcgagagccccgcacacccgcgcagagcacgcgagagtcctggaaaccgactcacagagcacgtgagagccccggaaacccgcgcagagcacgcgagagtcccggaaaccaacccacacagagcatgcgagagccccgcacacccgcgcagagcacgcgagagtcctggaaaccgacccacgccgagcaagcgagagccccggaaacggaccaacgcggagcaagtgagagccccggaaatcgaccaacgcagagcacgcgggagtcccaggaaaccgacctgcgcagagcacgccagagtccccgaaacccgcgcagagcacgcggtagtcctggaaaccgacccgcgcagagcacgcgagagccccggaaaccgaccaacgcggagcacgcgagagccccggaaaccgacccgcacgaagcacgcgggagccaccgcttcattccacgcaccacccacttgctgggcgtcttcagagttctaaaaacccaagaaagaaaaagattggaagaggaggtgaagatgtcccagaaagtggaataa

SEQ ID NO: 22774 - DNA, 552 bp, Homo sapiens
  MAP TO AL132780.1; EXPRESSED IN BONE MARROW, SIGNAL = 1.1; EXPRESSED IN FETAL LIVER, SIGNAL = 1.1; NT HIT: gi14751308, EVALUE 0.00e+00; EST_HUMAN HIT: BG823895.1, EVALUE 0.00e+00; SWISSPROT HIT: P54748, EVALUE 4.60e-01
agcaggggggccgcctcgctggcagccagcgtgcaccctgggagccgcatgtccctctgagttgctgggaagcccaaaggcccaggccccactgaggctgctcccagctgccgcagctcctcaatcaccacctgcacgccgctgcccacgctgtcacactcctcttccacggcagacagagccttaaaggcttccccgggactttccttgagaggcccaggctcctcaggtggggaactatgtgcccggctttccccatcttcatcagggatggacactttcccttgcctcaggtcacccacttcctcctggagacgttttaacaactcattgttggccctggcaagacccagagcagcttcagccaaacccactgccttatcgacccgctggtagataacatgcaggagctgctctgagctctgaacagccaagccatgtccagtcactgtgatgggggtgctgggaggaggattcccaccctgggagcctgtgttgcctccattagtctcactcttacaggcgcagcagcagcatctggcctcgctgcca

SEQ ID NO: 22775 - DNA, 1007 bp, Homo sapiens
  MAP TO AF002994.1; EXPRESSED IN HELA, SIGNAL = 2.8; EXPRESSED IN BRAIN, SIGNAL = 0.99; EXPRESSED IN LUNG, SIGNAL = 0.94; EXPRESSED IN BONE MARROW, SIGNAL = 1.1; NT HIT: gi15307855, EVALUE 0.00e+00; EST_HUMAN HIT: BI090658.1, EVALUE 0.00e+00; SWISSPROT HIT: P43357, EVALUE 0.00e+00
agtgggtctccattgcccagctcctgcccacactcccgcctgttgccctgaccagagtcatcatgcctcttgagcagaggagtcagcactgcaagcctgaagaaggccttgaggcccgaggagaggccctgggcctggtgggtgcgcaggctcctgctactgaggagcaggaggctgcctcctcctcttctactctagttgaagtcaccctgggggaggtgcctgctgccgagtcaccagatcctccccagagtcctcagggagcctccagcctccccactaccatgaactaccctctctggagccaatcctatgaggactccagcaaccaagaagaggaggggccaagcaccttccctgacctggagtccgagttccaagcagcactcagtaggaaggtggccgagttggttcattttctgctcctcaagtatcgagccagggagccggtcacaaaggcagaaatgctggggagtgtcgtcggaaattggcagtatttctttcctgtgatcttcagcaaagcttccagttccttgcagctggtctttggcatcgagctgatggaagtggaccccatcggccacttgtacatctttgccacctgcctgggcctctcctacgatggcctgctgggtgacaatcagatcatgcccaaggcaggcctcctgataatcgtcctggccataatcgcaagagagggcgactgtgcccctgaggagaaaatctgggaggagctgagtgtgttagaggtgtttgaggggagggaagacagtatcttgggggatcccaagaagctgctcacccaacatttcgtgcaggaaaactacctggagtaccggcaggtccccggcagtgatcctgcatgttatgaattcctgtggggtccaagggccctcgttgaaaccagctatgtgaaagtcctgcaccatatggtaaagatcagtggaggacctcacatttcctacccacccctgcatgagtgggttttgagagagggggaagagtga

SEQ ID NO: 22776 - DNA, 545 bp, Homo sapiens
  MAP TO AC007676.19; EXPRESSED IN HEART, SIGNAL = 1.5; EXPRESSED IN BONE MARROW, SIGNAL = 2.1; EXPRESSED IN LUNG, SIGNAL = 2.2; EXPRESSED IN HELA, SIGNAL = 3.4; EXPRESSED IN PLACENTA, SIGNAL = 1.7; EST_HUMAN HIT: BE515346.1, EVALUE 0.00e+00; SWISSPROT HIT: Q14585, EVALUE 1.00e-69; NT HIT: gi14766687, EVALUE 4.00e-23
cttacattcatagggtttcacaccagtatgaattttctgatgttgattaagatatccatgcaagctaaaggtcttgccacattccttacatttatagggtttctcaccagtatgagttttccgatgttgaataaggtttgagccagtactataggccttcccacattcctgacattcaaaaagtttcttaccagtgtgaatattctgatgtcgagtaagatttctatacaaagtaaaggtttttttacactccttacattcaaagtgtttcatgccagtatgaattttctgatgttgtttaaggtagccatacaagctaaaggcctttccgcattccttgcattcatagggtttctcgccagtatgagttttctgatgttgaaagagttttgaaccagtagtataggtcttcccacattgcttgcattcaaaaagtttctcaccagtatgaatattctgatgccgagtaagatttctatacaaagtaaaggttttcttacactccttacattcatagggttttccacctttatgaattctctgat

SEQ ID NO: 22777 - DNA, 726 bp, Homo sapiens
  MAP TO AC002556.1; EXPRESSED IN PLACENTA, SIGNAL = 3.2; EXPRESSED IN BRAIN, SIGNAL = 2.4; EXPRESSED IN HELA, SIGNAL = 1.5; EXPRESSED IN LUNG, SIGNAL = 2.4; EXPRESSED IN HEART, SIGNAL = 2.7; EXPRESSED IN BONE MARROW, SIGNAL = 2.6; EST_HUMAN HIT: AV713699.1, EVALUE 1.00e-06; SWISSPROT HIT: Q15620, EVALUE 1.00e-89; NT HIT: AF282280.1, EVALUE 0.00e+00
ctgaggcaaatctgccatggttcatagagccaggaaaagatgttgttaagtaggtgaatgtccctgacccaaaaaacagagcaacagcaattatgtgggagccccatgtgctaaaggctttggatctgccctctgcagaaggaatacagaggatgttggagagtatcaaagcgtaagagatgacgatgcttatgctggatagcatggtgattactccaacaacaatgaaaaataccagctcactgacatgggtgctggtgcaggagagctgcaagagggggagaacgtcacacagataatggtcaatgacgttggaatcacagaaggtcagtcgcagcatgcttccagtgtgggccatggccccagcaaaccctaccacataggaaccaaacatcagcagaaagcagacccttggggacatggtgaccatgtagagcagggggttgcagatggccacatagcgatcataggccattgataccaacacatagcactcagaattgacaaagaaacagaagaaaaatagctgagtcatacatcccacataagagatgatactttctgaaacaaagtcattcagcattttgggggtaaacacacaggaataacagagatctataaaggacaagttgaagaggaaaaagtacatgggggtgtgaaggctaggatttatcccaattaaggtgatcaagcccaagttgcccaccacagtgaacacatagatcc

SEQ ID NO: 22778 - DNA, 527 bp, Homo sapiens
  MAP TO AP001698.1; EXPRESSED IN BONE MARROW, SIGNAL = 0.91; EXPRESSED IN FETAL LIVER, SIGNAL = 0.99; EXPRESSED IN HELA, SIGNAL = 0.61; EST_HUMAN HIT: BE251810.1, EVALUE 7.40e-01; NT HIT: gi13385385, EVALUE 1.30e-01; SWISSPROT HIT: Q9P2Y4, EVALUE 5.00e-02
ctcatctcctgaacgggtgttttggttaaagttattgagacgtttcaagtctctccctgcctccttcttgcctgcttttctcgccctcggtgggaagttcctgccgcaagtttttcccctttgcacacccgtgcgctctggcctcgcagaccgtgcaactccatccaccagccagagcttttcagcttcccgtgcgtcccctaaccaccgcgttcccttcgcttcctcccctccgtcccggcacccggtttcctccctccccattctccagcctcttgatgctttgacgctcgccggattcgggctccgggtgactaacttctcccggccaccagcagagcggctggacagccagagagcccagggcgcttcctggcgcgctgcggtaccccggggcgagaacgcccgccgcttgggaactccgcagctttgtgtgcgaacggcgggctcccagctttctccagcacgcctttcgtcagggtccacaatctgtcccttactcccagcccactggaacttcctttgct

SEQ ID NO: 22779 - DNA, 674 bp, Homo sapiens
  MAP TO AC005664.1; EXPRESSED IN BRAIN, SIGNAL = 1.2; EXPRESSED IN HELA, SIGNAL = 0.73; EXPRESSED IN BONE MARROW, SIGNAL =   1; NT HIT: gi13647481, EVALUE 0.00e+00; SWISSPROT HIT: P53735, EVALUE 1.00e+00; EST_HUMAN HIT: AW964989.1, EVALUE 0.00e+00
ctcgtaggggaaattcaaggcctcttcatccactctgtctctctgaacgattgctttagccgtgaacccgcctgctccttcttcatctagctccaaattgtcagtaaaatcttctaactcatcgagcactgcatactccactctcttttcctgatccagctcattctcctcatccttcttatcagcactctcaccccctatgcctaccccgtcaccaacactcccgccaaagggacaagcatgcacgtccccactgacagggctaaggagcagaccgcactccgcccgcacgtcgcgctctgctcctgtgtacagcaccttcctgtccttactcctgcagctctcggtaaagctcacgctaatctttacatccttaagcaacttaaggtcaggggagaacttccggaccgcaggtgcgtgccgggcggtgcgcgggctgtggccactacagttcgggtctatgaggaggcggcccttagagaaggatcctttggagagaagagaagctccgtagaagttgaaggggtcctcagcagggagttcggactgtccatcaccaccagagccaacgtccattacctctgcaccactggacgtttgcaggggaggtggtggagactgctcacggggcagcgcttggaaggggcgagctcggctctccatcaccgcttctc

SEQ ID NO: 22780 - DNA, 1140 bp, Homo sapiens
  MAP TO U95626.1; EXPRESSED IN HELA, SIGNAL = 1.4; EXPRESSED IN BRAIN, SIGNAL = 0.99; EXPRESSED IN PLACENTA, SIGNAL = 2.1; EXPRESSED IN LUNG, SIGNAL = 1.5; EXPRESSED IN BONE MARROW, SIGNAL = 1.4; EST_HUMAN HIT: BI834559.1, EVALUE 0.00e+00; SWISSPROT HIT: O97883, EVALUE 2.00e-63; NT HIT: gi14736672, EVALUE 0.00e+00
ggcagtctgaagatggccaattacacgctggcaccagaggatgaatatgatgtcctcatagaaggtgaactggagagcgatgaggcagagcaatgtgacaagtatgacgcccaggcactctcagcccagctggtgccatcactctgctctgctgtgtttgtgatcggtgtcctggacaatctcctggttgtgcttatcctggtaaaatataaaggactcaaacgcgtggaaaatatctatcttctaaacttggcagtttctaacttgtgtttcttgcttaccctgcccttctgggctcatgctgggggcgatcccatgtgtaaaattctcattggactgtacttcgtgggcctgtacagtgagacatttttcaattgccttctgactgtgcaaaggtacctagtgtttttgcacaagggcaactttttctcagccaggaggagggtgccctgtggcatcattacaagtgtcctggcatgggtaacagccattctggccactttgcctgaatacgtggtttataaacctcagatggaagaccagaaatacaagtgtgcatttagcagaactcccttcctgccagctgatgagacattctggaagcattttctgactttaaaaatgaacatttcggttcttgtcctccccctatttatttttacatttctctatgtgcaaatgagaaaaacactaaggttcagggagcagaggtatagccttttcaagcttgtttttgccataatggtagtcttccttctgatgtgggcgccctacaatattgcatttttcctgtccactttcaaagaacacttctccctgagtgactgcaagagcagctacaatctggacaaaagtgttcacatcactaaactcatcgccaccacccactgctgcatcaaccctctcctgtatgcgtttcttgatgggacatttagcaaatacctctgccgctgtttccatctgcgtagtaacaccccacttcaacccagggggcagtctgcacaaggcacatcgagggaagaacctgaccattccaccgaagtgtaaactagcatccaccaaatgcaagaagaataaacatggattttcatctttctgcattatttcatgtaaattttctacacatttgtatacaaaatc

SEQ ID NO: 22781 - DNA, 1366 bp, Homo sapiens
  MAP TO AL117328.5; EXPRESSED IN BRAIN, SIGNAL = 1.2; EXPRESSED IN HELA, SIGNAL = 1.2; EXPRESSED IN LUNG, SIGNAL = 1.2; EXPRESSED IN BONE MARROW, SIGNAL = 1.1; EXPRESSED IN FETAL LIVER, SIGNAL = 0.94; EST_HUMAN HIT: BE884139.1, EVALUE 0.00e+00; NT HIT: gi11418333, EVALUE 0.00e+00; SWISSPROT HIT: P08770, EVALUE 1.00e-09
gtcccaccttaaggaagctgagagtggtgtgatccacttcacgtctggaatatggatgagtaaccagacccgtgagtacctgaccctcacggcccactgggtttccttcgagtcgccagcccggccgcgctgtgacgaccaccactgctcggcgctgttggacgtgtcgcaggtggactgcgactacagtggcaacagcattcagaagcagctggagtgctggtgggaagcgtgggtgacctccaccggccttcaggtgggcatcaccgtcaccgacaacgccagcatcgggaagacgctgaacgagggggagcactcgagcgtgcagtgcttcagccatacggtgaacctgatcgtcagcgaggccattaagagccagcggatggtgcagaacctgctgagcctcgcccggaagatctgcgagcgggtgcaccggtcgcccaaggcgaaggagaaactggccgagctgcagagggagtacgcgctgcctcagcatcacctcatccaggacgtcccgtccaagtggagcacttccttccacatgctcgagcggctcattgagcagaaaagggccattaacgagatgtccgtcgagtgtaacttccgagagctgatcagctgcgaccagtgggaggtcatgcagtccgtgtgccgtgcgctaaagcccttcgaggctgcgagccgggagatgagcacgcagatgtccaccctcagccaggtcatccccatggtacacatcctcaacaggaaggtggagatgctcttcgaggagacgatgggcatcgacaccatgctgcgctctctgaaggaggccatggtgagccgcctgtctgccaccctccacgacccgcggtacgtcttcgccacgctgctggatcctcgctacaaggcctccctgtttacggaggaggaggcggagcagtacaaacaggatttaatcagggaactcgaactcatgaattctacctcagaggacgtggctgcctcccacaggtgtgatgctggctccccgtcgaaagactctgccgcagaggagaacctgtggtcacttgtggccaaggtgaagaagaaagacccaagagaaaagctgcctgaagccatggtgcttgcgtatctggaggaggaggtgcttgaacacagctgtgacccgctcacctactggaacctgaagaaggcgtcctggccggggctgtccgcgctggccgtcagatttttgggctgccccccaagcatcgtcccttcagaaaagctgttcaacacacccactgagaacggtagccttggccaatccaggctcatgatggaacattttgaaaaacttatctttttgaaagtgaatcttcccttaatatactttcagtattga

SEQ ID NO: 22782 - DNA, 848 bp, Homo sapiens
  MAP TO AC004922.2; EXPRESSED IN HELA, SIGNAL = 1.4; EXPRESSED IN LUNG, SIGNAL = 1.1; EXPRESSED IN BONE MARROW, SIGNAL = 1.2; EXPRESSED IN BRAIN, SIGNAL = 1.2; SWISSPROT HIT: Q99856, EVALUE 5.30e-02; EST_HUMAN HIT: BE258271.1, EVALUE 0.00e+00; NT HIT: gi14781928, EVALUE 0.00e+00
gctgacgtttgtctcttccgtggcaggtgtggcggctgatgctgagtctagggctacagccgagccgggacagctacaacctgctgttggtggcagctcgggactgtggcctaggggacccccaggtggcctcagagctgcttctgaagcccagggaggaggcgactgtgcttcagcccccagtgagcaggcagcggccaaggaggacagcccaggccaaggcaggcaacctcatgtcagccatgctgcatgtggaggccctggagaggcagctgtttctggaaccttctcaggcacttgggcctccagagcctccggaagccagagtgcccggcaaggcccaaccagaggtggatactaaggcagagcccagccacacagcagccctcaccgcagtggccctgaagccacctcccgtggagctggaagtcaacctcctgacccccggggccgttccccctacagtggtctcctttggaacggtgaccaccccagctgaccggctggccttgatagggggcctggagggcttcctgagcaagatggcagagcacaggcagcagcccgacatcaggaccctcacgctactggccgaggtggtggagtccgggagtcctgcagagtccttgctgctggccctcctggatgagcaccaggtagaggccgacctgacattctttaacacgctggtgagaaagaagagcaagctgggagacctggagggggccaaggcgctgttgccggtcctggcaaagaggggcctcgtccccaacctgcagacattctgcaacctggccatcgggtgccacaggccgaaggacggtctacagcttctcacagacatgaag

SEQ ID NO: 22783 - DNA, 652 bp, Homo sapiens
  MAP TO AC002494.1; EXPRESSED IN BONE MARROW, SIGNAL =   1; EXPRESSED IN BRAIN, SIGNAL =   1; EXPRESSED IN HELA, SIGNAL = 2.1; NT HIT: X65718.1, EVALUE 6.20e-01
agaacgggctaatacaaccaccatcaccttcacaactactacaatcacaaaaaccaccaccaccatcaccatgaccatcatagtgaccaccagcaccactttcaccacaactgtcaccacaaccaccaccattgccaccatcaccaccacaatcactactaccatcactaccactaccacaaccatcaccaccactaccaccattaccatcgccatcaccacaaccaccttcaccacaaccaccacaatcactaccaccatcaccaccaccactgccaccaccaccatcactaccattatcaccaccaccatcaccaccaccactacccccaccaccatcactaccattatcaccatcaccaccaccaccaccttcaccacaatcatcaccatcactaccaccatcaccaccaccaccaccaccttcaccacaatcatcaccatcactaccaccatcaccaccaccaccaccatcaccaccactaccaccatcatcaccaccaccatcaccacaacaaccatgaccaccatcaccaccattccttctaccaccacaatcaccatcatcgctaccattgtcaccatcaccaccaccatcaccactaccatccctcacaaacacagcgtagctccctttgaggccaaaaggtga

SEQ ID NO: 22784 - DNA, 1211 bp, Homo sapiens
  MAP TO U34879.1; EXPRESSED IN HELA, SIGNAL = 0.74; EXPRESSED IN BRAIN, SIGNAL = 0.93; EXPRESSED IN HEART, SIGNAL = 1.9; EXPRESSED IN BONE MARROW, SIGNAL = 1.6; NT HIT: gi14785987, EVALUE 0.00e+00; SWISSPROT HIT: P54802, EVALUE 0.00e+00; EST_HUMAN HIT: BE410798.1, EVALUE 0.00e+00
tggatactgaggctgtgtggctgctccaaggctggctcttccagcaccagccgcagttctgggggcccgcccagatcagggctgtgctgggagctgtgccccgtggccgcctcctggttctggacctgtttgctgagagccagcctgtgtatacccgcactgcctccttccagggccagcccttcatctggtgcatgctgcacaactttgggggaaaccatggtctttttggagccctagaggctgtgaacggaggcccagaagctgcccgcctcttccccaactccaccatggtaggcacgggcatggcccccgagggcatcagccagaacgaagtggtctattccctcatggctgagctgggctggcgaaaggacccagtgccagatttggcagcctgggtgaccagctttgccgcccggcggtatggggtctcccacccggacgcaggggcagcgtggaggctactgctccggagtgtgtacaactgctccggggaggcctgcaggggccacaatcgtagcccgctggtcaggcggccgtccctacagatgaataccagcatctggtacaaccgatctgatgtgtttgaggcctggcggctgctgctcacatctgctccctccctggccaccagccccgccttccgctacgacctgctggacctcactcggcaggcagtgcaggagctggtcagcttgtactatgaggaggcaagaagcgcctacctgagcaaggagctggcctccctgttgagggctggaggcgtcctggcctatgagctgctgccggcactggacgaggtgctggctagtgacagccgcttcttgctgggcagctggctagagcaggcccgagcagcggcagtcagtgaggccgaggccgatttctacgagcagaacagccgctaccagctgaccttgtgggggccagaaggcaacatcctggactatgccaacaagcagctggcggggttggtggccaactactacacccctcgctggcggcttttcctggaggcgctggttgacagtgtggcccagggcatccctttccaacagcaccagtttgacaaaaatgtcttccaactggagcaggccttcgttctcagcaagcagaggtaccccagccagccgcgaggagacactgtggacctggccaagaagatcttcctcaaatattaccccggctgggtggccggctcttggtga

SEQ ID NO: 22785 - DNA, 759 bp, Homo sapiens
  MAP TO AC004797.1; EXPRESSED IN HELA, SIGNAL = 0.48; EXPRESSED IN BONE MARROW, SIGNAL =   4; EST_HUMAN HIT: AW269906.1, EVALUE 0.00e+00; SWISSPROT HIT: O28142, EVALUE 3.10e-01; NT HIT: AJ006529.1, EVALUE 1.00e-08
gacggcaggatggccgcgcagggcgcgccgcgcttcctcctgaccttcgacttcgacgagactatcgtggacgaaaacagcgacgattcgatcgtgcgcgccgcgccgggccagcggctcccggagagcctgcgagccacctaccgcgagggcttctacaacgagtacatgcagcgcgtcttcaagtacctgggcgagcagggcgtgcggccgcgggacctgagcgccatctacgaagccatccctttgtcgccaggcatgagcgacctgctgcagtttgtggcaaaacagggcgcctgcttcgaggtgattctcatctccgatgccaacacctttggcgtggagagctcgctgcgcgccgccggccaccacagcctgttccgccgcatcctcagcaacccgtcggggccggatgcgcggggactgctggctctgcggccgttccacacacacagctgcgcgcgctgccccgccaacatgtgcaagcacaaggtgctcagcgactacctgcgcgagcgggcccacgacggcgtgcacttcgagcgcctcttctacgtgggcgacggcgccaacgacttctgccccatggggctgctggcgggcggcgacgtggccttcccgcgccgcggctaccccatgcaccgcctcattcaggaggcccagaaggccgagcccagctcgttccgcgccagcgtggtgccctgggaaacggctgcagatgtgcgcctccacctgcaacaggtgctgaagtcgtgctga

SEQ ID NO: 22786 - DNA, 835 bp, Homo sapiens
  MAP TO AC006549.28; EXPRESSED IN HELA, SIGNAL = 1.8; EXPRESSED IN BRAIN, SIGNAL = 1.2; EXPRESSED IN BONE MARROW, SIGNAL = 1.2; EXPRESSED IN FETAL LIVER, SIGNAL = 1.2; EXPRESSED IN LUNG, SIGNAL = 1.3; SWISSPROT HIT: O29522, EVALUE 1.80e+00
caagctgcctccctgggctggacagggcctggaaagaggtgacctgggcagatccgtgtcgatgtacttcccaggacatcaggattccagcctctgctaaagggatcttcacagttaataacaaagaaatattaaagatgagaacacttggtgcaggaaacaagagaggaaagggagtgcggtccctccttgcaaacaggatgccctggaccaccctccacggcctcaggcctggatgctcctgcagacccatagccaagattgtgaaggaaaagtaggctgtggaggcattttctgtccttgttatcatcattgtaaacatactcatcatcaccatcaccatcctcatcaccatcactatcattatcatcaccataatcatcatcagcatcatcatcatcatcatcaccaccactatcatcattaccattctcattaccatcactatcaccaccatcatcttcatcaccatcctcatcatcatcaccatcatcaccatcaccatcaccaccatccttatcctcatcactatcaccatcaccgaggccaggatcaccatcctcatcctcatcaccatcatcacatcactatcatcaccatcctcatcacaatcactatcatcaccatcaccatcctcatcatcaccatcgtcctcatcaccatcaccgccatcagcatcctcatcactatcatcatcaccatcctcatccctgtcaccatcatcgtcttcatcatcatcaccgtcatcatcactatcatcacaccagctctgtgcaaggcccttagataaagggcagcctggggctgacctcacacaaggataggaagccccagg

SEQ ID NO: 22787 - DNA, 900 bp, Homo sapiens
  MAP TO AF024533.1; EXPRESSED IN HELA, SIGNAL = 1.1; EXPRESSED IN BONE MARROW, SIGNAL = 0.74; SWISSPROT HIT: P39880, EVALUE 5.00e-52; EST_HUMAN HIT: BG110648.1, EVALUE 0.00e+00; NT HIT: gi15299631, EVALUE 0.00e+00
tgcaccttggcctatggcgattttgccctgtggcccgcagggcggtaagtgcgcaaagcggtccaggggtccaggccgcgggctgggtctgggccgcggggttggtggaggccgcagggtcggcccgggccgcagagtgggtctgggccgcggccttggatctgggcctcgggtcggtgcaggccgcggaccgtggagggggtctgggctgcgggctcaggtccggcccggggtcggtgcaggccgcgggccaagcccaggccacggtgtcgcagcgcctgccccgtccgaccccgtccaggcccttgcggcccagcctggctgcccgccccagggccgcagcccctcagaactcccattcgataggttcctcccggctggcggccttctccaggcggtggatgatgctgttcaagttcgcggccttcttcttgcgcagggggttgtcgcgcgagtcccgggcgcccgcggcctcggggaggccgaaaaggctctgcagcgagctgggcctgcggggggcgctgctgctgctgctgttgctgggcggtggcgcggagctcggggccgcggggccctcccccggcgcggcggcggctgaggtagcggcgtcctcgggggccgcgggcgcggcggtggcggtcgcggaggcggggctgggcaggggccccgggccttccacggggcctccctcgtggtcgtcgtcgcgggcgtcgtccgggcccggggtccccgagggcggcggctccgtctgctccgccggccgcggcacctcctcccgctcggcctctccctgagacttgggctcctcggtgtcggcgctgcctgggccctcagtggcctccacgccgtcgcagctgtcgccctccgagctgggcgccgcccggccgctgcgggccgagg

SEQ ID NO: 22788 - DNA, 693 bp, Homo sapiens
  MAP TO AD000684.1; EXPRESSED IN BONE MARROW, SIGNAL = 1.1; EXPRESSED IN HELA, SIGNAL = 0.79; NT HIT: Y07661.1, EVALUE 0.00e+00; SWISSPROT HIT: Q9MYX8, EVALUE 1.10e+00; EST_HUMAN HIT: AL572659.1, EVALUE 0.00e+00
ggactcttggtgcaaaccctggaccccgggctcctccagcagtcagtgacaccccccttccctgcagccatgagtgaagtcacctccctccacgaggacgactggcgatctcggccttcccggggccctgccctcaccccgatccgggatgaggagtggggtggccactccccccggagtcccaggggatgggaccaggagcccgccagggagcaggcaggcgggggctggcgggccaggcggccccgggcccgctccgtggacgccctggacgacctcaccccgccgagcaccgccgagtcagggagcaggtctcccacgagtaatggtgggagaagccgggcctacatgcccccgcggagccgcagccgggacgacctctatgaccaagacgactcgagggacttcccacgctcccgggacccccactacgacgacttcaggtctcgggagcgccctcctgccgaccccaggtcccaccaccaccgtacccgggaccctcgggacaacggctccaggtccggggacctcccctatgatgggcggctactggaggaggctgtgaggaagaaggggtcggaggagaggaggagaccccacaaggaggaggaggaagaggcctactacccgcccgcgccgcccccgtactcggagaccgactcgcaggcgtcccgagagcgcaggctcaagaag

SEQ ID NO: 22789 - DNA, 642 bp, Homo sapiens
  MAP TO AP000114.1; EXPRESSED IN HELA, SIGNAL =   2; EXPRESSED IN BRAIN, SIGNAL = 2.2; EXPRESSED IN BONE MARROW, SIGNAL = 1.8; NT HIT: gi16166227, EVALUE 0.00e+00; SWISSPROT HIT: P18583, EVALUE 1.00e-110; EST_HUMAN HIT: BG163854.1, EVALUE 0.00e+00
tatcatgtcatcacatgttatgaaaggaattaatctatcctctggtgatcaaaatcttgctccagagattggcatgcaggagattgcattgcattcaggtgaagaaccacatgctgaggaacacctgaaaggtgacttttacgaaagtgaacatggtataaatatagaccttaatataaataatcatttaattgctaaagagatggaacataatacagtgtgtgctgctggtactagtcctgttggggaaattggtgaagagaaaattttgcccaccagtgagactaaacagcgcacagtattggatacctaccctggtgttagtgaagctgatgcaggagaaactctatcttctactggtccttttgctctggaacctgatgcaacaggaactagtaagggtattgaatttaccacagcatctactctcagtttagttaataaatatgatgttgatttatctttaactactcaagatactgaacatgacatggtaatttccaccagtcctagtggtggtagtgaagctgacattgaagggcctttgcctgctaaagatattcatcttgatttaccatctaataataaccttgttagtaaggatacagaagaaccattacctgtaaaagagagtgaccagac

SEQ ID NO: 22790 - DNA, 748 bp, Homo sapiens
  MAP TO AC001643.1; EXPRESSED IN BRAIN, SIGNAL = 0.87; EXPRESSED IN HELA, SIGNAL = 0.3; EXPRESSED IN BONE MARROW, SIGNAL = 0.92; EST_HUMAN HIT: BI858477.1, EVALUE 0.00e+00; NT HIT: AF163572.1, EVALUE 0.00e+00; SWISSPROT HIT: P16442, EVALUE 1.00e-62
tcagctcctcaggcagctgatatccttgtccagtgtagaaaagcggatcagcttcaggctgggtggctggggcttcctgtcgtcccagaggtactcgggggacagcaccttggacggcttgtttgagatgaagtgacggttcaggtggctttcctcccgccaggcagccatgatgccattggccttgtccgccaggatggccatgtggcagcccctagtaaactcatataccctggccacctgccccccgaagactgccccaccataatagaagtccccttcgctgtctgccacaaaggcagtggaaacacgcctgcgctcataggggaactgctggcggggaacggcgtagtagcttgggtgaatggcagccaccaggtctcccaaggtctcagggccccacgggttccgaaacaccatgtccacatcaaggcagaagaggtagtccacctcccggtgagccctcttagcaatgtgctggctgatggtctccatccggcgcatggatgtctcctcccagtgggagtgaccctggatggggatggagctgagaagccggtggggacccagcgggaccccgggaacggctgcagggttgtcagtgaagatgtagtagtgcacccggtacccacgcatgaagaactcctcggctgactccaggaaggactggatgaaatgagtgtacctagtgatgatcacccggtcacccactgctacaccagcagcctgccagggtccccactgtgtg

SEQ ID NO: 22791 - DNA, 3501 bp, Homo sapiens
  MAP TO U82670.2; EXPRESSED IN HEART, SIGNAL = 1.4; EXPRESSED IN BONE MARROW, SIGNAL = 1.1; SWISSPROT HIT: P23253, EVALUE 6.00e-17; NT HIT: AL049866.2, EVALUE 1.00e-46
agcaaggccactgcccctgctccaggcgccttgtgcagtgaaaggtcccgcgcacgcaggagcattgcccctactccatgtttactgtgcggggacaggtcatgggtgggtatgggcattgcacctactccaggcgccctgcttggtggcaaatcaaggaaatgcagggccattgctattactcccggcgccctgcgtggtggcaggtcacagaaacgcagggtcgttgctcctactccagaggccctgcacggtgacgggtcatggacttatatggccattgctcctactccaggtgccctgcacggtgacagctcaccagcccacacgtccattattccctctccaggcgccctgcatggtgacgggccaccagcgcacatggcctttccttctactccaggcaccctgcatggtgatgcctctcacgcacacatggccattgctcctactccaggcacgatgcgcggtgacagctcaacagcgcgcacggccactgccccatctccaggggccctgcgaggtgacaggtcatggaaacgcaaggccattgcttctactccaggtgccctgcatggtaacaggtctgacaggtcacggaaatgcaaggccattgcttctactccaggcaccctgcacgttgagaggtcaccagcactcagggccattgttccaactccaggcaccctgggccgtgacagctcaccagggcgcacgtccattattccttctccaggcgccctgcatggtgacaggtcaccagcacacctggacattgcttctactccaggcgccctgcacggtgacagctctcaggcacacacggccattgctcctactccaggcaccatgcgcggtgacagctcaacagctcgcatggccattgccccatctgcaggggccctgagaggtgacaggtcatggaaacgcaaggccattgcttctactccaggtgccctgcgtggtaacaggtctgacaggtcacggaaacgcaaagccattgcttctactccaggtgccctgctcggtaacaggtctgacaggtcacggaaacgcaaggccattgctcctactccaggtgccccgcgcattgacaggtcaccagcatgcagggccattgctcctactccaggcgccctgggtgatgacagctcaacggccattgcccctactccagggaccccgcgaggtgacagttcgccagcaaacacggccattgcttctactccaggcgccctgcacggtgacacctctcagacacacaaggccattgctcctactccaggtgacctgggcggtggcagctcatcagcgcacaaggccatcgctccttctccaggtgccctgcatggtgacaggtcaccagcacacacggccattgcttctactccaggagccctgcatggtgacagctcccaggtgcacacgaccattgctccaactccaggcgccctgcgcgatgacaagtcatggaaacgcaaggccattgctcccactccaggcaccctgcactgtgacagctcacgaacgtgcaccgcctttgctcctactccaggcgccctgcatgctgacaggtcaccagcgcaccaggacattactcttacttcaggcgccctgcactgtgacagctcaagagaaagcagggccgttgctcctattctaggcgccctgcaccgtgtcggctctcaggcacacaaggctattgcttctactccaggccctctgcgcggtgacagctcaccatttcacacagccattgcacctatgccaggggccctgcatggtaccaggtcatggaaacgcgaagccatttctcagactccaggcaccctgtgtggtgacagctcaggagaacgcatggccattgctcctactccaggcgccctgcacagtgacaggtcacagacacatacggccatcgatcctactccaagtgtcctgcgcagtgacagctcaccagcgtgcatggccattgatcctactccaggtgccctgggcagggacaggtcacaggcgctcatggccattgctcctactccagttggaatgcaagcacatgtgttgcaaagcccccgagcctgccaggattccctgacgctttcgcggcatgtttgtgagaaaaaggggaagaaaagggcaaacgcctcaactcttatgtccctgcctcccacagtaacggaggagggtgcatctctgcctccaggtctcaccagccctgcaccccccgctctgaaggaagagacacaggacagccgcccgaagaaggccctggctgcatccccggaaagttctcccttctcggggaacattcaggaccccggagagggtgcctggaagccaggctgggcaggtatggctgcatcctctgggtcccgtcagcacaggctgccttcttcactccggcttgccaatagaaaaaggaagcgtccaggtccagattttcagaggagacctcaaggacctcagacgcctggtgacgctaagcttgctaatcctgtcaccaccattcaaagggctggcggtaaacaggatgggcagccccccagccttgcttttccacaggagccacatcccatcgaaaggggaacgatggtctggttcaaatttcaagatcatccgttttggccagcagtggtcaagagtgtcagcaacacagacaagaccgcgagggtgctcctgcttgaggccaacctgcaccatggaaagcggggcattcaagttcctcttcgaaggctgaagcacctggattgtaaggagaaagagaaactgctgaagagagcccagaaggcctacaagcaaagcgtcaactggtgcttctcactgatctcccactacagagaaggactggtccggggttctttccggggctctttcctggactattatgccgcagacatcagctacccaatcaggagagccatccaagagggagacctgcagattgactttccaaaggtgaattatggcgacctggaagactgggaggaggagacctccctgggcgggaagaggccttgcaagaaaatcctcccggaccggatgagggcctcttgggaccgagacaaccagaagctcgtggacttcatcgtgaggagaaagggggccgacccccaccttctggacatcttgcaaggcaggaagcagtccaggtggctgaccgcgtttctgaagccacacagggatttgcactgcattgaaacatacctggaggatgacgatcagttggaagtcgtggccaagcatttacaagaaatctacaagcaaattgacaaggccaggctgactctgataagggatgacaaagtcaattttgttctggaagttcttctgccggaagccatgatttgtaccatcgccgcacttgatgggctggattacaaggcagcagaggagaagtacctgcgaggaccacctgtgcattaccgggagaaagagctgtttgacagaaatatcttaaagaaggcaagaagagaaccagcaaccacccatacagctaattag

SEQ ID NO: 22792 - DNA, 676 bp, Homo sapiens
  MAP TO AC005618.1; EXPRESSED IN HEART, SIGNAL = 1.2; EXPRESSED IN BONE MARROW, SIGNAL = 0.88; EXPRESSED IN FETAL LIVER, SIGNAL = 1.1; EXPRESSED IN HELA, SIGNAL = 0.56; NT HIT: gi14861871, EVALUE 0.00e+00; SWISSPROT HIT: Q9Y5E2, EVALUE 9.00e-55; EST_HUMAN HIT: BG911582.1, EVALUE 2.00e-08
gttctctccgaaccgatccgctacgctattcccgaggagctggacaggggctcgctggtagggaacctcgccaaggacctggggtttggcgtgggggatttacctactaggaacctgcgggttattgcagagaagaaattctttaccgtgagccccgaaaatgggaacttacttgtgagcgaccgtatagaccgagaggagatttgtggcaagaagtcgacgtgtgttctggaatttgaaatggttgctgaaaagcctttaaacttttttcatgtaactgtgctgatccaggatattaacgacaacccaccgacctttagccaaaatatcactgagctggaaatcagcgaactggctctcactggagccacatttgccctggaatctgcgcaagatcctgatgtaggtgtcaattcgctgcagcagtactacctcagccctgatccgcacttctctttgattcagaaggagaacctggatggcagtaggtacccagagctagtactgaaagcacccctggacagggaagagcagccacatcaccacctggtcctcacagctgtggatgggggcgagccctccagaagctgtaccacccagatcagggtaattgtcgcagatgcaaatgataaccccccagtatttactcaggacatgtacagggtcaatgttgcag

SEQ ID NO: 22793 - DNA, 565 bp, Homo sapiens
  MAP TO AP001505.1; EXPRESSED IN HELA, SIGNAL = 0.59; EXPRESSED IN BRAIN, SIGNAL = 0.81; EXPRESSED IN BONE MARROW, SIGNAL = 0.94; EXPRESSED IN FETAL LIVER, SIGNAL = 0.98; NT HIT: AL163301.2, EVALUE 0.00e+00; SWISSPROT HIT: Q28824, EVALUE 2.00e-27
tcacagcgtcctgcggagggaccgtctgggggtcacagggtcctgaggagtgaccgtctgtctgggggtcacagcgtcctgcggagtgaccgtctgtctgggggtcacagcgtcctgcggagggaccgtctgtctgggggtcacagggtcctgaggagggaccgtctgtctgggggtcacagcgtcctgcggagtgaccgtctgtctgggggtcacagcgtcctgcggagggaccgtctgtctgggggtcacagcgtcctgcggagtgaccgtctgtctgggggtcacagcgtcctgcggagtgaccgtctgtctgggggtcacagcgtcctgcggagggaccgtctgtctgggggtcacagggtcctgaggagggaccgtctgtctgggggtcacagcgtcctgcggagtgaccgtctgtctgggggtcacagcgtcctgcggagggaccgtctgtctgggggtcacagcgtcctgaggagtgaccgtctgtctgggggtcacagcgtcctgcagagggaccgtctgtctgggggtcacagggtcctgcggagggaccgtctgt

SEQ ID NO: 22794 - DNA, 1279 bp, Homo sapiens
  MAP TO U82670.2; EXPRESSED IN HEART, SIGNAL = 1.2; EXPRESSED IN BONE MARROW, SIGNAL = 0.78; NT HIT: gi14757498, EVALUE 0.00e+00; SWISSPROT HIT: Q15569, EVALUE 8.60e-02; EST_HUMAN HIT: BF972760.1, EVALUE 0.00e+00
ctagttatcacattcctccaggacgggcttgagcccctcctggaggagctcctcagcctcctggcctcctgcctggaggaggccctctggctcccgaccaggacctcctgggaccgcctctactttagtgctggctctggcaacagcctgggcaccagcccgggcaccggccccttcctgtgtctgggctctcacgctcctggctagactggcctcccatgcctcagactcccgaacgagccccagcatctccaagaaacttggagacctcccggccattctcagcttcctcagtgcttcatccagaggctcagtaaggtgggccctggtgagcatctgcctcaggcgcacgcggtcggcggatgctctggccagggcctccttctccatggccttctgcagcagcacttccagccgcaacacgaaagctgagagacgctcgcctgactgctgctgagcggtcagacacttcacccggatggtcgcctgggactcgttgtctccaaacacctgggccagggccgccagacagtcctgcgccgtcctggcggggttctccgccaggagcgcgtgcacgagctgcagggcggtcccacgcaagccttccagcagcctcctcctcctctccctttccgagaccccctgccacacatgcagcatttcggtggtgtggtctagccagacctcaaaggactcctcccctggggctggctggtccctcccggaaaacacgcccaggctctggcacctcacggcctccacccagggctggaccgcctgaccgatggatcgcagccagcacaccctgcgcagccccacacccagggcgccggccacgctctccaccatctgcccctcttgctccgggaagtggaacacgcgaccgagaccgagaaactcctcgcctgagcaacggggcacaaagaccacgttccacgggcccccagtgccggggatttccctggggaccaaagcatagttgacttcccggtcgagctcgaccagggccgcggtggcattatcctcctctcgaaacgctttgcctagcactgtaaagtgtcccataggcctcagggcagcctcgagggactcttggaattcggcatcatcacagtcctccgggatgcccaggatgagcaggcccctgcgagcgttgacccccatccaccggcaccagtcctgcagcatggtcaccgccatgcccgcgattctggccagtgccgggctgacacgaggggcaggatagggttcccagcgcggaccagggtggcacggggcg

SEQ ID NO: 22795 - DNA, 468 bp, Homo sapiens
  MAP TO AC011234.1; EXPRESSED IN PLACENTA, SIGNAL = 1.5; EXPRESSED IN BRAIN, SIGNAL = 1.2; EXPRESSED IN HELA, SIGNAL = 1.5; EXPRESSED IN BONE MARROW, SIGNAL = 1.2; EXPRESSED IN LUNG, SIGNAL = 0.94; EXPRESSED IN HEART, SIGNAL = 1.9; EXPRESSED IN FETAL LIVER, SIGNAL = 1.1; SWISSPROT HIT: Q12809, EVALUE 9.00e-68; EST_HUMAN HIT: AL520970.1, EVALUE 0.00e+00; NT HIT: AJ010540.1, EVALUE 0.00e+00
cggtgctggcgtggcgcggtggcgggggcagcaccccggcgcgcatggcctcgatgtcgtcggccgacgaggcgcggcgcacgctggcgcagctttctcgggagcgcgtccgggccaggctgcagctggagcccgaggcgtcggggttgaggctgtgcgcccggggcgatgggagctggccgggcgcgctgcggggcggagagccgggacccaccagcgcacgccgctcctccgcgggcccgagccctgccacgtggttgtccatggctgtcacttcgtccagggccagcgactcgctgctgggtgccgcgggcgtcaggtccacgtccaccaccacggcccccggggcgcccgcgccgcccgcgccgcccgaccgcaccgacgactcccgggccgtcagcgccagcagcgcgggcagcttcaggcggaaggtcttggcgcggcctgcgggagaggagaggcacgtgg

SEQ ID NO: 22796 - DNA, 728 bp, Homo sapiens
  MAP TO AC008174.2; EXPRESSED IN HEART, SIGNAL = 1.3; EXPRESSED IN BONE MARROW, SIGNAL = 1.2; EXPRESSED IN LUNG, SIGNAL = 1.2; EXPRESSED IN BRAIN, SIGNAL = 1.1; NT HIT: U32990.1, EVALUE 4.50e-02; SWISSPROT HIT: P13666, EVALUE 3.40e-02; EST_HUMAN HIT: BG823287.1, EVALUE 6.60e-02
ttgtgaaggattaatccccaaactaccttcctttaactttgatgtgaacattttcatattagttgctaattcaacctgattaacagtgtaggcattttcagctccttggaacaaactttctcttgaaaggttttgtatcaaagactcattgaaataagtacactggtccattagtgtgccaatgatctcacttgctacaatgttctctttcaatatgctaattgaagatggttccatttggcttatttcgttgtctagcttgttcttaattacagcaagcatgtcactgatgatattaacagcatatgtaagtaattgtgaatggaatgaatgaacccgtagaaggatattctgtatgttttccttgaaattaatagtatttgactcggatttatcagaaaacattttcagtggttgtaattttggcaacatttttttgtttaacagtttctgttggatagaagaaaggttttctataggcattttcacaatttcagaaaactcatatttggagatatgtttaaactgcaagtccacaaatgactctaacatgtttaaaaccgtttctacaatctcttgaacaatttggttgctggagcccacagaaatttggtcttttgtctttgtgttatagattggtaaactgctgaggctatgcttgtttggaaaaccatatttacttttagcagtaatgtgttctttactgtttgatagagtttcttcactat

SEQ ID NO: 22797 - DNA, 652 bp, Homo sapiens
  MAP TO AC011536.5; EXPRESSED IN PLACENTA, SIGNAL = 1.5; EXPRESSED IN HELA, SIGNAL = 0.71; EXPRESSED IN BONE MARROW, SIGNAL = 0.81; SWISSPROT HIT: O88799, EVALUE 7.00e-42; EST_HUMAN HIT: AW501855.1, EVALUE 0.00e+00; NT HIT: gi16163229, EVALUE 0.00e+00
ggcctcccaagactgcgactcaaacacctacctggctgatgcccaccttgtccccacagccttccagtgccctgcccacagccactacgagctctgcggtgactcctgtcctgggagctgcccgagcctgtcggcacccgagggctgtgagtcggcctgccgtgaaggctgtgtctgcgatgctggcttcgtgctcagtggtgacacgtgtgtacctgtgggccagtgtggctgcctccacgatgaccgctactacccactgggccagaccttctaccctggccctgggtgtgattccctttgccgctgccgggagggcggtgaggtgtcctgtgagccctccagctgcggcccgcatgagacctgccggccatccggtggcagcttgggctgcgtggccgtgggctctaccacctgccaggcgtcgggagatccccactacaccaccttcgatggccaccgcttcgacttcatgggcacctgcgtgtatgtgctggctcagacctgcggcacccggcctggcctgcatcggtttgccgtcctgcaggagaacgtggcctggggtaatgggcgagtcagtgtgaccagggtgatcacggtccaggtggcaaacttcaccctgcggctggagcagagacagtggaaggtcacg

SEQ ID NO: 22798 - DNA, 590 bp, Homo sapiens
  MAP TO AE000658.1; EXPRESSED IN BRAIN, SIGNAL = 1.8; EXPRESSED IN HEART, SIGNAL = 1.9; EXPRESSED IN BONE MARROW, SIGNAL = 2.2; EXPRESSED IN FETAL LIVER, SIGNAL = 2.1; EXPRESSED IN LUNG, SIGNAL = 1.9; EXPRESSED IN PLACENTA, SIGNAL =   2; EXPRESSED IN HELA, SIGNAL = 1.3; SWISSPROT HIT: Q15615, EVALUE 3.00e-53; EST_HUMAN HIT: BG193339.1, EVALUE 9.00e-04; NT HIT: AE008683.1, EVALUE 0.00e+00
cagcttgatcacctgaggtacatcacagaagaagttgtcaatctcatcaggaccacagtagggcagcttgatggtaagggaggtgagggctatggagtggatggtccctcctgtccagagggccacagccagcagcacacataccttccagttcatcactatcatgtactgcaggggtttacagatggccacataccgatcataggccatgacggtgaggaggaagatctctgtgcaggcaaagaggtgcaggaagaacatctgggtcacacaggcatcaaaagagatgagcttttcctctgaccacacgtctctcagcatcttggggacagtgacagtggagtggcagacatcaataaaggacaggttgctgaggaagaaatacatgggagtatggagccggtggtcatagataatagttatgacaatgagaacattcccaatcagtgtcaggacataaaaaatgaggaacatggaaaacatagctatccgtgccttatgatttacagataaacctctaagccgaaaatatgtcactaaagaagtttgattgagtaggatggcctcttccattctctttgttagacaac

SEQ ID NO: 22799 - DNA, 624 bp, Homo sapiens
  MAP TO AL109741.3; EXPRESSED IN BONE MARROW, SIGNAL = 1.1; EXPRESSED IN LUNG, SIGNAL = 5.9; EXPRESSED IN PLACENTA, SIGNAL = 1.5; EXPRESSED IN BRAIN, SIGNAL =   2; EXPRESSED IN HELA, SIGNAL = 1.1; NT HIT: gi13628824, EVALUE 0.00e+00; SWISSPROT HIT: P48303, EVALUE 1.00e-100; EST_HUMAN HIT: BG251038.1, EVALUE 0.00e+00
  unsure 608
  unsure 609
ggtgggaggaattgtccgatttgctgcggctgaattccatgccggcgatgatgggtcgcttgaatttgccagcagagtctccgctcgggcacttgcagcaggacatgatccggatgaaggcccgacgcatctccttgttggtcagagtgtaaatgatggggttggtgccggagttgagcacagctaacaccaggaagtactccgctctgaagaggatgtcacaggtcttcaccttgcagcccacatccagcaggagcaggatgaagagcggtgcccagcaggcgatgaagacgctcaggacgataattacggtcttgagcagcgccagcgacttctcagagctgcggctggccttggaaatgttcttgcggaacgtcaggcggcggctccgagtcctgaccaaggagtagattctgcagtacagaatgacgatggagagcagaagcagagtgaagaccgtggtgcagaagaggatatagtgcttgtggtagagcggcagcacggtggagcagctggacagcgcactgatgcagttccagcccatgataggcaggccacccaggatgagggagatgacccacctggcgctgattagcaagaaggaaganngttgtagctcttttt

SEQ ID NO: 22800 - DNA, 756 bp, Homo sapiens
  MAP TO AC005678.1; EXPRESSED IN HEART, SIGNAL = 1.4; EXPRESSED IN BONE MARROW, SIGNAL = 1.1; EXPRESSED IN FETAL LIVER, SIGNAL = 1.1; EXPRESSED IN HELA, SIGNAL = 1.6; EST_HUMAN HIT: AI124541.1, EVALUE 0.00e+00; SWISSPROT HIT: Q15776, EVALUE 7.00e-73; NT HIT: gi14760699, EVALUE 0.00e+00
gtgatgaaaaacagactaagagcagggacttgcctccagctgaggagcttccagaaaaggagcatgggaagatatcgtgccacctgagagaagacattgcccagattcctacatgtgcagaagctggtgaacaggagggcaggctacaaagaaagcagaaaaatgccacaggagggaggcggcacatctgccatgaatgtggaaagagttttgctcaaagctcaggcctgagtaaacacaggagaatccacactggtgagaaaccctacgaatgtgaagagtgtggcaaagccttcattgggagctctgcccttgtcattcatcagagagtccacactggtgagaagccatatgagtgtgaagaatgtggtaaggccttcagtcatagctcagaccttatcaagcatcagagaacccacactggggagaagccctatgagtgtgatgactgtgggaagaccttcagccagagctgcagcctccttgaacatcacagaatccacactggggagaagccgtatcagtgcagtatgtgtggcaaagcctttaggcgaagttcacatctcctgagacatcagaggatccatactggggataaaaatgttcaggaacctgagcagggagaggcctggaaaagtaggatggaaagccagttggaaaatgttgaaactcccatgtcttataaatgtaatgagtgtgaaagaagtttcactcagaatacaggcctcattgaacatcaaaaaatccacactggtg

SEQ ID NO: 22801 - DNA, 656 bp, Homo sapiens
  MAP TO AC005670.1; EXPRESSED IN HELA, SIGNAL = 0.77; EXPRESSED IN BONE MARROW, SIGNAL = 0.85; NT HIT: gi13633133, EVALUE 0.00e+00; EST_HUMAN HIT: BI018676.1, EVALUE 0.00e+00; SWISSPROT HIT: O60309, EVALUE 1.00e-108
gcagagcctagtgcagaggtgggaaattctttagtccaccagcaggctacagctcagctctcagggtcaggtaatgatgtagaacctcccaccatccagcacgggggcccacatctgcttccagagtcatcggaagaagctggacctttagcagttcaacaggagacttcatttcagtctccggaacctattaataatgagaacccctctccaacccagcaggaggctgcagctgagcatccacagaccgctgaggagggtgaatcttccctaacccatcaggaggccccagctcagactccagagtttcctaatgtagttgtagctcaacctccagagcattcacccctgactcaagccgcagttcaacctttggatctggggtttaccatcactccagaatccatgacagaggttgaactttctccaaccatgaaggagaccccaactcagcctcctaagaaagttgtaccccaacttcgaatatatcaaggggtaacaaatccaacaccaggtcaggatcaagctcagcatccagtgtcacccagcgttacagttcaacttttggacctgggacttaccatcactccagaacccactacggaggttggacattctacacccccgaagaggactatagtttctccaaagcatcc

SEQ ID NO: 22802 - DNA, 468 bp, Homo sapiens
  MAP TO U63963.1; EXPRESSED IN HELA, SIGNAL = 0.77; EXPRESSED IN BRAIN, SIGNAL = 0.96; EXPRESSED IN BONE MARROW, SIGNAL = 0.9; EST_HUMAN HIT: AL561488.1, EVALUE 0.00e+00; SWISSPROT HIT: Q12766, EVALUE 1.00e-77; NT HIT: D83778.1, EVALUE 0.00e+00
ttattctgccactgcggccacctcctcttcctcaccctcctcctctgtctctgtcttgatctgagcaaccccaaggcggtagagggtgtcacgaatgaccacctcaccaggctggcagctctgtacaatgtcatggatctgacgattgacaatttcgcggctggtgaggaagtccatgaggcggttgtagaggtaatagtgagtggcattgtcgaaggcaatgggccgctggcggacaccgtttggtttgctgtccacgatggaggccaggatggttgcgtaaggtgccaattcagggcacagggccaaggagtggtgcccagcactggggtcaccaggattgggctgtaggcctgcatggacgatgcgccgcgtggcagtcttggtgactgggtgctggatagagtgctcagtttctgtcatgtccacagtataatgctggtccaagagctctgggcaggacacact

SEQ ID NO: 22803 - DNA, 453 bp, Homo sapiens
  MAP TO AP001101.1; EXPRESSED IN HEART, SIGNAL = 9.4; EXPRESSED IN LUNG, SIGNAL =   6; EXPRESSED IN BONE MARROW, SIGNAL = 1.3; EXPRESSED IN PLACENTA, SIGNAL = 4.9; EXPRESSED IN HELA, SIGNAL = 0.67; EST_HUMAN HIT: BE258935.1, EVALUE 0.00e+00; SWISSPROT HIT: P12110, EVALUE 1.00e-83; NT HIT: gi16166477, EVALUE 0.00e+00
ggacgcgtgtgggcgtggtgcagtacagccacgagggcacctttgaggccatccagctggacgacgaacgtatcgactccctgtcgagcttcaaggaggctgtcaagaacctcgagtggattgcgggcggcacctggacaccctcagccctcaagtttgcctacgaccgcctcatcaaggagagccggcgccagaagacacgtgtgtttgcggtggtcatcacggacgggcgccacgaccctcgggacgatgacctcaacttgcgggcgctgtgcgaccgcgacgtcacagtgacggccatcggcatcggggacatgttccacgagaagcacgagagtgaaaacctctactccatcgcctgcgacaagccacagcaggtgcgcaacatgacgctgttctccgacctggtcgctgagaagttcatcgatgacatggaggacgtcctctgcccgg

SEQ ID NO: 22804 - DNA, 587 bp, Homo sapiens
  MAP TO AC007282.2; EXPRESSED IN FETAL LIVER, SIGNAL = 0.94; EXPRESSED IN HELA, SIGNAL = 2.2; EXPRESSED IN BONE MARROW, SIGNAL = 0.96; EST_HUMAN HIT: BG622398.1, EVALUE 2.10e-01; SWISSPROT HIT: Q20875, EVALUE 4.30e+00; NT HIT: X55877.1, EVALUE 3.60e-02
aagtactgaaatgaaactcatgaaaagtatcataaatattctctaaaaactgacttgggggcatatatcatctacctttaagtctgagagtttcaacaatgataatgagctccacccagtccttaacatgtcacagtttcatcttgctttttgatgcatactgtataatgcctcagaaatggatgagggagaaccatatagaaaactcaggattacagtaaaaattcagtgtaatattcataagcagctttttagctctgggatcaagctcttctaatcattgaaacagccttcaaaataaaaattcttattgaaactcttttttcgtacttctgtgttatctaactaaaaaaagcaaaatgtgaaagaatcagcctagtatttgtcttattttatttcaacttagtagttcaaaattatttttaatggatgcaacttattgtaactggttttcaaattctagtggataccaagatgacaaattaagaatccccttggttttttttttttttttttgagaaatacaaattcccaggttctgtttccaagttgagattcattaggtcagaagtggacctgggaatgtg

SEQ ID NO: 22805 - DNA, 930 bp, Homo sapiens
  MAP TO AC025249.2; EXPRESSED IN BONE MARROW, SIGNAL = 0.84; EXPRESSED IN HELA, SIGNAL = 0.86; EXPRESSED IN BRAIN, SIGNAL = 0.91; NT HIT: L17432.1, EVALUE 2.00e-04; EST_HUMAN HIT: BF679294.1, EVALUE 2.00e-05; SWISSPROT HIT: Q9H344, EVALUE 6.00e-89
aatatcacctccacttccatcattttcctgctcactggtgttcctgggctggaagccttccacacctggatctccattcccttctgcttcctctctgtaactgctctcttgggaaacagcctgatcctcttcgctaccatcactcagcccagcctccacgaaccaatgtactatttcctctccatgctgtccgccactgacctcggcctgtccatatccactctggtcaccatgctgagtatattctggttcaatgtgagggaaatcagctttaatgcctgcttgtcccacatgttctttattaaattcttcactgtcatggaatcctcagtgctgttggccatggcttttgatcgttttgtggccgtctctaatccccttaggtatgccatgattttaactgactccagaatagctcaaattggagtggcaagtgtcatcagggggctcctaatgctgacaccaatggtagcacttcttataagactttcctactgccacagccaagtactccaccactcctactgctaccaccctgatgtgatgaagctctcatgcacagacaccagaatcaacagtgcagttgggctgactgccatgttctctactgttggtgtagacttacttctcatcctcctttcttatgttttgatcattaggactgtccttagcgttgcttccccagaagagaggaaggaaaccttcagtacatgtgtctcccacattgtggcttttgctatatattacattccattgatcagtctgtccattgttcacagatttgggaaacaagccccagcctatgtacatactatgattgctaacacctacctgctgatctcccctttgatgaaccctgtcatctacagtgtgaaaaccaaacagatacgtagagctgtgataaaaattctccattccaaagaaacataa

SEQ ID NO: 22806 - DNA, 544 bp, Homo sapiens
  MAP TO AC002053.2; EXPRESSED IN BONE MARROW, SIGNAL = 6.6; EXPRESSED IN LUNG, SIGNAL = 7.4; EXPRESSED IN HELA, SIGNAL = 1.5; EXPRESSED IN PLACENTA, SIGNAL = 5.7; EXPRESSED IN BRAIN, SIGNAL = 4.8; SWISSPROT HIT: P42568, EVALUE 7.00e-38; NT HIT: gi16162115, EVALUE 0.00e+00; EST_HUMAN HIT: AW157750.1, EVALUE 0.00e+00
cagaacaagtgagtatcagtggtggtgcgctagaaaaacttttaaataaagcctctgagctactctttttcctttttttggctgagagttcttcagaatctgaaatgggcggccttttactaggagccttcttatcttgtccactggtgatggtgagtaagttactatctggttttggctcttttgacatgggtttaggttccttgaaggccatcttaggaactattttctcttctttcagtggtttattttctttgggtttcttagaggattctttggaagatttgttgtgatccctggaaggttctttgaaggcacttttatgttctctggagtctttagaaggtttttccttgtgctccttcattaatttgtgaggctttgaaaaactggtactactgctgctgctgctgctgctactgctgctgctactgctgctgctgctgctgctgctgctgctgctactgctgctgctgctgctgctgctgctgctgctgctgctgctgctgctgctgctgctggtatgaatactcctattagggtc

SEQ ID NO: 22807 - DNA, 774 bp, Homo sapiens
  MAP TO AL163282.2; EXPRESSED IN HELA, SIGNAL =   1; EXPRESSED IN BONE MARROW, SIGNAL = 0.86; EXPRESSED IN FETAL LIVER, SIGNAL = 1.2; NT HIT: AL163282.2, EVALUE 0.00e+00; EST_HUMAN HIT: BF948841.1, EVALUE 1.00e-28; SWISSPROT HIT: P12524, EVALUE 1.60e+00
ggtgtgacagagcttgccatggtgctgaaacctggtcagagacctgtgagccaccacggacaggagggagggacaagagaaactgtggacaggacggaggcaccggagaaactgtggacagcagaggccaacagagaaaccgtggacaggagggaggtaccagagaaactgtggacaggaggggccagcagagaaaccgtggacagaacgggccaccagagaaaccgtggacaggagggggttaccagagaaaccgtggacaggggggggttaccagagaaaccgtggacgggggggggttaccagagaaaccgtggacgggggggctaccagagaaaccgtggacgggggggggtaccagagaaaccgtggacaggaggggggtaccagagaaaccgtggacggggggggttaccagagaaaccgtggacagaacgggccaccagagaaaccgtggacaggagggggctaccagagaaaccgtggacggggggggttaccagagaaaccgtggacagaacgggccaccagagaaaccgtggacaggagggggttaccagagaaaccgtggacggggggggttaccagagaaaccgtggacagaacgggccaccagagaaaccgtggacaggagggggctaccagagaaaccgtggacaggagggggctaccagagaaaccgtggacggggggggttaccagagaaaccgtggacaggagaggcaacaagagaacctgcggacaggagatggcccccacaggaacagactctga

SEQ ID NO: 22808 - DNA, 1037 bp, Homo sapiens
  MAP TO AC008468.4; EXPRESSED IN BRAIN, SIGNAL = 1.8; EXPRESSED IN HELA, SIGNAL = 0.56; EXPRESSED IN BONE MARROW, SIGNAL = 1.1; EXPRESSED IN FETAL LIVER, SIGNAL = 0.93; EXPRESSED IN HEART, SIGNAL = 1.3; EST_HUMAN HIT: BI465306.1, EVALUE 0.00e+00; SWISSPROT HIT: Q9Y5H5, EVALUE 0.00e+00; NT HIT: gi14728099, EVALUE 0.00e+00
cagcgttcgcgcagtccgagtacacggtgttcgtgaaggagaacaacccgccgggctgccacatcttcacggtgtctgcgcgggacgcggacgcgcaggagaacgccctggtgtcctactcgctggtggagcggcggttgggcgagcgctcgctgtcgagctacgtgtcagtgcacgcggagagcggcaaggtgtacgcgctgcagccgttggaccacgaggagctggagctgctacagttccaggtgagcgcgcgcgacgcgggcgtgccgcctctgggcagcaacgtgacgctgcaggtgttcgtgctggacgagaacgacaatgcgccggcgctgctgacacctcggatgaggggcactgacggcgcagtgagcgagatggtgctgcggtcggtgggcgccggcgtagtggtggggaaggtgcgcgcagtggacgccgactcgggctacaacgcgtggctttcatacgagctgcagccagaaacggccagcgcgagcatcccgttccgcgtggggctgtacacgggcgagatcagcacaacgcgtgccctggacgaaacggacgcaccgcgccagcgcctactggtgctggtgaaagaccacggggagccagcgctgacggccacggccactgtgctggtgtcgctggtggagagcggccaggcgccaaagtcatcgtcgcgggcgtcagtgggtgccacgggccccgaggtgacgctggtggatgtcaacgtgtacctgatcatcgccatctgcgcggtgtctagcctgttggttctcacgctgctgctgtacactgtgctgcggtgctcggcgatgcccaccgagggcgagtgcgcgcctggcaagccgacgctggtgtgttctagcgcggtggggagttggtcgtactcgcagcagaggaggcagagggtgtgctctggcgagggtccgcagaagaccgacctcatggccttcagcccgggcctttctccttgtgctggatctacagagcgaacgggagaaccctctgcttcctcagattcaactgggaag

SEQ ID NO: 22809 - DNA, 545 bp, Homo sapiens
  MAP TO AC005263.1; EXPRESSED IN HELA, SIGNAL = 1.6; EXPRESSED IN BONE MARROW, SIGNAL = 1.1; NT HIT: gi14765814, EVALUE 0.00e+00; EST_HUMAN HIT: AI479899.1, EVALUE 1.00e-95; SWISSPROT HIT: O14901, EVALUE 3.90e+00
gtgtctttaaccacgcggtgccctccgcctctgctcatccgtttggagcccgtgtcggccgcggggctgcatgtggcagcgccacactgggcccgagcccgctgcaggcggcggccagcgcctcggcctcttcctttcaggccccggcctcggttgagacccggccgccccctccgcctccgcctccgcctcccccgctgcccccgcctgcgcacctgggccggtcccccgcggggccgcccgtcctccacgccccccctccacctaacgccgccttgcctcctcccccaacgctgctggcctctaaccctgagcccgcgcttctgcagagcctcgcgtccctcccgcctaaccaagctttcttgccccccacctctgctgcctctctgccgcctgctaacgcctctttgtctatcaagctcacctccctcccgcacaagggcgcccgcccctccttcacggtgcaccaccagcccctgccccggctggccctggcccaggccgcgcccgggatcccacaggccagcgccacggggccgtccgcg

SEQ ID NO: 22810 - DNA, 465 bp, Homo sapiens
  MAP TO AL031782.1; EXPRESSED IN BRAIN, SIGNAL = 2.7; EXPRESSED IN HELA, SIGNAL = 4.3; EXPRESSED IN LUNG, SIGNAL = 2.9; EXPRESSED IN HEART, SIGNAL = 2.8; EXPRESSED IN BONE MARROW, SIGNAL =   3; EXPRESSED IN FETAL LIVER, SIGNAL = 2.8; EST_HUMAN HIT: BG699698.1, EVALUE 0.00e+00; SWISSPROT HIT: P21941, EVALUE 7.00e-30; NT HIT: gi14759679, EVALUE 0.00e+00
tgttggcaatagctctaagttcggcatcttctgtttctgaaccaacaccaatagcaaataatgttatcttactatctcttgctgcttgagctgcatccttgacgtcatcttgggatttgccatccgtaagtaccactgctatcttagtcagaaatcgtgaggacttggcaaaaaggtaatcgagcgcaaactggatggccttccctgtctttgtgtttcctcctaagtagagtatggattccactgctgccgtcaaatgttctcctgaatcatagcttccgagaggaatctccagcacagggtagtcactatattgaaccactccaacttgaataaacttcggccctatgtcaaagttttttgtgatattgacaagccactttttcactatttcaaagttttctgggccaacactataagagccatctaagatgaaaactaaatctgtcggagcagtacgacaac

SEQ ID NO: 22811 - DNA, 740 bp, Homo sapiens
  MAP TO AF002993.1; EXPRESSED IN BRAIN, SIGNAL = 1.8; EXPRESSED IN BONE MARROW, SIGNAL = 1.7; EXPRESSED IN FETAL LIVER, SIGNAL = 1.4; EXPRESSED IN HELA, SIGNAL = 1.1; EST_HUMAN HIT: BI753192.1, EVALUE 0.00e+00; SWISSPROT HIT: P22303, EVALUE 1.00e-129; NT HIT: gi14753878, EVALUE 0.00e+00
cgaggcggctcccgcgctctccccaaacagcgtcactgatgtcgggtcacccccgaaggctgccacgttctcctgcacccactgcagggccagcctctgatccaggagacccacattgcccggggcctctcggctccccggcagggccaggaagccaaaggctcccacccggtagttcatggacaccagcacagtcctctcggcctgtaccaagaagcggccatcgtacacgtccaaggaggaggccccactgtagaagccacccccatagatccagacgaggacaggggtgggggatgtaggccgggggtatggtgtccacacgttgaggtacaggcagtcctcgctcagctcacggttggggttccacatctcggtgccctcaaaacctgggtatagggtgtccacatattggtagcagacactctggaaggttgtagcgtctaccacccctgaccaaggctgcttgggctccggtggcagaaagcgacggggtcccatgggtggctccgcaaaggggatgcccaggaaagcagagacagggcccccgggggtcttcaggcgaatgccccgcagccggcccccacgcaccgtcaccagcagctctgcatcctcccggccctcagcccccactcctccacccaggagccagaggaggaggagaaggagtggggaagccagggaaggcgtgtgcagcagacactgcgggggcctcatggctgcagggcaggcggcgtctg

SEQ ID NO: 22812 - DNA, 768 bp, Homo sapiens
  MAP TO AL079302.4; EXPRESSED IN LUNG, SIGNAL = 2.2; EXPRESSED IN BONE MARROW, SIGNAL = 2.1; EXPRESSED IN BRAIN, SIGNAL = 3.5; EXPRESSED IN PLACENTA, SIGNAL = 1.9; NT HIT: gi14748376, EVALUE 0.00e+00; EST_HUMAN HIT: BI599342.1, EVALUE 0.00e+00; SWISSPROT HIT: Q09903, EVALUE 2.00e-04
ctatgggctcaatccagaagcaatcctgctttggccagagttgcccttacctgtctcagcagccccaaggatgtccagtttgtcacggatggcaggtgccaaggtcagggcttggattggtgtgggtgcagagaagcctagaaagctgagtgctcggagaaccggcctgggaacaaacaggtccttccaagctgacacatctgctttctgatcatgaacttcaggaatccatgtcttcgcttttttgggcaccttggcagcagtgctctgagaaggctccaacccttttttccctttatttttcttcttttttggagcagtttggaccaggttttctgatgtcatctccccagcctccggatcatcacaaaccatgtcatctccctgggcctccagctcaggatctttcacttcaaattctttctgggtactggttccttcagttgctacatttttacttttcttcaacttgatctttttctttggtgagctagactttccctcctcctcctcctcttcttctgaaacagcttgtgcctttctcttgggtgcttcctttgagaagagactggagggattcttggcaggggagaccaactggtaatctgtcaattcctcaaagcacaccaagtcatccatctgtccatctgcaaacatatttgggtcaatcttcacttccttccattttcccacaactttgattccctttgtctgaaatttgccacagcttgactgctttggccttgattttgtgtccttcaacttcat

SEQ ID NO: 22813 - DNA, 699 bp, Homo sapiens
  MAP TO AL132656.3; EXPRESSED IN BRAIN, SIGNAL = 1.7; EXPRESSED IN LUNG, SIGNAL = 1.4; EXPRESSED IN HEART, SIGNAL = 1.6; EXPRESSED IN BONE MARROW, SIGNAL = 1.5; EXPRESSED IN FETAL LIVER, SIGNAL = 1.3; SWISSPROT HIT: P22105, EVALUE 6.00e-03; NT HIT: gi14739129, EVALUE 2.00e-75; EST_HUMAN HIT: BI457007.1, EVALUE 1.00e-106
  unsure 585
catacccagtgctgggaccgggcgtgaccgcgaaccctggcacctccctgtctgtgttcacggctctgcccttcaccacacccgctcccggcccagcacacgggccgctccttgtgactgcaggggctcctccaggcggccctctggtgctgtctaccttccccagcacacctctggtgacagaacaggatggctgcggcccgagtggggccggggcttccaacgtctttgtccagatgaggacagaggtggggcctgtgaaggccgctcaggcgcagaccttggtcctaactcaggcccccctcgtctggcaggctccaggcgccctctgcggaggtgttgtgtgtccacctcccctactcctggcagctgctcctgtggtgcctgttatggctgcccaggtggttgggggcacccaggcctgtgagggaggctggtcccagggccttcctcttccaccaccaccaccaccggctgcccagctgccccccattgtgtcccaagggaatgctgggccatggccacaaggggctcatggagagagcagcctgctttctcccaggccaaggccccgccagatgactnctgtaaccccaggagtgtctatgagaactttcgactctggcagcactacaagcccctggtccggaggcaccttccccagagtcctgacaccgaagcgctttcgtgcttcctcat

SEQ ID NO: 22814 - DNA, 613 bp, Homo sapiens
  MAP TO AL136295.2; EXPRESSED IN BONE MARROW, SIGNAL =   1; EXPRESSED IN HELA, SIGNAL = 0.52; EXPRESSED IN BRAIN, SIGNAL = 1.1; SWISSPROT HIT: P09480, EVALUE 2.40e-01; NT HIT: AB054000.1, EVALUE 0.00e+00; EST_HUMAN HIT: BI114004.1, EVALUE 0.00e+00
tcagttatgcttgcggctggagtggggacgggggaagagcccatggcctgggctccctggagaccagggctgatgataccagctgccataggtgaggtaccaggcaaaggtgcccactgcggcgcccaccaccttgtgagtgtactggtggaaatagatgacggtacagagcagcaagaagttccagaggcccagcagcagcacgttcagcaggaagacaaggcgcagtggggcgccggcaggaagcccatgggccaggtacttggcgaacacagctgcttcctctgccatgagcaggcagcaaaaggtgagcaggaaggtgtgggaggagacggtgtagcctcgccactggtggccggctgccaggcagctgcggcggtcaggcagctcgtggagcagcagaccctggggcagtggctcgaagcaggagccagtcaggtcctcgatgagcaggaaggcccggccggctccccgccacacggctgcccctactaccagtcggctcaggtgtctggcagttactgccacgcgccgtgtagccaggaacaccaccagcaacacaaagccccctaagaaagtgcatgtccagccccaggctgaattcacaaatttt

SEQ ID NO: 22815 - DNA, 570 bp, Homo sapiens
  MAP TO AP000344.1; EXPRESSED IN BRAIN, SIGNAL =   1; EXPRESSED IN BONE MARROW, SIGNAL = 1.1; EXPRESSED IN LUNG, SIGNAL =   1; EXPRESSED IN HELA, SIGNAL = 1.1; EXPRESSED IN PLACENTA, SIGNAL = 1.4; EST_HUMAN HIT: BF435361.1, EVALUE 1.00e-100; SWISSPROT HIT: O06260, EVALUE 1.90e+00; NT HIT: M99656.1, EVALUE 1.00e-102
gaaccttgcacctgataccgttgctcttcttgtaactatttgtcttttgtttatcactctgtaaccattttgcttcttttgattcttgcatgtttttacttctgtagaattattacatttgagtccccctccccttcctaaacctaggtataaaagttaattgagccccttcctcgtggcagagagaattttgagcattagctgtctctctggccgccggcttaataaaggactcttaattcttctcaaagtgtggcgttcccttaactcacctggatacaacataaccagtcctccaggtgatcctgatgcatgttcaagtttgagaaccactggccaaatacaaagggaaaaatggtggtagatggagtagctaggactgtaggggttggtgtgaacacctttctcagatgtctccctgagacacagtgcctgggaaatgcctggatatttctggggtctcagaaagcaacactcagctctaatcacggtttcttcaggtttctgttttgggatttgggtagaaaggagcacatggaagagttcaatacaacgtcaggtccaggactt

SEQ ID NO: 22816 - DNA, 559 bp, Homo sapiens
  MAP TO AC007462.2; EXPRESSED IN BRAIN, SIGNAL = 0.8; EXPRESSED IN HELA, SIGNAL = 0.9; EXPRESSED IN BONE MARROW, SIGNAL = 0.85; NT HIT: U51899.1, EVALUE 2.10e+00; EST_HUMAN HIT: AW841898.1, EVALUE 2.00e-01
aaatgatgctttaaaatgcgtgtaatgatcgttccatttgaaatagaaaagagccaccattctctttcaatattataaattttatttccccaaaatgccatgctttatatttttctaaataggattttatggttcccatatgttcctaaatgagagttttcttctagacacttgtacaaatgtgaacagtaaaaatgaatactttgtccttttctcttttagctgcttccctaggaaatctctattttgctcccctcattggaaggccaaaatagcaatgcctttgagtgtttctcccctaggagcttttcccttttctttctctgaaagtctagagagccaaatatcctcttaatgactcggccacctgagcagtctttgtcagtggcttccatgcccttctccctgacaaagacagatcccattagactgcctagattgaagggggcccttctgctgggatttggaatactcctgggcacatcagggcccacagccttacatccttagttagatatgtgttttcacttggggcgggcttttggtattctgtgtagca

SEQ ID NO: 22817 - DNA, 799 bp, Homo sapiens
  MAP TO AP001714.1; EXPRESSED IN BONE MARROW, SIGNAL = 1.7; EXPRESSED IN LUNG, SIGNAL = 1.4; EXPRESSED IN HEART, SIGNAL = 1.4; EXPRESSED IN FETAL LIVER, SIGNAL = 1.8; EXPRESSED IN BRAIN, SIGNAL = 1.4; NT HIT: U12927.1, EVALUE 7.70e-01; EST_HUMAN HIT: BE148149.1, EVALUE 2.90e-01; SWISSPROT HIT: P09815, EVALUE 5.00e-14
caaaattggaaataaagcaaatgtcaacaaaacagctaaatattttaatattcataaaatggactacactgcaacaaatatgagtaaactactgccacttgctacaacatggatgatttcccatatgtcaacatggatgatttcccatatgtcaacatggatgatttcccatatatcaacatggatgatttcccatatgtcaacatggatgatttcccatatgtcaacatggatgatttcccatatatcaacatggatgatttcccatatgtcaacatggatgatttcccatatatcaacatggatgatttcccatgtcaacatggatgatttcccatatgtcaacatggatgatttcccatatatcaacatggatgatttcccatatgtcaacatggatgatttcccatatgtcaacatggatgatttcccatatgtcaacatggatgatttcccatatgtcaacatggatgatttcccatatgtcaacatggatgatttcccatatatcaacatggatgatttcccatatatcaacatagatgatttcccatatgtcaacatggatgatttcccatatgtcaacatggatgatttcccatatgtcaacatggatgatttcccatatgtcaacatggatgatttcccatatatcaacatggatgatttcccatatatcaacatggatgatttcccatatatcaacatggatgatttcccatatatcaacatggatgatttcccatatgtcaacatggatgatttcccatatgtcaacatggatgatttcattgagtga

SEQ ID NO: 22818 - DNA, 664 bp, Homo sapiens
  MAP TO AC016620.5; EXPRESSED IN BRAIN, SIGNAL = 1.2; EXPRESSED IN HELA, SIGNAL = 1.8; EXPRESSED IN BONE MARROW, SIGNAL = 1.2; EXPRESSED IN FETAL LIVER, SIGNAL = 1.1; EXPRESSED IN LUNG, SIGNAL =   1; NT HIT: AL163246.2, EVALUE 1.00e-118; EST_HUMAN HIT: AW850837.1, EVALUE 1.00e-117; SWISSPROT HIT: P19028, EVALUE 2.00e-05
atatgcgtttgcctatcctgcatggaatgccttatccaccatcatggtattctgcatagcattgcctctgaccaaggcacatactttacagctaaagaagtgcagcagtatgttcatgctcttggaattcactggtcttctccttatcattttgaagcagctggattgatagaacggtggaatggccttttgaagtcacaattacaacatcaactaggtgacaatactttgcagggctggcgcagagttctccagaaggctgtgtatgctctgaatcagtgtccaatatatggtacagtttctcccatagccaggattcacgggtccaggaatcaaggggtggaagtggaagtggcaccactcaccatcacccctagtggcccattagaaaaatttttgcttcctgttcccgcaacattacgttctgctggcctaaaagtcttaggtccagagtggagagtgctgccaccaggacacacaacaacgattccattaaactggaagttaatattaccacctggacactttgagctcctcctacctttaagtcagcaggctaagaagggagttacagtgttgcctggggtgattggcttggactatcaagatgaaatcagtctactactcatcttgaaatcagtctactcttccttacctgatggag

SEQ ID NO: 22819 - DNA, 825 bp, Homo sapiens
  MAP TO AL356019.2; EXPRESSED IN LUNG, SIGNAL = 1.1; EXPRESSED IN HELA, SIGNAL = 0.61; EXPRESSED IN BONE MARROW, SIGNAL = 0.86; EXPRESSED IN FETAL LIVER, SIGNAL = 1.3; SWISSPROT HIT: P58180, EVALUE 7.00e-78; NT HIT: AE008683.1, EVALUE 5.10e-02; EST_HUMAN HIT: AI809240.1, EVALUE 1.00e-68
atggaaacacagaacctcacagtggtgacagaattcattcttcttggtctgacccagtctcaagatgctcaacttctggtctttgtgctagtcttaattttctaccttatcatcctccctggaaatttcctcatcattttcaccataaagtcagaccctgggctcacagcccccctctatttctttctgggcaacttggccttactggatgcatcctactccttcattgtggttcccaggatgttggtggacttcctctctgagaagaaggtaatctcctatagaagctgcatcactcagctctttttcttgcattttcttggagcgggagagatgttcctcctcgttgtgatggcctttgaccgctacatcgccatctgccggcctttacactattcaaccatcatgaaccctagagcctgctatgcattatcgttggttctgtggcttgggggctttatccattccattgtacaagtagcccttatcctgcacttgcctttctgtggcccaaaccagctcgataacttcttctgtgatgttccacaggtcatcaagctggcctgcaccaatacctttgtggtggagcttctgatggtctccaacagtggcctgctcagcctcctgtgcttcctgggccttctggcctcctatgcagtcatcctctgtcgtataagggagcactcctctgaaggaaagagcaaggctatttccacatgcaccacccatattatcattatatttctcatgtttggacctgctattttcatctacacttgccccttccaggctttcccagctgacaaggtagtttctcttttccat

SEQ ID NO: 22820 - DNA, 779 bp, Homo sapiens
  MAP TO AC009087.4; EXPRESSED IN PLACENTA, SIGNAL = 1.9; EXPRESSED IN BRAIN, SIGNAL = 1.6; EXPRESSED IN HELA, SIGNAL = 2.9; EXPRESSED IN BONE MARROW, SIGNAL = 9.1; EXPRESSED IN LUNG, SIGNAL =   3; SWISSPROT HIT: P00737, EVALUE 0.00e+00; NT HIT: gi15319141, EVALUE 0.00e+00; EST_HUMAN HIT: AL579899.1, EVALUE 0.00e+00
ttagttctcagctatggtcttctgaacccagtcctggatggaagtcaccttcacatacacaccatactcagccacagcacagctcttatcaaagcttaagatcccagtcgcataccaggtgtcctcctccaggtcgtgaacggcaaaggcactgcccgcatcgccatagcaggtgtcttcttggtacttagacatgccagcacagaaggtgtgttcattcagtatgggctgcacccctacagggctcttcggtgtcttcttttcggggactgtgctgccttcataatgccttatgcattggtcttggtcagccacaggcagcatgacatacttcagatggtcagtaaatttaaaattggcatttcgcccccagccagaaacataacccacacgccctacttctgcataatcctttgaaggtaggcagatgggcatcactctctcattaacagacaccttctgtttgagtttgatgagcccaatatctacctgggagtagttagggtgtagaacaaccttctcaatctctacaagctgctttttccccacatagagtgttaaagtaggggcaatgtctttcgctgttgcattttctgaatggttcaggaagagatttttagccgtggtcagcagccattgttcattgatcagcgtggcacctgtggtgagattatggtgggaaaccatcttagcctgccagggaaagctgcctttggcatccaggtgtccacccaggatccgctgcactgggtttgccggattcttgggcttcccacata

SEQ ID NO: 22821 - DNA, 511 bp, Homo sapiens
  MAP TO AC006027.1; EXPRESSED IN HELA, SIGNAL = 1.4; EXPRESSED IN HEART, SIGNAL = 1.2; EXPRESSED IN BONE MARROW, SIGNAL = 0.86; EXPRESSED IN LUNG, SIGNAL = 1.6; SWISSPROT HIT: P81489, EVALUE 8.20e-02; NT HIT: AF149774.1, EVALUE 0.00e+00; EST_HUMAN HIT: BF843564.1, EVALUE 1.00e-64
ctgagaacagtgaggcggctgaagcagggctgcagctcccgcacgccgtagtcgttgagattgttgttgtctaggtctagggccagccgcttggggaagtgatgcaggacgaaggagagggcgctgcagtcggccgagcaggcgttgcagtaggtcagcttgaggtagttggcgcagatgcccctggccgccagctgccccaccttctggctctgtgtctcgtagatgcagcgcagcatccagatgaacgtgggcatggcctgcacctggttgaagctttcgacctgaacgcggggcaggctcttcaggtagccccgcaggctggaaaacaggtgtgcccacagggccttgcgctttctcctcagggctgccgcgggcaccagatgccgcaggagtttctgtttggctttggacaacagcccgcacaggaagaggttggtgaactggaagtgatccttgttcttgaagaggtcttcccgcgccggaccactgccctgcaggcactggaacg

SEQ ID NO: 22822 - DNA, 601 bp, Homo sapiens
  MAP TO AC003665.1; EXPRESSED IN HELA, SIGNAL = 2.3; EXPRESSED IN BRAIN, SIGNAL = 0.88; EXPRESSED IN BONE MARROW, SIGNAL = 0.9; EXPRESSED IN FETAL LIVER, SIGNAL = 1.1; SWISSPROT HIT: Q9UL17, EVALUE 5.00e-91; NT HIT: gi14774791, EVALUE 0.00e+00
ataaaactgtccttcagcttccttatcaaaaggagaaggggccccagcaggggaggagctgtcaccactggaaggatagggggacacgcgcctcctcttagagtctccttcgcccagtcctgaatcactggattccggccggatgggggcaatctcagtccacaccaaggggggaccctggtcctctggtccccgtccctctgagcctccagggccgggttccatgggcagagtccgcatagggcggaaccagctggccgggcccatcttgggagggtactggggtgccacaggccagccagctccaggtgccaggacctcctggcctcggtagtaggacatggtgggcccaggggcagagggcaagaatgcaggcttcatgctgactgctcgaaactcagcctcatagctgtggtcccggggggcccccagccagtaagcctggggaaccacatccttcgcctggccaggaaggtcggggtagaagcggctgggaacaggatactggttgggtaggagaggagagtagtgatctcccccaaggaattgacagttgggtccaggcggggaggggatgctggtgtcaacagatgtgtacatg

SEQ ID NO: 22823 - DNA, 669 bp, Homo sapiens
  MAP TO Z72004.1; EXPRESSED IN BONE MARROW, SIGNAL = 1.1; EXPRESSED IN HELA, SIGNAL = 0.33; EXPRESSED IN BRAIN, SIGNAL = 1.3; EST_HUMAN HIT: BG111003.1, EVALUE 3.00e-31; SWISSPROT HIT: Q16960, EVALUE 7.80e-01; NT HIT: AL163227.2, EVALUE 1.00e-23
tgttgggaactggagtaagggtcactcttgctatgctttagcaaagagactggtggcattttgcccctgccctagaggtctttggaactttgaacttgtgagaaatgatttaggtatctggcagaaaaaaattgtaaagcagcaaagcattcaagaggaagcagagcacaaaattttggaaactatgaaacctaacaatgcaatagaaaagaaaaacccattttctggggtgaaattcaagcctgcttcagatatttgcgtaagtaacaaggagccacatgttaatcaccaagacaatgcgaaaatgtcttcaaggcatgtcagagaccttcacagcatccccaccaatcacaggcctagaggcctagaagggaaagatggtttcatgagctgggcccagggctcacctgctctatgcagcctcaggacatggtgctgtgtgtcccagctgtttcagctccagctgtggctaaaagagtccaagatacagctcaggccattacttcagagggtgcaatccccaagccttgacagcttacacatggtgttggacctgcaggtgcacagaagtcaagaactgagattggggacccaccgcctagattttacagaatgtatggaaatgcctgtatgtctaggcagaattttgctgcaagtgtgaagccctca

SEQ ID NO: 22824 - DNA, 582 bp, Homo sapiens
  MAP TO AP000353.1; EXPRESSED IN HELA, SIGNAL = 1.5; EXPRESSED IN BONE MARROW, SIGNAL = 0.75; SWISSPROT HIT: P02671, EVALUE 4.00e-03; NT HIT: gi6753469, EVALUE 3.60e-02
accgcctcccggggtcaccaccaacagtatccagagtgaggcaggtctgagccctgcctgcttcctccacgaggttgccggggatgctccctccccaggctctctctccatgtatgcagtgggatggagaactgtggccgcctcgtggggtggggaggccgccaacacagcacagggctcacttgggtcactcaggagatggagaaggacaacccctccctcaacagaggtgccaccccctcaccacgccctggcgtgctctggcaagcactgccctgcagcctcggctccttggctgggtgcagtcgctggcaggatcagttccaagtcctcaggagaccagcgcccaggctccttagcccaggaatgtccagaatctgggcacagagcccaggcctcaggccacggtggcccacctgagcagctctttgtcggcgcttcctgtggggcctggcatggaggcacagacctggaagcagctggaggatgaccagggtccatcaacctttgtggagagggtcccgaatggggactcaggcagggtagcattggtcgggtttgccccttaggtctcagagaaag

SEQ ID NO: 22825 - DNA, 458 bp, Homo sapiens
  MAP TO AL121911.10; EXPRESSED IN BRAIN, SIGNAL = 0.83; EXPRESSED IN BONE MARROW, SIGNAL = 0.87; SWISSPROT HIT: P13450, EVALUE 4.70e-01; NT HIT: gi8393937, EVALUE 1.10e-01
atggaacaacatatgactctgagtctattctttaatactcatacattatctgtgcttcaattgacacttaatggggtcttgctccttgttgaggggaagataccacagacctttcctaagacaggagtgaccctttcttctgacctgcttatagacaatctcttgccaacaatgtctaaagctgtctctgggaaggaagtgttgggagaagtgggcaagggagtgaattccttctcacacttgatgatacaacacctttgggtcatgttgggtcaagaaagtgagctgaagaggcctatgacatttctgaccctctttcatctcagagacccagtagtgatggtgccaaggaatatgagatgtgcatacattctcacattcaactgtatattgataacctactgtatgttcagctgtgggctaagcacagtgaatattacactgcagcatataagatc

SEQ ID NO: 22826 - DNA, 754 bp, Homo sapiens
  MAP TO AC006121.1; EXPRESSED IN BONE MARROW, SIGNAL = 0.95; EXPRESSED IN BRAIN, SIGNAL = 0.98; EST_HUMAN HIT: AU132252.1, EVALUE 0.00e+00; SWISSPROT HIT: Q93008, EVALUE 0.00e+00; NT HIT: gi14764091, EVALUE 0.00e+00
cgggaggagggtttaagtaaacgccattacatgtaagcagttttttcataaactgaaaatactccatactgtactgcattcggttatgcatgaattgtacgttctgtttccgtacacttctctcaatggctgatggcataataatctgatgaggtctggtggtgatagcaagctctgatatatatcttatcaactcatcatcttggtctattgtgtccattcgttcataaaaaagtatataagcattccaccaccttttctggcgcctgtatgacatacgcttcatcatgtgatcaaacacttctcccatgtactctccaccaaaacactggtttttcatttcttcgtcatcatccattttacattctgttacatcaccatcatcaaatttataccagcgatttctctcaccatctccaccattcctttggatgatgtaagaataataatgccccccactcgcttgaccactgtgtacgagcacacccacaagtctgtattttgtgcttcctgctgtctcactttcagactgctcactctgttgtatcaactgactctctgggtttacattatccccttccagctttgcgacacctgcaactgtgtaaggttccatgtccagctctcgaggaaattcaaaataatcattgaacttgattgcacattctctttcccagtcatagtcaaatcgctttagttgtatagcaagaacaggaggtaattttttaatcagcaagcgctttacggtatcaac

SEQ ID NO: 22827 - DNA, 846 bp, Homo sapiens
  MAP TO AL121919.19; EXPRESSED IN LUNG, SIGNAL = 2.1; EXPRESSED IN HELA, SIGNAL = 3.8; EXPRESSED IN BONE MARROW, SIGNAL = 2.3; EXPRESSED IN HEART, SIGNAL = 2.1; EXPRESSED IN FETAL LIVER, SIGNAL = 2.5; EST_HUMAN HIT: BF307498.1, EVALUE 0.00e+00; SWISSPROT HIT: P56931, EVALUE 2.90e+00
gatatttctccatctgctggtgagcatggtgactgtactactcacagcactgctgccacatcaggattatctctgcaatctgacacctgcctggcagtggttaatgacgtgcctctaccccctggcaaaggtcttgaccttgggttgctggagactcagctgctggcctcccaggattcagtctcaacagatcccaaaccatacatcttctcagatgctcaaaggccttcttcctttgggtccaaaggaacttttccccaccatgacattgctacctctgtggctgccgtttgtatttctctgccagtgagaacagatcacatagcccaggaaattcacagtgctgaatcacgagaccacagccagactgcagggaggactctgacatcaagctccccagacagcaaagtcacagaagagggcagagcacagaccctcttgccagggagaccttcatctggacaaagaatttcagattcggttccactggagtcaactgaaaaaactcatcttgaaataccagcttcaggaccaagttcagctagttcacaccacaaggaagggagacacaagacgttttttccttccagaggccagtatgggtgtggggaaatgactgtcccctgcccctctttaggaagtgacggtaggaaacgtcaggtatctggattaatcactcggaaagattctgtggttccttctaagccagagcagcccatagaaattcctgaagccccttctaaatccctcaagaagaggagtctggaaggaatgagaaagcaaactcgagtagagttcagtgacaccagcagcgacgatgaagaccgattagttatagaaatatga

SEQ ID NO: 22828 - DNA, 581 bp, Homo sapiens
  MAP TO AJ239326.3; EXPRESSED IN PLACENTA, SIGNAL = 2.1; EXPRESSED IN HELA, SIGNAL = 0.41; EXPRESSED IN LUNG, SIGNAL = 2.2; EXPRESSED IN BONE MARROW, SIGNAL = 2.1; NT HIT: AL163302.2, EVALUE 0.00e+00; EST_HUMAN HIT: BF870078.1, EVALUE 0.00e+00; SWISSPROT HIT: P39060, EVALUE 6.00e-86
agcgcatcagcgaggaggtggggctgctgcagctccttggggaccccccgccccagcaggtcacccagacggatgaccccgacgtcgggctggcctacgtctttgggccagatgccaacagtggccaagtggcccggtaccacttccccagcctcttcttccgtgacttctcactgctgttccacatccggccagccacagagggcccaggggtgctgttcgccatcacggactcggcgcaggccatggtcttgctgggcgtgaagctctctggggtgcaggacgggcaccaggacatctccctgctctacacagaaccaggtgcaggccagacccacacagccgccagcttccggctccccgccttcgtcggccagtggacacacttagccctcagtgtggcaggtggctttgtggccctctacgtggactgtgaggagttccagagaatgccgcttgctcggtcctcacggggcctggagctggagcctggcgccgggctcttcgtggctcaggcggggggagcggaccctgacaagttccaggtaacccccactgtgccgtcgctgggggactggagc

SEQ ID NO: 22829 - DNA, 718 bp, Homo sapiens
  MAP TO AF050154.1; EXPRESSED IN HELA, SIGNAL = 0.73; EXPRESSED IN BRAIN, SIGNAL =  26; EXPRESSED IN BONE MARROW, SIGNAL = 9.2; NT HIT: gi14755853, EVALUE 0.00e+00; EST_HUMAN HIT: AV709078.1, EVALUE 0.00e+00; SWISSPROT HIT: P02649, EVALUE 1.00e-113
ggcgctgatggacgagaccatgaaggagttgaaggcctacaaatcggaactggaggaacaactgaccccggtggcggaggagacgcgggcacggctgtccaaggagctgcaggcggcgcaggcccggctgggcgcggacatggaggacgtgtgcggccgcctggtgcagtaccgcggcgaggtgcaggccatgctcggccagagcaccgaggagctgcgggtgcgcctcgcctcccacctgcgcaagctgcgtaagcggctcctccgcgatgccgatgacctgcagaagcgcctggcagtgtaccaggccggggcccgcgagggcgccgagcgcggcctcagcgccatccgcgagcgcctggggcccctggtggaacagggccgcgtgcgggccgccactgtgggctccctggccggccagccgctacaggagcgggcccaggcctggggcgagcggctgcgcgcgcggatggaggagatgggcagccggacccgcgaccgcctggacgaggtgaaggagcaggtggcggaggtgcgcgccaagctggaggagcaggcccagcagatacgcctgcaggccgaggccttccaggcccgcctcaagagctggttcgagcccctggtggaagacatgcagcgccagtgggccgggctggtggagaaggtgcaggctgccgtgggcaccagcgccgcccctgtgcccagcgacaatcactga

SEQ ID NO: 22830 - DNA, 603 bp, Homo sapiens
  MAP TO AL163152.2; EXPRESSED IN BRAIN, SIGNAL = 0.82; EXPRESSED IN HELA, SIGNAL = 0.94; EXPRESSED IN BONE MARROW, SIGNAL = 0.88; SWISSPROT HIT: O95013, EVALUE 8.00e-48; NT HIT: AL163203.2, EVALUE 4.00e-14; EST_HUMAN HIT: BG754726.1, EVALUE 8.50e-01
atgactcttctgataatcatggcctttgacaggtatgtagccatatgtaaacccctgcactataggacaatcatgagccacaagctgctaaaggggtttgcgatactttcatggataattggttttttacactccataagccagatagttttaacaatgaacttgcctttctgtggccacaatgtcataaacaacatattttgtgatcttccccttgtgatcaagcttgcttgcattgaaacatacaccctggaattatttgtcattgctgacagcgggctgctctctttcacctgtttcatcctcttgcttgtttcttacattgtcatcctggtcagtgtaccaaaaaaatcatcacatgggctctccaaggcgctgtccacattgtctgcccacatcattgtggtcactctgttctttggaccttgtatttttatctatgtttggccattcagtagtttggcaagcaataaaactcttgctgtattttatacagttatcacaccgttactgaatccgagtatttataccctgagaaataagaaaatgcaagaggccataagaaaattacggttccaatatgttagttctgcacagaatttc

SEQ ID NO: 22831 - DNA, 717 bp, Homo sapiens
  MAP TO AC000403.1; EXPRESSED IN HELA, SIGNAL = 2.1; EXPRESSED IN PLACENTA, SIGNAL = 1.7; EXPRESSED IN LUNG, SIGNAL = 1.7; EXPRESSED IN HEART, SIGNAL = 1.3; EXPRESSED IN FETAL LIVER, SIGNAL = 1.6; EXPRESSED IN BONE MARROW, SIGNAL = 1.6; NT HIT: L38281.1, EVALUE 1.00e-103; EST_HUMAN HIT: BF312427.1, EVALUE 6.50e-02; SWISSPROT HIT: P54987, EVALUE 2.00e-99
cccagacagtgtgactccattatcaatgttcttgatgactacgctatcctgcctcctggtggttacggtttgtacatctccaactctgcttctttgcttttcagattccatcccccttccgtggtaggaacgttgggtagtgctgctgctgcatccaagtttttaggacttagctcgacaaagtgccgagaagctctggccattgctgtttcccatgctggggcacccatggccaatgctgccacccagaccaagcccctccacattggcaatgctgccaagcatgggatagaagctgcatttttggcaatgttgggtctccaaggaaacaagcaggtcttggacttggaggcaggatttggggccttttatgccaactattccccaaaagtccttccaagcatagcttcctacagttggctgctggaccagcaggacgtggcctttaagcgttttcctgcacatttatctacccactgggtggcagacgcagctgcatctgtgagaaagcaccttgtagcagagagagccctgcttccaactgactacattaagagaattgtgctcaggataccaaatgtccagtatgtaaacaggccctttccagtttcggagcatgaagcccgtcattcattccagtatgtggcctgtgccatgctgcttgatggtggcatcactgtcccctcattccatgaatgccagatcaacaggccacag

SEQ ID NO: 22832 - DNA, 1532 bp, Homo sapiens
  MAP TO AC017111.2; EXPRESSED IN PLACENTA, SIGNAL = 1.8; EXPRESSED IN BONE MARROW, SIGNAL = 2.5; EXPRESSED IN LUNG, SIGNAL = 3.1; EXPRESSED IN FETAL LIVER, SIGNAL = 2.5; EXPRESSED IN HELA, SIGNAL = 4.4; NT HIT: AF287478.1, EVALUE 5.90e+00; EST_HUMAN HIT: AI791262.1, EVALUE 2.20e+00; SWISSPROT HIT: Q00657, EVALUE 2.00e-20
tgaattaagtttctgtctacttcatcctgggtaaaattcatgcccagtgtgatattttcaaaggcaccagtaggttttcgtctctgtaataagccatgtcctggcccataacgaataatataaaccaaagatttgtcttctgaatctaaatctgttgccattaatattttgttgttgataatcttggtatccccaatttctatttctagtccattattgatagtcattctgggcgtctcatcatcaacagggataactataatgaggaccgtcttttccacagagtgcttcccatctgttagtttaatcacaaaactgtcttcctgggtctcggagtcatcatgctcataaataatgctggaactctctatgatctgatccaaggtgaagctttcgaccaaaaccgtgccatttatcagctgattcatgatgtgaccatgagtggggaattgggtaatagtgaaagttaaatcatccaggggaacatcagcatcagcagcattgagaatgggtgtatcaattaccagactcatgccttccatcaccataaattctctcataaacatctctggctgttcatcattggtgggaatgattacaatggggaagaactgtctctctgaaaagttaatgccatcagaacaacgaaatacaaatcggtcctccacaggttccacccctttatggacactctggacatagtttatgtggccctgcctgagatctttcaagttgaaagcacttatggcaatccctgctcttgatttctcagagcctggtgctggagaaatgttttcaacataacctgaagtaggctgaataactatagtgcacaagatgtcatcattcagggagtcgacatcttcagcacttatatgcactgatgttataacacttttatcaccttccattactatcaactgttcacctacaaagatttctggggcctggctatcaacaggcaggatggtcacccatatagtaactccttggatagtattgccaccaattctccattcttgagacatatctgacagactcaggttaaaagaatccgctttaggcaataggcctatctcaccactggtgtgggtatatacaacagagccctccaagatgtccctttgagtaaactgctctgctggaatgccattgaccaagatttccccatacaaaggtggatcttccaagaggaaagtcaacatcaagtcatcagtttcctcattggtccccttaataacattggcagtgatttcagtagccccattttctaagacatctagataggactccagagtgccagtaggatggctcagtatgggcacttcatcatccactggccggacatttactctgagagtgatgggcaccacatgatgtctgtcactgacttccaaggagcagctatcagtcagggacttgtccccattatgggcataggaaactcggccctgttttatgtcctccaagtggaagagaccccctacatgcaggatctgtccagacactctcatgtggccatgtttgggtgc

SEQ ID NO: 22833 - DNA, 663 bp, Homo sapiens
  MAP TO AC009516.17; EXPRESSED IN HELA, SIGNAL = 0.99; EXPRESSED IN BONE MARROW, SIGNAL = 0.79; NT HIT: AB051453.1, EVALUE 0.00e+00; EST_HUMAN HIT: BG773464.1, EVALUE 3.00e-19; SWISSPROT HIT: Q15149, EVALUE 1.80e-02
tccggtgatcccgacaaagccgggtgcccgcggaagtgcgccaggatgtacttgaggaagagctggcgctccacctccagcgccgcctgcagatagcggatgcgcgccgcctgctcgccgtcagtctgccagcgaagctgcgccaacacttcctgcaggcgacagcggcactgcgccgcggaaacctcggacgcccccgggcggctacagtggccgcggttcaccagctcctcggccagctggcgctgcagctcccgggcttggcgcaccacgccatcgcgctcccggtgcagcagctgctgcagctgccgctgctcggcctccttccagcgcagcagctgccggatctcggcctcgcgttcccgctgcatctcctcttgcagctgccgcaactcccggctgcgctgtgcctcccacttggagcgcagacggtcagccagctgccgccgctcccgctcggcctcctcacgcagctggcgctcccgggcagcgaagcgccgccgttccgcccgccagcctgcccgctccgcctccagctccgcccgtagcttctccagctcccgcctctggttctccagcactgccgccgccgggctggagcagcccggcttcttgggcgacgcgcccaaggggctgggcgagtccttggccattgcggccgcg

SEQ ID NO: 22834 - DNA, 570 bp, Homo sapiens
  MAP TO AF241729.1; EXPRESSED IN LUNG, SIGNAL =   2; EXPRESSED IN BONE MARROW, SIGNAL = 1.9; NT HIT: gi12743224, EVALUE 0.00e+00; EST_HUMAN HIT: AL551675.1, EVALUE 0.00e+00; SWISSPROT HIT: P47805, EVALUE 1.00e-31
atgatgcaaatctgcgacacctacaaccagaagcactcgctctttaacgccatgaatcgcttcattggcgccgtgaacaacatggaccagacggtgatggtgcccagcttgctgcgcgacgtgcccctggctgaccccgggttagacaacgatgttggcgtggaggtaggcggcagtggcggctgcctggaggagcgcacgcccccagtccccgactcgggaagcgccaatggcagctttttcgcgccctctcgggacatgtacagccactacgtgcttctcaagtccatccgcaacgacatcgagtggggggtcctgcaccagccgcctccaccggctgggagcgaggagggcagtgcctggaagtccaaggacatcctggtggacctgggccacttggagggtgcggacgccggcgaagaagacctggaacagcagttccactaccacctgcgcgggctgcacactgtgctctcgaaactcacgcgcaaagccaacatcctcactaacagatacaagcaggagatcggcttcggcaattggggccactgaggcgtggcgcccgtggct

SEQ ID NO: 22835 - DNA, 1638 bp, Homo sapiens
  MAP TO AC002111.1; EXPRESSED IN BONE MARROW, SIGNAL = 0.85; EST_HUMAN HIT: AL043499.1, EVALUE 1.50e-01; NT HIT: AF146793.2, EVALUE 1.00e-01; SWISSPROT HIT: P17437, EVALUE 9.00e-06
atgcttcttgaagctggaaggaagaagccaatgtgccacctaccgctgcgcccactggggctgaccactgagcatgggcatcgccagctactgctgtgcccactggggctgaccactgagcgggggcatcaccacctaccgctgcgcccactgaggctgaccactgagtgggggcatcgccagctactgctgtgcccactggggctgaccactgagcgggggcatcaccacctaccgctgcgcccactggggctgaccactgagcacgggcatcgccagctactgctgtgcccactgaggctgaccactgagtgggggcatcaccacctaccgctgcgcccactgaggctgaccactgagtgggggcatcgccagctactgctgtgcccactggggctgaccactgagcgggggcatcaccacctaccgctgcgcccactgaggctgaccactgagcacgggcatcgccagctactgctgtgcccactgaggctgaccactgagtgggggcatcaccacctaccgctgcgcccactggggctgaccactgagcacgggcatcgccagctaccgctgcgcccactggggctgaccactgagcacgggcatcaccacctaccgctgcgcccactgaggctgaccactgagtgggggcatcaccagctactgctgtgcccactggggctgaccactgagcacgggcatcaccacctaccgctgcgcccactgaggctgaccactgagcacgggcatcgccagctactgctgtgcccactgaggctgaccactgagcacgggcatcgccagctaccgctgcgcccactggggctgaccactgagcacgggcatcaccacctaccgctgcgcccactggggctgaccactgagcacgggcatcaccacctaccgctgcgcccactggggctgaccactgagtgggggcatcaccacctaccgctgcgcccactgaggctgaccactgagtgggggcatcgccagctactgctgtgcccactggggctgaccactgagcgggggcatcaccacctaccgctgcgcccactggggctgaccactgagtgggggcatcaccacctaccgctgcgcccactgaggctgaccactgagcgggggcatcgccagctactgctgtgcccactggggctgaccactgagcgggggcatcaccacctaccgctgcgcccactggggctgaccactgaccacgggcatcaccacctaccgctgcgcccactggggctgaccactgagcacgggcatcaccacctaccgctgcgcccactggggctgaccactgagcacgggcatcaccacctaccgctgcgcccactggggctgaccactgaccacgggcatcgccagctaccgctgcgcccactggggctgaccactgagtgggggcatcaccacctaccgctgcgcccactggggctgaccactgagcacgggcatcgccggcatgcggccaccttcctggacacccagcagtgctgccccctgcagccagcacaggctgacccaaggtgtccttctaccgtgcggagaaacactgtcactgcagtgccaccaagttggggtcacagcaggcatttcgacgtgggccctgtgccttcctga

SEQ ID NO: 22836 - DNA, 1772 bp, Homo sapiens
  MAP TO AP001717.1; EXPRESSED IN BONE MARROW, SIGNAL = 1.3; SWISSPROT HIT: P08640, EVALUE 3.00e-17; NT HIT: gi15055516, EVALUE 0.00e+00; EST_HUMAN HIT: BE149300.1, EVALUE 0.00e+00
acttgaaagagggctccagaaaaagtagatgcgtatctgtacaaacagatcctactgatgaaattcccactaaaaagtcaaagaagcataaaaagcacaaaaacaaaaagaagaaaaagaagaaagaaaaggaaaaaaaatataaaagacagccagaagaatctgagtcaaagacgaaatctcatgatgatgggaacatagatttagaatctgattcctttttaaagtttgattctgaaccttcagctgtggcgctggagcttcctacaagagcatttggcccatctgagaccaatgaatcccctgcagttgtgctagaacctcctgtagtatcaatggaggtatcagagccacacatcttagaaactctgaagccagctacaaaaactgcagaactgtcagttgtatctacatcagtaatctcagagcagtcagagcagtctgtggcagtaatgccagaaccatccatgacaaagattctggattcctttgcagcagcaccagtgcctactacaacactggtgttgaagtcatctgagccagttgtaacaatgtcagtggagtatcagatgaagtctgtgctgaaatctgtggagagcacatctccagagccatcaaagatcatgttggtagagcccccagtagcaaaagtgttagagccttcagaaacccttgtggtatcatcagagacacctactgaggtgtaccctgagccaagcacatcaacaacaatggattttccagagtcatctgcaattgaagcgctaagattgccagagcagcctgtagacgtaccatcggagattgcagattcatccatgacaagaccgcaggagttgccggagctgcctaagaccacagcgttggagctgcaggagtcgtcggtggcctcagcgatggagttgccggggccacctgcgacctccatgccggagttgcaggggccccctgtgactccagtgctggagttacctgggccctctgctaccccggtgccagagttgccagggcccctttctaccccagtgcctgagttgccagggccccctgcgacagcagtgcctgagttgccagggccctctgtgacaccagtgccacagttgtcgcaggaattgccagggcttccagcaccatccatggggttggagccaccacaggaggtaccagagccatctgtgatggcacaggagttgccagggctgcctttggtgacagcagcagtagagttgccagagcagcctgcggtaacagtagcaatggagttgaccgaacaacctgtgacgacgacagagttggagcagcctgtggggatgacaacggtggaacatcctgggcatcctgaggtgacaacggcaacagggttgctggggcagcctgaggcaacgatggtgctggagttgccaggacagccagtggcaacgacagcgctggagttgccggggcagccttcggtgactggggtgccagagttgccagggctgccttcggcaactagggcactggagttgtcggggcagcctgtggcaactggggcactagagttgcctgggccgctcatggcagctggggcactggagttctcggggcagtctggggcagctggagcactggagcttttggggcagcctctggcaacaggggtgctggagttgccagggcagcctggggcgccagagttgcctgggcagcctgtggcaactgtggcgctggagatctctgttcagtctgtggtgacaacatcggagctgtcaacgatgaccgtgtcgcagtcc

SEQ ID NO: 22837 - DNA, 957 bp, Homo sapiens
  MAP TO AC008488.6; EXPRESSED IN BRAIN, SIGNAL = 0.81; EXPRESSED IN BONE MARROW, SIGNAL = 1.1; SWISSPROT HIT: Q10264, EVALUE 4.00e-03; EST_HUMAN HIT: AL133685.1, EVALUE 0.00e+00; NT HIT: gi15296646, EVALUE 0.00e+00
gtgttcggatatctagttttcccaatgaagaggacaggaaacaccaacaaaggagcattattggctttttacaggctggaaaccaagccctgtcagccactgagtgtacattagagaaaactgacaaagataagtttgtaaaacctctagaaatgtctcataagaagagtttctttgataaaaaacgatcagaaaggaaatggagtcaccaagatacatttaaatgtgaagccgtgaataaacaaagtttccagacatcacaaccattccaagttttaaagaagaagatgaatgagaatttggaaatatcagagaattcagatgactgtcagatacttacctgtcctgtttgctttagggctcaagggtgcatcagtctggaagccttgaataaacatgtagatgaatgtcttgatggaccttcaatcagtgaaaactttaaaatgttctcgtgttcacatgtttctgctaccaaagttaacaagaaagaaaatgttcctgcttcttcactttgtgagaagcaagattatgaagcccatccaaaaattaaagaaatatcttcagtagattgtatagctttagtagatactatagataactcatctaaagcagaaagcatagatgctttaagtaataagcatagcaaggaagaatgttctagtctcccaagcaagtcttttaatattgaacactgtcatcagaattcttcttctactgtttcattggaaaacgaagatgttggatcatttagacaagaataccgccagccttacttatgtgaagtgaaaacaggccaagctctagtttgtcctgtttgtaacgtagaacaaaagacttcagatctaaccctgttcaatgtgcatgtggatgtttgcttaaataaaagttttatccaagaattaagaaaggataaatttaacccagttaatcaacccaaagaaagctccagaagtactg

SEQ ID NO: 22838 - DNA, 809 bp, Homo sapiens
  MAP TO AL133279.2; EXPRESSED IN FETAL LIVER, SIGNAL = 1.2; EXPRESSED IN LUNG, SIGNAL = 1.1; EXPRESSED IN BRAIN, SIGNAL =   1; EXPRESSED IN HELA, SIGNAL = 1.8; EXPRESSED IN BONE MARROW, SIGNAL =   1; EST_HUMAN HIT: BI669964.1, EVALUE 0.00e+00; NT HIT: gi16306553, EVALUE 0.00e+00; SWISSPROT HIT: P57789, EVALUE 1.00e-109
ttagtttctgtcttcaagtaatgagttgttctccggctcccggtctttggtgtccgtgggtatcattccgttctccaactcagcgtgctgctggatacagtccgtcagcatggctgtgctggagttgtctgagttacacatcttttccgtctcctcctctttcttctcctcgtccagggagtaattccggaaggtcttgtagattttctgaacgtcctcgggcaaggtctttttgaggtccttgtttttcctcttggtgagtctggaggtggacccgaacttgttgatgatgttgtcctcggacgcaccctgcccatgcttgttcagctgctccggccccttcaggcgcaggttgttgggccggttgttgatgctctcctgggatgaggccttgaagcggccggtgtccagggcagcaaagacagagcgcttctcgggggacagcatgtccagtgagtgggcccgctggtccaggcccagccgccggcgctccatgctgcggatggtggccgcccgctgcagcttatcgtggatctccacgctgagccttcgccgtgtctcccggaactcagccgtgacattggccttccactctgccgcatgggccttgatttcacccacctggccaagagacagaagagcaacaatatgctgacaaatgcctccctgccttggcctcccagcacccacagccctcgggtgtccccacggggaggccaggaggtgacggagcacatgcccagggggaggtgcaaatgctaccttctgccctagtacttctgccacctggacacccatccctaattggc

SEQ ID NO: 22839 - DNA, 866 bp, Homo sapiens
  MAP TO AC005630.1; EXPRESSED IN BONE MARROW, SIGNAL = 1.7; EXPRESSED IN FETAL LIVER, SIGNAL = 1.9; EXPRESSED IN PLACENTA, SIGNAL = 1.4; SWISSPROT HIT: Q08379, EVALUE 4.00e-10; NT HIT: gi16161055, EVALUE 4.00e-95; EST_HUMAN HIT: BF828725.1, EVALUE 0.00e+00
ctgaacccctggccccagagcccccagcagggccatctaaggtggagcagctacaagatgagaccaaccacctaaggaaggagctagagagtgtgggaagacagctccaggctgaggtggaaaacaatcagatgttgagtctcctgaacaggagacaggaggagaggctacgtgaacaggaggagaggctacatgaacaggaggagaggctacatgaacaggaggagaggctgtgtgaacaggaggagaggctacgtgaacaggaggagaggctgtgtgaacaggaggagaggctacgtgaacaggaggagaggctacatgaacaggaggagaggctacgtgaacaggaggagaggctacgtgaacaggaggagaggctacatgaacaggaggagaggctgtgtgaacaggaggagaggctacgtgaacaggaggagaggctgtgtgaacaggaggagaggctacgtgaacaggaggagaggctgtgtgaacaggaggagaggctacgtgaacaggaggagaggctgtgtgaacaggaggagaggctatgtgaacaggaggagaggctgtgtgaacaggagaagctgccagggcaggagaggctgctggaagaggtggagaagctgttagaacaggagaggcggcaggaggagcaggagaggctgctggagagggagaggctgctggacgaggtggaggagctcctggagcaggagaggcttcggcaacaggatgagaggctgtggcagcaggagactctgcgggagctggagaggctgcgggagctggagaggatgctggagctggggtgggaagccctgtacgagcagcgggccgagccacgcagcggcttcgaggagctggta

SEQ ID NO: 22840 - DNA, 576 bp, Homo sapiens
  MAP TO AC007539.8; EXPRESSED IN HELA, SIGNAL = 1.1; EXPRESSED IN BRAIN, SIGNAL = 0.98; EXPRESSED IN LUNG, SIGNAL = 0.98; EXPRESSED IN BONE MARROW, SIGNAL = 0.75; NT HIT: gi16162047, EVALUE 3.50e-02; EST_HUMAN HIT: AA345056.1, EVALUE 5.20e-02; SWISSPROT HIT: P44872, EVALUE 1.40e+00
ctcaggacctctccccttggctgtcatgaaattatggaagcagagagactgtccatattaagaagtatacacttcattggtgctttcaatgtcgatttcgtggcagtagcaaattacatgcatatgacgttttaggcaagaaaaaaggatcctgaggcttagaagaactgtgctatactagaagagatagccttagcaacagcacactatcatctccagtaagtgattctatccagtaagtgatctaataagaggtataaataaagtgttgggggaacagttatgaacggagacaacaagaagacttcagcaaaggaaaggcttacacagccttaaatggatgagtaggatttcaacaggtgaacacagggatgaccctgcaagtaagtaggattattctgattgtctgtctggttccatggtgggcttttactgttttgcttccccgacctgcacagtcttattgtcccccaataaaatagactctacttagaagaggaatgagacaagcttcttttattcctttgaatattttcagcaagaagtcaagatttttcttttctgaccccaggaatc

SEQ ID NO: 22841 - DNA, 854 bp, Homo sapiens
  MAP TO AC011451.2; EXPRESSED IN BRAIN, SIGNAL = 1.1; EXPRESSED IN HELA, SIGNAL = 1.7; EXPRESSED IN BONE MARROW, SIGNAL = 1.1; EXPRESSED IN LUNG, SIGNAL = 1.1; EXPRESSED IN FETAL LIVER, SIGNAL = 1.2; NT HIT: gi14756440, EVALUE 0.00e+00; EST_HUMAN HIT: BG119714.1, EVALUE 0.00e+00; SWISSPROT HIT: P52742, EVALUE 6.00e-73
attgataaggcttctcaccagtgtgagttctcatatgtacagtaagatgtgaagagttagcaaaagctttcccacattccttacattcataaggcttttctccagtgtgagttcgcctgtgttttataagacctgatgaatcagtgaaggctttcccacatttgttgcactcatacggtttttctccagtgtgaacccttatgtgaatgttgagttttgagaaacaagtaaattctttgccacattcattacaaacatagtgttttcctctagttctaagtcttatatgtttagcaagatctggggaaaaagcaaaggctttgccaaatttcttatgttctataggtaacactctactatgagttcttaaatgttgagtaagatatgacgactcagtgaagggtttcccacatgctttacattcatagaatttttctccatcttgagtttgcatgtgtacaaaaagggctgtagaatgagaaaaggtttcgacatactccttatgagtatatggtctctctccaccataaattcttacacattctctgaggtgtgaggaggaaggtaagcctttttcacagtcactgcatttatatggtttctcttgagtgtgagttttcttgcaaacaagatgtagattttggctagttttcttgcaaacaagatgtagatgttggctgaaggctgtttcacattgattacagttaggaagttcctctccgatatcagttttcttgtgtaaagtaaagatagagggttttctgaaggctttttcacattgattacactcacaggttttctttctaaagtaagttctcctgtgagtcttaaggcatgagtgttcactcaaggct

SEQ ID NO: 22842 - DNA, 829 bp, Homo sapiens
  MAP TO AL121758.5; EXPRESSED IN BONE MARROW, SIGNAL = 0.82; EXPRESSED IN FETAL LIVER, SIGNAL = 1.2; EXPRESSED IN HELA, SIGNAL = 0.82; SWISSPROT HIT: Q91924, EVALUE 6.00e-45; NT HIT: gi13775235, EVALUE 0.00e+00; EST_HUMAN HIT: BF346626.1, EVALUE 0.00e+00
tcagctggccgggccggcgggggtcggcgggggtggctcggccgccttggcgcaggccgcctcgcagtgcttgtggaggtaggacttgagcgcgaagctcttgtcgcactggcggcagcggtagtgcttgaaggccgagtgcgtctgcatgtgcgcgcgcaggttggagcggtcggcgaaggccttgccgcagtgcgcgcagccgaacggcttttcgccggtgtgcgagcgcatgtgaccctgcagcagccagggccgcgagaaggccttgccgcagacgccgcacttgtggcgcaggttgtgcgtgagcaggtgcatggcgagcgcgggcatggacacgtaggccttgccgcacgtcgggcatttgcgcgccagctggctgtccaggctgcggtgcgtctgcttgtggcggctcaggttcgacgacgtggcgtaggtcttgccgcactcggcgcacgcgtgccggtgcccgccgcccgcctgcgcccccgcgcgccccgcgcgccccccggcgccccccgcgtctcccgagccccccgcgtccccgccgcccccgccccgccgccgccgcgagcgcccgtccgagatgaagaaggcgtccatggagtagctgtcggtcactgccgcctcccctcggaagtagcgcgccgacaggctcgactgcgggctttcggggtcgctgtactcctccggcgccgccggcgggtacgcgggctcggccggggccagctccaggcccggcttctggtccgcatcgtagctgctcgggggcaggcggtgcggggcgtaccctggagggggcgagaagtggaggggcggtgagaggagg

SEQ ID NO: 22843 - DNA, 1070 bp, Homo sapiens
  MAP TO AC010320.7; EXPRESSED IN BONE MARROW, SIGNAL = 0.75; EXPRESSED IN HELA, SIGNAL = 1.2; EXPRESSED IN FETAL LIVER, SIGNAL = 0.97; NT HIT: gi14774829, EVALUE 1.00e-34; EST_HUMAN HIT: AW386242.1, EVALUE 0.00e+00; SWISSPROT HIT: P51522, EVALUE 1.00e-105
tcattccatctgtaaggtacgcagtgaattctctccagcatgaattttccgatgtcgtgaaaggtgtggattttgattgaagaccttgccacatgcattacacttgtaaggtctctctccagtatgaattctctgatggttggttaggtataatttgcgcccaaagactttgtcacattcattacatttgtaaggtttctctccagtatggattagaagatgggccataaggcccggacgcttgtgaaatgctcttccacattcgttacatttgtagggcttctctgtactatgaattatttgatgccgtgcaaggtatgaaagcagactaaagaccttgccacattcattacatttgtaaggtttttccgccgtgtgacttctctgatgattggttagagaaaatttgtgcctgaagttcttgccacactcattacatttgtaaggtttctctccagtatggattacaagatgggtagtaagtcccgaacactctctaaaagctttgccacattcgttacatttgtgaggcttctctccagtatgaattctttgatgtcgtgcaaggtttgaattgcgattaaacaccttgtcacattcactacatttgtaaggcttctgtccagtatgaattctccaatgttctacaaggtgtgaattgcgactgaagaccttgccacattcagtacatttgtaaggtttctctgcagtatggattacttgatggttagtaaggcttgcacggactctaaaaacttcaccatcttcactacattcatattcataagattttcctctaatgtatgctttctcttcttgtgggagtaatgggaaatcaataagatcatttctatatttattaaaaatgtgtgttgtgaaactagaagaaattttttgaagtggtgaaactgaggaacgatggtttgtaaacttttcaacttgattacttctgtaaattttccttccggcttgaaacagctgcaattcagacagatgtgcctcaagggttaatccaagttgatttttaataggcttgttttctgcattgcttcccaatacacagctcctcc

SEQ ID NO: 22844 - DNA, 934 bp, Homo sapiens
  MAP TO AL096805.1; EXPRESSED IN HELA, SIGNAL = 0.82; EXPRESSED IN BONE MARROW, SIGNAL = 0.88; NT HIT: AL096805.1, EVALUE 0.00e+00; EST_HUMAN HIT: AI932372.1, EVALUE 3.00e-60; SWISSPROT HIT: P51172, EVALUE 5.00e-20
tctctgccccgtcccccatgtctccgctccatcccatgtccctgctcatcccccctgtccccaggcctgcctggtgtcctgcttccagcagctgatggtggagacctgctcctgtggctactacctccaccctctgccggcgggggctgagtactgcagctctgcccggcaccctgcctggggtgagtcctgctcgctgcctcccactctgtcagccattagccggggggtcacagcgagcctcacacatgcctctgacccctccccaaggacactgcttctaccgcctctaccaggacctggagacccaccggctcccctgtacctcccgctgccccaggccctgcaggtgagacgggggtgttggggtcgcggccagggatcattgccccaggtagcgtggcaggtgacacccggctgtctcttccagggagtctgcattcaagctctccactgggacctccaggtggccttccgccaagtcagctgtgagtccccaaagtggtggggtgggggtgtggacagccaggcagaccccacaggtcccacagagcccacccaagacaagggcagggccggaactgacccagcctatgccccgtggtctctgcccccacatccgcccgtggtacccaggatggccgggggcatgggggagccgtggccacagcaaaccttccgtctgcagggatggactctggccacgctaggtgaacaggggctgccgcatcagagccacagacagaggtgggtgcaccctccccctccagagaggcatcacagcccctctcccctcaaagcccccctccccatcatgaaggtctgggccagcgccctcatgcctctatcctgccccaggagcagcctggccaaaatcaacatcgtctaccaggagctcaactaccgctcagtggaggaggcgcccgtgtactcg

SEQ ID NO: 22845 - DNA, 527 bp, Homo sapiens
  MAP TO AF048727.1; EXPRESSED IN BONE MARROW, SIGNAL =   1; EXPRESSED IN HELA, SIGNAL = 2.4; NT HIT: AF048727.1, EVALUE 0.00e+00; EST_HUMAN HIT: BG820306.1, EVALUE 0.00e+00; SWISSPROT HIT: P10481, EVALUE 3.00e-05
ctggcctccacgggggtctacagcagcctcctctgggggttcgtggactccaggaccgaggagtggaggctggaggggactcccggggcccactgaccaactgtcatcccgtggcctgttgggggcgggggctgggaagcccacgatgctgccctggcagccccaggcagtctcgggcagggaagccacgcgctctgcgggcaggaaggaggtgccctcgtcagtgctgagcgcctgcacacggctgcccagtgggctccgggcattgcagtagaggaagctgccggcctgcccaccgtccaccgccgccagctggcactcgcctgagcgcaggttgggcacgaggcctccacagcgccaggtgcggccgtggtcatcgctgtagaaggcgaaggagtgagggctggtccggcagatcttgccaaaacactctcggcggtccacgcggtaggtgtaggcgggtaccagcaggcggcctgagggcagctgcacgccgtggccgggacccacagcgaatgtggcccagt

SEQ ID NO: 22846 - DNA, 939 bp, Homo sapiens
  MAP TO AC004174.1; EXPRESSED IN BONE MARROW, SIGNAL = 1.3; EXPRESSED IN LUNG, SIGNAL = 1.1; EXPRESSED IN BRAIN, SIGNAL =   1; EXPRESSED IN HELA, SIGNAL = 1.4; NT HIT: gi11526383, EVALUE 0.00e+00; EST_HUMAN HIT: BF841098.1, EVALUE 4.00e-07; SWISSPROT HIT: Q9H209, EVALUE 3.00e-92
tcaaatctccataggcaccgttttctggatggttctctttagggcagctttgacctctgtgttccgcaggctgtagatgatggggttgaggatgggggtgaccacagcatagaagagggacaccagagggtcagtggccggatcgtagctggccttagggcgaatatagataaagagtgcggtgccatagaagagggagaccacgatcaggtgggaggagcaggtggagaaggccttgcggcggcccgcaacagatgggatccggaagatggtaacgaggatacgcccgtaggagcccaggatgaggccaaaggggcagaggatgaggagggctgttgccaggataatctgcagttcattaagcgaggtgtctccacataccagctgcaggacaggctggatctcacagaagaactgcgggatggtattggggccgcagaagggcaaagagaagatgaaaggggtgtggcccagccccaccagcaccccacaggcccacgccgacccagctagctgtagacacacccggtggctcagcagcagtgggtagcggaggggttcacagatggctgcatagcggtcataggccatggctgccaggaggcagcactccgtggcgccaaagaagaggaagaagaacatctggagagcacatccagagcgagagatgtggcgccggccagtaaggaggtggtgaagtagcagggggaccgtgacagacgtatagccaatctccaaggccgagagggtgcgcaggaagaagtacataggggactggagggcagcatcagtggagaccagcaccacaatgaggaaattgcctgccacggtcagcaggtagatagtgagaaagacagagaagagcaagccctggaggtcggccaggtgggagaagccgagaagaagaaactcagtcaccatggaggtgtttgcactcat

SEQ ID NO: 22847 - DNA, 576 bp, Homo sapiens
  MAP TO AC004889.1; EXPRESSED IN HELA, SIGNAL = 1.5; EXPRESSED IN BONE MARROW, SIGNAL = 0.85; EST_HUMAN HIT: BF841098.1, EVALUE 2.00e-13; NT HIT: X89663.1, EVALUE 7.00e-25; SWISSPROT HIT: O95047, EVALUE 3.00e-54
cagatggctttgtatttgacttttgctgctgcagtgtgcatgattttggtggtgatgtcctatgacagatttgtggcgatctgccatcccctgcattacactgtcatcatgaactggagagtgtgcacagtactggctattacttcctgggcatgtggattttccctggccctcataaatctaattctccttctaaggctgcccttctgtgggccccaggaggtgaaccacttcttcggtgaaattctgtctgtcctcaaactggcctgtgcagacacctggattaatgaaatttttgtctttgctggtggtgtgtttgtcttagtcgggcccctttccttgatgctgatctcctacatgcgcatcctcttggccatcctgaagatccagtcaaaggagggccgcaaaaaagccttttccacctgctcctcccacctctgtgtggttgggctttactttggcatggccatggtggtttacctggtcccagacaacagtcaacgacagaagcagcagaaaattctcaccctgttttacagccttttcaacccattgctgaaccccctcatctacagc

SEQ ID NO: 22848 - DNA, 1397 bp, Homo sapiens
  MAP TO AC022085.4; EXPRESSED IN LUNG, SIGNAL =   1; EXPRESSED IN HELA, SIGNAL = 1.7; EXPRESSED IN BRAIN, SIGNAL = 0.94; EXPRESSED IN HEART, SIGNAL = 2.4; EXPRESSED IN BONE MARROW, SIGNAL = 0.96; SWISSPROT HIT: P29126, EVALUE 2.00e-04; NT HIT: gi16160730, EVALUE 0.00e+00; EST_HUMAN HIT: BF332445.1, EVALUE 0.00e+00
atgatacgattcgagctcggtacccctctttggcctttcgtaaagtatcatttaaattatcaccagattgcttttgagagccaaatgtacttttattcccttttaaaacatgaggacatgaactacgcagtttggatatgtaaggaccatggttatcttccacagtgggcttgttcgagggatttgagtgttctccaggggaaaaaaaatttgttttggtgttttttgagatattctttggatcttgcttttgagacaatgatttagtggctggacatggaaggagtggggatttcaatgatggcattttatttggtgtatgctcttgttcaggtttttctgcagtggggcactgtctcaccacctcgaaggaagcagcggaatcagaagaggccttgtgattaagagatccagtatgtatttctttttgtgttttctgtgttggggaattacgtgtttcatcagtttggggctcctgtattcctgtagttatcaagctaaaatcaaagagaggtttctctatcatttctgacttgttaccagtgatgtctttcaatcccgactgtaaatccagagtcttctgagaagggtaaggcgtccagcgacgaggcttttcccttgccgcactgccattctttccactaactttggaagtagcagtgtctgcttgtttagtggtttggctttccagctgctcaaaattgaagtcgagtaagccttctgaaggaaatttatcacttgtaaatccttcagaaggacctctatatgtggcaactgtaccaagtttgtcattttcttgccgctgccaattatatctgtcgtgactgtatttgtttgacttattagatttcttgttccatagcatagtcatgtcttccatttgacagttagaatttctgtttctgcctggttgaaatttgtctccagggccactgtaattccaattatttgtactacgtacactggatttccagtttccgttactgttgttcatatgccaactggaaaagccacctgttccttcagaaagccaactggaattccttcctgtaccattatgattccaatctactgctccactatttgaaagccaaccacctccagaattactatggttgtgaaaccaagtcgaggagcctcctgcaacacccttatgccacccggaacgtcctcttggtccaccaccattcctcaaagaatgtggaaagctgtttttcctagtattattaaagccatctttttcccatttccaatcccgctgtggaggtccacgatgatgccatgcaggctgactgtaactctctctgtcttggtaaggaattcggtcttctcgtctccattggggtcgtctgtcatcagagtttatttcttggttgctattggaaggttcatcttgt

SEQ ID NO: 22849 - DNA, 545 bp, Homo sapiens
  MAP TO AL022319.2; EXPRESSED IN HELA, SIGNAL =   2; EXPRESSED IN BONE MARROW, SIGNAL = 1.1; EXPRESSED IN FETAL LIVER, SIGNAL =   1; EXPRESSED IN LUNG, SIGNAL = 1.1; SWISSPROT HIT: Q99046, EVALUE 1.00e+00; NT HIT: gi14779039, EVALUE 0.00e+00; EST_HUMAN HIT: N57586.1, EVALUE 0.00e+00
acagagcagggagtgtggagaaggtggaagagctgagctcagaggcagagaagctccttgcagggagcactgggagatggcctggcccgtcccaggctcctggaggccccacctgccgatcccaggcacttgaccttgttcctgtgggtgacagagatgagaaccagggaagctgtgatccactggccaggacaagtcaacatgggtgagggttgggcaaagggcccttccttcctccccaaccctgtggtctggggccatggcctcaggcttgtgtctatcacaaaagcacaaacttgccctaacccacatgggcctggctgtggggaaagtggggacccaggtccctgagctgtctgctgggctccgtagagcggtggtgggcaggcaccttggcatctgtgcagagacggcccagtctggccaaatcctcttcctctcccctgctctaccttctccggcaccaggcagccccttaaaggaggacaaagtgtgtaaagcccgtctgctgtcttcccccaaatcctcagctcagagccttccgc

SEQ ID NO: 22850 - DNA, 477 bp, Homo sapiens
  MAP TO AP000336.1; EXPRESSED IN BRAIN, SIGNAL = 0.84; EXPRESSED IN HELA, SIGNAL = 1.5; EXPRESSED IN BONE MARROW, SIGNAL =   1; EST_HUMAN HIT: BE062073.1, EVALUE 8.00e-87; SWISSPROT HIT: P07476, EVALUE 2.00e-06
tcgcccaccctcctcctcctggacacacagccgcccactctcctcttcctcctccttctcgacacacaaccacccaccctgctcctcctcctcctcctcctggacatgcagccgcccaccctcctcctcctggacacgcagccgcccaccctgctcctcctcctcctcctggacacacagccgcccactctcctcctcctggacatgcagccacccaccctgctcctcctcctcctcctggacacacagctgcccacactcctcctcctggacacacagctgcccaccctcctcctcctggacacgcagccgcccaccctcctcctggacacacagccgcccactctcctcctcctggacatgcagccgcccaccctgctcctcctcctcctggacacacagacacctaccctcctcctgctggacacacagccacccaccctgctcttcctcctccccctcctccctgctgtttgc

SEQ ID NO: 22851 - DNA, 625 bp, Homo sapiens
  MAP TO Z73965.1; EXPRESSED IN HEART, SIGNAL = 5.5; EXPRESSED IN BONE MARROW, SIGNAL =   2; EXPRESSED IN LUNG, SIGNAL = 5.2; EXPRESSED IN FETAL LIVER, SIGNAL = 1.9; EST_HUMAN HIT: AL535343.1, EVALUE 0.00e+00; SWISSPROT HIT: O67825, EVALUE 3.20e-01; NT HIT: gi16172816, EVALUE 0.00e+00
ccctgaattcccttggacctctagggtagaaggggtcctgtaaatttctttgcatccacaaaaacgcccccaatttctgtttgctttttctcttctcatcctgcaccttagccatattgtcaaattctcttatcatgtcctcattgctgaaattcatatcatgtatggcctctttatactccttgaggtaatgagccagccccttattagtttttcttttggctttcctgggtacatcatcctcagctgggcgctttcctgcagcccttgtttcactccctggctctccttcactctctggctttccctctatctctggttttccctctctctctgatcctccctccatctctgactctccctccctctctgactttccttcttttgcctctccctcactctctggctttcctttatcctttaacatttcctcatctcctgttttgcccttgttttctgtctttccctcgttttctaacttcttgtcttccagagtacaagttacttctggctttctctcgtcttgtggctgttcttcattttccatctttccttggtttgaagccattccttcattttcactgtagagtttttccatgtcgagatttcccctccttttcctgtc

SEQ ID NO: 22852 - DNA, 502 bp, Homo sapiens
  MAP TO AP000500.1; EXPRESSED IN BONE MARROW, SIGNAL = 0.73; EXPRESSED IN FETAL LIVER, SIGNAL =   1; EXPRESSED IN HELA, SIGNAL =   1; SWISSPROT HIT: P07801, EVALUE 1.60e+00; NT HIT: AB026898.1, EVALUE 0.00e+00; EST_HUMAN HIT: AA921998.1, EVALUE 7.00e-01
ccaggatgcttccaggaacttgaaccagcatgaggtagcaggacatccacattcctggtctctggagatgctgttacgcagattgagggctgtccacaccaagcaggatgacaagtttgccaacctcctggatgcggtgggggagtttggcacattccagcagaggctagtagccctcacctttatccccagcatcatgtcggccttcttcatgtttgctgaccacttcgtgttcacagcccagaagccctattgcaataccagctggatcctggcagtgggcccccacctgtccaaagctgagcagctgaatctgaccataccccaagcacccaatggcagtttcctgacatgcttcatgtaccttcctgtgccttggaatctggattctatcatccagtttggcctcaatgacacagacacatgccaagatgggtggatctatcctgacgctaagaagcgatcgctgatcaatgaggtatgtcttgtcatgggttgtctg

SEQ ID NO: 22853 - DNA, 954 bp, Homo sapiens
  MAP TO U85195.1; EXPRESSED IN BONE MARROW, SIGNAL = 0.77; EXPRESSED IN HELA, SIGNAL = 1.1; SWISSPROT HIT: Q15615, EVALUE 1.00e-58; NT HIT: AE008683.1, EVALUE 0.00e+00
tcaaacctcactcggagttcttgggcttctgagcattcttttcagggccagcttcacctcttggttccgcagagtgtagataagggggttgaggaaaggagtgatggccgtggggactagggcagctgccccatccagggggctgttggtttcaggcctcaggtagatgaaggcacagggcacatagtacacggtgaccacggttacatgggctccacaagttgaaaaagcccggcgccgcccatcagctgtgtggattctcaggatggcctgaatgatctgtatgtaggagaggaggatcagggagaagcaactggcaaccaccaccccaatgtctacaaacgtcaccagctcgttgactgttgtgtcagcacaggccagtctcaacactgcagggatgtcacagaagaagtaatccacctgattgggcccacagtagggcaggcggaaggttaggatggcctggagagccccatggatggatcctgccatccaggctccagccacaagcaaggcgctcagcttagcagtcatgagcacagggtagcgcaggggctgacatattgccaggtacctgtcataggccattagggtgtagaggaagcactgggtgctgcccaggaagtgatagaaatagagttgagcaacacagccaccaaatgggatgggtttgacacctaaagtgaagttcatcatgaggcgagggacaatgatggaggagatgctcatatcaatgactgagagaacaccaagaaagatgtacatggggcgggcatggagccttgggtctgcccagacagtgattaaaataagcaggtttcccagctgagtcaggatgtagattagaaaaaagaacacaaaaaagagtgtccttagcctgagtggatacggaattcctgtcaggataaacgcagtcaacagtgtgctgttgattctttccatatcccagagaat

SEQ ID NO: 22854 - DNA, 789 bp, Homo sapiens
  MAP TO AL031277.1; EXPRESSED IN BRAIN, SIGNAL = 1.6; EXPRESSED IN HELA, SIGNAL = 0.94; EXPRESSED IN BONE MARROW, SIGNAL = 0.9; SWISSPROT HIT: P57071, EVALUE 3.20e-01; NT HIT: gi16168391, EVALUE 0.00e+00; EST_HUMAN HIT: BG942814.1, EVALUE 0.00e+00
ttgagctttgatgacaaataaacacttttctctttgtggaaagacactgcctctgttgttgatatgctaagaggaagacttaaagagcaagaggggaccatggggtcagagtctgtttcggccttaattttgggcagtgcaggtgggctcgcagttctccgcttcttggcctcactatttgtgctgcccaaaggctctttaggaagatcttctgttacagggacctgtgtggtctttatattttgagtaatttccactgtaactggagtgagcagacaatttataccatacaaatctgccgaagcagactccatctcaatcacatcacagttactagtgttgttattagtttgaattttaccatcaatatagtaatttaagttttcagagatattgctagaaatgtccatgatgtacacatcatctgcttccccttcctcctccggctctgtgcttggtacatacacgttctgggtggcctgggcctgttctgctggaggctggggctcttcaaggcctccttttcgccgtacacctttgggaatcagatgacgttcgtgaactctacgctgatgccgtctcatattagtatgagttccaaaaacctttttacaatatttgcacggatgaagttctttaacttccccattctcttctacgacagaagaatttattgtgtcttgggaagccttctctgaattcatgatcagacagtctggcccaagactgggaggactcgaatcatcttttgaagcaacgttttctccagatgctttgccatcagccaga

SEQ ID NO: 22855 - DNA, 501 bp, Homo sapiens
  MAP TO Z49918.1; EXPRESSED IN BONE MARROW, SIGNAL = 0.85; EXPRESSED IN BRAIN, SIGNAL = 0.91; SWISSPROT HIT: P53830, EVALUE 1.10e+00; NT HIT: J02843.1, EVALUE 7.40e+00; EST_HUMAN HIT: D20913.1, EVALUE 7.00e-01
gatcttaaatctttaagaagtcagacatcaagaggttctgccaagctgtctcctcagtccttcagtgtcaggctcacagatcagctgtctgctgaccaaaaacagaagagcatcagctcattgactctttcaagttgtttaattccacattataatcaagaggcttcagttctacagaaaaaggggcataaaagaaagcatttcctaatggagaatataaataatgaaaataaaggaagcattaatcttaaaagaaaacatattacatataataatttgtcagagaaaacaagtaaacaaatggcattggaagaagatactgatgacgccgaaggctacctaaattctgggaactcaggagcattgaaaaaacatttttgtgatattaggcatttggatgattgggcaaaaagccagctgattgaaatgctcaaacaggcagcagccctggtgataactgtgatgtatactgatggttccacccagctaggagctgaccag

SEQ ID NO: 22856 - DNA, 482 bp, Homo sapiens
  MAP TO AP000344.1; EXPRESSED IN BONE MARROW, SIGNAL = 1.6; EXPRESSED IN LUNG, SIGNAL = 1.6; EXPRESSED IN PLACENTA, SIGNAL =   2; EXPRESSED IN HELA, SIGNAL = 0.76; EST_HUMAN HIT: BG753829.1, EVALUE 0.00e+00; SWISSPROT HIT: P22814, EVALUE 2.20e-01
ctctgcacggtcagcgagggcggtggctctaggaggtccatttggatgaaggtgacacctttggggcctgtgtaggatggtgagtggggagtgccgggcggggagggcaggccctggcgtgcgggcgacctgtgtgagccactactgggccggggccccggggcgttgctgctgacctgatcagcctgcagggaggaggacgacgtccgcagtgcacggctcacggagctggaaagcgaggacaatgatgtctgcaggacagggttgcaggcgccgccgaagccgggcctggccacaaggtcatctgtagagctgtagcacagcgtaggacctcggaagccctcagacagcacactggcctgctgcaggctgtaggagctgggagcatcatagacgcctgagtcgccgaagagtgagtcggcctgggagcgcagcaggcactcacgctcctccctgtccttgcgctcctggatggatgccat

SEQ ID NO: 22857 - DNA, 493 bp, Homo sapiens
  MAP TO AL022393.1; EXPRESSED IN HELA, SIGNAL = 2.3; EXPRESSED IN BONE MARROW, SIGNAL = 1.4; EXPRESSED IN LUNG, SIGNAL = 1.3; EXPRESSED IN FETAL LIVER, SIGNAL =   1; EXPRESSED IN BRAIN, SIGNAL = 1.3; SWISSPROT HIT: O15535, EVALUE 3.00e-71; NT HIT: U88081.1, EVALUE 0.00e+00; EST_HUMAN HIT: BI770247.1, EVALUE 0.00e+00
ctcatgttgtggttcatcgagctctctctccagatcctccagcaaaatcacagcctcttctccactctctggacagtgttccctcacccagccctggagctccttgggcagaatggatagaaactgctccagcaccagcagatccaaaatctgctcctttgtgctcacatgtggcctcaaccactggtagcaaagttcctggagtcgagtaagagcctcccttggtccaggggtctcttggtagcacagctgtcgaaagtgccttcggaagatttcccttgccagtggattactgcgtttcagtctggattcctgccattgaaggtgactttttgcttccactttcattgtcagaagttcttcccatgcctcgggaacttgaacacccagggataaaacctcctttgagtttgtattcatcttgaccttgaacagcttaaaaggtaccctccagctggagctatgcttcaagacaaaccttggaggcgcttgc

SEQ ID NO: 22858 - DNA, 985 bp, Homo sapiens
  MAP TO AC011493.2; EXPRESSED IN BRAIN, SIGNAL = 0.87; EXPRESSED IN HELA, SIGNAL = 1.1; EXPRESSED IN BONE MARROW, SIGNAL = 1.1; EXPRESSED IN FETAL LIVER, SIGNAL =   1; SWISSPROT HIT: Q05481, EVALUE 0.00e+00; NT HIT: gi14755315, EVALUE 0.00e+00; EST_HUMAN HIT: BG617080.1, EVALUE 1.00e-102
cagcataaaagcatttatactacagagaagtcctacaaatgtaaagaacgtggaaaaatctttaattggtcttcaacccttactaatcataagaaaattcatactgaagaaaaaccctacaaatgtgaagaatatagaaaagcttttagtctatcctcaaatcttactacacataagataattcatattggagagaaaccttataagtgtgaagaatgtggcaaaacgtttaacaaatccttaaccctaaccatatataagaggatgcacactgaagagaaactctacaaatgtaaagaatgtggcaaagcatatgtatggtcctcaaacctaactaaacataagaggatgcacgctggagagaaaccctacaaatgtgaagaatgtggcaaagcttttagccaatcctcaacccttactacacataagataattcgtactggagagaaacgctacaaatgtgaagaatgtggcaaagcatatgtatggtcctcaaccctaactaaacataagagaatgcacactgcagagaaaccctataaatgcgaagtatgtggcaaaacttttcatcgattctcaaatcttagtgcacataagataatccatactggagagaaaccttacaagtgtgaagaatgtggcaaagcatttatatggtcctcaacccttactgaatataagaaaattcatactagagagaaaccctacaaatgtgaagaatgtggcaaagcatttagccgatcttcaaccctaactatacataagaggatgcatactagagagaaactctacaaatgtgaagagtatggcaaagcttttagacaatcctcaacccttactgcacataagatgattcatactggagagaaaccctacaaatgtgaagaatgtggcaaagcctttaactcgtcctcaactcttactaaacataagataatccatactgaagagaaaccctacaaatgtgaaaaatgtggcaaaagct

SEQ ID NO: 22859 - DNA, 628 bp, Homo sapiens
  MAP TO AC011553.3; EXPRESSED IN HELA, SIGNAL =   1; EXPRESSED IN BRAIN, SIGNAL = 0.8; EXPRESSED IN FETAL LIVER, SIGNAL = 1.1; EXPRESSED IN BONE MARROW, SIGNAL =   1; EXPRESSED IN LUNG, SIGNAL = 0.96; SWISSPROT HIT: P02461, EVALUE 3.60e+00; NT HIT: AJ277881.1, EVALUE 2.40e+00; EST_HUMAN HIT: BF891619.1, EVALUE 7.00e-54
ggagacagcaggaggaggaggaagaggaggagaaggaggaggaggaacaggaggaggaggaggaggaacaggaggaggaggaggaataggaggaggaggaggaggaggaacaggaggaggaggaggaggaggaacaggaggaggaggaggaacaggaggaggaggaggaggaacaggaggaggaggaggaggaggaacaggaggaggaggaggaggaacagcaggaggaggaggcacaggaggaggaggaggaagcacaggaggaggaggaggaacaggaggaggaggaggaacaggaggaggaggaggaacaggaggaggaggaggaacaggaggaggaggaggaggaggcacaggaggaggaggaggaggcacaggaggaggaggaggaggaacaggaggaggaggaggaacaggaggaggaggaggaggaggcagcggcggcactgtgggtcttccacagggtgtgcccggaggaggtcaagactccactgccctgaagcaaacaaggcgtccagcccgagccagggtcacacgcccaacaggtaggatccagcaacccctgcgcagcagcccccgccatgcgagggaggacccggagttgagcgtggccctgcctgacatctga

SEQ ID NO: 22860 - DNA, 1976 bp, Homo sapiens
  MAP TO AL121653.2; EXPRESSED IN HELA, SIGNAL =   1; EXPRESSED IN BONE MARROW, SIGNAL = 1.4; SWISSPROT HIT: Q9JIB6, EVALUE 2.00e-40; NT HIT: gi15296399, EVALUE 0.00e+00; EST_HUMAN HIT: AV656315.1, EVALUE 0.00e+00
taggtcatgaatactcaaggttttcaggtttgttacagatgtgatgtgcctctcatcttctatggtgaggggactggcttccaccatgagagaataaatgttcttacaggtgctgaggaccaaactgaggcttccagccacaccagcacatctctttatttgcagcctgaggcttgtggcagagctgaatattttccccagatatctgatatcttgcttattcaacttgctgaaatcccggagtgtgacctccagagtcctgaattcctgcttccagttgaagaacaaagatacagccctgctgggaatgtaggtttctggggcctcttccatgtggattccacctgtgtcttctgcagccttttcccatgaagccatagctcccccataaaagtccagtttaatgaagtccagggcacttgcacaattgggcaaatgttcaaagaagtcaaataagtaatcggggatgttccctgagttgatatataagcttttaccttgaaagaaagcttcaaattcttggctcagggctgatttggatgtactctcttgatataaatggatgccacactctacaaaggaattgatgtttatggctttcagaatttcttgctcagtggtgtttttcacactttgcaaagattcctgtctccagagaggcctcttggcgatggaaagtccgagaaggcagccgtgttgatacactgctgcgaggtgcttcataacagccctggtggcttccacagatgacccacaggtgtaccggagcaggctgctataagtggatgtaatgtccgaaatggaaaccattttctgcaagtaaccattccccttggtcacctcctctggctcatgagacgtcaataaactgctgagtcttcgtcctgctgtgtactcctggaatgacttgtgaaagaatttatactttggcttgaacctttgagctgtatatttacagaggagcccagttgtcagcaggacatcctcattcacgctggacacatcctgcagttcgaaatcaaacttgtgggagaacacaccctccagagctaggtctccacagtggtccaggctccgaatgaagtcacttgcagccacacctttatgtttgtgtttgtttttctgtatcaacagatcatagaaggtatggaacagcgttgtttgtgtgtgagagtggaactcactttcacccatctggattgcacaagtgatgaccacaaagagaggggtcttcatgagattcctcaagcacctggatttctgaatttggagcaacaagccttcagcaagctccttgatcagcacttctcggatgagagcctgggcgctgtcttctgtcatatcccccacctcagcagtcagggcaccaaactgccgtatgtgcctcaggcactcagtggtagtggtgacgatgaccatgttcttgaagcggtggttttcctttatcagggcttcgatttctgggcagttctggggcttgaattcattgtagccatcaagaaggaaaagaaccctctgccgcagcttcagcagcatggccatgaatgtctgcttcctgattgtgccaggtatatccaggagttgatcacagagggtttcaaaaagtccaccctgggccctgctgagacggaggaagaagacgaatttgaacttggtcagagccttgcactttccggagccccagagcatggcaattcgctgcagcagagtggacttgcctttgccagattccccttcaatgatgcaggggctctgaagagcctgcaggaggccattcagggtcagctgctccacgcggtgatggtgttggtccttcctccacaggacaggttctgtgaaggtgcttttcaagttaaaaataatgtcaatatcttcaccaaggggataaaagttcagaaaagatggggtatggtacaagtcctttaaatcctgagccaaatcgtccaagtctccttctgatgtctgatgaaaaagac

SEQ ID NO: 22861 - DNA, 965 bp, Homo sapiens
  MAP TO AL137185.3; EXPRESSED IN LUNG, SIGNAL = 1.3; EXPRESSED IN HELA, SIGNAL = 2.1; EXPRESSED IN BONE MARROW, SIGNAL = 1.3; NT HIT: gi16172557, EVALUE 0.00e+00; EST_HUMAN HIT: AW963315.1, EVALUE 1.00e-129
agtaaaaggccaagctatgatagcaactggtggagtgataactggcctggccgccttgaaaaggcaagactctgccagatcacagcagcatgtcaacctcagcccgtctcctgctacccaagagaagaagcccatcaggcgccggccccgggcagatgttgtggttgttcgtggcaaaatccggctttattccccatctggtttttttcttattttaggagtgctcatctccattataggaattgctatggccgttcttggatattggccccaaaaagaacattttattgatgctgaaacaacactgtcaacaaatgaaactcaggtcattcggaatgaaggcggtgtggtggttcgcttctttgagcagcatttgcattctgataagatgaaaatgcttggcccattcaccatggggattggcattttcattttcatttgtgctaatgccattcttcatgaaaaccgtgacaaagagaccaaaatcatacacatgagggatatctattccacagtcattgacattcacacgctaagaatcaaggagcaaaggcaaatgaacggcatgtacactggtttgatgggagaaacagaagtaaaacagaatgggagctcctgtgcctcgagattggcagcaaatacgatcgcctctttctcgggttttcggagcagttttcgaatggacagctccgtggaggaggatgaacttatgttaaatgaaggtaagagttctgggcatcttatgccccctttgctctctgacagctctgtgtctgtctttggcctctatccacctccttccaagacaactgatgataagaccagcggctctaagaaatgtgaaaccaagtcaattgtgtcatcgtccatcagtgcttttacattgcctgtgatcaaacttaataactgtgttattgatgagcccagtatagataacatcactgaagatgctgacaacctcaaaa

SEQ ID NO: 22862 - DNA, 952 bp, Homo sapiens
  MAP TO AC009288.8; EXPRESSED IN BONE MARROW, SIGNAL = 0.87; EXPRESSED IN HELA, SIGNAL = 1.4; EXPRESSED IN BRAIN, SIGNAL = 0.91; SWISSPROT HIT: Q15059, EVALUE 2.40e-01; NT HIT: gi11427757, EVALUE 0.00e+00; EST_HUMAN HIT: BE531263.1, EVALUE 2.00e-61
gggctgccggtctggctgctgaggccaggtggtgaaagtgggccctgggcagcctgagggcagctctcacctctggccagcaaacttctagactgcaccttgagggccaaaaacgtccagatttcctgctcaatgctgtcgtcgctgtccacggagctactgtcaccatcagagcgggaaggcacgttgggggagtagaagagtgggcttgcggacagggacccatcgctgccctccatagggccggcaggatcgtcttgaaaatgtccaggactgcttctacacacatcagctcagcggaggtgtctgcctggcaagaggaccattccacaaacttgctcctggaagccgggctcgttggaggtggagctttggtttcctttgggatcttgggggaatggtcagcgtccagatcccctggaccagggtccgtggtcttggtgggcactggcttcttcttgctgggtgttttcctgtgggtctctggcaaggcactttttgtggcgctgcttgtgctgtgtgcgggaggggcaggtgctctttcctcttggagctggaccctctggggcgggtccccgtcggcctccttgtgtgttttctgcacctggtacagctggatggcctcctcaatgccgtcgtcgctgctggagtcggacgcctcgggcgcctgtatggcgctcgtgactcgctttcccctccttgcggtgctggcgttccttttaatcccacttttattctgtactgcttctgaagggcggtgggggttgctggctttgtgctgccctccttctcctgcgtggtcgtggtcgtgaccttggacctgaggcttctgggctgcacgtttgtctttgctaaccgggggaggtctgcagaaggcgaactccttctggacgtccatcaggccctgccggtgcaccacctttgtagccggctcttggtgggatttcgagag

SEQ ID NO: 22863 - DNA, 570 bp, Homo sapiens
  MAP TO AL163636.2; EXPRESSED IN HELA, SIGNAL = 0.36; EXPRESSED IN BONE MARROW, SIGNAL = 0.94; EXPRESSED IN FETAL LIVER, SIGNAL = 0.97; SWISSPROT HIT: P44689, EVALUE 4.20e+00; NT HIT: M96388.1, EVALUE 5.40e-01; EST_HUMAN HIT: BG176590.1, EVALUE 0.00e+00
aaagcagcagcgaataagtacgtggcagatggtgctgtcgaccagtgtcaagaccaagtttcatgggttcctggacgctcagccaggggtagtctctgaagggccgcctggcaattgggagcagaagccagtttcccgccatctgctctccgtggaggcagtgctctcgcggctgctgcccgttggggtccagctgaggaaggagcgcggatcccaggctcgttctttgcctgggctgcccctgcggcccctggggcgggtgctgctgcggcgccagctccaagggcggatccaggcgggaggggcctcctcggagaagcggggcgcggtcccaactacgcagaggctggcacgccgaccctccacacctcaccacgcccccatctccgtccgtgtacacacactcacacaaggacgccaaccccacctagatgcaaagcaggattcaaaagaacatctttgcgttttctaccggctccccatcatcgtactagggaggaagaagcgggtgagaaacaaaacttctttccattgtcctgcccgtttctgcggacttgttctgaggccgag

SEQ ID NO: 22864 - DNA, 1956 bp, Homo sapiens
  MAP TO AC010519.6; EXPRESSED IN LUNG, SIGNAL = 1.2; EXPRESSED IN BRAIN, SIGNAL = 1.3; EXPRESSED IN HELA, SIGNAL = 1.4; EXPRESSED IN BONE MARROW, SIGNAL = 1.3; SWISSPROT HIT: P03200, EVALUE 1.00e-03; NT HIT: gi11425304, EVALUE 0.00e+00; EST_HUMAN HIT: BI519285.1, EVALUE 0.00e+00
ctggggcaggaacatctgcagggagtcctgagtgaggatggccgtgggggtggcagagggcggctgccccaggacgatcttctccgggctagacgccaggccagggctgggctggggggtggtggcctgaggcggggcggcggcctgtggggtgggggcctgcgggggctgctgcgcctgcggctgctggaggcccaggggcaggggtgtgctgaccgcggggggcgcctggggggcaggctgcaccgtgaggacaggcgcggcctccccggtggcagcggcaggggtggccggctgcaccaggccgtcgggggtgttgagcatggccacggcgctggggggcagggtgaccccctggaggacagtggtggcggccggcccggcgggcgctggctggctctgcgtgggcaggctgcccgccgccagcgacacgggcatctggaagagcgcaggctggcccacctggatgggagcggcggagaggatgtgcgcgctgtgggccccggagtggggggccaacacggggcccaggctcagtgggcccgccaggttctggtttgtgaggatggggttcgcgatgagctgtccacctgtgtggggggcagcggccgccaggatctgcccgcccacgttggccggcagggctgagagctgctgcgggagctggaccgccggggcgccaggcagtaggaactggttctggcccggcagcatgtgctgggcggggatgacgatgctgctgccttggttcaggaggtggacgctcatgggtttgctcagggccccggggggctgcggcggggccgctccggtggtggtggccggtggctgcttgaagacgttcgcttgcagcgcaggcgcggggaagcccgacagcaccacgttctggcccgccttccccgccgccatgaacgtcaggttctgcggggccttgggctgctgcgggagcgcccccggctcgccctggatggtgagcgtggcgcccgcgggcgcaaacggcttgggcgtcagctggtagagcttgggcggcagcacccccgcgggcttgggctggatgggcgtgggtgtgcgatgcaggatcacgttgggcgccgggaccagtggcgacgagccgaggcctggggccaccgccagcggctgtcccgagggcgtcccggtgggagccgaggcggcccccgcgcctccgaacacagagttcccattgagcgtggtggccacagcggccgagaggttcttctggatgaccaggccagccccctgtggcgagacaccggccgacgccagcgtcacgggctccgaggggccagccgccgaggccaggtagccgctgacgggcacctgcttggccaggagctgggaggtgggcgtgttgagcgccatgacgggctggcccaccacctggatgggcgccaggcccagtgtggccgccgtggcacccccagggctgccattgggcaggccttggaggcccgggatgggctgcagtgtcacattgcccaggcccacaggctgcaggaagggctgcacactcagggccttgttgaccacgtcctggggcggcaccagggcctggtgggtcagcacggtaggcgggccctgcagccccagcaggtcggtgctgcctgggaagagggcttggggccccgcagccacggccgctgcccctccagcgcccgtcgggcctgccccgccatccgcaggctgcagggtgggcagctggaagggacccaggtccagctcagcctcggcctccagcgtctgctccgtgatgttggcctcttggaggctctgctggaggatgtcacagggctggtcagcgcccccactgcccccgccgccgccccctgtcgcaggagagcccaggatgtcatcttccaggaagtctaggtccacactgggggccggctggttgggctctgggttcaggtggttgccggaagcttcttgcacatggag

SEQ ID NO: 22865 - DNA, 456 bp, Homo sapiens
  MAP TO AC007606.2; EXPRESSED IN PLACENTA, SIGNAL =   2; EXPRESSED IN BRAIN, SIGNAL = 1.2; EXPRESSED IN HELA, SIGNAL = 1.7; EXPRESSED IN BONE MARROW, SIGNAL = 1.2; EXPRESSED IN LUNG, SIGNAL = 1.3; EXPRESSED IN HEART, SIGNAL = 1.5; EXPRESSED IN FETAL LIVER, SIGNAL = 1.4; SWISSPROT HIT: P04280, EVALUE 1.60e-01; EST_HUMAN HIT: AA708475.1, EVALUE 1.60e-01
cttggccatgacttcatcatgaccctccaccatcttccggagcttgatcagatgccacaggtcctggacgggccgggcagtgccctggctggcttccagcagctgggcagtggagggcaggtcctgcagcagggccagctggttctccaacttgtcgaggcggctcaccacgtggtcgaagacattgctgagcctcttcatggggttgaggataggctgggcgtctccttccctgggcatgatgaccacctgcgaggtctgcaggaagtcctcatcgcctgagaggactttcttgagctcggccatgtggatgtgctccaagatgccgtgcagcaggaggtgcagggccttgaagttcagcaccccgcactgtgggatggcgatgttggccagctcggtgaacgtgagtgagaagctcatcctgccagggtgggtcagtggggctggggttccagg

SEQ ID NO: 22866 - DNA, 697 bp, Homo sapiens
  MAP TO AC011536.5; EXPRESSED IN BONE MARROW, SIGNAL = 0.74; EXPRESSED IN HELA, SIGNAL = 1.1; SWISSPROT HIT: Q9Y493, EVALUE 2.00e-21; NT HIT: gi13651412, EVALUE 0.00e+00; EST_HUMAN HIT: BE873050.1, EVALUE 0.00e+00
agtgccaaggtgtttggtgacaggagataccaagctcagaggaaggaaagtggcccctgagccccatggaggaggaaggggctgctgtcctacagtcctgggaagggcagggagagacccaaccatgtggaccatgcatggagcagtactcacgacagaagtccggccgcctccactcgccgagctgggccccagcggcctgacaggctgccacgtaggtagccactgcaggacagaggcctccaggatggccctgaacttggcaggcgtccagcaagcagccctggaagtactgcgcgggcggcacaaggccgtggcagggtgccagcgggccgtcggtggcggagatcacgccgcaggcgtccgggccgccgaaggactcctgctgctctggggtgcacggcgacgggcatggcttggacacacattccccgcagccctgggccccgcccacctgccatccagcgggcttcccgcccacagccttgaggtcgtctgcggggtcctggttgtagttcccgcataagccacagagagaggccgcgtacgccgccggcacgcgcaggcgcacgaagctgtccccatcgaaagccagcgagagccctgaggttgtggtcaccaccacgtcggcgccgctcaggtgtgcgtgcaggagcgagtccagctggaaaggcagagccacgaacacgccgtcgac

SEQ ID NO: 22867 - DNA, 910 bp, Homo sapiens
  MAP TO AL009181.1; EXPRESSED IN HELA, SIGNAL = 0.93; EXPRESSED IN BRAIN, SIGNAL = 0.97; EXPRESSED IN BONE MARROW, SIGNAL = 0.88; EST_HUMAN HIT: BG025021.1, EVALUE 2.00e-05; SWISSPROT HIT: P41143, EVALUE 2.00e-81; NT HIT: gi14732044, EVALUE 0.00e+00
tcagttgtagagccacaggtcccgctcctctcctggagtcactggctttcccgccccacctagagccgtggacggggcacccagaccagaggcactgcgccattgatctgtcctctgcctcgccccaaaccagaggcccaccccatgcccatctagcggcccggtcccgtctccgaaacagaggccccatctggcggtcccaagcctccgaccttctactgccccactccacatcatggctcgcgcctcccactgggactcatgtggcctccgggtcactagggaggggcgctctgggggccggatggcctggtcaggcggcagcgccaccgccgggaccatcggacggggtgcaggcggtgacacgctcgcgggccgtggcttcgcgggcgcggctgaagctgctggggtctgggcggccgcagggcttgcggcagagctggcggaagcagcgcttgaagttctcgtcgaggaaagcgtagagcacggggttgaggctgctattggcgtagcccagcgcgatgcacaggtgcagcgcagccaccaccagcgggtcgcgccggtcgatgtccaccagcgtccagacgatgacgaagatgtggatgggcgcccaacacaccacgaaggcgcccacaaccaccagcaccatgcgcgtgatgcgccgcaggctgcggtccttctccttggagcccgacagcaggcgcacactgcgcaggcgcagcagcatgaggccatagcacacggtgatgatgaggatgggcaccacgaaggcgaagaggaacacgcagatcttggtcaccgtgtcccagtaccagctggggctggggaactggagcatgcacaccactgccccgtctgggccgcggaaacaaggaaagacagacggggtgaggggcctgtgtgcctaagg

SEQ ID NO: 22868 - DNA, 3617 bp, Homo sapiens
  MAP TO AC003973.1; EXPRESSED IN BRAIN, SIGNAL = 4.4; EXPRESSED IN BONE MARROW, SIGNAL = 3.2; EXPRESSED IN HEART, SIGNAL = 1.3; EXPRESSED IN PLACENTA, SIGNAL = 3.7; NT HIT: gi6005975, EVALUE 0.00e+00; SWISSPROT HIT: O43345, EVALUE 0.00e+00; EST_HUMAN HIT: BF773250.1, EVALUE 0.00e+00
ttatatgttctcattttgctcaagatctttggccagagcagggcatagaagattctttccaaaaagtgatattgagaaggtatgaaaaatgtggacatgagaatttacacttaaaaattggttataccaatgtggatgagtgtaaggtgcacaaagaaggttataataaacttaaccagagtttgacaactacacagagcaaagtatttcaacgtggcaaatatgcaaatgtctttcataaatgttcaaattcaaacagacataagataaggcatactggaaagaaacatttgcaatgtaaagaatacgtcagatcattttgcatgctttcacacctatctcaacataaaagaatttatactagagagaattcctacaaatgtgaagaaggtggcaaagcttttaactggtcctcaacccttacttattataagagtgctcatactggagagaaaccctacagatgtaaagaatgtggcaaagcctttagtaagttctcaatccttactaaacataaggtaattcatactggagagaaatcctacaaatgtgaagaatgtggcaaggcttttaaccaatctgcaatccttactaaacataagataattcatactggagagaaacccaacaaatgtgaagaatgtggcaaagcctttagtaaggtctcgactcttactacacataaggcaattcatgctggagagaagccctacaaatgtaaagaatgtggcaaagccttcagtaaggtctcaacccttattacacataaggcaattcatgctggagagaagccctacaaatgtaaagaatgtggcaaagcctttagtaagttctcaatccttactaaacataaggtaattcatactggagagaaaccctacaaatgtgaagaatgcggcaaagcctataagtggccctcaacccttagttatcataagaaaattcatactggagagaaaccctacaaatgtgaagaatgtggcaaaggttttagtatgttctcaatccttactaaacatgaggtcattcatactggagagaaaccctacaaatgtgaagaatgtggcaaagctttcaactggtcctcaaaccttatggaacataagaaaattcacactggagagacaccctacaaatgtgaagaatgtggcaaaggctttagtatgttctcaatccttactaaacataaggtaattcataatggagagaaaccctacaaatgtgaagaatgtgataaggcaactcatgctggagagaaaccctacaaatgtgaagaatgtggcaaagctttcaactggtcctcaaaccttatggaacataagagaattcatactggagagaaaccctacaaatgtgaagaatgtggcaaaagcttcagtacattctcaatccttactaaacataaggtaattcatactggagagaaaccctacaaatgtgaagaatgtggcaaagcctataagtggtcctcaacccttagttatcataagaaaattcatactgtagagaaaccctacaaatgtgaagaatgtggcaaagcttttaaccaatctgcaattcttattaaacataagagaattcatactggtgagaaaccctacaaatgtgaagaatgtggcaaaacctttagtaaggtctcaacccttactacacataaggcaattcatgctggagagaagccctacaaatgtaaagaatgtggcaaaacctttattaaggtctcaacccttactacacataaggcaattcatgctggagagaagccctacaaatgtaaagaatgtggcaaagcctttagtaagttctcaatccttactaaacataaggtaattcatactggagagaaaccctacaaatgtgaagaatgtggcaaagctttcaactggtcctcaaaccttatggaacataagagaattcatactggagagaaaccctacaaatgtgaagaatgtggcaaaagctttagtacattctcagtccttactaaacataaggtaattcatactggagagaaaccctacaaatgtgaagaatgtggcaaagcctataagtggtcctcaacccttagttatcataagaaaattcatactgtagagaaaccctacaaatgtgaagaatgtggcaaagcttttaaccgatctgcaatccttattaaacataagagaattcatactgatgagaaaccctacaaatgtgaagaatgtggcaaaacctttagtaaggtctcaacccttactacacataaggcaattcatgctggagaaaagccctacaaatgtaaagaatgtggcaaagcctttagtaagttctcaatccttactaaacataaggtaattcatactggagagaaaccctacaaatgtgaagaatgtggcaaagcctataaatggccctcaacccttagttatcataagaaaattcatactggagagaaaccctacaaatgtgaagaatgtggcaaaggttttagtatgttctccatccttactaaacatgaggtaattcatactggagagaaaccctacaaatgtgaagaatgtggcaaagccttcagctggttgtcagtctttagtaaacataagaaaactcatgctggagagaaattctacaaatgtgaagcatgtggcaaagcctataagtcatcctcaacccttagttatcataagaaaattcatactgaagagaaaccttacaaatatgaagaatgtggcaaaggctttagtacattctcaatccttactaaacataaggtaattcatactggagagaaaccctacaaatgtgaagaatgtggcaaagctttcaactggtcatcaaaccttatggaacataagaaaattcacactggagagacaccctacaaatgtgaagaatgtgacaaagccttcagctggccctcaagccttactgaacataaggcaactcatgctggagaaaaaccctacaaatgtgaagaatgtggcaaagccttcagctggccctcaagacttactgaacataaggcaactcatgctggagaggaaccctacaaatgtgaagaatgtggcaaagctttcaactggtcctcaaaccttatggaacataagagaattcatactggagagaaaccctacaaatgtgaagaatgtggcaaaagctttagtacgttctcaatccttactaaacataaggtaattcatactggagagaaaccctacaaatgtgaagaatgtggcaaagcctataagtggtcctcaacccttagttatcataagaaaattcatactgtagagaaaccctacaaatgtgaagaatgtggcaaaggctttgttatgttctcaatccttgcaaaacataaggtaattcatactggagagaaactctacaaatgtgaagaatgtggcaaagcctataagtggccctcaacccttagatatcacaagaaaattcatactggagagaaaccctacaaatgtgaagaatgtggcaaagcctttagtacgttctcaatcctcactaaacataaggtaattcatactggagagaaaccctacaaatgtgaagaatgtggcaaagccttcagctggttatcagtcttcagtaaacataagaaaattcatactggagagaaactctag

SEQ ID NO: 22869 - DNA, 571 bp, Homo sapiens
  MAP TO AC005332.1; EXPRESSED IN HELA, SIGNAL = 0.55; EXPRESSED IN BONE MARROW, SIGNAL = 0.83; EST_HUMAN HIT: AA682203.1, EVALUE 0.00e+00; NT HIT: gi15805042, EVALUE 1.40e-01; SWISSPROT HIT: Q08881, EVALUE 2.00e-03
aagctgccgctccttccgaggtggccggcgggaggcgagacggcggcgcgcgccaggtagtccagggactgcgcaggccgcaagtacaggcaggcgggcaggccgggcgccaggctgctgcgctgggtcgcggcgccgcgttgcgaagggccgcacagggagctggcgcggcctcggggctccgcgggggtgctgtcggggcccgctgccgccgccgcgctcacaagccggtagtcgtaggtgagcggctcgggggccgaggggactgttggggggacctggcggcgcggcagtggcaggttgtctcgtccgggcgttcccgttcgcggggaggtcatttgcccagcgcaggcagctcgcgcacgtactgcgcgggcaggtagaaggggtggccgccaggctcgcgccgcacgtgccaccagtgctccgtgctgcgccgcagcagccagtagcgctcattgggccagatggccacgcggcgccagtccttgcgggtatactcgaaggggtgctccaccaccaggtagacatccccctccacatacgccggcatcgtggccgcggcgttttt

SEQ ID NO: 22870 - DNA, 831 bp, Homo sapiens
  MAP TO AC004687.1; EXPRESSED IN LUNG, SIGNAL =   1; EXPRESSED IN BONE MARROW, SIGNAL = 0.77; EXPRESSED IN HELA, SIGNAL = 0.79; EXPRESSED IN BRAIN, SIGNAL = 1.6; SWISSPROT HIT: P11276, EVALUE 1.00e-04; EST_HUMAN HIT: BF934025.1, EVALUE 3.00e-75; NT HIT: gi14769777, EVALUE 0.00e+00
gagagctcatggatggccgaaggggcctggtcccttccaattttgtagagcgtgtgtcggatgatgacctcctgacctccctccctccagagctggccgatttgtcccacagctcaggccctgaactcagtttcctgagtgtaggtgggggtggcagcagtagcgggggccaaagcagtgtgggaaggagccagcccagacctgaggaggaggatgcaggggacgagctcagtctgagcccatcaccggagggcctgggcgagcctcctgccgtgccttacccccgccgtctggtggtcctcaagcagctggcccacagcgtggtgctggcctgggagccgcctcctgagcaagtggagctacacggcttccatatctgtgtgaatggggagctgcgacaggccctggggcctggggcgccacccaaggccgtgctggagaacctggacctgtgggccgggccccttcacatttctgtccaggccctgactagccggggcagctctgacccactgcgctgttgcttggcggtgggtgcccgggccggagtggtgcccagccagctgcgggtccatcggttgacagccacatctgctgagatcacctgggtgcccggcaatagcaacttggcccatgccatctacctcaatggggaagagtgcccacctgccagccccagtacctactgggccaccttctgccacttacggcctggcacaccctatcaggcccaagtggaggctcagctcccaccccaagggccctgggaaccaggctgggagaggctggagcagcgggctgccaccctgcagttcaccacactcccagcag

SEQ ID NO: 22871 - DNA, 841 bp, Homo sapiens
  MAP TO AL139423.2; EXPRESSED IN BRAIN, SIGNAL =   1; EXPRESSED IN HELA, SIGNAL = 1.1; EXPRESSED IN LUNG, SIGNAL = 1.1; EXPRESSED IN BONE MARROW, SIGNAL =   1; EXPRESSED IN FETAL LIVER, SIGNAL =   1; SWISSPROT HIT: P08775, EVALUE 1.00e-02
ggaagggacaaggagcctgggagcagccgggcagagagaggcagcagagatgcctcctccactccccacagcacccaatcctctccccacagcacccaatccacaccccacagcacccaatccgccccccacagcacccaatccacaccccacagcatccaatccgcacctcacagcacccaatccgcaccccacagcacccaatccgctccccacagcacccaatccgcaccccacagcacccaatccgcaccccacagcacccaatccgctccctgcagcacccaatccacaccccagagcacccaatccgctccccacagcacccaatccgctccccacagcacccaatccacaccccacagcacccaatccacacccacagcacccaatccacaccccacagcatccaatccgcacctacagcacccaatccactccccgcagcacccaatcctctcccggcagcacccaatccacaccccagagcacccaatcctctccccacagcacccaatccgcttcccacagcacccaatccacaccccacagcacccaatccgctccccacagcacccaatccgctccccacagcacccaatccacaccccacagcacccaatccacaacccacagcacccaatccgcaccccacagcacccaatccgcaccccacagcacccaatccacacccacagcacccaatccacaccccacagcacccaatccgctccccacagcacccaatccacaacccacagcacccaatccgctctccacagcacccaatctgctccccacagcacccaatccacactcacagcacccaatccccacccca

SEQ ID NO: 22872 - DNA, 765 bp, Homo sapiens
  MAP TO AC006313.1; EXPRESSED IN HELA, SIGNAL = 1.2; EXPRESSED IN BRAIN, SIGNAL = 0.9; EXPRESSED IN LUNG, SIGNAL = 0.99; EXPRESSED IN BONE MARROW, SIGNAL =   1; NT HIT: AF127882.1, EVALUE 0.00e+00; SWISSPROT HIT: P23266, EVALUE 6.00e-83; EST_HUMAN HIT: BG193339.1, EVALUE 6.90e-02
tagcagcagcacctcaggcttcatcctcctgggcctctcttccaaccctaagctgcagaaacctctctttgccatcttcctcatcatgtacctactcactgcggtggggaatgtgctcatcatcctggccatctactctgaccccaggctccacacccctatgtacttttttctcagcaacttgtctttcatggatatctgcttcacaacagtcatagtgcctaagatgctggtgaattttctatcagagacaaagattatctcttatgtgggctgcctgatccagatgtacttcttcatggcatttgggaacactgacagctacctgctggcctctatggccatcgaccggctggtggccatctgcaaccccttacactatgatgtggttatgaaaccatggcattgcctactcatgctattgggttcttgcagcatctcccacctacattccctgttccgcgtgctacttatgtctcgcttgtctttctgtgcctctcacatcattaagcactttttctgtgacacccagcctgtgctaaagctctcctgctctgacacatcctccagccagatggtggtgatgactgagaccttagctgtcattgtgacccccttcctgtgtaccatcttctcctacctgcaaatcatcgtcactgtgctcagaatcccctctgcagccgggaagtggaaggccttctctacctgtggctcccacctcactgtagtggtcctgttctatgggagtgtcatctatgtctattt

SEQ ID NO: 22873 - DNA, 555 bp, Homo sapiens
  MAP TO AC007238.3; EXPRESSED IN PLACENTA, SIGNAL = 1.5; EXPRESSED IN BRAIN, SIGNAL = 1.1; EXPRESSED IN HELA, SIGNAL = 1.5; EXPRESSED IN BONE MARROW, SIGNAL = 1.2; EXPRESSED IN FETAL LIVER, SIGNAL = 1.5; EXPRESSED IN LUNG, SIGNAL = 1.4; EXPRESSED IN HEART, SIGNAL = 1.3; EST_HUMAN HIT: BE900639.1, EVALUE 0.00e+00; NT HIT: gi14736551, EVALUE 0.00e+00; SWISSPROT HIT: Q9Z1M8, EVALUE 1.00e-74
ccggagcgagatagtgagccgttctccaaccctttggcccctgatggccacgatgtggatgatcctcactccttccaccaatcaaaactcaccaatgaagacttcaggaaacttctcatgacccccagggctgcacctacctctgcaccaccttctaagtcacgtcaccatgagatgccaagggagtacaatgaggatgaagacccagctgcacgaaggaggaaaaagaaaagttattatgctaagctacgccaacaagaaattgagagagagagagagctagcagagaagtaccggggtcgtgccaaggaacggagagatggagtgaacaaagattatgaagaaaccgagcttatcaacaccacagctaactacagggctgttggccccactactaaggcggacaaatcagctgcagagaagagaagacagttgatccaggagtccaaattcttgggtggtgacatggaacacacccatttggtgaaaggcttggattttgctctgcttcaaaaggtacgagctgagattgccagcaaagagaaagaggaagag

SEQ ID NO: 22874 - DNA, 1779 bp, Homo sapiens
  MAP TO AC004152.1; EXPRESSED IN LUNG, SIGNAL = 1.5; EXPRESSED IN PLACENTA, SIGNAL = 1.5; EXPRESSED IN HELA, SIGNAL = 1.1; EXPRESSED IN BRAIN, SIGNAL = 1.8; EXPRESSED IN HEART, SIGNAL = 1.4; EXPRESSED IN BONE MARROW, SIGNAL = 1.9; SWISSPROT HIT: O75325, EVALUE 6.00e-37; EST_HUMAN HIT: AW304683.1, EVALUE 0.00e+00; NT HIT: gi15301269, EVALUE 3.00e-08
tcagatcatcttcatgttgaacttgcgcgcgcctccctggcccgccgcggcggccggcccatccaccttgcggaaggagtactccaccgagaagttgtttttgtgctgcccgcggccgcggctccacacgaacagcagcacgaagcagaagaggaccacgcccaggaaggtgatgcagcccatggcggtggacaccaggatggtggtgaggtcgagcggcgcgcgcagggccgccagcgtctcgttgtgggcctcgcccggggtccggttggcggccggctcggggcgcacggtcagcgtggcgaagtaggtgtcgttgccgcccgcgttgctggccacgcacgtgtaggtgccgctgtcctgcggccgcgcgtcctggatctccagcgtccccccggggagcacgcgcgcccggcccgcgctggtggccgtcaccggccggtgctggggggtcacccaggccacggtgggcgccggctcgccctcggcgcggcagaggaagcggacgtcttcgcccgcggtggccgtgacgcgctgcagccgccgctcccggatcttgggtttgcggcacacgaagtactcgaacagcacggagtccggcaggtttcgcagcgcgtcgccgcgcacctcggccggggtggcgcaggccggcagccgcccgtcgaagttgagggtcttgcgacgctgcacgatccacagcaggcgacagtcgcaggccagcgggttcccgtccacgcgcagcgtctctagcgtgttcaccgagtggaaggtgctctcctccaacgtggagagcaggttgttggagaggttgagcaggcggatctggcgcaggcccaggaaggcctgcggctccaccacagccagcagggccccggccaggtgcagctcgcgcaggcggaccaggtcccggaacgacccccgcggcaccgtgctgatggggttgtgcgacagattgaggcaggtgaggtgcgcctggtgccgcagcgcggcggccggcacggcggtgatgttggtgtgggtgaccgacagcgaggtcaggttcaggccccgcaggctgcccgccgccacctcctccagcagcggccagttgtcaatctccaggtgcagcagcccgggcagcctgcggaagttctggtcctccagggaggcgatggccaggtggcgcagccgcagggcgcccaggctgcgcagatggcccagcgactccccggacagagccgtgaggttgcagcgctccagggtcagctcctccagggccagcagccccgcgaaggcgcggcgcgagacgaataccaggtcgttgtcgcccacttccagccggcgcaggctgtgcaggtcctggaaagtgtagtccagcaggattaccagcttgttctcgctcaggtccagcagcgtgaggttgtccaggcgcgtgaagaccccgggcgggatgagcttcagctggttgccacggagacgcaggacgcgcaggcgcggcaggttggcgaaggcgccgggctccacgtgcgcgatggcgttctcgctcaggtccagctcctccagcgcgggcagcgcggccaggtcgcccgggttcaggcagcggatgcggttgcggctgagctccagcaggcgggtctcggccgggatgccgtcgggcacggcggtcaggcggcggcgcgtgcaggccaccgcgcgggtctgcacggtgcactcgcagcgggccgggcagcctccagccgggggcggcgccgcgggcagcaggagcaggggcaggctcaggacgcacagccagcaggtcat

SEQ ID NO: 22875 - DNA, 575 bp, Homo sapiens
  MAP TO AP000127.1; EXPRESSED IN BRAIN, SIGNAL = 1.5; EXPRESSED IN HELA, SIGNAL = 3.9; EXPRESSED IN BONE MARROW, SIGNAL = 1.3; EXPRESSED IN FETAL LIVER, SIGNAL = 1.6; EXPRESSED IN LUNG, SIGNAL = 1.6; NT HIT: gi11466252, EVALUE 3.50e-02; SWISSPROT HIT: P36099, EVALUE 2.20e-01; EST_HUMAN HIT: BE698042.1, EVALUE 3.00e-03
gtactttgatgatgagagaagctgttatttatttattgttatatcgtgttatttatttattacttttttagtgaattgtccacttatggctatgcccaattttctgttcaggcacttatttttcttactcatttgtaacaaacctttacatattaaacatacaagctctttcacagggattacaatatttttttcttctactactcttgccttttaattcggatcactgtattgttgacatacagttataaactatagattttttaaataatttcttcctatgttacttaggcttaaacagaccttcaccataccaaaaggttcatctacttcttctactcgtttggtaagaaatttttttttgacatgtaactataacttttctggaatttaacttgctataactttatttagaatgttgagatgaaatttataaatgagattggtgttatggattttttttctactttcatgaccagattggggtaataatagtttgtaaaataataccagctatctatatgtcataaaagagtgtatacagtataacactgatctatattctttacctgtgc

SEQ ID NO: 22876 - DNA, 812 bp, Homo sapiens
  MAP TO AL096712.17; EXPRESSED IN BONE MARROW, SIGNAL = 0.99; EXPRESSED IN HELA, SIGNAL = 1.2; NT HIT: gi14783109, EVALUE 0.00e+00; SWISSPROT HIT: P46821, EVALUE 1.00e-03; EST_HUMAN HIT: BG397333.1, EVALUE 0.00e+00
agaactctggccagagactcatgaagtgcctgccccacccctgaagaccactcttgcccttcccttctgtgtggtacctgaagatgctgttcctcttcctggaaagtcttctctagttgctccactcttgcctgctgctgagcctgctctgcacacagctgggactgtaagtcctgaagttcctgctccatttgcacaactttctttgagttccccttttgggtctgctttttcacattcataacggcttcatgtttttcctgcatctgtattttgagcctcagaatcctggacatggtcaccttaaacatctgtaagcttctctgagatgctgaagagtttgaggctttctgctcatgatgaacctctgtgactttggggaagccagggtaaatgggagcccctgtggtcttacttggctcaagggcagtcaacttaggatccaaattgtcagagggtgtactggccacttcacctttcccctgtgatttcactggctgaccagattcacaagacactttatttattttggatttcaaatttgaggggccttcagctccaggacctgctaattcatccaaactgaatttccttttagttctcaattccttatttttttctatcatttggtcattctttggggaaagacaaggatatattgtctcccagtcttcttcagtaacttcatattcatactccgcattctccttattttccagaggcactccaagttggatgtagtctccctgatgaatggaatagacccttaaaggttccagacgcgctctgttcagccaaacaccatttagact

SEQ ID NO: 22877 - DNA, 1154 bp, Homo sapiens
  MAP TO AC005146.1; EXPRESSED IN BRAIN, SIGNAL = 1.7; EXPRESSED IN BONE MARROW, SIGNAL = 0.79; NT HIT: gi16188056, EVALUE 0.00e+00; SWISSPROT HIT: P47144, EVALUE 8.70e-01; EST_HUMAN HIT: BI546107.1, EVALUE 0.00e+00
ttcctcaggaagcaatagtaagttcttggattttgttcagtgatggttcggtgacacctttagacatttacgatcctaaggattattctgttactgtctcatcattggatgaaatggtggtgtctgtccaggcaaaccttgagtccaaatggccaattgtggttgcagagggtgaaggacaagggcctttgattaagttagaaatgatgataagtgaaccttgtcagaagaccaagaggaagagtgttcttgccgtgggtaaaggaaatgtcaaggtcaaattcgaaccaagtagtgatgagcaccaaggaggcagcaatgatattgagggcataaatcgggaatataaagaccacctcagtaattccatagagcgcgaaggaaaccaggagagagcagtccaggaatggttccaccgtggcacacctgttggccaagaggaaagtaccaacaaaagcacaaccccccagtctcccatggaagggaagaataagttactcaaaagtggtggtccagatgcctttacaagcttccccactcaagggaagtcaccggaccccaataatcctagtgacctcacagtgacctcaagggggctaacggacttggagattggcatgtatgccttgctctgcgtcttctgtctggccattctggtcttcttgatcaactgcgtggcgtttgcctggaaatacagacacaaaaggtttgctgtgagtgagcagggcaacatcccccattcccacgactgggtctggcttgggaatgaagtggaacttttggagaaccctgttgacattacactcccatcagaggagtgcacaaccatgatagacaggggcctgcagttcgaggagaggaacttccttctgaatggcagttcccagaagacttttcatagtcaactactcagaccctctgactatgtctatgagaaagaaattaaaaatgaacctatgaattcttcgggcccaaagaggaagagagtcaagttcacttcctacaccaccatcctcccagaggacggcggcccatacaccaactccatcctgtttgacagcgatgataacatcaagtgggtctgccaagatatggggctgggggattcacaggactttagagactatatggaaagtctgcaagaccagatgtaa

SEQ ID NO: 22878 - DNA, 662 bp, Homo sapiens
  MAP TO AL031277.1; EXPRESSED IN PLACENTA, SIGNAL = 2.1; EXPRESSED IN BRAIN, SIGNAL = 1.6; EXPRESSED IN BONE MARROW, SIGNAL = 1.1; NT HIT: gi16168391, EVALUE 0.00e+00; SWISSPROT HIT: P14404, EVALUE 5.00e-07; EST_HUMAN HIT: AI808800.1, EVALUE 2.00e-54
ctctgacggctgtagtgtttggctgggtttccgctttaaccctgcttcatggcgccgctcatgtcgccgccggttaatctgtgtgccaaaggctttcccacagtacttgcatttgaaagcatgattgacggtggatatatggatatgcatgtgacgctcaagcccctgtttggttgtaaacttcctttcacaatgttgacacggaaacataaacgtttcaaatacatcaccattggcctcttctttagttctggggatttgcatggcaggtgttacctctgagcagtcttcaagagtttcttctgaagttgtttttggttcctctaataaatcttctggcttctcatcacaccgtatttctggctctttcacagaattttcatttggcatgctggcttcttcttccccctcgtcttccaactcatcatcatcatcatcttcttcttcttcttcatcctcctcctcttcctcctcctcctcttcccccaaatcattcacctcacaagctgccgcttctaatcgctcgtctggttctggctgtggctcccaggcaggggcaggggttgctagttctggaggcacctcctgactggccacctcctggagggtggccggctgctcaagtgctgaggctgaaggcttctcttcgtcttctttaggac

SEQ ID NO: 22879 - DNA, 990 bp, Homo sapiens
  MAP TO AC002110.1; EXPRESSED IN BONE MARROW, SIGNAL = 0.87; EXPRESSED IN HELA, SIGNAL = 0.51; SWISSPROT HIT: Q60992, EVALUE 9.00e-36; EST_HUMAN HIT: BF940723.1, EVALUE 5.00e-99; NT HIT: gi11429600, EVALUE 1.00e-110
ttaagaggccaagaaaagcagcttcgttcggctgggcaggcattttcctgcctggccctgcggccgcacgcgtgcctccgccgcgacaaaggccacactcagcgcccgaaggaggggtgggggtgttgggaaagcgatgggggccaggactggggccaagtggccctggggatcctcgaggcggctcgacccgggagccaggactggcgccaagtggcccgggtccgggtccgggaagaggcggaggccggcgagggggcggtgcccggggccaacccagctccctccggccccgagggctcccgccccgcgcccctcccgggccctccagccgcgccccgggccggcgcagcgaccgcgcccgctcttccaccggcgtccggccaggaggcgcgaggcccaaggatgcgacccacgacgcgcacacccggctcggcaggctccctgggaaatgaggggccactcgcagggccccgcagagcgagcgcagcgccggagcctcccccatcccaggccgcgcagaccgcggaaccggcgcaccagagcagtgcccgcgggcggcggcggcgcgacccaggctgaggggactttggccaacttcgcgcctcctgaggtcgcgtctcggaggcccggggcgcaccctccagccgcccgcccgcgtcccggagcccggccgccccagccagggcgcctgggccgccgccgctgcgacctccgcgttcagtccgcgcgtcgggcagcgcgaacgccgcctccccggggccctcccgcccgccgggcgctcacctgggacatctgcggccggaagttgatgtccttgaggtcgatggagccgggggagaggttgtgcagcagctggcacagaaggaccccgtcgcgcagcgcctgcgccaggtcgaagaccacggccgagggccacaccacccggtggttgggcggcaggaccttgcaatcgatgagccagcggccgcactgccgccactgctccat

SEQ ID NO: 22880 - DNA, 567 bp, Homo sapiens
  MAP TO Z98744.1; EXPRESSED IN BONE MARROW, SIGNAL = 0.76; NT HIT: gi16174425, EVALUE 0.00e+00; SWISSPROT HIT: P16401, EVALUE 2.00e-27; EST_HUMAN HIT: BG292093.1, EVALUE 0.00e+00
tagggctcttcgccacctttttgacgccagccgccgcgggcttcttcgccttcttcggagtcttcttcactgcctttttcgcccctgcagccttcttggccttcttaggcgtggcccccgcgggcttcttagctttagcggcgcctgccttcttggctttgggcttggcttccccggaggccgccttcttgttgagtttaaaggagccagaagcaccagtgcccttggtctgcaccagggtgcccttgctcaccaagctcttgaggcccagcttaatgcggctgttattcttctccacgtcgtagccaccggccgctaaggccttcttaagggctgccaaagaaaggccattgcgctccttagaagcagccacagccttggtgatcagctctgagactgggggccccgtcgctttgcgcttagcagcgccggcgccggcagccttcttagttgccttcttcttagccggggatttctccaccggcgctggggtggctgtctcggcaggagcggtttccgacatggtggcaagaaactgctagaagagaataagctcgaaatctaaag

SEQ ID NO: 22881 - DNA, 566 bp, Homo sapiens
  MAP TO AL080250.11; EXPRESSED IN BONE MARROW, SIGNAL = 0.78; EXPRESSED IN HELA, SIGNAL = 2.5; NT HIT: gi14757166, EVALUE 0.00e+00; SWISSPROT HIT: Q99715, EVALUE 1.00e-102; EST_HUMAN HIT: AI471637.1, EVALUE 0.00e+00
aaggcagatagactgtgtgagttcaaaagatatcctctgaaaagcatcaaaatcttccactgtgaacacatgggtctctgcaggaggagaggcaatagcttccaattctgagcgaacggcatccttcacaccaactgcaaagatttcaacatctgaattcctcagttttatcgcaggatctctgaaagcatctgatgatttcccatccgtgataagaatcatgacctttggcacattgcttcttgatcccttgctaggcacaaatattttctctctgacataagtcattgctttgccagtatttgtagatcctcctctgtaagggaaggtgtttattgcttcaattatatcttcaactttggtgaattttttcaaagtgaactcagtatgaggatcccggctgtattgcacaagactaatctggaccctatttggtgaaatttcaaaactttttacaagaacttccaaaaaggctctaactttaacaaagtttgcaatcccaatgctataggagccatcaaccaaaaacacaatatcggcttttatatccacaccacgtgagcatt

SEQ ID NO: 22882 - DNA, 586 bp, Homo sapiens
  MAP TO U52112.1; EXPRESSED IN HELA, SIGNAL = 0.42; EXPRESSED IN BONE MARROW, SIGNAL = 0.85; SWISSPROT HIT: P32004, EVALUE 7.00e-36; EST_HUMAN HIT: AL535207.1, EVALUE 1.00e-112; NT HIT: Z29373.1, EVALUE 0.00e+00
agatgaccggaagtgcaatggagacagagacagggcaaaggaggagactgcacaagaaacaagatgggccaggggagaagctggggtggggtggagggctggcaggacacccaggcccctcgccacgagacaactggctgacagcagcttccagcccacaatcccacacgaactccgggacctgccctccctggtccctgcagcgcctcgcaccctcggccatgagccggatctcatgggacatggcggtgcccagcttattgctggcaaagcagcggtagatgccctggaacctctgagcaaagttgctgttgttgcccgtgatggtgaaggagccagagtggggcgactggtacacggtcacacccagctcttccttgggtttgaagtggacaccatccctcgtccagcggaacctgtgggcggaaaaaggcccagaggcctgaggccctggaacccaacgggggctggaacaggctggagggacaggtgcaagcagccagggcccccaggggatggactgggagatggcgaggacttggggtgattagcaaggtttggggcttctgggcttagaagttaggca

SEQ ID NO: 22883 - DNA, 470 bp, Homo sapiens
  MAP TO AL031652.1; EXPRESSED IN BONE MARROW, SIGNAL = 1.1; EXPRESSED IN FETAL LIVER, SIGNAL = 1.1; EXPRESSED IN HELA, SIGNAL = 0.7; EXPRESSED IN BRAIN, SIGNAL = 0.77; NT HIT: gi13653870, EVALUE 6.00e-96; SWISSPROT HIT: Q15147, EVALUE 4.00e-28; EST_HUMAN HIT: BG220268.1, EVALUE 2.00e-93
ctcaaagcactgggattacaggtgtgagccactgcacctggcccctgggtgccatttcttatagctcatcttgctcataatcagccatatgatgagatacacaaaagagctacatgttgtacgtcaaattgatttcacttattaccttggctctcttatacacacaaaatcagcttttgtttttaaatattagatgtttactctggagacggcaattcccccacctgtcatgggacagtttcagctgctgggtttgctgctcgtgggcattgatgagtagctttttcagcagctcacactgctggctgaggtgcaggtctcggatttcttgctcctcagcactgtgggtattgatcatttctgaccattcctttgtgtgctgtgctacaatctctttgacctgtttgggaaaaaggggacggtgccattgtaatcctcataggtcaggtatgaacccaaaagcacaacat

SEQ ID NO: 22884 - DNA, 1018 bp, Homo sapiens
  MAP TO AC018739.2; EXPRESSED IN BONE MARROW, SIGNAL = 1.1; EXPRESSED IN HELA, SIGNAL = 1.9; NT HIT: gi14752575, EVALUE 0.00e+00; SWISSPROT HIT: P51612, EVALUE 3.80e-02; EST_HUMAN HIT: AV758164.1, EVALUE 0.00e+00
caggtggttggtcttgacttatgtttaacttgagttcatttcccaagtgtgaatctgactttggttttggtttcaaagaaggaaagaatttcatcatcagctccgatgtaggaggacttctgctcctcctggacttgctcaagtcttctcccctcttgactggtgcaatcttcctttttattgttttgtccaggatacctatttcattattagggtagcatgtctgcggcgtcccataagtggattcattcccaagaacaacatcatggttacacaaattctcttcaaggtcagtccaagttctttcatcatcaaagtccattttactcagacttagggatgaggatctcgagggctcagacactttatgttttatgctttccatgatagactcatcgctactgtaatctttatcagacaaatccagatcaacatctctccttttatcttcttgggtcctggtgtccttaaaaggccccttatcatcacagacttgtgggctatcctctctgctgctgatgcccctctctctatcctcagtcgatggttttatggtaacatcaagctgttcctcagagtcagtgctactgtcactatttggaacaccttcatcgtcacgtgcattccattcagtctgattttcagaagtgctcttttggacggctttcctgattttacaaggctgttccctcaattcatcagctgaggacaatgaatgaagttgtttgggtgcgacttcacactcactctccttctcacgtgcagtgtggtccaaatcctcactgcggttacaatgactaatgggatctgccggatttgtcttctgtggcacagctttgacaggggtggaagacatccggtgacctttgcagatctgttgatccctttctaagattttcagtacaaatgaggaattactagaaaatgatatttcatcagcagcttgttctaaaaacaaaaattcatctaattccaaattttccttttccttttctcgttcccaagtctctaacttttt

SEQ ID NO: 22885 - DNA, 685 bp, Homo sapiens
  MAP TO AP001725.1; EXPRESSED IN PLACENTA, SIGNAL = 1.8; EXPRESSED IN BONE MARROW, SIGNAL = 1.2; EXPRESSED IN FETAL LIVER, SIGNAL = 1.1; EXPRESSED IN LUNG, SIGNAL =   1; NT HIT: gi14780345, EVALUE 0.00e+00; SWISSPROT HIT: Q9Y3R5, EVALUE 1.00e-115; EST_HUMAN HIT: BG979766.1, EVALUE 0.00e+00
agtccagtaaaaggtgaaaacggcaaaataattttggaaacaaaggcagtgattcccggtgacgaagatgcttcgtttccccctctgaagtctgaggacagtgggatcgggctcagtgcctcgtcaccggagctctctgagcacttgagggttcctcgagtttctctggaaagggacgacgtttggaagaagggcgggagcatgcagaggacgtttctttgcatccaagagctaatcgccaactttgccagcaagaacatttttggagtacagctgacagcgtcaggagaagaaagcaagtccgaggagcctgcagggaagagggacagggatgggacgcagagcctggcagccaatgattccagcaggaagaactcttgggagcccaagcccatcactgtgcctcagttcaagcagatgctgtcagacttgttcacagcacgagggtctccattcaagacaaaaagttcagagtcaccatcgtcttcgcccagcagccctgccaggaaaaacgggggagaatgggatgttgagaaggtggtcattgacctggggggttccagggaggaacgcagggaggcctttgccgccgcctgccacctgctgctggattgtgccactttccctgtctacctgtccgaggaagagaccgagcagctctgtgcaacgctcttccagctgccag

SEQ ID NO: 22886 - DNA, 1145 bp, Homo sapiens
  MAP TO AC005006.2; EXPRESSED IN BRAIN, SIGNAL = 1.5; EXPRESSED IN HELA, SIGNAL = 0.56; EXPRESSED IN BONE MARROW, SIGNAL = 1.1; EXPRESSED IN LUNG, SIGNAL = 0.92; EXPRESSED IN HEART, SIGNAL = 1.2; EST_HUMAN HIT: BI760652.1, EVALUE 0.00e+00; SWISSPROT HIT: O94810, EVALUE 2.00e+00; NT HIT: AB029901.1, EVALUE 0.00e+00
tcaccaccgcaggaaatcgcgaatgaacttccagagcttggtgacccacaggttggcgccgaggtccatcaggtactggatctcgggcgtgagcatgcgccggcagagctgcgcgtgccgctgcccgatgctcttcttgaggttgtagcccaggatggacttggtgcccagcggctgccagggctgcatggcctcgtcctggatggcggcggcgtccacggcgtggcccccgtcgatgcagatggtccgcatgcgctcgttggcatggcgcagggcggccacctcgcgggccatgcgctcccgcccgaaggcctccaccttgcgccagaagctggcgttgaagtggcggtagaggtgggagtccagcatgttccaggcggtggcgcgcccatacagctcccccgagagccgcggcacgggcgagtcgcggcgggcgttgagcttgaagtagagcacgtcctccagctcccagcacagcaggtccttcagcagcaccagcgactcgtcgaagtactcttgaaggagcaccaggtggaagcgacgctccacctccaggatgtgctcctgcacctgcgggctgctggggtccaggctgttgtcatagcccaggtcgaagaagagcaggtttcggaggtagtgggcattgaagccgttggggtcgtagtagcgatccgggtcttgcaggaactcggtcagcttgtcgccggccgagagcttccacgtgaggggcaccaccggcccgaagtagtggaaggaggactcgaacaagcgggcggggtcgcggagcaccgtgatgaagatggcgttggtcggcaccaggccgcgcacctcgtcgtagtggaagcgcatgtggttgcagatgatgttgaagcaggccccgggccgatagtcctgcaccaggctgcgggcgaagaaggtcgggtagtcgaagtcattgcggccgttagggaaggcgaacttgagccggtgcttctggccgaagcggaacaggatgttgagcagggtgctgctggccgtcttgtgcgtcttcaagaacacgatgttgcgccgcggctggcactcccccgccgagccgttggcccggatcactgcctctggctcgagtgcaggtggagagcaggacgctgcggcctccggggtcctgc

SEQ ID NO: 22887 - DNA, 777 bp, Homo sapiens
  MAP TO AL139397.1; EXPRESSED IN LUNG, SIGNAL = 0.98; EXPRESSED IN BONE MARROW, SIGNAL = 1.1; EXPRESSED IN FETAL LIVER, SIGNAL = 1.1; EXPRESSED IN BRAIN, SIGNAL = 1.1; EXPRESSED IN HELA, SIGNAL =   2; NT HIT: gi14737425, EVALUE 0.00e+00; SWISSPROT HIT: Q9Y657, EVALUE 1.00e-116; EST_HUMAN HIT: AW862988.1, EVALUE 0.00e+00
ctaagatgtttttaccaaatcgtagacatagatatggaaatcatcatcaaatttgatgaagtacacagagggttttgcttctacctgatgaatgaccatgccagttctcttggagccatcgtctttggcgtattccacctgtttgcctaccaggctgtctatgacttctcctggctccctctctgccagaggagaatcattggaatcttgaaggatgcggaggtcaccatctttataatcatctaagagctggtacatatataatacaggatctttctcataggtaatgtaaaaccatgtgttcatgacaggtgcctgagctaagaccatccccctccattcatttttggaaccttcctctgtctcaaaaatatgttccactgctttgccaaccattatttctgccaagtgtgtatcactgattctagatgatgcaactctattaggaaggacttcaagtgatgacactctttcatctctgtgaagttccaatccataaacacagtcaaatccatcatatttgataagatacagagagggatttacaggtacctgatccagaacggttcctttccactgtgttagaggttcatctccatctttccatccgtgctgaattctgcagcccacgatgttcccccgaggctgggaggtgggtcggctcctatgcttcttgtgtgcagccttcctctttatcatggtaacagacacactgccgtggccagcgcccgtcctggaccgctgccctgcagctgcctttccaaacggggtcttcat

SEQ ID NO: 22888 - DNA, 834 bp, Homo sapiens
  MAP TO AC008468.4; EXPRESSED IN HELA, SIGNAL = 1.5; EXPRESSED IN LUNG, SIGNAL =   1; EXPRESSED IN BONE MARROW, SIGNAL = 0.95; NT HIT: gi14861872, EVALUE 0.00e+00; SWISSPROT HIT: Q9UN74, EVALUE 0.00e+00; EST_HUMAN HIT: BI465306.1, EVALUE 0.00e+00
atgtgaacgacaacgctccggcgttcgcgcagcccgagtacacagtgttcgtgaaggagaacaacccgccgggctgccacatcttcactgtgtctgcgtgggacgcggacgcgcaggagaacgcgctggtgtcctactcgctggtagagcggcgggtaggggagcgcgcgctgtcgagctacgtttcggtgcatgcggagagcggcaaggtgtacgcgctgcagccgctggaccacgaggagctagagctgctgcagtttcaggtgaccgctcgcgatgccggcgtgccacctctgggcagcaacgtgacgctgcaggtgttcgtgctggacgaaaacgacaacgcgccagcactgctagcgcctcgggcgggtggcactggtggcgcagtgagcgagctggtgccatggtcggtgggtgtgggccacgtggtggcaaaggtgcgcgcggtggatgctgactcgggctacaacgcgtggctttcgtacgagctgcagccggggactggtggcgcgcgcatcccgttccgcgtggggctgtacactggcgagatcagcacaacgcgtgccctggacgaaacggacgctccgcgccaccgcctactggtactggtgaaggaccacggcgagcccgcgctgacggccacggccactgtgctggtgtcacttgtggagagtggacaggcgccaaaggcctcctcacgggcgttggtgggcgctgtgggtcccgatgctgcgctggtggatgtcaacgtatacctgatcattgccatctgcgcggtgtccagccttttggtgctcacgctgctgctgtacaccgcgctgcggtgctctg

SEQ ID NO: 22889 - DNA, 1513 bp, Homo sapiens
  MAP TO AC005846.1; EXPRESSED IN HELA, SIGNAL = 2.1; EXPRESSED IN BONE MARROW, SIGNAL = 1.1; NT HIT: M60675.1, EVALUE 0.00e+00; SWISSPROT HIT: P04275, EVALUE 0.00e+00; EST_HUMAN HIT: AU140638.1, EVALUE 0.00e+00
ttcttcctgaaccattttaatttcttcgctcttttctgcagccactgtgatgttgtcaacctcacctgtgaagcctgccaggagccgggaggcctggtggtgcctcccacagatgccccggtgagccccaccactctgtatgtggaggacatctcggaaccgccgttgcacgatttctactgcagcaggctactggacctggtcttcctgctggatggctcctccaggctgtccgaggctgagtttgaagtgctgaaggcctttgtggtggacatgatggagcggctgcgcatctcccagaagtgggtccgcgtggccgtggtggagtaccacgacggctcccacgcctacatcgggctcaaggaccggaagcgaccgtcagagctgcggcgcattgccagccaggtgaagtatgcgggcagccaggtggcctccaccagcgaggtcttgaaatacacactgttccaaatcttcagcaagatcgaccgccctgaagcctcccgcatcaccctgctcctgatggccagccaggagccccaacggatgtcccggaactttgtccgctacgtccagggcctgaagaagaagaaggtcattgtgatcccggtgggcattgggccccatgccaacctcaagcagatccgcctcatcgagaagcaggcccctgagaacaaggccttcgtgctgagcagtgtggatgagctggagcagcaaagggacgagatcgttagctacctctgtgaccttgcccctgaagcccctcctcctactctgccccccgacatggcacaagtcactgtgggcccggggctcttgggggtttcgaccctggggcccaagaggaactccatggttctggatgtggcgttcgtcctggaaggatcggacaaaattggtgaagccgacttcaacaggagcaaggagttcatggaggaggtgattcagcggatggatgtgggccaggacagcatccacgtcacggtgctgcagtactcctacatggtgactgtggagtaccccttcagcgaggcacagtccaaaggggacatcctgcagcgggtgcgagagatccgctaccagggcggcaacaggaccaacactgggctggccctgcggtacctctctgaccacagcttcttggtcagccagggtgaccgggagcaggcgcccaacctggtctacatggtcaccggaaatcctgcctctgatgagatcaagaggctgcctggagacatccaggtggtgcccattggagtgggccctaatgccaacgtgcaggagctggagaggattggctggcccaatgcccctatcctcatccaggactttgagacgctcccccgagaggctcctgacctggtgctgcagaggtgctgctccggagaggggctgcagatccccaccctctcccctgcacctggtatgctggcaccttgtgtgcaggtgggagggctgggcgagggctggcatggccttggtgctacatgcatctgccaagatacgactcgggttc

SEQ ID NO: 22890 - DNA, 605 bp, Homo sapiens
  MAP TO AP000508.1; EXPRESSED IN BONE MARROW, SIGNAL = 0.94; EST_HUMAN HIT: BE786679.1, EVALUE 1.00e-127; NT HIT: gi4827053, EVALUE 0.00e+00; SWISSPROT HIT: P40818, EVALUE 4.00e-73
tttgctcgtgttcttccctcctcagtttctttctgtttcccttgctgtctttcctgaagttctttttcttgtttgtttttctccattagaagagcagtttctgcatgaatatgagccttttcttcatctgttaacatgagagttggagaggaaactactggcttggcggaacaatcaggaataactttttcattctgaggagactgttgctcatgatttgtactttcagatttgattatatgctcttcaggcaatttgactgccagttttttagtatgatcaatctgtggaacattctttatgctaggcactggctgaatgatgggtgaaacatcagatttagaagcagcaactgattcaactggaattgatatattcagtggtcctgtcctctcattttgatcattatcacttatttgatcacttatcaattctatgtcttcatccacttctataggtggaggtggcatctcggcagcaggtttagaaggaattgattcttccaatgagggataagtaaaatccaatgagatagacaactcttcattctggtgttgtgggggtggagtgaccttagcatttgttgtatactgggaatagcaaag

SEQ ID NO: 22891 - DNA, 2106 bp, Homo sapiens
  MAP TO AC024049.2; EXPRESSED IN BRAIN, SIGNAL = 1.1; EXPRESSED IN BONE MARROW, SIGNAL = 1.5; EXPRESSED IN HELA, SIGNAL = 0.96; SWISSPROT HIT: P08640, EVALUE 1.00e-43; EST_HUMAN HIT: BF757290.1, EVALUE 1.00e-102
ctagaggatcctgattgggtttcgtgttcctgaattcgtggtgatggggccgtgtagcggtgctgttctgtgtctgagcttcgtggtgatggggccgtgtagcggtgctgttctgtgtctgagcttcgtggtgatggggtcgtggagcgggtgctgttctgtgtgtgagcttcgtggtgatggggccgtgtagcggtgctgttctgtgtgtgagcttcgtggtgatggggccgtgtagcggtgctgttctgtgtgtgagcttcgtggtgatggggccgtgtagcggtgctgttctgtgtctgagcttcgtggtgatggggccgtgtagcggtgctgttctgtgtctgagcttcgtggtgatggggctgtgtagcgggtgctgttctgtgtgtgagcttcgtggtgatggggtcgtggagcgggtgctgttctgtgtgtgagcttcgtggtgatggggtcgtggagcgggtgctgttctgtgtgtgagcttcgtggtgatggggccgtgtagcggtgctgttctgtgtgtgagcttcgtggtgatggggccgtgtagcggtgctgttctgtgtctgagcttcgtggtgatggggccgtgtagcggtgctgttctgtgtctgagcttcgtggtgatggggctgtgtagcgggtgctgttctgtgtgtgagcttcgtggtgatggggtcgtggagcgggtgctgttctgtgtgtgagcttcgtggtgatggggccgtggagcgggtgctgttctgtgtctgagcttcgtggtgatggggccgtgtagcggtgctgttctgtgtctgagcttcgtggtgatggggccgtgtagcggctgctgttctgtgtctgagcttcgtggtgatggggcagtgtagcgggtgctgttctgtgtgtgagcttcgtggtgatggggtcgtgtagcgggtgctgttctgtgtgtgagcttcgtggtggtggggtcgtgtagcgggtgctgttctgtgtgtgagcttcgtggtggtggggccgtgtagcgtgtgctgttctgtgtgtgagcttcgtggtgatggggccgtgtagcgggtgctgttctgtgtctgagcttcgtggtgatggggccgtgtagcgggtgctgttctgtgtgtgagcttcgtggtgatggggccgtgtagcgggtgctgttctgtgtgtgagcttcgtggtgatggggccgtgtagcgggtgctgttctgtgtgtgagcttcgtggtgatggggccgtgtagcgggtgctgttgtgtgtctgagcttcgtggtggtggggccgtgtagcgggtgctgttctgtgtgtgagcttcgtggtggtggggccgtgtagcgggtgctgttctgtgtgtgagcttcgtggtggtggggccgtgtagcggtgctgttctgtgtgtgagcttcgtggtgatggggccgtgtagcggtgctgttctgtgtgtgagcttcgtggtgatggggccgtgtagcggtgctgttgtgtgtctgagcttcgtggtggtggggccgtgtagcggtgctgttctgtgtgtgagcttcgtggtggtggggccgtgtagcggtgctgttctgtgtgtgagcttcgtggtggtggggccgtgtagcggtgctgttctgtgtctgagcttcgtggtggtggggccgtgtagcggtgctgttctgtgtctgagcttcgtggtggtggggccgtgtagcgggtgctgttctgtgtctgagcttcgtggtggtggggtcgtgtagcgggtgctgttctgtgtgtgagcttcgtggtgatggggccgtgtagcgggtgctgttctgtgtctgagcttcgtggtggtggggccgtgtagcgggtgctgttctgtgtctgagcttcgtggtggtggggccgtgtagcgggtgctgttctgtgtctgagcttcgtggtggtggggccgtgtagcgggtgctgttctgtgtctgagcttcgtggtgatggggtcgtgtagcgggtgctgttctgtgtgtgagcttcgtggtgatggggtcgtgtagcgggtgctgttttgtgtgtgagcttcgtggtggtggggttgtggagcaggtgctgttttgtgtgtgagcttcttggtggtggggtcat

SEQ ID NO: 22892 - DNA, 465 bp, Homo sapiens
  MAP TO AC009294.6; EXPRESSED IN BRAIN, SIGNAL = 6.7; EXPRESSED IN HEART, SIGNAL = 5.9; EXPRESSED IN BONE MARROW, SIGNAL =  15; EXPRESSED IN LUNG, SIGNAL = 7.5; SWISSPROT HIT: P49312, EVALUE 2.00e-76; EST_HUMAN HIT: BE297503.1, EVALUE 0.00e+00; NT HIT: gi14763090, EVALUE 0.00e+00
ctaaggaagctcttcattggagggttgaggtttgaaacatcagatgagagcctgaggagccattctgagcaatggggaacgctcactgaatgtgtggtaatgagagatccaaacaccaatcgctccaggggctttgggtttgtcccctatgtcactgtggaggaggtggatgcagccatgaatgcaaggccacacaagatgggtggaagagttgtggaaccaaagacagctgtctcaagagaagattctcaaagaccaggtgcctacttaacagtgaaaaagatatttgttggtggcattaaagaagacactgaagaacatcccctaagagattattatgaacagtatggaaaaactgaagtgattgaaatcatgactgaccaaggcagtggcaagaaaagggactttgcctttgtaacttttgacaaccatgactccacggataagattgtcattcagaaatac

SEQ ID NO: 22893 - DNA, 1596 bp, Homo sapiens
  MAP TO AL121932.13; EXPRESSED IN BRAIN, SIGNAL = 1.3; EXPRESSED IN HELA, SIGNAL = 1.5; EXPRESSED IN BONE MARROW, SIGNAL = 1.3; EXPRESSED IN FETAL LIVER, SIGNAL = 1.3; EXPRESSED IN LUNG, SIGNAL = 0.99; NT HIT: gi16174470, EVALUE 0.00e+00; SWISSPROT HIT: O43422, EVALUE 4.00e-03; EST_HUMAN HIT: BE779724.1, EVALUE 0.00e+00
atggcgaaacaagcttcactggacttttttgtcaagaaaagacatgccttttctgaacacagtagtagtaataaaagaaatgttaacaatagaagttatcctgaagaagggaaaaccaaaagagttcatgctagtttcactcggaaatatgatccttcatatattgagtttggttttgtagctgtaattgatggtgaagtactaaaaccacagtgtattatttgtggagatgtactggctaatgaagcaatgaaaccatcaaaacttaagcgacatttatattcaaaacataaagaaataagttcacaaccaaaagaattctttgaaagaaagagtagtgaattgaaaagccaaccaaagcaggtgttcaacgtttctcatataaacattagtgctttgcgggcttcatataaagtagcacttccggttgccaagtctaaaacaccatacacaattgctgagacactagtgaaagactgcatcaaagaagtttgcttggaaatgttgggtgaatctgcagcaaagaaggtagctcaggtaccactttccaatgacaccatagctcgacgtattcaggaactggctaatgatatggaagatcaactcatagaacaaataaaactagcaaagtatttttcattgcaacttgatgaatgcagagatattgctaacatgataattcttttagtctatgtgaggtttgaacatgatgatgatataaaggaagagttctttttttcagcctctttgcctacaaacacaactagctcagaactgtatgaagctgtaaagaattatattgttaacaaatgtggtttggaatttaaattttgtgtaggagtatgttctgatggtgcagcttcaatgacaggaaaacattctgaagtggtaacccagattaaggaacttgcgccagaatgtaaaacaacacattgcttcattcatcgagaaagtcttgccatgaaaaaaatatcagctgaactaaatagtgtacttaatgatatagtaaaaattgtgaattatataaaatctaattcattgaattcaagattattctctttattatgtgataatatggaagctgatcataagcaactgttactgcatgctgagatacggtggttatcacggggaaaagttctgtcaagaatgtttgaaatacgaaatgaactcttagtgtttctgcaaggcaagaaacccatgtggtcccaactttttaaagatgtgaattggacagccagacttgcttatttgtctgatatcttcagtatttttaatgatcttaatgcttctatgcaagggaagaatgcaacttatttttcaatggcagataaagttgaaggacaaaaacagaagttagaagcttggaaaaacagaatttctacagattgttatgacatgtttcataatttaacaacaattatcaatgaagtaggtaatgatcttgatattgcacatctgcgaaaagttatcagtgaacatcttacaaatttgttagaatgttttgaattttattttccatcaaaagaagatccacgcataggaaatttgtggatccaaaatccatttctttcatcaaaagataacttaaattta

SEQ ID NO: 22894 - DNA, 543 bp, Homo sapiens
  MAP TO Z68326.1; EXPRESSED IN LUNG, SIGNAL = 3.1; EXPRESSED IN PLACENTA, SIGNAL = 5.7; EXPRESSED IN HELA, SIGNAL =   4; EXPRESSED IN BRAIN, SIGNAL = 5.4; EXPRESSED IN BONE MARROW, SIGNAL = 3.6; EXPRESSED IN HEART, SIGNAL = 6.7; EST_HUMAN HIT: BI667416.1, EVALUE 1.00e-11; NT HIT: AL161589.2, EVALUE 2.00e-03; SWISSPROT HIT: P17437, EVALUE 1.30e+00
ctgcaattcttttgcctgggggcccccatcctttacaggtgggagaggtagggaaggccctctctgcttcagtccatcttgcacactcggggctaatacggcggggcggggcggggcgagcttggcctttactgcgccacggcaggtgggggtggggcagtggcgaaccgcgcccagcccaatctcggacgggctgaagagaggcagcgaaggagatggggccgcccccgcaccccgggacgggaactcaccttctctgaggcaagggcgggtgtctactttaaaactactgccccccctccccgccgccgccatagtggagccgccaaagccgccgccgccgccgtcgccacagccaccggcaggcgggcaggcaggggcggaggtggcggaggaggcaggaacaattactgccgccgccgccgccgccgccgccgctgccgcgcaggcggtgtaggaggaggaggaggcggcagagacggtagcttcctgaggggaagactccgccgccagcggggtgactgtgctcggcgccgccgccat

SEQ ID NO: 22895 - DNA, 809 bp, Homo sapiens
  MAP TO AF225898.1; EXPRESSED IN BRAIN, SIGNAL = 1.4; EXPRESSED IN HELA, SIGNAL =   2; EXPRESSED IN BONE MARROW, SIGNAL = 0.8; EXPRESSED IN LUNG, SIGNAL = 1.2; EXPRESSED IN HEART, SIGNAL = 1.3; NT HIT: gi15299284, EVALUE 0.00e+00; SWISSPROT HIT: P37275, EVALUE 1.00e-116; EST_HUMAN HIT: BE883884.1, EVALUE 0.00e+00
catattatgctttgaatgcacaaccaagtgcagaagagctctcaaaaattgctgattcagtaaacctaccactggatgtagtaaaaaagtggtttgaaaagatgcaagctggacagatttcagtgcagtcttctgaaccatcttctcctgaaccaggcaaagtaaatatccctgccaagaacaatgatcagcctcaatctgcaaatgcaaatgaaccccaggacagcacagtaaatctacaaagtcctttgaagatgactaactccccagttttaccagtgggatcaaccaccaatggttccagaagtagtacaccatccccatcacctctaaacctttcctcatccagaaatacacagggttacttgtacacagctgagggtgcacaagaagagccacaagtagaacctcttgatctttcactaccaaagcaacagggagaattattagaaaggtcaactatcactagtgtttaccagaacagtgtttattctgtccaggaagaacccttgaacttgtcttgcgcaaaaaaggagccacaaaaggacagttgtgttacagactcagaaccagttgtaaatgtaatcccaccaagtgccaaccccataaatatcgctatacctacagtcactgcccagttacccacaatcgtggccattgctgaccagaacagtgttccatgcttaagagcgctagctgccaataagcaaacgattctgattccccaggtggcatacacctactcaactacggtcagccctgcagtccaagaaccacccttgaaagtgatccagccaaatggaaatcag

SEQ ID NO: 22896 - DNA, 1023 bp, Homo sapiens
  MAP TO AC004775.1; EXPRESSED IN LUNG, SIGNAL = 1.1; EXPRESSED IN BONE MARROW, SIGNAL = 1.2; EXPRESSED IN FETAL LIVER, SIGNAL = 1.1; EXPRESSED IN BRAIN, SIGNAL = 1.6; EXPRESSED IN HELA, SIGNAL = 0.78; NT HIT: gi9629818, EVALUE 9.90e-01; SWISSPROT HIT: O15084, EVALUE 3.00e-06; EST_HUMAN HIT: BG704014.1, EVALUE 0.00e+00
agaaggctggcagaccaccgcggatctttgtctttttacgtggagccatgggcgaggcgctcaagaacttgctgaaggagctcgacttcttcaagcctcgggccaggtcctggagcatgaggtcgtcagccaggacgcccagaaatgcactggtggtggaactgaggatggtggcggccacctgtacggggcgcctggcagcaagactgccacttccaccaccggtcgcatctggctccgtggtgcctcgcaggcctggatcgccaagaaggcggcgcagcgcgtacgaggagccgggccgcaggtactggtaggcgcgacgcccgctgtgatcacgcacgtgcacctgggcacccagacgcaccaccagcagcacggcagcgtcctcgtggccgtgcagtgcagccaggtgcagcggcgtgtagccgccgtgggagcgtgcgttcacgtcgactggtgcgccactgcgccgcgcgacctccaccagctgcagcgccatctcgccgtcgccgctcttggcggcccaatgcagggccgtgaagccagacatgaagtcgcgcttggccgccaagccgcggtcgcgcagcagcagcccgtgcagctggtgggtccagcggcccccggcagtccgcacgagccactcgtgctcggacggctccaggggcaccgcggacggcggcggcgcggcgggcaactcctcggcgtcagggctcagcagacgcgggccggcgcgcgacaggcgcctcaggtgcggggagcggcccgggcccaggccgaggcccagaccggactcttccaccgagagccgcctcagcagcagaggggagctccgcgggctcggctcctccgacagctgccggcgcaggccgggctcctccgcccggaggcggagcgtggcgggggccgggacgcagcgcaccggcagcatacagggcttctgctgcggcggccctttcgctgccccgggcccgggctccgcgtctggcggatcagagcagggcgatgccgcctcagaaggggccc

SEQ ID NO: 22897 - DNA, 1999 bp, Homo sapiens
  MAP TO AC012112.1; EXPRESSED IN FETAL LIVER, SIGNAL = 2.6; EXPRESSED IN LUNG, SIGNAL = 1.5; EXPRESSED IN PLACENTA, SIGNAL = 3.6; EXPRESSED IN BRAIN, SIGNAL = 1.6; EXPRESSED IN BONE MARROW, SIGNAL = 1.6; EST_HUMAN HIT: AW275993.1, EVALUE 0.00e+00; NT HIT: gi14771305, EVALUE 0.00e+00; SWISSPROT HIT: P22459, EVALUE 0.00e+00
atggaggttgcaatggtgagtgcggagagctcagggtgcaacagtcacatgccttatggttatgctgcccaggcccgggcccgggagcgggagaggcttgctcactccagggcagctgcagcagctgctgttgcagcggccacagctgctgtcgaaggtagcgggggttctggtgggggctcccaccaccaccaccagtcacgcggggcctgtacctcccatgaccctcagagcagccggggtagtcggaggaggaggcgacagcggtctgagaagaagaaagcccactaccggcagagcagcttccctcattgctctgacctgatgcccagtggctctgaggagaagatcctgagggagctgagtgaggaggaggaagatgaggaggaggaggaagaggaggaagaggagggaaggttttactatagtgaagatgaccatggtgatgagtgttcctacacggatctgctgcctcaggatgagggcggtggcggctacagttcagtccgctacagtgactgttgtgaacgtgtggtgataaatgtgtcaggcctacgctttgagacccaaatgaaaactctggcccagtttccagagactttgttgggagaccctgaaaagaggactcagtactttgaccctttgcgcaatgagtatttttttgacaggaaccgccccagctttgatgccatcttgtattattatcaatcaggaggccgcctgaagaggccagtcaatgtcccctttgatatcttcactgaggaggtgaagttctatcagttgggggaggaggccctgttgaagtttcgggaggacgagggctttgtgagagaagaggaagacagggccctccccgagaatgaatttaaaaagcagatttggctcctctttgaatatccagagagctccagtcctgcaaggggcatagccattgtgtccgtcctggtcatcttaatctccattgtcatcttttgcctggaaaccttgcctgagtttagggacgacagggatctcgtcatggcactgagtgctggcgggcatggtgggttgttgaatgatacttcagcaccccatctggagaactcagggcacacaatattcaatgaccccttcttcatcgtggaaacagtctgtattgtatggttttcctttgagtttgtggttcgctgctttgcttgtcccagccaagcactcttcttcaaaaacatcatgaacatcattgacattgtctccattttgccttacttcatcacactgggcactgacctggcccagcaacaggggggtggcaatggtcagcagcagcaggccatgtcctttgccatcctcagaatcattcgtctggtccgagtattccggatcttcaaactctccaggcactccaaaggcctgcagatcctgggccacaccctcagagccagcatgcgggaactgggccttctgatcttcttcctcttcattggggtcatcctcttttctagtgctgtgtattttgcagaggcggatgaacctactacccatttccaaagcatcccagatgcattttggtgggctgtggtgaccatgacaactgtgggctatggggacatgaagcccatcactgtagggggcaagattgtcgggtccctgtgtgccattgcgggtgtcttaaccattgctttgccagtgccagtgattgtctctaactttaactatttctaccacagagagactgaaaatgaggaacagacacagctaacgcagaatgcagtcagttgtccatacctcccctctaatttgctcaagaaatttcggagctctacttcttcttccctgggggacaagtcagagtatctagagatggaagaaggagttaaggaatctctgtgtgcaaaggaggagaagtgtcagggaaagggggatgacagtgagacagataaaaacaactgttctaatgcaaaggctgtggagactgatgtgtgaatctttttccacctgccactgctcccccctcagcatc

SEQ ID NO: 22898 - DNA, 1183 bp, Homo sapiens
  MAP TO AL096810.1; EXPRESSED IN BRAIN, SIGNAL = 1.6; EXPRESSED IN HELA, SIGNAL = 0.53; EXPRESSED IN BONE MARROW, SIGNAL = 0.77; SWISSPROT HIT: P02465, EVALUE 3.50e-02; EST_HUMAN HIT: BG818167.1, EVALUE 2.00e-77; NT HIT: AL096810.1, EVALUE 0.00e+00
ctgctggatggcctgggagcccagcctgggcgccttctacggcccagccgccatcatcaccctggtcacctgtgtgtacttcctgggcacctacgtgcagctgcggcgccacccagggcgcaggtacgagctgcgcacacagcccgaggagcagcggcggctggcgacacccgagggcggccgtgggatccggccaggcaccccacccgcacacgatgcccccggcgcctccgtgctgcagaacgagcactcattccaggcacagctgcgcgccgccgccttcacgctgttcctgttcacggccacgtgggccttcggggcgctggcggtgtcgcagggccacttcctggacatggtcttcagctgcctgtacggcgccttctgcgtgaccctgggactcttcgtgctcatccaccactgcgccaagcgtgaggacgtgtggcagtgctggtgggcatgctgcccgccccgcaaggacgcccaccctgcacttgacgccaacggggccgcgctgggccgcgccgcctgcctgcactcgccgggactgggccagccacggggcttcgcgcacccaccgggcccctgcaagatgaccaacctgcaggccgcgcagggccacgccagttgcctgtcaccggccaccccgtgctgcgccaagatgcactgcgagccactgacggcggacgaggcgcacgtgcacctgcaggaggagggcgccttcgggcacgacccccacctgcacgggtgccttcagggcagaactaagccgccctactttagccggcacccagcagaggagcccgagtacgcctaccacatcccatccagcctggatggcagcccccgcagctcgcgcacagacagcccccccagctctctggatggcccggcggggacacacacgctggcctgctgcacccagggcgaccccttccccatggtcacccagcccgagggcagtgatgggagccctgccctctacagctgccccacgcagccgggcagggaggcagcgctcgggcccggccacttggagatgctgcggaggacacagtccctgccctttggtggccccagccagaacgggctgcccaagggtaaattgctagaaggcctgccgtttggcaccgacgggaccggcaacatccgaacgggaccctggaaaaacgaaactactgtgtag

SEQ ID NO: 22899 - DNA, 719 bp, Homo sapiens
  MAP TO Z84479.1; EXPRESSED IN BRAIN, SIGNAL = 0.99; EXPRESSED IN BONE MARROW, SIGNAL = 0.91; EXPRESSED IN LUNG, SIGNAL = 0.96; EXPRESSED IN HELA, SIGNAL = 1.2; SWISSPROT HIT: P02452, EVALUE 2.00e-06; EST_HUMAN HIT: BG328110.1, EVALUE 0.00e+00
ctactccttttctgttattgctgacacatagtcctctcggtcctcagtccagtgtgggtttccctgggctgaagtcaaggtgttggctgacacacagtcctctcggtcctcagtccagtgtgggtttccctgggctgaagtcaaggtgttggctgacacacagtcctctcggtcctcagtccagtgtgggtttccctgggctgaagtcaaggtgttggctgacacacagtcctctcggtcctcagtccagtgtgggtttccctgggctgaagtcaaggtgttggctgacacgcagtcctctcggtcctcagtccagtgtgggtttccctgggctgaagtcaaggtgttggctgacacgcagtcctctcggtcctcagtccagtgtgggtttccctgagctgaagtcaaggtgttggctgacacacagtcctctcggtcctcagtccagtgtgggtttccctgggctgaagtcaaggtgttggccagggctttgctttttgcaggccctacaggaagatgttctcttgctcgttgggaggttggcagaattccgttcttgctggtggtaggactggcagtagcaccttgctgggtgcaagccgagcctttcccggcttctccaggccgcctgcgttgttcacggagggcccttgcccatctgcagagccagcactggcgggtgaagtccctctcatgctttgactctccttctgtctcat

SEQ ID NO: 22900 - DNA, 1217 bp, Homo sapiens
  MAP TO AC003006.1; EXPRESSED IN BRAIN, SIGNAL = 0.79; EXPRESSED IN HELA, SIGNAL = 0.92; EXPRESSED IN BONE MARROW, SIGNAL = 0.95; EST_HUMAN HIT: AI909402.1, EVALUE 0.00e+00; NT HIT: gi14766432, EVALUE 0.00e+00; SWISSPROT HIT: P52740, EVALUE 1.00e-109
ttaaagcttttctccagcatgaaccctctggtgcagaacaagtgtctgtttccggatgaattctctcccgcactcactacacacataaggcctttccccagtgtggactttccagtgcctgatgaggttgggtctttgagtgaaggctttcccgcacttgctgcactcataaggcttttctccagagtgaactttctggtgctgaatgagtttggagatgcagctgaaagctttaccacatctgctacactcataatcactgctgtgaattctccagtgtacattaaggtgggagctttggctaaaggccttcccacattcactgcactcataaggcctttctccagtgtgagttcgttggtgcagaacaagtgtgtgtttccgactgaactctttcccacattcgctgcatacataaggcctggctcctgtgtgaacttcctggtgtcgaatgagattagacttactgctaaaaaatttcccacatttgccacactgatagagtctttcacccgtgtgaactcgcctgtgctcaatcaggccggagatttgtctaaagaatttcccacattcgctgcactcgtatggcctttctccagtgtgaactgtctggtgtttaaagaggtcatagctttggctgaagaatttcccacattcgttacactcataaggcctttctccagtgtggattctctgatgccgagcaagtgtgtctttgcgggtgaaggctttcccacattcaccacacctgtgatacctctgtcccatgagaaagccactcacaagcttagtgctcttgtggggcttcatgctgctgagagaggcctgatgctgaagaaggccagatgtggctgaaaagtctctcctacctttcccacatgtgagggtcttctctggcacatggactctgcagcttttcacagagtctctgccctccttccttgggaaaagtttccctccattgggctggttctggtgctggtcaaagtctgtactgaaccagaattgctttccacatgccccacacaagtatggtttctgcctggcttttcccccatggtatttagccaggtgtaaggtatctttcaatattgggccacatatgtcacatgggtgagactccagctctgccatgagagtcctgacctctgacactcctgctacaaaaatgctctgctcagaagatacctcttcatcctccactccatgccaacaac

SEQ ID NO: 22901 - DNA, 1203 bp, Homo sapiens
  MAP TO Z97632.1; EXPRESSED IN BONE MARROW, SIGNAL = 1.4; SWISSPROT HIT: Q05831, EVALUE 9.10e-01; EST_HUMAN HIT: BG256911.1, EVALUE 0.00e+00; NT HIT: gi15310493, EVALUE 0.00e+00
aatatcatcgtcatcatcatcgctactgagaataaagctgctgccagtggataggggcccttcttcaacactcccaaaaccacccaaagtccccctctcatcagaatcgtcaaacaacttctcactggaatcttcctcctcatcaaacaacttctcattggaatcatcatcttcgaacaacttttcgtcagcatcttcaacttcctttccatctgcatcttcatcttccttgtcatctgactcttcaaacagcttttcatctgcatcaccttcttccgcctttttatcagcagcttcaagccccttttcatctgcatattcttcatcctctttctcatcagactcatcatcaaatactttttcatatgtatcctcctcttcttccttttcatctgaatcttcgtcaaactctctctcagagccttcctcatctaacactttttcagagccgtcatcttcaaattcggagttttcagagtcattttcttctaactctttgtcaagaacattttcatgaagctccttttcagaaccttcctcgtccaaatctttctcgagaccattttcttcaaattctctttcggagccatcttcagactgtttttcagagcagtcttcatcagactctttctctgagtcatcttcttcggactcttttgtggggccaacctcctcttcagactccttgttgaggtcatcttcagattcctttgcaaggccattctcttcacaatcatttttgagtgtcttctttttagactcttttttaggactatcctcttcagatcctcttacgggattgccttcttcagactctttttgggagcagctgccttcaaaccctcttttggggcagccctcttcagattctttttcagggcagccttcttcagcctctttttcggggctactttccttagcattgttttcagaagcaccttcttcaaattctcccccatcttctgtcttttcaaacttcttctcatctataggttcttcaaacgccattccagttgcagtttcttgagcattcattttagatgtgctggggtgctctgaaaaatgccttgctctagaaggccctgccctttcggaagcagagacagaatctgaacgcctaaggcctctgttggcctcaggagcattgaggaaagcctcccatcctctcagcctttcctccctttctcttgaggtttcctccac

SEQ ID NO: 22902 - DNA, 663 bp, Homo sapiens
  MAP TO AC004643.1; EXPRESSED IN BRAIN, SIGNAL = 1.5; EXPRESSED IN BONE MARROW, SIGNAL = 1.5; EXPRESSED IN FETAL LIVER, SIGNAL = 1.4; EXPRESSED IN HEART, SIGNAL = 1.5; SWISSPROT HIT: P56747, EVALUE 1.00e-93; EST_HUMAN HIT: BI092825.1, EVALUE 0.00e+00; NT HIT: gi14777982, EVALUE 0.00e+00
atggcctctgccggaatgcagatcctgggagtcgtcctgacactgctgggctgggtgaatggcctggtctcctgtgccctgcccatgtggaaggtgaccgctttcatcggcaacagcatcgtggtggcccaggtggtgtgggagggcctgtggatgtcctgcgtggtgcagagcaccggccagatgcagtgcaaggtgtacgactcactgctggcgctgccacaggacctgcaggctgcacgtgccctctgtgtcatcgccctccttgtggccctgttcggcttgctggtctaccttgctggggccaagtgtaccacctgtgtggaggagaaggattccaaggcccgcctggtgctcacctctgggattgtctttgtcatctcaggggtcctgacgctaatccccgtgtgctggacggcgcatgccgtcatccgggacttctataaccccctggtggctgaggcccaaaagcgggagctgggggcctccctctacttgggctgggcggcctcaggccttttgttgctgggtggggggttgctgtgctgcacttgcccctcgggggggtcccagggccccagccattacatggcccgctactcaacatctgcccctgccatctctcgggggccctctgagtaccctaccaagaattacgtctga

SEQ ID NO: 22903 - DNA, 586 bp, Homo sapiens
  MAP TO AC006479.2; EXPRESSED IN LUNG, SIGNAL = 1.6; EXPRESSED IN HEART, SIGNAL = 1.3; EXPRESSED IN HELA, SIGNAL =   2; EXPRESSED IN BONE MARROW, SIGNAL = 1.5; SWISSPROT HIT: P54120, EVALUE 1.00e-12; EST_HUMAN HIT: BI767792.1, EVALUE 0.00e+00; NT HIT: gi16196212, EVALUE 0.00e+00
agttgtgttttgattaaggctccttttaggcagtttgcttcagccaaggctgtgtaacttctttgagtttccatgtactttataaggctctgtttgaattcctttactctttcatctgatcccacaggtccacatttagacctctgtattaggctgtacaacccattggtatagtgatcaccatttttctccatcaacagatcctcaatacagtccattagttccttcacttggtcatcctgattgctcccttcagcacggttattaaaggcacagattcgcccaccacatgctgccaccagcttgcttagggctttgttatctgagtcgtgcatgtaatccatcagggagccaccattgaggtcttccttgtgggtaaagaggacaattgtgtgtcccatggcatcctctccaaagatctccttcaccctctgtgcagcctgctggtcctgtgaggtatagcggcccagctgagtcaccaggagcagcacatggggtcctggtgcagacagcaagtagcacctctgcacctctttgtacagagcttcacagtggtccttccaagaaaacatatctggtgtgtcaa

SEQ ID NO: 22904 - DNA, 903 bp, Homo sapiens
  MAP TO U62631.1; EXPRESSED IN HELA, SIGNAL = 1.1; EXPRESSED IN BONE MARROW, SIGNAL = 0.89; NT HIT: gi11526068, EVALUE 0.00e+00; SWISSPROT HIT: O14842, EVALUE 0.00e+00; EST_HUMAN HIT: AW583167.1, EVALUE 0.00e+00
atggacctgcccccgcagctctccttcggcctctatgtggccgcctttgcgctgggcttcccgctcaacgtcctggccatccgaggcgcgacggcccacgcccggctccgtctcacccctagcctggtctacgccctgaacctgggctgctccgacctgctgctgacagtctctctgcccctgaaggcggtggaggcgctagcctccggggcctggcctctgccggcctcgctgtgccccgtcttcgcggtggcccacttcttcccactctatgccggcgggggcttcctggccgccctgagtgcaggccgctacctgggagcagccttccccttgggctaccaagccttccggaggccgtgctattcctggggggtgtgcgcggccatctgggccctcgtcctgtgtcacctgggtctggtctttgggttggaggctccaggaggctggctggaccacagcaacacctccctgggcatcaacacaccggtcaacggctctccggtctgcctggaggcctgggacccggcctctgccggcccggcccgcttcagcctctctctcctgctcttttttctgcccttggccatcacagccttctgctacgtgggctgcctccgggcactggcccgctccggcctgacgcacaggcggaagctgcgggccgcctgggtggccggcggggccctcctcacgctgctgctctgcgtaggaccctacaacgcctccaacgtggccagcttcctgtaccccaatctaggaggctcctggcggaagctggggctcatcacgggtgcctggagtgtggtgcttaatccgctggtgaccggttacttgggaaggggtcctggcctgaagacagtgtgtgcggcaagaacgcaagggggcaagtcccagaagtaa

SEQ ID NO: 22905 - DNA, 707 bp, Homo sapiens
  MAP TO AC005081.2; EXPRESSED IN HEART, SIGNAL =   3; EXPRESSED IN BONE MARROW, SIGNAL = 1.7; EXPRESSED IN PLACENTA, SIGNAL = 2.3; SWISSPROT HIT: P30622, EVALUE 2.00e-43; EST_HUMAN HIT: BI047278.1, EVALUE 5.00e-55; NT HIT: AF041055.1, EVALUE 0.00e+00
ataaggaatgggtgtcccaggctggaccctgtccgagcccccttcgagtccccaccctgcccagcccaggggggtccagcttcgccaagtggggcggagcaggggagggaagggaagctgggcccagagcccagtactgcccgcactcaccagcacgcggtcccccaggcgcaggtccttttcgccccgcttcacagagccgctgtctgagaggttggatcccgactcgttgccggtcttcacggagctgttgaggacgctctcccgcagggggatgacgcggctggtcagcgggggcgtggccgtgcccgaatgcaatgacaggttctgggcagtcagcgactccacggagtgggcatcactccccgagccctcggccgtgggctgccgggtcagcttggagggccgcgtgaagataccctggagggccgggcactcgaagtagcgcacgccgcccaccgcgccatcattcttgcccaccgggtcgtccagcaccacgccagcccactggcccggtgcgaactgcgtctctcccagatactgcaccacgcctggcttcacgccgttcacccacacccgctcgcccaccacaaagtcccccaggaagtcatcccccacttccgccgccttggggcccggcttctcgggggcagcagctgcggccggggaggaggagggtccagatgactgtttgtgcagtggggagc

SEQ ID NO: 22906 - DNA, 601 bp, Homo sapiens
  MAP TO AJ239329.2; EXPRESSED IN HELA, SIGNAL = 0.53; EXPRESSED IN BRAIN, SIGNAL = 0.97; EXPRESSED IN HEART, SIGNAL = 1.2; EXPRESSED IN BONE MARROW, SIGNAL = 0.93; SWISSPROT HIT: P23253, EVALUE 2.00e-09; EST_HUMAN HIT: AL043092.2, EVALUE 2.00e-38; NT HIT: AB004801.1, EVALUE 3.70e-02
caggctcagtgggttccttggttgtcttctcctggccctcacaatgaacccattcgtcctccagcttcctctcaggattcagcagtttcagcacctgtagtaggagactggacactcgatgagtattgggaggttccgggtggagatgggacactccaatctcaggaggctctgggcagacactggacacctccgtcttggggggctccgggtggaggctggacacctgcatcttggggggctctgggcggagactgtacacccgacgagtcttgggaggctctgggcagagactggacacccaaagaatcttgggaggctccgggtggagagtggacacccgttgagtcttgggaggcttggggcagagatgagacactgcagtcttggtaggctccgggcagagactggacacccgacgattcttgggaggctccgggcggacactggacagccgaccagtcttgggaggctccgggcagagtctggacacccgacgagtcttgggaggctccaggcggagatgagacactgcagtcttgggaggctctgggcagagactggacacccgacgagtcttgggaggctccgggagaacact

SEQ ID NO: 22907 - DNA, 2031 bp, Homo sapiens
  MAP TO AC005222.1; EXPRESSED IN HELA, SIGNAL = 0.52; EXPRESSED IN LUNG, SIGNAL =   1; EXPRESSED IN BONE MARROW, SIGNAL = 1.2; EST_HUMAN HIT: BI195544.1, EVALUE 0.00e+00; SWISSPROT HIT: Q27972, EVALUE 9.00e-12; NT HIT: gi16165435, EVALUE 0.00e+00
ggacagaagatgtgctccagggtccctctgctgctgccgctgctcctgctactggccctggggcctggggtgcagggctgcccatccggctgccagtgcagccagccacagacagtcttctgcactgcccgccaggggaccacggtgccccgagacgtgccacccgacacggtggggctgtacgtctttgagaacggcatcaccatgctcgacgcaggcagctttgccggcctgccgggcctgcagctcctggacctgtcacagaaccagatcgccagcctgcccagcggggtcttccagccactcgccaacctcagcaacctggacctgacagccaacaggctgcatgaaatcaccaatgagaccttccgtggcctgcggcgcctcgagcgcctctacctgggcaagaaccgcatccgccacatccagcctggtgccttcgacacgctcgaccgcctcctggagctcaagctgcaggacaacgagctgcgggcactgcccccgctgcgcctgccccgcctgctgctgctggacctcagccacaacagcctcctggccctggagcccggcatcctggacactgccaacgtggaggcgctgcggctggctggtctggggctgcagcagctggacgaggggctcttcagccgcttgcgcaacctccacgacctggatgtgtccgacaaccagctggagcgagtgccacctgtgatccgaggcctccggggcctgacgcgcctgcggctggccggcaacacccgcattgcccagctgcggcccgaggacctggccggcctggctgccctgcaggagctggatgtgagcaacctaagcctgcaggccctgcctggcgacctctcgggcctcttcccccgcctgcggctgctggcagctgcccgcaaccccttcaactgcgtgtgccccctgagctggtttggcccctgggtgcgcgagagccacgtcacactggccagccctgaggagacgcgctgccacttcccgcccaagaacgctggccggctgctcctggagcttgactacgccgactttggctgcccagccaccaccaccacagccacagtgcccaccacgaggcccgtggtgcgggagcccacagccttgtcttctagcttggctcctacctggcttagccccacagagccggccactgaggcccccagcccgccctccactgccccaccgactgtagggcctgtcccccagccccaggactgcccaccgtccacctgcctcaatgggggcacatgccacctggggacacggcaccacctggcgtgcttgtgccccgaaggcttcacgggcctgtactgtgagagccagatggggcaggggacacggcccagccctacaccagtcacgccgaggccaccacggtccctgaccctgggcatcgagccggtgagccccacctccctgcgcgtggggctgcagcgctacctccaggggagctccgtgcagctcaggagcctccgtctcacctatcgcaacctatcgggccctgataagcggctggtgacgctgcgactgcctgcctcgctcgctgagtacacggtcacccagctgcggcccaacgccacttactccgtctgtgtcatgcctttggggcccgggcgggtgccggagggcgaggaggcctgcggggaggcccatacacccccagccgtccactccaaccacgccccagtcacccaggcccgcgagggcaacctgccgctcctcattgcgcccgccctggccgcggtgctcctggccgcgctggctgcggtgggggcagcctactgtgtgcggcgggggcgggccatggcagcagcggctcaggacaaagggcaggtggggccaggggctgggcccctggaactggagggagtgaaggtccccttggagccaggcccgaaggcaacagagggcggtggagaggccctgcccagcgggtctgagtgtgaggtgccactcatgggcttcccagggcctggcctccagtcacccctccacgcaaagccctacatctaa

SEQ ID NO: 22908 - DNA, 698 bp, Homo sapiens
  MAP TO AL049564.10; EXPRESSED IN LUNG, SIGNAL = 1.1; EXPRESSED IN BONE MARROW, SIGNAL = 0.97; EST_HUMAN HIT: BE385804.1, EVALUE 6.30e-02; SWISSPROT HIT: P10275, EVALUE 1.00e-74; NT HIT: gi14761773, EVALUE 0.00e+00
gccttacacaactccttggcgttgtcagaaatggtcgaagtgccccctaagtaattgtccttggaggaagtgggagcccccgaggcctccctcgctctcccgctgctgctgccttcggatactgcttcctgctgctgttgctgaaggagttgcatggtgctggcctcgctcaggatgtctttaaggtcagcggagcagctgcttaagccggggaaagtggggcccagcagggacaacgtggatggggcagctgagtcatcctcgtccggaggtgctggcagctgctgcggcagccccttgctggcggccacggcggctccaggctctgggacgcaacctctctcggggtggcactccagggccgactgcggctgtgaaggttgctgttcctcatccaggaccaggtagcctgtggggcctctacgatgggcttggggagaaccatcctcaccctgctgctgctgctgctgcctggggctagtctcttgctgctgctgctgctgctgctgctgctgctgctgctgctgctgctgctgctgctgctgctgctgctgcagcagcagcaaactggcgccgggaggtgctgcgctcgcggcctctgggtgcctggggcccgggttctggatcacttcgcgcacgctctggaacagattctggaaagctcctcggtaggtcttggacggcggccgagggtagac

SEQ ID NO: 22909 - DNA, 638 bp, Homo sapiens
  MAP TO AL050343.17; EXPRESSED IN PLACENTA, SIGNAL = 1.5; EXPRESSED IN HELA, SIGNAL = 0.61; EXPRESSED IN BONE MARROW, SIGNAL =   1; EST_HUMAN HIT: BG993572.1, EVALUE 2.30e-01; SWISSPROT HIT: Q25434, EVALUE 3.00e-15; NT HIT: AF253322.1, EVALUE 1.00e-02
tagttgatatttcggaaatgtgtctgaatataggagatacttgggaaatgtgtctgaacgtagttgatacttcggaaatgtgtctgaacctaggagatacttgggaaatgtgtctgaacataggagatacttgggaaatgtgtctgaacgtaggagatacttgggaaatgtgtctgaacctaggagatacttgggaaatgtgtctgaatgtagcagatacttgggaaatgtatctgaacttaggagatacttgggaaatgtgtctgaacctaggagatacttgggaaatgtatctgaacataggagatatttgggaaatgtatctgaacgtaggagatacttgggaaatgtgtctgaacgtagcagatacttgggaaatgtgtctgaacctaggagatacttgggaaatgtgtctgaacatagcagatacttgggaaatgtgtctgaacgtaggagatacttgggaaatgtatctgaacgtaggagatacttgggaaatgtgtctgaacgtagcggatacttgggaaatgtgtctgaacctaggagatacttgggaaatgtgtctgaacgtaggagatacttgggaaatgttggtgcatttcttctttcttttcctacgtaactgtaaaatccaaact

SEQ ID NO: 22910 - DNA, 695 bp, Homo sapiens
  MAP TO AL031983.1; EXPRESSED IN HELA, SIGNAL = 1.5; EXPRESSED IN BONE MARROW, SIGNAL = 0.76; NT HIT: AF314088.1, EVALUE 5.00e-45; EST_HUMAN HIT: AV693686.1, EVALUE 0.00e+00; SWISSPROT HIT: O95918, EVALUE 2.00e-47
ggaggccaggatgacggcaaacggcagcagcaggatgaccacgcgggcggcgaacatctggttctcggtagtgtctccgtcgcctccgcaggccagcttgagcaacgccggcagctcacagatgaagtggtccagcaggcggggcgcgcacagcggccgctcagccaggagcgcggtttgcgcaaccgagttggtgaggccacttagccaggaggcgctggccagcgtgcgacataggcgcggggagacgagccccgcatagcgcagcgggcggcacactgcggccgcgcggtccagagccatcaccgccaggaggacgcattcggcggaacccagagccagcgatgcgcacagctgggccgtgcagtggctgcgcggcagccagagcgctggtccgcgcaggttggccagcagcggcggcaccacgctagtagtgaagcccgcgtctaccaaggccaggtggcagaggaagtagtacatgggcgtgtgcaggcgcgggtcgcgcaccgccagcagcaccagcgccgagttgcccgtcaaggtcaggaggtagcacaggaggacaagggcgaagaggaccggctgcagggaaggccagtcggagaaacccagcaggagaaagcgctcctctgcgctgtagttggcctaaaggaggaaaactcccagaatgtttggaaggtcgaaataaaaaaggg

SEQ ID NO: 22911 - DNA, 666 bp, Homo sapiens
  MAP TO AC008174.2; EXPRESSED IN HELA, SIGNAL = 1.7; EXPRESSED IN BONE MARROW, SIGNAL = 1.1; EXPRESSED IN LUNG, SIGNAL = 1.1; SWISSPROT HIT: P37609, EVALUE 3.00e+00
atttttcattttccttgtcatttgattctgtttgccacttgtcaaacaattttttaaatataccttctctaggaaaaatgtgctctagctgtgaagaaacattctccaagtaaaaacatgcttgttgtttaggaagggatcctgtgcctatattcccctgtgaaagtctgagatgtgaggatttcatcgggtaagccaaattgcagttattggtaacatataattcttgcaaaactgtattaactattttacctgctgctatgatttgatcagatggtaaagctttggtttgctttacctttccaaattccttcacaattgtttctaggatgttaattattatatccttggcatatatttttagttctgaagtgggcaattttgtgtccagtaaatttttggcatctccagctgacatgatgtgtgacaacccaatggcagtcttggatctgctgtcttttagggtcttctctccaggacctaacttggttttgcttttggccttagcagcactcagtcctaagtgtgttttttttgtaaatttaggcaaagtggtaatttttgatcttgtttttaaatgtgctttaaagcatggcttagggttgtccttagggctcacctttaaaggaagtgagacaaaatttgtgatcttattgagaaccattt

SEQ ID NO: 22912 - DNA, 586 bp, Homo sapiens
  MAP TO U82670.2; EXPRESSED IN BRAIN, SIGNAL =   1; EXPRESSED IN BONE MARROW, SIGNAL = 0.98; NT HIT: AF157613.2, EVALUE 8.70e+00; SWISSPROT HIT: Q04584, EVALUE 4.40e-02; EST_HUMAN HIT: R53167.1, EVALUE 5.30e-02
gacttcaccaaaaacgaagcctgaaaaggcgatttctctagaagttcaaatcctcgcagtagatgaaaaaatcaaggtgaaaagcacagacgtgaagaccccaactaagtttgagatggaagacattgccgcctctgcagcagcacagacgaagctcggtgccccactcagagagaagatggggtacagaggaacccttcgggtggccctggagattctgaaagagagaacaaatctgggtggaggaaggaaaccacatgaactagagagcaccacaccctctcagctttctcaaaaggtgcccgaaaagccagccagttctgtccctcgtgaagatgactggagatgcaaaggcgacctaaggaggagtcttgggaagagggaaaacccaagctcaccgacggtcccttcagagagtaagcgtgccctgcgggatgacaggtcgcaggagcccacagccattgcccctactccaggcgccctgcccggggacaggtcaggggcgcccagggccattgcccctactccaggagccatgctcagtggcaggtcacgggcacgcagggccattgcccctacaccaagc

SEQ ID NO: 22913 - DNA, 639 bp, Homo sapiens
  MAP TO AC010609.5; EXPRESSED IN HEART, SIGNAL = 1.5; EXPRESSED IN BONE MARROW, SIGNAL = 1.3; EXPRESSED IN FETAL LIVER, SIGNAL = 1.2; EXPRESSED IN LUNG, SIGNAL = 1.1; EXPRESSED IN BRAIN, SIGNAL = 1.3; EXPRESSED IN HELA, SIGNAL =   1; EST_HUMAN HIT: BI828953.1, EVALUE 0.00e+00; SWISSPROT HIT: P33057, EVALUE 6.40e+00; NT HIT: gi9790166, EVALUE 6.10e-01
atgggggacctgcaacgacaattgtacaacagaggagagtacaacattttcaagtatgcaccaatgttcgagagtaattttattcagataaacaaaaagggagaggtgattgatgtacacaaccgtgtccgaatggtgacagtgggcatcgtctgcaccagccccatcctcccactgcctgacgtcatggttctggcccaaccaactaaaatctgtgaacagcatgtcagatggggccggtttgccaaggggagaggtcgcaggcccgtcaagactctagagctcacgagactgcttcccttgaaatttgtgaagatctccatccacgatcatgagaaacagcagctgcgcctgaaactcgccactggccgtactttttatctgcagttgtgtccctcttctgacacacgggaagatctcttttgctattgggaaaaacttgtctatctcctgaggccaccagtagagagttactgcagtaccccaacacttctatctggggacgcaccacccgaagacaacaaaagcctagtggtaagcctctcaaaggctcgagaacatggggcaggttctttgggggagcagttcaaagccagtcctacaaagcctttggtgccttctgaggcccacctggaaaaa

SEQ ID NO: 22914 - DNA, 544 bp, Homo sapiens
  MAP TO AC035144.2; EXPRESSED IN HELA, SIGNAL = 2.3; EXPRESSED IN BRAIN, SIGNAL = 1.8; EXPRESSED IN BONE MARROW, SIGNAL = 4.4; EXPRESSED IN FETAL LIVER, SIGNAL = 2.6; EXPRESSED IN HEART, SIGNAL = 2.4; EST_HUMAN HIT: AL549492.1, EVALUE 0.00e+00; SWISSPROT HIT: P31390, EVALUE 2.60e-01; NT HIT: gi7657123, EVALUE 0.00e+00
tggccacagatgtctttaattccaaaaacctggccgttcaggcacaaaagaagatcttgggtaaaatggtgtccaaatccatcgccaccaccttaatagacgacacaagtagtgaggtgctggatgagctctacagagtgaccagggagtacacccaaaacaagaaggaggcagagaagatcatcaagaacctcatcaagacagtcatcaagctggccattctttataggaataatcagtttaatcaagatgagctagcattgatggagaaatttaagaagaaagttcatcagcttgctatgaccgtggtcagtttccatcaggtggattatacctttgaccggaatgtgttatccaggctgttaaatgaatgcagagagatgctgcaccaaatcattcagcgccacctcactgccaagtcacatggacgggttaataatgtgtttgatcatttttcagattgtgaatttttggctgccttgtataatccttttgggaattttaaaccccacttacaaaaactatgtgatggtatcaacaaaat

SEQ ID NO: 22915 - DNA, 1320 bp, Homo sapiens
  MAP TO AC011718.2; EXPRESSED IN PLACENTA, SIGNAL = 1.9; EXPRESSED IN BRAIN, SIGNAL = 2.6; EXPRESSED IN LUNG, SIGNAL = 2.1; EXPRESSED IN HEART, SIGNAL = 2.7; EXPRESSED IN BONE MARROW, SIGNAL = 2.1; EST_HUMAN HIT: BE531263.1, EVALUE 0.00e+00; SWISSPROT HIT: Q15059, EVALUE 1.30e-02; NT HIT: gi11427757, EVALUE 0.00e+00
ctatgcttccttttgcagccaggagtgggtccagtgttttagagagaggggccttggggctgccggtctggctgctgaggccaggtggtgaaagtgggccctgggcagcctgagggcagctctcacctctggccagcaaacttctagactgcaccttgagggccaaaaacgtccagatttcctgctcaatgctgtcgtcgctgtccacggagctactgtcaccatcagagcgggaaggcacgttgggggagtagaagagtgggcttgcggacagggacccatcgctgccctccatagggccggcaggatcgtcttgaaaatgtccaggactgcttctacacacatcagctcagcggaggtgtctgcctggcaagaggaccattccacaaacttgctcctggaagccgggctcgttggaggtggagctttggtttcctttgggatcttgggggaatggtcagcgtccagatcccctggaccagggtccgtggtcttggtgggcactggcttcttcttgctgggtgttttcctgtgggtctctggcaaggcactttttgtggcgctgcttgtgctgtgtgcgggaggggcaggtgctctttcctcttggagctggaccctctggggcgggtccccgtcggcctccttgtgtgttttctgcacctggtacagctggatggcctcctcaatgccgtcgtcgctgctggagtcggacgcctcgggagcctgtacggcgctcgtgactcgctttcccctccttgcggtgctggcgctccttttaatcccacttttattctgtactgcttctgaagggcggtgggggttgctggctttgtgctgccctccttctcctgcgtggtcgtggtcgtgaccttggacctgaggcttctgggctgcacgtttgtctttgctaaccgggggaggtctgcagaaggcgaactccttctggacgcccatcaggccctgccggtgcaccacctttgtagccggctcttggtgggatttcgagagtgacttcgccgaattttcatgtgtgtctggtttcttctccactgacccatcacatttttgggtctcatgctgtcttttctcattcagaaactgttctatttctgccctgatgctctgctcaaaggagtctgctctgctcatgctgactggggaggcagagccctggtccttgctggatcccacctggctgccagggccacaccacctgagccaggtacaagttttggggaacacagggcagttgggcactgctgtgagccagttcccgcttacatctactgcctccgcccgcagccctggaaggctgtgcat

SEQ ID NO: 22916 - DNA, 1545 bp, Homo sapiens
  MAP TO AC022150.5; EXPRESSED IN PLACENTA, SIGNAL = 1.5; EXPRESSED IN BONE MARROW, SIGNAL = 0.91; NT HIT: gi8922743, EVALUE 0.00e+00; SWISSPROT HIT: P51522, EVALUE 0.00e+00; EST_HUMAN HIT: BI761488.1, EVALUE 0.00e+00
atatctcttccaaacgcatgatgaaggaggtcttgtcaacagggcaaggcaatacagaagtgatccacacagggatgttgcaaagacatgaaagttatcacactggagatttttgcttccaggaaattgaaaaagatattcatgactttgagtttcagtcacaaaaagatgaaagaaatggccatgaagcatccatgccaaaaatcaaagagttgatgggtagcacagaccgacatgatcaaaggcatgctggaaacaagcctattaaagatcagcttggattaagctttcatttgcatcttcctgaactccacatatttcagcccgaagagaaaattgctaatcaagtggagaagtctgtcaacgatgcttcctcaatttcaacatcccaaagaatttcttgtaggcctgaaacacatactcctaataactatgggaataattttttccattcatcattactcacacaaaaacaggaagtacacatgagagaaaaatctttccaatgtaatgagactggcgaagcctttaattgtagctcatttgtaaggaaacatcagataatccatttaggagaaaaacaatataaatttgatatatgtggcaaagtctttaatgagaagcgataccttgcacgccatcgtagatgtcacactagtgagaaaccttacaagtgtaatgaatgtggaaagtccttcagttacaagtcatccctgacatgccatcgtagatgtcacactggtgagaaaccttacaagtgtaatgaatgtggaaagtccttcagttacaagtcatcccttacatgccatcataggtgtcacactggtgagaaaccttacaagtgtaatgaatgtggaaagtccttcagttacaagtcatcccttagatgccatcgtagacttcatactggaataaaaccttacaagtgtaatgagtgtggcaagatgtttggtcaaaattcaacccttgtaattcataaggcaattcatactggagagaaaccttacaagtgtaatgaatgtggcaaggcttttaatcaacaatcacacctttcacgtcatcatagacttcatactggagagaaaccttacaagtgtaatgactgtggtaaggcttttattcatcagtcaagccttgcacgtcatcatagacttcatactggagagaaatcttacaaatgtgaagaatgtgacagagttttcagtcagaaatcaaaccttgagagacacaagataattcatactggagagaaaccttacaagtgtaatgagtgtcacaagaccttcagtcacaggtcatctcttccatgccatcgtagacttcatagtggtgagaaaccttacaagtgtaatgaatgtgggaagacttttaatgtacagtcacacctttcacgtcatcatagacttcatactggagagaaaccttacaaatgtaaggtttgtgacaaggctttcatgtgccattcttatctggcaaaccatactagaattcatagcggagagaaaccttacaagtgtaatgagtgtggtaaggctcacaatcact

SEQ ID NO: 22917 - DNA, 1105 bp, Homo sapiens
  MAP TO AC005609.1; EXPRESSED IN BRAIN, SIGNAL =   1; EXPRESSED IN HELA, SIGNAL = 0.3; EXPRESSED IN BONE MARROW, SIGNAL = 0.74; EST_HUMAN HIT: BI465306.1, EVALUE 4.00e-81; NT HIT: gi14861872, EVALUE 0.00e+00; SWISSPROT HIT: Q9UN75, EVALUE 0.00e+00
ttcactgggaggatttaaacaatcttctcgagacagctgaaggcttgggctgaaggccatgaggtccgtcttgggcgggctctctgcagagcacaccctctgcctcctctgctgcgagtaagaccaactccccacggcgctggagcacaccagcgtgggcttgcccggcgcgcaccggctcacggtgggcggcgctgagcaacgcagcgcagtgtacagcagcagcgtgagcaccagcaggctggacaccgcacagatggcgatgatgaggtacacgttaatatccaccagagccgcttcgggatccacagcgcccactgaggcccgcgacgacgtctttggggcctggccgttctccaccagcgacaccagcaccgtggccgtggacgtcagcgcgggctcaccgtggtccttcaccagcaccagcaggcggtggcgcggagcgtccgcctcatccaggatgcgtgtcgtgctgatctcgccagtgtacagccccacgtggaacgggatgtgcgcgccgaccgccgccggttgcaactcgtaggacagccaagcgttatagccggagtcagcgtccaccgcgcgcactttcgccaccacgtggcccgcacccaccgaccgcggtaccaactcgctaactgcgcctcctgcgctgccagccggagtcgccagcagtgccggcgcgttgtcgttctcgtccagcacgaacacctgcagcgtcacgttgctgcccagaggcggcacgccggcgtcgcgcgcgctcacctggaactgcagcagctccagctcctcgtggtctagcggctgcagcgcgtacaccttgccgctctccgcgtgcaccgacacgtagctcgacagtgcgtgctcgcccacccgccgctccaccagcgagtaggacaccagcgcgttcttctgcgcgtccgcgtcccatgccgacaccgtgaagatgtggcagcccggcgggttgttctccttcacgaacactgtgtactcgggctgcgcgaacgcaggcgcattgtcgttcacgtcggccacctccacggacactctagccgtggcccacagcgaaggcgagcccccatcccgcgcagtcaccaccagctca

SEQ ID NO: 22918 - DNA, 5059 bp, Homo sapiens
  MAP TO AC027307.3; EXPRESSED IN BONE MARROW, SIGNAL = 0.85; EXPRESSED IN HELA, SIGNAL = 0.84; EXPRESSED IN BRAIN, SIGNAL = 4.8; EST_HUMAN HIT: BI554178.1, EVALUE 0.00e+00; NT HIT: gi14769630, EVALUE 0.00e+00; SWISSPROT HIT: Q61315, EVALUE 1.00e-46
gcaggtgctccgggatcacaactgtctgcagacgctgctgcagcatctgacttcgcacagcctgaccatcgtgagcaacgcgtgcggcacgctctggaacctgtcggcccgcagcgcccgtgaccaggagctgctgtgggacctgggcgccgtgggcatgctgcgtaatctggtgcactccaagcacaagatgatcgccatgggcagcgccgccgccctgcgcaacctgctggcccatcggcccgccaagcaccaggcggccgccaccgccgtgtccccaggcagctgcgtgcccagcctgtacgtgcgcaagcagcgggcgctggaggccgagctggacgcacggcacctcgcgcaggcgctggagcacctggagaagcagggcccgccggcagccgaggccgccactaagaagccgctgccgcccctgcgacacctggacggcctggcccaagactatgcttccgattcgggctgctttgacgacgacgatgcaccgtcatccctggctgcggccgcggccaccggggagccagccagccctgccgcgctgtccctcttcctgggcagccccttcctgcaggggcaggcgctggctcgcaccccgcccacccgccgaggcggcaaggaggcagagaaggacaccagtggggaggcagccgtggcggccaaggccaaggccaagctggcgcttgcagtggcgcgcatcgaccagctggtggaggacatctccgccctgcacacctcgtccgacgatagcttcagcctcagctctggagacccgggacaggaggcgccacgggagggccgcgcccagtcctgctcgccatgccgcggcccggagggcgggcggcgagaggcaggaagccgggcgcacccgctgctgcggctcaaggcggcccacgccagcctctccaacgacagcctcaacagcggcagtgccagcgacgggtactgcccacgcgaacatatgctgccctgcccgctggccgcactggcttcgcgccgcgaggaccccaggtgtgggcagcctcggcccagccggcttgaccttgacctgcccggctgccaggccgagcccccggcccgcgaggccacctccgccgacgcccgcgtgcgcaccatcaagctgtcgcctacctatcagcacgtgccactgcttgagggtgcctcaagggcgggtgcagagcccctcgcggggcctggaatctctccaggggcccggaagcaggcctggctgccggcagaccacctgagcaaggttcccgagaagctggcggctgccccgctgtctgtggccagcaaggcactgcagaaactggcggcgcaagaggggccactctcgctgtcccgatgcagctccctttcctcgctgtcctcggccggccgcccaggccccagcgagggtggtgacctggatgacagtgactcctccctggaggggctggaggaggccggccccagcgaggctgagctggacagcacgtggcgggcgcccggggccacctcgctgcccgtagccattccggctccccggcgtaaccgaggccggggcctgggggtggaagacgccacgccgtccagctcgtcggagaactacgtgcaggagacaccgcttgtgctgagccgctgcagctctgtgagctcgctgggcagcttcgagagcccgtccatcgccagctccatccccagtgaaccttgcagcgggcagggcagcggcaccatcagccctagcgagctgcccgacagccccggacagaccatgcctcccagccggagcaagacgccaccgctggcgcccgcgccacagggtccccccgaggccacccagttcagcctgcagtgggagagctacgtgaagcgcttcctggacatcgccgactgccgggagcgctgccggctgccatctgagctggacgcaggcagcgtgcgctttaccgtggagaagccagacgagaacttctcgtgcgcctccagcctcagcgcgctggccttgcacgagcactacgtgcagcaggacgtggagctgcggctgctgccctcggcctgccccgagcgcggcgggggcgccgggggcgccggcctccactttgcagggcaccggcggcgggaggaggggccggcgcccacgggttctcgccctcgcggcgccgcggaccaggagctggaactgctgcgggagtgcctgggagccgccgtgcctgcccggctgcgcaaggtggcctccgcgctggtgccaggtcgccgcgcactccccgtgcccgtctacatgttggtgcccgccccggccccggcccaggaggacgactcctgcactgactccgcggagggcacgccggtcaacttctctagcgccgcctcgctcagcgacgagacgctgcagggaccccccagggaccagcccgggggaccagcgggcaggcaaagacccaccggccgccccacctctgccagacaggccatggggcaccggcacaaggcgggaggcgccggccgcagcgcggagcagtctcggggcgcgggcaagaacagagcagggctggagctgcccctgggccggcccccgagcgcccccgcagacaaggacggctcaaagcccggccggacccgcggggacggggcgctccagtcgctgtgcctcacgacgcccactgaggaggccgtgtactgcttctacggcaacgactcggacgaggagcccccggcggccgcgcccacgccaacccaccggcgcacatcggccatccctcgcgcttttacgcgggagcgtccgcagggccggaaggaggcccctgccccgtccaaggctgcaccagctgccccgccgcccgcccggacccagcccagcctcattgctgacgagaccccgccctgctactccctgagctcctccgccagctccctcagcgagcccgagccctcggagccgccggccgtccatccacgaggccgggagcccgcggtcaccaaggacccgggcccaggaggcggacgcgacagctcgcccagcccgcgggccgcggaggagcttctgcagcggtgcatcagctcggccctgcccaggcgccggccccccgtgtctggcctgcggcgccgcaagccccgagccacccggctggatgagcggcccgcagaggggtcccgggaacgcggcgaggaggcagcgggctcggaccgggcctccgacctggatagcgtggagtggcgcgccatccaggagggcgccaattcaattgtcacgtggctgcaccaggcagcagctgccacgcgggaggcctcgtccgagtccgactccatcctgtccttcgtatccgggctgtcagtgggatccaccctacagccccccaagcacaggaagggacgacaggcggagggagaaatgggcagtgcccggcggccagagaaaaggggcgcagcctcagtcaagaccagcgggagcccccgttcccctgcaggccccgagaagccacgtggcacacagaagaccacgcccggggtgccagctgtgctccggggacgaacagtgatctacgtccccagcccggcaccccgtgcccagcccaaagggacccccggcccccgcgccacaccgcggaaggtggcgcccccttgcctggcacagcccgcggctccagccaaagtcccgagccccgggcagcagcggtcgcggagcctacaccggcctgccaagacctcggagctggcgacgctgagccagccccccagaagcgccacaccgcccgcccgcctcgccaagaccccctcctccagctcctcccagacctcgcccgcctcccagcccctgcccagaaagcgccccccggtcacccaggctgctggggccctgcccggccccggagcctccccggtgcccaaaacgccggcgcgcacccttctggcgaagcagcacaagacgcagagatcgcccgtgcggatcccgttcatgcagaggccggcccggcgtgggccgccaccgctggctcgggcagtcccggagccgggccccaggggccgggcggggaccgaggcgggcccgggggcgcgcgggggccgcctgggcctggtgcgtgtggcctcagccctctccagcggcagcgagtcctccgaccgctcgggcttccggcgacagctaaccttcatcaaggagtcgccgggcttgcggcgccgccgctccgagctgtcctcggccgagtccgcggcctctgccccccagggcgcctcgccccgccgcggccggcccgcgctgcccgccgtcttcctctgctcctcgcgctgcgaagagctccgagcggcaccccggcagggcccggccccggcccggcagcggccccccgcggcccgacccagccctggcgagcgccctgcccggcgcaccacctccgagagcccgtcccgcctgcctgtgcgcgcgcccgccgcccggccggagactgtcaagcgctacgcgtcgctgccgcacatcagcgtggcccgcaggcccgacggcgccgtccccgcggcccctgcctcagccgacgccgcgcgccgcagcagcgacggggagccccggccgctccccagggtggccgcgccgggcacgacctggcggcgcatccgagatgaggacgtgccccacatcctgcgcagcacgcttcccgccacggccctgccactgcggggctccacgcccgaggacgccccggccgggcccccgccgcgcaagaccagcgacgccgtggtccagaccgaggaggtcgccgcccccaagaccaactccagcacgtccccgagcctggagaccagggagccccccggggcccccgccggcggccagctctccctcctcggcagcgacgtggacggtcccagcctcgccaaggctcccatctccgcacccttcgtgcacgagggcctgggggtcgccgtggggggcttccccgccagccggcacggctcccccagccgctcggcccgagtaccccccttcaactatgtgcccagccccatggtggtcgcagccaccaccgactcggccgcggagaaagccccggccactgcctccgccaccctcctggaatag

SEQ ID NO: 22919 - DNA, 500 bp, Homo sapiens
  MAP TO AC000074.2; EXPRESSED IN PLACENTA, SIGNAL =   2; EXPRESSED IN HELA, SIGNAL = 0.56; EXPRESSED IN BRAIN, SIGNAL = 1.7; EXPRESSED IN HEART, SIGNAL = 2.3; EXPRESSED IN BONE MARROW, SIGNAL =   1; EST_HUMAN HIT: BF513464.1, EVALUE 0.00e+00; NT HIT: gi4502246, EVALUE 0.00e+00; SWISSPROT HIT: O00192, EVALUE 8.00e-93
cagtgacaagctcacggacctcgttgtcccgggcagccctcagcaggcgcaccagggcaggcacaccaccgcagtcccggatggcggccttgttgtcagtgtcgcggccataggagaggttgcgcagtgccccacaggcccggcgccgcacctcagcccgcgggtggtccagcagtgccacaagcagcggcagcccccgcaactgccgtacacgccgcttgacaccctcgttctcaaagcacagatgctgcaggtaggcggccgcattggccttcacggggtccacggggtgccgcagcatggccagcacctcaggcagctcagggtcccgccagcgcggctccttgcgggcgctatccactgagggcgagcgccgcaccagccggtccaggctgcccatgctgccccgttcaggctgggccaggggcgccgtcaccattgggaacgcaggccgctcgtccgccagctcgccgccatcatctgctgtgtcctcgtaggcc

SEQ ID NO: 22920 - DNA, 555 bp, Homo sapiens
  MAP TO AC022845.2; EXPRESSED IN BRAIN, SIGNAL = 1.1; EXPRESSED IN HELA, SIGNAL = 1.8; EXPRESSED IN BONE MARROW, SIGNAL = 1.1; EXPRESSED IN LUNG, SIGNAL = 1.2; EST_HUMAN HIT: BI826468.1, EVALUE 0.00e+00; NT HIT: gi14772416, EVALUE 8.30e+00; SWISSPROT HIT: P08799, EVALUE 1.10e-02
agcacacctctccttcagcgtttctagctccccagtgagggcctcacaccggactgtgagctgtaatactttcgcctcctcatccttcagagcctggctgaagaggctgctattctccagcctcagcttctcattctcctccctcagcttgatgttctcactcttgtattcatccttgaagcggagcatcaactcgtggttggctgctagggtcataaagcgttcctctagtttccgactgtactcaccctgggccttgagcttctcagcctcctgcatcatcttctcctccagctctgcattgagcagctctaggatctggcagcgctccagggcctcatctgacctccgcttcaggatgcagatgagctgggactgctcttcaatgcgggagcgaagcatagccttctcgctcctctcctcctctgacagtccccggaggtttgccaaggcttccctcagaccgtccagttccttaaactccgtctcctcttcctggttgttcagtttttcattttgcttctctaagcgttcttcagggggcggggtgtccat

SEQ ID NO: 22921 - DNA, 597 bp, Homo sapiens
  MAP TO AL049853.1; EXPRESSED IN PLACENTA, SIGNAL = 3.9; EXPRESSED IN HEART, SIGNAL = 3.2; EXPRESSED IN BONE MARROW, SIGNAL = 2.6; EXPRESSED IN FETAL LIVER, SIGNAL = 1.9; SWISSPROT HIT: P23206, EVALUE 2.00e-08
atgccctcacctgccgccctgggctggctgggaccaccccaatgccctcacctgccgccctgggctggctgggaccaccccaatgccctcacctgctgccccgggctgcctgggaccaccccaatgccctcacctgccgccctgggctgggaccaccccaatgccctcacctgccgccctgggctggctgggaccaccccaatgccctcacctgccgccctgggctggctgggaccaccccaatgccctcacctgccgccccgggctggctgggaccaccccaatgccctcacctgccgccctgggctggctgggaccaccccaatgccctcacctgctgccctgggcttgggaccaccccaatgccctcacctgccgccctgggctggctgggaccaccccaatgccctcacctgccgccctgggctggctgggaccaccccaatgccctcacctgccgccctgggctggctgggaccaccccaatgccctcacctggagcagacaagacaggagttctggggccccccaggaaaagtaccacagactggagctccccagacagcatggggactggcatggcatgcccccgctcag

SEQ ID NO: 22922 - DNA, 889 bp, Homo sapiens
  MAP TO AF176681.1; EXPRESSED IN HELA, SIGNAL = 0.67; EXPRESSED IN BONE MARROW, SIGNAL = 0.81; EST_HUMAN HIT: AL560788.1, EVALUE 0.00e+00; NT HIT: gi15299827, EVALUE 0.00e+00; SWISSPROT HIT: P17027, EVALUE 4.00e-59
ttctatttattgtttcagattgtgacaccaggactgaagacaaggagtttcttcacaaggaagacattcatgaagatttggaatcacaggcagaaatatcagaaaactatgctggtgatgtttcccaggtacccgagcttggagatctgtgtgatgatgtatcagaaagagactggggagtccccgaaggcaggaggctgccacagtccctctcccaggagggggacttcacaccagctgccatggggctccttaggggccccttaggggagaaagatatggactgtaatggttttgacagtcgcttcagtctgagcccaaacctgatggcatgtcaggaaatccctacagaagagaggccacatccatatgacatgggtggccagagtttccagcacagtgtggacctaactggtcatgagggggttcccacagctgaaagtccactcatatgtaatgagtgtgggaaaaccttccaaggaaatcctgaccttattcagcgtcaaatagtccacactggggaggcttcctttatgtgtgatgattgtgggaaaaccttcagccagaactcagttcttaaaaaccgtcatcgatctcatatgagtgagaaagcttaccagtgcagcgaatgtgggaaagccttccgagggcactcagacttttctaggcatcagagtcaccacagcagtgagaggccttatatgtgtaatgaatgtggaaaagccttcagccagaactcgagccttaaaaagcaccaaaagtctcacatgagtgagaagccctatgaatgcaatgaatgtgggaaggcttttaggcggagctcaaacctcatccaacatcaaagaatccattctggggagaaaccgtatgtgtgcagtgagtgtgggaa

SEQ ID NO: 22923 - DNA, 566 bp, Homo sapiens
  MAP TO AC007281.3; EXPRESSED IN BONE MARROW, SIGNAL = 0.83; EXPRESSED IN HELA, SIGNAL = 2.1; SWISSPROT HIT: Q55429, EVALUE 9.30e+00; EST_HUMAN HIT: BE144149.1, EVALUE 3.00e-03; NT HIT: AF129756.1, EVALUE 8.40e+00
attcggtcctcacaaaaaccctaagaggtagaagacactaacatcttctgtgttttaagagtgaggtccctgagccttggtaacattgtagtcaagctttgctagacatcaaagcctatgttcacaatgagaaactactgattttccctgtcagatccatgagagtcaacaggactgcccctggcctctgcctaacaccattttctcccccttcttacctaaagtccaccctatttctgaagctgtaatgtatatttgaaaggcaacaatgaagggatttaacttgagcaatttgcttctactttatcaaaatcttaacccctacactgaaaggaaaatgtgagcctgtactaaatctagactttcctgtgaacacctgaaatgaatgcacacagggatcattccaggggctgggccagggaccaccaatatcatactaagaaatccttgaaccttaggcattattttgctagaaaagatcccttctagtttttgtccccatgtagcaaaacctttctgaaagtaagagagacagcctcttaggtaccccgagtcagaaaatgaaa

SEQ ID NO: 22924 - DNA, 594 bp, Homo sapiens
  MAP TO AC003006.1; EXPRESSED IN HELA, SIGNAL = 1.6; EXPRESSED IN BONE MARROW, SIGNAL = 1.1; NT HIT: gi14766426, EVALUE 0.00e+00; SWISSPROT HIT: Q13398, EVALUE 5.00e-57; EST_HUMAN HIT: BE905098.1, EVALUE 0.00e+00
gttgttggcatggaggggaagatgaggcagcaccttctaagcagagcacgtgtatacatatatacaaagaccagggaggtcatagtggagaaaggccttatgagtgtggggaatataggaaattatttaagaacaagtcctgcctcactgaacccagaagagatcacaaacacaggaatgttcgcactggagaaaggccttatgagtgcagcaaatatgggaaattatttcaccaaaagcctacactccatattcatgagagatttcatactgggcaaaagacctatgagtgcagtgagtgtggaaaatcatttcaccaaagctcttcactcttgcagcgtcagacacttcacactagagaaaggccttatgagtgtattgaatgtgggaaagcctttgctgaaaagtccagtctcattaaccacaggaaagttcactctggagcaaagcgttatgaatgcaatgaatgtgggaagtcctttgcttatacatctagtctcattaaacacaggaggattcacactggagagaggccttatgagtgcagtgaatgtgggagatcctttgctgaaaactccagtcttattaaacact

SEQ ID NO: 22925 - DNA, 656 bp, Homo sapiens
  MAP TO AL160236.1; EXPRESSED IN BONE MARROW, SIGNAL = 0.8; EXPRESSED IN HELA, SIGNAL =   2; EST_HUMAN HIT: BG702371.1, EVALUE 0.00e+00; NT HIT: gi14752838, EVALUE 0.00e+00; SWISSPROT HIT: P38793, EVALUE 3.00e-08
gatcttatggaggccatttggattctcaggaagatttctgaaactggaaagccatagcataactgaatcaaaatcgttgattccagtagcttggacatccctgacacagatgcttttggaagcacctggtattttcttattgggtcaaagaaaaagattctcaaccatgccagaaacagaaacacatgagagagagactgaattgttttcaccaccttctgatgtccgaggcatgacaaaacttgatagaacagcttttaaaaagacagtcaacattccagtgcttaaagtgaggaaagaaatagtcagtaaattgatgcgatccctaaaaagggcagcattgcagcgcccaggcataagacgtgtgattgaagatccggaagataaagaaagtagactaatcatgttggatccctataaaatatttactcatgattcctttgagaaagcagaactcagtgttttagagcagcttaatgtcagtccacagatctctaaatacaatttggaactaacatatgaacactttaagtcagaagaaatcttgagagctgtgcttcctgaaggtcaagatgtaacttcagggtttagcaggattggacatattgcacacctaaaccttcgagatcatcagctgtctttcaaacatttaattg

SEQ ID NO: 22926 - DNA, 842 bp, Homo sapiens
  MAP TO AL139423.2; EXPRESSED IN HELA, SIGNAL = 1.1; EXPRESSED IN BONE MARROW, SIGNAL = 0.92; EXPRESSED IN LUNG, SIGNAL =   1; EST_HUMAN HIT: BE735485.1, EVALUE 0.00e+00; NT HIT: gi16157341, EVALUE 0.00e+00; SWISSPROT HIT: P08153, EVALUE 2.70e-01
ctgggtcaaaggtggcagagggcttgagggcagctgcagccagcctggccatcatgggcgagatgaggcccttgcttgcagagatcctctccatgatggaggcgggtggtgccgggacagaggcggcagccacgggggctgagtctccagctcccgaggcgaccagcgtgggtgtgtcaggggtggctgaggctgctgacccagacgacacggcacccaggaggctgggggtgcccacaggcagggaggtgctcccacggccagccagtatggggaagtagggcgtgggggtgggcaggcccgagttggagagggccagggccagggggattgagccaggcaggccctggggcagcagccccgagatcttgctgttgggaggtttggtggcactgggcccagcctcggtggcggcagtggcggcagccagggacgcagaggactgctggctggtaggggaggcgctcaggctggagttcttgctgctcagggcggagaagtcaacaaggtcgtcgttgctggactcctcgtgctccgtgtccttggcgcccagcagcgagggcggcagccccagcgcgcccgaggagcggatgtgccggcgctcatgcttgcgcttgtgagaggtcatctggctggtggaggtgaaggtgaagccgcagccggcgcggatgcagtggaagtggttggtagccttgctgtacacgcagccctcgtacttgcactcctcgtacttgtagaacttcttgaagccgtccttggcgtaggcatcgtccttgatgtggtagctcttgtgcttctcgatgtcacacttgttcttgaaagtgaatgtgcagccggggcgc

SEQ ID NO: 22927 - DNA, 1214 bp, Homo sapiens
  MAP TO AC067968.1; EXPRESSED IN LUNG, SIGNAL = 1.1; EXPRESSED IN BONE MARROW, SIGNAL = 1.4; EXPRESSED IN HEART, SIGNAL = 1.5; EXPRESSED IN FETAL LIVER, SIGNAL = 1.2; SWISSPROT HIT: Q9UK12, EVALUE 0.00e+00; EST_HUMAN HIT: BF672190.1, EVALUE 0.00e+00; NT HIT: gi11433035, EVALUE 0.00e+00
gaggcaagatccaaactgagatggagactgttccagaagcaggaacacatgaagaattttcctgcaagcaaatttgggaacaaattgcaagtgacttaaccaggtctcaagataccaccataagtaactctcagttatttgaacaagatgacaacccctcccagattaaagcaagactatctacagttcacacaagagaaaaacctttccagggtgaaaattgtaaacagttcttcagtgatgtttccttctttgatcttcctcagcagttatattcaggagagaagtctcatacctgtgatgagtgtggaaaaagcttctgttacatctcagcccttcatattcatcagagggtccacatgggagtgaaatgctataagtgtgatgtgtgtggtaaggaatttagtcagagctcacgtctgcaaactcatcaaagagtccacactggagagaaaccattcaaatgtgagcagtgtgggaaaggcttcagatgtagatcagcacttaaagttcattgcaaattacacatgagagagaaaccttataattgtgagaaatgtgggaaggctttcatgcacaatttccagcttcagaaacatcacagaattcatactggggagaagccattcaaatgtgaaatatgtggtaagagcttctgtcttaggtcaagtcttaataggcattgcatggtccacacagcagagaaactgtacaaatctgaaaagtatggaagaggtttcattgataggctagatttgcataagcatcagatgattcatatgggacagaaaccatataattgtaaagaatgtgggaagagcttcaaatggtcctcatatcttttggtccatcaacgagtccacactggagaaaagccatacaaatgtgaggagtgtgggaagggctacattagtaagtcaggtcttgacttccaccatagaacccacacgggagagagatcttataactgtgataactgcgggaagagctttagacatgcttctagtattttgaatcataagaaactccactgccaaagaaagccattgaaatgtgaagactgtggaaagaggcttgtatgccggtcatactgtaaagaccaacaaagagaccacagtggagaaaacccatccaaatgtgaggactgtgggaagcgctacaagaggcgcttgaatctggatataattttatcattatttttaaatgacatataa

SEQ ID NO: 22928 - DNA, 1435 bp, Homo sapiens
  MAP TO AL109854.1; EXPRESSED IN PLACENTA, SIGNAL =   3; EXPRESSED IN HELA, SIGNAL = 1.9; EXPRESSED IN LUNG, SIGNAL = 1.5; EXPRESSED IN BONE MARROW, SIGNAL = 1.6; NT HIT: gi13386477, EVALUE 2.30e-02; SWISSPROT HIT: Q14624, EVALUE 2.00e-38; EST_HUMAN HIT: AL540791.1, EVALUE 3.30e-02
aagtgtagagactccaggtcttgactgtggcaggcctttaggtgcctgtgatgtgagtgccccaagttgggggtgcgatggagcaccaggtttggaatgcagtggagtaacacatttcacagtgtcagctttgggcgaggctgggatgccaggtttcacaggtgggacttgtgtcctggagttcgtgggtaatatatcaggattctggtgtgatagagagccgggcttcagaggcaacagagtaccagaatttgagggcacaagaatggtaggttttgtcctgagagttggctgggccaaggtgccagaatcctgttgtgctggaattttggcctttgggtatgtgggcattgacagggtatgagggctctctcccaatggctccagctctttggaacttagcatcttcttggtagaggcagtagtagttgaggataagtagaactttggtttcacaggccttgatttgggggagatgaccttgggcaccaaggctggctgagctgtgcttacccctaggccatgcctgctgctggatgagggcatgatggtgtctggcccagcagaggtggaagtctgtctcctggtctcctcactggcctgtttgggttgcaccatgaccagtgaagtcagaggtgtgacaaagttgtattcaagggacaggttgaggactttggcagccagcaggtggcgagtggtggtgtcacgagcttggaagtgtgcatccagcagttctccaatggtgacataggcccagaggcggcggatgaagtgggccacattgggggctggctcccctgggcaaccaaaggccttctggctgttgttggtggccccttcactgtggtgggccacaagaagctgatccttggggccacgggctgccaggtggatgcccagttcctgtttgcctggctgcacctgtcctgccaccaccagctcagagccaccaaagtagttggggaaaacggcccaaggggaggccccaaccaagccacccaggtagttcagacgcacatctgccagcagaggcatggagatctcctcatagaggcccttcagctgtagggccgcatcagtgtcctcatatatgcgccgggctattccccggttttccagggacaggcggcgcagcagtgtaaagtcagcatcatccccaaaggccaagctgaaaagggataccctgtggcctagcgcctgacggacattggagaggatcacactgggggtcgtcacgccggccgtgggctccccatccgtcaggaagatgataagagggatcctccccacactggggcccctcccaggctcctggttgctatggttcagcactgaagcagctgccagcagagctgagttgacgtctgtccctaattggggaatagattgtgagaccatcttctctggtcacttctacccccattgcagacacact

SEQ ID NO: 22929 - DNA, 458 bp, Homo sapiens
  MAP TO AP000532.1; EXPRESSED IN HELA, SIGNAL = 0.94; EXPRESSED IN BONE MARROW, SIGNAL = 0.98; NT HIT: gi15299595, EVALUE 0.00e+00; SWISSPROT HIT: P51955, EVALUE 4.00e-58; EST_HUMAN HIT: BI831125.1, EVALUE 0.00e+00
gtccctggagctcccggtccctggagctctgcacttgggggcacaacttgcgtgaggcagcgtgactctggcgactggctggccatgccgtcccgggctgagaactatgaagtgttggacaccattggcacaggctcctctggccgctgccagaagatccagaggaagagtgacggcaagatactagcttggaaagaacttgattatggcttcatgacagaagctgagaaacagatgcttatttctgaagtgaatttgctttgtaaactgaaaaatccaaacatcgttcattactatgatcgtattattgaccggaccaacacaacactgtacattgtaatggaatattgtgaagaaggagacctggctagtgtaattacaaagggaaccaaggaaaggcaatacttagatgaagagtttgttcttcgagtgacgactcagttgactctggccctgaa

SEQ ID NO: 22930 - DNA, 705 bp, Homo sapiens
  MAP TO AC011094.1; EXPRESSED IN BRAIN, SIGNAL = 1.5; EXPRESSED IN HELA, SIGNAL = 3.5; EXPRESSED IN BONE MARROW, SIGNAL = 1.4; EXPRESSED IN LUNG, SIGNAL = 1.6; SWISSPROT HIT: P48725, EVALUE 1.90e+00; EST_HUMAN HIT: AU147848.1, EVALUE 0.00e+00; NT HIT: gi14762047, EVALUE 0.00e+00
ttttgctaggtgttcatttttttcttccattttaaaatctgccagaattgtttggcttgatatagattcttttaactttacttgtattgattcttttaatatagtctgtctatctacattttctttcatatttgattcctcaactagccaaaggagaacatcttcctgcttctttgaattttcatccactagatttttggctatatcacccttatcatttgaaatatcttcaagacttaaatgtttgttattatatccgctcttctttaatgcactacttattattagctgttggcttgcatcttctcttaatattattttttccttgcttattagttgctctctttcctgtttcacaatattctttttttcttcatattctttttctctccttttcctttcctcttccttttgcttttttctctcttcttttatcctttgttcctcctctaatctttttcgattttcttcctccttttgtcgtatttttgcttccttttccttccactcttgtgctttccttttcttactttcaatttgctctttaataattgggccatatttttgataggcaacaaatgctttatatttagcttgaattttaacagctgcattattctgctgttttaacaaagaatttttttctttttcttgttggtctttaaatcttgttctttcttcttccatttgtaaatgcaagtttct

SEQ ID NO: 22931 - DNA, 532 bp, Homo sapiens
  MAP TO AL163207.2; EXPRESSED IN PLACENTA, SIGNAL = 2.2; EXPRESSED IN BRAIN, SIGNAL = 2.6; EXPRESSED IN FETAL LIVER, SIGNAL = 2.8; EXPRESSED IN HEART, SIGNAL = 1.7; EXPRESSED IN BONE MARROW, SIGNAL = 2.2; EXPRESSED IN LUNG, SIGNAL = 2.4; SWISSPROT HIT: Q03695, EVALUE 6.50e+00; EST_HUMAN HIT: AW577202.1, EVALUE 1.20e-02; NT HIT: AL163207.2, EVALUE 0.00e+00
atgctcccccgccagcatgctcctctgccaggtgctcccccaccaggtgctcctccttcagatgctcctccagcaggtgctcccccgccagcgtgctcctccaccagcgtgctcctcctccagcgtgctcctccaccaggtgctcctccaccagcgtgctcctccactgctcctccgccagcgtgctcatgcgccaggtgctccttcgccagcgtgctcctccgccaggtgctcctcctccaggtgctcccccaccagcgtgctcccccaccagcgtgctcctccgccaggtgctcctccaccagcgtgctcctccactgctcctccgccagcatgctcatccgccaggtgctcctttgccagcgtgctcctccactgctcctctgccagcgtgctcctccgccaggtgctcctccgctaggtgctcctctgctaggtgctcccctgctaggtgctcccctcgacgtcttgtccccgtccagctgcttgtgtcttcttccgctgatgtgctcctctccacacccggccgcct

SEQ ID NO: 22932 - DNA, 571 bp, Homo sapiens
  MAP TO AL133243.1; EXPRESSED IN PLACENTA, SIGNAL =   3; EXPRESSED IN HELA, SIGNAL = 4.8; EXPRESSED IN LUNG, SIGNAL = 2.7; EXPRESSED IN BONE MARROW, SIGNAL = 3.1; EXPRESSED IN FETAL LIVER, SIGNAL = 3.3; SWISSPROT HIT: Q9NR09, EVALUE 1.00e-93; EST_HUMAN HIT: BE166042.1, EVALUE 0.00e+00; NT HIT: gi14730293, EVALUE 0.00e+00
gggtgctttccagacaggccaaggacctctcgatgcccaagtgaagctcttagaattcactctggagcagaattttgaagtcgtttcagttagtactatttctgccgtgatagaatcggttacatttttagtgcaccactatatcacttgctcagacaaagtaatgtcaagaagtggatcagatagctccgtgggtgctcgagcatgctttgggggactctttgccaatcttattcgtccgggtgatgcaaaagcagtttgtggcgaaatgacaagagatcaactcatgtttgatttgttaaaacttgttaacattttagtgcagctgcctctttcaggcaatagggaatacagtgcaagagtgtctgtgaccacaaatacaacagatagtgtttcagatgaagaaaaagtctcaggaggcaaagatggcaatggaagcagtaccagtgttcaaggatcgcctgcatatgttgctgacttagtcttagccaaccaacaaattatgagccagattttgtctgctctgggcctgtgtaatagcagtgccatggcaatgataattggtatgtat

SEQ ID NO: 22933 - DNA, 671 bp, Homo sapiens
  MAP TO AC011452.5; EXPRESSED IN LUNG, SIGNAL = 1.9; EXPRESSED IN BRAIN, SIGNAL = 1.9; EXPRESSED IN BONE MARROW, SIGNAL = 1.9; EXPRESSED IN FETAL LIVER, SIGNAL = 5.1; NT HIT: AF305687.1, EVALUE 0.00e+00; SWISSPROT HIT: O70191, EVALUE 2.00e-55; EST_HUMAN HIT: BI262387.1, EVALUE 0.00e+00
ctagcagctacgggtcctctggctccgggccttgtaaacctcgatgagcaggtccttgacgtactggatctcgcgctccacggactctgcccgttccttcagctcgcgattccgtgcctccagcccctggcactcgccctccagggcctcaccctctgcccgcttccgctggcggtacctcagagccgccgacttgttctggtctctcttcttttgcttgcggtcccctcgggtggtggcaggatgtgggtagggggccaggcgagaaggttgaggtggagaaggaggagggggctgctgtggcgggggcagaggcggcatccccacttcctcctgcccggcctcgttgcggcagtagatggccagcaagtccagagtatccaagacagggggctgggggaggtcaaaggaggggagggacagggggagggagggggctggtggtagtggtggtggtggtagtggcggcggggagggtggtgggaggggcggggcatctaggaagaagtcttccatctgttccagctccttcttgaggagggaggccatagcttccaggtcaggtggggttggggaaggttgggggagggtgccggggggtaagggaggctccagagggaggagagctgtgaaatcaactcgctcagtcatccagtcagagaagccatcac

SEQ ID NO: 22934 - DNA, 616 bp, Homo sapiens
  MAP TO AL022726.1; EXPRESSED IN LUNG, SIGNAL = 0.93; EXPRESSED IN HELA, SIGNAL = 0.87; EXPRESSED IN BONE MARROW, SIGNAL = 0.87; NT HIT: gi14756237, EVALUE 0.00e+00; SWISSPROT HIT: P47928, EVALUE 4.00e-48; EST_HUMAN HIT: BF058188.1, EVALUE 0.00e+00
agcgcccgcgtcccgccaccacgccaccaacctcccatcccccgcggcgtccgcccacggccggcgcccggcctctcaccgggtcggtgttgagcgcagtgagcggggtccgcggcggcgcggctggacaggtcccggccgggtggtgtggcggcgcgggcggtggtggctgcctcagcagggccgggtgcgtctccagcgccagctgcaggtccaggatgtagtcgataacgtgctgcaggatctccactttgctgactttcttgttgggcgggatggtgggcaccagcctccgcaggcggctatagcagtcgttcatatcgcactgcaggcacagcgccggctcgtcggccgccgcctcggccgccttacagcgcgctgccgccgccgccgccgccgcggctgcggagccacccaggctgtggccgtgctcggccaggcagcgcagcgccagctccccgccgccgcagcccgacggcgccttgcggcccgaggggcgcaccgggctcaccgccttcatcgcgcgcgccctgcgctctacgcgagcgaacccgctggggcgagcgagggaggcaggcaagctccgggccccgtccgcggccggctccgctccctt

SEQ ID NO: 22935 - DNA, 576 bp, Homo sapiens
  MAP TO AC007253.2; EXPRESSED IN HELA, SIGNAL = 1.7; EXPRESSED IN BONE MARROW, SIGNAL = 1.1; EXPRESSED IN FETAL LIVER, SIGNAL = 1.4; NT HIT: AB056059.1, EVALUE 8.60e+00; SWISSPROT HIT: Q13164, EVALUE 1.90e+00; EST_HUMAN HIT: R13381.1, EVALUE 5.20e-02
tgtgatcagacaaaagacaaaggatgacattgtcagaatctcattcaaaaaggaaaggaaataagtcattaagaatcatgatttgcatctgttaataaggatttaagagtacacatcaaaagaatacggcatatttttaattaaaaagcaaaaagggatagataaaaattacaaatgtgtttcatcaatgtaaccagcatggtccacacattccatgagtcaactctcaaattataatatctcagattcttatcccatcttactggttaagtttagtccttaccagatttccatccccaaatattctggactccctgggaaatgctctcatgttctccaaagccatcttgattgtcacgtcccacctcagtgagccccctagctccaggcccctctctgtggaccaccgctcaccccagcatgcgtgaccccctgccacctccacatgtttccctcaggcagctcctctcattgagactgcttcacctgaagcctgggtacagtcgttccttcaagtcccagttagaatagaacaggtcagcaagagtctattgatgctttggggataattggagg

SEQ ID NO: 22936 - DNA, 597 bp, Homo sapiens
  MAP TO AC006538.1; EXPRESSED IN HELA, SIGNAL = 0.76; EXPRESSED IN BONE MARROW, SIGNAL = 1.5; EXPRESSED IN FETAL LIVER, SIGNAL = 1.2; EST_HUMAN HIT: BG699685.1, EVALUE 0.00e+00; NT HIT: gi15297369, EVALUE 3.00e-55; SWISSPROT HIT: O95661, EVALUE 2.00e-44
tcacatgagggtgcatttgcccttgacgcggtctgtcctcttctgcttcccggagcgcttgccgtcgatgttgaggctcatgttccggcgcgtctccagcgtcagcagctcctggaagagctccttgacgttgtagttcatcttggccgaggtctccatgaaagcgcacttccactcctgggccaccgcctgcgcctcgcgcgtgtccacctcccgctgcgtctcatcgcacttgttgcccacgagcatcacggggatgtcctccacgctgcccttgatctgcacgatgagcttgtagatgggccccagctcctccagcgactgcttgctggtgacggagaacaccaggatgaaggcgtggcccttggagatggacaggcgctgcatggccgggaactggtggctgccggtggtgtctgtgatctgcagcgtgcacacgctcttgtcgcagctgatcacctgccggtaggtgtcctcgatggtggggatgtaggtgtcgcggaacgtgcccttcacgaagcgcagcaccagcgagctcttgcccacgccgcccgccccgaacaccaccacgcggtaatcgttactctgttccggcat

SEQ ID NO: 22937 - DNA, 454 bp, Homo sapiens
  MAP TO Z84464.1; EXPRESSED IN BONE MARROW, SIGNAL = 0.81; EXPRESSED IN PLACENTA, SIGNAL = 1.5; EXPRESSED IN HELA, SIGNAL = 0.63; SWISSPROT HIT: P09849, EVALUE 6.00e-16; EST_HUMAN HIT: BF819124.1, EVALUE 6.00e-35; NT HIT: AB009667.1, EVALUE 0.00e+00
gtagataccactctgtctcagtttaccgacctgaatgtttacctgtgggatgtccaccacagtaaaaggcttattaaagtggatggggttgtgaccaagaagaggaaatcctactgtgttgactttgctgccatccagccccagatcgctttactccaggaaatgcatgttacacattttcgcttctccctggactgggccctgattctccctctgggtaaccagtcccaggtgaaccacaccatcctgcagtactatcgctgcatggccagcgagcttgtccgtgtcaacatcaccccagtggtggccctgtggcagcctatggccccgaaccaaggactgccgcgcctcctggccaggcagggcgcctgggagaacccctacactgccctggcctttgcagagtatgcccgactgtgctttcaagagctcggccatcacgtcaagctttgga

SEQ ID NO: 22938 - DNA, 1617 bp, Homo sapiens
  MAP TO AC009470.2; EXPRESSED IN HELA, SIGNAL = 0.89; EXPRESSED IN BONE MARROW, SIGNAL = 0.8; NT HIT: AB009817.1, EVALUE 1.60e+00; SWISSPROT HIT: Q9Y493, EVALUE 2.00e-14; EST_HUMAN HIT: W26243.1, EVALUE 1.00e-108
atgtgggtggtggaccaggggcgagggcaggggacaatgtctgtggagaaggggggtctgtttaggtttccgctcttggacgggagggagcggcggggtaagcagcctaggaggactagggagctccacaagtcccgcggccagggcgccccaagcgaggccggggtccgcgaacggtcgccactggagcggggctgcaagggggtgccgatgctgcgagagaaaacctggggaccttggaacgggctcatggtaattgggaagagagtggagctcctgactagaaacactcgaaagccgaagctggagtctgagtactggagactggaagatgtggaaaagacggtcttgaaagggaagtcaggcccgagtcaggaaaggatggatgtgaagctgctataccgtggagcaagtgcatcacaagcttcagcagatttggggaaagacagcccaaggggtatttggggaaagcaagaggtcaaacacgaaataaaggctaaatctaagagtgcagggatgacagcagggcctatgaaggggtctgggtttgaagagaggttgaggtctgctggggagaaggtagggaccagtggagaggacttgagatccaatggatataaactgggacaggatgagaaggggttgaggtctagtgtagacaagatgagatcaagtgtagagaagctgaggtctactagtgagaagctggtgtgcaggggagagaagcaggggtccagtggagtgaagctgaggtccagtggcagaaagctgagatcaagtggagagaatttgagatcaagtagagagaagctgagatggagtggagagaagctgggaactagtggagagaagctgggaaccagtgatgagaagctgaggttgagtggagagatgctgagatcaatcagagagaagctgaggttgagtggagagaagctgggaaccagtgatgagaagctgaggttgagtggagagaagctgaggttgagtggagagaagctgagatcaagcagagagaagctgaggttgagtggagagaagctgggaaccagtgatgagaagctgaggttgagtggagagaagctaagatcaagcagagagaagctgaggttgagtggagagaagctaagatcaagcagagagaagctgagattgagtggagagaagctgggaacaagtgatgagaagctgaggttgagtggagagaagctgagatcaagcagagagaagctgggaaccagtggagagaagctgagatcaagcagagagaagctgaggttgagtggagagaagctggggtcaagtgcggagaagctgagatctagtgaggagaagttagggaccagcggggagaaattggagggttcaagaatggggagcataaatgagaagaacattgaaaaagtggtagaagttactggcgatgaaagagtgatggcatttactcatgatgagatggaaattccttttgaaagtgtcaaagggagtgaggaactacaagggactgagaaaggagtgggagttgaggggggcatcttgagtgaagtgaaagatatcactgatgaatctgtttctatggaaaaaaaagatattataggtgaaggtaccagtgaatga

SEQ ID NO: 22939 - DNA, 506 bp, Homo sapiens
  MAP TO AP001697.1; EXPRESSED IN PLACENTA, SIGNAL = 2.5; EXPRESSED IN BRAIN, SIGNAL = 1.1; EXPRESSED IN LUNG, SIGNAL = 5.4; EXPRESSED IN HEART, SIGNAL = 3.9; EXPRESSED IN BONE MARROW, SIGNAL = 1.1; SWISSPROT HIT: Q9UHI8, EVALUE 8.00e-87; EST_HUMAN HIT: AL553171.1, EVALUE 0.00e+00; NT HIT: AF207664.1, EVALUE 0.00e+00
aaggtctggtgctggctggcttcacttcctttgcacactcggaagcaggctgtccattaatgtctcggcattctaccagtcttctctgccaacccaattcacatgacttagaacattcgccccactcttcaatgacccatgctgaaaaagtggggatagcattgaaagattccttcttcttctttacgaagtaggtgtatttaattttaggtcgaagggcattgcccacagtaagaacctggatggtcaagggctctttgagagggctaaagctgcgaattctttccaatgccgcagaggagccgctgtacctcaagacaacacctttgtacataatgtcttgctctaaggtggacaaagtgtagtcaccattaagaatatatgtgccatcagcagctttgatggcaagaaagctgccattgttcctggatcccctctggttccgctgtttcacttcgatgttggtggctccagttggaattgtgatgatatcatgatatccaggt

SEQ ID NO: 22940 - DNA, 853 bp, Homo sapiens
  MAP TO AC011841.3; EXPRESSED IN PLACENTA, SIGNAL = 2.1; EXPRESSED IN BRAIN, SIGNAL = 1.7; EXPRESSED IN HEART, SIGNAL = 1.3; EXPRESSED IN BONE MARROW, SIGNAL = 1.2; EST_HUMAN HIT: BF508736.1, EVALUE 2.00e-54; NT HIT: AL163202.2, EVALUE 2.00e-63; SWISSPROT HIT: P18175, EVALUE 2.00e-06
gattccagaacaatgctacgagggtctgaatggttgtcccacacttaggattccagaacaccccagctgtggtctgaataattgtccctcacataggattccagaacactgctgctgggttctgagtgtttgtccctcacataggattccagaacactgttacgatggtctgaatgtttgtccctcaaataggattccagaacactgctatgagggtataaattattctccctcacataggattccagaacactcctgctgttgtctgaatatttgttccccactaagtattcaagagcactcctgctgcagtctgagtgtttgtccctcacttaggattccagaacactactgttgggttctgagtgtttgtccctcaggtacaattccacaacactgccacgtgggtctatatgtttgtctgttacgtaggattccagaacagtgctacgagggtctgaatgtttttctcgcacataggactccagaacactcttgctgtgttctgaatgtattttcctatgataggattccagaagaatgttatgagtgtctgaatgcttgtcgcacatgtaggattccagaaaaccccagctgtggtctgaatgattgtccctcacataggattccagaacactgctgctgggttttcagagtttgtccctaccatagcattccagaacactgcgacgagggtctaaatatttgtcattcacatagaattccagaacactgctactgggttctgagtgtttgtccctcacaaaggattcctgaacaatgctgctgtggtctgaatgtttgtctctcatataggattccagaacactactgctgtggtctcaacgtttga

SEQ ID NO: 22941 - DNA, 960 bp, Homo sapiens
  MAP TO AF176815.1; EXPRESSED IN HELA, SIGNAL = 0.53; EXPRESSED IN BRAIN, SIGNAL = 1.4; EXPRESSED IN BONE MARROW, SIGNAL =   1; NT HIT: gi15295342, EVALUE 0.00e+00; EST_HUMAN HIT: BE245606.1, EVALUE 0.00e+00; SWISSPROT HIT: P55201, EVALUE 0.00e+00
gtacatcgagaagtctgcagaggagctggacgaggaagtagagtatgacatggacgaggaggactacatctggctggatatcatgaatgagcgtcggaagacagagggtgtaagtcccatcccgcaggagatctttgagtacctaatggaccgactggagaaggagtcgtactttgagagtcataataaaggcgaccctaatgcgctagtggacgaggatgctgtttgctgtatctgcaatgatggtgagtgccagaacagcaatgtcatcctcttctgtgacatgtgcaacctggccgtgcaccaggagtgctacggtgtcccctatatccctgagggccagtggctgtgccgccgttgcctgcagtcaccctctcgtgctgtggattgtgccctgtgccccaacaagggcggtgccttcaagcagacagatgacgggcgctgggcccatgtggtgtgtgccttgtggatccctgaggtctgcttcgccaacacggtcttcctagagcctattgacagcattgagcacatcccaccagctcgctggaagctcacctgctacatttgcaaacaacggggctcaggggcctgcatccagtgccacaaggccaactgttacacagctttccatgtgacatgcgcccagcaggctggcctttacatgaagatggagcctgtgcgggagacaggcgccaacggcacctctttcagtgtccgcaagacagcctactgcgacatccacacgcctccaggttcagcacgccgactgcctgccctgtcccacagcgagggtgaggaggatgaagatgaggaggaggatgagggtaagggctggagctcagagaaagtcaagaaggccaaggccaagtcccggatcaaaatgaagaaggcacggaagatcctggcagagaagcgggcagcagcacctgtggtgtcagtgccctgcatcccaccacacag

SEQ ID NO: 22942 - DNA, 697 bp, Homo sapiens
  MAP TO AC004776.1; EXPRESSED IN BRAIN, SIGNAL = 0.8; EXPRESSED IN HELA, SIGNAL = 0.9; EXPRESSED IN BONE MARROW, SIGNAL = 0.84; NT HIT: gi14726187, EVALUE 0.00e+00; EST_HUMAN HIT: BF513590.1, EVALUE 0.00e+00; SWISSPROT HIT: Q9H158, EVALUE 0.00e+00
gtcgcagctctgcttgcgtgctgttgcttagggagtattggacttccccattggacccttcatctggatccaaggcttgaactcggaataacacagtcccattgggtgcagtctctggaaccttggtgcggtatacggagcgctcaaatacaggcgcgttgtcatttgtgtccaccacaatgatggtgacttgtgcgtctcctgagcgggcaggtagcccgccgtcccgagctgtaagcaccagcaggtgggtggcgcgctgttcgcgatccagtgctttctccaacaccaactccgggtattcgctgccgtcaacccgcgatcccatgtccaggcgaaagtgctgactggggcttaggctgtagcttagtatcccattgcttccctcgtcgtcatcttgggcattcgggagagtaaagcgggctccgggcgtcaggaactcggggatgtgcagctgcacgtcgccggcaggaaagagaggtgagttgtcattggtgtccaggacgtgaatccgaatcttgtgcagctccagcgggtcctcgagcaccaggtcgtaggtcaagacgcaggcagctttggccctgcacagctgttcgcggtccgccggctctctgaccaccaaattgccgctgggtagatccaccccgaagtagagctcgcggtggctggaaaggaagcgaaagttccgcgaggacat

SEQ ID NO: 22943 - DNA, 564 bp, Homo sapiens
  MAP TO AF038458.1; EXPRESSED IN HEART, SIGNAL = 3.5; EXPRESSED IN PLACENTA, SIGNAL = 3.7; EXPRESSED IN BRAIN, SIGNAL =   3; EXPRESSED IN BONE MARROW, SIGNAL = 2.7; SWISSPROT HIT: P16818, EVALUE 1.10e+00; EST_HUMAN HIT: BI758274.1, EVALUE 0.00e+00
actgcaacgacagccagtcagacgcggcagcgccggatggcgggaggcgggagttggaggccaagggaagcgctgggcggaagtggctgtggctttgccctttggcctttgctggctgtgtggcggctccgcggttcgcaggtcgttcgctgagcgtctctgcttagccgcggtcatgagccggcacagccggctgcagaggcaggttctgagcctgtaccgcgatctgctgcgcgccgggcgtgggaagccgggcgccgaggcgcgagtgcgggcagagttccggcagcatgcgggcctgccgcggtccgacgtgctgcgcatcgagtacctgtaccgccgcgggcggcgccagctgcagctgctacgctcgggccacgccaccgccatgggcgccttcgtacgcccgcgggccccgaccggggagcctggcggcgtgggttgccagcctgacgacggcgacagtccaaggaacccccacgacagcacgggggcaccggagacccgccccgacggacggtgacaggcgaagagccgaactcgctcgatggcgtggtggagcca

SEQ ID NO: 22944 - DNA, 477 bp, Homo sapiens
  MAP TO AP000038.1; EXPRESSED IN HELA, SIGNAL = 0.81; EXPRESSED IN BONE MARROW, SIGNAL = 0.76; EXPRESSED IN FETAL LIVER, SIGNAL = 0.94; NT HIT: M32788.1, EVALUE 1.10e-01; EST_HUMAN HIT: BI868476.1, EVALUE 1.70e-01; SWISSPROT HIT: P18127, EVALUE 9.00e-13
ggatgatttcccatatatcaacatggatgatttcccatatgtcaacatggatgatttcccatatgtcaacatggatgatttcccatatgtcaacatggatgatttcccatatgtcaacatggatgatttcccatatgtcaacatggatgatttcccatatatcaacatggatgatttcccatatatcaacatagatgatttcccatatgtcaacatggatgatttcccatatgtcaacatggatgatttcccatatgtcaacatggatgatttcccatatgtcaacatggatgatttcccatatatcaacatggatgatttcccatatatcaacatggatgatttcccatatatcaacatggatgatttcccatatatcaacatggatgatttcccatatgtcaacatggatgatttcccatatgtcaacatggatgatttcattgagtgaaaggagctagataccaaagaatacac

SEQ ID NO: 22945 - DNA, 537 bp, Homo sapiens
  MAP TO AC009974.2; EXPRESSED IN FETAL LIVER, SIGNAL = 1.4; EXPRESSED IN PLACENTA, SIGNAL = 2.7; EXPRESSED IN BONE MARROW, SIGNAL = 1.4; SWISSPROT HIT: P28798, EVALUE 3.40e-01; NT HIT: gi14733623, EVALUE 0.00e+00; EST_HUMAN HIT: BG823624.1, EVALUE 0.00e+00
ctttatccaagagcttctggctggctctgatgaatcctatcggcccctgcgcagcctcctgggccacccagagaattctgtgcgggcacacacttataggctcctgggacacttgctccaacacagcatggccctgcgtggggcactgcagagccagtctggactgctcagccttctgctgcttgggcttggagacaaggatcctgttgtgcggtgcagtgccagctttgctgtgggcaatgcagcctaccaggctggtcctctgggacctgccctggcagctgcagtgcccagtatgacccagctgcttggagatcctcaggctggtatccggcgcaatgttgcatcagctctgggcaacttgggacctgaaggtttgggagaggagctgttacagtgcgaagtaccccagcggctcctagaaatggcatgtggagacccccagccaaatgtgaaggaggctgccctcattgccctccggagcctgcaacaggagcctggcatccatcaggtataccctacagcacttatgaacca

SEQ ID NO: 22946 - DNA, 696 bp, Homo sapiens
  MAP TO AL132988.3; EXPRESSED IN HELA, SIGNAL = 6.2; EXPRESSED IN LUNG, SIGNAL = 2.4; EXPRESSED IN BONE MARROW, SIGNAL = 3.2; NT HIT: gi15300039, EVALUE 0.00e+00; EST_HUMAN HIT: BG820598.1, EVALUE 0.00e+00; SWISSPROT HIT: Q13023, EVALUE 1.00e-124
ggccggcttgattctctaacagaagtggatgactcaggacaattaaccatcaaatgttctcaaaattacttgtctctggattgtggcattactgcattcgaactgtctgactacagtccaagtgaggatttgctcagtgggctaggtgacatgacctctagccaagtcaaaaccaaaccctttgactcttggagctacagtgagatggaaaaggagtttcctgagcttatccgaagtgttggtttacttacggtagctgctgactctatctctaccaatggcagtgaagcagttactgaggaggtatctcaagtatctctctcagtagacgacaaaggtggatgtgaggaagacaatgcttctgcagtcgaagagcaaccaggcttaacactgggggtgtcatcatcttcaggagaagctctgacaaatgctgctcaaccctcctctgagactgtgcagcaagaatccagttcctcctcccatcatgatgcaaagaatcagcagcctgttccttgtgaaaatgcaacccccaaacgaaccatcagagattgctttaattataacgaggactctcccacgcagcctacattgccaaaaagaggactttttcttaaagaggaaacttttaagaatgatctgaaaggcaatggtggaaagaggcaaatggttgatctaaagcctgagatgagcagaagc

SEQ ID NO: 22947 - DNA, 916 bp, Homo sapiens
  MAP TO AL136112.9; EXPRESSED IN HELA, SIGNAL = 1.5; EXPRESSED IN BRAIN, SIGNAL = 0.83; EXPRESSED IN BONE MARROW, SIGNAL = 0.93; SWISSPROT HIT: P12525, EVALUE 0.00e+00; NT HIT: gi13631887, EVALUE 0.00e+00; EST_HUMAN HIT: AL580480.1, EVALUE 9.00e-82
atggaccgcgactcgtaccatcactatttctacgactatgacggcggggaggatttctaccgctccacgacgcccagcgaggacatctggaagaaattcgagttggtgccgccgccctgggacttgggtcccgcagccgggaacccagccctcagctttggtctcctggaaccgtggccggtagggtgcgctggggacgagacggaatcccaggactactggaaagcttgggacgcgaactacgcctccctcatccgccgtgactgcatgtggagcggcttctccacccaggagccgctggagagagcggtgagtgacctgcttgccgttggcgcgccctcgggatactcgcccaaggagttcgccacccccgactacactcccgagctcgaagccggcaacctagcgcccatcttcccctgtttgttgggcgagcccaagatccaggcctgctccaggtctgagagcccaagcgactccgagggtgaagaaatcgacgtgacagtaaagaagaggcagtctttgagtacgcggaagccagtcatcatcgcggtgcgtgcagaccttctggatccccgcatgaatctcttccacatctccatccaccagcaacagcacaactatgctgccccttttcctccagaaagctgcttccaagaaggggctccaaagaggatgcccccaaaagaggctctagagagagaagctccagggggaaaggatgataaggaagatgaagagattgtgagcctcccacctgtagaaagtgaggctgcccagtcctgccagcccaaacccatccattatgatactgagaattggaccaagaagaagtaccacagctacctggagcgcaagagacggaatgatcaacgttcgcggttcttggccctgagggacgaggtacccgccctgg

SEQ ID NO: 22948 - DNA, 454 bp, Homo sapiens
  MAP TO Z73986.1; EXPRESSED IN LUNG, SIGNAL = 1.1; EXPRESSED IN BONE MARROW, SIGNAL = 0.92; EXPRESSED IN FETAL LIVER, SIGNAL = 1.1; EXPRESSED IN HELA, SIGNAL = 1.6; NT HIT: gi13653132, EVALUE 0.00e+00; EST_HUMAN HIT: AL546208.1, EVALUE 0.00e+00; SWISSPROT HIT: P32189, EVALUE 9.00e-74
cttgacaaagttattatttcctggaattcttttactaagactctcaacggtagactgggttcttagatcaagccacaccacagcattgtagagaggctctccagttatcttgtcccagactacagtggtttccctctggttgctgacaccaatagcttttatgttggaaatatcaatattgagctgtccaagtttctcacatgttttctctatacactcatagacagaatgtagaatttccttagggtcctgttccacccatccttctcttggggactcttgttttatttctacttgatgatgactaagtagttcagctgtttttgaattgaaaaccaaaaagctcgtcgaactggtgccctggtccaccgcccccaccaatggccccaaaactgccttctttgaggctgccacgaaaccagcttcaggtcggccggcgattgcggccggtttc

SEQ ID NO: 22949 - DNA, 504 bp, Homo sapiens
  MAP TO AP001670.1; EXPRESSED IN HELA, SIGNAL =   2; EXPRESSED IN BONE MARROW, SIGNAL = 1.2; EXPRESSED IN FETAL LIVER, SIGNAL = 1.2; NT HIT: AF200465.1, EVALUE 0.00e+00; EST_HUMAN HIT: BG820472.1, EVALUE 0.00e+00; SWISSPROT HIT: P20290, EVALUE 1.00e-48
tcaatctagtccatgccagcttccaaaaaccatgccagcttcattctttgatgcctcatcaaaattttctacaagatcgggaacatcatcatcctcctcatcagtgtcttctggttttgctgctttactgtccaagacttgccgtgggaactgttcagctaacttcctaaggcttgttaaactgtcagcaccaagctgacttaatattccaggtatcatttctgtgattggtttggcttctgcatgaccagtaattgcaaaggtgttagcagaaagggaagcttggactttgggattgttgaagtgaataactgtcccatcatctttaatcatgttcatctcttcaataccaactatattattcacagccagtttttttagagaactctgaagctttttgtcatcagccatggctgttttatgtaccaccttctttctgcgagctgtacccttgccccctatccggacctgagcctgaagtttggctaacttttcttgattcat

SEQ ID NO: 22950 - DNA, 1186 bp, Homo sapiens
  MAP TO AL122035.1; EXPRESSED IN HELA, SIGNAL = 0.89; EXPRESSED IN BRAIN, SIGNAL = 1.1; EXPRESSED IN BONE MARROW, SIGNAL = 0.87; SWISSPROT HIT: P24588, EVALUE 0.00e+00; NT HIT: gi13650434, EVALUE 0.00e+00; EST_HUMAN HIT: BI825118.1, EVALUE 1.70e+00
aatagcattcttgactagagaagaggctgtttcaattaagagtgtttcatattgttctgaagttctatcctcaaaaccattatcattagcaaaaacccctacttgctcattttcagctgaaattaagaattgcttagggacatttttagattttgtaacatcaaattcactgatttcagtgtctgtaataataatagcaattggctccattcttttgctttcttctgatttggatttctcttcagtgatcccattttctttaaaatctgattcttggctcaattcagtatcttttggcttagtttcttcagctacaatctctgtactttcatagtcttttccatttggtgcactttctagggtactgttactggcttcttccacaatttgttgatctggaattgcaggtaaaggaggaacatcagaaagtactggctgctgatggtctgtttctgaagtttcaagtgggcttgcttgctggggttgaacatcttgtttttccttgatcgtttcaatttcttcaaggattagagttcccgtttgaatagcagaatgcccattatctaatccaagttctactgaaatcactttctctccagaagttgtgctattgctcacatttgattcacagacctcatcaccatctttccgtgagatgccttcacttagatcctgggttgacttagcctttgttgcctgatcattcaatggggtctgtgtttgtatatccaaaatttcagcttcttcctggactttgatgctgcagtctgagtcttctataattttggaatgattactcctttttggccctcttgggaattttatgcagggaatcttaagtctagattttgcctttttcttagaaagatcagcatcctcagcatttattgcaggttgcatttcaccctccaatggcttttgctgctttgaagactctgaccttttcctgcgtgttacaagacgtttgagtgaggcccaggccccccgtgtgggctctggctgatcagaagctcctgcttcttgtggacacttccttgccacatcagcagcttcagagccagctttgggcttcagtgctttggctgctttctttcttctcttgaagcaaagcatggatgccttttccttctgcctttcagccccaggactaccttctgctgatctcttctcatccttgttttctaca

SEQ ID NO: 22951 - DNA, 733 bp, Homo sapiens
  MAP TO AC002306.1; EXPRESSED IN LUNG, SIGNAL = 1.2; EXPRESSED IN BONE MARROW, SIGNAL = 2.1; EXPRESSED IN BRAIN, SIGNAL = 0.8; EXPRESSED IN HELA, SIGNAL = 0.46; SWISSPROT HIT: Q61130, EVALUE 2.00e-63; NT HIT: gi14767867, EVALUE 0.00e+00; EST_HUMAN HIT: AL552902.1, EVALUE 0.00e+00
ccaggatgatgacaacagtcttgaccaggctgagcgtggtctctcggtagcgggggtggcagctgacatgctctgccatgcgctgcactcgccgccgcacgtagaagaaaatgcgggtgtacacagccaccatgagcaggaagacaagcaggctcgacagagcccagacggccaaataggagcggctgagcaggggtgccatgcgtgagcagcggtccagggcacagaggcagtgccaggagtgggcaggcagcagccccaggcccagggcagccacccacacgcccacaatgagcatgaccacgcggccacggggcaggcggctgtgcagctgcacggccatcacactgcggtgccgctccacggcgatggccagcagtgtggccaccgacgcagtgaggcttgtgtccagcaagccctgccgcaggaaccagccctcaagtgaaagtcgggctgtgcggggaccagtgtggaacatgaggaagaggtaggccacgcccgcgaagaggtcagccgcggccagattgccgagcaggtagtagatgggctggtggaagcggcggttggaggcgatggctgctatgaccagcagattggtcagcagcaccagcacgctgacggtcagccccagtgccaccacgaccacatccttgggccgccagtgggagctgagctctttgccactgttgttatagaagaagccgatggtctcgttgtagtagcactggcccat

SEQ ID NO: 22952 - DNA, 549 bp, Homo sapiens
  MAP TO AC012354.2; EXPRESSED IN BRAIN, SIGNAL = 0.92; EXPRESSED IN BONE MARROW, SIGNAL = 1.1; EXPRESSED IN FETAL LIVER, SIGNAL = 1.2; SWISSPROT HIT: Q62232, EVALUE 5.00e-99; NT HIT: gi14727098, EVALUE 0.00e+00; EST_HUMAN HIT: BG829041.1, EVALUE 0.00e+00
cctcggccgcccggtcgcgctgccgccggttcttgaaccagttgctgacctgtgtggtggtgaggcccgtgcctccgccagctcacgcttctcgcggggtgaagggtaggggttgtgcgcgtaccactcgcgcagcacgctgcgactcttttccttgaagcagtagctggtctcctcgccgtcccagatggagcgcggcagcgggaatttgcggcgcacgcggtatttgcccacggcgcccaggggtcggccgcgcagcttctccgcctcgatgtagtgtgccttgagccacagctgctgcagcttggcgtggttgtgcggcgagaactggtggctctccaggatcttgtagagctcgcggaagttgccgcggtggaaggccaccacggccttggccttgagcacgctttcattcttgtgaaggtgctcgcaggcgggcagcgaccacaggaagcggcccagccgctcgatgttgccgccctgctgcagcacctcgcacacgcacgccacttgctcctgcgtgaagccgaaggtgggcagcatggacat

SEQ ID NO: 22953 - DNA, 875 bp, Homo sapiens
  MAP TO AL121809.1; EXPRESSED IN PLACENTA, SIGNAL = 2.3; EXPRESSED IN HELA, SIGNAL = 2.8; EXPRESSED IN BRAIN, SIGNAL = 0.93; EXPRESSED IN BONE MARROW, SIGNAL = 0.93; EXPRESSED IN LUNG, SIGNAL = 0.99; EXPRESSED IN FETAL LIVER, SIGNAL = 1.4; EST_HUMAN HIT: BE872865.1, EVALUE 0.00e+00; SWISSPROT HIT: P40414, EVALUE 3.70e-01; NT HIT: gi16162312, EVALUE 0.00e+00
ctaatttgagattttggtctttggttttgtcttatgaaattaaagagacaactgaagaattggatgtatccattgatattctaacctcaagggaacagtttttctcagatgaagaaagaaaatacatggccatcaatcagaagaaagcttatattttagtaacaccacttaaatctagaaaagtgatagagcaaagatgcatgaggtataatctgtccgctggcaccatcaaagcagtaacagattttgtaataccagagtgtcaaaaaaaaagtcccatcagcaagtccatggggactttagaaaatacatttgaaggtcataaaagtaaaaacaaggaagattgcgatgaacgtgacttacttactgtcaaccggaaaataaaaatatctaaccttgaaaaggaacaaatgctcacctctgactttaagaaaaataccagactattaccaaaattgaagaaaatagaaaatcaggtagctatgtcattttataagcatcagtcctcaccagatttgtcaagtgaagaaagtgaaacagaaaaggaaattaaaaggaaagctgaagttaagaaaaccaaagcaggaaacaccaaagaagcagtggttcacctgagaaagagcacaagaaacacaagtaatattccagtgattttggaacctgaaactgaagaaagtgaaaatgaattttatatcaaacaaaagaaagctagaccttccgtcaaagaaactcttcagaagtctggtgttaggaaagagtttccaattactgaggcagtaggatctgataagacaaataggcatcccttagaatgcttacctggtttaattcaggataaggaatggaatgagaaggagttacagaaacttcattgg

SEQ ID NO: 22954 - DNA, 666 bp, Homo sapiens
  MAP TO AF111170.3; EXPRESSED IN BRAIN, SIGNAL = 2.2; EXPRESSED IN LUNG, SIGNAL = 1.2; EXPRESSED IN BONE MARROW, SIGNAL = 1.3; NT HIT: AF111170.3, EVALUE 0.00e+00; EST_HUMAN HIT: BF952094.1, EVALUE 8.00e-94; SWISSPROT HIT: P04280, EVALUE 1.00e-08
acagtggtgtggcctctctctcctgagatgctaggttgttgctcctgagggtgccacggggctgtcaggctgtcccccgcccccagctgggcgactacgcggacagtggtgtggcctctctctcctgagatgctaggttgttgctcctgagggtgccacggggctgccaggctgtcccccgcccccagctgggcgactacgcggacagtggtgtggcctctctctcctgagatgctaggttgttgctcctgagggtgccacggggctgtcaggctgtcccccgcccccagctgggcgactacgcggacagtggtgtggcctctctctcctgagatgctaggttgttgctcctgagggtgccacggggctgccaggctgtcccccgcccccagctgggcgactacgcggacagtggtgtggcctctctctcctgagatgctaggttgttgctcctgagggtgccacggggctgccaggctgtcccccgcccccagctgggcgactacgcggacagtggtgtggcctctctctcctgagatgctaggttgttgctcctgagggtgccacggggctgccaggctgtcccccgcccccagctgggcgactacgcggacagtggtgtggcctctctctcctgagatgctaggttgttgctcctgagggtgc

SEQ ID NO: 22955 - DNA, 947 bp, Homo sapiens
  MAP TO AL356021.1; EXPRESSED IN HELA, SIGNAL = 1.4; EXPRESSED IN BONE MARROW, SIGNAL = 0.94; EST_HUMAN HIT: AW855724.1, EVALUE 6.00e-06; NT HIT: AL163208.2, EVALUE 2.00e-08; SWISSPROT HIT: P39053, EVALUE 4.00e-01
ggttcaggtgctccccagcttgaaagtggggattcacagaggactcgtccccttctgcctgtttgcctcctactgccattcatggcattcaggctatttgggccaacaggcacctgtgtgccagcactgagctgccctcaggcccacctggactccctcttgtgttctttggcgcctaaagtccagcggggcgaggaggcagggggctggcgtgtccacactgcctcgagcgtgcacacacctgcccaggctgcgacacgtccaggcttgactacaactttgctccaagatcagagcaagtgcagggagcggggagaggccaggcagcaggagcagacacctctgagcctgcgggggcagggcgcgggtccttcccgaccccgagagtgcagagatgcctgggtgtgcagccatgacttgggtggctgcagctgcacctgggagggcggggctcctgcctgctcccagcccctgctggttccgtgcagagtggagcgcaccaccaccctggacctacctccgcctcgaggcccctctctgcccgcccctccatgcccgactgtgctgctcccccagcagcggacaactcagcccgaccccatcactgcggctcccagggcagtgggctctgagggactcccaggggtgggctctagggactgcccacctcctgtccgcattttcaccgcagcatcggtggacaaggtgcaggtggcatggcggccctggccagccccacaacaaataaacctgacgctctcagagctgtcccagtaagtcccggctgtgccttccgccgggtgctcgcaggcttccgagatgcagcaggaagcagggttgaggctgcagcggaggctctgggtctgggagcgggtcctgcccggctgtacgacgatggaggtggcgtagtcagctgcctcggggacgcgagtcacaggggcccacca

SEQ ID NO: 22956 - DNA, 1494 bp, Homo sapiens
  MAP TO AL137818.2; EXPRESSED IN HELA, SIGNAL = 0.94; EXPRESSED IN BRAIN, SIGNAL = 0.78; EXPRESSED IN BONE MARROW, SIGNAL = 0.79; EST_HUMAN HIT: BG622807.1, EVALUE 0.00e+00; NT HIT: gi14750002, EVALUE 7.00e-89; SWISSPROT HIT: P25386, EVALUE 2.00e-03
atattgatgatgctcaaatacttccccgctcaactagagtcagacatttttcacaaagtgaagaaactggaaatgaagtttttggtgctttgaatgaggagcagccattgcctcgaagtagcagcacttctgacatcttggaaccattcactgttgaacgagccaaaggtgcagttcctgtcattgacagttcatcccgtcatgcaccaagcttgcagagttccacagaggcttcttcaataactagatccactgaaagccacatcactgatactcatagtagagagtcttctctggaagttggtgatagcatatatgaccatctttgtcatttaataggtccagtagaacttgcagattcagcttttgaacaaatccagtacattgaccttgaaggagatgatgatcttctttccaccctgaaagaatattttaaggaaaaccaggaaaatcatagtaaaaatgagacagggaaagacccagcttctcaggaagtgactattgcagtaaataggggtgaaagattatccttagataaattagaatgcacagatcaggaaactgaatcagaaaatatcacctcttttgttgggactcctgaaaacctacagtttcagaaagaaccaaactcagctgtcttcatgagtaatatcgcacctaaccagtcagacagtttttttagaacacaaacttctgaaaaatctaagcaactaaacactgataaacagccatcagagcctagtttagatagcccttgtgataaagaaaaaaggaaacatctgtacagacaagcagccacagaattagatgcttgtgttgatgtaacactagttgaaaagcttaagagtgtgcaaattaatgaaaaaatcactgtcccacatgttatgcgtgccaagaaagcaacactaaaagcacctgttaaccgcagaatgcctcatgttacaagtactagcaaactttctccaactaaaaggagcttgtctgaaacagtaactcatagagccaaaatcatgaaaattgctactaaaaaacgaaatagtgttcatgttacttttaggccatccactgagtccgttcagttttataatcctctggaaaacaaagaggctccatggaagatgagactgcggaagctcggtggctttagtagtggtagcagcaatagcagcactagcaacacccataccagcacaaatagtgctacagagctagtaaaacctggtgtgtacagacctctagatacacttggtactgcatcagtaagcagcaaaacagtgaaggaatccacagagattcccaccaccatattacaaaaagaaggaattgcaagtagtcaattaggtagtcgtagtactcttaggtcatcaagtcatgaggcaggactacagcagggctccctgggtggcgtttataaaactgttgtacatgctctttcgaagccgaaggcaaatgtttccccacagaggcagaacagaatgccaccagaggctccac

SEQ ID NO: 22957 - DNA, 525 bp, Homo sapiens
  MAP TO AL096800.20; EXPRESSED IN BONE MARROW, SIGNAL = 0.79; EXPRESSED IN BRAIN, SIGNAL = 1.1; SWISSPROT HIT: P38994, EVALUE 2.00e-15; EST_HUMAN HIT: BG724319.1, EVALUE 0.00e+00; NT HIT: gi14780991, EVALUE 0.00e+00
ttcatcctttgatcccggggccccttcctgtaccgcgtcctcagcatctggaatcttgagccccacggcatctgaggtgccttatgcctctggcatgcccatcaagaaaacaggccatcgaggtgtcgattcctcaggagagacaacatataaaaagacaacctcaacagccttgaaaggtgccatccagttaggcattacttacactgtggggagcctgagtaccaaaccagagcgtgatgtcctcatgcaagatttctacgtggtggagagtatcttcttccccagtgaagggagcaacctgacccctgctcatcactacaatgccttccgtttcaagacctatgcgccggttgccttccgctactttcgggagctatttggtatcccgcccgatgattacttgtgctccctctgcagtgagccgctgattgaactctgtagctctggagctagtggttccctgttctatgtgtccagcgacgatgaactcattattaagacactccaacataaagaggcgga

SEQ ID NO: 22958 - DNA, 593 bp, Homo sapiens
  MAP TO AC004586.1; EXPRESSED IN PLACENTA, SIGNAL = 5.2; EXPRESSED IN BONE MARROW, SIGNAL = 1.6; EXPRESSED IN LUNG, SIGNAL = 2.1; SWISSPROT HIT: P09958, EVALUE 1.00e-91; NT HIT: X04329.1, EVALUE 0.00e+00; EST_HUMAN HIT: BG760312.1, EVALUE 0.00e+00
tgtgcgaggaaggcttctccctgcaccagaagagctgtgtccagcactgccctccagggttcgccccccaagtcctcgatacgcactatagcaccgagaatgacgtggagaccatccgggccagcgtctgcgccccctgccacgcctcatgtgccacatgccaggggccggccctgacagactgcctcagctgccccagccacgcctccttggaccctgtggagcagacttgctcccggcaaagccagagcagccgagagtccccgccacagcagcagccacctcggctgcccccggaggtggaggcggggcaacggctgcgggcagggctgctgccctcacacctgcctgaggtggtggccggcctcagctgcgccttcatcgtgctggtcttcgtcactgtcttcctggtcctgcagctgcgctctggctttagttttcggggggtgaaggtgtacaccatggaccgtggcctcatctcctacaaggggctgccccctgaagcctggcaggaggagtgcccgtctgactcagaagaggacgagggccggggcgagaggaccgcctttatcaaagaccagagcgccctctga

SEQ ID NO: 22959 - DNA, 1033 bp, Homo sapiens
  MAP TO AF205588.1; EXPRESSED IN LUNG, SIGNAL = 1.1; EXPRESSED IN FETAL LIVER, SIGNAL = 1.3; EXPRESSED IN BONE MARROW, SIGNAL = 1.2; EXPRESSED IN HELA, SIGNAL = 0.89; EXPRESSED IN BRAIN, SIGNAL = 1.3; SWISSPROT HIT: Q06730, EVALUE 3.00e-95; NT HIT: gi15299302, EVALUE 0.00e+00; EST_HUMAN HIT: AL542243.1, EVALUE 0.00e+00
atgaagttcaatgagtttaacaaaggtggaaaatgtttctgtgatgaaaagcatgaaataattcattctgaagaggaaccttctgaatataataaaaatgggaacagcttctggctgaatgaagacctcatttggcatcagaaaattaaaaattgggaacaatcttttgaatacaatgaatgtgggaaagctttccctgagaattcactcttccttgtacataagagaggttacacaggacagaaaacctgcaaatatactgaacatgggaaaacctgtgatatgtcatttttcatcactcatcagcaaacacatccaagagaaaaccactatggtaatgaatgtggagaaaatatctttgaggaatccattctccttgaacatcagagtgtttacccattcagccagaagttaaatctcactccaattcagagaacccactcaattaacaatattattgaatataatgagtgtggaacatttttcagtgaaaaattagtccttcatttacaacagagaacacatacaggagaaaaaccttatgaatgtcatgaatgtggaaaaaccttcacccagaagtcagcccacacaagacatcagagaacacacacagggggaaaaccctatgaatgtcatgaatgtgggaagaccttctataagaattcagacctcattaaacatcaaagaattcatacaggggagagaccttatggatgtcatgaatgtgggaaatccttcagtgaaaagtcaacccttactcaacatcaaagaacgcacacaggggagaaaccatatgaatgtcatgaatgtgggaaaaccttctcatttaagtcagtccttactgtgcatcagaaaacacacacaggggagaagccctatgaatgctatgcatgtgggaaagcctttctcagaaaatcagacctcattaaacatcaaagaatacacacaggtgaaaaaccttatgaatgtaatgaatgtgggaagtcattctctgagaagtcaacccttactaaacatctaagaactcacacag

SEQ ID NO: 22960 - DNA, 731 bp, Homo sapiens
  MAP TO AL121948.7; EXPRESSED IN PLACENTA, SIGNAL = 5.4; EXPRESSED IN BRAIN, SIGNAL = 2.5; EXPRESSED IN HELA, SIGNAL = 0.46; EXPRESSED IN BONE MARROW, SIGNAL = 2.6; EXPRESSED IN LUNG, SIGNAL = 2.6; EXPRESSED IN HEART, SIGNAL = 3.5; EXPRESSED IN FETAL LIVER, SIGNAL = 2.4; SWISSPROT HIT: P81133, EVALUE 0.00e+00; NT HIT: gi13631082, EVALUE 0.00e+00; EST_HUMAN HIT: BF679225.1, EVALUE 1.00e+00
tcagcttccgttggttattataacagatgttcccttgtgtccttgtgctgggtctggttgcatcctcagatgggaagttacatcaaagtgtgagccattacagcccaaggaatagtttctaatggtttcgctgtcatataagtgctccagggcatatccagttaatgtgtaagcatgcttgtcaaaatactgccggtgagagccaaagcagtttggagagacagtagggtggtctcctgctgtctgatgaggagatatatccgaatgcagatagtctttagctaggatcaaactggattttgaaatgcgatccgaattgggactacttatccgagatagtgcggtgggactgttgtcatagtcattttcatgggggctcaacatttttccctctctctgctggatatggtcacatggtgaagtgttggcaagagcagagccatggcagacttcacctgttggtgggggctgttggtagtttgcaaaacacagggagtgttttttcccagccccattaatggaagccagttggtctgagggggctttccttagctgtaatctgttctcttcttctttaatcatttgctgagtggctcttataagagtttcaattttgctgggttcatgtgggctactttgatactgctcagtacgatatcggtcacctgattcactggccgacccagggtctggagaactgaccacactatcttcatcccaatgacctcgcc

SEQ ID NO: 22961 - DNA, 1376 bp, Homo sapiens
  MAP TO AC005923.2; EXPRESSED IN PLACENTA, SIGNAL = 3.9; EXPRESSED IN BRAIN, SIGNAL = 2.2; EXPRESSED IN LUNG, SIGNAL =   2; EXPRESSED IN HEART, SIGNAL =   2; EXPRESSED IN BONE MARROW, SIGNAL = 1.9; SWISSPROT HIT: Q14517, EVALUE 1.00e-68; EST_HUMAN HIT: BF363266.1, EVALUE 6.00e-10; NT HIT: gi14736192, EVALUE 0.00e+00
acctcggcgaaccgggcacgctttcgtcgcgccgcaaaccgccacccgcagtttccgcagtacaactaccagacgctggtgccggagaatgaggcagcaggcaccgcggtgctacgcgtggttgctcaggacccggacgccggcgaggccgggcgcctagtctactcgctggcggcactcatgaacagccgctcgctggagctgttcagcatcgacccgcagagcggccttatccgtacggcggcagctctggaccgcgagagcatggagcgtcactacctgcgtgtgaccgcgcaggaccacgggtcgccgcgcctctcggccaccacgatggtggccgtgacagtagccgaccgcaacgaccactcgccggtttttgagcaagcgcagtaccgggagacccttcgcgagaatgtggaggagggctaccctatcctgcagctgcgtgccactgacggcgacgcgccccccaacgccaacctgcgctaccgcttcgtggggccgccagctgcgcgcgctgcagctgccgccgccttcgagattgatccacgctccggcctcatcagcaccagcggccgagtggaccgcgagcacatggaaagctatgagctggtggtggaagccagcgaccagggccaggaacccgggccgcgctcggccactgtgcgcgtacacataactgtgctagacgagaacgacaatgctcctcagttcagcgagaagcgctacgtggcgcaggtgcgcgaggatgtgcgcccccacacagtcgtgctgcgcgtcacggccactgaccgggacaaggacgccaacggattggtgcactacaacatcatcagtggcaatagccgtggacactttgccatcgacagcctcactggcgagatccaggtggtggcacctctggacttcgaggcagagagagagtatgccttgcgcatcagggcgcaggatgctggccggccaccgctgtccaacaacacgggcctggccagcatccaggtggtggacatcaatgaccacattcctatttttgtcagcacgcccttccaagtttctgtcttggaaaatgctcccttgggtcactcagtcatccacattcaggcagtcgatgcagaccatggggagaatgccagattggagtactccctaactggtgtggcacctgatactccttttgtgataaacagcgccactggctgggtctctgtgagtggtcccctggaccgtgagtctgtggagcattacttctttggtgtggaggctcgagaccatggctcacccccactctctgcctcagccagtgtcaccgtgactgtgctggacgttaatgacaatcggcctgagttcacaatgaaggagtaccacctacgactgaa

SEQ ID NO: 22962 - DNA, 591 bp, Homo sapiens
  MAP TO AC007324.38; EXPRESSED IN LUNG, SIGNAL =   1; EXPRESSED IN BONE MARROW, SIGNAL = 0.96; EXPRESSED IN FETAL LIVER, SIGNAL = 1.1; EXPRESSED IN BRAIN, SIGNAL = 0.95; NT HIT: U82671.3, EVALUE 6.00e-10; EST_HUMAN HIT: AW292540.1, EVALUE 3.00e-19; SWISSPROT HIT: P29126, EVALUE 1.00e-09
agcctgagacccaggagagctgaagacatagttccagtctgagtctgaagcctgggacccatgagagctgaagacgtggtcccagtctgagtctgaagcctgagacccaggagagctgaagacgtggttccagtctgagtctgaagcctgagatccaggagagctaaggacatggttctagtctgagtctgaagcctgagacccaggagagctgatggtgtggttccagtctgagtctgaagcctgagacccaggagagctgaatacgtagttccagtctgagtctgaagcctgagttccaggagagctgaggacatggttccagtctgaatctgaagcctgagacccaggagagctgatggtgtggttccagtctgagtctgaagcctgagacccacgagagctgaagacgtggttccagtctgagtctgaagcctgagacccacgagagctgaagacgtggttccagtctgagtctgaagcctgagacccacgagagctgaagacgtggttccagtctgagtctgaagcctgagacccacgagagctgaagacgtggttccagtctgagtctgaagcctgagacccagg

SEQ ID NO: 22963 - DNA, 562 bp, Homo sapiens
  MAP TO AC010387.4; EXPRESSED IN BONE MARROW, SIGNAL = 1.1; EXPRESSED IN FETAL LIVER, SIGNAL = 1.1; EXPRESSED IN BRAIN, SIGNAL = 1.4; NT HIT: AJ278581.1, EVALUE 6.00e-87; EST_HUMAN HIT: BE295714.1, EVALUE 3.00e-80; SWISSPROT HIT: P10272, EVALUE 2.00e-18
ttatttctcttcttctttgtgtctctgtctttctgactccctctttgtctgtgtcttcctctctttgactttccgtctctctgtctcttcctctctctccttctctttatctctgtttcttcctctctttctctttctctgactttctgtctctttctctctttccttctgtctttgactttgtctctctttctttttctttctctctttctgtctctttctctttcctttctgctggtctttccttgcctctgccagctgcttgtgctgctgttctcccctctccttccccttttgatggctttggcagcataagactgccaactccttgggtttttgcactgcatgcaataactccatggtttccttgtgatatttaatggaggttcccccagatgttaggaatgccctttctttccatattgcagcatgggcatgtaggattaggtaagcacacttgctatctgtatacacatttgttctttttccttttcccagttctaaggctcgggtaagtgctaactcggtgctggtcccagggggaagaggcttacactggtcc

SEQ ID NO: 22964 - DNA, 1251 bp, Homo sapiens
  MAP TO AC007934.7; EXPRESSED IN BRAIN, SIGNAL = 1.7; EXPRESSED IN LUNG, SIGNAL = 1.7; EXPRESSED IN HEART, SIGNAL = 2.2; EXPRESSED IN BONE MARROW, SIGNAL = 1.8; EXPRESSED IN FETAL LIVER, SIGNAL = 2.3; EXPRESSED IN HELA, SIGNAL = 0.36; NT HIT: gi13647879, EVALUE 0.00e+00; EST_HUMAN HIT: AI800553.1, EVALUE 0.00e+00; SWISSPROT HIT: Q08426, EVALUE 0.00e+00
atgggccgaggcattgtcatttcttttgcaagggccaggattcctgtgattgctgtagactcggacaaaaaccagctagcaactgcaaacaagatgataacctctgtcttggaaaaagaagcctccaaaatgcaacagagcggccacccttggtcaggaccaaaacccaggttaacttcatctgtgaaggagcttggtggtgtagatttagtcattgaagcagtatttgaggaaatgagcctgaagaagcaggtctttgctgaactctcagctgtgtgcaaaccagaagcatttttgtgcactaatacttcagccctggatgttgatgagattgcttcttccactgatcgtcctcacttggtcattggcacccacttcttttcgccagctcatgtcatgaagttgttagaggttattcccagccaatactcttcccccactaccattgccactgttatgaacttatcaaaaaagattaaaaagattggagtcgttgtaggcaactgttttggatttgtggggaatcgaatgttgaatccttactacaatcaggcatatttcttgttagaagaaggcagcaaaccagaggaggtagatcaggtgctggaagagtttggttttaaaatgggaccttttagagtgtctgatcttgctgggttggatgtgggctggaaatctagaaaggggcaaggtcttactggacctacattgcttccaggaactcctgcccgaaaaaggggtaataggaggtactgcccaattcctgatgtgctctgtgaattaggacgatttggccagaagacaggtaagggttggtatcaatatgacaagccattgggtaggattcacaaacctgatccctggctttccaaattcctatcacggtatagaaaaacccatcacattgaaccacgtaccattagccaggatgagatccttgaacgctgcttatattcacttatcaatgaagcattccgtatcttgggagaagggatagctgctagcccagagcacattgatgttgtctatttacatggatatggatggccaaggcacaagggcgggcccatgttctatgcttccacagttgggttgcccacagttctagagaaattgcagaaatattacaggcagaaccctgatattccccaactggagccaagtgactatctaaaaaaactggcttctcagggaaaccctcccctgaaagaatggcaaagcttggcaggctcccctagcagtaaattgtga

SEQ ID NO: 22965 - DNA, 1839 bp, Homo sapiens
  MAP TO AL136040.3; EXPRESSED IN PLACENTA, SIGNAL = 1.5; EXPRESSED IN BRAIN, SIGNAL = 1.1; EXPRESSED IN HEART, SIGNAL = 1.2; EXPRESSED IN BONE MARROW, SIGNAL = 0.9; SWISSPROT HIT: Q9Y6Q2, EVALUE 2.00e-95; NT HIT: gi15300602, EVALUE 0.00e+00; EST_HUMAN HIT: AA984839.1, EVALUE 0.00e+00
acaattcctcctcgcttcaagaagatgaagaagtagagatggaggccatcagctggcaggccagcagtccagccatgaatgggcaccctgcccctccagtgacctctgctcgttttcccagctgggtcacctttgatgacaatgaagtcagctgccctttaccaccagtcacctctcctctgaagccaaatacaccaccaagtgcatctgtgatcccagatgtaccttataattcaatgggatcatttaagaagagggaccgtcccaagagcactttgatgaacttctccaaagttcagaagctggatatttcctctttaaaccgcacgccttctgtaactgaggcttcaccttggagggcaaccaaccctttcctgaatgagactctgcaggatgtacagccctcccctatcaaccctttcagtgctttctttgaggagcaggagaggcgctcccaaaacagttccatttccagtaccacgggcaaaagccaaagagattccctcattgtcatctaccaggatgccatcagttttgatgattcaagcaaaacccagtcacactctgatgctgttgaaaaactcaaacaactccaaattgatgaccctgatcactttggcagtgcaactctacctgatgatgacccagtagcctggattgaactagatgctcacccgcctggatcagcacggtcccagcctcgtgacgggtggccaatgatgttgaggatccctgagaagaaaaacatcatgtcctccaggcactggggaccgatcttcgtcaaactgacagacactggttacctgcagctgtattatgagcagggcctagaaaaaccattccgtgagttcaagctggagatctgtcatgagatttcagaaccccggcttcaaaactatgatgagaatggcagaatccacagcttgcggatagaccgtgtcacctataaagagaagaagaaataccagcccaaacctgctgtggcccacacagcagagagggaacaggtgattaagctgggcaccaccaattacgatgacttcctgagtttcatccatgcagttcaggaccgtctcatggatctgccagtgttgtcaatggacttgagcacagttggcctcaactaccttgaagaggagattacagtggatgtcagagatgaattctctggcattgtgagcaaaggagacaaccagattctccagcaccatgtcttgacacggatccacatcctgagtttcctgtctgggctcgcagagtgccgcctgggcctcaatgacatcctcgtcaaagggaatgaaatagttttgaggcaggacatcatgcccaccaccaccacaaagtggatcaagctccatgagtgccgtttccatgggtgtgtggatgaggatgttttccacaactcacgggtcattctgttcaaccctttggatgcgtgccggtttgagctaatgcggttcaggacagtgtttgctgagaagaccttgcctttcacactcaggacggccacaagtgtcaatggggcagaggtggaggtgcagagctggctgaggatgtcaactggcttctccgccaatcgtgaccccctcactcaggttccctgtgagaatgtgatgatccgttaccctgtgcccagtgagtgggtgaaaaacttccgcagggaaagtgtcctgggggaaaagtctttgaaagccaaagtgaaccggggggcaagttttggctccactagtgtttctggctctgagcctgtcatgagagtaactctgggaactgccaagtacgagcatgccttcaactccattgtgtggaggataaaccgactgccggacaaaaactcag

SEQ ID NO: 22966 - DNA, 482 bp, Homo sapiens
  MAP TO Z68694.1; EXPRESSED IN HELA, SIGNAL = 1.6; EXPRESSED IN BRAIN, SIGNAL = 1.5; EXPRESSED IN BONE MARROW, SIGNAL =   1; SWISSPROT HIT: Q01042, EVALUE 4.00e-11; EST_HUMAN HIT: AL550633.1, EVALUE 0.00e+00; NT HIT: gi14249717, EVALUE 0.00e+00
gaaaggcaaagaagggaacatctcaacatggaaaagctctacaaagaaaatgaaggaaagccagagaatgaaagaaacctagaaagtgagggaaagccagaggatgagggaagtacagaagatgaaggaaagtcagacgaggaagaaaagccggacatggaggggaagacagaatgcgagggaaagcgagaggatgagggagagccaggtgatgagggacaactggaagatgagggaaaccaggaaaagcagggcaagtctgaaggtgaggacaagccacaaagtgagggcaagccagcctcccaggccaagccagagagccagccgcgggccgccgaaaagcgcccggctgaagattatgtgccccggaaagcaaaaagaaaaaccgacagggggacggacgattcccccaaggactctcaggaggacttacaagaaaggcatctgagcagtgaggagatgatgagagaatgtggagatgt

SEQ ID NO: 22967 - DNA, 718 bp, Homo sapiens
  MAP TO AC023066.2; EXPRESSED IN BRAIN, SIGNAL = 1.3; EXPRESSED IN BONE MARROW, SIGNAL = 0.97; EXPRESSED IN FETAL LIVER, SIGNAL = 1.1; SWISSPROT HIT: P17029, EVALUE 1.20e-01; NT HIT: gi14738197, EVALUE 0.00e+00
caaaggaaacaagtttctgactctggtgatataaaaatcaaatcttggaggggaaataacaagaaagagtgttggagttatctctctactaataaaaagatgaaatctgatggattaggagcatctggacattcgtcaagtaccaatagaaatagtataaataaaactctgaagcaagatgatgtaaaggaaaaagatggtacaaaaatagcatctaagattacaaaagaactaaaaactgggggaaaaaatgtttctggaaagcccaaaactgtaacaaaatccaaaacagaaaatggtgataaggcacggttggaaaacatgtcacctagacaagttgtagaaagatcagcaacagcagcagcagcagcaactggacagaagaatttactaaatggaaaaggagtgagaaatcaggaagggcaaatttcaggtgccagacccaaggtactcacaggaaacttaaatgtgcaagccaaagcaaagcctttgaagaaagctacagggaaggattcaccatgcctcagcatcgcaggaccctccagcagatccacagattcaagtatggaattctcaatttccactgaatgtctggatgaaccgaaagaaaatggatcaacagaagaagaaaagccttctggacataaactatccttttgtgattctccaggacagatgatgaaaaacagtgtagatagtgtcaaaaattccactgtag

SEQ ID NO: 22968 - DNA, 610 bp, Homo sapiens
  MAP TO AC019140.2; EXPRESSED IN BONE MARROW, SIGNAL = 0.93; EXPRESSED IN BRAIN, SIGNAL =   1; EXPRESSED IN FETAL LIVER, SIGNAL = 1.1; SWISSPROT HIT: Q9QXZ0, EVALUE 9.90e+00; EST_HUMAN HIT: AU119120.1, EVALUE 0.00e+00; NT HIT: gi13643812, EVALUE 0.00e+00
gtggatcgtatgtctttcccatgcggctgcactaaagaaggatgtagtaacacagcaggtagaattgaatttaatcctatccgtgttcggactcactttttgcacacaataatgaaacttgaactggagaaaaaccgagagcagcaaatccccacgctgaatggctgccacagtgagataagtgctcacagtagttctatgggccctgtcgctcactccgtagaatattcaatcgcagacagttttgagattgaaactgagccccaggctgcagtgctgcacctgcagtcggctgaagaattagattgccaaggagaggaggaggaagaagaggaggatgggagcagcttttgcagcggagtcacagattctagcacgcaaagcttggcacctagtgagtcagacgaggaggaggaggaagaagaagaggaagaggaggaggaggatgacgatgatgacaaaggagatggcttcgtggaaggtttgggcacccatgccgaagttgtccctcttccttcagttctttgttattctgatggcaccgccgttcacgaaagccatgcaaagaatgcttctttttatgccaactcttcaactctgtattaccaaa

SEQ ID NO: 22969 - DNA, 635 bp, Homo sapiens
  MAP TO AL008639.15; EXPRESSED IN BRAIN, SIGNAL = 0.79; EXPRESSED IN BONE MARROW, SIGNAL = 2.5; EXPRESSED IN FETAL LIVER, SIGNAL = 0.96; EXPRESSED IN LUNG, SIGNAL = 1.9; SWISSPROT HIT: Q99439, EVALUE 2.00e-58; EST_HUMAN HIT: BE274405.1, EVALUE 0.00e+00; NT HIT: gi4758017, EVALUE 0.00e+00
ccatgagttccacgcagttcaacaaggggccttcttaccagctttttgccgagatcaagaaccagctcctgttcaaatgcgaccctcagaagcaggcggcgctctgcagctggatcgagggactcacccgcctctctttcagccccgacttccagaagagtctgaaggaagggattgtcttatgcacactcatgaacaagctgggctcagtccccaagatcaacggctcatgcagaactggcaccagctagaaaatctctccaacttcatcaaggccatggttggatacgacatgaaccccatggacctgttcgaggccaacgacctgtttgagagtaggaacatgacgcaggtgcagctgtctcttctagccctggcagggaaggtcaagacaaagctgctgcagaatggggtggacgtcggggtcaaatactcggagaagcaggagcggaacttcgacgacgccaccttgaaggccagccagtgcctcactgagctgcagatgggcaccaacatatgtgcctgccagtcgggcgcgacaacttagggcacgatgaggcatctctaccaccccaagaaccgtatcctgccctctggaccactcgaccatcagcctccagatgggtgcaaacaaa

SEQ ID NO: 22970 - DNA, 526 bp, Homo sapiens
  MAP TO AC005837.1; EXPRESSED IN PLACENTA, SIGNAL = 1.8; EXPRESSED IN HELA, SIGNAL = 1.1; EXPRESSED IN BONE MARROW, SIGNAL = 1.6; NT HIT: gi7305080, EVALUE 1.30e-01; SWISSPROT HIT: Q28983, EVALUE 6.00e-52
gcctttgtgatggcagtgtggtcctttttgatggcagtgtggtcctttttgatggcagtgtggtcctttttgatggcagtgtggtcctttgtgatggcagtgtgggcctctgtgacggcagcgtgggcctctgtgacggcagcgtgggcctctgtgatggcagagtgggcctctgtgatggcagcgtggtcctttgtgatggcagcgtgggcctctgtgacggcagcgtgggcctctgtgacggcagcgtgggcctctgtgatggcagagtgggcctctgtgacggcagagtgggcctttgtgatggcagcgtgggcctctgtgatggcagcgtgggcctctgtgacggcagcgtgggcctctgtgacggcagtgtggtcctttgtgatggcagcgtgggcctttgtgatggcagcgtgggcctttgtgatggcagtgtggtcctctgtgatggcagtgtggtcctttgtgatagcagagtgggccttcgtgatggcagtgtggtcctctgtgatggcagtgtggg

SEQ ID NO: 22971 - DNA, 1476 bp, Homo sapiens
  MAP TO AL049543.14; EXPRESSED IN BONE MARROW, SIGNAL = 0.8; EXPRESSED IN HELA, SIGNAL = 0.71; NT HIT: gi16174470, EVALUE 0.00e+00; SWISSPROT HIT: P34457, EVALUE 4.00e-05; EST_HUMAN HIT: BE176836.1, EVALUE 9.00e-06
ctggtgaaaatggtgtccctgatggctttagcattttggaaggtttaacaggcaaacttctttgaatctcatcatgtttcctcttcattgtgctggtttcatagcaaaggctacaagttatttgccgaccacagccctcagtcccatgttgagagggcactccacaaattgcatggatatttccatcacatgatatacaactattaacacctgtgcattctttttcacaaactacacaggataaaaatcttagtctgctctcaggagggcttttttcagccaccttaggagtgacagaaagattctcttcaatatcactactgtctgttccagtctcaatgttttcttcatactgggctcttaaagtattttctaactctttgtcagcctgatctaattcattttctgtatgcaagctggcaacaagttcttcagttagctgagaatgggacaagcccagtttagcttcagagctaaatgcactttcacatggagtctgttgcatgcttctgtgatagggctgattttgggacatctgaatgaaccacaaaaattcagtccagtgtgatgagttgttagtttgcatccaggagaaaatcctctttcggatatcctcagtttgttctgcagaactctggctttggcaggtctgagacttcccatggacaattttcaattctggccaaatattactgagttcactgacaacctggcttgaaaattccctcccattgtcagattgtaggacactgggtgctccaataattgtaaatatatctaaaagagcatgtgcaacttccgtaggccttttagactttaatgaccgcaaaaaagttaactttgtacagagatcttgataatgcaaaataaatctgtactccccatcaggattcaactgcatgtctataagatctacttggcatcttgaactaacttccttaattgattttgatgttagaaccttcttgagttttgaatttttctgttggcatggtttacagagggtcagatacagcattataacttcttttgtgatgttcttgtatttcgcttgtaactctttctccatgcgagtacgtccaccatgtccaatgctgagatgtgtattatgcagaatgtcaaataagtcctcactgtgtaagtaataccgtattttatctgtttccccatttacagcctcaattagcttctcatttccttgtacaaggataacatcaaatctagccaagcgacggtagtcaactgattcctttttcgccttagctttagcttctttcacttcctttatcaactgacagtactttgctttagaaaatatcttagtattattacttttgttttccagtaaccttgctaagcttctgaagaacttttctctcatgttttctggttcaatttctgcttcattagtatctaagctactgaggttatcaccacccatgctttgagacatcatggaaaaccacaaaaatgacc

SEQ ID NO: 22972 - DNA, 646 bp, Homo sapiens
  MAP TO AL163302.2; EXPRESSED IN BRAIN, SIGNAL = 0.98; EXPRESSED IN HELA, SIGNAL = 0.47; EXPRESSED IN LUNG, SIGNAL = 1.2; EXPRESSED IN BONE MARROW, SIGNAL = 0.84; SWISSPROT HIT: P36297, EVALUE 1.00e-02; NT HIT: AL163302.2, EVALUE 0.00e+00
atgtattccatcaacacagttgaaatgttttatgaccgcatggcagtatgttcgggtgagggtcctgtatgttttacacgacacatgtttaaacggcattctgtgagcccagaggctttgcctgccggccagcaaggtgcagtagaaaaggttgagggtcctagtctggtcccgtgtgggcactgcctgaccaggtggggtcagcaccaggatgagagccccagcctgcacctgccagccgcggtgccacgtccttcctccacttcccttcccgcagccctgggaaaccccagcccagtgggctggcaggaaggaggccggtgtgcatgtgcctgactggcccctggttggcgccaggcactctctgcaggaccctggcgccagcccgtcggaagacaaagcctggaggctattcttggagcatgtgtcacaaccccaggagcgccttataaggctctgtccaggctcaagatgctctctgagcgccagggtctgccctgacaatggcctgcagctggacgtggggccacacggccacctggctgctcctggcccgtttcgccctggggtccagactccctcctgtttcctgtgagtctcccctaagatttgaaggaatttgaccaacaccttggcctggggggac

SEQ ID NO: 22973 - DNA, 666 bp, Homo sapiens
  MAP TO AC019222.3; EXPRESSED IN LUNG, SIGNAL = 1.1; EXPRESSED IN BONE MARROW, SIGNAL = 0.89; EXPRESSED IN HELA, SIGNAL = 1.8; EST_HUMAN HIT: BI464211.1, EVALUE 0.00e+00; SWISSPROT HIT: P15387, EVALUE 6.00e-21; NT HIT: gi15595198, EVALUE 2.50e+00
ctgcgcctgcgcgcagctcgtgctggatcttgagccgttcgctcagctcgtcgcgccgctcctcgaagcagatgcggcagcagcgtggcgtgtacttgagccgcacgccccagtagcccagctcctccaggaagcggcgcggacacagcccgtcgagcaccagcagcaccccggacaggtagaaattgtagaccagctggaagacggccgggtcgcggtcgaagaagtattcgtctgtctgctcctcgtagtcgtcgcacaggcttagctggcggctgcggctggtggaggtggccaggcgacctaggcgcgtcttggggaagccggccagctcgcagtagtccagctggtagctgtggccacccacgttcacattcagcgtggacagcagggccggagggtcgctggggccctcgggcttggcggtggtgacctcccctgcctgctggtcctcttctgccaggtcgtccttccactggtcctcctcctcgccgtcttcgtcttcctcgatgtagtagttatagttgccctctgtccagccgtggatgctggcctgggagccggaacgggcacccagggagcaaatgctcctgcggtgttggctgccctcattctccgtcgtgttccagggcctgtagctccaggaccgtctcctctcactctgtt

SEQ ID NO: 22974 - DNA, 872 bp, Homo sapiens
  MAP TO AC022101.3; EXPRESSED IN BRAIN, SIGNAL = 0.95; EXPRESSED IN HELA, SIGNAL = 0.76; EXPRESSED IN BONE MARROW, SIGNAL = 0.88; SWISSPROT HIT: Q9Y6H5, EVALUE 0.00e+00; EST_HUMAN HIT: AA992624.1, EVALUE 1.00e-108; NT HIT: gi14722106, EVALUE 0.00e+00
caggagagagatctgtccttctttaacaatgttcaagatgcttttcacttttttcagatactcactcctttcttctgggccttgggagctggtccggtttaggccactgacctgctcttctggtttggattctgctgctgaggattgtaggtggaaggccctgagctggcagtctggtgttgtcttctcaacttttcgaccatgaggatcactaaatgtcttgtttaggaagtctttactctggttttcaggctcatatgcagagccacatttaaccagaggaggtgagatctcggtttcttcagtggacagcttgtgctggtcgtggatgacagctgatgcttttctcaagtgagggcttttcacgggagaaagaacacaaaatggtgccatgttggatgatgagctctcagaacttcctgtagagcaggctttgccagaaaggccattgatggttgtgcataagcccaaaattcttttttctgaagtcaccttggtaaaagaggcaagctgctgactggatttaatataaggcacatccagaatctcatccatgtcgaggtcgtagtgctccagttcacccagcgatgtgctgggctcagagctcttacctggtgggccgcccactccatctccagggccaagctcctgaggctgggggcccaggtcagactcaccccctttctggtactcaaccactttctggttcttttggtcatcactttcattgttctccagagtctctggctgatgtttcagtggcgaaacccgcttcactgggcggaacttactgtacacatcagcgattcctgtgggcttttgcgtgtttgtaataagagttgagatgccacaattccagctagagctagaaa

SEQ ID NO: 22975 - DNA, 1249 bp, Homo sapiens
  MAP TO AL157687.1; EXPRESSED IN HEART, SIGNAL = 3.2; EXPRESSED IN BONE MARROW, SIGNAL = 2.2; EXPRESSED IN FETAL LIVER, SIGNAL = 1.9; EXPRESSED IN HELA, SIGNAL = 0.77; EXPRESSED IN BRAIN, SIGNAL = 2.6; NT HIT: gi16189831, EVALUE 0.00e+00; SWISSPROT HIT: P38486, EVALUE 2.90e-02; EST_HUMAN HIT: BG393203.1, EVALUE 0.00e+00
gcccaatacagtggattcctcttcttccatgaggggtggccgctctgcctgcatgaacaggtggtggtgcagctagcagccctaccctggcaactgctgcgcccaggagacttctatctgcaggtggtgccctcagctgcccaagcaccccgactagcactcaagtgtctggcccctgggggtgggcgggtgcaggaggttcctgtgcccaatgaggcttgtgcctacctattcacacctgagtggctacaaggcatcaacaaggaccggccaacaggtcgcctcagtacctgcctactgtctgcgccctctgggattcagcggctgccctgggctgagctcatctgtccacgatttgtgcacaaagagggcctcatggttggacatcagccaagtacactgcccccagaactgccctctggacctccagggcttcccagccctccacttcctgaggaggcgctgggtacccggagtcctggggatgggcacaatgcccctgtggaaggacctgagggcgagtatgtggagctgttagaggtgacgctgcccgtgagggggagcccaacagatgctgaaggctccccaggcctctccagagtccggacggtacccacccgcaagggcgctggagggaagggccgccaccggagacaccgggcatggatgcaccagaagggcctggggcctcggggccaggatggagcacgcccacccggcgaggggagcagcaccggagcctcccctgagtctcccccaggagctgaggctgtcccagaggcagcagtcttggaggtgtctgagcccccagcagaggctgtgggagaagcctccggatcttgccccctgaggccaggggagcttagaggaggaggaggaggaggccagggggctgaaggaccacctggtacccctcggagaacaggcaaaggaaacagaagaaagaagcgagctgcaggtcgaggggctcttagccgaggaggggacagtgccccactgagccctggggacaaggaagatgccagccaccaagaagcccttggcaatctgccctcaccaagtgagcacaagcttccagaatgccacctggttaaggaggaatatgaaggctcagggaagccagaatctgagccaaaagagctcaaaacagcaggcgagaaagagcctcagctctctgaagcctgtgggcctacagaagagggggccggagagagagagctggaggggccaggcctgctgtgtatggcag

SEQ ID NO: 22976 - DNA, 823 bp, Homo sapiens
  MAP TO AL096706.10; EXPRESSED IN BRAIN, SIGNAL =   1; EXPRESSED IN HELA, SIGNAL = 0.65; EXPRESSED IN BONE MARROW, SIGNAL = 0.82; NT HIT: gi6679127, EVALUE 0.00e+00; SWISSPROT HIT: P56975, EVALUE 3.00e-82; EST_HUMAN HIT: BF947486.1, EVALUE 6.00e-24
atgagtgaaggggcggccgctgcctcgccacctggtgccgcttcggcagccgccgcctcggccgaggagggcaccgcggcggctgcggcggcggcagcggcgggcgggggcccggacggcggcggcgaaggggcggccgagcccccccgggagttacgctgtagcgactgcatcgtgtggaaccggcagcagacgtggctgtgcgtggtacctctgttcatcggcttcatcggcctggggctcagcctcatgcttctcaaatggatcgtggtgggctccgtcaaggagtacgtgcccaccgacctagtggactccaaggggatgggccaggaccccttcttcctctccaagcccagctctttccccaaggccatggagaccaccaccactaccacttccaccacgtcccccgccaccccctccgccgggggtgccgcctcctccaggacgcccaaccggattagcactcgcctgaccaccatcacgcgggcgcccactcgcttccccgggcaccgggtgcccatccgggccagcccgcgctccaccacagcacggaacactgcggcccctgcgacggtcccgtccaccacggccccgttcttcagtagcagcacgctgggctcccgacccccggtgccaggaactccaagtacccaggcaatgccctcctggcctactgcggcatacgctacctcctcctaccttcacgattctactccctcctggaccctgtctccctttcaggatgctgcctcctcttcttcctcttcttcctcctccgctaccaccaccacaccagaaactagcaccagccccaaatttc

SEQ ID NO: 22977 - DNA, 580 bp, Homo sapiens
  MAP TO AC002472.3; EXPRESSED IN HEART, SIGNAL = 1.3; EXPRESSED IN BONE MARROW, SIGNAL = 1.2; EXPRESSED IN LUNG, SIGNAL =   1; EXPRESSED IN HELA, SIGNAL = 1.8; EXPRESSED IN BRAIN, SIGNAL = 1.4; NT HIT: gi16167426, EVALUE 8.00e-28; SWISSPROT HIT: P13889, EVALUE 2.20e-01; EST_HUMAN HIT: BF982547.1, EVALUE 3.00e-25
tgtgtttctttcaaggctgcatctactcagaagagggacatttccacatactgagcatgtgccacccactggaagctgtgctgaggaccatgagtgcaggatctcatttaatcctcaccacgaccagggaggtgagtgcaaggaatctcacagatggggaaactgaagcttagaggcaccagctagcatctgaaaggacagtaatggagctggacaggcccagtccctgaccacagtacttctccctacctggtccaaacactgatgctgagactcactcacccattgtctccaccaaatacataaatggcatctttataggccaccactgtgtgcttgctgcgcctggaaagaaaggagtggagggcggtaaggacaggaccctcctggggggtacccaaggaatgggactaagcaggagagctgccacggaagttaggtatcacctctcaactgctaagatccatcatcttctaagataacaccaatcatcctgcaagtgaggacccctgacacggctccaggactctctggactcctcaccccacctcagagcacctgggaccccagcccaatatcc

SEQ ID NO: 22978 - DNA, 528 bp, Homo sapiens
  MAP TO AC006128.1; EXPRESSED IN BONE MARROW, SIGNAL = 0.76; EXPRESSED IN HELA, SIGNAL = 1.1; EST_HUMAN HIT: BE312479.1, EVALUE 0.00e+00; SWISSPROT HIT: Q60760, EVALUE 3.30e-01; NT HIT: gi14761720, EVALUE 0.00e+00
aggagtgggaggtcttctcatgaagggtctttgccttgaagggcagttcagtctggatgtaggtcttggccttgacctctgctgggaggaggcggtcctcctgcaggggccgcttggctgccactgagcccaggtagccagtggctgagggcttggccccagtgatgggcgtcaggctgagctcacgaggaacctgggccggccctgcacctggtttgcctggccggccagccaggggcgacagcggcagtggggactgcacgggcccaggggccacggtgggaggcccgtcctcagccagggcaggggccaggtctccagccggtggctccttcttgatgaggcacggcttggacttcttcttgaggatctctcgcagtgtgtcgatgggcgaaccattgacggaccactcggtcacacccatctgccgcaggtgtgagcgcgcgtgactcgacaggcccttgcggttctcgaagaactcgccgcagaactcacagcggatgtcgcgcaccggctctgcccgggacg

SEQ ID NO: 22979 - DNA, 557 bp, Homo sapiens
  MAP TO X66401.1; EXPRESSED IN BONE MARROW, SIGNAL = 0.84; EXPRESSED IN HELA, SIGNAL = 1.2; SWISSPROT HIT: Q03518, EVALUE 1.00e-40; EST_HUMAN HIT: AI346197.1, EVALUE 0.00e+00; NT HIT: gi16174996, EVALUE 0.00e+00
atggctgagcttctcgccagcgcaggatcagcctgttcctgggactttccgagagccccgccctcgttccctcccccagccgccagtaggggaggactcggcggtacccggagcttcaggccccaccggggcgcggagagtcccaggcccggccgggaccgggacggcgtccgagtgccaatggctagctctaggtgtcccgctccccgcgggtgccgctgcctccccggagcttctctcgcatggctggggacagtactgctacttctcgccgactgggtgctgctccggaccgcgctgccccgcatattctccctgctggtgcccaccgcgctgccactgctccgggtctgggcggtgggcctgagccgctgggccgtgctctggctgggggcctgcggggtcctcagggcaacggttggctccaagagcgaaaacgcaggtgcccagggctggctggctgctttgaagccattagctgcggcactgggcttggccctgccgggacttgccttgttccgagagctgatctcatggggagcccccgggtccgcgga

SEQ ID NO: 22980 - DNA, 587 bp, Homo sapiens
  MAP TO AL035703.17; EXPRESSED IN HELA, SIGNAL = 3.3; EXPRESSED IN BRAIN, SIGNAL = 1.5; EXPRESSED IN BONE MARROW, SIGNAL = 1.8; EXPRESSED IN LUNG, SIGNAL = 1.7; SWISSPROT HIT: P19332, EVALUE 2.70e+00; EST_HUMAN HIT: AL528782.1, EVALUE 2.00e-38; NT HIT: AF210249.1, EVALUE 2.00e-03
cttcgccgcgcgccgcggacacgcaggtggccgccgccgccgcggccgtgacgacccagagcgcagggggcaggcggccccgggcgggggccatggccgggccgggccgggcgggcgggggcgccacgcaccctcgggcttggccgctgcggcccgcgcgtcgggagggagcgcgctccctcgctctccgcacacccggccgggcgcacaccccggcgcacacgcggctcccagcgcacacgcgggcacccgcgcccgccgccgccgccgccgccccgggcgggggccggcccgtcacggcgccgagccaatcagcaccgaggcgggggggtgggggacacggagcccgcaccgcggccacccggcccgcggccaccgccgccgcacgtgcgcacgcccacactcccccggcgggcaccttcgggggcgcgccccgcgctgcgcacttggactcagggctcagggccccagtgcgcgaagccaccatcgggacgtcccggcgacaccaggaccagacccacccagggattccctctgtggacacacgcgcgggccgcacatccaccgcatgctcgctcctgcccgca

SEQ ID NO: 22981 - DNA, 2501 bp, Homo sapiens
  MAP TO AL109653.9; EXPRESSED IN HELA, SIGNAL = 1.1; EXPRESSED IN BONE MARROW, SIGNAL = 0.98; SWISSPROT HIT: O94991, EVALUE 0.00e+00; EST_HUMAN HIT: BE141495.1, EVALUE 0.00e+00; NT HIT: gi14768941, EVALUE 0.00e+00
tggccgggatcttacagacagagagtcgcaaaactgccaaagacatttgcaagatccgctgtctgtgcgaagaaaaggaaaacgtactgaatatcaactgtgagaacaaaggatttacaacagttagcctgctccagcccccccagtatcgaatctatcagctttttctcaatggaaacctcttgacaagactgtatccaaacgaatttgtcaattactccaacgcggtgactcttcacctaggtaacaacgggttacaggagatccgaacgggggcattcagtggcctgaaaactctcaaaagactgcatctcaacaacaacaagcttgagatattgagggaggacaccttcctaggcctggagagcctggagtatctccaggccgactacaattacatcagtgccatcgaggctggggcattcagcaaacttaacaagctcaaagtgctcatcctgaatgacaaccttctgctttcactgcccagcaatgtgttccgctttgtcctgctgacccacttagacctcagggggaataggctaaaagtaatgccttttgctggcgtccttgaacatattggagggatcatggagattcagctggaggaaaatccatggaattgcacttgtgacttacttcctctcaaggcctggctagacaccataactgtttttgtgggagagattgtctgtgagactccctttaggttgcatgggaaagacgtgacccagctgaccaggcaagacctctgtcccagaaaaagtgccagtgattccagtcagaggggcagccatgctgacacccacgtccaaaggctgtcacctacaatgaatcctgctctcaacccaaccagggctccgaaagccagccggccgcccaaaatgagaaatcgtccaactcctcgagtgactgtgtcaaaggacaggcaaagttttggacccatcatggtgtaccagaccaagtctcctgtgcctctcacctgtcccagcagctgtgtctgcacctctcagagctcagacaatggtctgaatgtaaactgccaagaaaggaagttcactaatatctctgacctgcagcccaaaccgaccagtccaaagaaactctacctaacagggaactatcttcaaactgtctataagaatgacctcttagaatacagttctttggacttactgcacttaggaaacaacaggattgcagtcattcaggaaggtgcctttacaaacctgaccagtttacgcagactttatctgaatggcaattaccttgaagtgctgtacccttctatgtttgatggactgcagagcttgcaatatctctatttagagtataatgtcattaaggaaattaagcctctgacctttgatgctttgattaacctacagctactgtttctgaacaacaaccttcttcggtccttacctgataatatatttggggggacggccctaaccaggctgaatctgagaaacaaccatttttctcacctgcccgtgaaaggggttctggatcagctcccggctttcatccagatagatctgcaggagaacccctgggactgtacctgtgacatcatggggctgaaagactggacagaacatgccaattcccctgtcatcattaatgaggtgacttgcgaatctcctgctaagcatgcaggggagatactaaaatttctggggagggaggctatctgtccagacagcccaaacttgtcagatggaaccgtcttgtcaatgaatcacaatacagacacacctcggtcgcttagtgtgtctcctagttcctatcctgaactacacactgaagttccactgtctgtcttaattctgggattgcttgttgttttcatcttatctgtctgttttggggctggtttattcgtctttgtcttgaaacgccgaaagggagtgccgagcgttcccaggaataccaacaacttagacgtaagctcctttcaattacagtatgggtcttacaacactgagactcacgataaaacagacggccatgtctacaactatatccccccacctgtgggtcagatgtgccaaaaccccatctacatgcagaaggaaggagacccagtagcctattaccgaaacctgcaagagttcagctatagcaacctggaggagaaaaaagaagagccagccacacctgcttacacaataagtgccactgagctgctagaaaagcaggccacaccaagagagcctgagctgctgtatcaaaatattgctgagcgagtcaaggaacttcccagcgcaggcctagtccactataacttttgtaccttacctaaaaggcagtttgccccttcctatgaatctcgacgccaaaaccaagacagaatcaataaaaccgttttatatggaactcccaggaaatgctttgtggggcagtcaaaacccaaccaccctttactgcaagctaagccgcaatcagaaccggactacctcgaagttctggaaaaacaaactgcaatcagtcagctgtga

SEQ ID NO: 22982 - DNA, 541 bp, Homo sapiens
  MAP TO AL162633.2; EXPRESSED IN BONE MARROW, SIGNAL = 1.2; EXPRESSED IN LUNG, SIGNAL =   1; EXPRESSED IN HELA, SIGNAL = 1.3; SWISSPROT HIT: P15505, EVALUE 4.50e-01; EST_HUMAN HIT: AW271838.1, EVALUE 0.00e+00; NT HIT: gi10864062, EVALUE 0.00e+00
atttgatgcagttttgctccccaaccagctgtgtagcacagaaagggcaagcagcgtgaaatgcatgagttccatgaggcaacgggatctgagaccagtattttgcagacttctccgagcacacgtgtccacagggagtgaaagcatgagttggcggtcctgcgtctacataaaatcctgcctcacagccaagccagagaggcacataggggcccacagtcctgcacatgggacactccctctcgttggcctccgtgtcactccgatggccccagttgtggtacccgtgcacgtggccacaactgagatatgcccagggctgcttctcctccaccacctctttcctgttgatgctggggaaggccagggtgttgagccccacaggacactgaggccgggcggcgttaatctcctgccggagggcttctatgtgcttctgagttggagtatgaaaaagcccatctgctgttctccagaggagagtggccccacacaggtcaatgagggagccgtcctgcaggacgttggtctcactttccac

SEQ ID NO: 22983 - DNA, 734 bp, Homo sapiens
  MAP TO D87002.1; EXPRESSED IN BONE MARROW, SIGNAL = 1.9; SWISSPROT HIT: Q9Y2N3, EVALUE 1.00e-13; EST_HUMAN HIT: AL041202.1, EVALUE 0.00e+00; NT HIT: gi16167547, EVALUE 0.00e+00
ctctgggcacctgctgcagctgtggctgaggcccagaaatgtgaagggcctccatccactccagtagtgaccccaacgtggggttcaatgcggaggggggaggggctgctgcggcagctgcaggagcagaagtgccacgccttgttcttctcatgcccgcatccatgcttgcagctgggaagggggcaggaatcagcgaggtgacctgggctgagtcctgggaatgggaagaggtggcaggaaggggatctgaggaggagaacagggggcctggtggtctgtgcttcttcccagacatgggagctgtagaggggacctctgcagcagatgctaagggggccagtaggcccaggcagtcttgggacttgtgtgtctcctgctgtgcatccatactgggtgctttagaaacggcaggcagaccagaagcccctgttgcaagtgaggacaaagtgtgggaaggccgtgagggtctgcagtccgagatggccttgtcctcaacttgcagtgcactgttgatgcgctggaatgccgcctccttctcccggtcaaggtcttcaacagtgacccggtaccccagctctaagggaggtggcagcatcaaaggctcccctcgcctgcatggcagcaggggaaacttgtgtgtactgggcctagaggcctcggatgtggaggagtcattcctgagggtgagtgtctgccctggtgctatatctgctgccttttcacactgggtg

SEQ ID NO: 22984 - DNA, 530 bp, Homo sapiens
  MAP TO AL050349.9; EXPRESSED IN HELA, SIGNAL = 1.2; EXPRESSED IN BONE MARROW, SIGNAL = 0.78; EST_HUMAN HIT: BG291145.1, EVALUE 0.00e+00; SWISSPROT HIT: Q9UJU3, EVALUE 9.00e-10; NT HIT: gi14772640, EVALUE 0.00e+00
tcactcggaggcctggatgtagacgggcacagcgagcatggcacatgggccctcggccccagcctgcagctccgccagagccaggttggagcccagcccctcagcgtgtccaggtaccaccagctcagtttccgcgcccaccgcaccacccacaacgatggacagcaccgcgtccggctctgcgaagggcggcttgccggggacagcctcgggcaccagcccagcccctgtgtccttcagctcctccagccccagcgggtcaggcaagggggtcagcaccttgcgcccaccactgccgcaactgcggggggctgccctcctctgggggggccgccgggtttgcaggtccttgtccttttgggggccgagacgacagcggtgatctttgaggtatttgtggcgggaaaagcccttggcgcagccagcacagcggaacttgtagttgcccgtgtgggcgcgctgatgctcggcgaggtgggcacggcggctgaaggacttgctgcacagggcgcatttgtggagcttcatgc

SEQ ID NO: 22985 - DNA, 904 bp, Homo sapiens
  MAP TO AL021579.1; EXPRESSED IN HELA, SIGNAL = 1.9; EXPRESSED IN HEART, SIGNAL = 1.5; EXPRESSED IN BONE MARROW, SIGNAL = 1.7; EST_HUMAN HIT: BG481596.1, EVALUE 0.00e+00; NT HIT: gi14736452, EVALUE 0.00e+00
gtctggaacaaaaagaatgcaaatgaaaaaggaagaagccagacttctaagcttcctccaagatttgccaaaaaacaggctacagggatccagcaagcacagtcttcagcctcagttccacctctagcttcggctccacttccaccttcaacctcagcttcagttccagcctcaacctcagctccacttccggcaaccttaactccagttccagcctcaacctcagctccggttccagcctcaactttagctccagttctggcctcaacctcagctccagttccagcctcacccttagctccagtttcagcctcagcctcagtctcagcttcagttccagcctctacttcagctgcagctataacctcttcttcagctccagcctcagccccagctccaacccccatccttgcctcagtttcaaccccagcttctgtcaccattcttgcctcagcctcaattcccattcttgcttcagccctagcatcaacttcagctccaacgccagccccagcagcctcttccccagctgccccagtcatcacagcaccaactatcccagcctcagccccaactgcctcagtcccacttgcccctgcctcagcttcagccccagccccagcccctaccccagtctcagccccaaatcctgccccacctgccccagcccagactcaggcacagacccacaaaccagtccagaatccactacagactacatctcagtcttcaaaacaaccaccaccatcaattaggctgccttcagctcaaacacctaatggcacagattatgtagcctcaggaaaatccatccagaccccacagtcacatggcactctgacagctgaattatgggataacaaggtggccccaccagctgtgctgaatgatatctctaagaaat

SEQ ID NO: 22986 - DNA, 524 bp, Homo sapiens
  MAP TO AP001751.1; EXPRESSED IN BONE MARROW, SIGNAL = 1.3; EXPRESSED IN HELA, SIGNAL = 4.4; EST_HUMAN HIT: BG719047.1, EVALUE 7.00e-66; NT HIT: AB020480.1, EVALUE 5.00e-44; SWISSPROT HIT: P57059, EVALUE 1.00e-35
ccagatgtccagctgggggccttcatactccttcccctcaaagacttccggggcggcatacggggggctcccacaccacgtggacagaggctctcctgacttgtagaaattcccaaatccaaaatctgagcggcaaagaaacagatggatgaggttaaacggcaaatggcaaggggctgcggtttcggcacaggggctgtggtttcggcacatgccgggaagctggggctgcttgcgggcacactcccaccccggggcctccgtgcctgccagcttgatgtccctgctcccaccccggaccctccgtgcctgccagcttgatgtccctgctcccaccccagaccctccgtgcctgccagcttgatgtccctgctcccaccccggaccctccgtgcctgccagcttgatgtccatgttgccatccagcaggaggttctcggtcttgaggtcccggtggacgatgtgatggtcgtgacagtactccacggccgacaggatttgccagaacttcttccgcgcctcgt

SEQ ID NO: 22987 - DNA, 606 bp, Homo sapiens
  MAP TO AL136109.1; EXPRESSED IN BRAIN, SIGNAL = 1.2; EXPRESSED IN HELA, SIGNAL = 1.1; EXPRESSED IN BONE MARROW, SIGNAL = 0.9; SWISSPROT HIT: Q92618, EVALUE 1.00e-01; EST_HUMAN HIT: AU134074.1, EVALUE 0.00e+00; NT HIT: gi16161126, EVALUE 0.00e+00
ctatagagaagtctgaaaccacttctgaacacacttgtcagctctgtggtggttggtttgatactaaaattggattatcaaatcatgttagaggccacttgaaaagacttggaaagacgaaatgggatgctcacaaatctccaatctgtgttctgaatgagatgatgcaaaatgaagaaaaatatgaaaaaatcttaaaggcattgaacagtcgtcgtattattcccagaccatttgtagctcaaaaacttgcatcaagtgatgactttatatctcaaaatgttatacctcttgaagcataccgtaatggcctaaagactgaagctctgtcagtgtctgcatcagaagaagaagggctgaatttcttaaatgaatatgatgaaacaaaaccagaactgcccagtgggaaaaagaatcagtctcttacactcatagaacttcttaaaaataaaaggatgggagaagaaaggaattctgctatttctcctcaaaagatccataatcagacagcaagaaagagattcgttcagaaatgcgttcttccattaaatgaggatagtccgttgatgtatcagccacaaaaaatggacttgactatgcactcag

SEQ ID NO: 22988 - DNA, 888 bp, Homo sapiens
  MAP TO AC005261.1; EXPRESSED IN LUNG, SIGNAL = 1.1; EXPRESSED IN BONE MARROW, SIGNAL =   1; EXPRESSED IN HELA, SIGNAL = 1.2; EST_HUMAN HIT: BI047079.1, EVALUE 0.00e+00; SWISSPROT HIT: O43296, EVALUE 2.00e-91; NT HIT: gi11426566, EVALUE 2.00e-26
gtgacagcacaaaacctgagaccgtagagcctatcccttctcatctggccttgcctgaggaagtctcactccaggaacagctggcacagggagtcccaagatactcctatttggggcaggccatggatcaagatgggccatctgaaatgcaggaatactttttgagaccagggacagacccacagagtgagaaactccatgggaaaatgagccttgaacacgaaggtttggcgacagctgatggtatttgttcaatgatgatacagaaccaagtctcaccagaagatgctctctatggatttgactcatatggaccagttacagattccttgattcatgaaggggaaaattcctataaattcgaggaaatgtttaatgagaattgcttccttgttcagcatgagcagattctccctcgtgtgaagccctatgattgcccagaatgtgggaaagccttcggcaagagcaaacacctccttcagcatcacatcatccatactggggagaagccctataaatgcctggagtgtgggaaagacttcaaccgcaggtcacacctcacacggcaccagcggactcacaatggagataagccctttgtgtgcagtgaatgtggaaggaccttcaatcgcgggtcgcaccttacacggcaccagcgggttcacagtggagagaagccttttgtgtgcaatgaatgtggaaaggcctttacctaccgctccaattttgtcttgcataacaagagccacaatgagaagaaacccttcgcatgcagcgaatgtggaaaaggcttttatgagagtacagccctcattcaacacttcattatccatactggggagaggccctttaagtgccttgagtgtgggaaggccttcaactgcaggt

SEQ ID NO: 22989 - DNA, 1053 bp, Homo sapiens
  MAP TO AC011447.2; EXPRESSED IN BRAIN, SIGNAL = 2.1; EXPRESSED IN BONE MARROW, SIGNAL = 1.7; SWISSPROT HIT: P35789, EVALUE 0.00e+00; EST_HUMAN HIT: BE177799.1, EVALUE 0.00e+00; NT HIT: gi14767612, EVALUE 0.00e+00
atttgtaaggtttctctccagtatgagttgtcttatgttcagttagatttgaggatgtagtatacgctttgccacattcttcacatttgtagggtttctctccagtatgagttctcctatgtttatggaggcctgcagaccatgtaaaggctttgccacattcttcacatttgtatggtttctctccagtatgaattatcttatgcatagtaaggtgtgaggagcgggtgaaggctttgccacattcttcacatttgtagggtttctctcccgtatgaatcttctcatgtttactaaggatcgaggatgaaataaaggctttgccacatttatcacacgtgtacggtttctctccagtatgaattttcttatgtgaagaaagagttgcaggatggttaaaagctttgtcacattctttacatttgtagggttgctctccagtatggattatcttatgtgtagtaagggtataggggtacataaaggctttgccacattcttcacaaatgtagggtttctctccactatgaattttcttatgtgtagtaaagctagagaagtacttaaagactttgccacattcttcacatttgtagggtttctctctagtatgagttatcttatgtgtagtaaggtgtgaggaccggttgaaggctttgccacattcttcacatttgtatggtttctctccagtatcaatttttttatgtgtagtatgggttgaggactggttaaaagctttgtcaccttctatatatttcaaaggttttttttcagtatgtcttcttttatgtctctttgaatttgaaaattgatgaaagactttcacatatttaccacattgaaatattttgctctgggtagttgtcaaacattggttaagtccattataacctcttttgtgtaacttacactcatccacactttcacagccttttttaaagtgtaaattgccatgtccacatttttcaaattttctcagtatcactttttggtaagaatcttttatgctctgctctggccaaaggtcttgggcaaaatgagaacacacaa

SEQ ID NO: 22990 - DNA, 779 bp, Homo sapiens
  MAP TO AC022091.2; EXPRESSED IN BRAIN, SIGNAL = 1.4; EXPRESSED IN HELA, SIGNAL = 0.94; EXPRESSED IN BONE MARROW, SIGNAL = 0.75; EXPRESSED IN LUNG, SIGNAL = 1.1; SWISSPROT HIT: P02810, EVALUE 1.00e-04; EST_HUMAN HIT: BI820174.1, EVALUE 0.00e+00; NT HIT: gi6005797, EVALUE 0.00e+00
ctcctcagccggtgcctggggttgcccatcagcacacagggtgctgggtttggaagcaggccctgtgccattagatgggagttgggcctctgaggaattctgttggatgctagaaagtggcaggctctgtgggacaacagttgccggtgggttctgattgacatcggtggctggcggattgtggctgctgttagaagttggtgtggtgagcgtggcactgggcgaggcaaggttttggttgacatctgcagctgggctgtggacctcagctggaggtggggccggtgaggactgctgggcctctcggttttgggacaggtgcagcccattggctgtcagcagtgctgcattctcctttagataaaccaccagtggtacctcttcctcctcactggccaccttctccaggtgccgcagcaagctagcctcctctgagtacccctccatgctgtggccagggacccctctgtcggggctctggggactggggtgccgtggagggcctggctccggcagcgaggtggaactcaggctgagccccggtgcatggcctgggaggcttgaagggagcactctgagggactcctggctgggcttctgtcccctctggccgtggctctccaaggtgaactcgttcaccctctgccggcgcctgttgaagagctggacgccacgggaattggagctgggaggggtggtcagctgggctgcaatctgctggctccgcgccttggcttctttcagatccttctccgtgaggctagtgctccggcccaacg

SEQ ID NO: 22991 - DNA, 508 bp, Homo sapiens
  MAP TO AC001070.1; EXPRESSED IN BONE MARROW, SIGNAL = 5.9; NT HIT: gi14777900, EVALUE 0.00e+00; EST_HUMAN HIT: BE932481.1, EVALUE 0.00e+00; SWISSPROT HIT: Q9NVW2, EVALUE 6.10e+00
tgggggagttctagagcgagtttctggtgaggatgaggcagagcggcttctacgggacagtctggccttccttgttagctccggagatgatcgagagctgcgacgtcgaggtggtgtacgagacttggtcttgggctctggtgatgacctggaacctctgcgagcagttctggatttgggcggatgttcaggagaggactcggtactgctgcttccttcaggagaagggcctctgcctttgcttgatgaacctgatctgcttcgtctgggaagggcccgaggggctggagctttaggttcaggagaggaatcagaaccactctgtgccctgggtgctgctcttggcttatctttcacttcaggggaggaaccagacctactgcgccgaggggatagtcgagatttgctgtcaacctctggagatgatccagaccgactcctctgccgaagtggggttcgtgtcttggctttagaatctggagaagagtctgactcacttctttcctga

SEQ ID NO: 22992 - DNA, 1191 bp, Homo sapiens
  MAP TO AC012627.4; EXPRESSED IN HELA, SIGNAL = 1.3; EXPRESSED IN BONE MARROW, SIGNAL = 1.4; NT HIT: gi13650821, EVALUE 0.00e+00; SWISSPROT HIT: Q03923, EVALUE 0.00e+00; EST_HUMAN HIT: AU143734.1, EVALUE 0.00e+00
cccaagacctttggccagagcagggcataaaagattctttccaagaagtcatattgagaagatatggaaaatgtggacatgaagatttacagttaagaacaggctgtaaaagtgtggatgagtgtaatctgcacaaagaatgttatgatgaactaaaccagtgtttgacaactacccagagtgaaatatttcaatatgataaatatgtgaatgtcttttataaattttcaaatccaaatatacaaaagataagacatactggaaagaagcctttcaaatgtaaaaaatgtgacaaatcgttttgcatgcttttacacctaactcaacataaaagaattcatattagggaaaattcttaccaatgtgaagaatgtggtaaagtctttaactggttctcaacccttactagacacagaagaattcatactggagagaaaccctacaaatgtgaacaatgtggcaaagcttttaagcagtcctcaacccttactacacataagataattcatactggagagaaaccctacagatgtgaagaatgtggcaaaacctttaaccggtcctcacaccttactacacataaaagaattcatactggagagaaaccctacagatgtgaagaatgtggcagagcttttaaccggtcctcacaccttactacacataagattattcatactggagagaaaccctacaaatgtgaagaatgtggcaaagcttttaaccaatcctcaacccttactacacataagataattcatgctggagagaaaccttacaaatgtgaagaatgtggcaaagctttttaccgattctcataccttactaaacataagataattcatactggagagaaattctacaaatgtgaagaatgtggcaaaggctttaattggtcctcgacccttactaaacataaaagaattcatactggagagaaaccctacaaatgtgaacaatgtggcaaagcttttaatgagtcctcaaaccttactgcacataagataattcatactggagagaaaccctacaaatgtgaagaatgtggcaaagcctttaaccggtccccaaaacttactgcacataaggtaattcattctggagagaaaccctacaaatgtgaagaatgtggcaaagcttttaaccaattctcaaaccttactaaacataagataactcatattggagata

SEQ ID NO: 22993 - DNA, 559 bp, Homo sapiens
  MAP TO AC013591.3; EXPRESSED IN LUNG, SIGNAL = 1.5; EXPRESSED IN BONE MARROW, SIGNAL = 1.6; EXPRESSED IN FETAL LIVER, SIGNAL = 1.6; NT HIT: gi15311111, EVALUE 0.00e+00; EST_HUMAN HIT: BG818534.1, EVALUE 0.00e+00; SWISSPROT HIT: Q9P2W7, EVALUE 2.00e-91
ggccgtagccggcgctctcctcccacatcgccggtctcccgactccgcagatgagggcagtgacccccgacgcgaaacgccgcccggcgccgaccccagggagtactgcacgtctgaccgcgacatcgtggaggtggtgcgcaccgagtacgtgtacacgcggcccccgccatggtccgacacgctgcccaccatccacgtggtgacgcccacctacagccgcccggtgcagaaggccgagctgacgcgcatggccaacacgctgctgcacgtgcccaacctccactggctggtggtggaggatgcgccgcgccggacgccgctgaccgcgcgcctgctgcgcgacaccggcctcaactacacgcacctgcacgtggagacgccccgcaactacaagctgcgcggagacgcccgcgacccacgcatcccgcggggcaccatgcagcgcaacctggccctgcgctggctgcgcgagaccttcccgcgcaactccagccagcctggcgtggtctacttcgccgacgacgacaacacctacagcctggagctcttcgaagag

SEQ ID NO: 22994 - DNA, 528 bp, Homo sapiens
  MAP TO AL353998.3; EXPRESSED IN LUNG, SIGNAL = 0.94; EXPRESSED IN BONE MARROW, SIGNAL = 1.6; EXPRESSED IN HELA, SIGNAL = 0.5; EXPRESSED IN BRAIN, SIGNAL = 0.8; EST_HUMAN HIT: AI214122.1, EVALUE 0.00e+00; NT HIT: AB017908.1, EVALUE 5.00e-01; SWISSPROT HIT: P30647, EVALUE 4.00e-03
aaccccttgttcgtggaggctgaggagaaagtctcctacaactgctgccgccagggcactgtctgtttgcaaatccagatggaaaggaacaccttcacgccaggagagaaggtcgtcttcacaacagagatcaacaaccagaccagcaaatgcatcaagacggtcgtattcgccctgtatgcccacatacagtacgagggcttcacgcccagtgcagagcggcggtctcggctggacagcagcgagcttctgaggcaggaggccaacacccccgtgacccgcttcaacaccaccaaggttgtcagcaccttcaacctgccgttgctgctgtccgtgagcagcagcacgcaggacggtgagatcatgcacactcgctacgagctggtcaccaccgtgcacctgccctggtccctgaccagcctcaaggccaaagttcccatcatcatcaccagcgcctcagtggactctgccatctgccagctgtcagaggacggagtgttacccgtgaacccagatcaccagaattaa

SEQ ID NO: 22995 - DNA, 627 bp, Homo sapiens
  MAP TO AF128525.1; EXPRESSED IN BRAIN, SIGNAL = 0.86; EXPRESSED IN HELA, SIGNAL = 1.8; EXPRESSED IN LUNG, SIGNAL = 1.1; EXPRESSED IN BONE MARROW, SIGNAL = 1.2; EST_HUMAN HIT: AA018811.1, EVALUE 0.00e+00; NT HIT: gi14747349, EVALUE 0.00e+00; SWISSPROT HIT: P56715, EVALUE 1.00e-107
gtctcagccaaaatgagtgataccccttctactggtttttccatcattcatcctacgtcttctgaaggtcaagttccaccccctcgccatttgagcctcactcatcctgttgtggccaagcgaatcagtttctacaagagcggagacccccaattcggcggggtcagggtggtggtcaaccctcgctcctttaagtcctttgatgctctgctggataacttgtccaggaaggtgcccctcccttttggagtgaggaacatcagcacccctcggggcaggcacagcatcacgcgcctggaggagctggaggacggcgagtcctacctatgttcccacggcaggaaggtgcagcctgtagacctggacaaagcccgtcggcgcccgcggccctggctcagcagccgggccattagcgcgcactcaccgccccaccccgtagccgtcgctgctcccggcatgccccgccccccacggagcctagtggtcttcaggaatggcgacccgaagacgaggcgtgcggttcttctgagcaggagggtcacccagagcttcgaggcatttctacagcacctgacagaggtcatgcagcgccctgtggtcaagctgtacgctacggacggaaggagg

SEQ ID NO: 22996 - DNA, 954 bp, Homo sapiens
  MAP TO AC008888.4; EXPRESSED IN HELA, SIGNAL = 0.88; EXPRESSED IN BONE MARROW, SIGNAL = 0.76; NT HIT: U17895.1, EVALUE 0.00e+00; EST_HUMAN HIT: BE299719.1, EVALUE 0.00e+00; SWISSPROT HIT: Q10983, EVALUE 0.00e+00
ttacggcctaaagaccacgttgaaaggggagttgggcagggtgaagttggccaggtagacagtgtccccgcccgcgaggtacgcggcccagaccccgaaggtgcccacggtgatgatggtgtggttgcactgtgtgagcagtgcgaagtccttggcaggtgagccctggaggccattgccagcgaacaccacgtccccaagggagctgttgatgctctcccggcaccaggccatgtcatcgctggtgaccacaaagaccgggaggcggcagcaggcccggaaccagtccagggcccgctgcaggtagccggtcggccagcacccccttccatacgcgcggcatgacacggacatagtccccccggcgcacgtggacccccacgaaggtcgcctgccctgcccacttggcctgcaggccccgcaggaacttctgggcctcctcgcgcacgtggtcgtgcagggtgaactcctggaggatctcctggcggaggtggtggtagaaggtccaggagcaggggtagcccgtgaggcggacacagcgccccgggatgtggcggtactcctcctccatccagtcgttcaggtggtagttctgccaggggatcctgctggccgtggcgctgtgcagcaccggcagggtgattctgaagatgggggccagggtgctgtgcatctgggccgggatgaaggcgggccgcccgttcatcttggccagggcgtacagcgtggcgtactcgcccatctggttccccaggcggcccttggagttgatagtgaacaggtcctcccggggcaggtgtctgggggccaggaccacacgggctgagtatgcccagggcgcaggcaccagagccaggtgctggtggcagtgaaagatggtggacaccacaaaaatggcaaagacgaagtagaaggtggagaaggaagggcgggtggcccagaatcccttgacgg

SEQ ID NO: 22997 - DNA, 1951 bp, Homo sapiens
  MAP TO AL118508.6; EXPRESSED IN LUNG, SIGNAL = 1.4; EXPRESSED IN BONE MARROW, SIGNAL = 0.83; EXPRESSED IN HELA, SIGNAL = 1.3; SWISSPROT HIT: O73775, EVALUE 1.00e-39; NT HIT: gi12742414, EVALUE 0.00e+00; EST_HUMAN HIT: BI907890.1, EVALUE 0.00e+00
atggccacctccatgggcctgctgctgctgctgctgctgctcctgacccagcccggggcggggacgggagctgacacggaggcggtggtctgcgtggggaccgcctgctacacggcccactcgggcaagctgagcgctgccgaggcccagaaccactgcaaccagaacgggggcaacctggccactgtgaagagcaaggaggaggcccagcacgtccagcgagtactggcccagctcctgaggcgggaggcagccctgacggcgaggatgagcaagttctggattgggctccagcgagagaagggcaagtgcctggaccctagtctgccgctgaagggcttcagctgggtgggcgggggggaggacacgccttactctaactggcacaaggagctccggaactcgtgcatctccaagcgctgtgtgtctctgctgctggacctgtcccagccgctccttcccagccgcctccccaagtggtctgagggcccctgtgggagcccaggctcccccggaagtaacattgagggcttcgtgtgcaagttcagcttcaaaggcatgtgccggcctctggccctggggggcccaggtcaggtgacctacaccacccccttccagaccaccagttcctccttggaggctgtgccctttgcctctgcggccaatgtagcctgtggggaaggtgacaaggacgagactcagagtcattatttcctgtgcaaggagaaggcccccgatgtgttcgactggggcagctcgggccccctctgtgtcagccccaagtatggctgcaacttcaacaatgggggctgccaccaggactgctttgaagggggggatggctccttcctctgcggctgccgaccaggattccggctgctggatgacctggtgacctgtgcctctcgaaacccttgcagctccagcccatgtcgtgggggggccacgtgcgtcctgggaccccatgggaaaaactacacgtgccgctgcccccaagggtaccagctggactcgagtcagctggactgtgtggacgtggatgaatgccaggactccccctgtgcccaggagtgtgtcaacacccctgggggcttccgctgcgaatgctgggttggctatgagccgggcggtcctggagagggggcctgtcaggatgtggatgagtgtgctctgggtcgctcgccttgcgcccagggctgcaccaacacagatggctcatttcactgctcctgtgaggagggctacgtcctggccggggaggacgggactcagtgccaggacgtggatgagtgtgtgggcccggggggccccctctgcgacagcttgtgcttcaacacacaagggtccttccactgtggctgcctgccaggctgggtgctggccccaaatggggtctcttgcaccatggggcctgtgtctctgggaccaccatctgggccccccgatgaggaggacaaaggagagaaagaagggagcaccgtgccccgtgctgcaacagccagtcccacaaggggccccgagggcacccccaaggctacacccaccacaagtagaccttcgctgtcatctgacgcccccatcacatctgccccactcaagatgctggcccccagtgggtccccaggcgtctggagggagcccagcatccatcacgccacagctgcctctggcccccaggagcctgcaggtggggactcctccgtggccacacaaaacaacgatggcactgacgggcaaaagctgcttttattctacatcctaggcaccgtggtggccatcctactcctgctggccctggctctggggctactggtctatcgcaagcggagagcgaagagggaggagaagaaggagaagaagccccagaatgcggcagacagttactcctgggttccagagcgagctgagagcagggccatggagaaccagtacaggtaaagggggccctgag

SEQ ID NO: 22998 - DNA, 486 bp, Homo sapiens
  MAP TO AL031963.11; EXPRESSED IN BONE MARROW, SIGNAL = 0.97; NT HIT: gi14737999, EVALUE 0.00e+00; EST_HUMAN HIT: BI552241.1, EVALUE 0.00e+00; SWISSPROT HIT: P30629, EVALUE 3.00e-09
atagtttagatttctagaaaaattaagcagagcagggcagcacagggtcaccatggtggagctgcagcagctgcgggtgcaggaggtggtggactccatggtgaagagtctggaaagggagaacatctggaagacacagggtctcatgttctggtgcagcgccagctgttgtgaggacagccaggcattcacccagcaggtgcaccagtgcatcgagtgctgccctgtgcctctggctcaagtccaggccttggtcaccagtgagttggagaagttccaggaccacctggctcggtgcaccatgcattgcaatgacaaagccaaagattcaatagatgctgggagtaaggagcttcaggtgaagcagcagctggacggttgtgtgaccaagtgtgtggatgaccacatccacctcatctcaactatgaccaagaagatgaaggaggctgtcttatccattgggaaataaaagtctttgccagtggc

SEQ ID NO: 22999 - DNA, 781 bp, Homo sapiens
  MAP TO AC013396.4; EXPRESSED IN BRAIN, SIGNAL = 0.86; EXPRESSED IN HELA, SIGNAL = 0.76; EXPRESSED IN LUNG, SIGNAL =   1; EXPRESSED IN BONE MARROW, SIGNAL = 1.2; SWISSPROT HIT: P49019, EVALUE 5.00e-29; NT HIT: AJ245728.1, EVALUE 7.50e-01; EST_HUMAN HIT: BI906118.1, EVALUE 0.00e+00
gacggccaccaccatggccagcacacgcatggccctctgcgggcctgcctgcccgcccagaccacggttccggatggtgagcccaatgctcacaatagcaaagaggatgagcgccagtggcaggaagaactccagcaggtacagtgcctggtgccagcggagcgaggccgagggcttcgtgcccaccctgtagctgaggcaggaggggccggagaaggtgctcaggagcaggtgcccgttgaggagcaggatgcccacccagagtcccccggccacccgggcagctgcccccacggaagcacggctcagcacgtggtggggctgcaccaccttcaggtagcggttgagtgcgatggctgtgaggaagacaacgctggccgtgcggttggtggacagcatgaagaggttgactttgcaggcagcagccccaaagcgccaggtctcatggaggaggtagtagtccacgcggaggggcaggttgctgatcaggaggaagtcagcggccaccaggctgaccaggaacaccgtgttggaggtccagggccgcgtgtggatgcagaagatgaagagggccaaactgttccccaccaggcccaggacaaactccagggccaggattggtgccaggaaggcagacaccagcgaggaagaggtggggtggcagggccctccagaggacccccccacagtggtaaaggcagagggagcagaggagggtgagggagagaaggagggagggagaacagaggaggagagagagggagatggagagctcaggtta

SEQ ID NO: 23000 - DNA, 878 bp, Homo sapiens
  MAP TO AC006479.2; EXPRESSED IN LUNG, SIGNAL = 1.1; EXPRESSED IN HEART, SIGNAL = 1.2; EXPRESSED IN BONE MARROW, SIGNAL =   1; EXPRESSED IN BRAIN, SIGNAL = 0.78; EXPRESSED IN HELA, SIGNAL = 0.93; EST_HUMAN HIT: BI912503.1, EVALUE 0.00e+00; SWISSPROT HIT: P54120, EVALUE 3.00e-21; NT HIT: gi6680442, EVALUE 3.00e-16
tcagtcaggcccgacctccgcaacggcctccgaccaccgcctgtggagcagcacccagaacaggagcgcgccccccagcagcagggccaggcccagcctccagctcctgggggacttcagccacttccacagccgggccgacagccaggcgccccatggcctcctctgcaccctggctgccacgcgctccgccacccgccggagccgctcctcagggcctgcccagcgcagcacctgcgccagctcatacacctcgttggagtaatgggcgcccttgtgctccagcaccaagccctcgaccatccccagcagctgctccacctgggcttcctgctcccggccggtggcccggttatcaaaggcacagacccggcccccgcactcggccaccagctcgcgcaaggcccggttctctgtgttgctcacgtaatcgtgcagggagcccccggccaggtcctccttcctggtgaagacgatgaccatccattttaggacgtcctccccgaacatgtccctcacctgcctcaccgcctgctggtcctgggcggtgaaccgacccaactgggtcaccaggagcagcgcgtggggtccgggggccgagagcaggtagcagtgacctctctcctcacagccaggatctgtcttggacacttgggagctgaaaatgtccggagtgtccacgacttccacgtggcacttgtcccacctgcggctgcccgtggtgcaggccctggtcacagacgtggcccccagcctggagaagaaccgtctctggcccaggatgctgttcccagtggcgctcttcccggcccctgttctcccaacaaggatgagcctccgcgtggactcctgccgggactgagcgttctcttctaaac

SEQ ID NO: 23001 - DNA, 611 bp, Homo sapiens
  MAP TO AL161668.1; EXPRESSED IN HELA, SIGNAL = 1.7; EXPRESSED IN BONE MARROW, SIGNAL = 1.1; EXPRESSED IN LUNG, SIGNAL = 1.4; NT HIT: gi16189831, EVALUE 0.00e+00; EST_HUMAN HIT: BG750105.1, EVALUE 0.00e+00; SWISSPROT HIT: Q02788, EVALUE 3.50e+00
gcacatgaatgggtggatgagggctttgctcggctggcaggagctgggccgggtcgggaggctgtgctggctgcactggccctgcggcgggccccagagcccagtgccggcaccttccaggagatgcgggccctggccctggacctgggcagcccagcagccctgcgagaatggggccgctgccaggcccgctgccaagagctagagaggaggatccagcaacacgtgggagaggaggcgagcccacggggctaccgacgacggcgggcagacggtgccagcagtggaggggcccagtgggggccccgcagcccctcgcccagcctcagctccttgctgctccccagcagccctgggccacggccagccccatcccattgctccctggccccatgtggagaggactatgaggaagagggccctgagctggctccagaagcagagggcaggcccccaagagctgtgctgatccgaggcctggaggtcaccagcactgaggtggtagacaggacgtgctcaccacgggaacacgtgctgctgggccgggctagggggccagacggaccctggggagtaggcaccccccggatggagcgcaagcgaagcatcag

SEQ ID NO: 23002 - DNA, 2186 bp, Homo sapiens
  MAP TO AF205588.1; EXPRESSED IN HELA, SIGNAL = 0.57; EXPRESSED IN BRAIN, SIGNAL = 0.78; EXPRESSED IN BONE MARROW, SIGNAL = 0.9; EST_HUMAN HIT: AL539492.1, EVALUE 0.00e+00; NT HIT: gi14741165, EVALUE 0.00e+00; SWISSPROT HIT: Q06730, EVALUE 0.00e+00
aagtctggacagctgatcacctgaaagagaggagccaagaaaaccaatctaaacatttgtgggaagttgtattcatcaataatgaaatgctgactaaggaacaaggtgatgtaataggaataccatttaatgtggatgtaagttcttttccttccagaaaaatgttctgtcagtgtgattcatgtggaatgagtttcaacactgtttcagaattggttatcagtaagataaactatttaggaaaaaagtctgatgaatttaatgcctgtgggaaattgttactcaatattaagcatgatgaaactcatactcaagagaaaaatgaagttttgaaaaataggaacacactgagtcatcatgaggagactttgcagcatgagaagattcaaactttagagcacaattttgaatacagtatatgtcaggaaaccctccttgaaaaggcagtattcaatacacagaagagagagaacgcagaagagaataactgtgattataatgaatttgggagaactttgtgtgatagttcatccctcttgttccatcagatatctccgtcaagggacaatcactatgaatttagtgattgtgagaagttcttatgtgtgaagtccaccctttctaaacctcatggggtatctatgaaacactatgattgtggtgaaagtgggaataatttcaggaggaaattgtgtctgtcacaccttcagaaaggtgataaaggagagaaacactttgaatgtaatgaatgtgggaaagctttctgggagaagtcacatctcactcgacatcagagggtgcacacaggacagaaaccctttcaatgtaatgaatgtgaaaaagctttctgggataagtcaaacctcactaaacatcaaagatcacacacaggggagaaaccttttgaatgcaatgaatgtgggaaagcctttagccataagtcagccctcacattacaccagagaacacatacaggggagaaaccctatcaatgtaatgcgtgtgggaaaactttttgccagaaatctgacctcactaaacatcagagaacacacacagggctgaaaccctatgaatgttatgaatgtggaaaatccttccgtgtgacttcgcaccttaaagtacaccagagaactcacacaggtgagaaaccttttgaatgtcttgagtgtgggaaatcctttagtgaaaagtcaaatcttacacagcatcagagaattcacataggagataaatcttatgaatgtaatgcatgtgggaaaactttctaccacaagtcattactcaccaggcatcagataattcatacagggtggaaaccttatgaatgttatgaatgtgggaaaaccttctgcttgaagtcagacctcacagtacatcagagaacacacacagggcagaaaccctttgcatgtcccgaatgtgggaaattctttagccataagtcaaccctctctcaacattatagaacacacacaggggagaaaccctacgaatgtcatgaatgtggaaaaatcttttacaataaatcatacctaactaaacataatagaacacatacaggggagaaaccctatgaatgtaatgaatgtggaaaagccttctaccagaagtcacaactcactcagcatcagagaattcacataggggagaaaccctataaatgtaatgagtgtggaaaagctttctgccataagtcagctctaattgtacatcagagaacccatacacaagaaaagccctataaatgtaatgaatgtggaaaatctttctgtgtaaaatcaggacttattttccatgagagaaagcacacgggggagaaaccctatgaatgcaatgaatgtgggaaattcttcaggcacaaatcatcactcacagtacatcacagggctcacacaggagagaaatcttgtcaatgtaatgaatgtggaaaaatcttttaccgtaaatcggaacttgctcaacatcagagatcacatacaggggaaaagccctatgaatgtaacacatgcaggaaaactttctctcaaaagtcaaatctcattgtacatcagagaagacatataggagaaaaccttatgaatgaaatggatattagaaatttccagccacaagtcagcctccataatgcctcagagtattcacactgtggagaaagccctgatgacatcctgaatgttcagtaa

SEQ ID NO: 23003 - DNA, 1205 bp, Homo sapiens
  MAP TO AL008726.1; EXPRESSED IN HELA, SIGNAL =   1; EXPRESSED IN BONE MARROW, SIGNAL = 1.3; SWISSPROT HIT: P12882, EVALUE 4.00e-03; NT HIT: gi14786133, EVALUE 0.00e+00; EST_HUMAN HIT: BG328421.1, EVALUE 0.00e+00
cccaggatgctgtctagactggtagcacagcctgccgtccactgagccggcagcatgtcgggctggagcacctggcggcgggcactgagcatggctaggatgtggcggcagggcaggtggaaggcctggttaaagtagcagctgcagctggcagggggctggggctgcaccttatgggtatcttccaggatctgtatgttcatcttttctgagccagagccaatgaggtgtgtggatttctggaccacagcaagctcgcccaggcacagttgggctgctggccctgtgcagatggcattgagggagtgctggatgtgggattctaccagctgctccagtttggggctttcggggatggtgtctgagggagcatgattgttctgggcacacaggccctggttgaagtttgccttgtctgcagagttctgctgcatgtaacggaacagagaagccataccttgtttctcagatggggtggtaccaaagaactggctgaggatgtgggtggtgacctcgaggctctggaagtagtggctgctctcagctcggcttctccagcggtgagccagccagatgcggtcgttgagcagccagtgtgagtgaagctcgggcagcttggctggagggatgcagttgctcaggagtgtatacaactttctcaggttgcctgctgtggctgagcacattgtgctctgcagggaggtcaggagcagcctttccacgggccgttcaagggacagctgatagaacttggcctggaggaacttacaaatgtggaaggctgagagaaggacctcagctgtggggaactccatagctaggataggcagtggaaggaaatgaggatccaccaggatggtacagactctctcccatgctggattaaacttcttgaatacttggaacatctgggccaggccttcagtgtcctccttggcagggatggcaaagtagactgctcgggcaagatgaccctccagctgcacccgaggtccatccaccaggaaggtatataagaccttaccccttgggttataggtccggtggataaataagatctcagggaaatggtcaaagacactttgcataaagcagctctggtagttgaaggtatctaactgggcagtcttgttaacctggtgcagcagcataggtgggcttgagtccttaatcaggagcccattcagcattgtcagggccatggg

SEQ ID NO: 23004 - DNA, 807 bp, Homo sapiens
  MAP TO AC061958.9; EXPRESSED IN HELA, SIGNAL = 0.6; EXPRESSED IN BONE MARROW, SIGNAL = 0.85; SWISSPROT HIT: P08547, EVALUE 3.00e-80; NT HIT: AF418272.1, EVALUE 0.00e+00; EST_HUMAN HIT: AW562328.1, EVALUE 0.00e+00
atgaatgcaatggtacctcacatttcaatactaacattgaatgtaaatgccctaaatgctccacttaagagatacagaaccacagaatggataagaactcaccaaccaactatctgctgccttcaggagactcacctaacacataaggactcacataaacttaaaggggtggaaaaaggcatttcatgcaaacagacaccaaaagtgagcaggagtagctattcctacatcagacaaaaaaatttcaaagcaacagcagttaaaagagacaaagagggacattatacaatggtaaaaggccttgtccaacaggaaaataccacaatgctaaacatatatgcacctaacactggagctcccaaatttattaaacaattacaaatagacctaagaaatgaggtagacagcaacacaataatagtgaagaacttcagtactccactgacagcactagacaggtcatcaagacagaaagtcaacaaagaaagagtggatttaaactataccttggaacaaatggacttaacagatgtatacagaacatttcatccaacaaccacagaaaacacattctattcaacagcacatggaactttctccaagatagaccatatgataggccataaaacgagcctcaataaatttttaaaaattgaaattaaatcaagcagtctctcagaccacagtggaataaagctggaaatcaactccaaaaggaaacttcagaaccatgcaaatatacggcaattaaataatctgctcctgaatgagcattgggtcaaaaacaaaatcaagaagaaaatttaa

SEQ ID NO: 23005 - DNA, 573 bp, Homo sapiens
  MAP TO AL031588.1; EXPRESSED IN FETAL LIVER, SIGNAL = 0.99; EXPRESSED IN LUNG, SIGNAL = 1.1; EXPRESSED IN BONE MARROW, SIGNAL = 1.1; NT HIT: gi11418320, EVALUE 5.00e-32; EST_HUMAN HIT: AA303097.1, EVALUE 1.00e-101; SWISSPROT HIT: O75648, EVALUE 1.00e-15
atcaaggcaactgttccaccctaggccgtgcccgcccccggccgccccacagagccttctacaattctccagccaagtggaagggacgacaggaactctggtctagtctcccagagctgaaacgccacagctctaggcatttcagatgacaagtggcagagtctgcacctcacctttatgtgttcccagaaccttattgtcttctatggaaataaagtgaccaggtcgaggctgcagatactggaaaacaaacatgtcattaccgacggagatctaggcccagggcagacacgcagccccatctctttgtgtcaaagagcagcacgcacctgaagaaggaaatgttcaaaattcctcttcccgatgaaacacatgcccatgctctgaaatgagaagacggcagccgtgagaggagcagaagtggcggtggcccaagctgtacccagacgtcctgagcgggccctggggcctcccggcctcaccccacactttgcttccagggtaggggcccggctgcccaccggcaccctcggccgccagtcacagccggcgcacacgatgccagagccttag

SEQ ID NO: 23006 - DNA, 571 bp, Homo sapiens
  MAP TO AC002040.1; EXPRESSED IN LUNG, SIGNAL = 1.1; EXPRESSED IN BONE MARROW, SIGNAL = 0.84; EXPRESSED IN HEART, SIGNAL = 1.4; NT HIT: gi14779377, EVALUE 0.00e+00; EST_HUMAN HIT: BF357196.1, EVALUE 0.00e+00; SWISSPROT HIT: P49477, EVALUE 1.90e+00
gaggcttttcaactcgaccatttgtgagaagtgtccagcgtcagagtttgtcatccagatcttctgtcaccagccccttggccgtcaatgaaaattgcatgagaccttcatggtccctgtctgctaagctgcagatgcgctccaattctccatcccgattttcaggggattcgccaattcacagctctgcttccaccttggagaagattggggaggcagcagatgacaaggtctccatctcttgctttggtagcttgcggaacctttctagcagttaccaggaaccaagcgacagtcatagtctccgtgagcacaaggctgtgggccgggcccctctggctgtcatggaaggcgtgttcaaagacgaatcggacacccgcagattgaactccagtgtcgtagatacacagagcaaacattcagcacaaggggaccgcctgcccccgctctctggtccatttgataacaataatcagatcgcttatgtggatcagagcgactccgtagacagctctccagtcaaagaggtgaaagcccccagccacccaggctcactcgcaaagaaaccaga

SEQ ID NO: 23007 - DNA, 1340 bp, Homo sapiens
  MAP TO AF228728.1; EXPRESSED IN BONE MARROW, SIGNAL = 0.85; EXPRESSED IN HELA, SIGNAL = 0.36; EXPRESSED IN BRAIN, SIGNAL = 0.77; EST_HUMAN HIT: W56451.1, EVALUE 0.00e+00; NT HIT: gi16178801, EVALUE 0.00e+00; SWISSPROT HIT: P52742, EVALUE 0.00e+00
ttacatggagaagtcctcccggaggtgaatccgctgatgctgacacatgttggaactgtgccggaaggccttcccacactcgctgcacttgtagggcttctccccggtgtggatcctccggtgctgaatcaagtacgtgctctggctgaaggctttcttgcaatcgctgcatctgtagggtttctctccgtggtgcagcctctggtggtggatgagtctggaactgttgtggaaggccttcccacactcgctgcacttgtagggcttctctcctgtgtggattctctggtgctggatgaggtgtgtgctttggctgaaaactttgccacagtcattgcattcatagggcttctctccagtgtggcttctctgatgttccacgagtttggttttttgaatgaaagctttctcacattcattacatttatagggtttctctccagtgtgaattctctgatgttggataaggttagaactttgtgtaaagcctttgccacattccttgcactcaaatggcttctctccggtgtgagtccgacgatgtcggataaggattgagccatcactgaaggctttcccgcagtcattacatttatagggtttctctccggtgtggattctctggtgataaatcagggaagagtaggcgctaaagtgcttcccacactccccacacttgtagggtttctccccagtgtgaatcctctggtgcttcatgaggttgggcctccgggtgaatgtcttcccacactcgtcacaccggtagggaatctctcctgagtgcatccttcggtgattgatgaactcgcagctctggctgaaggctttcccacactcatcacatttgtagggcttctcttcagtgtgaagccgctgatgcttgacaaggttggcactgtacctgaatgttttcccacagtaactgcaataatgcaattttttcccagtaggaattttctgatcttctttaacaactaagtttgcactgaagatttccccagagttacgaactgtatttgttttttttgacctgtgtacacgcttatggttgttgagatatgatctctgttcaaaactttgctcacatatatcacatttgtgaggtctctgatcaggaacaggtcttgacagcaacctgaggtttcccccagactccctgctgctctccccgttggtcagtgtgactgccctggggcctctctgctccactagcttttccaggctcccctctgacttactgatgtggtcacaggcttctactggctcagatccctggggatcttcctcaccaaatgtctcctgtgaagtcaactccttgtactcagttctggtcccaagag

SEQ ID NO: 23008 - DNA, 677 bp, Homo sapiens
  MAP TO AF205588.1; EXPRESSED IN BONE MARROW, SIGNAL = 0.83; NT HIT: Z70664.1, EVALUE 0.00e+00; SWISSPROT HIT: P03341, EVALUE 6.00e-48; EST_HUMAN HIT: AI654705.1, EVALUE 5.00e-52
aatatttccttgtctcctcgactacatcccctgtggcctctccacctatagccacccaattacggcatcggctggaggaggtggccctccttctcccactgacagaggcccaaatccctctgggcaatgagcgctctgctccatttttagtttatgtccccttctctgtttctgacctgtacaactggaaggctcataatccccccttttctgaaaagccccaggtcttgacctcactgatggagtccgtgctccggaatcaccggcccacctgggatgactgtcagcaacttcttttaacccttttcacctctgaagagagggaccatatccgaagaaaggtcagaaagtatttcctcacatcagctggtagaccagaggaggaagcccgggacctccttgaggagacttttccctctacctggcctgattgggatacaaaatcctcgggtgggaagagagctttggataattttcactggtatgtccttgtgggtatcaagggagccactcaaaaacccatgaatctgtccaagacaactgaagctgtccaggggcctaatgagtcaccaggagtgtttctagaacgcctcctggaggcctatcagatttacaccccttttgacccggaggctcccgagaatagccgtgctattaatttggcatttgtgactcag

SEQ ID NO: 23009 - DNA, 691 bp, Homo sapiens
  MAP TO AC003070.1; EXPRESSED IN HELA, SIGNAL = 0.77; EXPRESSED IN BONE MARROW, SIGNAL = 1.7; NT HIT: gi15805042, EVALUE 2.60e+00; EST_HUMAN HIT: AI972838.1, EVALUE 0.00e+00; SWISSPROT HIT: Q08881, EVALUE 2.00e-03
ctgctctgcgctctcctcccgcggcgggacgtgcaagtcctggatgacctcgtagacgttctctgagtcgctgcgcgccagaggccgcgggcacacccaggagcccgccacgctgcaggccttgaagctgccgctgcttcctaggaggccggcgggaggcgagacggcggcgcaggccaggtcgttcagggactgcgcgggccgcacgggcgccgcgggccgcaggtacaggcaggctggcaggccgggcgccaggctgctgcgctgggtcgcggcgccgcgttgcgcagggccgcacagggagctggctcggcctccggactcctcgggggcgccgtcggggcccgcggtcgccgccgcgctcacaaaccggtagtcgtaggcgagcggctcaggggccgcggggctcgggtggggacctggcggcgcggcggcggcagggttgcccagcgcgggcagctcgcgcacgtactgcgcaggcaggtagaaggggcggccgccgggctcacgccgcacgtgccaccagtgctcggtgctgcgccgcagcagccggtagcgctcattcggccggatggccacgcggcgcccgtccttgccggtgtactcgaaggggtgctccaccagcacgtacacgtcccccaccacgtccgccgccatcgcagccgcggcgttttcctgcgggcaacaagaa

SEQ ID NO: 23010 - DNA, 528 bp, Homo sapiens
  MAP TO Z68276.1; EXPRESSED IN HELA, SIGNAL = 2.8; EXPRESSED IN BRAIN, SIGNAL = 0.93; EXPRESSED IN BONE MARROW, SIGNAL = 1.5; NT HIT: AF071593.1, EVALUE 0.00e+00; SWISSPROT HIT: P72024, EVALUE 4.90e+00; EST_HUMAN HIT: AW082081.1, EVALUE 0.00e+00
tcaaattctgaaacttgctagcatgaaacacaacttagtactgacctcatccctgtgtttttgacagaagaccaaaaactgggatgctgcatctcccttcctgcttcgtggcatggagactgtggtcttcttcctcccaggaggagaccctactcctcttctggggtcagcctctgccgtcttttgaggagtactcttccctatgtcggggtgactctccagggtctctgcagagctacacagtttggccctccgccttctcttcatgggaatgcactcttctctcacagacttggggttttcagcagcttcttcactgactcctgaggattctgccatttctcccaaagactctgcagcaatgccagcctccttggctacttgagggttgagatgaagctggtcccccacatagagaaaggtgaacttggctttccgctcctccactgacatgcttgcagcttcttctgcttgaacaatgcccatttcccactgggccctcaatttccctgaaattggtttcaatag

SEQ ID NO: 23011 - DNA, 777 bp, Homo sapiens
  MAP TO AC004232.1; EXPRESSED IN BONE MARROW, SIGNAL = 0.92; EXPRESSED IN HELA, SIGNAL = 1.7; EST_HUMAN HIT: BE295552.1, EVALUE 0.00e+00; NT HIT: gi14777885, EVALUE 0.00e+00; SWISSPROT HIT: O14978, EVALUE 0.00e+00
gagaagagaaatttgagaacctggaaggtgttccgtctgtatgctctgagaacatccaccctcaggtgctgcttcctgaccaggcccgaggggaggtgccctggagtcctgagctgggaagacctcatgaccggtcgcaaggggattgggcgcctcccccagagggtggaatggagcaggccttggcaggagcctcaagtggcagagaactggggcgaccgaaggaactgcagccaaagaaactccatttatgtcccttgtgtggcaaaaatttctctaacaactcaaacctaattaggcaccagagaatacatgcagctgaaagactgtgtatgggtgtggactgcactgaaatctttggtgggaacccacgtttcctgtcactacacagagcacacctgggagaggaggcccacaagtgccttgaatgtgggaaatgcttcagtcagaacacccatctgactcgccaccaacgcacccacacgggtgagaagccctatcagtgcaacatttgcggaaaatgtttctcctgcaactccaacctccacaggcaccagagaacgcacactggggagaagccctacaagtgccctgagtgtggggagatctttgctcacagttccaacctccttcggcaccagagaattcacactggagagcgaccttataagtgtcccgagtgtgggaaaagtttctctcggagttcacacctcgtcattcacgaaagaactcatgagagagagagactttaccccttctctgagtgtggggaagctg

SEQ ID NO: 23012 - DNA, 968 bp, Homo sapiens
  MAP TO Z98885.1; EXPRESSED IN HELA, SIGNAL = 1.4; EXPRESSED IN BONE MARROW, SIGNAL = 1.2; EST_HUMAN HIT: BG392401.1, EVALUE 0.00e+00; NT HIT: gi14779673, EVALUE 0.00e+00; SWISSPROT HIT: O95696, EVALUE 0.00e+00
ccatttttcatttcgacatccccgtaaatattcagaggcctccgggtgcagcctggaggcgtgtggacatcacagtaagcggtctttctgacggagaaggtggtgccaccgccagtcagttccttcacgggctccattttcatgtacaggccagccttctgggcacacgtcacatggaatgctgtgtagcagtttgctttgtggcactggatgcaggcacccacgcccttctgcttacagaggtagcatgtcagtttccaccgggctggagggatgttcctcaccccatcgatgggctcgatgaacaccgtgttggcaaagccgacctctgggatccacagggcacacaccacgtgaccccagcggtcgtcatctgtctttttgaaggcaccacccttgttggggcacagcacacagtcggcgggccgggcccgcgactgcaggcagtggcggcagagccactggccctcggggatgtagggcaccccgtagcactcctggtgcacggccaggttgcacatgtcgcagaagaggatcacgttgctgttctgacactccccgtccatgcagatgcagcacacggcgtcctcgtcgatcagagactgctgctcgccctgcttctggttctcgcagtgcgactccttctcgaagcggtccatcaggaactcaaacatgctctgcgacacggcggggacgcagtcgcccttgcgcttctcattgacgatctccagccaggcatagtcctcctcgtccatgtcatactccacctcgttgtccagttcctcggccgacttctcgatgaacttgtagtacacaggaggcctcctgggggcggacggagggctgtactccacgatgcgcaccttgggctccgggagggcactggccgaggccggcgtgccgtgggcgctggggagggcctcgtttttctttttgactctgttgtttttgtgacgcttagttcttaa

SEQ ID NO: 23013 - DNA, 617 bp, Homo sapiens
  MAP TO AL031985.10; EXPRESSED IN BONE MARROW, SIGNAL = 1.2; EXPRESSED IN LUNG, SIGNAL = 1.6; NT HIT: gi13636749, EVALUE 0.00e+00; EST_HUMAN HIT: AL519686.1, EVALUE 0.00e+00; SWISSPROT HIT: Q99676, EVALUE 2.00e-32
acttgaagagcaaaacaaaaaccaaagagtcagccttacagaatgatatttcgtgggaagaactacattgtggcctaatgatggaaagatttacaaaaggaagcagcatgtattccaccttgggaagaatctccaaatgtaataagctagaaagccaacaagagaaccaaagaatgggtaaggggcaaatccccctgatgtgcaagaaaacattcactcaggagagaggccaagagtctaatagatttgagaaaagaattaatgtgaagtcagaagttatgccaggaccaataggtcttccaagaaaaagagatcgtaaatatgacacacctggaaagagaagcagatacaacatagatttagttaatcattcaaggagttatacaaaaatgaaaacctttgagtgtaatatttgtgaaaaaatcttcaaacagcttattcaccttactgaacacatgagaattcataccggggagaaacctttcagatgtaaggaatgtggaaaagcctttagccaaagttcatctcttattccgcatcagagaattcatactggtgagaaaccctatgaatgtaaggagtgtgggaaaaccttcagacatccttcatcgcttact

SEQ ID NO: 23014 - DNA, 633 bp, Homo sapiens
  MAP TO AP000512.1; EXPRESSED IN BONE MARROW, SIGNAL = 0.75; NT HIT: gi14752414, EVALUE 2.00e-59; EST_HUMAN HIT: BF725559.1, EVALUE 3.00e-59; SWISSPROT HIT: O60231, EVALUE 1.00e-19
ctcaagtctagcagagtcatgaacttaattacccagagctgggtgaggaccccctttgagggccctaggtctgtcatcctatctatttgcccttcttttctggttttcagcatctgtcttttcctccttttctcctgcctggtttttacaacttctttctctgaaatgtacctggtcccagggtgcatatttagtaaagggcaaacttcttcttttttctttgtcattcagggttatacaaacaagggtatgaagattgcctgcacccaaccccggagagtggctgccatgagtgtggccgcccgagtggcccgggagatgggtgtgaagcttgggaatgaggtgagatttctagggaaccggggggtagagtctggggtctgtgactcagtctacagttccctcaggtccctacagcagaagtcttggtgctgccccacttcacctttccccaagttcctttcagggcacaccagcccacacttggttgctaatggttcccttgaccaggttggctacagcatccgctttgaggactgcacatcagagcgaactgtcctccgctacatgacagatgggatgcttctccgggagttcctctctgagcctgacctggcgagttacaggtatctc

SEQ ID NO: 23015 - DNA, 744 bp, Homo sapiens
  MAP TO AC068323.6; EXPRESSED IN BRAIN, SIGNAL = 0.82; EXPRESSED IN HELA, SIGNAL = 0.98; EXPRESSED IN BONE MARROW, SIGNAL = 0.92; NT HIT: AF405692.1, EVALUE 0.00e+00; EST_HUMAN HIT: BE709906.1, EVALUE 1.10e+00; SWISSPROT HIT: P21453, EVALUE 1.50e+00
gtggatccccaggtcctgggggccagctagcagaaaccaacctccaggtgacagtaatggttccattcaatgatgatccctttggagtttttatcttggatccagagtgtttagagagagaagtggcagaagatgtcctgtctgaagatgatatgtcttatattaccaacttcaccattttgaggcagcagggtgtgtttggtgatgtacaactgggctgggaaatactgtccagtgagttccctgctggtttgccaccaatgatagattttttactggttggaattttccccaccaccgtgcatttacaacagcacatgcggcgtcaccacagtggaacggatgctttgtactttaccggactagagggtgcatttgggactgttaatccaaaataccatccctccaggaataatacaattgccaactttacattctcagcttgggtaatgcccaatgccaatacgaatggattcattatagcgaaggatgacggtaatggaagcatctactacggggtaaaaatacaaacaaacgaatcccatgtgacactttcccttcattataaaaccttgggttccaatgctacatacattgccaagacaacagtcatgaaatatttagaagaaagtgtttggcttcatctactaattatcctggaggatggtataatcgaattctacctggatggaaatgcaatgcccaggggaatcaagagtctgaaaggagaagccattactgacg

SEQ ID NO: 23016 - DNA, 545 bp, Homo sapiens
  MAP TO AC035144.2; EXPRESSED IN BONE MARROW, SIGNAL = 0.83; EXPRESSED IN BRAIN, SIGNAL = 0.9; EXPRESSED IN HELA, SIGNAL = 1.1; SWISSPROT HIT: P26805, EVALUE 6.00e-12; NT HIT: AB008681.1, EVALUE 0.00e+00; EST_HUMAN HIT: AA663213.1, EVALUE 0.00e+00
ttttgaagctttctcctgatatctgtggctgattgggtaataaacttatcttttaggatcagttgactgttgagggagtcacaggggagagtatatttccttaaggcctcccgtagccgctcgaggaaggcagaaggattttcttcctttctctgagttatggtggacatcattaaataattcatgggcttttccctaattctccttagtccttctagaacacaggtcaacagatgtttgtgactccagtccccatgatctgagtcaaggtcccattggggatccatactggggacggcttgctgactggtagggaatttgtccttttcttcggctgtcattctatcatttacttgactaagataccaggtatatccaaactcttgggatgcagctaaagctgcattcttttcattaaaggccagggtttgatctaatagcatgacttctctccaagtgaggtcaaaggtttgccctagaccctgtaggacatctatatatctatcaggatcatctgaaagcttctccaggtctgccttgatctg

SEQ ID NO: 23017 - DNA, 763 bp, Homo sapiens
  MAP TO AC005565.1; EXPRESSED IN LUNG, SIGNAL = 0.95; EXPRESSED IN BRAIN, SIGNAL = 1.2; EXPRESSED IN HEART, SIGNAL = 1.2; EXPRESSED IN BONE MARROW, SIGNAL = 0.9; EST_HUMAN HIT: BF995865.1, EVALUE 0.00e+00; SWISSPROT HIT: Q62203, EVALUE 1.60e-02
gcttctacgacggccaactgcgagtgcgggcaggttcacagattcacacgggctatgcttatccacgcttctacgacggccaaccgcgagtgcgggcaggttcacagattcacccgggctatgcttatggggccttctacgacggccagccgcgagtgcgggcaggttcacagattcacacgggctatgcttgtggggccttctacgacggccagctgcgagtgcgggcaggttcacagattcacacgggctatgcttatggggccttctacgacggccaaccgcgaatgcgggcaggttcacagattcacatgggctatgcttatccacacttctacgatggccaaccgcgagtgcgggcaggttcacagattcacacgggctatgcttatccaggcttctacgacggccaaccgcgagtgcgggcaggttcacagattcacacgggctatgcttatccaggcttctacaacggccaaccgcgagtgcgggcaggttcacagattcacacgggctatgcttatggggccttctacgacggccaaccgcgaatgcgggcaggttcacagattcacatgggctatgcttatccacacttctacgatggccaaccgcgagtgcgggcaggttcacagattcacacgggctatgcttatccaggcttctacgatggccaaccgcgagtgcgggcaggttcacagattcacacgggctatgcttatccaggcttctacgacggccaaccgtgagcacaggcaggttc

SEQ ID NO: 23018 - DNA, 609 bp, Homo sapiens
  MAP TO AC010494.4; EXPRESSED IN BONE MARROW, SIGNAL = 0.77; EXPRESSED IN HELA, SIGNAL = 0.39; NT HIT: gi16179329, EVALUE 0.00e+00; EST_HUMAN HIT: BG527236.1, EVALUE 0.00e+00; SWISSPROT HIT: P21521, EVALUE 1.00e-25
ctgagaactgggaatcagcgccttccaccagtgcccgcccttgaccaggtcaacttcacacaaaggcacagaaactttcccaatgacacagtggcgggagaacttatcaaaatccaccacggtcaggagcagggtcctcctctgggcctccaggaaggggatctcgaaggtgtagcgctcctcaaacacgggcttctgggtcttgcgtttgaccccggtctgctttgagttcttctggtctggcaggagacagatcttgacgtaggggttggagtgcgccatgtcctggcgcgagccatcgtgggagatgggaggtggcaggtccctggcctcgatcacgcgcacggtgaggtggttgtgcagcaggtcgtactgagtgctgaagtgcagcatgcccagctggtacttggacaggatctcctcgtctgtcagagagtccacatcgtcgctgttggagtcgagggagtacaggtggggttcgaacttcctgaaatagtcgtcggggttataggtccgtctgagcaccgaaggttggatgggctccttcttggcgctgagaacgccaaactcgatgggtttaatatcgatgagtggagagctgggacgtct

SEQ ID NO: 23019 - DNA, 482 bp, Homo sapiens
  MAP TO AL034562.2; EXPRESSED IN HELA, SIGNAL = 0.56; EXPRESSED IN BRAIN, SIGNAL =   2; EXPRESSED IN BONE MARROW, SIGNAL = 0.92; NT HIT: D86043.1, EVALUE 0.00e+00; EST_HUMAN HIT: AI363143.1, EVALUE 0.00e+00; SWISSPROT HIT: P18466, EVALUE 9.00e-07
gctctgtcctggtgatgacctcaccgtggtgggggagctacgttatggagccctccctgtgatctgtctgtgccacaaggtcagagcttctgccctgtgctgtttcagttccacccaccttggaggttactcaacagcccgtgagggcagagaaccaggtgaatgtcacctgccaggtgaggaagttctacccccagagactacagctgacctggttggagaatggaaacgtgtcccggacagaaacggcctcaaccgttacagagaacaaggatggtacctacaactggatgagctggctcctggtgaatgtatctgcccacagggatgatgtgaagctcacctgccaggtggagcatgacgggcagccagcggtcagcaaaagccatgacctgaaggtctcagcccacccgaaggagcagggctcaaataccgccgctggtgaggcctctatttcagctgacccagcttttttaaacttt

SEQ ID NO: 23020 - DNA, 762 bp, Homo sapiens
  MAP TO AC006369.3; EXPRESSED IN BONE MARROW, SIGNAL = 1.3; EXPRESSED IN LUNG, SIGNAL = 1.5; EXPRESSED IN HEART, SIGNAL =   2; NT HIT: gi14733248, EVALUE 0.00e+00; EST_HUMAN HIT: BI861738.1, EVALUE 0.00e+00; SWISSPROT HIT: Q00587, EVALUE 1.00e-08
ccagccaagaccccaatttacctgaaagcagccaataacaagaaaggaaagaaatttaaactgagggacattctgtctcctgatatgatcagtcccccgcttggagactttcgccacaccatccacattggcaaagagggccagcacgatgtctttggagatatttcctttcttcaagggaactacgagcttttacctggaaaccaggagaaagcacacctgggccagttccctgggcataatgagttcttccgggccaacagcacctcggactctgtgttcacagaaacgccctccccggtgctcaaaaatgccatctccctcccgaccattggaggatcccaagctctcatgttgcccttattgtcaccagtgacatttaattccaaacaggagtccttcgggccagcaaagctgcccaggcttagctgcgagcccgtcatggaggaaaaagctcaggagaaaagcagtctgttggagaatgggacagtccaccagggagacacctcgtggggctccagcggttctgcatctcagtccagccaaggcagagacagccactcctccagcctgtccgaacagtaccccgactggccagccgaggacatgtttgaccatcccaccccatgcgagctcatcaagggaaagactaagtcagaggagtccctctctgaccttacaggttccctcctctccctgcagcttgatcttgggccctcacttttggatgaggtgctgaatgtaatggataaaaataagtaa

SEQ ID NO: 23021 - DNA, 458 bp, Homo sapiens
  MAP TO AC006057.5; EXPRESSED IN HELA, SIGNAL = 1.2; EXPRESSED IN BONE MARROW, SIGNAL = 0.77; EST_HUMAN HIT: AW802727.1, EVALUE 4.10e-02; SWISSPROT HIT: P97874, EVALUE 4.10e+00
aaaatgatgaaacatttgcttgtgtcagccagggccgaaaacatactcctctccttgggagagagagatttgaaataactgaagtgctattaccctcctcctctgtatttgctttaaacccagagagtggtcaagatgtcattcgtgaccaaacgcctattacaccttccaacactttggtatctgcaggaggatctgggaacatgggaggtgatgggggactccgtgctggtccagaaggaaatgaagggcagcctgatataaaatggtggtggccactgaatttgggtctaggtttttctaggtctggctggggcagggtgcatggcagaagagttagaagttcccctgagtctctttcaacatcaggggattgtgatggagaggtatccatgccagtgagggctcccggagaagctagagataaagtgttgctgattccagcactgatggggact

SEQ ID NO: 23022 - DNA, 531 bp, Homo sapiens
  MAP TO AC010491.2; EXPRESSED IN BONE MARROW, SIGNAL = 1.1; EXPRESSED IN HELA, SIGNAL = 4.3; NT HIT: gi14742225, EVALUE 0.00e+00; EST_HUMAN HIT: AL536448.1, EVALUE 0.00e+00; SWISSPROT HIT: P40227, EVALUE 5.00e-83
aaggtagcaacagcccaggatgatataactggtgatagtacaacttccaatgtcctaatcattgaaaagctactgaaacaggaggatctctacatttctgaaggccttcatctcagaataattactgaaggatttgaagctgcaaaggaaaaggcccttcggtttttggaagaagtcaaaataaggaaagagatggacagggaaacacttataaatgtggccagaacatctcttcatactaaagttcatgctgaacttgcagatgccttaacagaggctgtagtggactccattttggccattaaaagacaagatgaacctattgatctcttcatggttgtgatcatggagatgaaacataaatctgaaactgatacaagcttaatcagagggcttgttttggaccacggagcatggcatcctgatatgaagaaaagggtggaggatgtatacattctcaagtgtaacgtgtcattagaatatgaaaaaacataagtgaattctggctttttttacaagactgcagaaatg

SEQ ID NO: 23023 - DNA, 960 bp, Homo sapiens
  MAP TO AL121935.12; EXPRESSED IN HELA, SIGNAL = 1.1; EXPRESSED IN BONE MARROW, SIGNAL = 0.87; SWISSPROT HIT: O00270, EVALUE 0.00e+00; NT HIT: gi11418512, EVALUE 0.00e+00
tcaggaataggagtctctggggttgaaatctgggggctctgctgcctgccctttgcctcggagggtgtggaagaccctccgataggagctcctgaaggtggggctggagaagcagtataccacggggttgagcacactgtgcaggtaggtgaggctgcccgtgacatccgaggtatgagccactgcacaaagggccctgcagctccccagattctggaagatgtgcatcaggactctggccaggaagcagggcagaaagcacagagcaaacagcaccaccaccaaggtgaccagtgcctgggcccgctgaagcttgggctgtttctcaggctcccggagtcttttctggagagccctgatgatgcctgcattgcagaacacgatgaggccaaaggggaggacaaactgaaggcaggagagtgcttcctgccagatgatgctgaaggagccgtctgccctggagtagaaactgtggcacctggtggagttctgggcggcctcagagatgagcaagcccgggcaggtgagggcgaccatcaggagccagacgaggcccgagacccccagggccgcctgaggagacagcaggttgaccttaagccgagggtggaccacacggaggtaccggtccaaagccacggcggccaggaaggccatccccacgctgcggctgaggtccagcaggaagtgcagggcccagcagcccacacggcccagatgccaagcctggaggctcaggtagaaggcggccaggaaaggcaggcacgcagccaacagcaggtcagccagggccaggttgagcaggtagacagcgtacggcttccacaccctgacccggaacaggaaggtccacagcgccaccgcgttgcccagcagacccagcccacactccagccccagcaagacacccacagctgtggccaccacagtgctgggggctgagcagtttgggaatggcat

SEQ ID NO: 23024 - DNA, 854 bp, Homo sapiens
  MAP TO AC004531.1; EXPRESSED IN BONE MARROW, SIGNAL = 0.85; EST_HUMAN HIT: BI559925.1, EVALUE 0.00e+00; SWISSPROT HIT: Q11039, EVALUE 9.00e-11; NT HIT: gi16164727, EVALUE 0.00e+00
ctcgcttcttcctcacggtgctccagctccacacaccgtactgagcctcgccagccaccgtacgcgaggtcgcggcgcgtccgtgacgtcactgatgtgcgcttctcccgcactaagggaaacatggctctaacgcggccggtgcggctcttttccctcgtgactcggttgctcctggcgccgcgacggggcctcacggtccgcagtcccgacgaacccctgccggtggtgcgcatcccagtggctctacagcggcagttggaacagcggcagagcaggcggcggaacctcccgaggccggtgctggttcgacccggaccgctgctggtttcggcgcggcggccggagttgaaccagccggcgcgcctcacactgggccgttgggagcgcgcgccgctagcctctcaaggctggaagagtcgacgcgcgcgtcgggaccacttctccatcgagcgcgcgcaacaggaggcgccagcggtgcgaaagctctcgtctaagggcagctttgctgacctgggcctggagccccgtgtgctgcacgcactacaggaggctgcgcctgaagtcgttcagcccacaaccgtgcagtctagcaccatcccctcactacttcgcggccgccatgtcgtttgcgccgcagaaaccggcagtggcaagactctcagctacctcctgccgctgcttcaacggctcttgggccagccaagcctggactcccttcctatccccgcgccccgaggcctggtccttgttccttcccgagaattggcccaacaggtgcgggctgtggcccaacccttgggccgctccttgggcctgctggtgcgggacctggagggaggccacggcatgcg

SEQ ID NO: 23025 - DNA, 601 bp, Homo sapiens
  MAP TO AL163285.2; EXPRESSED IN HELA, SIGNAL = 1.2; EXPRESSED IN BONE MARROW, SIGNAL = 0.74; EST_HUMAN HIT: AA403053.1, EVALUE 0.00e+00; SWISSPROT HIT: P23074, EVALUE 3.00e-16; NT HIT: AL163285.2, EVALUE 0.00e+00
ccctgaggtaggacagtaaaggtgtattgccggccttgccagcggaaggcaaattgcttctggtgggccttatggacaggaatggggaaaaagtcatttgccaagtcaatggctgcataccaggtaccaggaggtgtgttaatttgctcaagcaatgaaaccacatctggtacagcagctgcaattggagtcaccacttggttaagcttacagtaacccactgtcattctccaagatccgtctgtcttctgcacaggccagatgggagagttgaatggggatgtggtgggaatcaccacccctgcatccttcaagtccttgatggtggcactaatctccacaatcccttcagggatgtgatactgtttttgatttactatttttctaggtagaggcagctctaatggcttccatttggcctttctcaccataatagtccacaccctaccagtcagggagccagtgtgggggttctgcctgctactaagcatatctatgccaattatgcattctggcactgggaaaatgaccacaggatgagtccgaggacccactggacccactgtaagttggacctgagctaaaactcctttaagtacct

SEQ ID NO: 23026 - DNA, 703 bp, Homo sapiens
  MAP TO AL034380.25; EXPRESSED IN BRAIN, SIGNAL = 0.87; EXPRESSED IN LUNG, SIGNAL = 1.7; EXPRESSED IN BONE MARROW, SIGNAL = 0.91; EST_HUMAN HIT: BG682052.1, EVALUE 0.00e+00; SWISSPROT HIT: P31947, EVALUE 1.00e-130; NT HIT: gi14734357, EVALUE 0.00e+00
cgttgtcggccgtccacagtgtcaggttgtctcgcagcagctgcatgatgagggtgctgtctttgtaggagtcctcgctgagggtgtgcagatcagccatggcctcgtcgaaagtggtcttggccagagagatggcctcctcggggctgttggcgatctcgtagtggaagacggaaaagttcagggccaggcccaggcggatggggttggtgggcggcatctccttcttgctgatgtccatggcctcctggtaggctgaccgggctgagtcaatgatgcgcttcttgtcgtcaccggtggccacctcggccaggtagcggtagtagtcacccttcatcttcaggtagaagacccggctctcggcgtccccggcctccttgatgaggtggctgtccagcaggcccagcacggtgtcgcacacgccctggagctcagtctccaccttctcccggtactcacgcacctcgggccccttctcctccgagccctcctcgttgcttttctgctcaatactggacagcaccctccaggcagccctctggccgcccaccacgttcttataggctactgagagcaggtttcgctcttcgcaggagagctcctcgcccttctccacggcgcctttcatgaaggctgccatgtcctcatagcgttcggcctgctctgccagcttggccttctggatcagactggctctctccat

SEQ ID NO: 23027 - DNA, 691 bp, Homo sapiens
  MAP TO AC007498.2; EXPRESSED IN BONE MARROW, SIGNAL = 0.79; SWISSPROT HIT: Q60847, EVALUE 8.10e-01; NT HIT: gi15316964, EVALUE 0.00e+00; EST_HUMAN HIT: BF923314.1, EVALUE 1.00e-100
agagcaaggatgcccacgtctgtggccggtgctgtgccgagttctttgaattatcagatcttctgctccacaagaagaactgtactaaaaatcaattagttttaatcgtaaatgaaaatccagcctccccacccgaaaccttctcccccagcccccctcctgataatcctgatgaacaaatgaatgacacagttaacaaaacagatcaagtggactgcagcgacctttcagaacacaacggacttgacagggaagagtccatggaggtggaggccccggttgctaacaaaagcggcagcggcacttccagcggcagccacagcagtaccgccccaagcagcagcagcagcagcagcagcagcagcggcggcggcggcagctcctccacaggtacctcagcgatcacaacctctctacctcaactcggggacctgacaacactgggcaacttctccgtaatcaacagcaacgtcatcatcgagaacctccagagcaccaaggtggcggtggcccagttctcccaggaagcgaggtgcggcggggcctctgggggcaagctggccgtcccagccctcatggaacaactcctagctctgcagcagcagcagatccaccagctgcaattgatcgaacagattcgtcaccaaatattgctgttggcttctcagaatgcagacttgccaacatcttc

SEQ ID NO: 23028 - DNA, 565 bp, Homo sapiens
  MAP TO AC004590.1; EXPRESSED IN BONE MARROW, SIGNAL = 0.85; SWISSPROT HIT: P47160, EVALUE 2.00e-34; EST_HUMAN HIT: BE734993.1, EVALUE 0.00e+00; NT HIT: gi14773266, EVALUE 0.00e+00
atgacgacctccgcactccggcgccaggtgaagaacatcgtgcacaactactccgaggcagaaatcaaggtgcgcgaggccaccagcaatgacccctggggcccccctagttcgctcatgtccgagatcgctgacctgaccttcaacacagtggccttcaccgaagtcatgggcatgctgtggcggcggctcaatgacagcggcaagaactggcggcacgtgtacaaggctctaacattgctggactacctgctcaagacgggctccgagcgggtggcccaccagtgccgcgagaacctctacaccatccagacactcaaggacttccagtacatcgaccgcgacggcaaggaccagggcgtcaacgtgcgcgagaaggtcaagcaggtgatggccctgctcaaggatgaggagcggctgcggcaggagcgaacccacgccctcaagaccaaggagcgcatggcactggagggcatcggcattggcagtgggcagctgggcttcagccgccgctacggcgaggactacagccgctcccggggctccccgtcctcctacaactgtg

SEQ ID NO: 23029 - DNA, 561 bp, Homo sapiens
  MAP TO AC006486.1; EXPRESSED IN BONE MARROW, SIGNAL = 0.95; NT HIT: D88029.1, EVALUE 9.00e-03; SWISSPROT HIT: P50901, EVALUE 2.10e-01; EST_HUMAN HIT: BI029614.1, EVALUE 0.00e+00
gcggggcgggccggcccgcggccgtggcagcccgtgagggcagcacggagtttgactggggtgatgagacgtcgagggacagtgaggccagcagtgtggcggctcgtggagactcacggccacgcctggtggcccctgctgacttgtcacgctttgagttcgacgagtgtgaggcggccgtgatgctggtgtcgctgggcagctcgcgctcaggcacgccctccttctcacccgtctccactcaatcgcccttctcgccagccccatcaccctcaccctcaccactcttcggcttccgccctgccaactttagccccatcaatgcctcaccagtcatccagcgcactgcagtccgcagtcgccacctgagcgccagcacccctaaggcaggcgtgctgacgccaccagacctgggcccccacccaccgccacctgccccccgagagcgccactcctctggaatcctacccaccttccagaccaacctgaccttcaccgtgcccatcagccctgggcgacggaagacagagctgttgccgcatccaggggccttgggggccc

SEQ ID NO: 23030 - DNA, 1001 bp, Homo sapiens
  MAP TO AC012313.5; EXPRESSED IN BONE MARROW, SIGNAL = 0.84; SWISSPROT HIT: Q13049, EVALUE 2.00e-04
gtgccatccgatcgcctgtccagcgtcctctcggcctccgccgggtcctcggggcccgcctcgggctccagcgcatcttctgcagttcctggcagggccgtgtccaggtcagggcccgtggggcgcggcgtccaggcgggggcccagggcgaccccggcgggggcctcggcggaaaccaagagaagccaggcgctggagcgagcgccacgagctggggccgcggggggccggaggaggtggcgtgcgggatgaggaagaagatgtagacgcccgagaccacgaggcccgcggccaccagcaccgccagcgccacggcagcgttgaagacccaggccgggctggccagcgacaagcggcgcgacagcgggcggcccaggcgcagaggcggcgggggcggcggggcgcgggccttgcgcggcccgggcgggggcggcggcggccgcaggtagagaaggccgcggcgccggtcgaagcgcacggagccctggcgagagggcggtgcgcgcgcgtcgcggggcaggagaccggactgcgtgggcaacgcggggagtccgcggcggggggccaggcgcgtgggcgcgcggcacaccggacaggccaccgcgttgccgccgcccgccgtggccaacgataggcgcgccaggcactcgagacagaagacgtggccgcagtccaggcgcttgggcagcttgaacacgccgtcgaaggacgacacgcagatgaggcactccaccggggaggcggggggcaggatagggccggagcctgggctgccgtccccttcctcctcctcctcctcctcctggtcttcccctctgcttggggagcggggcgcagagagcgagcctggggagctgggacccgagccctggggggcccgggaatggcggagccagaacggccgagggcagggcatccggatggacctgggaggagaggaggtcaggcagggaaggaggcggtggagcctggagcgggttctgagaccagcagggaatcc

SEQ ID NO: 23031 - DNA, 529 bp, Homo sapiens
  MAP TO AP001748.1; EXPRESSED IN BONE MARROW, SIGNAL = 1.4; NT HIT: AB038163.1, EVALUE 0.00e+00; EST_HUMAN HIT: BI908255.1, EVALUE 0.00e+00
atgtagtggaaccaaaggagaggggcaagctcctagccacccagacagcagctgaattgtctaaaaacttatcttcacccagttcttacccgccagctgtgaataagggcaggaaggtagctagtcccagtcccagtggcagcgtgctattcacagatgaaggggttccgaaatttttgtcaagaaagactttggtagagtttccacagaaagttctgtctccattcagaaaacagggctctgattcagaagctcgtcaggtgggtcggaaagtgacgtcgccttcgtcttcatcctcttccagctcctctgattctgaatctgatgatgaggctgacgtttcagaggtcactcctcgagtggtgagcaaaggcagaggggggcttcgaaaaccagaggcctctcattcctttgaaaacagagccccccgagttacagtatcagcaaaagagaaaaccttgctgcagaagccgcatgtggacattactgatccagagaagccccaccagccaaagaagaaagggtcccc

SEQ ID NO: 23032 - DNA, 1109 bp, Homo sapiens
  MAP TO AC018432.4; EXPRESSED IN BONE MARROW, SIGNAL = 0.86; NT HIT: AL161560.2, EVALUE 4.20e+00; EST_HUMAN HIT: BF666287.1, EVALUE 6.20e+00; SWISSPROT HIT: P54938, EVALUE 9.60e-02
gttatgctgttgtaagcaataataaggagcagaaacagaactttaaagcccagaagacagaagcagaagttgatttaatagatcaagaagcaaagataaatgttgcagaagagtttaatccagaatctgtttttttctctaagatacatccacttcaaattgaaaacaagaaagaatttaaaactgcagactggaaaacaagggcagatcccaagacatttgccctgccaaagaaacagcaagagctgtgtgtctcaggaactatctggagttatcctaatccctacacatctatttctcctaaaatcataagacataaagataaggcaaagacagcagatgtggaaagtactatgcataccaaacagataaaattgaaggcaaaaagaataacagtttcccagctgcttgagtatggtactgcaagcaataaaaaagaactgagaggtaacatccagcagcagaagtcattccagctgagtaaaaatgcagtacatcgagttctaaaggctgtttatgactctggatactgtgtgtctagcattaaaaagcttacagaagtaaaaatggagaaagacaagccaaaagacaggacatgcattcttccacagccaaagctggagaaaccactaaaagaaatgcaaaggtcattgtcaggttgtactgatatgtccagcattcttagaaaacaggaacaagatattagagaaaaggaacaaaaacaccaaagcatttcagaagacatatcccaatactatattggaccgttaaggattagttcacaacaaatcaattacagtagtttcgatgccccacgaattagaacagatgaagaacttgaattcctcattgcacaaagagcaaaggaaaaagatgtgggcattgccaaacattcagtttcaattccgtgggagagagaaggatcgaagagactagatattccactaaactcaaaaggacagaatatattttttacagagttggatacttctcaacagaagacttgccaggagcaagaattgctgaaacaagaagatatttctatgacaaacctggggtctatggcctgccccattatggaacctcttcatttggaaaacacaggaaag

SEQ ID NO: 23033 - DNA, 152 bp, Homo sapiens
  MAP TO CHR10.3; EXPRESSED IN LUNG, SIGNAL = 6.8; EXPRESSED IN BONE MARROW, SIGNAL =   4; EXPRESSED IN FETAL LIVER, SIGNAL = 4.2; EXPRESSED IN ADULT LIVER, SIGNAL = 4.4; EXPRESSED IN BRAIN, SIGNAL = 7.9; EXPRESSED IN PLACENTA, SIGNAL = 4.3; EST_HUMAN HIT: AL527876.1, EVALUE 6.00e-57; SWISSPROT HIT: P47859, EVALUE 4.00e-19; NT HIT: gi15297728, EVALUE 4.00e-57
tacctgcagatccctgatgtcgaagggctcttcgaaaatgtatgcggcatcagctccggccgcgagcccccccatgttggccaggtagccacagtagccgcccatgggctcgatgatgaaaacacgcgccgcttggttccgctggcggactg

SEQ ID NO: 23034 - DNA, 214 bp, Homo sapiens
  MAP TO CHRX.3; EXPRESSED IN LUNG, SIGNAL = 2.2; EXPRESSED IN PLACENTA, SIGNAL = 1.5; EXPRESSED IN HEART, SIGNAL = 1.6; EXPRESSED IN HELA, SIGNAL = 2.9; EXPRESSED IN BONE MARROW, SIGNAL = 1.8; EXPRESSED IN FETAL LIVER, SIGNAL = 1.8; EXPRESSED IN BRAIN, SIGNAL = 1.3; EXPRESSED IN ADULT LIVER, SIGNAL = 1.2; EST_HUMAN HIT: BI822807.1, EVALUE 1.00e-03; SWISSPROT HIT: Q61603, EVALUE 4.00e-34; NT HIT: X75852.1, EVALUE 8.00e-78
tccttgcagggaaattcacctgcatcgaggtaaagtttcacctggaacggcagatgggctactatctgattcagatgtacatccccagcctactcatcgtcatcctgtcctgggtctccttctggatcaacatggatgctgcccctgcccgtgtgggcctgggcatcaccaccgtgctcaccatgaccacccagagctctggctcccgggcctc

SEQ ID NO: 23035 - DNA, 386 bp, Homo sapiens
  MAP TO CHR3.3; EXPRESSED IN LUNG, SIGNAL = 0.79; EXPRESSED IN HEART, SIGNAL = 0.67; EXPRESSED IN BRAIN, SIGNAL = 0.81; EXPRESSED IN BONE MARROW, SIGNAL = 0.86; NT HIT: gi15295589, EVALUE 0.00e+00; EST_HUMAN HIT: W04836.1, EVALUE 5.30e-01; SWISSPROT HIT: P51685, EVALUE 2.00e-60
tcttcagaggccacttggtaaaacactagcaatgggatggtagccataatggcggttagccatactgccaggcacagcgttgtgcccatcctgatcgtcctcacctttagggcatacacggcatggacaacagccaggtacctgtccacactcatgagggtgatgaaaaacatgctgctgtagaagccaatgtaataaaagccagacaccactttgcacattacagtcccaaacacccactggtccagcagatagtaggtctgaaaggggaaggagaagacaaaaagcaggtcagacagggccaggttcaagaggtatacatctgtgatgctcctcagcttcttgcagaccacaaggaccaggatgaccaggctgtttcccagaag

SEQ ID NO: 23036 - DNA, 178 bp, Homo sapiens
  MAP TO CHR19.3; EXPRESSED IN ADULT LIVER, SIGNAL = 1.8; EXPRESSED IN LUNG, SIGNAL =   2; EXPRESSED IN PLACENTA, SIGNAL = 1.2; EXPRESSED IN BONE MARROW, SIGNAL = 1.6; EXPRESSED IN FETAL LIVER, SIGNAL = 1.8; SWISSPROT HIT: P49366, EVALUE 2.00e-27; NT HIT: AJ001701.1, EVALUE 8.00e-96; EST_HUMAN HIT: BE793652.1, EVALUE 5.00e-92
ggcgctggccgccgtgctaaagcacagctcgacgttgccgcccgaaagcacccaggtccggggctacgacttcaaccgcggtgtgaattaccgcgcactgctggaggccttcggcaccaccggcttccaagcaaccaacttcgggcgcgctgtacagcaagtcaatgccatggtgagg

SEQ ID NO: 23037 - DNA, 214 bp, Homo sapiens
  MAP TO CHR3.3; EXPRESSED IN BONE MARROW, SIGNAL = 0.69; EXPRESSED IN HEART, SIGNAL = 0.73; EXPRESSED IN HELA, SIGNAL =   2; EXPRESSED IN BRAIN, SIGNAL = 0.58; SWISSPROT HIT: Q13275, EVALUE 2.00e-21; NT HIT: U38276.1, EVALUE 1.00e-61; EST_HUMAN HIT: AW381182.1, EVALUE 1.00e-52
tggccccagggcgagtgtgggaacttcgtcaggctcatccagccctggaaccgaacacacctgtatgtgtgcgggacaggtgcctacaaccccatgtgcacctatgtgaaccgcggacgccgcgcccaggtaagccccagccaccctggccctgtgctgcccccgctggtggctgcatcccagggtcctgatgggaggaggggcttcagcccca

SEQ ID NO: 23038 - DNA, 161 bp, Homo sapiens
  MAP TO CHR17.3; EXPRESSED IN BONE MARROW, SIGNAL = 6.8; EXPRESSED IN LUNG, SIGNAL = 9.9; EXPRESSED IN HEART, SIGNAL = 5.5; EXPRESSED IN FETAL LIVER, SIGNAL = 5.5; EXPRESSED IN ADULT LIVER, SIGNAL = 4.6; EXPRESSED IN BRAIN, SIGNAL = 4.2; EST_HUMAN HIT: BI770681.1, EVALUE 5.00e-79; SWISSPROT HIT: P28799, EVALUE 2.00e-24; NT HIT: L01117.1, EVALUE 2.00e-81
ggcactcaccagaaggggacggcagcagctgtagctggctcctccggggtccaggcagcaggccacagggcagaactgaccatctgggcaccgcgttccagccaccagccctgctgttaaggccacccagctcaccagggtccacatggtctgcctgcaaa

SEQ ID NO: 23039 - DNA, 340 bp, Homo sapiens
  MAP TO CHR2.3; EXPRESSED IN BONE MARROW, SIGNAL = 1.2; EXPRESSED IN LUNG, SIGNAL = 1.1; EXPRESSED IN PLACENTA, SIGNAL = 1.7; EXPRESSED IN BRAIN, SIGNAL = 1.2; EST_HUMAN HIT: BG329966.1, EVALUE 1.00e-120; SWISSPROT HIT: Q16550, EVALUE 5.00e-43; NT HIT: gi4507310, EVALUE 1.00e-120
gctgtgtctctggatttgtaggtctctcctcgacttttcagctcctacacgattccttggggcaggtgaccagtgaatgacaccgcatatgtacctggcttaaagttactgactcgctgccacttggagacctagctgtcctctggactcatcattgcaatgattccatcaaaggaagagctagtgcagtcatataccatctcagttactcttcgtctgtagataggtgttacagttgtcagaaccttcatattcaaactggtctatagtcttgaccagcaaacacagccaacaagcctgcagatgccccaggtccttcagcaccatctccagggccatc

SEQ ID NO: 23040 - DNA, 321 bp, Homo sapiens
  MAP TO CHR11.3; EXPRESSED IN BRAIN, SIGNAL =   1; EXPRESSED IN BONE MARROW, SIGNAL =   1; EST_HUMAN HIT: AL525251.1, EVALUE 0.00e+00; SWISSPROT HIT: P46098, EVALUE 3.00e-49; NT HIT: AJ005205.2, EVALUE 0.00e+00
ggctgtacccactcaagcgtactgccagatggaccagagcataaccagggtgatgctgtaggccagcaccgctagcaggtaaatgtggaatagcagcttgtccagcacggagcccacgcgcagccagtctcgggccacctctcggatctcatcccgcttttccaggaattgccggatggaggacagctcctgcagcagcccacacaccgccagcgaggcctcccgaggtggtgggggagggctacatctgtccctcgggctcttctcgaagtcctggggtcctcccatgtggctgcagtggtttcccatggctggaagaag

SEQ ID NO: 23041 - DNA, 266 bp, Homo sapiens
  MAP TO CHR17.3; EXPRESSED IN LUNG, SIGNAL = 2.5; EXPRESSED IN PLACENTA, SIGNAL = 2.6; EXPRESSED IN HEART, SIGNAL = 2.9; EXPRESSED IN BONE MARROW, SIGNAL = 1.8; EXPRESSED IN FETAL LIVER, SIGNAL = 2.9; EXPRESSED IN BRAIN, SIGNAL =   2; EXPRESSED IN ADULT LIVER, SIGNAL = 2.1; EST_HUMAN HIT: BG683254.1, EVALUE 1.00e-90; SWISSPROT HIT: Q61576, EVALUE 3.00e-28; NT HIT: gi14774933, EVALUE 8.00e-91
ccctcccacctcaagaccctcctgacctggaatcgaagagggtgccgtccatcaaggagccattgtagtggtagcgcatgaagtccccggccccggctctgcggacacagccgggggggagctccagcgtctctagctggacagcgtccttcgggttgtgcacgtcaatcaggaggacgtgaaagaccagcgaggcctgtggggggatcactgtccctggggaagggatagggcttgaaccataaaattggggagcaagccgaggc

SEQ ID NO: 23042 - DNA, 118 bp, Homo sapiens
  MAP TO CHR6.3; EXPRESSED IN ADULT LIVER, SIGNAL = 2.3; EXPRESSED IN BRAIN, SIGNAL = 2.9; EXPRESSED IN BONE MARROW, SIGNAL = 2.3; EXPRESSED IN LUNG, SIGNAL = 2.1; EXPRESSED IN PLACENTA, SIGNAL = 2.5; EST_HUMAN HIT: BF313083.1, EVALUE 3.00e-52; SWISSPROT HIT: P33520, EVALUE 1.60e-02; NT HIT: gi5729833, EVALUE 2.00e-52
acctgggcgttgacgtccacctgtcctgtgctcagcagcaggctgaccatctccaagttcccgattttggctgcgtggtggaggcaggtggaaccgtcctcctcctgagggagacacg

SEQ ID NO: 23043 - DNA, 163 bp, Homo sapiens
  MAP TO CHR5.3; EXPRESSED IN ADULT LIVER, SIGNAL = 2.9; EXPRESSED IN HEART, SIGNAL = 3.8; EXPRESSED IN BONE MARROW, SIGNAL =   3; EXPRESSED IN LUNG, SIGNAL = 1.6; EXPRESSED IN PLACENTA, SIGNAL =   3; EST_HUMAN HIT: AA524749.1, EVALUE 2.00e-17; SWISSPROT HIT: P47902, EVALUE 3.00e-23; NT HIT: gi14726676, EVALUE 1.00e-78
ccttctgcttctcaggtaagactcggaccaaggacaagtaccgcgtggtctacaccgaccaccaacgcctggagctggagaaggagtttcattacagccgttacatcacaatccggcggaaatcagagctggctgccaatctggggctcactgaacggcaggt

SEQ ID NO: 23044 - DNA, 286 bp, Homo sapiens
  MAP TO CHR4.3; EXPRESSED IN LUNG, SIGNAL = 1.2; EXPRESSED IN BONE MARROW, SIGNAL = 1.1; EXPRESSED IN PLACENTA, SIGNAL = 0.72; EXPRESSED IN FETAL LIVER, SIGNAL = 0.71; EXPRESSED IN ADULT LIVER, SIGNAL = 1.1; EXPRESSED IN BRAIN, SIGNAL = 1.8; EST_HUMAN HIT: BG284503.1, EVALUE 0.00e+00; SWISSPROT HIT: Q9UPY5, EVALUE 2.00e-39; NT HIT: AB042201.1, EVALUE 0.00e+00
cgcactcaccaaatagtgacaggaccccacacaccgtccagatggtcagagacatgcccacgctgcccgtgttctggagcacgcccttaggagagatgaagattcctgctccaatgatggtgccaatgataatggagactcccctcagtaaagtgactttcctcttcagctgcactttctcctgcccaggtggctccttgttgcccagggaaggcagcctcccgttaacatttccctgcaggtaacctcctttggagatggtggacacaacaggctttctgaccat

SEQ ID NO: 23045 - DNA, 261 bp, Homo sapiens
  MAP TO CHR12.3; EXPRESSED IN BRAIN, SIGNAL = 1.4; EXPRESSED IN LUNG, SIGNAL = 1.8; EXPRESSED IN HEART, SIGNAL = 2.1; EXPRESSED IN PLACENTA, SIGNAL = 1.6; EXPRESSED IN BONE MARROW, SIGNAL = 2.3; EST_HUMAN HIT: AL581999.1, EVALUE 1.00e-114; SWISSPROT HIT: P26010, EVALUE 2.00e-43; NT HIT: L23820.1, EVALUE 1.00e-119
catggtgtcttgcagcctgggcattggtcgcatagagcaccatagtagccgtccaagcactggcagcggttgcatttgcagcgtccatgcccactgcagagccctccctcgggactgatgcaactgtccatgtccccactgcattcgcatgctctgcccgtgcggttggcatgacagtgacatactccacattggcagcgaccaaagcctggggtagagccatgcagagggtgacaaccatactccacacacacagttggc

SEQ ID NO: 23046 - DNA, 188 bp, Homo sapiens
  MAP TO CHR17.3; EXPRESSED IN LUNG, SIGNAL = 0.4; EXPRESSED IN FETAL LIVER, SIGNAL = 0.76; EXPRESSED IN BRAIN, SIGNAL = 0.51; EXPRESSED IN PLACENTA, SIGNAL = 0.55; EXPRESSED IN BONE MARROW, SIGNAL = 0.83; EST_HUMAN HIT: BG953695.1, EVALUE 2.00e-97; SWISSPROT HIT: Q14532, EVALUE 1.00e-26; NT HIT: X90761.1, EVALUE 1.00e-102
gaggtcttgtgccttttcaggaagtcggttcccttcgatgccagcttggggaccgccttaacatcgaggtggacgctgcacccccggtggacctgaccagggtgctggaggagatgcggtgtcagtacgaggccatggtggaggccaaccgcagggacgtggaggaatggttcaatatgcaggtgggc

SEQ ID NO: 23047 - DNA, 174 bp, Homo sapiens
  MAP TO CHR11.3; EXPRESSED IN BONE MARROW, SIGNAL = 1.1; EXPRESSED IN FETAL LIVER, SIGNAL = 1.1; EST_HUMAN HIT: BE206635.1, EVALUE 3.00e-93; SWISSPROT HIT: P15328, EVALUE 2.00e-31; NT HIT: gi12056965, EVALUE 2.00e-93
ttctacttccccacacccactgttctgtgcaatgaaatctggactcactcctacaaggtcagcaactacagccgagggagtggccgctgcatccagatgtggttcgacccagcccagggcaaccccaatgaggaggtggcgaggttctatgctgcagccatgagtggggctggg

SEQ ID NO: 23048 - DNA, 176 bp, Homo sapiens
  MAP TO CHR1.3; EXPRESSED IN BONE MARROW, SIGNAL = 0.71; EXPRESSED IN LUNG, SIGNAL = 1.3; EXPRESSED IN PLACENTA, SIGNAL = 0.81; EXPRESSED IN HEART, SIGNAL = 0.51; EXPRESSED IN BRAIN, SIGNAL = 1.2; NT HIT: D90088.1, EVALUE 1.00e-94; EST_HUMAN HIT: AV650615.1, EVALUE 2.00e-94; SWISSPROT HIT: P04746, EVALUE 7.00e-30
agcaaaatgaagttctttctgttgcttttcaccattgggttctgctgggctcagtattccccaaatacacaacaaggacggacatctattgttcatctgtttgaatggcgatgggttgatattgctcttgaatgtgagcgatatttagctcccaagggatttggaggggttcaggt

SEQ ID NO: 23049 - DNA, 103 bp, Homo sapiens
  MAP TO CHR2.3; EXPRESSED IN HEART, SIGNAL = 1.2; EXPRESSED IN ADULT LIVER, SIGNAL = 0.89; EXPRESSED IN BONE MARROW, SIGNAL = 1.3; EXPRESSED IN LUNG, SIGNAL = 2.1; EXPRESSED IN HELA, SIGNAL = 2.1; SWISSPROT HIT: Q62871, EVALUE 2.00e-14; NT HIT: AY037160.1, EVALUE 4.00e-50; EST_HUMAN HIT: BG165995.1, EVALUE 6.00e-50
agcaccctgtatattgtgtaaatgttgttggaacacaaaatgctcacaatctgattagcatctctactgatggaaaaatttgttcatggagtctggacatgct

SEQ ID NO: 23050 - DNA, 136 bp, Homo sapiens
  MAP TO CHR19.3; EXPRESSED IN PLACENTA, SIGNAL = 0.83; EXPRESSED IN BONE MARROW, SIGNAL = 1.1; EXPRESSED IN LUNG, SIGNAL = 1.1; EXPRESSED IN HEART, SIGNAL = 0.87; EXPRESSED IN ADULT LIVER, SIGNAL = 0.81; EST_HUMAN HIT: AU130692.1, EVALUE 2.00e-62; SWISSPROT HIT: Q9UJU3, EVALUE 4.00e-17; NT HIT: gi15301667, EVALUE 2.00e-65
tcctcacctactaagagcaggttcctgaagttctccagcatcacatctcggtacagcttcctctggacagagtccagcagccccagctcctcctcagtgaagaccacagcaacatccttgaatgtcaccatctcct

SEQ ID NO: 23051 - DNA, 126 bp, Homo sapiens
  MAP TO CHR14.3; EXPRESSED IN HEART, SIGNAL = 3.8; EXPRESSED IN PLACENTA, SIGNAL = 2.4; EXPRESSED IN ADULT LIVER, SIGNAL = 5.8; EXPRESSED IN BRAIN, SIGNAL = 2.2; EXPRESSED IN LUNG, SIGNAL = 3.4; EXPRESSED IN BONE MARROW, SIGNAL = 9.6; EST_HUMAN HIT: BE896178.1, EVALUE 9.00e-65; SWISSPROT HIT: O70435, EVALUE 9.00e-18; NT HIT: gi14753145, EVALUE 6.00e-65
gtacagctattggaatcagatgcaaagatggtgttgtctttggggtagaaaaattagtcctttctaaactttatgaagaaggttccaacaaaagactttttaatgttgatcggcatgttggaatgg

SEQ ID NO: 23052 - DNA, 187 bp, Homo sapiens
  MAP TO CHR10.3; EXPRESSED IN BRAIN, SIGNAL = 1.6; EXPRESSED IN LUNG, SIGNAL = 2.2; EXPRESSED IN PLACENTA, SIGNAL = 1.5; EXPRESSED IN BONE MARROW, SIGNAL = 1.4; SWISSPROT HIT: P11712, EVALUE 9.00e-30; NT HIT: gi16156530, EVALUE 1.00e-101; EST_HUMAN HIT: BG199426.1, EVALUE 1.00e-101
aggaaaacggatttgtgtgggagaagccctggccggcatggagctgtttttattcctgacctccattttacagaactttaacctgaaatctctggttgacccaaagaaccttgacaccactccagttgtcaatggatttgcctctgtgccgcccttctaccagctgtgcttcattcctgtctgaaga

SEQ ID NO: 23053 - DNA, 138 bp, Homo sapiens
  MAP TO CHR19.3; EXPRESSED IN BRAIN, SIGNAL =   2; EXPRESSED IN BONE MARROW, SIGNAL =   2; EXPRESSED IN LUNG, SIGNAL = 2.4; EXPRESSED IN HEART, SIGNAL =   2; EXPRESSED IN ADULT LIVER, SIGNAL = 1.8; EST_HUMAN HIT: AW610482.1, EVALUE 7.00e-72; SWISSPROT HIT: Q9Y2A9, EVALUE 9.00e-22; NT HIT: AB049585.1, EVALUE 5.00e-72
ccaacgccagcttcgtgctcaacggggatgatgacgtctttgcacacacagacaacatggtcttctacctgcaggaccatgaccctggccgccacctcttcgtggggcaactgatccaaaacgtgggccccatccggg

SEQ ID NO: 23054 - DNA, 157 bp, Homo sapiens
  MAP TO CHR6.3; EXPRESSED IN BONE MARROW, SIGNAL = 1.7; EXPRESSED IN LUNG, SIGNAL = 5.4; EXPRESSED IN HEART, SIGNAL = 1.7; EXPRESSED IN ADULT LIVER, SIGNAL = 1.5; EXPRESSED IN BRAIN, SIGNAL = 1.7; NT HIT: M25380.1, EVALUE 2.00e-83; EST_HUMAN HIT: AW295038.1, EVALUE 4.00e-83; SWISSPROT HIT: P04540, EVALUE 3.40e+00
aggagattccacacaggggtggagtttctgacgaaggtcctaagggagtgtttgtgtctgactcaggcgcctggcacatttcagggagaaactccaaagtccacacaaagattttctaaggaatgcacaaattgaaaacacactcaaaagacaaaca

SEQ ID NO: 23055 - DNA, 345 bp, Homo sapiens
  MAP TO CHR1.3; EXPRESSED IN FETAL LIVER, SIGNAL = 1.6; EXPRESSED IN ADULT LIVER, SIGNAL = 1.8; EXPRESSED IN BRAIN, SIGNAL = 2.4; EXPRESSED IN BONE MARROW, SIGNAL = 2.1; EXPRESSED IN HEART, SIGNAL = 2.2; SWISSPROT HIT: Q9TSZ2, EVALUE 2.00e-16; NT HIT: gi12725409, EVALUE 0.00e+00; EST_HUMAN HIT: AL541019.1, EVALUE 0.00e+00
agggctgggatggggtaagcaggagaggagacaccggggaggacagggctgggcactcttcccaggatggcgagctggttgctcagggctggcagccctggacagctatggaagaaagaccagggccaggcagggaaggccaaagggccagtgggcgtgggcgaaggctccatctcggctgcgtagctgttgaggtgggagagaaggcgaatccggacggggtctgcacggctgctgggcccttcaaggacccccaggtacctgatgacctcagtgaggcactcccgaaaaccaatgctccggaagtcaactgccagggctcgggcatcaaagaatcctgcaaag

SEQ ID NO: 23056 - DNA, 208 bp, Homo sapiens
  MAP TO CHR15.3; EXPRESSED IN PLACENTA, SIGNAL = 0.69; EXPRESSED IN LUNG, SIGNAL = 0.65; EXPRESSED IN BONE MARROW, SIGNAL = 0.97; SWISSPROT HIT: P08910, EVALUE 1.00e-32; NT HIT: gi15300919, EVALUE 1.00e-100; EST_HUMAN HIT: AW075983.1, EVALUE 1.00e-100
gatgactcacctcagtgcactgtacccctggcacacgctgacgcagcacaggaccttctcttggtttgcctgagtctcccccaagtatttgcacacaatgttaccacccaggctgaagcccacgacgaccagctgggtcaggggatatgtcttcttgatgtagttcaccatggctccaaattcccacgtgcagcctgtgggcaaaagg

SEQ ID NO: 23057 - DNA, 251 bp, Homo sapiens
  MAP TO CHR2.3; EXPRESSED IN PLACENTA, SIGNAL = 4.3; EXPRESSED IN BRAIN, SIGNAL = 1.3; EXPRESSED IN FETAL LIVER, SIGNAL = 1.3; EXPRESSED IN BONE MARROW, SIGNAL = 1.3; EXPRESSED IN HEART, SIGNAL = 1.1; EXPRESSED IN HELA, SIGNAL = 2.4; EST_HUMAN HIT: AW392518.1, EVALUE 1.00e-130; SWISSPROT HIT: P16649, EVALUE 1.90e-02; NT HIT: AF227166.1, EVALUE 0.00e+00
ccacaccttccagacacggacgtagccatctgttcctccagtggcaagcagggtattatcgtggttgaagcacacaactttctgcagtggatcggagctaaagtctgtctgcaccgcctgcaaattctctaccctgagttctagcccctcgtgctgggtttccgctccacatttcttctctgctggggctgctcccttcctttgtcgaggcccctgctccttggaacctgtaacacaaacacttggccagg

SEQ ID NO: 23058 - DNA, 392 bp, Homo sapiens
  MAP TO CHR6.3; EXPRESSED IN HELA, SIGNAL = 6.9; EXPRESSED IN BONE MARROW, SIGNAL = 3.8; EXPRESSED IN ADULT LIVER, SIGNAL = 3.9; EST_HUMAN HIT: BE313558.1, EVALUE 0.00e+00; SWISSPROT HIT: P02261, EVALUE 1.00e-55; NT HIT: Z83742.1, EVALUE 0.00e+00
atgtctgggcgtggcaagcagggaggcaaagctcgcgccaaggccaagacccgctcttctcgggccgggcttcagtttcccgtaggccgagtgcatcgcctgctccgcaaaggcaactatgcggagcgggtcggtgctggagcgccggtgtacctggcggcggtgctggagtacctgaccgccgagatcctggagctggctggcaacgcggcccgcgacaacaagaagactcgcatcatcccgcgtcacctccagctggccatccgcaacgatgaggagctcaacaagcttctgggcaaagtcaccatcgcacagggtggcgtcctgcccaacatccaggccgtgctactgcccaagaagaccgagagccaccacaaggcgaagggcaagta

SEQ ID NO: 23059 - DNA, 208 bp, Homo sapiens
  MAP TO CHR8.3; EXPRESSED IN PLACENTA, SIGNAL = 0.57; EXPRESSED IN LUNG, SIGNAL = 0.82; EXPRESSED IN HEART, SIGNAL = 0.58; EXPRESSED IN BONE MARROW, SIGNAL = 0.85; EXPRESSED IN FETAL LIVER, SIGNAL = 0.62; EXPRESSED IN ADULT LIVER, SIGNAL = 0.67; EXPRESSED IN BRAIN, SIGNAL = 0.63; EST_HUMAN HIT: AV687249.1, EVALUE 1.00e-113; SWISSPROT HIT: P22680, EVALUE 4.00e-39; NT HIT: gi13787185, EVALUE 1.00e-113
ccttcgcagaagtagcaaagtgaaattttttccaatcaaaatattttccgtggcacaacaccttatggtatgacaagggatttgtgatgaaatggacatattttcccattagtttgcaggtaaaaacatgaccatgtttcctttgatttgctctgaggaactcaagaggattggcaccaaattgcagagcacagcccaggtatggaat

SEQ ID NO: 23060 - DNA, 170 bp, Homo sapiens
  MAP TO CHRX.3; EXPRESSED IN LUNG, SIGNAL = 0.87; EXPRESSED IN HEART, SIGNAL =   1; EXPRESSED IN BONE MARROW, SIGNAL = 0.95; EXPRESSED IN ADULT LIVER, SIGNAL = 1.1; NT HIT: gi10863920, EVALUE 4.00e-85; EST_HUMAN HIT: BG722634.1, EVALUE 3.40e+00; SWISSPROT HIT: Q92796, EVALUE 3.00e-26
gtcttacctggtgaagtcctcctcagccagcatgtgcctgggaataggagagtagcgggtggggggaacctgaggaggagcagggtagctgaccttgctctccacagccccgagataacccaggctggaattatggcttatgtggttgtcagccaaggcagtaaaagctg

SEQ ID NO: 23061 - DNA, 211 bp, Homo sapiens
  MAP TO CHR12.3; EXPRESSED IN BONE MARROW, SIGNAL = 2.6; EXPRESSED IN LUNG, SIGNAL = 1.4; EXPRESSED IN ADULT LIVER, SIGNAL = 1.7; EXPRESSED IN BRAIN, SIGNAL = 2.5; SWISSPROT HIT: Q00872, EVALUE 3.00e-33; NT HIT: gi4505294, EVALUE 1.00e-102; EST_HUMAN HIT: AI339458.1, EVALUE 1.00e-103
tttcttcaatttgaacttcagcctaaaataacctggatgaaaaacaaagttgctattgtggatgatccaagatacaggatgttcagcaaccagggagtctgtaccctggaaattcgcaagcccagcccctatgatggaggcacttactgctgcaaagcagtcaatgaccttgggacagtggagattgaatgcaaactggaggtgaaaggta

SEQ ID NO: 23062 - DNA, 197 bp, Homo sapiens
  MAP TO CHR14.3; EXPRESSED IN BRAIN, SIGNAL = 0.56; EXPRESSED IN BONE MARROW, SIGNAL = 0.7; EXPRESSED IN LUNG, SIGNAL = 0.51; EXPRESSED IN HEART, SIGNAL = 0.68; SWISSPROT HIT: P73769, EVALUE 2.50e+00; NT HIT: gi13649630, EVALUE 1.00e-97; EST_HUMAN HIT: AW869533.1, EVALUE 3.00e-44
ccaacctggttgttaaatggtgactcctccagccgcttcccgtacagggccagctcctctctcaccagccgggcccgagcagaggcctccagaggccccaaggccagcacgtgggcaccctggctctgctcaagggtctcccctaggcctgcatcactagacacactcagcaccaggtgtacacactgtgatatttg

SEQ ID NO: 23063 - DNA, 126 bp, Homo sapiens
  MAP TO CHR1.3; EXPRESSED IN ADULT LIVER, SIGNAL =   4; EXPRESSED IN BONE MARROW, SIGNAL = 8.1; EXPRESSED IN HELA, SIGNAL = 3.1; EXPRESSED IN LUNG, SIGNAL = 5.8; EXPRESSED IN PLACENTA, SIGNAL = 2.7; EST_HUMAN HIT: BF970393.1, EVALUE 1.00e-51; SWISSPROT HIT: P05413, EVALUE 2.00e-13; NT HIT: U57623.1, EVALUE 6.00e-65
ctctttccacagtccattgtgacactggatggagggaaacttgttcacctgcagaaatgggacgggcaagagaccacacttgtgcgggagctaattgatggaaaactcatcctggtaagatgggca

SEQ ID NO: 23064 - DNA, 149 bp, Homo sapiens
  MAP TO CHR8.3; EXPRESSED IN ADULT LIVER, SIGNAL = 1.4; EXPRESSED IN BRAIN, SIGNAL = 1.5; EXPRESSED IN BONE MARROW, SIGNAL = 1.8; EXPRESSED IN LUNG, SIGNAL =   1; EXPRESSED IN HEART, SIGNAL = 2.1; EST_HUMAN HIT: BF918987.1, EVALUE 1.20e-02; SWISSPROT HIT: P00540, EVALUE 6.00e-23; NT HIT: gi4885488, EVALUE 1.00e-78
agtttgggaaagtgtctcaagtactcactagatgttgtgaacggcctgctcttcctccactcgcaaagcattgtgcacttggacctgaagcccgcgaacatcttgatcagtgagcaggatgtctgtaaaattagtgacttcggttgctc

SEQ ID NO: 23065 - DNA, 149 bp, Homo sapiens
  MAP TO CHR11.3; EXPRESSED IN BRAIN, SIGNAL = 1.2; EXPRESSED IN HEART, SIGNAL = 0.96; EXPRESSED IN FETAL LIVER, SIGNAL = 0.82; EXPRESSED IN ADULT LIVER, SIGNAL = 0.96; EXPRESSED IN BONE MARROW, SIGNAL = 0.92; EXPRESSED IN HELA, SIGNAL = 2.3; EXPRESSED IN LUNG, SIGNAL = 0.94; EST_HUMAN HIT: BE019710.1, EVALUE 4.00e-67; SWISSPROT HIT: P22608, EVALUE 6.70e-01; NT HIT: AJ295844.1, EVALUE 1.00e-78
ttacctctttatgatcttcaactacactaagaagtgtatcaattgtattcagaattcccatagcagtaactgctttgtcatcactaccttcttcatctggccccgtctggattacttggttaaatgtcattgcctagattcaagagaat

SEQ ID NO: 23066 - DNA, 358 bp, Homo sapiens
  MAP TO CHR14.3; EXPRESSED IN BONE MARROW, SIGNAL = 0.88; EXPRESSED IN LUNG, SIGNAL =   1; EXPRESSED IN BRAIN, SIGNAL = 0.79; EST_HUMAN HIT: BI825694.1, EVALUE 0.00e+00; SWISSPROT HIT: P45164, EVALUE 5.50e-01; NT HIT: AF265666.1, EVALUE 0.00e+00
atctttccagttcagatcggagtcttgggaacctcagaacgagctgtggattgaaatcaccaagtgctgtggcctccggagtcgatggctgggaactcaacccagtccatatgctgtgtaccgcttcttcaccttttctgaccatgacactgccatcattccagccagtaacaacccctactttagagaccaggctcgattcccagtgcttgtgacctctgacctggaccattatctgagacgggaggccttgtctatacatgtttttgatgatgaagacttagagcctggctcgtatcttggccgagcccgagtgcctttactgcctcttgcaaaaaatgaatctatcaaaggtggg

SEQ ID NO: 23067 - DNA, 303 bp, Homo sapiens
  MAP TO CHR11.3; EXPRESSED IN FETAL LIVER, SIGNAL = 3.6; EXPRESSED IN ADULT LIVER, SIGNAL = 6.3; EXPRESSED IN BRAIN, SIGNAL =  11; EXPRESSED IN BONE MARROW, SIGNAL = 6.6; EXPRESSED IN HEART, SIGNAL = 7.1; EXPRESSED IN HELA, SIGNAL = 6.4; EXPRESSED IN PLACENTA, SIGNAL =   6; SWISSPROT HIT: Q13114, EVALUE 6.00e-06; NT HIT: gi4759253, EVALUE 0.00e+00; EST_HUMAN HIT: AL544165.1, EVALUE 0.00e+00
taccttattgattttatgatgcaggctttgcagaacctatggccgcatggcgtttgcactgcttctcgtaatgccatcaagcagatggggcattcatacttgctttccaggggtgggtcaaactctacatcatatccctggatctcctccataaatgagctggagaggttccccgtgctggcagttccacccacactatcatcttttgttacagcgctacaggagctggccatggccacacagcagtcactttcagactggctggatccacagctgttttcacagtttagcagactcatagta

SEQ ID NO: 23068 - DNA, 438 bp, Homo sapiens
  MAP TO CHR18.3; EXPRESSED IN ADULT LIVER, SIGNAL = 0.62; EXPRESSED IN BRAIN, SIGNAL = 0.61; EXPRESSED IN LUNG, SIGNAL = 0.31; EXPRESSED IN BONE MARROW, SIGNAL = 0.74; EST_HUMAN HIT: BI830442.1, EVALUE 0.00e+00; SWISSPROT HIT: Q01718, EVALUE 4.00e-84; NT HIT: X65633.1, EVALUE 0.00e+00
attctaccagtacctgctgcagaagatcatctttttgaatgcgtccctgagctctgggctccggaaggcatatatgaaggggtcaatgacggcattgcacatgatcaacatgccgttcacctggaagagagacatgtagcaggcgcagtaggggttacttgggcagaatgtcatcaagaggacatgaagcacaaagggggcccagcagaagatgaagaccccgagcaggatggtcagtgtgatggcccctttcatgttggctctggggagggtggagatcttcctggtgtgggatcgagccagcaggaacatgtgcacatagaggcacaggatgaagaccagcatcagcgggaacagcgacgtgaaggtgatcactgtgggcacatgatgggagaagatcaccatggtgatgccagtccccgtgcagaacgtccagat

SEQ ID NO: 23069 - DNA, 144 bp, Homo sapiens
  MAP TO CHR11.3; EXPRESSED IN HEART, SIGNAL = 1.2; EXPRESSED IN BONE MARROW, SIGNAL = 1.8; EXPRESSED IN BRAIN, SIGNAL = 1.9; EXPRESSED IN LUNG, SIGNAL = 2.8; EST_HUMAN HIT: BG772624.1, EVALUE 7.00e-72; SWISSPROT HIT: P35790, EVALUE 8.00e-21; NT HIT: gi4557454, EVALUE 5.00e-72
cacttacttttccattgtgccaaaaagccattttggttccttattgaatggcattttcataccatgaaatgtagccattttctcggcgatttctgcagaaatatctggcaaacttaattcttcagtatctaatcgccggctctg

SEQ ID NO: 23070 - DNA, 381 bp, Homo sapiens
  MAP TO CHR11.3; EXPRESSED IN HEART, SIGNAL =   1; EXPRESSED IN BONE MARROW, SIGNAL = 1.4; EXPRESSED IN ADULT LIVER, SIGNAL = 1.6; EXPRESSED IN BRAIN, SIGNAL = 1.9; EST_HUMAN HIT: W27038.1, EVALUE 0.00e+00; SWISSPROT HIT: P54681, EVALUE 5.00e-03; NT HIT: gi12736598, EVALUE 0.00e+00
gcctcatcagagagtgattccgatgagaaccagaacaagtctggcagcgaggccggcagtccccggaggccacgaagacagcggtcagatcaggactcagacagtgaccagccatccagaaagagaaggccctccggttctgagcagtctgacaatgaatctgtgcagtcagggagaagccactcaggagtttctgagaacgactctcgcccagcttctccaagtgccgaatcagatcacgaatcggagagaggatctgataatgagggttctggccaaggctctggaaatgaatcggaaccagagggatccaacaatgaggcctcagatagaggctcagaacatgggtcagatgatagtgactaggttttatttcatcaa

SEQ ID NO: 23071 - DNA, 155 bp, Homo sapiens
  MAP TO CHR19.3; EXPRESSED IN HELA, SIGNAL = 3.3; EXPRESSED IN PLACENTA, SIGNAL = 6.9; EXPRESSED IN BONE MARROW, SIGNAL =  13; EXPRESSED IN FETAL LIVER, SIGNAL = 6.9; EXPRESSED IN ADULT LIVER, SIGNAL = 9.5; EXPRESSED IN BRAIN, SIGNAL =  14; EST_HUMAN HIT: AA327669.1, EVALUE 3.00e-65; SWISSPROT HIT: Q9UIE0, EVALUE 1.00e-17; NT HIT: gi14764525, EVALUE 3.00e-67
tgttataggaggcagtgaccttcaaggatgtggctgtgttcttcactgaggaggaactggggctactggaccctgcccagaggaagctgtaccaagacgtgatgcttgagaacttcacgaacctgctgtcagtgggtgagcacaggcaccctctg

SEQ ID NO: 23072 - DNA, 136 bp, Homo sapiens
  MAP TO CHR2.3; EXPRESSED IN BRAIN, SIGNAL = 0.77; EXPRESSED IN BONE MARROW, SIGNAL = 0.8; EXPRESSED IN LUNG, SIGNAL = 0.33; EXPRESSED IN HEART, SIGNAL = 0.88; NT HIT: X91216.1, EVALUE 7.00e-71; EST_HUMAN HIT: T19754.1, EVALUE 1.00e-05; SWISSPROT HIT: P32418, EVALUE 1.00e-19
accttgaattcataggattcttcaatgatcacttccaacttggtgtgctctcccaggatggggcgccccatttctgcaatgcgcctctcctcttcctctttgctggtcagtggctgcttgtcatcatattcgtctg

SEQ ID NO: 23073 - DNA, 176 bp, Homo sapiens
  MAP TO CHR20.3; EXPRESSED IN BRAIN, SIGNAL = 1.4; EXPRESSED IN HEART, SIGNAL = 0.84; EXPRESSED IN BONE MARROW, SIGNAL = 1.4; EXPRESSED IN LUNG, SIGNAL = 1.3; SWISSPROT HIT: Q14165, EVALUE 4.30e+00; NT HIT: D83784.1, EVALUE 1.00e-94; EST_HUMAN HIT: BF218475.1, EVALUE 3.00e-93
ctctccagaggtgaaggtcatggccaattccttccacagcaggttcagagttccaggagaggccagggtgggatcccagaggaatctggacttttctggccaacacctgcctaaggcaaagtttcttattacataaatatccttgttaaaaagcaaaatattgatcctgtacaata

SEQ ID NO: 23074 - DNA, 136 bp, Homo sapiens
  MAP TO CHR3.3; EXPRESSED IN ADULT LIVER, SIGNAL = 1.2; EXPRESSED IN BRAIN, SIGNAL = 1.2; EXPRESSED IN BONE MARROW, SIGNAL =   1; EXPRESSED IN HEART, SIGNAL = 0.88; EST_HUMAN HIT: BF906899.1, EVALUE 6.70e-01; SWISSPROT HIT: Q9Y215, EVALUE 8.00e-06; NT HIT: AF229118.1, EVALUE 7.00e-71
agtactcaccggacttcggccacctctgaagaatggtggtgggaacagtggtggtggaggaggcgtcagcaggcagcatgctttgtggccaccacgcttcttctgatccaggctgggaagggctgttcagagaaaa

SEQ ID NO: 23075 - DNA, 344 bp, Homo sapiens
  MAP TO CHR17.3; EXPRESSED IN BRAIN, SIGNAL = 1.4; EXPRESSED IN BONE MARROW, SIGNAL = 1.9; EXPRESSED IN HEART, SIGNAL = 1.3; EXPRESSED IN PLACENTA, SIGNAL = 1.5; EXPRESSED IN ADULT LIVER, SIGNAL = 1.5; EST_HUMAN HIT: BF982414.1, EVALUE 0.00e+00; NT HIT: gi14774885, EVALUE 0.00e+00; SWISSPROT HIT: Q9IA11, EVALUE 4.00e-20
tccccacaggcctttcccctcgcgtcctccctccctttccagcaccttcactcggcctgtttttcttcctcctcctcggcactgagctgagacgcgctgagcagtttgctctcctttttccacttcatgcgtcggttctggaaccatatcttgatctgcctctccgtcaggcacagggcgtgcgcgatctcgatgcgccgccgccgcgtcaggtagcgattgtagtgaaactccttctccagctccagcgtctggtaacgtgtgtatgtctggcggcctcgccggccgctgggcccaaaggaggaacctgttacgcagagtggagatgctgaggcctgcggtca

SEQ ID NO: 23076 - DNA, 158 bp, Homo sapiens
  MAP TO CHR11.3; EXPRESSED IN FETAL LIVER, SIGNAL = 1.7; EXPRESSED IN BRAIN, SIGNAL = 2.6; EXPRESSED IN BONE MARROW, SIGNAL = 2.4; EXPRESSED IN PLACENTA, SIGNAL = 2.2; EXPRESSED IN HEART, SIGNAL = 1.6; EST_HUMAN HIT: BE613249.1, EVALUE 5.00e-79; SWISSPROT HIT: P40362, EVALUE 5.90e-02; NT HIT: gi16184325, EVALUE 4.00e-79
accttatgctccagaccccgtggattctggatcctgtgtatcctcaagactctgtccaagccacaggaggctagtagaggctttgaagggtggcactgcaacccacgcacactgcctgccagccccttcagacagcccagtagacgccctagagaagg

SEQ ID NO: 23077 - DNA, 252 bp, Homo sapiens
  MAP TO CHR22.3; EXPRESSED IN ADULT LIVER, SIGNAL = 1.6; EXPRESSED IN FETAL LIVER, SIGNAL = 1.3; EXPRESSED IN BONE MARROW, SIGNAL = 1.6; EXPRESSED IN HELA, SIGNAL = 2.2; EST_HUMAN HIT: AL046886.1, EVALUE 1.00e-117; SWISSPROT HIT: O55145, EVALUE 1.10e+00; NT HIT: AF328769.1, EVALUE 1.00e-117
tgcccttgtgttcccacagatcctatgaatgcactccagagcctgactggcggacctgctgcgggagccgctggaattggcatgcctcctcggggcccgggacagtctctgggcgggatgggtagccttggtgccatgggacagccaatgtctctctcagggcagccgcctcctgggacctcggggatggcccctcacagcatggctgtcgtgtctacggcaactccacagagtgagtaccacacttcttgg

SEQ ID NO: 23078 - DNA, 267 bp, Homo sapiens
  MAP TO CHR9.3; EXPRESSED IN BONE MARROW, SIGNAL = 1.6; EXPRESSED IN FETAL LIVER, SIGNAL = 2.1; EXPRESSED IN BRAIN, SIGNAL = 2.4; EXPRESSED IN LUNG, SIGNAL = 2.1; EXPRESSED IN HEART, SIGNAL = 0.87; SWISSPROT HIT: O95477, EVALUE 2.00e-33; NT HIT: AF275948.1, EVALUE 0.00e+00; EST_HUMAN HIT: AV654319.1, EVALUE 1.40e+00
  unsure 157
cactcaaagcttacttggtcaagtgttgtctgagaaacagagtagtcttctatgtggagtcgctttttgctctgggagaggatgctgaatatcctggccagagaagataatgaagatggaagctggtattgtagcatgttccggtgtttctcttttngaacacttccaggaaatgcaagtccaaagaaatcctggacaggcttcaggtccgggttggaccctgctattcgtacaactattgtataaccatctccaaacctgaaagca

SEQ ID NO: 23079 - DNA, 195 bp, Homo sapiens
  MAP TO CHR6.3; EXPRESSED IN ADULT LIVER, SIGNAL = 0.87; EXPRESSED IN BRAIN, SIGNAL = 1.6; EXPRESSED IN BONE MARROW, SIGNAL = 1.4; EXPRESSED IN LUNG, SIGNAL = 4.3; SWISSPROT HIT: O35984, EVALUE 8.00e-31; NT HIT: D28769.1, EVALUE 1.00e-106; EST_HUMAN HIT: AL576644.1, EVALUE 1.00e-102
acctggcatccaggaaacgggagcgcaggatcatcacagcctcgcaggtgctctgcttcagctgcatctggatggcgctgaactttcgatggatgatgctcaccatgcgttccatctctttgggggccacgggcctggtgcggctctgctccctcagcaggttcatgacatgggtcgtgaactcattacatgcct

SEQ ID NO: 23080 - DNA, 159 bp, Homo sapiens
  MAP TO CHR4.3; EXPRESSED IN BONE MARROW, SIGNAL = 0.78; EXPRESSED IN LUNG, SIGNAL = 0.5; EXPRESSED IN BRAIN, SIGNAL = 0.55; EST_HUMAN HIT: AL539373.1, EVALUE 2.00e-78; SWISSPROT HIT: P50571, EVALUE 1.00e-23; NT HIT: M59215.1, EVALUE 2.00e-84
tatccacgactgtcactaagttttcgtctaaagagaaacattggttacttcattttgcaaacctacatgccttctacactgattacaattctgtcctgggtgtctttttggatcaactatgatgcatctgcagccagagtcgcactaggtaatacattc

SEQ ID NO: 23081 - DNA, 125 bp, Homo sapiens
  MAP TO CHR9.3; EXPRESSED IN ADULT LIVER, SIGNAL = 1.4; EXPRESSED IN BONE MARROW, SIGNAL = 0.85; EST_HUMAN HIT: AA298492.1, EVALUE 3.00e-64; NT HIT: gi16161478, EVALUE 2.00e-64
ttttgtcttttggattcctcatttttcctgattatccactcacaagatgactcagttgggaacttgaccatgattgtagtgctttctggctgggctccttccctcatcgggaagacagtgtgaaa

SEQ ID NO: 23082 - DNA, 237 bp, Homo sapiens
  MAP TO CHR14.3; EXPRESSED IN LUNG, SIGNAL = 0.88; EXPRESSED IN BONE MARROW, SIGNAL = 1.1; EXPRESSED IN FETAL LIVER, SIGNAL = 0.94; EXPRESSED IN BRAIN, SIGNAL = 0.61; EXPRESSED IN ADULT LIVER, SIGNAL = 0.62; EST_HUMAN HIT: BF834726.1, EVALUE 1.00e-116; SWISSPROT HIT: P12883, EVALUE 9.00e-33; NT HIT: M25133.1, EVALUE 0.00e+00
gacacccaccttgccatactcggtctcggcagtgactttgccaccctctcgagacacgatcttggccttgacaaactcctgtttgtcatcaggcacgaagacatccttcttgaggtcaaaaggcctggtctgcgcttctagccgctccttctctgacttgcgcaggtagggggcggcagccccaaagactgccatctccgaatctcccatggctgtgcctggagtgagcagaagctg

SEQ ID NO: 23083 - DNA, 164 bp, Homo sapiens
  MAP TO CHR6.3; EXPRESSED IN ADULT LIVER, SIGNAL = 1.9; EXPRESSED IN BRAIN, SIGNAL = 2.1; EXPRESSED IN BONE MARROW, SIGNAL = 1.9; EXPRESSED IN HELA, SIGNAL = 3.5; EXPRESSED IN HEART, SIGNAL = 1.9; EXPRESSED IN FETAL LIVER, SIGNAL = 1.8; EST_HUMAN HIT: BG250855.1, EVALUE 4.00e-80; SWISSPROT HIT: P40055, EVALUE 2.00e-07; NT HIT: gi14550417, EVALUE 2.00e-80
ccactcacagctgtagccaggaggaagtggaagggcaggaactcaagccgtgttactcggtcacagcggcggatacagtggagctcaatgccctgattgtcatagatgtggagccagcggttctgagcaacagcaagcagtgcctcagaatggagaaacctggg

SEQ ID NO: 23084 - DNA, 131 bp, Homo sapiens
  MAP TO CHR12.3; EXPRESSED IN PLACENTA, SIGNAL = 2.3; EXPRESSED IN HELA, SIGNAL =   2; EXPRESSED IN BONE MARROW, SIGNAL = 2.8; EXPRESSED IN ADULT LIVER, SIGNAL = 2.6; SWISSPROT HIT: P34535, EVALUE 1.00e-06; EST_HUMAN HIT: BE885728.1, EVALUE 8.00e-53; NT HIT: AF351620.1, EVALUE 6.00e-68
ttccttttttgctctaggcctctggaaccttgtttttctcttctccaacctgtccctcatcttcctcatgccctttgcatatttcttcactgagtctgagggctttgctggctccagaaaggtaagtaggg

SEQ ID NO: 23085 - DNA, 135 bp, Homo sapiens
  MAP TO CHR4.3; EXPRESSED IN BONE MARROW, SIGNAL = 4.2; EXPRESSED IN LUNG, SIGNAL = 1.8; EXPRESSED IN PLACENTA, SIGNAL = 2.6; EXPRESSED IN FETAL LIVER, SIGNAL = 2.4; EXPRESSED IN ADULT LIVER, SIGNAL = 2.8; EXPRESSED IN BRAIN, SIGNAL = 3.8; SWISSPROT HIT: P27707, EVALUE 1.00e-18; NT HIT: gi4503268, EVALUE 4.00e-60; EST_HUMAN HIT: BE041528.1, EVALUE 6.00e-60
agtcttacttcagtgtcctatgcaggagccagctttcatgtttataatgaagcttctctaaatattcaagaggaatgccttgctcttcatttcttccccgtaaatatattctatgtaagcatgtctaaaagcaag

SEQ ID NO: 23086 - DNA, 157 bp, Homo sapiens
  MAP TO CHR19.3; EXPRESSED IN LUNG, SIGNAL = 1.1; EXPRESSED IN PLACENTA, SIGNAL = 0.82; EXPRESSED IN BONE MARROW, SIGNAL = 0.93; EXPRESSED IN FETAL LIVER, SIGNAL = 0.54; EXPRESSED IN BRAIN, SIGNAL =   1; EST_HUMAN HIT: AI081072.1, EVALUE 1.00e-73; SWISSPROT HIT: O95473, EVALUE 9.00e-24; NT HIT: gi11425252, EVALUE 8.00e-74
gggcttgtcctcacccagacaaggatggagaagaaggtgaaggcgatggctgcctgggcactgctgctccccaggaggaactctttgggcggcgaatgctgccattggttggccaggaagcagaaacccatgaaccagacaactgcccagagaactg

SEQ ID NO: 23087 - DNA, 161 bp, Homo sapiens
  MAP TO CHR11.3; EXPRESSED IN HELA, SIGNAL =  13; EXPRESSED IN BONE MARROW, SIGNAL = 2.3; EXPRESSED IN HEART, SIGNAL =   2; EXPRESSED IN FETAL LIVER, SIGNAL = 2.9; EXPRESSED IN ADULT LIVER, SIGNAL =   3; EST_HUMAN HIT: BE562236.1, EVALUE 4.00e-83; SWISSPROT HIT: P38138, EVALUE 4.00e-03; NT HIT: D42041.1, EVALUE 2.00e-83
tacctgtgagactagcatattgccggaaaacatcagagatggagggccccagcagcaggaagacgtcaatgatgccagtctctgacatccagcgaacatctgtctgtggggtctccccagagccctgcaggtagtccatcatcttcccaaacagggtctgt

SEQ ID NO: 23088 - DNA, 106 bp, Homo sapiens
  MAP TO CHR19.3; EXPRESSED IN BONE MARROW, SIGNAL =   1; EXPRESSED IN HEART, SIGNAL = 0.67; EXPRESSED IN PLACENTA, SIGNAL = 0.78; NT HIT: L08634.1, EVALUE 4.00e-53; SWISSPROT HIT: Q9NQT4, EVALUE 2.00e-15; EST_HUMAN HIT: AA428915.1, EVALUE 2.00e-52
taccttgcaggaaggaagcagagccatctggccgcgacagcaggttctgttcgcaggcaaagtgccggaggctgcagccaggaccccgagggctggaccctgttcc

SEQ ID NO: 23089 - DNA, 116 bp, Homo sapiens
  MAP TO CHR9.3; EXPRESSED IN BONE MARROW, SIGNAL = 2.7; EXPRESSED IN HEART, SIGNAL = 1.3; EXPRESSED IN HELA, SIGNAL = 5.5; EXPRESSED IN ADULT LIVER, SIGNAL = 1.5; EXPRESSED IN BRAIN, SIGNAL = 1.8; EXPRESSED IN FETAL LIVER, SIGNAL = 0.76; NT HIT: gi14745912, EVALUE 5.00e-56; SWISSPROT HIT: P04083, EVALUE 3.00e-15; EST_HUMAN HIT: BG620959.1, EVALUE 7.00e-56
tagcaaactgtgaagtcatccaaaggtggtcccggatcagcggtgagcccctatcctaccttcaatccatcctcggatgtcgctgccttgcataaggccataatggttaaaggtaa

SEQ ID NO: 23090 - DNA, 189 bp, Homo sapiens
  MAP TO CHR5.3; EXPRESSED IN HEART, SIGNAL = 3.6; EXPRESSED IN BONE MARROW, SIGNAL =   3; EXPRESSED IN FETAL LIVER, SIGNAL = 3.1; EXPRESSED IN ADULT LIVER, SIGNAL = 3.6; EXPRESSED IN BRAIN, SIGNAL = 4.3; EXPRESSED IN LUNG, SIGNAL =   3; EXPRESSED IN HELA, SIGNAL = 3.4; EST_HUMAN HIT: AI942392.1, EVALUE 3.00e-04; SWISSPROT HIT: O00254, EVALUE 3.00e-32; NT HIT: AF374726.2, EVALUE 1.00e-102
tggccaggtagcggttgatgctgatgcaggcaaggagcagaatggagcagtacatgttgccatagaagatgactgtggtggcccggcacaggacctctccaaatacccagttgttcccattgagatgataagctatcttaaagggcaatgtaacacaaaaaagaaaatctgcaatggccaggttggtgt

SEQ ID NO: 23091 - DNA, 182 bp, Homo sapiens
  MAP TO CHR3.3; EXPRESSED IN BRAIN, SIGNAL = 0.96; EXPRESSED IN BONE MARROW, SIGNAL = 0.87; EXPRESSED IN HEART, SIGNAL = 0.62; EXPRESSED IN ADULT LIVER, SIGNAL = 0.55; EST_HUMAN HIT: AA777399.1, EVALUE 5.00e-98; SWISSPROT HIT: P11182, EVALUE 7.00e-17; NT HIT: X15069.1, EVALUE 3.00e-98
accctttaaagcttctgtttctatgtttactaatggcttccccacataggcaatatcatctagactatgctagagttttcaatgactccatcataaggactagcgatggtaacagaagctttatcactttgaactttaccgatgttatcaaactgagacactgtatctccttcttttacata

SEQ ID NO: 23092 - DNA, 185 bp, Homo sapiens
  MAP TO CHR11.3; EXPRESSED IN PLACENTA, SIGNAL = 0.64; EXPRESSED IN BONE MARROW, SIGNAL = 0.72; EXPRESSED IN ADULT LIVER, SIGNAL = 0.69; EXPRESSED IN BRAIN, SIGNAL = 0.59; NT HIT: AF169255.1, EVALUE 1.00e-88; SWISSPROT HIT: P46098, EVALUE 1.00e-18; EST_HUMAN HIT: BF958361.1, EVALUE 2.00e-88
tttacctgtatgcagaatgctcttgaaggtcaggctgcaattctggacatcaaatggaaaagcatatgtctctaaactgcacgcagagaccacctggatgggcttatagttctcaatggtcccagatgagttcacataaacatagggaaggtcaggggatctttcaatgtccacactatatgaaa

SEQ ID NO: 23093 - DNA, 121 bp, Homo sapiens
  MAP TO CHR11.3; EXPRESSED IN BONE MARROW, SIGNAL = 1.7; EXPRESSED IN LUNG, SIGNAL = 1.1; EXPRESSED IN HEART, SIGNAL = 1.9; EXPRESSED IN FETAL LIVER, SIGNAL = 0.54; EXPRESSED IN ADULT LIVER, SIGNAL = 1.6; NT HIT: gi14763520, EVALUE 5.00e-62
gattgcttgaggcttttagtgagttccgaaaagcaacaggaaaaatcagttatctgaaagctcagtaactcagaacaggagtaactgcaggggaccagagatgagcaaagatctgtgtgtg

SEQ ID NO: 23094 - DNA, 242 bp, Homo sapiens
  MAP TO CHR19.3; EXPRESSED IN FETAL LIVER, SIGNAL = 2.9; EXPRESSED IN ADULT LIVER, SIGNAL =   4; EXPRESSED IN BRAIN, SIGNAL = 2.4; EXPRESSED IN HELA, SIGNAL = 3.2; EXPRESSED IN PLACENTA, SIGNAL = 2.3; EXPRESSED IN BONE MARROW, SIGNAL = 2.4; EST_HUMAN HIT: AL543612.1, EVALUE 1.00e-120; SWISSPROT HIT: Q92947, EVALUE 2.00e-36; NT HIT: AF012341.1, EVALUE 0.00e+00
cccaaagtggctgccacttacccccaggctggatgcaccagggagcacattctcctctggcacctccacaccgtccatgatgatcatgcctgtggctgaggcccgcagcgagaacttgccctggatcctgggggccgagagaccccgcatccccttctccagcaggaagccccgaatgcagccatcttcacaccgagcccacactacaaacagatcggccataggcgagttcgtgatcctgg

SEQ ID NO: 23095 - DNA, 160 bp, Homo sapiens
  MAP TO CHR5.3; EXPRESSED IN LUNG, SIGNAL = 4.1; EXPRESSED IN PLACENTA, SIGNAL = 1.8; EXPRESSED IN BONE MARROW, SIGNAL = 1.6; EXPRESSED IN FETAL LIVER, SIGNAL = 1.1; EXPRESSED IN ADULT LIVER, SIGNAL = 1.1; EXPRESSED IN BRAIN, SIGNAL = 1.5; EST_HUMAN HIT: R83528.1, EVALUE 6.00e-85; SWISSPROT HIT: Q92628, EVALUE 1.10e+00; NT HIT: gi14726895, EVALUE 4.00e-85
caggcatggaagcccaacctcttctgagacttggcagggagaggacacggggagacactgatatctgttacactttgacatcagcaccttgggctttcaaaacacaaatggtagacaaaatcgcctaggcaagactgaagtccaactcatagagtggctc

SEQ ID NO: 23096 - DNA, 361 bp, Homo sapiens
  MAP TO CHR5.3; EXPRESSED IN BONE MARROW, SIGNAL = 1.3; EXPRESSED IN FETAL LIVER, SIGNAL = 1.6; EXPRESSED IN ADULT LIVER, SIGNAL = 1.5; EXPRESSED IN LUNG, SIGNAL = 1.7; EXPRESSED IN HEART, SIGNAL = 1.7; EXPRESSED IN PLACENTA, SIGNAL = 1.8; NT HIT: gi14727857, EVALUE 0.00e+00; EST_HUMAN HIT: BE262635.1, EVALUE 0.00e+00; SWISSPROT HIT: Q9Y5H9, EVALUE 4.00e-61
gctgctctcgcttctgctcctcgcagcctgggaggtggggagcggccagctccgctactccgtccccgaggaggccaaacacggcaccttcgtgggccgcatcgcgcaggacctggggctggagctggaggagctggtgccgcgcctgttccgggtggcgtccaaaagacacggggaccttctggaggtaaatctgcagaatggcattttgtttgtgaattctcggatcgaccgggaggagctgtgcgggcggagcgcggaatgtagcatccacgtggaggtgatcgtggacaggccgctgcaggttttccatgtggaagtggaggtgaaggacattaacgacaacccgccaatatttcca

SEQ ID NO: 23097 - DNA, 148 bp, Homo sapiens
  MAP TO CHR12.3; EXPRESSED IN FETAL LIVER, SIGNAL = 1.4; EXPRESSED IN BRAIN, SIGNAL = 0.77; EXPRESSED IN ADULT LIVER, SIGNAL = 1.5; EXPRESSED IN PLACENTA, SIGNAL = 0.83; EXPRESSED IN BONE MARROW, SIGNAL = 0.74; NT HIT: gi14763305, EVALUE 5.00e-78; EST_HUMAN HIT: BG767339.1, EVALUE 8.00e-78; SWISSPROT HIT: P00973, EVALUE 1.00e-23
aatctatgtcaagctcatcgaggagtgcaccgacctgcagaaagagggcgagttctccacctgcttcacagaactacagagagacttcctgaagcagcgccccaccaagctcaagagcctcatccgcctagtcaagcactggtaccaa

SEQ ID NO: 23098 - DNA, 134 bp, Homo sapiens
  MAP TO CHR11.3; EXPRESSED IN FETAL LIVER, SIGNAL = 1.9; EXPRESSED IN ADULT LIVER, SIGNAL = 1.4; EXPRESSED IN BONE MARROW, SIGNAL = 1.3; EXPRESSED IN PLACENTA, SIGNAL =   1; EXPRESSED IN LUNG, SIGNAL = 1.3; EXPRESSED IN HEART, SIGNAL = 1.7; EXPRESSED IN BRAIN, SIGNAL = 1.3; SWISSPROT HIT: O94966, EVALUE 1.40e-01; NT HIT: gi6912303, EVALUE 2.00e-68; EST_HUMAN HIT: W25502.1, EVALUE 2.00e-68
atctttttgtttttcctgctttttagctgcaggcagttcaaggcttgcccactgcatcggttcagcttttctcatagtgatttcaatctttgttgcagtcatagttacataacttcgctttacatcaatcacct

SEQ ID NO: 23099 - DNA, 115 bp, Homo sapiens
  MAP TO CHR5.3; EXPRESSED IN ADULT LIVER, SIGNAL = 0.48; EXPRESSED IN BONE MARROW, SIGNAL = 0.72; EXPRESSED IN LUNG, SIGNAL = 0.9; EXPRESSED IN PLACENTA, SIGNAL = 0.96; SWISSPROT HIT: P07686, EVALUE 5.00e-15; EST_HUMAN HIT: R97124.1, EVALUE 2.00e-56; NT HIT: M23286.1, EVALUE 2.00e-58
gttcaccatcaatgaatccaccattattgattctccaaggttttctcacagaggaattttgattgatacatccagacattatctgccagttaagattattcttaaaactctggta

SEQ ID NO: 23100 - DNA, 129 bp, Homo sapiens
  MAP TO CHR2.3; EXPRESSED IN LUNG, SIGNAL = 1.4; EXPRESSED IN HEART, SIGNAL = 1.2; EXPRESSED IN BRAIN, SIGNAL = 1.6; EXPRESSED IN FETAL LIVER, SIGNAL = 0.54; EXPRESSED IN ADULT LIVER, SIGNAL = 1.1; EXPRESSED IN BONE MARROW, SIGNAL = 1.2; SWISSPROT HIT: Q9Y5W5, EVALUE 2.00e+00; EST_HUMAN HIT: AL044521.1, EVALUE 3.00e-58; NT HIT: gi10048403, EVALUE 6.00e-59
aaagaaaatacaaacctgcggcaaatccatcaaatattctgtttttccttaagattggatgactattagtgctgatgagaacacctgcttgagcattcctgaaaatatcattttcttcaaggagaccta

SEQ ID NO: 23101 - DNA, 233 bp, Homo sapiens
  MAP TO CHR1.3; EXPRESSED IN LUNG, SIGNAL = 2.3; EXPRESSED IN HEART, SIGNAL = 3.4; EXPRESSED IN BONE MARROW, SIGNAL = 3.3; EXPRESSED IN PLACENTA, SIGNAL = 3.5; EXPRESSED IN FETAL LIVER, SIGNAL = 2.3; EXPRESSED IN ADULT LIVER, SIGNAL = 3.2; EXPRESSED IN BRAIN, SIGNAL = 2.3; EST_HUMAN HIT: BE257965.1, EVALUE 1.00e-126; SWISSPROT HIT: Q14774, EVALUE 3.00e-26; NT HIT: gi14734952, EVALUE 1.00e-126
caggtgaaggtgtggttccagaaccggcggatgaagtggcggcactccaaggaggcccaggcccaaaaggacaaggacaaggaggctggcgagaagccatcaggtggagccctggctgcggatggcgagcaggacgagaggagccccagccgttctgaaggcgaggctgagagcgagagcagcgactccgagtccctggacatggcccccagcgacacggagcggactgaggg

SEQ ID NO: 23102 - DNA, 210 bp, Homo sapiens
  MAP TO CHR19.3; EXPRESSED IN HEART, SIGNAL = 1.4; EXPRESSED IN HELA, SIGNAL = 2.1; EXPRESSED IN PLACENTA, SIGNAL = 4.1; EXPRESSED IN BONE MARROW, SIGNAL = 1.4; EXPRESSED IN ADULT LIVER, SIGNAL = 1.5; NT HIT: gi11321629, EVALUE 2.00e-97; EST_HUMAN HIT: BG749358.1, EVALUE 2.00e-97; SWISSPROT HIT: Q62755, EVALUE 2.00e-29
attacctcgatagtggatgccttcaggagggcgatctggtcctcccggcccagctgcaggaaaccaggcacttgcttagcgaagtccacgatctcctggactgagatgatggccagctccgtgaagtgggcaaagcgttgctggcgggcatctcgggactgggggtctgcgcccaggggccagggctgggacacaggagaccagggtcac

SEQ ID NO: 23103 - DNA, 129 bp, Homo sapiens
  MAP TO CHR3.3; EXPRESSED IN BONE MARROW, SIGNAL = 1.1; EXPRESSED IN LUNG, SIGNAL = 0.89; EXPRESSED IN HEART, SIGNAL = 1.4; EXPRESSED IN FETAL LIVER, SIGNAL =   1; EXPRESSED IN ADULT LIVER, SIGNAL = 1.2; NT HIT: gi16159167, EVALUE 1.00e-66; EST_HUMAN HIT: BG621468.1, EVALUE 1.00e-66; SWISSPROT HIT: Q61751, EVALUE 2.00e-16
agtgaaggctttaccacattcagtgcatgtgtagggcttctctcctgaatgaattctctgatgctgcatgagacatgcactctgattaaaggctttcccacattcattacacttaaaaggtttatctcc

SEQ ID NO: 23104 - DNA, 206 bp, Homo sapiens
  MAP TO CHR2.3; EXPRESSED IN ADULT LIVER, SIGNAL = 0.83; EXPRESSED IN BRAIN, SIGNAL =   1; EXPRESSED IN BONE MARROW, SIGNAL = 0.77; EXPRESSED IN HEART, SIGNAL = 1.1; EXPRESSED IN PLACENTA, SIGNAL = 0.68; SWISSPROT HIT: Q99726, EVALUE 3.00e-25; EST_HUMAN HIT: AL046404.1, EVALUE 1.00e-107; NT HIT: gi14729317, EVALUE 1.00e-100
ccaacttaccgaccacctccccagccatgaagacaaagcaaacggcacaggcagcatatagctgcctccgtgcatgcagcctctcaggggtaaggcccggcggcggaagggggtccctgtggcagtggtggaagggcatctccacaggtttggactcctcagggaggggctctgagggctctgtgaagagactgaggcaagcaaca

SEQ ID NO: 23105 - DNA, 188 bp, Homo sapiens
  MAP TO CHR2.3; EXPRESSED IN LUNG, SIGNAL = 1.1; EXPRESSED IN BONE MARROW, SIGNAL = 0.89; EXPRESSED IN FETAL LIVER, SIGNAL = 0.98; EXPRESSED IN BRAIN, SIGNAL = 1.2; NT HIT: gi4503164, EVALUE 1.00e-79; SWISSPROT HIT: Q9JLV5, EVALUE 3.00e-26; EST_HUMAN HIT: BF038331.1, EVALUE 2.00e-79
cttacctttaacttagatatcatgtttttttcagagtcatcagaaacacttttatttgtgagaagtctccttgccaagtgttgtttataataacgttcaaatacatctttttcttgcataaacctaaaaaggaccattgctttatccaatattgtttctacttcttgttctgttagctgcaaaattaa

SEQ ID NO: 23106 - DNA, 123 bp, Homo sapiens
  MAP TO CHR20.3; EXPRESSED IN HEART, SIGNAL = 0.88; EXPRESSED IN BONE MARROW, SIGNAL = 0.87; EXPRESSED IN FETAL LIVER, SIGNAL = 0.77; EXPRESSED IN LUNG, SIGNAL = 0.84; EXPRESSED IN PLACENTA, SIGNAL = 1.1; SWISSPROT HIT: Q9UK85, EVALUE 7.00e-14; EST_HUMAN HIT: BI826744.1, EVALUE 3.00e-43; NT HIT: AB047817.1, EVALUE 4.00e-44
gacagcttcttctctgcccccatggacttccggggcctccctaggaactaccaacaagaggagaacgaggagcaccagctgaggaacaacaccctctccagccacctccatattgacaaggtg

SEQ ID NO: 23107 - DNA, 187 bp, Homo sapiens
  MAP TO CHR1.3; EXPRESSED IN BONE MARROW, SIGNAL = 0.94; EXPRESSED IN FETAL LIVER, SIGNAL = 0.64; EXPRESSED IN BRAIN, SIGNAL = 0.67; EXPRESSED IN ADULT LIVER, SIGNAL = 0.67; EXPRESSED IN LUNG, SIGNAL = 0.76; EXPRESSED IN HEART, SIGNAL = 0.85; EXPRESSED IN PLACENTA, SIGNAL = 0.7; SWISSPROT HIT: P23109, EVALUE 4.00e-26; EST_HUMAN HIT: BF575179.1, EVALUE 4.00e-86; NT HIT: M37922.1, EVALUE 1.00e-101
actaatatgtgaaaacctcttttagaaattgatgatgcaatgcgcaactttgctgaaaaagtgtttgcctctgaagtcaaagatgaaggaggtcgtcaggagatttccccctttgatgtggatgagatctgtccgatttctcatcatgagatgcaagcacacatattccatctggagactctgtcca

SEQ ID NO: 23108 - DNA, 117 bp, Homo sapiens
  MAP TO CHR21.3; EXPRESSED IN BONE MARROW, SIGNAL = 0.87; EXPRESSED IN ADULT LIVER, SIGNAL = 0.9; EXPRESSED IN BRAIN, SIGNAL = 1.1; NT HIT: U79775.1, EVALUE 1.00e-50; SWISSPROT HIT: P56182, EVALUE 4.00e-13; EST_HUMAN HIT: BG910673.1, EVALUE 2.00e-50
tcttttgaaacagtttgactacgaggcagttgctaacagactgtttgaaatggccagccgccagagcaccccttctcagaacagaaagcgtctctacaaagtgatccggaagtgagt

SEQ ID NO: 23109 - DNA, 367 bp, Homo sapiens
  MAP TO CHR9.3; EXPRESSED IN BONE MARROW, SIGNAL = 0.68; EXPRESSED IN LUNG, SIGNAL = 0.56; EXPRESSED IN BRAIN, SIGNAL = 0.74; EXPRESSED IN ADULT LIVER, SIGNAL = 1.1; NT HIT: gi13640581, EVALUE 0.00e+00; SWISSPROT HIT: P01562, EVALUE 1.00e-53; EST_HUMAN HIT: AA843982.1, EVALUE 5.10e-01
gccctttgctttactgatggtcctggtggtgctcagctgcaagtcaagctgctctctgggctgtgatctccctgagacccacagcctggataacaggaggaccttgatgctcctggcacaaatgagcagaatctctccttcctcctgtctgatggacagacatgactttggatttccccaggaggagtttgatggcaaccagttccagaaggctccagccatctctgtcctccatgagctgatccagcagatcttcaacctctttaccacaaaagattcatctgctgcttgggatgaggacctcctagacaaattctgcaccgaactctaccagcagctgaatgacttggaagcctgtgtgatgcag

SEQ ID NO: 23110 - DNA, 150 bp, Homo sapiens
  MAP TO CHR12.3; EXPRESSED IN BONE MARROW, SIGNAL =   1; EXPRESSED IN PLACENTA, SIGNAL = 0.81; NT HIT: gi6754411, EVALUE 6.00e-53; SWISSPROT HIT: P40377, EVALUE 7.70e+00; EST_HUMAN HIT: BI042645.1, EVALUE 7.00e-66
aagctagaggtctgtgttcttcggtgtctgtaggtccgtcccatctgaatgcttctgattttctacccccgtatcactttctatttctctgcagcgtgcatcgatcgccctggtgggagcttagaaggcggcaggcgaagaggggtagga

SEQ ID NO: 23111 - DNA, 185 bp, Homo sapiens
  MAP TO CHR22.3; EXPRESSED IN BONE MARROW, SIGNAL = 0.94; EXPRESSED IN HEART, SIGNAL = 0.94; EXPRESSED IN HELA, SIGNAL =   5; EXPRESSED IN ADULT LIVER, SIGNAL = 0.69; EXPRESSED IN BRAIN, SIGNAL = 0.63; NT HIT: gi6981191, EVALUE 5.00e-94; SWISSPROT HIT: P33992, EVALUE 2.00e-28; EST_HUMAN HIT: BE390184.1, EVALUE 8.00e-94
ttacagtcggacatgatgtcacacctggtgaagatccctggcatcatcatcgcggcctctgcggtccgtgccaaggccacccgcatctctatccagtgccgcagctgccgcaacaccctcaccaacattgccatgcgccctggcctcgagggctatgccctgcccaggaagtgcaacacgtgagt

SEQ ID NO: 23112 - DNA, 213 bp, Homo sapiens
  MAP TO CHR18.3; EXPRESSED IN LUNG, SIGNAL = 0.94; EXPRESSED IN ADULT LIVER, SIGNAL = 0.94; EXPRESSED IN BONE MARROW, SIGNAL = 0.98; EXPRESSED IN HEART, SIGNAL = 0.99; EXPRESSED IN PLACENTA, SIGNAL = 1.1; NT HIT: gi16178137, EVALUE 1.00e-116; SWISSPROT HIT: P16241, EVALUE 5.60e-01; EST_HUMAN HIT: AI968903.1, EVALUE 1.00e-116
tttcttaaagattatttccataagaaaccatatcctagtaaaaaggaaatagaactgttgtcctcactcttttgggtgtggaaaattgatgtggcttcattttttggaaaaagaaggtatatttgcatgaaagcaataaaaaatcacaagccttctgtacttttaggctttgatatgtctgaacttaaaaatgtgaaacatagattgaacttt

SEQ ID NO: 23113 - DNA, 103 bp, Homo sapiens
  MAP TO CHR19.3; EXPRESSED IN LUNG, SIGNAL = 1.1; EXPRESSED IN ADULT LIVER, SIGNAL = 3.8; EXPRESSED IN BRAIN, SIGNAL = 3.2; EXPRESSED IN FETAL LIVER, SIGNAL = 2.3; EXPRESSED IN BONE MARROW, SIGNAL = 3.6; EXPRESSED IN HEART, SIGNAL =   4; EXPRESSED IN PLACENTA, SIGNAL = 2.5; NT HIT: gi13649931, EVALUE 2.00e-51; SWISSPROT HIT: Q58277, EVALUE 2.10e+00; EST_HUMAN HIT: W22972.1, EVALUE 3.00e-39
cctctggcagcctgtatgtgcgaacgacccaccgcctcctcttccgctgtccacgcctcctcaaccttggccttcaatgtctgtcctgcggctgcctcccaac

SEQ ID NO: 23114 - DNA, 192 bp, Homo sapiens
  MAP TO CHR6.3; EXPRESSED IN LUNG, SIGNAL = 0.88; EXPRESSED IN HEART, SIGNAL = 1.8; EXPRESSED IN ADULT LIVER, SIGNAL = 1.4; EXPRESSED IN BONE MARROW, SIGNAL = 1.5; EST_HUMAN HIT: AI879439.1, EVALUE 2.00e-94; NT HIT: gi14766908, EVALUE 1.00e-94; SWISSPROT HIT: O15540, EVALUE 3.00e-28
accttacagtttctatcatctgcagtggtttcatcaaactcttctcccagctggaaactaatctccgtgttcttgaatgtgctgagagtcctgatgaccactttgtctccttcttgactgataattaccgttggtttggtcacatttcccacctgcctagtggcaaagcccacgcctaaaatagcaaaggga

SEQ ID NO: 23115 - DNA, 141 bp, Homo sapiens
  MAP TO CHR22.3; EXPRESSED IN LUNG, SIGNAL = 3.8; EXPRESSED IN HEART, SIGNAL = 6.8; EXPRESSED IN PLACENTA, SIGNAL = 4.8; EXPRESSED IN BONE MARROW, SIGNAL = 6.1; EXPRESSED IN BRAIN, SIGNAL = 6.6; SWISSPROT HIT: P10635, EVALUE 9.00e-22; EST_HUMAN HIT: AW297258.1, EVALUE 4.00e-70; NT HIT: X58467.1, EVALUE 7.00e-74
cacctgctgagaaaggcaggaaggcctccggcttcacaaagtggccctgggcatccaggaagtgttcggggtggaagcggaagggcttcttccagacggcctcatccttcagcaccgatgacaggttggtgatgagtgtcg

SEQ ID NO: 23116 - DNA, 110 bp, Homo sapiens
  MAP TO CHR2.3; EXPRESSED IN LUNG, SIGNAL = 3.5; EXPRESSED IN HELA, SIGNAL = 4.2; EXPRESSED IN BONE MARROW, SIGNAL = 3.4; EXPRESSED IN HEART, SIGNAL = 2.5; EXPRESSED IN PLACENTA, SIGNAL = 3.3; EXPRESSED IN ADULT LIVER, SIGNAL = 2.4; EXPRESSED IN BRAIN, SIGNAL = 3.2; SWISSPROT HIT: P29558, EVALUE 2.00e-17; EST_HUMAN HIT: AW809936.1, EVALUE 3.00e-55; NT HIT: gi14725152, EVALUE 2.00e-55
agtctcacctctccttctctatgccatggtcttccattagggatgtatttgtttgggttctgtctctttttctgtcctccatcagcaaacttacacaataaaggttctgt

SEQ ID NO: 23117 - DNA, 472 bp, Homo sapiens
  MAP TO CHR16.3; EXPRESSED IN BONE MARROW, SIGNAL = 1.8; EXPRESSED IN FETAL LIVER, SIGNAL = 2.7; EXPRESSED IN BRAIN, SIGNAL = 2.3; EXPRESSED IN ADULT LIVER, SIGNAL = 2.5; EXPRESSED IN PLACENTA, SIGNAL = 2.2; SWISSPROT HIT: O60437, EVALUE 2.00e-76; EST_HUMAN HIT: BG260999.1, EVALUE 0.00e+00; NT HIT: gi14779880, EVALUE 0.00e+00
gactctgggaccaaccatgactccagactgtggtccctggagagggaactggatgacctcaagaggctctccaaggacaaagacctcgagatcgacgagctgcagaagcgcctgggctccgtggccgtcaagcgggagcagcgggagaaccacctgcggcgctccatcgtagtcatccaccctgacacaggccgcgagctgtccccggaggaagcccaccgtgccgggctcattgactggaacatgttcgtgaaactcagaagccaggagtgcgactgggaggagatctcagtgaagggtcccaatggggagtcctcagtgatacacgacaggaagtctggcaagaagttctccatcgaagaggccctgcagagtggcaggctgacccctgctcagtatgaccgctatgtcaacaaggatatgtccatccaggagctggcggtcttggtatctgggcagaagtaggcacagc

SEQ ID NO: 23118 - DNA, 141 bp, Homo sapiens
  MAP TO CHR19.3; EXPRESSED IN BRAIN, SIGNAL = 4.5; EXPRESSED IN PLACENTA, SIGNAL = 3.7; EXPRESSED IN HEART, SIGNAL = 4.4; EXPRESSED IN BONE MARROW, SIGNAL = 4.1; SWISSPROT HIT: Q07886, EVALUE 8.00e-06; EST_HUMAN HIT: BG740029.1, EVALUE 3.00e-71; NT HIT: gi14766934, EVALUE 2.00e-71
gcaccgtggagcagctggaccagcgctacctgctggtgcctgagaaggtcaaggacgcctacctggtccacctgatccagcgcttccaggatgagcacgaggactggtccattatcatcttcaccaacacgtgcaagtgag

SEQ ID NO: 23119 - DNA, 154 bp, Homo sapiens
  MAP TO CHR14.3; EXPRESSED IN BONE MARROW, SIGNAL = 1.4; EXPRESSED IN HEART, SIGNAL = 1.5; EXPRESSED IN PLACENTA, SIGNAL = 1.4; EXPRESSED IN BRAIN, SIGNAL = 1.1; EXPRESSED IN ADULT LIVER, SIGNAL = 1.8; NT HIT: M38193.1, EVALUE 1.00e-81; SWISSPROT HIT: P10144, EVALUE 1.00e-23; EST_HUMAN HIT: BF221604.1, EVALUE 3.00e-80
ctgtagttagtagcgtttcatggttttctttatccagtgtacaaagcttgagactttggtgcaggctcgtggaggcatgccattgtttcgtccataggagacaatgccctgggccaccttgttacacacaagagggcctccagagtccccctgt

SEQ ID NO: 23120 - DNA, 179 bp, Homo sapiens
  MAP TO CHR19.3; EXPRESSED IN BONE MARROW, SIGNAL = 2.6; EXPRESSED IN HEART, SIGNAL = 1.7; EXPRESSED IN PLACENTA, SIGNAL = 1.9; EXPRESSED IN ADULT LIVER, SIGNAL = 1.8; EXPRESSED IN BRAIN, SIGNAL = 4.6; NT HIT: gi15307445, EVALUE 2.00e-96; SWISSPROT HIT: Q08493, EVALUE 1.00e-30; EST_HUMAN HIT: AW878487.1, EVALUE 2.00e-91
acctgggacttctccactgaggccgtatgcttgtcacacatgggactgatgtccaggcccgactcacgctcgcggtctccctgctggaagaactcggccatgatgcggtccgtccactggcggtacaggggcagcggcttggtggggttgctcagatcagcacagtgcaccaggttctg

SEQ ID NO: 23121 - DNA, 153 bp, Homo sapiens
  MAP TO CHR21.3; EXPRESSED IN ADULT LIVER, SIGNAL = 2.1; EXPRESSED IN FETAL LIVER, SIGNAL = 2.6; EXPRESSED IN BONE MARROW, SIGNAL =   2; EXPRESSED IN LUNG, SIGNAL = 4.7; EST_HUMAN HIT: AI923670.1, EVALUE 8.00e-81; NT HIT: gi14780510, EVALUE 6.00e-81; SWISSPROT HIT: P20591, EVALUE 6.00e-14
cagaaggccatgctgcagctcctgcaggacaaggacacctacagctggctcctgaaggagcggagcgacaccagcgacaagcggaagttcctgaaggagcggcttgcacggctgacgcaggctcggcgccggcttgcccagttccccggttaa

SEQ ID NO: 23122 - DNA, 161 bp, Homo sapiens
  MAP TO CHR9.3; EXPRESSED IN ADULT LIVER, SIGNAL =   2; EXPRESSED IN PLACENTA, SIGNAL = 1.9; EXPRESSED IN LUNG, SIGNAL = 1.9; EXPRESSED IN HEART, SIGNAL = 2.6; EXPRESSED IN BONE MARROW, SIGNAL = 2.1; EXPRESSED IN BRAIN, SIGNAL = 1.6; SWISSPROT HIT: O15287, EVALUE 8.00e-08; EST_HUMAN HIT: BG290409.1, EVALUE 4.00e-58; NT HIT: gi13640920, EVALUE 3.00e-58
gcatcagaagtgggaagagaagctcaggtgagcaaggggaacctcacctccccgtctgtaggcacctgcttgctagtatgtgcttggtctggctctgagtgccacaatgaaggggtgaggctaggtcaggtggtggcagtagtaattctacctcaatgaga

SEQ ID NO: 23123 - DNA, 156 bp, Homo sapiens
  MAP TO CHR6.3; EXPRESSED IN BONE MARROW, SIGNAL = 1.9; EXPRESSED IN HELA, SIGNAL = 2.9; EXPRESSED IN FETAL LIVER, SIGNAL =  17; SWISSPROT HIT: P04179, EVALUE 2.00e-25; EST_HUMAN HIT: BG534853.1, EVALUE 1.00e-82; NT HIT: S77127.1, EVALUE 9.00e-83
actttttgcaagccatgtatctttcagttacattctcccagttgattacattccaaatagcttttagataatcaggcctgacatttttatactgaaggtagtaagcgtgctcccacacatcaatccccagcagtggaataaggcctgttagaaaga

SEQ ID NO: 23124 - DNA, 223 bp, Homo sapiens
  MAP TO CHR17.3; EXPRESSED IN BONE MARROW, SIGNAL = 1.8; EXPRESSED IN HEART, SIGNAL =   2; EXPRESSED IN ADULT LIVER, SIGNAL = 4.5; NT HIT: J00124.1, EVALUE 1.00e-122; SWISSPROT HIT: P02533, EVALUE 8.00e-35; EST_HUMAN HIT: BG742966.1, EVALUE 1.00e-117
ctcgccctccagcaggcggcggtaggtggcgatctcctgctccagccgcgtcttcacgtccagcaggatcttgtactcctggttctgctgctccatctcgcagcggagctgggccagctgctcctccacgctgccaatcatctcctggatctgggccagctgcatgcagtagcgacctttggtctcctccaggctgttctccagggatgctttctgtgaggga

SEQ ID NO: 23125 - DNA, 244 bp, Homo sapiens
  MAP TO CHR1.3; EXPRESSED IN LUNG, SIGNAL = 2.3; EXPRESSED IN HEART, SIGNAL = 3.7; EXPRESSED IN BONE MARROW, SIGNAL = 2.3; EXPRESSED IN ADULT LIVER, SIGNAL = 2.8; SWISSPROT HIT: Q9WTL2, EVALUE 3.00e-31; EST_HUMAN HIT: BG292330.1, EVALUE 1.00e-108; NT HIT: gi11427606, EVALUE 1.00e-108
gctcagcccttatctctccactccttcagtggtgctgatcggcgaatcaggtgtggggaagaccaatctactctcccgattcacgcgcaatgagttcagccacgacagccgcaccaccatcggggttgagttctccacccgcactgtgatgttgggcaccgctgctgtcaaggctcagatctgggacacagctggcctggagcggtaccgagccatcacctcggcgtgagcccgggcctggggg

SEQ ID NO: 23126 - DNA, 107 bp, Homo sapiens
  MAP TO CHR20.3; EXPRESSED IN LUNG, SIGNAL = 3.3; EXPRESSED IN PLACENTA, SIGNAL = 3.7; EXPRESSED IN HEART, SIGNAL = 4.3; EXPRESSED IN BONE MARROW, SIGNAL = 4.4; EXPRESSED IN FETAL LIVER, SIGNAL = 3.4; EXPRESSED IN BRAIN, SIGNAL =   5; EXPRESSED IN ADULT LIVER, SIGNAL = 3.9; SWISSPROT HIT: O88943, EVALUE 2.00e-12; EST_HUMAN HIT: BE703020.1, EVALUE 6.00e-50; NT HIT: gi14769905, EVALUE 4.00e-47
ctcacctggatcaggcctgctgccgggttccgcctcttctcaaagtgcttctgcctgtgctgctcctgaaccttcagggcaaacccagaccccaagatgccctgcaa

SEQ ID NO: 23127 - DNA, 190 bp, Homo sapiens
  MAP TO CHR17.3; EXPRESSED IN FETAL LIVER, SIGNAL = 2.4; EXPRESSED IN HEART, SIGNAL = 3.7; EXPRESSED IN PLACENTA, SIGNAL = 1.9; EXPRESSED IN LUNG, SIGNAL = 1.9; EXPRESSED IN BONE MARROW, SIGNAL = 1.5; NT HIT: gi14773211, EVALUE 1.00e-100; SWISSPROT HIT: Q9JK42, EVALUE 8.00e-31; EST_HUMAN HIT: BE675684.1, EVALUE 1.00e-101
aggttcactgacgccctggtcaccatccggaaccggcacaacgacgtggtgcccaccatggcacaaggcgtgcttgagtacaaggacacctacggcgatgaccccgtctccaaccagaacatccagtacttcctggaccgcttctacctcagccgcatctccatccgcatgctcatcaaccagcacagtg

SEQ ID NO: 23128 - DNA, 170 bp, Homo sapiens
  MAP TO CHR12.3; EXPRESSED IN FETAL LIVER, SIGNAL = 0.92; EXPRESSED IN BRAIN, SIGNAL = 1.4; EXPRESSED IN ADULT LIVER, SIGNAL = 1.2; EXPRESSED IN BONE MARROW, SIGNAL = 1.2; EXPRESSED IN HEART, SIGNAL = 1.3; EXPRESSED IN PLACENTA, SIGNAL = 2.1; NT HIT: gi4759277, EVALUE 7.00e-87; SWISSPROT HIT: P46942, EVALUE 4.00e-11; EST_HUMAN HIT: AA453316.1, EVALUE 1.00e-86
acactgcacggtggaaaaggccaggagcagcgagagtttgcgttgtccaacctcaaggctggggccaaggatattttggtggctacagatgtggctggtcgtggtattgacatccaagatgtgtctatggttgtcaactatgatatggccaaaaatattgaaggtaagtt

SEQ ID NO: 23129 - DNA, 223 bp, Homo sapiens
  MAP TO CHR1.3; EXPRESSED IN FETAL LIVER, SIGNAL = 3.7; EXPRESSED IN ADULT LIVER, SIGNAL =   3; EXPRESSED IN BRAIN, SIGNAL = 3.4; EXPRESSED IN LUNG, SIGNAL = 3.6; EXPRESSED IN HEART, SIGNAL = 3.2; EXPRESSED IN HELA, SIGNAL = 8.2; EXPRESSED IN BONE MARROW, SIGNAL =   3; SWISSPROT HIT: Q15357, EVALUE 3.00e-35; EST_HUMAN HIT: BE898467.1, EVALUE 1.00e-113; NT HIT: gi14724833, EVALUE 1.00e-122
caaagctcaccctcccgagctgaaaaaatttatggacaagaagttatcattgaaattaaatggtggcagacatgtccaaggaatattgcggggatttgatccctttatgaaccttgtgatagatgaatgtgtggaaatggcgactagtggacaacagaacaatattggaatggtggtaatatgaggaaatagtatcatcatgttagaagccttggaatgagta

SEQ ID NO: 23130 - DNA, 239 bp, Homo sapiens
  MAP TO CHR16.3; EXPRESSED IN HEART, SIGNAL = 2.5; EXPRESSED IN FETAL LIVER, SIGNAL = 3.8; EXPRESSED IN BRAIN, SIGNAL =   2; EXPRESSED IN BONE MARROW, SIGNAL = 2.7; EXPRESSED IN LUNG, SIGNAL = 1.2; EXPRESSED IN PLACENTA, SIGNAL = 2.1; SWISSPROT HIT: P35858, EVALUE 1.00e-36; EST_HUMAN HIT: AW152410.1, EVALUE 6.00e-89; NT HIT: gi14774719, EVALUE 0.00e+00
ctggggcggctgcgctacctcagcctcaggaacaactcactgcggaccttcacgccgcagcccccgggcctggagcgcctgtggctggagggtaacccctgggactgtggctgccctctcaaggcgctgcgggacttcgccctgcagaaccccagtgctgtgccccgcttcgtccaggccatctgtgagggggacgattgccagccgcccgcgtacacctacaacaacatcacctgtgc

SEQ ID NO: 23131 - DNA, 153 bp, Homo sapiens
  MAP TO CHR6.3; EXPRESSED IN LUNG, SIGNAL = 2.8; EXPRESSED IN HELA, SIGNAL = 2.7; EXPRESSED IN PLACENTA, SIGNAL = 2.4; EXPRESSED IN HEART, SIGNAL = 3.6; EXPRESSED IN BONE MARROW, SIGNAL = 2.5; EXPRESSED IN BRAIN, SIGNAL = 2.2; SWISSPROT HIT: P28062, EVALUE 8.00e-23; EST_HUMAN HIT: BI918327.1, EVALUE 8.00e-81; NT HIT: X66401.1, EVALUE 6.00e-81
acctgcattccccggggtaaagcgagctctggagatcgcatagagaaactgtagtgtcctgggtccgagcgacgcccgcttcccgcaaccgggagagccgattccggccgctgccctcggggggctccgcatacatctagtagcgccatgacc

SEQ ID NO: 23132 - DNA, 250 bp, Homo sapiens
  MAP TO CHR9.3; EXPRESSED IN BRAIN, SIGNAL = 0.56; EXPRESSED IN LUNG, SIGNAL = 1.4; EXPRESSED IN BONE MARROW, SIGNAL =   1; SWISSPROT HIT: P35408, EVALUE 3.00e-23; EST_HUMAN HIT: BI600443.1, EVALUE 0.00e+00; NT HIT: X97876.1, EVALUE 1.00e-129
tcatggcacagacgatgctgaggccggactgactgaagaagaacaggctgaagatgctgtactcacacagcagctggcccccaggttacccgcccttcatgtacatggcgatggtcacctggctcaccagcaaagtgaacaacaggtcggtggcagccagccgcataactgtatagaaggtggtctccttctgctccttgcgcgacttgcacagcaccacgatggccaccaggttgcccaccaccccgaa

SEQ ID NO: 23133 - DNA, 265 bp, Homo sapiens
  MAP TO CHR22.3; EXPRESSED IN HEART, SIGNAL =   1; EXPRESSED IN BONE MARROW, SIGNAL = 0.95; EXPRESSED IN ADULT LIVER, SIGNAL = 0.63; NT HIT: gi7662217, EVALUE 0.00e+00; SWISSPROT HIT: Q64516, EVALUE 2.10e+00; EST_HUMAN HIT: BG258786.1, EVALUE 0.00e+00
tcacaagtctcatagctgaaatgattgcacttgacctccagccatattcttttgtagacaacgttggctttaacaggctgcttgaatacttgaaacctcagtactccctccccgccccttcctacttctccaggacagctatcccaggtatgtatgataatgtgaagcagataattatgtcccaccttaaggaagctgagagtggtgtgatccacttcacgtctggaatatggatgagtaaccagacccgtgagtacctgaccct

SEQ ID NO: 23134 - DNA, 250 bp, Homo sapiens
  MAP TO CHR12.3; EXPRESSED IN BONE MARROW, SIGNAL = 1.2; EXPRESSED IN LUNG, SIGNAL = 4.7; EXPRESSED IN HEART, SIGNAL = 0.71; EXPRESSED IN ADULT LIVER, SIGNAL = 0.79; SWISSPROT HIT: Q9ULV4, EVALUE 3.00e-43; EST_HUMAN HIT: BG743743.1, EVALUE 0.00e+00; NT HIT: gi15305419, EVALUE 0.00e+00
accacactggccgtgtctgtggttttcttggggatgctgatcaggtcgcacttcttgtttgcagtgggcttgctatccagaatgttcttcttgaccaccttgagatccctgtttttgcctggaatgtacccgtgcttcaaggagatgaggattgggtctgcattcttgccttcgaaccactcttctgcctccagcgcggcctctggccccgctgtgtcaggatacaggtcatcttggaaaaggtcagact

SEQ ID NO: 23135 - DNA, 114 bp, Homo sapiens
  MAP TO CHR3.3; EXPRESSED IN PLACENTA, SIGNAL = 0.52; EXPRESSED IN LUNG, SIGNAL = 0.68; EXPRESSED IN BONE MARROW, SIGNAL = 0.79; EST_HUMAN HIT: BE163727.1, EVALUE 1.00e-08; NT HIT: gi8922516, EVALUE 1.00e-56
ggagcctgctgcagggggtacaaggctgtccagctgttggcgatgtcctgtattaatcaaccattcataaaacttgttctctaccagtacctggaactgcttcctttgatccct

SEQ ID NO: 23136 - DNA, 136 bp, Homo sapiens
  MAP TO CHR17.3; EXPRESSED IN BRAIN, SIGNAL = 0.92; EXPRESSED IN BONE MARROW, SIGNAL = 0.86; EXPRESSED IN PLACENTA, SIGNAL = 6.4e+02; EST_HUMAN HIT: AV752999.1, EVALUE 1.00e-70; NT HIT: J03071.1, EVALUE 7.00e-71; SWISSPROT HIT: P33093, EVALUE 3.00e-20
cttacaaactcctggtaggtgtcaaaggccagctggtgcagacgatgggcgcggagcatagcgttgtcaaaaagcctggataagggaatggttgggaaggcactgccctcttgaagccagggcaggcagagcaggc

SEQ ID NO: 23137 - DNA, 254 bp, Homo sapiens
  MAP TO CHR17.3; EXPRESSED IN HEART, SIGNAL = 1.3; EXPRESSED IN BRAIN, SIGNAL = 2.2; EXPRESSED IN ADULT LIVER, SIGNAL = 1.4; EXPRESSED IN BONE MARROW, SIGNAL = 1.5; SWISSPROT HIT: Q13164, EVALUE 2.00e-19; EST_HUMAN HIT: BF525755.1, EVALUE 0.00e+00; NT HIT: gi15315704, EVALUE 0.00e+00
gcagatggccccagcgcacccctggaggctcctgagcctcggaagccggtgacagcccaggagcgccagcgggagcgggaggagaagcggcggaggcggcaagaacgagccaaggagcgggagaaacggcggcaggagcgggagcgaaaggaacggggggctggggcctctgggggcccctccactgaccccttggctggactagtgctcagtgacaatgacagaagcctgttggaacgctggactcgaatggc

SEQ ID NO: 23138 - DNA, 239 bp, Homo sapiens
  MAP TO CHR5.3; EXPRESSED IN FETAL LIVER, SIGNAL = 0.82; EXPRESSED IN ADULT LIVER, SIGNAL = 1.4; EXPRESSED IN BRAIN, SIGNAL = 1.8; EXPRESSED IN HELA, SIGNAL = 2.8; EXPRESSED IN LUNG, SIGNAL = 2.2; EXPRESSED IN BONE MARROW, SIGNAL = 1.5; EXPRESSED IN HEART, SIGNAL = 1.4; EXPRESSED IN PLACENTA, SIGNAL = 1.4; NT HIT: U81504.1, EVALUE 1.00e-113; SWISSPROT HIT: P34303, EVALUE 2.30e+00; EST_HUMAN HIT: BG108112.1, EVALUE 1.00e-114
tttacctattggattaaaaacatgcattttcatgcctataggaagttttttttcccctatgtggatattttctatctttcgatcagtagtgttattcagtgttatttgtatagagaccatcttatcaccaaaaatgcaaggctgtcttggaaagaaataatgggcagctagtccttttccactcattcgatgaagcagcacgtgagttttcgttggtacaaatgcaggagtactgacct

SEQ ID NO: 23139 - DNA, 140 bp, Homo sapiens
  MAP TO CHR1.3; EXPRESSED IN FETAL LIVER, SIGNAL = 1.4; EXPRESSED IN ADULT LIVER, SIGNAL = 1.8; EXPRESSED IN BRAIN, SIGNAL = 1.8; EXPRESSED IN LUNG, SIGNAL = 1.3; EXPRESSED IN PLACENTA, SIGNAL = 1.5; EXPRESSED IN BONE MARROW, SIGNAL = 2.2; EXPRESSED IN HEART, SIGNAL = 1.5; NT HIT: L42621.1, EVALUE 1.00e-72; SWISSPROT HIT: Q01965, EVALUE 4.00e-13; EST_HUMAN HIT: BI912014.1, EVALUE 2.00e-65
aagctgttgtgtcccaaggggaatcacacctcaatgtctcatggagaagcagtgaaaatcaccccaacctcacatgcacagccagcaaccctgtcagcaggagttcccaccagtttctttctgagaacatctgttcaggt

SEQ ID NO: 23140 - DNA, 148 bp, Homo sapiens
  MAP TO CHR2.3; EXPRESSED IN LUNG, SIGNAL = 0.95; EXPRESSED IN BONE MARROW, SIGNAL = 0.67; EST_HUMAN HIT: BF871995.1, EVALUE 4.80e-02; NT HIT: gi9506580, EVALUE 5.00e-78; SWISSPROT HIT: P38764, EVALUE 5.90e+00
ttctttctttgatgattggaatgatccctcatttgccaatgaaattattaaagcatgtcatcaattagataatacctgggaagcagatgatgtagatgatgatttgttgtaccaagcatgtgatgatattgaaagactaactcagcaa

SEQ ID NO: 23141 - DNA, 281 bp, Homo sapiens
  MAP TO CHR1.3; EXPRESSED IN HEART, SIGNAL =  10; EXPRESSED IN BONE MARROW, SIGNAL = 7.5; EXPRESSED IN FETAL LIVER, SIGNAL = 7.5; EXPRESSED IN BRAIN, SIGNAL = 7.8; EXPRESSED IN LUNG, SIGNAL =  23; EST_HUMAN HIT: BF740624.1, EVALUE 0.00e+00; SWISSPROT HIT: O00622, EVALUE 3.00e-51; NT HIT: AF307860.1, EVALUE 0.00e+00
tctcttttggtgatctttgcagctcagtcagagggcagaccctgtgaatataactccagaatctaccaaaacggggaaagtttccagcccaactgtaaacatcagtgcacatgtattgatggcgccgtgggctgcattcctctgtgtccccaagaactatctctccccaacttgggctgtcccaaccctcggctggtcaaagttaccgggcagtgctgcgaggagtgggtctgtgacgaggatagtatcaaggaccccatggaggaccaggacggcctcct

SEQ ID NO: 23142 - DNA, 166 bp, Homo sapiens
  MAP TO CHR16.3; EXPRESSED IN ADULT LIVER, SIGNAL = 0.85; EXPRESSED IN BRAIN, SIGNAL =   1; EXPRESSED IN LUNG, SIGNAL = 2.2; EXPRESSED IN PLACENTA, SIGNAL =   1; EXPRESSED IN FETAL LIVER, SIGNAL = 0.62; EXPRESSED IN BONE MARROW, SIGNAL = 0.87; EXPRESSED IN HELA, SIGNAL =  12; EXPRESSED IN HEART, SIGNAL = 1.6; EST_HUMAN HIT: AL601018.1, EVALUE 2.00e-88; SWISSPROT HIT: P15559, EVALUE 9.00e-18; NT HIT: gi14778324, EVALUE 1.00e-88
tacctgtgatgtcctttctggaaatgatgggattgaagttcatggcatagaggtccgactccaccacctcccatcctttcttcttcaaagccgctgcagcagcctccttcatggcatagttgaaggacgtcctctctgagtgagccagtacgatcagtgctcttct

SEQ ID NO: 23143 - DNA, 150 bp, Homo sapiens
  MAP TO CHR11.3; EXPRESSED IN ADULT LIVER, SIGNAL = 3.4; EXPRESSED IN BRAIN, SIGNAL = 7.4; EXPRESSED IN PLACENTA, SIGNAL = 1.7; EXPRESSED IN BONE MARROW, SIGNAL =   2; EXPRESSED IN LUNG, SIGNAL = 1.4; EXPRESSED IN HEART, SIGNAL = 3.7; SWISSPROT HIT: P29798, EVALUE 7.00e-20; NT HIT: AF188177.1, EVALUE 3.00e-76; EST_HUMAN HIT: BG701285.1, EVALUE 1.00e-67
cccttcctggctgtgtcccaggtgtccaaggcagcagcagacctgatgacttactgtgatgcccacgcctgtgaggatcccctcatcacccctgtgcccacttcggagaaccccttccgggagaagaagttcttctgtgctctcctctga

SEQ ID NO: 23144 - DNA, 129 bp, Homo sapiens
  MAP TO CHR14.3; EXPRESSED IN HELA, SIGNAL =  10; EXPRESSED IN PLACENTA, SIGNAL = 7.5; EXPRESSED IN HEART, SIGNAL =  12; EXPRESSED IN BONE MARROW, SIGNAL = 9.8; EXPRESSED IN FETAL LIVER, SIGNAL =  11; EXPRESSED IN BRAIN, SIGNAL =  12; SWISSPROT HIT: Q9Z143, EVALUE 1.20e+00; NT HIT: U43842.1, EVALUE 1.00e-66; EST_HUMAN HIT: BG248254.1, EVALUE 3.00e-52
cccctcaccaggtagccttgctcaccataggtccctgcagtagcgggctcgccagcagcagctcctggggacctctgaacggttgcagtgaacctgggcgagggccggggactgtggcgctgcaggctc

SEQ ID NO: 23145 - DNA, 134 bp, Homo sapiens
  MAP TO CHR2.3; EXPRESSED IN BRAIN, SIGNAL = 5.6; EXPRESSED IN HELA, SIGNAL = 3.9; EXPRESSED IN BONE MARROW, SIGNAL = 3.7; EXPRESSED IN LUNG, SIGNAL = 4.2; EXPRESSED IN PLACENTA, SIGNAL = 3.7; EXPRESSED IN HEART, SIGNAL = 4.8; EXPRESSED IN FETAL LIVER, SIGNAL = 2.4; EXPRESSED IN ADULT LIVER, SIGNAL = 3.9; NT HIT: gi15321354, EVALUE 1.00e-69; SWISSPROT HIT: Q06710, EVALUE 8.00e-21; EST_HUMAN HIT: AU141907.1, EVALUE 2.00e-69
cggatctcccaggcaaacatggtagggttctggcgtttgtagtccccaatcttctccaccaccttgggggtggccaccttgggcttggagccccctatcactccaggccggatgctgccagtctcgtagtacct

SEQ ID NO: 23146 - DNA, 207 bp, Homo sapiens
  MAP TO CHRX.3; EXPRESSED IN PLACENTA, SIGNAL =   1; EXPRESSED IN BRAIN, SIGNAL = 1.4; EXPRESSED IN BONE MARROW, SIGNAL = 1.3; EST_HUMAN HIT: BI258757.1, EVALUE 2.70e-01; NT HIT: AF018962.1, EVALUE 1.00e-113; SWISSPROT HIT: O15537, EVALUE 9.00e-36
acttacccggttgtttccagtctggtccttgtagtaaatccagttcaggcgctcatcggtcctgtactgcacgctgtacttggtcatccactcatcgatgtcacagcgcccctgggtgaggatccctgaaatcactttgatctccttcagatctatctgtaaccactggctactgtcctggaacttggagagccaggcacacctgcc

SEQ ID NO: 23147 - DNA, 188 bp, Homo sapiens
  MAP TO CHR2.3; EXPRESSED IN HEART, SIGNAL = 3.5; EXPRESSED IN PLACENTA, SIGNAL = 2.5; EXPRESSED IN FETAL LIVER, SIGNAL = 2.8; EXPRESSED IN ADULT LIVER, SIGNAL = 3.8; EXPRESSED IN BRAIN, SIGNAL = 4.7; EXPRESSED IN HELA, SIGNAL = 2.3; EXPRESSED IN BONE MARROW, SIGNAL = 4.2; EST_HUMAN HIT: AA229039.1, EVALUE 9.00e-69; NT HIT: X16983.1, EVALUE 6.00e-69; SWISSPROT HIT: P13612, EVALUE 1.00e-21
ttttttcttacaggatttaattgtgatgggggccccaggatcatcttactggactggctctctttttgtctacaatataactacaaataaatacaaggcttttttagacaaacaaaatcaagtaaaatttggaagttatttaggtactataaaaattgacaaacttaaatgatctgtgccttacaaat

SEQ ID NO: 23148 - DNA, 249 bp, Homo sapiens
  MAP TO CHR1.3; EXPRESSED IN FETAL LIVER, SIGNAL = 1.5; EXPRESSED IN BRAIN, SIGNAL = 1.8; EXPRESSED IN ADULT LIVER, SIGNAL = 1.7; EXPRESSED IN HELA, SIGNAL = 5.3; EXPRESSED IN PLACENTA, SIGNAL =   1; EXPRESSED IN BONE MARROW, SIGNAL = 1.2; EST_HUMAN HIT: BG105973.1, EVALUE 0.00e+00; NT HIT: gi15294625, EVALUE 0.00e+00; SWISSPROT HIT: P48382, EVALUE 1.00e-33
ctttccccacttccacctgacttttttcgagggcgcccccgtttccttttggcatcacttgctgtatcctctatatcctgctttgctgctttagctggtggagcctgcccactggcctcactcacaggtacttcagctgtcctcttgacacccttgtcatgtggtccttggtcaccacctatgcctacctctctgttctctgtgccccggggctgagtgagtcccccaggtggagctcgcccaggccca

SEQ ID NO: 23149 - DNA, 179 bp, Homo sapiens
  MAP TO CHR17.3; EXPRESSED IN BONE MARROW, SIGNAL =  18; EXPRESSED IN LUNG, SIGNAL =  17; EXPRESSED IN HEART, SIGNAL =  17; EXPRESSED IN PLACENTA, SIGNAL =  14; EXPRESSED IN ADULT LIVER, SIGNAL =  15; EXPRESSED IN FETAL LIVER, SIGNAL = 9.6; EXPRESSED IN BRAIN, SIGNAL =  20; SWISSPROT HIT: P50221, EVALUE 2.00e-28; NT HIT: gi4758709, EVALUE 8.00e-96; EST_HUMAN HIT: BE740220.1, EVALUE 1.00e-95
cagacaaccaggagaacagagggaagccggagggcagcagcaaagcccgcaaggagaggacggccttcaccaaggagcagctgcgagagctggaggcagagtttgcccatcataactacctgactcggctccgcagatatgagattgcggtaaacctggacctctctgagcgccaggtg

SEQ ID NO: 23150 - DNA, 245 bp, Homo sapiens
  MAP TO CHR1.3; EXPRESSED IN LUNG, SIGNAL = 4.2; EXPRESSED IN PLACENTA, SIGNAL = 1.7; EXPRESSED IN HELA, SIGNAL =   3; EXPRESSED IN BONE MARROW, SIGNAL = 1.1; EXPRESSED IN ADULT LIVER, SIGNAL = 4.9; SWISSPROT HIT: P10442, EVALUE 7.00e+00; NT HIT: gi14728204, EVALUE 0.00e+00; EST_HUMAN HIT: AL528799.1, EVALUE 1.00e-102
tttggtccagaccctcaaatttaagagtagcttgaagttaaggaaaggtcatttttccacagtttcagttctctgaaacacttccatctcccactgaaagtcacagtccaggagtgaagtaatcacatgctagaacatcagggccaattcgcaagttattatgaacgcttgcattggtcaatcttatttatcaccacaagcctgaaaatgcaatgtcctgaaaaaggtgggctctctgtgcacac

SEQ ID NO: 23151 - DNA, 177 bp, Homo sapiens
  MAP TO CHR2.3; EXPRESSED IN HEART, SIGNAL =   4; EXPRESSED IN PLACENTA, SIGNAL = 3.8; EXPRESSED IN BONE MARROW, SIGNAL = 2.5; EXPRESSED IN FETAL LIVER, SIGNAL = 3.2; EXPRESSED IN BRAIN, SIGNAL = 3.9; EXPRESSED IN LUNG, SIGNAL = 3.3; EXPRESSED IN HELA, SIGNAL = 2.8; EST_HUMAN HIT: AA181709.1, EVALUE 5.00e-95; NT HIT: gi8923935, EVALUE 8.00e-93; SWISSPROT HIT: P47343, EVALUE 2.50e+00
ggcatgattcgaatgaagaggatcatgctaatgaagatgaagcagacgataatgagcatggcccagagcagccagttgactgacttctgcgtgtgctgctccagacgctctgactccgtcttcagtttctccaggttctggtccgccattttcagtgagtgtgacagggtctgtggg

SEQ ID NO: 23152 - DNA, 245 bp, Homo sapiens
  MAP TO CHRX.3; EXPRESSED IN BONE MARROW, SIGNAL =   4; EXPRESSED IN PLACENTA, SIGNAL =   3; EXPRESSED IN HEART, SIGNAL = 3.6; SWISSPROT HIT: P51805, EVALUE 2.80e-01; EST_HUMAN HIT: BI053627.1, EVALUE 5.10e+00; NT HIT: U52111.2, EVALUE 0.00e+00
cagtgctccaccgtctgctccgtcaactcgtccagcctcctcctgtgccggagccctgctgtaccagacagagcccacccgcagcgggtcttcttcaccctagacaacgtgcaagtggacttcgccagtgccagtgggggccagggcttcctgtaccagcccaacccccgcctggcacccctcagccgcgaggggcctgcccgcccctaccgcctcaagccaggccatgtcctggatgtggaggt

SEQ ID NO: 23153 - DNA, 168 bp, Homo sapiens
  MAP TO CHR22.3; EXPRESSED IN BRAIN, SIGNAL = 6.4; EXPRESSED IN HELA, SIGNAL = 5.3; EXPRESSED IN PLACENTA, SIGNAL = 5.7; EXPRESSED IN BONE MARROW, SIGNAL = 4.5; EXPRESSED IN HEART, SIGNAL = 4.5; EXPRESSED IN ADULT LIVER, SIGNAL = 4.1; SWISSPROT HIT: P17050, EVALUE 3.00e-26; NT HIT: M59199.1, EVALUE 7.00e-90; EST_HUMAN HIT: BG829868.1, EVALUE 4.00e-83
tggagaagcagccatccagcttgagcatgtctaccttccactcggcgaaggtctgagcatcctggaccaccttgtccagtgtggtgcctgggtaacccatgcaggtgaagttgcccatgtccgcgtagatacccaacttcaggcccagggagtgaacctgtgggggtt

SEQ ID NO: 23154 - DNA, 139 bp, Homo sapiens
  MAP TO CHR14.3; EXPRESSED IN BONE MARROW, SIGNAL = 1.1; EXPRESSED IN LUNG, SIGNAL = 2.2; EXPRESSED IN FETAL LIVER, SIGNAL = 0.73; EXPRESSED IN ADULT LIVER, SIGNAL = 0.78; EXPRESSED IN BRAIN, SIGNAL = 1.1; EST_HUMAN HIT: BF360435.1, EVALUE 6.00e-63; NT HIT: gi14750886, EVALUE 4.00e-60; SWISSPROT HIT: Q00978, EVALUE 2.00e-18
ccttgaccctttctctttcagacttggtcaggtactttcagggcctgggccccccaccgaagttccaggtaacactgaatttctgggaagagagccatggctccagccatactccacagaatcttatcacagtgaaggt

SEQ ID NO: 23155 - DNA, 102 bp, Homo sapiens
  MAP TO CHR15.3; EXPRESSED IN ADULT LIVER, SIGNAL = 1.1; EXPRESSED IN BRAIN, SIGNAL = 1.1; EXPRESSED IN BONE MARROW, SIGNAL = 0.71; EXPRESSED IN LUNG, SIGNAL = 0.65; EXPRESSED IN HEART, SIGNAL = 1.1; EXPRESSED IN PLACENTA, SIGNAL = 0.74; EST_HUMAN HIT: AL556902.1, EVALUE 1.00e-50; NT HIT: gi14749688, EVALUE 1.00e-50; SWISSPROT HIT: P21781, EVALUE 2.00e-12
atcatggaaatcaggacagtggcagttggaattgtggcaatcaaaggggtggaaagtgaattctatcttgcaatgaacaaggaaggaaaactctatgcaaag

SEQ ID NO: 23156 - DNA, 110 bp, Homo sapiens
  MAP TO CHR22.3; EXPRESSED IN FETAL LIVER, SIGNAL = 0.94; EXPRESSED IN BRAIN, SIGNAL = 0.95; EXPRESSED IN BONE MARROW, SIGNAL = 1.8; EXPRESSED IN HEART, SIGNAL = 1.1; EST_HUMAN HIT: BI755764.1, EVALUE 2.00e-50; NT HIT: U50726.1, EVALUE 2.00e-55; SWISSPROT HIT: Q15080, EVALUE 3.00e-13
tctcctcaggctctatttgacttcactggaaacagcaaactggagctgaatttcaaagctggagatgtgatcttcctcctcagtcggatcaacaaagactggctggaggt

SEQ ID NO: 23157 - DNA, 145 bp, Homo sapiens
  MAP TO CHR2.3; EXPRESSED IN BONE MARROW, SIGNAL = 1.9; EXPRESSED IN BRAIN, SIGNAL = 1.2; EXPRESSED IN HEART, SIGNAL = 1.5; EXPRESSED IN PLACENTA, SIGNAL = 1.4; EST_HUMAN HIT: BF095675.1, EVALUE 4.00e-55; NT HIT: AB038983.1, EVALUE 3.00e-76; SWISSPROT HIT: Q14790, EVALUE 8.00e-15
tttctaaagtgtctccatttcccaccacagggtcatgctctatcagatttcagaagaagtgagcagatcagaattgaggtcttttaagtttcttttgcaagaggaaatctccaaatgcaaactggatgatgacatggtaagacct

SEQ ID NO: 23158 - DNA, 143 bp, Homo sapiens
  MAP TO CHR1.3; EXPRESSED IN LUNG, SIGNAL = 0.36; EXPRESSED IN BONE MARROW, SIGNAL = 0.78; EXPRESSED IN HEART, SIGNAL = 0.54; EXPRESSED IN ADULT LIVER, SIGNAL = 2.8; EXPRESSED IN BRAIN, SIGNAL = 0.53; EST_HUMAN HIT: AI927458.1, EVALUE 7.00e-75; NT HIT: gi14720223, EVALUE 5.00e-75
tacttagcgatgtcccccttcttcaggatgacctgtcgctgccagggcgccagcttgctctcatcgtagcccagcgtccgcagcttctctgactgttccttctcccgccgcagctcctcctgcttctgtcgctcctcctcttt

SEQ ID NO: 23159 - DNA, 244 bp, Homo sapiens
  MAP TO CHR2.3; EXPRESSED IN LUNG, SIGNAL = 3.5; EXPRESSED IN BRAIN, SIGNAL = 3.9; EXPRESSED IN BONE MARROW, SIGNAL = 2.2; SWISSPROT HIT: P11680, EVALUE 9.10e-02; NT HIT: gi14721257, EVALUE 1.00e-129; EST_HUMAN HIT: BG469420.1, EVALUE 1.00e-129
tacccggaatatctggcgcaggtactccagggccttctccaggtattcatctgtcttccggacactgtcttgccccatctcgtccaggtcgttggctgtgtaggagccattggtgtccatggagctaaagcccagccatgagaggaaggagtggccagccgggctctccgcacactggtcggagatggacttggctgtgtgtttggcctgtgtgatgagctgagcgaggcgcaggacctgcaag

SEQ ID NO: 23160 - DNA, 342 bp, Homo sapiens
  MAP TO CHR16.3; EXPRESSED IN LUNG, SIGNAL = 2.7; EXPRESSED IN HEART, SIGNAL = 4.5; EXPRESSED IN HELA, SIGNAL = 3.3; EXPRESSED IN FETAL LIVER, SIGNAL = 5.5; EXPRESSED IN ADULT LIVER, SIGNAL = 3.9; EXPRESSED IN BRAIN, SIGNAL = 3.9; EXPRESSED IN BONE MARROW, SIGNAL = 2.8; NT HIT: X98833.1, EVALUE 1.00e-111; EST_HUMAN HIT: BF841523.1, EVALUE 4.70e-01
caaccggggcctccacctccatggactcttccctgtcaagtccgttgtgttctgaaaggtcgctgcagtccacttgatctgttttgttaactgtgtcattcatttgttcatcaggattatcaggaggggggctgggggagaaggtttcgggtggggaggctggattttcatttacgattaaaactaattgatttttagtacagttcttcttgtggagcagaagatctgataattcaaagaactcggcacagcaccggccacagacgtgggcatccttgctcttagtagggcgactcggttgacccttttctgtgtctcctacaaatgtcaaaaaggtgcagg

SEQ ID NO: 23161 - DNA, 186 bp, Homo sapiens
  MAP TO CHR1.3; EXPRESSED IN BRAIN, SIGNAL = 2.6; EXPRESSED IN HELA, SIGNAL = 2.7; EXPRESSED IN BONE MARROW, SIGNAL = 2.7; EXPRESSED IN PLACENTA, SIGNAL = 2.6; EXPRESSED IN LUNG, SIGNAL = 3.6; EXPRESSED IN HEART, SIGNAL = 3.4; EXPRESSED IN ADULT LIVER, SIGNAL = 3.1; SWISSPROT HIT: P16356, EVALUE 1.30e-01; EST_HUMAN HIT: BG984807.1, EVALUE 3.00e-59; NT HIT: gi8923302, EVALUE 2.00e-72
ggcctcgcctcacctgggctccttcacagtcaggtctagactgcggtcctgggaggcttcgtgggggcctggggcgccggtgctctcaccgggttccggcttcacttgggccggggggaacctggctggggtgacctgctgcccgcttcctgcaggggaggggtgggaagatgcgtcagaggggct

SEQ ID NO: 23162 - DNA, 156 bp, Homo sapiens
  MAP TO CHR1.3; EXPRESSED IN BONE MARROW, SIGNAL = 0.93; EXPRESSED IN LUNG, SIGNAL = 0.65; EXPRESSED IN HEART, SIGNAL = 1.1; EXPRESSED IN FETAL LIVER, SIGNAL = 0.5; EXPRESSED IN BRAIN, SIGNAL = 1.2; SWISSPROT HIT: P54000, EVALUE 4.40e+00; EST_HUMAN HIT: BE888021.1, EVALUE 5.00e-82; NT HIT: gi7705619, EVALUE 4.00e-82
caggggtgtggtgcaattatttaatgctgttcagaaacatcaaaagaatgttgatgaaaaggttaaggaagctggaagttctatgagaaagcgtgctaagttgatatcaactgtttccaagaaagatttcatcagtgttttgagagggatggatgg

SEQ ID NO: 23163 - DNA, 161 bp, Homo sapiens
  MAP TO CHR3.3; EXPRESSED IN BONE MARROW, SIGNAL = 0.72; EXPRESSED IN HEART, SIGNAL = 0.53; EXPRESSED IN ADULT LIVER, SIGNAL = 0.61; EXPRESSED IN BRAIN, SIGNAL = 0.66; EST_HUMAN HIT: BE170556.1, EVALUE 2.10e-01; NT HIT: AB026898.1, EVALUE 1.00e-85
gggcagctgattgctttggatctgatctatatttctggtgaaaaaagccagccagaccctggagagctcacagacttaacagcccagcacttcatacgatttgagcctgaaaaccttcggtccacggctaggaagcagctgattattagaaatgctacgtg

SEQ ID NO: 23164 - DNA, 178 bp, Homo sapiens
  MAP TO CHR2.3; EXPRESSED IN PLACENTA, SIGNAL = 0.46; EXPRESSED IN ADULT LIVER, SIGNAL = 0.72; EXPRESSED IN BRAIN, SIGNAL = 0.67; EXPRESSED IN LUNG, SIGNAL =   1; EXPRESSED IN BONE MARROW, SIGNAL =   1; NT HIT: X03991.1, EVALUE 2.00e-93; SWISSPROT HIT: P01275, EVALUE 3.00e-27; EST_HUMAN HIT: BI439007.1, EVALUE 2.00e-88
agactcttacctgttcctcttggtattcatcaaccactgcacaaaatcttgggcacgcctggagtccagatacttgctgtagtcactggtgaatgtgccctgtgaatggcgcttgtcctcgttcatctgatcaggatcactgagtgggtctgcctgggaagctgagaatgatctgtga

SEQ ID NO: 23165 - DNA, 321 bp, Homo sapiens
  MAP TO CHR11.3; EXPRESSED IN BONE MARROW, SIGNAL = 1.4; SWISSPROT HIT: P53619, EVALUE 1.00e-09; EST_HUMAN HIT: AU128180.1, EVALUE 0.00e+00; NT HIT: gi16183725, EVALUE 0.00e+00
aggttaccaaagtgacccaggtagatggaaacagccccgtcaggttttccacagagaccactttcctagtggataagtatgaaattctgtaataccaagaagagggagctgaaaaggaaaattttcagattaataaagaagacgccaatgatggctgaagagtttttcccagatttacaagccactggagaccccttttttctgatacaatgcacgattctctgcgcgcaaggaccctcgactcacccccatgtttcagtgtcacagagacattctttgataaggaaatggcacaaacataaagggaaaggctgctaattt

SEQ ID NO: 23166 - DNA, 166 bp, Homo sapiens
  MAP TO CHR11.3; EXPRESSED IN BONE MARROW, SIGNAL = 8.2; EXPRESSED IN HELA, SIGNAL = 3.8; EXPRESSED IN PLACENTA, SIGNAL = 5.4; EXPRESSED IN HEART, SIGNAL =   7; EXPRESSED IN FETAL LIVER, SIGNAL = 3.2; EXPRESSED IN ADULT LIVER, SIGNAL = 7.2; EXPRESSED IN BRAIN, SIGNAL = 9.1; SWISSPROT HIT: Q92785, EVALUE 1.00e-28; EST_HUMAN HIT: AW247494.1, EVALUE 4.00e-86; NT HIT: U43920.1, EVALUE 1.00e-88
cagccttggggagcagtactacaaagatgccatggagcagtgccacaattacaatgctcgcctctgtgctgagcgcagcgtgcgcctgcctttcttggactcacagaccggagtagcccagagcaattgttacatctggatggaaaagcgacaccggggtccaggt

SEQ ID NO: 23167 - DNA, 224 bp, Homo sapiens
  MAP TO CHR2.3; EXPRESSED IN BONE MARROW, SIGNAL = 1.7; EXPRESSED IN FETAL LIVER, SIGNAL = 1.5; EXPRESSED IN ADULT LIVER, SIGNAL = 1.2; EXPRESSED IN HELA, SIGNAL = 3.1; EXPRESSED IN PLACENTA, SIGNAL = 1.4; EXPRESSED IN HEART, SIGNAL = 1.6; NT HIT: AJ308680.1, EVALUE 1.00e-121; SWISSPROT HIT: P31387, EVALUE 4.00e-40; EST_HUMAN HIT: BI489745.1, EVALUE 7.00e-33
gggagcagaaggagaggcgagcagccatgatggtgggaattctgattggcgtgtttgtgctgtgctggatccccttcttcctgacggaactcatcagcccactctgtgcctgcagcctgccccccatctggaaaagcatatttctgtggcttggctactccaattctttcttcaaccccctgatttacacagcttttaacaagaactacaacaatgccttcaag

SEQ ID NO: 23168 - DNA, 259 bp, Homo sapiens
  MAP TO CHR2.3; EXPRESSED IN PLACENTA, SIGNAL = 0.82; EXPRESSED IN BONE MARROW, SIGNAL = 1.3; EXPRESSED IN BRAIN, SIGNAL = 0.86; NT HIT: gi4502456, EVALUE 0.00e+00; SWISSPROT HIT: O95342, EVALUE 2.00e-42; EST_HUMAN HIT: AI263800.1, EVALUE 1.40e+00
gatattcctcacctgaacacatagctgaaatggagcccctcattggagattaagtaacctccatatctgtaggaagcagaattcgcaataaacatgatgcactgggcaaaggcaaagcagaatccgtaaatattggctttctgaatggctgtcttgaagggcttctccagctcagtctcaagtgcttcaatgaaccgcctctcctttccaattccagcaacagtgcggatgttactgagggcttcatttgtaatctgaa

SEQ ID NO: 23169 - DNA, 153 bp, Homo sapiens
  MAP TO CHR19.3; EXPRESSED IN BRAIN, SIGNAL = 2.9; EXPRESSED IN HELA, SIGNAL = 3.7; EXPRESSED IN BONE MARROW, SIGNAL =   3; EXPRESSED IN LUNG, SIGNAL = 2.1; EXPRESSED IN HEART, SIGNAL = 2.5; NT HIT: gi14760603, EVALUE 1.00e-72; SWISSPROT HIT: Q07814, EVALUE 1.00e-20; EST_HUMAN HIT: BF969286.1, EVALUE 2.00e-72
tcctgcaggatgattgccgccgtggacacagactccccccgagaggtctttttccgagtggcagctgacatgttttctgacggcaacttcaactggggccgggttgtcgcccttttctactttgccagcaaactggtgctcaaggtgggcagc

SEQ ID NO: 23170 - DNA, 169 bp, Homo sapiens
  MAP TO CHRX.3; EXPRESSED IN PLACENTA, SIGNAL = 2.8; EXPRESSED IN BONE MARROW, SIGNAL = 2.6; EXPRESSED IN BRAIN, SIGNAL = 1.9; EXPRESSED IN FETAL LIVER, SIGNAL = 2.2; SWISSPROT HIT: P41208, EVALUE 3.00e-24; EST_HUMAN HIT: BE958578.1, EVALUE 2.00e-85; NT HIT: U82671.3, EVALUE 2.00e-90
agcttgccttcagttctttaacatctatggtgccagttccatccgcatcgaaaagatcaaaagcttcccggatctcctgcttttgctcttcagtaagctcaggcttagggctcattctttttcgctgagaacttgatgccatgtttgccttcttaaagttggaggcctt

SEQ ID NO: 23171 - DNA, 155 bp, Homo sapiens
  MAP TO CHR14.3; EXPRESSED IN BRAIN, SIGNAL = 2.1; EXPRESSED IN BONE MARROW, SIGNAL = 1.1; EXPRESSED IN HELA, SIGNAL = 3.3; SWISSPROT HIT: Q29036, EVALUE 2.00e-19; EST_HUMAN HIT: AA215648.1, EVALUE 5.00e-73; NT HIT: U84213.1, EVALUE 4.00e-82
tcagccaacaaagttcatgacaacaaggtgcaggatggtgctggcaaagagaaaatcagcaaaggctcgctctggggagatgccttggaaatccgctttgttctgtgggttgatctgtattctcaggcaaactgcacaagaagcaaaacacaaaa

SEQ ID NO: 23172 - DNA, 157 bp, Homo sapiens
  MAP TO CHR1.3; EXPRESSED IN HEART, SIGNAL = 1.8; EXPRESSED IN ADULT LIVER, SIGNAL = 1.5; EXPRESSED IN BRAIN, SIGNAL = 0.93; EXPRESSED IN BONE MARROW, SIGNAL = 1.3; EXPRESSED IN LUNG, SIGNAL =   1; EXPRESSED IN PLACENTA, SIGNAL = 1.3; SWISSPROT HIT: P20800, EVALUE 2.00e-26; EST_HUMAN HIT: BI760483.1, EVALUE 2.00e-81; NT HIT: gi14742785, EVALUE 1.00e-81
agtgttcacccagatgatgtccaagtggcagaagtagacgcactccttgtcgagccaggagctgcaggagcaacggcgaagccgaaggtgggtgccttgggcatgagatgaggacgctggctgctccagggtggcagcagcctggcccttccctgca

SEQ ID NO: 23173 - DNA, 388 bp, Homo sapiens
  MAP TO CHR3.3; EXPRESSED IN BONE MARROW, SIGNAL = 2.5; EXPRESSED IN FETAL LIVER, SIGNAL =   3; EXPRESSED IN ADULT LIVER, SIGNAL = 2.2; EXPRESSED IN PLACENTA, SIGNAL = 2.8; EXPRESSED IN LUNG, SIGNAL = 2.9; EXPRESSED IN HELA, SIGNAL = 2.3; SWISSPROT HIT: P46094, EVALUE 8.00e-61; EST_HUMAN HIT: BE252309.1, EVALUE 2.10e+00; NT HIT: gi11449895, EVALUE 0.00e+00
ggatggaggacaggatgctggctacccacacagccatggtcaccagcacccggcagcggagggtggggacgcgcagggtggagagggggctcactaccgacaggtagcggtggatggtcatgatggtcaggaagaagatgctgctgtagaggctgatggagaagatcatattgaggagtttgcagaggaagtctcccagcacccagccccagtggtatggggagatccacacaggcaacaagcaggcgaacaccaggtctgagaggcacaggttgaggatgaagatgttggtgagggactccaggctctcatacttcaccaggacccacaggaccaggctgttgcccactaggctgaggagaaacaccaggcagtataggacagtggt

SEQ ID NO: 23174 - DNA, 209 bp, Homo sapiens
  MAP TO CHR22.3; EXPRESSED IN PLACENTA, SIGNAL = 1.4; EXPRESSED IN BONE MARROW, SIGNAL =   2; EXPRESSED IN LUNG, SIGNAL = 0.99; EXPRESSED IN HEART, SIGNAL = 1.4; EXPRESSED IN BRAIN, SIGNAL = 1.3; SWISSPROT HIT: P10323, EVALUE 2.00e-35; EST_HUMAN HIT: BG724168.1, EVALUE 1.00e-105; NT HIT: X54018.1, EVALUE 1.00e-112
ctggtctctccccagtggcccctgtgggttacggttcaggcaaaacccacagggtggtgtccgcatcgtcggcgggaaggctgcacagcatggggcctggccctggatggtcagcctccagatcttcacgtacaacagccacaggtaccacacatgtggaggcagcttgctgaattcacgatgggtgctcactgctgctcactgcttcg

SEQ ID NO: 23175 - DNA, 238 bp, Homo sapiens
  MAP TO CHR1.3; EXPRESSED IN BRAIN, SIGNAL =   2; EXPRESSED IN FETAL LIVER, SIGNAL = 1.2; EXPRESSED IN BONE MARROW, SIGNAL = 1.4; EXPRESSED IN HEART, SIGNAL = 1.6; NT HIT: gi14780971, EVALUE 1.00e-126; SWISSPROT HIT: P35218, EVALUE 2.20e+00; EST_HUMAN HIT: BE298275.1, EVALUE 1.00e-126
ctcacctccacttgcagctcgcctatgtcatccaccgaccaggcctcatcatcgttgtcatagttgggcacagtgctgaagctgccagctcgctgctcatgggtaataccacattcgggcaagttttctacggacctcgtactccgaattcggttctcggggatccgggcagggacactggtggtgtcaaagttttcacattcaaggacttccacataaatcaggtagggagcctggg

SEQ ID NO: 23176 - DNA, 203 bp, Homo sapiens
  MAP TO CHR10.3; EXPRESSED IN LUNG, SIGNAL = 2.2; EXPRESSED IN HEART, SIGNAL = 1.6; EXPRESSED IN BONE MARROW, SIGNAL = 1.4; EXPRESSED IN PLACENTA, SIGNAL = 1.6; EXPRESSED IN FETAL LIVER, SIGNAL = 1.5; EXPRESSED IN ADULT LIVER, SIGNAL = 1.3; EXPRESSED IN BRAIN, SIGNAL = 0.99; NT HIT: M31951.1, EVALUE 1.00e-106; SWISSPROT HIT: P14222, EVALUE 7.00e-23; EST_HUMAN HIT: BI836346.1, EVALUE 1.00e-106
ccttctcctgctgctgcccctgcccgtccctgccccgtgccacacagccgcacgctcagagtgcaagcgcagccacaagttcgtgcctggtgcatgctggccggggagggtgtggacgtgaccagcctccgccgctcgggctccttcccagtggacacacaaaggttcctgcggcccgacggcacctgcaccctctgtgaaaa

SEQ ID NO: 23177 - DNA, 218 bp, Homo sapiens
  MAP TO CHR5.3; EXPRESSED IN LUNG, SIGNAL = 1.2; EXPRESSED IN HEART, SIGNAL = 0.86; EXPRESSED IN BONE MARROW, SIGNAL = 0.86; SWISSPROT HIT: P20585, EVALUE 9.00e-30; EST_HUMAN HIT: BG188772.1, EVALUE 1.00e-101; NT HIT: D61416.1, EVALUE 1.00e-117
gtgttttcatcttgcttgtaggatgggtgctgcagacaatatatataaaggacagagtacatttatggaagaactgactgacacagcagaaataatcagaaaagcaacatcacagtccttggttatcttggatgaactaggaagagggacgagcactcatgatggaattgccattgcctatgctacacttgagtatttcatcagagatgtaagtatcc

SEQ ID NO: 23178 - DNA, 227 bp, Homo sapiens
  MAP TO CHR21.3; EXPRESSED IN LUNG, SIGNAL = 1.1; EXPRESSED IN BONE MARROW, SIGNAL = 1.3; EXPRESSED IN HEART, SIGNAL =   1; EXPRESSED IN ADULT LIVER, SIGNAL = 0.98; EXPRESSED IN BRAIN, SIGNAL = 1.9; SWISSPROT HIT: O95613, EVALUE 9.00e-35; EST_HUMAN HIT: AU160050.1, EVALUE 1.00e-12; NT HIT: gi16166512, EVALUE 1.00e-125
gccttgagctggaggcgctgcgcctgagtctgagcaacatgcacacggcgcagctggagctgacacaggccaacctccagaaggagaaggagacggcattgacggagctgcgggagatgctcaacagccggcgtgcccaggagctggccctgctacagagcaggcagcagcacgagctggagctcctcagggagcagcacgcacgggagaaggaggaggtggtgctc

SEQ ID NO: 23179 - DNA, 140 bp, Homo sapiens
  MAP TO CHR17.3; EXPRESSED IN FETAL LIVER, SIGNAL = 0.91; EXPRESSED IN BRAIN, SIGNAL = 1.9; EXPRESSED IN BONE MARROW, SIGNAL = 2.2; EXPRESSED IN PLACENTA, SIGNAL = 1.7; SWISSPROT HIT: O75771, EVALUE 9.00e-20; EST_HUMAN HIT: BG829674.1, EVALUE 7.00e-72; NT HIT: gi14785724, EVALUE 5.00e-72
tacctgttcctcctcatcctgggttttagcctgaagcagctggaggaggcgggaagctgtcagccctccattggaatctacatataggacgttttgctgcaggccatgggccacatttgctgccatacagagacatacct

SEQ ID NO: 23180 - DNA, 202 bp, Homo sapiens
  MAP TO CHR21.3; EXPRESSED IN LUNG, SIGNAL = 1.5; EXPRESSED IN PLACENTA, SIGNAL = 1.5; EXPRESSED IN ADULT LIVER, SIGNAL = 2.4; EXPRESSED IN BRAIN, SIGNAL = 1.6; EXPRESSED IN BONE MARROW, SIGNAL = 2.1; NT HIT: gi14780601, EVALUE 1.00e-91; SWISSPROT HIT: O70477, EVALUE 2.00e-27; EST_HUMAN HIT: AU143357.1, EVALUE 2.00e-91
aaagtcttcattttctctgctctagatggtaaaagcaatccaggttttgcgcattcatcttcttgagctggaaaaggttaacgaactctgcaaagatttctgcagtcgatacattgcttgtctgaaaacaaaaatgaacagtgaaactctgttgagtggagagcctggaagcccgtactcaccagtgcagtcccaggtactt

SEQ ID NO: 23181 - DNA, 148 bp, Homo sapiens
  MAP TO CHR13.3; EXPRESSED IN BRAIN, SIGNAL = 1.2; EXPRESSED IN FETAL LIVER, SIGNAL = 1.2; EXPRESSED IN BONE MARROW, SIGNAL = 1.1; EXPRESSED IN PLACENTA, SIGNAL = 1.1; SWISSPROT HIT: P09182, EVALUE 5.20e-01; EST_HUMAN HIT: BE504550.1, EVALUE 7.00e-69; NT HIT: gi14756990, EVALUE 5.00e-69
ttagatgtctttggtttgttctggaaatattaatggctaaaaatgaaaataacagtcacgcttttatcagaaagatggtagaaaatattaaacaaacaaaagatgcccaaggaccagatgatgcaaaaatgaatgaagtatgtaattc

SEQ ID NO: 23182 - DNA, 193 bp, Homo sapiens
  MAP TO CHR2.3; EXPRESSED IN PLACENTA, SIGNAL = 1.8; EXPRESSED IN BONE MARROW, SIGNAL = 2.2; EXPRESSED IN LUNG, SIGNAL = 3.1; EST_HUMAN HIT: AU124779.1, EVALUE 3.00e-84; SWISSPROT HIT: Q99832, EVALUE 2.00e-24; NT HIT: gi5453606, EVALUE 1.00e-82
attaaaagcagttaatttctttcttttctagcccacaccagttatcctattgaaagaggggactgatagctcccaaggcatcccccagcttgtgagtaacatcagtgcctgccaggtgattgctgaggctgtaagaactaccctgggtccccgtggcatggacaagcttattgtagatggcagaggtaagtct

SEQ ID NO: 23183 - DNA, 116 bp, Homo sapiens
  MAP TO CHR4.3; EXPRESSED IN BONE MARROW, SIGNAL = 0.8; EXPRESSED IN FETAL LIVER, SIGNAL =   1; EXPRESSED IN BRAIN, SIGNAL = 0.78; EXPRESSED IN ADULT LIVER, SIGNAL = 0.84; EST_HUMAN HIT: BF830143.1, EVALUE 5.60e-01; SWISSPROT HIT: Q13316, EVALUE 1.20e-02; NT HIT: gi4758171, EVALUE 5.00e-59
agtgagagtgaagagcactgggtgggaggtggcagtgatggggagagcagccatggagacggctccgagttggacgatgagggaatgcagagtgatgacccagagagcatcaggag

SEQ ID NO: 23184 - DNA, 202 bp, Homo sapiens
  MAP TO CHR5.3; EXPRESSED IN ADULT LIVER, SIGNAL = 6.3; EXPRESSED IN FETAL LIVER, SIGNAL = 4.3; EXPRESSED IN BRAIN, SIGNAL = 4.3; EXPRESSED IN BONE MARROW, SIGNAL =   4; EXPRESSED IN HELA, SIGNAL = 6.4; EXPRESSED IN PLACENTA, SIGNAL = 5.8; EXPRESSED IN LUNG, SIGNAL = 3.2; EXPRESSED IN HEART, SIGNAL = 4.9; EST_HUMAN HIT: AU135460.1, EVALUE 1.00e-109; SWISSPROT HIT: P49419, EVALUE 9.00e-17; NT HIT: gi14735831, EVALUE 1.00e-109
tacctctccccggcctccccagcttccattatacacgccctcgttttcctcgcggagccccagctctttcagccacgcatactggggctgattgatgaggagagtggacatgaaggcggcaggcctgctccaaggtccagagagcttgctggtctttgcagcgtgcacacacagcgcgcgaggaaggcgccacatactgagc

SEQ ID NO: 23185 - DNA, 120 bp, Homo sapiens
  MAP TO CHR19.3; EXPRESSED IN LUNG, SIGNAL = 1.2; EXPRESSED IN PLACENTA, SIGNAL = 1.9; EXPRESSED IN ADULT LIVER, SIGNAL = 1.5; EXPRESSED IN BONE MARROW, SIGNAL = 1.3; EST_HUMAN HIT: BG754626.1, EVALUE 5.00e-54; SWISSPROT HIT: O43765, EVALUE 2.00e-15; NT HIT: AJ133129.1, EVALUE 3.00e-54
tccccagagccgcagcctacagcaaactcggcaactacgcaggcgcggtgcaggactgtgagcgggccatctgcattgacccggcctacagcaaggcctacggcaggatggggtgagtgc

SEQ ID NO: 23186 - DNA, 152 bp, Homo sapiens
  MAP TO CHR2.3; EXPRESSED IN ADULT LIVER, SIGNAL = 0.77; EXPRESSED IN BRAIN, SIGNAL = 1.3; EXPRESSED IN PLACENTA, SIGNAL = 0.64; EXPRESSED IN BONE MARROW, SIGNAL = 0.83; EST_HUMAN HIT: AA077633.1, EVALUE 1.00e-45; SWISSPROT HIT: O42184, EVALUE 2.00e-06; NT HIT: gi14702160, EVALUE 2.00e-50
tgctgggactgtgggtcagtgctgacacacccatggccatacgtttggtcttcttggccttggctgggctggtggatgggaagccagtatggatcaccttgtggatggatgcaaagagaccaaacttggcgggcactggaagtacctgggga

SEQ ID NO: 23187 - DNA, 215 bp, Homo sapiens
  MAP TO CHR8.3; EXPRESSED IN BONE MARROW, SIGNAL = 1.4; EXPRESSED IN LUNG, SIGNAL = 1.2; EXPRESSED IN HEART, SIGNAL = 1.8; EXPRESSED IN PLACENTA, SIGNAL =   1; EXPRESSED IN FETAL LIVER, SIGNAL =   1; EXPRESSED IN ADULT LIVER, SIGNAL = 1.2; EXPRESSED IN BRAIN, SIGNAL = 1.1; SWISSPROT HIT: P52823, EVALUE 1.00e-35; EST_HUMAN HIT: AW954342.1, EVALUE 1.00e-117; NT HIT: gi4507264, EVALUE 1.00e-118
cagggaaaagcattcgtcaaagagagcttaaaatgcatcgccaacggggtcacctccaaggtcttcctcgccattcggaggtgctccactttccaaaggatgattgctgaggtgcaggaagagtgctacagcaagctgaatgtgtgcagcatcgccaagcggaaccctgaagccatcactgaggtcgtccagctgcccaatcacttctccaacag

SEQ ID NO: 23188 - DNA, 113 bp, Homo sapiens
  MAP TO CHR9.3; EXPRESSED IN FETAL LIVER, SIGNAL = 1.4; EXPRESSED IN BRAIN, SIGNAL = 3.3; EXPRESSED IN HELA, SIGNAL = 3.3; EXPRESSED IN PLACENTA, SIGNAL = 1.6; EXPRESSED IN BONE MARROW, SIGNAL = 1.3; EXPRESSED IN LUNG, SIGNAL = 1.9; EXPRESSED IN HEART, SIGNAL = 2.3; EXPRESSED IN ADULT LIVER, SIGNAL = 2.3; NT HIT: gi14736074, EVALUE 3.00e-51; SWISSPROT HIT: Q9RSF0, EVALUE 6.00e+00; EST_HUMAN HIT: BE261886.1, EVALUE 4.00e-51
taccttctctccattggggttccccagaatgtagcagcccatgatgtggatgacgttcggctctgggttcactttgctcatcaggcggctcagccgcttccagaagctggtgg

SEQ ID NO: 23189 - DNA, 126 bp, Homo sapiens
  MAP TO CHRX.3; EXPRESSED IN BONE MARROW, SIGNAL = 0.83; EXPRESSED IN PLACENTA, SIGNAL = 0.46; EXPRESSED IN LUNG, SIGNAL = 0.79; EXPRESSED IN HEART, SIGNAL = 0.93; EXPRESSED IN BRAIN, SIGNAL = 1.1; SWISSPROT HIT: P56377, EVALUE 1.00e-16; EST_HUMAN HIT: BG707260.1, EVALUE 1.00e-63; NT HIT: gi4506956, EVALUE 9.00e-64
atcatctttaattttgagaaggcttattttattttggatgagtttcttttgggaggggaagttcaggaaacatccaagaaaaatgtccttaaagcaattgagcaggctgatctactgcaggaggta

SEQ ID NO: 23190 - DNA, 164 bp, Homo sapiens
  MAP TO CHR22.3; EXPRESSED IN HELA, SIGNAL = 3.6; EXPRESSED IN BONE MARROW, SIGNAL = 4.5; EXPRESSED IN PLACENTA, SIGNAL = 5.6; EXPRESSED IN FETAL LIVER, SIGNAL = 4.2; EXPRESSED IN ADULT LIVER, SIGNAL =   4; EXPRESSED IN BRAIN, SIGNAL =   5; EST_HUMAN HIT: AW167077.1, EVALUE 1.00e-76; SWISSPROT HIT: O70194, EVALUE 5.00e-24; NT HIT: gi4503522, EVALUE 1.00e-75
gcacaggaatctcacccaagcttgaggtactcagatccagccagcaaagcacagcaggtccaccgggccaacttgtagctgttgttcttcagctccgtggcaatgacagcccctcgctgagagtccagcttctgacgccagtcaacgccattacagtgctgcag

SEQ ID NO: 23191 - DNA, 167 bp, Homo sapiens
  MAP TO CHR14.3; EXPRESSED IN LUNG, SIGNAL = 2.3; EXPRESSED IN BONE MARROW, SIGNAL = 2.3; EXPRESSED IN BRAIN, SIGNAL = 1.6; EST_HUMAN HIT: BG396938.1, EVALUE 4.00e-89; SWISSPROT HIT: Q15070, EVALUE 2.00e-26; NT HIT: X80695.1, EVALUE 3.00e-89
gcagtacctgaggtggcttctggagagactgcagatgtagtccaaactgctgcagagcagagcttcgctgaactggggctggggtcatacaccccagtgggactgatccagaatttactggaatttatgcatgttgatctgggcctaccttggtggggggccattgc

SEQ ID NO: 23192 - DNA, 118 bp, Homo sapiens
  MAP TO CHR11.3; EXPRESSED IN BONE MARROW, SIGNAL = 1.4; EXPRESSED IN LUNG, SIGNAL = 0.83; EXPRESSED IN PLACENTA, SIGNAL = 0.82; EXPRESSED IN HEART, SIGNAL = 1.5; EXPRESSED IN BRAIN, SIGNAL = 1.5; NT HIT: AJ249369.1, EVALUE 7.00e-46; EST_HUMAN HIT: BG400051.1, EVALUE 1.00e-45; SWISSPROT HIT: P07293, EVALUE 4.60e+00
agcttcaggtggcgccagtggggcacagcgtaggccacatcatccaggaggaactggcccaggctgtagacatagcccattcaaggtgcccacgcaggcccgtgtgtgaatgggcatc

SEQ ID NO: 23193 - DNA, 308 bp, Homo sapiens
  MAP TO CHR14.3; EXPRESSED IN PLACENTA, SIGNAL = 0.56; EXPRESSED IN BONE MARROW, SIGNAL = 0.91; EXPRESSED IN ADULT LIVER, SIGNAL = 0.69; EXPRESSED IN BRAIN, SIGNAL = 0.91; NT HIT: M83229.1, EVALUE 0.00e+00; EST_HUMAN HIT: BE293065.1, EVALUE 0.00e+00; SWISSPROT HIT: P22735, EVALUE 5.00e-48
aaggagcacttacaggcccctggtgccagctccacttccttcttggtctccttgaagatggtaccactgacaccagtatagaaagtgactgagaggtagaggtgcagtttcactgtgcggcggctgctgctgtgattgatcagcatcacagagaccatcagatcctgccccatcaccgcgtcctgtgcctccacctgcatggccacatcctccgctgagccccggttggcatacacattgggtttgctgccgtgggctgctgctgtctctactgccttccgctctgcgtctgagcctgggggttgagg

SEQ ID NO: 23194 - DNA, 317 bp, Homo sapiens
  MAP TO CHRX.3; EXPRESSED IN FETAL LIVER, SIGNAL = 2.8; EXPRESSED IN ADULT LIVER, SIGNAL = 2.5; EXPRESSED IN HELA, SIGNAL = 3.3; EXPRESSED IN BONE MARROW, SIGNAL = 1.3; EST_HUMAN HIT: BE886604.1, EVALUE 0.00e+00; SWISSPROT HIT: P55795, EVALUE 7.00e-46; NT HIT: gi14757937, EVALUE 0.00e+00
caggtattcgtttcatctacaccagagaaggcagaccaagtggtgaagcatttgttgaacttgaatctgaagaggaagtgaaattggctttgaagaaggacagagaaaccatgggacacagatacgttgaagtattcaagtctaacagtgttgaaatggattgggtgttgaagcatacaggtccgaatagccctgatactgccaacgatggcttcgtccggcttagaggactcccatttggctgtagcaaggaagagattgttcagttcttttcagggttggaaattgtgccaaatgggatgacactgccagtggac

SEQ ID NO: 23195 - DNA, 158 bp, Homo sapiens
  MAP TO CHR12.3; EXPRESSED IN LUNG, SIGNAL = 4.9; EXPRESSED IN HEART, SIGNAL = 3.6; EXPRESSED IN HELA, SIGNAL = 3.6; EXPRESSED IN PLACENTA, SIGNAL = 3.2; EXPRESSED IN BONE MARROW, SIGNAL = 4.1; EXPRESSED IN BRAIN, SIGNAL = 4.7; EST_HUMAN HIT: AU116935.1, EVALUE 3.00e-80; SWISSPROT HIT: O35594, EVALUE 3.00e-19; NT HIT: gi16163898, EVALUE 2.00e-80
cagttcaaacgatatgtcaataaacttcgaagcaagagtacagttttcaaaaagaagcatcagataatagctgaacttaaagctgaattcggtcttttgcagaggactgaagaacttcttaagcaacgtcatgaaaatattcaacaacaactggtaat

SEQ ID NO: 23196 - DNA, 201 bp, Homo sapiens
  MAP TO CHR4.3; EXPRESSED IN FETAL LIVER, SIGNAL = 1.3; EXPRESSED IN BONE MARROW, SIGNAL = 1.7; EST_HUMAN HIT: AA256653.1, EVALUE 1.00e-107; SWISSPROT HIT: P52875, EVALUE 1.00e-26; NT HIT: AF183409.1, EVALUE 2.00e-99
atttattttagtttcaacgaaccaaacttttaaatggaccgggagatgttgaaacgggtacaagcataacagtacctcagaaaaagtggttgcattttatttcacccatttttgttcaagctcttacattaacattcttagcagaatggggtgatcgctctcaactaactacaattgtattggcagctagagaggtgagtg

SEQ ID NO: 23197 - DNA, 171 bp, Homo sapiens
  MAP TO CHR16.3; EXPRESSED IN BONE MARROW, SIGNAL = 2.4; EXPRESSED IN HEART, SIGNAL = 2.6; EXPRESSED IN HELA, SIGNAL =   2; EXPRESSED IN PLACENTA, SIGNAL = 1.9; EXPRESSED IN FETAL LIVER, SIGNAL =   3; EXPRESSED IN ADULT LIVER, SIGNAL =   5; EST_HUMAN HIT: BF815129.1, EVALUE 2.00e-35; SWISSPROT HIT: O95255, EVALUE 3.00e-24; NT HIT: gi13654697, EVALUE 3.00e-86
gcctcacctgggggatgatgctgatcctggagcgcagtgtgtgcagccccacgtgggcaatggggaccccgtcgatccagatcccaccctcagctgcctcctggagccgcagcagcccactggccagggaggacttccctgccccggtcctgccaacgatgcccacctgcc

SEQ ID NO: 23198 - DNA, 218 bp, Homo sapiens
  MAP TO CHR1.3; EXPRESSED IN LUNG, SIGNAL = 2.2; EXPRESSED IN ADULT LIVER, SIGNAL =   1; EXPRESSED IN FETAL LIVER, SIGNAL = 0.42; EXPRESSED IN BONE MARROW, SIGNAL =   1; NT HIT: gi14742457, EVALUE 1.00e-116; EST_HUMAN HIT: AU117450.1, EVALUE 1.00e-117; SWISSPROT HIT: P35590, EVALUE 6.00e-35
ggacctttcagcattttgatggctgcgttcatcttcagcccgtccttcttgatcatggcccggatgacctggccgaagttcccctccccgatgaggtcctcaaaggtgatgtcctcccactctagcactgggtagctcaggggctcgggctgcagttttggccgccgggtaagtgtcaaggtccctgagctgaactgcaggatggtctcctcgccctt

SEQ ID NO: 23199 - DNA, 216 bp, Homo sapiens
  MAP TO CHR3.3; EXPRESSED IN HELA, SIGNAL = 5.5; EXPRESSED IN BONE MARROW, SIGNAL = 1.8; EXPRESSED IN LUNG, SIGNAL = 1.2; EXPRESSED IN HEART, SIGNAL = 1.9; EXPRESSED IN FETAL LIVER, SIGNAL = 1.4; NT HIT: gi4502960, EVALUE 1.00e-98; EST_HUMAN HIT: BF870818.1, EVALUE 7.00e-67; SWISSPROT HIT: Q02388, EVALUE 4.00e-26
ccccagcctcaccctctctcctggccttcctgcctctcccacacccccagccctgcctgggagcccgggaataccaggctttccaggctccccggcaaggccggaaggcccgggggggcccctctccccaagggccagaccaggtggcccctgagggccagggtctccacggtcgcccttcagcccgcgttctccaggaaagccgatggggccctg

SEQ ID NO: 23200 - DNA, 114 bp, Homo sapiens
  MAP TO CHR3.3; EXPRESSED IN LUNG, SIGNAL = 1.2; EXPRESSED IN BONE MARROW, SIGNAL = 1.5; EXPRESSED IN HEART, SIGNAL = 1.2; EXPRESSED IN PLACENTA, SIGNAL =   1; EXPRESSED IN ADULT LIVER, SIGNAL = 1.6; EXPRESSED IN BRAIN, SIGNAL = 1.5; NT HIT: gi11449889, EVALUE 8.00e-58; EST_HUMAN HIT: BG220110.1, EVALUE 2.00e-50; SWISSPROT HIT: P51677, EVALUE 1.00e-16
ctgtgagcggagcaagcatctggacctggtcatgctggtgacagaggtgatcgcctactcccactgctgcatgaacccggtgatctacgcctttgttggagagaggttccggaa

SEQ ID NO: 23201 - DNA, 115 bp, Homo sapiens
  MAP TO CHR6.3; EXPRESSED IN HELA, SIGNAL = 8.1; EXPRESSED IN BONE MARROW, SIGNAL =  36; EXPRESSED IN PLACENTA, SIGNAL =  24; EXPRESSED IN HEART, SIGNAL =  35; EXPRESSED IN FETAL LIVER, SIGNAL =  21; EXPRESSED IN ADULT LIVER, SIGNAL =  31; EXPRESSED IN BRAIN, SIGNAL =  28; NT HIT: AJ315532.1, EVALUE 2.00e-49; SWISSPROT HIT: P14283, EVALUE 9.10e-01; EST_HUMAN HIT: BE260055.1, EVALUE 4.00e-51
ctgacctgcagcagcacatggcagatctccacggagccttctgggcggctgcatgcaggggcgtgcgcttgctctgctggtcgctctggaagttggggtccaggttgtccactgc

SEQ ID NO: 23202 - DNA, 364 bp, Homo sapiens
  MAP TO CHR19.3; EXPRESSED IN BONE MARROW, SIGNAL = 1.7; EXPRESSED IN HEART, SIGNAL = 2.7; EXPRESSED IN FETAL LIVER, SIGNAL = 2.6; EXPRESSED IN ADULT LIVER, SIGNAL = 3.6; EST_HUMAN HIT: AW967331.1, EVALUE 0.00e+00; SWISSPROT HIT: P15882, EVALUE 4.00e-04; NT HIT: AB051509.1, EVALUE 0.00e+00
gtcagccacaacaacaaggtgaatctcatgaccagcgagaacctctccatctgcttctggcccaccttgatgagacctgatttcagcactatggacgccctcacagccacgcgcacctaccagacaatcattgaactctttatccagcagtgccccttcttcttctacaatcggcccatcaccgagccccccggcgccaggcccagctccccctctgccgtggcttccaccgtccccttcctcacttccacgcctgtcacaagtcagccgtcgcccccacagtcgcctccacccaccccccagtccccaatgcagccactgcttccctcccagcttcaagccgaacacacgctgtgagccacca

SEQ ID NO: 23203 - DNA, 106 bp, Homo sapiens
  MAP TO CHR17.3; EXPRESSED IN ADULT LIVER, SIGNAL = 1.1; EXPRESSED IN LUNG, SIGNAL = 0.86; EXPRESSED IN BONE MARROW, SIGNAL = 0.87; NT HIT: gi16164321, EVALUE 4.00e-53; EST_HUMAN HIT: BG398992.1, EVALUE 6.00e-53; SWISSPROT HIT: Q10085, EVALUE 2.00e-06
gcaaacatcagcgcgatcccgatggggaggccaaccacatagtacccaatggtattcacaatggctccaaccttctgatttccactccccctcagaacaccaccac

SEQ ID NO: 23204 - DNA, 219 bp, Homo sapiens
  MAP TO CHR2.3; EXPRESSED IN HELA, SIGNAL =   3; EXPRESSED IN PLACENTA, SIGNAL = 4.7; EXPRESSED IN FETAL LIVER, SIGNAL = 3.1; EXPRESSED IN ADULT LIVER, SIGNAL = 4.4; EXPRESSED IN HEART, SIGNAL = 5.2; EXPRESSED IN BONE MARROW, SIGNAL = 4.8; NT HIT: gi4827015, EVALUE 1.00e-118; SWISSPROT HIT: P48751, EVALUE 4.00e-36; EST_HUMAN HIT: BF093595.1, EVALUE 1.00e-110
cccagaactgtctttggagttggggggctctgaggcgacccctgaagatgaccccttgctgcggacgggctcggtatttggggggcttgtgcgggatgtgaggcgccggtacccgcactaccccagtgacctgcgagatgcgctgcactcccagtgtgtggccgctgtgctcttcatctacttcgcagccctcagccctgccatcaccttcggggggct

SEQ ID NO: 23205 - DNA, 151 bp, Homo sapiens
  MAP TO CHR20.3; EXPRESSED IN FETAL LIVER, SIGNAL = 2.2; EXPRESSED IN ADULT LIVER, SIGNAL = 2.5; EXPRESSED IN BRAIN, SIGNAL = 2.7; EXPRESSED IN LUNG, SIGNAL = 2.6; EXPRESSED IN HEART, SIGNAL = 2.4; EXPRESSED IN BONE MARROW, SIGNAL =   3; EXPRESSED IN PLACENTA, SIGNAL = 2.1; SWISSPROT HIT: P52951, EVALUE 3.00e-01; EST_HUMAN HIT: AL526827.1, EVALUE 1.00e-79; NT HIT: gi14772528, EVALUE 9.00e-80
actgctgtggggtctgcaggttgggaccagaaggtgggcttcttgggcaatttctctagaggtcatccaaggtgaaaccctctgtgtctccaagaggcctccccattctccaaagagaaggaggttctggcgctttggagaggaagagggc

SEQ ID NO: 23206 - DNA, 188 bp, Homo sapiens
  MAP TO CHR22.3; EXPRESSED IN HELA, SIGNAL = 2.3; EXPRESSED IN PLACENTA, SIGNAL = 5.3; EXPRESSED IN BONE MARROW, SIGNAL =   5; EXPRESSED IN LUNG, SIGNAL =   4; EXPRESSED IN HEART, SIGNAL = 6.3; EXPRESSED IN FETAL LIVER, SIGNAL = 3.2; EXPRESSED IN BRAIN, SIGNAL = 5.5; EXPRESSED IN ADULT LIVER, SIGNAL = 6.2; NT HIT: gi14778734, EVALUE 3.00e-95; EST_HUMAN HIT: AW606321.1, EVALUE 5.00e-95; SWISSPROT HIT: Q9UJY5, EVALUE 3.00e-09
cccacagtcgtcggatgccactgagcccccagcccctgctctggcccaggcccccagtatggaaagccgacccccagcgcagacatccctgccagcaagcagcggtctggacgacctagacctcctggggaagaccctcctgcagcagtcgctgcccccggaatcccagcaagtgcggtggtgagggc

SEQ ID NO: 23207 - DNA, 222 bp, Homo sapiens
  MAP TO CHR12.3; EXPRESSED IN LUNG, SIGNAL = 1.1; EXPRESSED IN HEART, SIGNAL = 0.76; EXPRESSED IN BONE MARROW, SIGNAL =   1; EXPRESSED IN FETAL LIVER, SIGNAL = 0.69; EXPRESSED IN BRAIN, SIGNAL = 1.1; NT HIT: gi14757787, EVALUE 1.00e-118; EST_HUMAN HIT: BG390548.1, EVALUE 1.00e-117; SWISSPROT HIT: P50542, EVALUE 1.00e-28
caggtgtctggagctaaagccagataaccagacagcactgatggcgctggctgtgagcttcaccaacgagtccctgcagcgacaggcctgtgaaaccctacgagactggctgcggtacacaccagcctatgcccatctggtgacacctgctgaagaaggggctggtggggcaggactgggccccagcaagcgtatcctgggatctctcttgtctgagtgagt

SEQ ID NO: 23208 - DNA, 363 bp, Homo sapiens
  MAP TO CHR17.3; EXPRESSED IN BONE MARROW, SIGNAL = 2.6; EXPRESSED IN PLACENTA, SIGNAL = 3.2; EXPRESSED IN HEART, SIGNAL =   4; EXPRESSED IN FETAL LIVER, SIGNAL = 1.8; NT HIT: gi14772709, EVALUE 0.00e+00; EST_HUMAN HIT: BI545607.1, EVALUE 0.00e+00; SWISSPROT HIT: P14136, EVALUE 1.00e-53
cccctcctcacttctgcctcacagtggccaggtcctgtgccagattgtccctctcaacctccagccgggcgctgttggcggtgagttgatcgagccgcagccgcagctctcgcagctcagcctggtagacgtctgccagcttggtgggctccttggcccgcagctggttcagctcagcagccagcgccttgttttgctgttccaggaagcgaaccttctcgatgtagctggcaaagcggtcattgagctccatcatctctgcccgctcactggcccgggtctccttgaagccagcattgagtgccccagccagggagaaatccacccgggtcgggagtggagggggcattcgagccagggaga

SEQ ID NO: 23209 - DNA, 133 bp, Homo sapiens
  MAP TO CHR22.3; EXPRESSED IN HEART, SIGNAL = 1.1; EXPRESSED IN ADULT LIVER, SIGNAL = 0.94; EXPRESSED IN BRAIN, SIGNAL = 0.89; EXPRESSED IN BONE MARROW, SIGNAL = 1.3; NT HIT: U50722.1, EVALUE 4.00e-69; EST_HUMAN HIT: BI832805.1, EVALUE 5.00e-60; SWISSPROT HIT: Q15080, EVALUE 1.00e-16
ctctgtcctccttaggttttcgtcatcgaggtgaagacaaaaggaggatccaagtacctcatctaccgccgctaccgccagttccatgctttgcagagcaagctggaggagcgcttcgggccagacagcaaga

SEQ ID NO: 23210 - DNA, 197 bp, Homo sapiens
  MAP TO CHR12.3; EXPRESSED IN HEART, SIGNAL = 1.8; EXPRESSED IN PLACENTA, SIGNAL = 1.5; EXPRESSED IN ADULT LIVER, SIGNAL = 1.3; EXPRESSED IN FETAL LIVER, SIGNAL = 1.7; EXPRESSED IN LUNG, SIGNAL =   1; EXPRESSED IN BONE MARROW, SIGNAL = 1.4; SWISSPROT HIT: O43822, EVALUE 5.00e-03; EST_HUMAN HIT: AI768266.1, EVALUE 1.00e-98; NT HIT: gi7305240, EVALUE 4.00e-33
gagctggccaagcttcgagacctgcccaagctgcgagcgttggtgctgcttgataacccatgcacggacgaaaccagctaccgccaggaggccctggtgcagatgccataccttgaacgcctggacaaggaattctatgaggaggaggaacgggctgaggctgatgtgattcgacagaggctgaaggaagaaaagga

SEQ ID NO: 23211 - DNA, 120 bp, Homo sapiens
  MAP TO CHR1.3; EXPRESSED IN HEART, SIGNAL = 1.2; EXPRESSED IN FETAL LIVER, SIGNAL =   1; EXPRESSED IN ADULT LIVER, SIGNAL = 1.6; EXPRESSED IN BONE MARROW, SIGNAL = 1.3; SWISSPROT HIT: P50997, EVALUE 3.00e-15; EST_HUMAN HIT: BE005103.1, EVALUE 3.00e-58; NT HIT: gi14748588, EVALUE 8.00e-58
cagctgtacctgggtgtggtgctatcagccgttgtaatcataactggttgcttctcctactatcaagaagctaaaagttcaaagatcatggaatccttcaaaaacatggtccctcaggta

SEQ ID NO: 23212 - DNA, 227 bp, Homo sapiens
  MAP TO CHR2.3; EXPRESSED IN LUNG, SIGNAL = 0.78; EXPRESSED IN HEART, SIGNAL = 0.53; EXPRESSED IN ADULT LIVER, SIGNAL = 0.52; EXPRESSED IN BRAIN, SIGNAL = 0.4; EXPRESSED IN BONE MARROW, SIGNAL = 0.81; NT HIT: AF156159.1, EVALUE 1.00e-125; SWISSPROT HIT: P41595, EVALUE 1.00e-34
tttctttcagaggctatgtggcccctcccacttgttctatgtcctgcctggttatttcttgacgttctcttttcaaccgcatccatcatgcatctctgtgccatttcagtggatcgttacatagccatcaaaaagccaatccaggccaatcaatataactcacgggctacagcattcatcaagattacagtggtgtggttaatttcaataggtatgtagagaatgcc

SEQ ID NO: 23213 - DNA, 118 bp, Homo sapiens
  MAP TO CHR6.3; EXPRESSED IN HEART, SIGNAL = 0.69; EXPRESSED IN BONE MARROW, SIGNAL = 0.84; EXPRESSED IN LUNG, SIGNAL = 1.8; EXPRESSED IN ADULT LIVER, SIGNAL =   1; NT HIT: gi15301192, EVALUE 1.00e-47; EST_HUMAN HIT: BG108116.1, EVALUE 2.00e-47
acagtgttccaaccacttgatttcaaaccaagtagattttaggtttagaaacactaaaaaaaggtgtttcatttataaatacggaaggaacaaaaacatcactgcatcaatccagaaa

SEQ ID NO: 23214 - DNA, 125 bp, Homo sapiens
  MAP TO CHR19.3; EXPRESSED IN BRAIN, SIGNAL = 0.92; EXPRESSED IN FETAL LIVER, SIGNAL = 0.5; EXPRESSED IN BONE MARROW, SIGNAL = 0.92; NT HIT: gi14786947, EVALUE 9.00e-61; SWISSPROT HIT: O09043, EVALUE 2.00e-14; EST_HUMAN HIT: BG398256.1, EVALUE 2.00e-62
tagggttccaccaccgcttcaatcccaatgcctccagctccttcaagcccagtgggaccaagtttgccattcagtatggaactgggcgggtagatggaatcctgagtgaggacaagctgactgtg

SEQ ID NO: 23215 - DNA, 161 bp, Homo sapiens
  MAP TO CHR12.3; EXPRESSED IN BONE MARROW, SIGNAL = 0.89; EXPRESSED IN BRAIN, SIGNAL = 1.4; NT HIT: gi14766316, EVALUE 1.00e-85; EST_HUMAN HIT: BG492019.1, EVALUE 1.00e-85; SWISSPROT HIT: Q13610, EVALUE 9.00e-11
ggtggcagtgatgaagaggagacaggcagtccttcagaagatggcatgcagagtgcacgcacccaggcacgcccaagagagcccctggaggatggtgacccagaggatgacaggacgcttgatgatgatgagctggctgagtacgacttagataaatatga

SEQ ID NO: 23216 - DNA, 107 bp, Homo sapiens
  MAP TO CHR17.3; EXPRESSED IN FETAL LIVER, SIGNAL = 4.9; EXPRESSED IN LUNG, SIGNAL = 1.8; EXPRESSED IN BONE MARROW, SIGNAL = 1.7; EXPRESSED IN ADULT LIVER, SIGNAL = 3.7; NT HIT: gi14777136, EVALUE 1.00e-34; EST_HUMAN HIT: AJ230823.1, EVALUE 2.00e-53; SWISSPROT HIT: P43487, EVALUE 7.00e-14
aggaagtggatggccagcagctctggcttggggcactcgttggcgaagtcggcgtgggtgttccagacccaggcatggtcactacccatgttgggcttcagctccat

SEQ ID NO: 23217 - DNA, 181 bp, Homo sapiens
  MAP TO CHR22.3; EXPRESSED IN BONE MARROW, SIGNAL = 6.8; EXPRESSED IN HELA, SIGNAL = 2.8; EXPRESSED IN PLACENTA, SIGNAL =   6; EXPRESSED IN ADULT LIVER, SIGNAL =   7; EXPRESSED IN FETAL LIVER, SIGNAL = 4.6; EXPRESSED IN BRAIN, SIGNAL = 5.2; NT HIT: gi14777015, EVALUE 1.00e-69; EST_HUMAN HIT: BF979714.1, EVALUE 2.00e-69; SWISSPROT HIT: Q92890, EVALUE 3.00e-21
ttagggcaggaaaagttactattcaaataaaaacaagcacatactcttccctcctttctccacatctgacctgtcattaggccctgctagcatggacacagagaagcagcggtactgtgtggagaagcggttttggaagaccctgggaatagggtggtcgaacatgttgaaagagaactag

SEQ ID NO: 23218 - DNA, 234 bp, Homo sapiens
  MAP TO CHR1.3; EXPRESSED IN LUNG, SIGNAL = 3.5; EXPRESSED IN HEART, SIGNAL = 6.2; EXPRESSED IN BONE MARROW, SIGNAL = 6.6; EXPRESSED IN HELA, SIGNAL = 2.7; EXPRESSED IN PLACENTA, SIGNAL = 4.5; EXPRESSED IN ADULT LIVER, SIGNAL = 5.5; EXPRESSED IN BRAIN, SIGNAL = 5.1; SWISSPROT HIT: Q03173, EVALUE 7.00e-12; NT HIT: gi6679027, EVALUE 2.00e-78; EST_HUMAN HIT: BE514709.1, EVALUE 1.00e-56
aagccttaccctgttgggatggagtctcggccggctgagaggctgcctgcaagcctggctcagaagcagaagagtctcccagcacagagtttagaggagtctcaacagaggcaggggcagctgcagagggagaagggagaacactaggcttggatgagggagttgaggcaataggggtgcttggaggaggagaagcttgagatccacagtgtgagagtgatgcgagggaaggca

SEQ ID NO: 23219 - DNA, 160 bp, Homo sapiens
  MAP TO CHR9.3; EXPRESSED IN BONE MARROW, SIGNAL = 4.2; EXPRESSED IN FETAL LIVER, SIGNAL = 2.8; EXPRESSED IN PLACENTA, SIGNAL = 3.1; EXPRESSED IN HELA, SIGNAL = 2.8; EXPRESSED IN HEART, SIGNAL = 4.7; EXPRESSED IN LUNG, SIGNAL = 3.9; EXPRESSED IN BRAIN, SIGNAL = 8.3; EXPRESSED IN ADULT LIVER, SIGNAL = 5.1; EST_HUMAN HIT: AI735583.1, EVALUE 5.00e-73; SWISSPROT HIT: Q99731, EVALUE 1.00e-22; NT HIT: AJ223410.1, EVALUE 4.00e-85
caactcacactacagcaggcaccctgcagccatccttgatgagaaggtagtggaagttcctcacgatgtacccagggatgggtttctgggtcacagacaggcagcagtcttcagcatcattggtgccactcagagttggggctgggatggggaaagaagg

SEQ ID NO: 23220 - DNA, 162 bp, Homo sapiens
  MAP TO CHR3.3; EXPRESSED IN ADULT LIVER, SIGNAL =   1; EXPRESSED IN BONE MARROW, SIGNAL = 0.86; EXPRESSED IN PLACENTA, SIGNAL = 0.82; EXPRESSED IN HEART, SIGNAL = 0.9; EXPRESSED IN BRAIN, SIGNAL = 1.6; NT HIT: AB026898.1, EVALUE 3.00e-86; SWISSPROT HIT: P02462, EVALUE 1.10e+00; EST_HUMAN HIT: BF849619.1, EVALUE 7.00e-20
ggagagcctggggcactcctcctactctgtggatgatgtgattgtcctggaaatcgaggtgaaaggctcagtagaacctttccaggttctcttagagccatatgccctcatcatcccaggggagaactacattgggataaatgtgaagaaggcttttaaggt

SEQ ID NO: 23221 - DNA, 150 bp, Homo sapiens
  MAP TO CHR16.3; EXPRESSED IN LUNG, SIGNAL = 0.65; EXPRESSED IN BRAIN, SIGNAL = 0.73; EXPRESSED IN BONE MARROW, SIGNAL = 0.74; NT HIT: gi14779893, EVALUE 2.00e-71; SWISSPROT HIT: Q92901, EVALUE 2.00e-13; EST_HUMAN HIT: AI124720.1, EVALUE 1.20e-02
tggctcaggcacaagagcaagaagaaagccttcaccaaggcctgcaagaggtggcgggacacagacgggaaaaagcagctacagaaggacttcgccgccatgaagaagtactgcaaggtcattcgggtcattgtccacactcaggtcagc

SEQ ID NO: 23222 - DNA, 148 bp, Homo sapiens
  MAP TO CHR2.3; EXPRESSED IN HELA, SIGNAL = 2.1; EXPRESSED IN BONE MARROW, SIGNAL = 1.5; EXPRESSED IN LUNG, SIGNAL = 1.7; EXPRESSED IN ADULT LIVER, SIGNAL = 1.1; SWISSPROT HIT: Q9CG48, EVALUE 2.60e+00; NT HIT: gi4507702, EVALUE 2.00e-74; EST_HUMAN HIT: AA447238.1, EVALUE 3.00e-74
tcactgatgtcatcgtcgtctaccaagtggccgaagggctccgacgagatggacaccatgttggaaaggatgactctgctgtcactgctgcccgtgaggaccagctggtcatgagagtggttgtagcggacgttccacaccctgcaaa

SEQ ID NO: 23223 - DNA, 158 bp, Homo sapiens
  MAP TO CHR2.3; EXPRESSED IN BONE MARROW, SIGNAL = 1.7; EXPRESSED IN HEART, SIGNAL = 1.6; EXPRESSED IN FETAL LIVER, SIGNAL = 1.1; EXPRESSED IN ADULT LIVER, SIGNAL = 1.5; EXPRESSED IN BRAIN, SIGNAL = 1.6; EST_HUMAN HIT: BG013572.1, EVALUE 2.00e-69; SWISSPROT HIT: P13002, EVALUE 2.00e-05; NT HIT: gi14726915, EVALUE 1.00e-82
accttgaacaccttgatctggcagctggctgagtgcaggtgctccgtgtactccccattctcgttctgcttaaacgtgtcaatctggactcgaaagggcactcccttctcgcccccgtgcttcctgggggtgaattctgtgctgatgcagtgtacctg

SEQ ID NO: 23224 - DNA, 394 bp, Homo sapiens
  MAP TO CHR4.3; EXPRESSED IN HELA, SIGNAL =  11; EXPRESSED IN BONE MARROW, SIGNAL =  13; EXPRESSED IN BRAIN, SIGNAL =  19; EXPRESSED IN ADULT LIVER, SIGNAL =  19; EXPRESSED IN PLACENTA, SIGNAL =  11; NT HIT: gi14722882, EVALUE 0.00e+00; SWISSPROT HIT: P25763, EVALUE 2.00e-56; EST_HUMAN HIT: BG400449.1, EVALUE 0.00e+00
ggtctctccatcttcatttgaaaatgtgaaagaaaagtgggtgcctgagataactcaccactgtccaaagactccttttttgcttgttgggactcaaattgatctcagagatgacccctctactattgagaaacctgccaagaacaaacagaagcctatcactccagagactgctgaaaagctggcccgtgacctgaaggctgtcaagtatgtggagtgttctgcacttacaaagaaaggcctaaagaatgtatttgacgaagcaatattggctgccctggagcctccagaaccgaaaaagagccgcaggtgtgtgctgctatgaacatctctccagagccctttctgcacagctggtgtcggcatcatactaaaagcaatgtttaaatcaaac

SEQ ID NO: 23225 - DNA, 190 bp, Homo sapiens
  MAP TO CHR2.3; EXPRESSED IN BONE MARROW, SIGNAL = 0.92; EXPRESSED IN PLACENTA, SIGNAL = 1.1; EXPRESSED IN LUNG, SIGNAL =   1; EXPRESSED IN HEART, SIGNAL = 0.66; NT HIT: gi14781420, EVALUE 5.00e-94; SWISSPROT HIT: Q15633, EVALUE 1.00e-13; EST_HUMAN HIT: BI562574.1, EVALUE 3.00e-99
atacagacctgtgcaggttatgtcaccaacggttactctgaaggtgaaagtgggcacgtgtatttgcacatcagatctttcacattcataaactgggatgttcttggtcttcatgccgtattcgtgtaatacctgaatcggtgttttccctggcttagctgttatcatcttccccaaactgcaaaaacca

SEQ ID NO: 23226 - DNA, 142 bp, Homo sapiens
  MAP TO CHR6.3; EXPRESSED IN FETAL LIVER, SIGNAL = 0.92; EXPRESSED IN ADULT LIVER, SIGNAL = 1.2; EXPRESSED IN BRAIN, SIGNAL = 0.89; EXPRESSED IN BONE MARROW, SIGNAL = 0.77; EXPRESSED IN PLACENTA, SIGNAL = 1.1; NT HIT: D28769.1, EVALUE 2.00e-74; SWISSPROT HIT: Q15109, EVALUE 3.00e-11; EST_HUMAN HIT: W79547.1, EVALUE 6.00e-57
ctgatgctgacagcacggctttcctggggcccgtggctggaatgggtggccacacagctgtaggttccctggtcctgaggccctatctcagggaggatcagcacagggctggggggaaggggcaagggcacaccctggtggg

SEQ ID NO: 23227 - DNA, 202 bp, Homo sapiens
  MAP TO CHR5.3; EXPRESSED IN BONE MARROW, SIGNAL = 0.98; EXPRESSED IN LUNG, SIGNAL = 0.78; EXPRESSED IN HEART, SIGNAL = 0.7; EST_HUMAN HIT: H99382.1, EVALUE 1.00e-108; SWISSPROT HIT: P20585, EVALUE 5.00e-33; NT HIT: D61398.1, EVALUE 1.00e-110
aagagccaaagaaatgtctgaggaccaggaatgtttcaaagtctctggaaaaattgaaagaattctgctgcgattctgcccttcctcaaagtagagtccagacagaatctctgcaggagagatttgcagttctgccaaaatgtactgattttgatgatatcagtcttctacacgcaaagaatgcagtttcttctgaagattc

SEQ ID NO: 23228 - DNA, 110 bp, Homo sapiens
  MAP TO CHR16.3; EXPRESSED IN BONE MARROW, SIGNAL =   2; EXPRESSED IN ADULT LIVER, SIGNAL = 5.1; NT HIT: L48546.1, EVALUE 2.00e-55; EST_HUMAN HIT: BI060178.1, EVALUE 1.00e-48; SWISSPROT HIT: Q61037, EVALUE 1.00e-14
tccctacccgctggcggagccgcttgatgtggcggagccgggcaatccacttggaggggtagatatcggtggggttggagcggctatgatgcacctgtgaggccatctgg

SEQ ID NO: 23229 - DNA, 118 bp, Homo sapiens
  MAP TO CHR19.3; EXPRESSED IN BRAIN, SIGNAL = 1.3; EXPRESSED IN FETAL LIVER, SIGNAL = 1.8; EXPRESSED IN ADULT LIVER, SIGNAL = 2.5; EXPRESSED IN BONE MARROW, SIGNAL = 1.1; EXPRESSED IN HEART, SIGNAL = 1.2; EXPRESSED IN LUNG, SIGNAL = 1.6; NT HIT: AF044968.1, EVALUE 3.00e-60; SWISSPROT HIT: Q92692, EVALUE 3.00e-16; EST_HUMAN HIT: BE938104.1, EVALUE 5.00e-60
gaggaggaagagtatctggacaagatcaaccccatctatgatgctctgtcctatagcagcccctctgattcctaccagggcaaaggctttgtcatgtcccgggccatgtatgtgtgag

SEQ ID NO: 23230 - DNA, 125 bp, Homo sapiens
  MAP TO CHR1.3; EXPRESSED IN HEART, SIGNAL = 3.2; EXPRESSED IN ADULT LIVER, SIGNAL = 3.5; EXPRESSED IN BRAIN, SIGNAL = 2.4; EXPRESSED IN HELA, SIGNAL = 2.2; EXPRESSED IN BONE MARROW, SIGNAL = 2.4; NT HIT: gi14720270, EVALUE 2.00e-64; SWISSPROT HIT: Q60529, EVALUE 4.00e-09; EST_HUMAN HIT: AL037736.1, EVALUE 3.00e-64
ttgctggtgtgaaatgactgagtacaaactggtggtggttggagcaggtggtgttgggaaaagcgcactgacaatccagctaatccagaaccactttgtagatgaatatgatcccaccatagagg

SEQ ID NO: 23231 - DNA, 136 bp, Homo sapiens
  MAP TO CHR17.3; EXPRESSED IN BONE MARROW, SIGNAL = 2.9; EXPRESSED IN BRAIN, SIGNAL =   4; EXPRESSED IN FETAL LIVER, SIGNAL = 1.8; EXPRESSED IN PLACENTA, SIGNAL = 2.5; EXPRESSED IN LUNG, SIGNAL = 2.6; NT HIT: gi9256522, EVALUE 3.00e-70; SWISSPROT HIT: O43497, EVALUE 7.00e-18; EST_HUMAN HIT: BI917129.1, EVALUE 4.00e-70
ccaggtggaaccagctggacctggccattgtgctgctgtccatcatgggcatcacgctggaggaaatcgaggtcaacgcctcgctgcccatcaaccccaccatcatccgcatcatgagggtgctgcgcattgcccg

SEQ ID NO: 23232 - DNA, 133 bp, Homo sapiens
  MAP TO CHR19.3; EXPRESSED IN BONE MARROW, SIGNAL = 1.1; EXPRESSED IN PLACENTA, SIGNAL = 1.5; EXPRESSED IN FETAL LIVER, SIGNAL = 1.3; EXPRESSED IN BRAIN, SIGNAL = 1.4; NT HIT: gi16176192, EVALUE 4.00e-69; SWISSPROT HIT: P15621, EVALUE 5.00e-22; EST_HUMAN HIT: AW795413.1, EVALUE 1.00e-66
gctttcccacactgtttacatgtatagggtttctctccagtgtgaattctttcatgtactcgaagggaaccggaaacactgaaggctttcccacattgtttacatttgtagggtttctctccagtgtgagttc

SEQ ID NO: 23233 - DNA, 186 bp, Homo sapiens
  MAP TO CHR9.3; EXPRESSED IN LUNG, SIGNAL = 1.3; EXPRESSED IN BONE MARROW, SIGNAL = 1.4; EXPRESSED IN HEART, SIGNAL = 1.5; EXPRESSED IN PLACENTA, SIGNAL = 1.8; EXPRESSED IN ADULT LIVER, SIGNAL = 1.3; EXPRESSED IN BRAIN, SIGNAL = 1.1; SWISSPROT HIT: P38571, EVALUE 1.50e+00; NT HIT: M17310.1, EVALUE 1.00e-100; EST_HUMAN HIT: H81820.1, EVALUE 5.00e-95
tcttgaaccctcttctggaaaggggtacctattattactttatggggcagcagcctggaaaagtacttggggaccaaagaaggccaagcttgcctgccctgcattttatcaaaggagcagggaagaaggaatcatcgaggcatgggggtccacactgcaatgtttttgtggaacatggtgagtgct

SEQ ID NO: 23234 - DNA, 159 bp, Homo sapiens
  MAP TO CHR12.3; EXPRESSED IN HEART, SIGNAL = 0.85; EXPRESSED IN ADULT LIVER, SIGNAL = 0.61; EXPRESSED IN BRAIN, SIGNAL = 0.8; EXPRESSED IN FETAL LIVER, SIGNAL = 0.81; EXPRESSED IN BONE MARROW, SIGNAL = 0.73; EST_HUMAN HIT: BG254747.1, EVALUE 3.00e-77; SWISSPROT HIT: P50542, EVALUE 2.00e-23; NT HIT: gi15301891, EVALUE 2.00e-77
cttgtaggggtaccagtttgaggaggagaaccccttgcgtgatcaccctcagccttttgaagaagggctgcggcgccttcaggagggggacctgccaaatgctgtgctgctttttgaggcagctgtgcagcaggatcctaagcacatggaagtgagtga

SEQ ID NO: 23235 - DNA, 277 bp, Homo sapiens
  MAP TO CHR3.3; EXPRESSED IN BRAIN, SIGNAL = 2.3; EXPRESSED IN BONE MARROW, SIGNAL = 1.9; EXPRESSED IN PLACENTA, SIGNAL = 1.5; EXPRESSED IN HEART, SIGNAL = 2.5; EXPRESSED IN FETAL LIVER, SIGNAL = 1.4; EXPRESSED IN ADULT LIVER, SIGNAL = 2.2; NT HIT: AF242198.1, EVALUE 0.00e+00; EST_HUMAN HIT: BF726104.1, EVALUE 0.00e+00; SWISSPROT HIT: P22914, EVALUE 2.00e-50
actccacaatgcggcggaaagactggacagctggggaggctgcaccccaatcgatgggcttccggtactccttcttgtccaggaggtactgcctgccacggtagttgggtagctcatagaaaatccagacaccctccagcaccttacaggagtggatctctcgcatgtgaaattgctccatgatggaagggcaatcttcggtggtttcatacatctgaccactaaaatcccctttctcaaagatctgaatcttatactggcctccactaggctgaaa

SEQ ID NO: 23236 - DNA, 110 bp, Homo sapiens
  MAP TO CHR2.3; EXPRESSED IN LUNG, SIGNAL =   4; EXPRESSED IN HEART, SIGNAL = 1.4; EXPRESSED IN BONE MARROW, SIGNAL = 1.8; EXPRESSED IN BRAIN, SIGNAL =   1; NT HIT: AF128179.1, EVALUE 2.00e-55; EST_HUMAN HIT: AL532065.1, EVALUE 1.00e-51; SWISSPROT HIT: P30754, EVALUE 3.60e-02
ccaggaccccaaggagagaagggcagcaaaggcgatgggggtctcattggcccaaaaggggaaactggaactaagggagagaaaggagacctgggtctcccaggtgaggg

SEQ ID NO: 23237 - DNA, 305 bp, Homo sapiens
  MAP TO CHRX.3; EXPRESSED IN LUNG, SIGNAL = 2.4; EXPRESSED IN HEART, SIGNAL = 2.7; EXPRESSED IN HELA, SIGNAL =   2; EXPRESSED IN PLACENTA, SIGNAL = 2.3; EXPRESSED IN BONE MARROW, SIGNAL = 2.3; NT HIT: gi12743143, EVALUE 0.00e+00; SWISSPROT HIT: P04000, EVALUE 8.00e-55; EST_HUMAN HIT: W21958.1, EVALUE 5.00e-93
caggccccttcgaaggcccgaattaccacatcgctcccagatgggtgtaccacctcaccagtgtctggatgatctttgtggtcactgcatccgtcttcacaaatgggcttgtgctggcggccaccatgaagttcaagaagctgcgccacccgctgaactggatcctggtgaacctggcggtcgctgacctagcagagaccgtcatcgccagcactatcagcattgtgaaccaggtctctggctacttcgtgctgggccaccctatgtgtgtcctggagggctacaccgtctccctgtgtggtaag

SEQ ID NO: 23238 - DNA, 123 bp, Homo sapiens
  MAP TO CHR16.3; EXPRESSED IN BONE MARROW, SIGNAL = 0.77; EXPRESSED IN PLACENTA, SIGNAL = 0.54; EXPRESSED IN LUNG, SIGNAL = 0.56; EXPRESSED IN HEART, SIGNAL = 0.8; EXPRESSED IN BRAIN, SIGNAL = 0.52; NT HIT: AF058301.1, EVALUE 6.00e-34; SWISSPROT HIT: Q9Y6M0, EVALUE 8.00e-17; EST_HUMAN HIT: AW243584.1, EVALUE 5.00e-63
cagggtgactcaggtggacccttggtctgtgacaaggatggactgtggtatcaggttggaatcgtgagctggggaatggactgcggtcaacccaatcggcctggtgtctacaccaacatcagt

SEQ ID NO: 23239 - DNA, 153 bp, Homo sapiens
  MAP TO CHR19.3; EXPRESSED IN LUNG, SIGNAL = 1.2; EXPRESSED IN HEART, SIGNAL = 1.5; EXPRESSED IN BONE MARROW, SIGNAL = 1.3; EXPRESSED IN FETAL LIVER, SIGNAL = 1.5; EXPRESSED IN BRAIN, SIGNAL = 2.2; SWISSPROT HIT: P17017, EVALUE 5.00e-20; EST_HUMAN HIT: AV726241.1, EVALUE 8.00e-81; NT HIT: gi11139306, EVALUE 6.00e-81
aaggctttcccacactgtttacattcatagggtttctctgcattgtgagtcctttcatgtctttgaagggaacttgaaaaactgaaggttttaccacattgtttacattcatagggtttctctccagtgtgagttgtttcgtgttctcgaagg

SEQ ID NO: 23240 - DNA, 457 bp, Homo sapiens
  MAP TO CHR1.3; EXPRESSED IN ADULT LIVER, SIGNAL = 0.61; EXPRESSED IN PLACENTA, SIGNAL = 0.58; EXPRESSED IN LUNG, SIGNAL = 0.99; EXPRESSED IN BONE MARROW, SIGNAL = 1.1; NT HIT: gi14670380, EVALUE 0.00e+00; EST_HUMAN HIT: AU131206.1, EVALUE 0.00e+00; SWISSPROT HIT: P49454, EVALUE 3.00e-60
gaaactgaaagaacgcgagcgggagaatgattcacttaaggataaagttgagaaccttgaaagggaattgcagatgtcagaagaaaaccaggagctagtgattcttgatgccgagaattccaaagcagaagtagagactctaaaaacacaaatagaagagatggccagaagcctgaaagtttttgaattagaccttgtcacgttaaggtctgaaaaagaaaatctgacaaaacaaatacaagaaaaacaaggtcagttgtcagaactagacaagttactctcttcatttaaaagtctgttagaagaaaaggagcaagcagagatacagatcaaagaagaatctaaaactgcagtggagatgcttcagaatcagttaaaggagctaaatgaggcagtagcagccttgtgtggtgaccaagaaattatgaaggccacagaacagagtctagacccacca

SEQ ID NO: 23241 - DNA, 178 bp, Homo sapiens
  MAP TO CHR3.3; EXPRESSED IN ADULT LIVER, SIGNAL = 5.9; EXPRESSED IN LUNG, SIGNAL = 3.9; EXPRESSED IN HELA, SIGNAL = 2.1; EXPRESSED IN PLACENTA, SIGNAL = 4.6; EXPRESSED IN BONE MARROW, SIGNAL = 6.4; EXPRESSED IN BRAIN, SIGNAL = 5.2; NT HIT: L36149.1, EVALUE 8.00e-96; SWISSPROT HIT: P46094, EVALUE 1.00e-20; EST_HUMAN HIT: AI188244.1, EVALUE 4.00e-03
gtgaagttgtagggaccccagctgaggaagtaggccaccacgatggcgaagatgagcttgaccgtgcggtggcgccgcttggagcgtgagcggaacagggtcctgaggatctccacgtagcagaacaggataatccccagggacagcaggaagaagaggttgtgctggtagacggagg

SEQ ID NO: 23242 - DNA, 183 bp, Homo sapiens
  MAP TO CHR12.3; EXPRESSED IN BONE MARROW, SIGNAL = 5.3; EXPRESSED IN HELA, SIGNAL = 4.2; EXPRESSED IN HEART, SIGNAL = 3.7; EXPRESSED IN FETAL LIVER, SIGNAL = 5.6; EXPRESSED IN ADULT LIVER, SIGNAL = 3.1; NT HIT: gi14784284, EVALUE 9.00e-99; SWISSPROT HIT: Q14839, EVALUE 1.00e-28; EST_HUMAN HIT: BE560078.1, EVALUE 1.00e-98
ttcatccttgaatagttcctcagtgccaaatttgaggatatcatcaagctcctgtttggacatagatccagtcttggagcccagcccaggccgcaccactagatgcgtcagcatcattttcttctttgccacctgcgtgatgcgctcctccactgacgcacgggtcacaaaccggtagatcat

SEQ ID NO: 23243 - DNA, 120 bp, Homo sapiens
  MAP TO CHR21.3; EXPRESSED IN BONE MARROW, SIGNAL = 0.81; EXPRESSED IN BRAIN, SIGNAL = 0.68; NT HIT: U25656.1, EVALUE 2.00e-61; SWISSPROT HIT: Q07654, EVALUE 7.00e-20; EST_HUMAN HIT: AI459674.1, EVALUE 2.00e-56
ggccttacctgcttcctgcaggggcttgaaacaccaaggcactccagggatcctggagtcaaagcagcagccccggttgttgcactccttgggggtgacatgggggtagccgcagtccac

SEQ ID NO: 23244 - DNA, 302 bp, Homo sapiens
  MAP TO CHR19.3; EXPRESSED IN BONE MARROW, SIGNAL = 1.6; EXPRESSED IN ADULT LIVER, SIGNAL = 1.6; EXPRESSED IN BRAIN, SIGNAL = 1.4; EXPRESSED IN PLACENTA, SIGNAL =   1; SWISSPROT HIT: P28698, EVALUE 5.00e-35; EST_HUMAN HIT: BG748470.1, EVALUE 0.00e+00; NT HIT: gi14755571, EVALUE 0.00e+00
gaccacccttgaggagcctgagactgcccgcctccgcttccgagggttctgctaccaggaggtggcaggtccccgagaagccctggcccggctgcgtgagctgtgttgccagtggctgcagcctgaggcacactccaaggagcagatgctggagatgctggtgctggagcagttcctgggcacactgcctcccgagatccaggcctgggtgcgcggtcagcggccaggcagtcctgaggaggccgctgccctagtcgaaggactgcagcatgaccctgggcaactgttgggctgggtgagtg

SEQ ID NO: 23245 - DNA, 152 bp, Homo sapiens
  MAP TO CHR1.3; EXPRESSED IN BRAIN, SIGNAL = 4.8; EXPRESSED IN HELA, SIGNAL = 2.6; EXPRESSED IN BONE MARROW, SIGNAL = 3.2; EXPRESSED IN PLACENTA, SIGNAL = 2.5; EXPRESSED IN HEART, SIGNAL = 3.8; NT HIT: gi11968006, EVALUE 3.00e-33; EST_HUMAN HIT: AW752559.1, EVALUE 2.00e-35; SWISSPROT HIT: P52945, EVALUE 1.00e+01
tcactgaagtactgtttgaaggactctctgatctgtcttcactgactaagataatctcaaagttctggcctgcctccttgatcttctaataagattccaccaggacctgggtgaggctttggcaggatgaacacccatgtgcagagaaatag

SEQ ID NO: 23246 - DNA, 130 bp, Homo sapiens
  MAP TO CHR19.3; EXPRESSED IN FETAL LIVER, SIGNAL = 1.4; EXPRESSED IN ADULT LIVER, SIGNAL = 2.6; EXPRESSED IN HEART, SIGNAL = 2.6; EXPRESSED IN BONE MARROW, SIGNAL = 2.4; EXPRESSED IN HELA, SIGNAL = 3.3; EXPRESSED IN PLACENTA, SIGNAL = 2.3; EXPRESSED IN BRAIN, SIGNAL = 3.1; NT HIT: gi14766934, EVALUE 3.00e-67; EST_HUMAN HIT: AW955353.1, EVALUE 1.00e-66; SWISSPROT HIT: P34580, EVALUE 1.00e-09
cagacatggtggcccaggcgctggagctctctcggaaaccacacgtggtcatcgccacgccggggcgcctggcagatcacctgcgcagctccaacacttttagtataaagaagatccgcttcctggtgag

SEQ ID NO: 23247 - DNA, 246 bp, Homo sapiens
  MAP TO CHR8.3; EXPRESSED IN BONE MARROW, SIGNAL = 2.2; EXPRESSED IN LUNG, SIGNAL = 6.6; EXPRESSED IN BRAIN, SIGNAL =  33; NT HIT: M63379.1, EVALUE 0.00e+00; SWISSPROT HIT: P10909, EVALUE 4.00e-40; EST_HUMAN HIT: AI242045.1, EVALUE 0.00e+00
ctcaccgtggtgacccgcagatagtactggtcttcgccttgcgtgaggtttgccagccgggacacccagttaaactgctcgttcagctgctccagcaaggaggaggtgttgagcatcttccactggtaggactttagcagctcgttgtatttcctggtcaacctctcagcgacctggagggattcgtcgagctcccgccgcagcttagcctgggaggggttgttggtggaacagtctgcccagaga

SEQ ID NO: 23248 - DNA, 402 bp, Homo sapiens
  MAP TO CHR3.3; EXPRESSED IN ADULT LIVER, SIGNAL = 2.5; EXPRESSED IN BONE MARROW, SIGNAL = 2.3; EXPRESSED IN PLACENTA, SIGNAL =   2; EXPRESSED IN LUNG, SIGNAL = 1.7; EXPRESSED IN FETAL LIVER, SIGNAL = 1.3; EXPRESSED IN BRAIN, SIGNAL = 2.8; NT HIT: U51241.1, EVALUE 0.00e+00; SWISSPROT HIT: P51677, EVALUE 3.00e-73; EST_HUMAN HIT: BG182330.1, EVALUE 0.00e+00
ctgtactccctggtgttcactgtgggcctcttgggcaatgtggtggtggtgatgatcctcataaaatacaggaggctccgaattatgaccaacatctacctgctcaacctggccatttcggacctgctcttcctcgtcacccttccattctggatccactatgtcagggggcataactgggtttttggccatggcatgtgtaagctcctctcagggttttatcacacaggcttgtacagcgagatctttttcataatcctgctgacaatcgacaggtacctggccattgtccatgctgtgtttgcccttcgagcccggactgtcacttttggtgtcatcaccagcatcgtcacctggggcctggcagtgctagcagctcttcctgaatttatcttctatgag

SEQ ID NO: 23249 - DNA, 154 bp, Homo sapiens
  MAP TO CHR1.3; EXPRESSED IN ADULT LIVER, SIGNAL = 2.6; EXPRESSED IN BRAIN, SIGNAL = 0.85; EXPRESSED IN LUNG, SIGNAL = 0.84; EXPRESSED IN BONE MARROW, SIGNAL = 1.1; EXPRESSED IN PLACENTA, SIGNAL = 0.89; SWISSPROT HIT: Q92618, EVALUE 3.40e+00; EST_HUMAN HIT: BE791713.1, EVALUE 8.00e-78; NT HIT: gi13899328, EVALUE 9.00e-77
gcctacctggaaggccggctgcccgatgcctgagaacactgtggtcagccccttgctctggggcgtcggcttcaggctcttgcctgccttaatctcagccagtagctccgagttgtcgcccgtcggggacatcatgttgaaagacttggtgcct

SEQ ID NO: 23250 - DNA, 310 bp, Homo sapiens
  MAP TO CHR2.3; EXPRESSED IN BONE MARROW, SIGNAL = 1.1; EXPRESSED IN FETAL LIVER, SIGNAL =   1; EXPRESSED IN ADULT LIVER, SIGNAL = 1.4; EXPRESSED IN BRAIN, SIGNAL = 0.99; SWISSPROT HIT: P24341, EVALUE 4.00e-49; EST_HUMAN HIT: AW243295.1, EVALUE 1.00e-121; NT HIT: gi4504470, EVALUE 0.00e+00
cttctccctttaattttgttagaggaaatcaagtctgatacaccaaccagcaattggctcactgcaaagagtggcagaaagaagaggtgcccttacactaagcaccaaacgctggaattagaaaaagagttcttgttcaatatgtacctcacccgcgagcgccgcctagagatcagtaagagcgttaacctcaccgacaggcaggtcaagatttggtttcaaaaccgccgaatgaaactcaagaagatgagccgagagaaccggatccgagaactgaccgccaacctcacgttttcttaggtctgaggcc

SEQ ID NO: 23251 - DNA, 282 bp, Homo sapiens
  MAP TO CHR17.3; EXPRESSED IN BONE MARROW, SIGNAL = 1.1; EXPRESSED IN HEART, SIGNAL = 0.64; EXPRESSED IN ADULT LIVER, SIGNAL = 0.68; SWISSPROT HIT: P08111, EVALUE 1.00e-07; EST_HUMAN HIT: BG032503.1, EVALUE 0.00e+00; NT HIT: gi14775763, EVALUE 0.00e+00
gctcaccttgaactgctcctcagatgcgatgagcacagcgtgaccaccctgcatgtcaggtgcctgcgccaggtcccgtgaggcctcgtagggctcgggcagtgggcggccacgccgccaacacggcaatggcaccacaggcgcccggtgcatcagctgcacctccttgcccagcacggcctccaccgcttgctcaggccgcttctcaccacccactgctgctgccggcacctccagtgcataggcgaacacagagcctgagttggtgccagcccacatggt

SEQ ID NO: 23252 - DNA, 216 bp, Homo sapiens
  MAP TO CHR3.3; EXPRESSED IN PLACENTA, SIGNAL = 5.3; EXPRESSED IN BONE MARROW, SIGNAL = 5.7; EXPRESSED IN LUNG, SIGNAL = 5.2; EXPRESSED IN HEART, SIGNAL = 6.4; EXPRESSED IN FETAL LIVER, SIGNAL = 2.7; EXPRESSED IN BRAIN, SIGNAL = 8.2; EXPRESSED IN HELA, SIGNAL =   9; NT HIT: AF009963.1, EVALUE 1.00e-109; EST_HUMAN HIT: BE612639.1, EVALUE 7.20e-02; SWISSPROT HIT: P17059, EVALUE 9.90e-01
aagcgcacgccgagaggaggtgtgggtgttccgcttccatcctaacggaacgagctccctcttcgcggacatgggattacccagcggctgctaacccctctcctcgccctgctcccccaaaccggcgtggctccccgggcaccaaggtagcggctggggccgggcagagggcgcggggagttggcactggctccccgggcgcagaagtttttgccc

SEQ ID NO: 23253 - DNA, 118 bp, Homo sapiens
  MAP TO CHR19.3; EXPRESSED IN HEART, SIGNAL = 2.1; EXPRESSED IN PLACENTA, SIGNAL = 1.7; EXPRESSED IN BRAIN, SIGNAL = 1.7; EXPRESSED IN BONE MARROW, SIGNAL = 1.8; NT HIT: gi14767272, EVALUE 3.00e-54; EST_HUMAN HIT: AW629730.1, EVALUE 4.00e-54; SWISSPROT HIT: O00322, EVALUE 1.00e-14
acctcaatcatgacgcggtcccagaggcgggtcagctcctggccctggtcggtgtccgcgctgtagaaggtcagcatctgcttggtgatcagggatgggttggacaccatctgaggag

SEQ ID NO: 23254 - DNA, 399 bp, Homo sapiens
  MAP TO CHR16.3; EXPRESSED IN BONE MARROW, SIGNAL = 1.6; EXPRESSED IN LUNG, SIGNAL = 0.96; EXPRESSED IN HEART, SIGNAL =   1; EXPRESSED IN ADULT LIVER, SIGNAL = 1.1; EXPRESSED IN BRAIN, SIGNAL = 1.6; SWISSPROT HIT: P26258, EVALUE 2.00e-52; NT HIT: AF077345.1, EVALUE 0.00e+00; EST_HUMAN HIT: AA399390.1, EVALUE 0.00e+00
gggatggtgaactcgcatatgtatctcttgctgctgcgacaggcctcatcactccacttgccctgagctgattgggagaacaggacacagttttctcgcttgccaccgttaggctgtgcacggtcccagttgaggaaggagatagcgattccgttgacgtcaacaaacttgccttccgtgaccatgtcattgatgcccagccaaaagtcattgacacctggcaggctccttttaccatagtcttggagggcgttgatttcgtcggagttcctggggataaccaggattcctcctttggaaatgcagtcttcattggcctcatggaaatgcttcaaaccttctgaagcaaggtagcatttcttgtgaactttagtgcctcggagacagactgtgaagatg

SEQ ID NO: 23255 - DNA, 225 bp, Homo sapiens
  MAP TO CHR13.3; EXPRESSED IN BONE MARROW, SIGNAL = 0.66; EXPRESSED IN HEART, SIGNAL = 0.75; EST_HUMAN HIT: AL042714.2, EVALUE 1.00e-123; SWISSPROT HIT: Q92598, EVALUE 2.00e-36; NT HIT: gi5729878, EVALUE 1.00e-124
aggtcacaatttgaagaactctgtgctgaacttctgcaaaagatagaagtacccctttattcactgttggaacaaactcatctcaaagtagaagatgtgagtgcagttgagattgttggaggcgctacacgaattccagctgtgaaggaaagaattgccaaattctttggaaaagatattagcacaacactcaatgcagatgaagcagtagccagaggatgtgca

SEQ ID NO: 23256 - DNA, 306 bp, Homo sapiens
  MAP TO CHR6.3; EXPRESSED IN PLACENTA, SIGNAL = 0.81; EXPRESSED IN HEART, SIGNAL = 0.82; EXPRESSED IN BRAIN, SIGNAL = 0.81; EXPRESSED IN ADULT LIVER, SIGNAL = 0.88; EXPRESSED IN BONE MARROW, SIGNAL = 1.1; NT HIT: X02882.1, EVALUE 0.00e+00; EST_HUMAN HIT: BE706347.1, EVALUE 0.00e+00; SWISSPROT HIT: P06340, EVALUE 4.00e-54
agggggctccgtaccccaatgcctgaggagtggcgcatccaggccccagtgctccacctggcagtcatagacgtcctcggctgagggcacgaagggcaggtagtggaacttgcggaacaaatggtcaggctgggaatagaagctggtctgggccactccctcagtgacagtttggccgttgcgtagccaggtgatattgatcacaggggggaagatgttgtccacgatgcagatgaggatgttgggctggcccagctccacccgagacttggggagcacggtcacccgtggaggcactaggaggaa

SEQ ID NO: 23257 - DNA, 224 bp, Homo sapiens
  MAP TO CHR3.3; EXPRESSED IN BONE MARROW, SIGNAL = 0.92; EXPRESSED IN ADULT LIVER, SIGNAL = 3.7; NT HIT: X93499.1, EVALUE 1.00e-123; EST_HUMAN HIT: BE730315.1, EVALUE 1.00e-123; SWISSPROT HIT: P09527, EVALUE 8.00e-40
acttgtctgttttcgaggtcaatcttgtttcccaacacaacaaatgggaagttttcaggatctcggggactggcctggatgagaaactcatctctccagctatctagggttttgaatgtgttgggggcagtcacatcaaataccagaacgcagcagtctgcacctctgtagaaggccacaccgagagactggaaccgttcctgtcctgctgtgtcccatatctg

SEQ ID NO: 23258 - DNA, 178 bp, Homo sapiens
  MAP TO CHR22.3; EXPRESSED IN LUNG, SIGNAL = 2.2; EXPRESSED IN PLACENTA, SIGNAL = 1.5; EXPRESSED IN HEART, SIGNAL = 1.8; EXPRESSED IN BONE MARROW, SIGNAL = 1.5; EXPRESSED IN FETAL LIVER, SIGNAL = 2.3; NT HIT: gi14778502, EVALUE 2.00e-71; EST_HUMAN HIT: BF206189.1, EVALUE 4.00e-71; SWISSPROT HIT: P55673, EVALUE 2.50e+00
aggtgagctgtggttaccggctgtgtccccttgtcccctctcagtcctgggctgacgcgttccgcagctcgcccgatctgacaggtgtggtcaccatctatgaggacctgcggaggaaaggcctggagttccccatgactgacctggacatgctgtcacccatccacacaccccagag

SEQ ID NO: 23259 - DNA, 161 bp, Homo sapiens
  MAP TO CHR5.3; EXPRESSED IN HEART, SIGNAL = 3.5; EXPRESSED IN BRAIN, SIGNAL =   3; EXPRESSED IN FETAL LIVER, SIGNAL = 1.8; EXPRESSED IN BONE MARROW, SIGNAL = 1.9; EXPRESSED IN HELA, SIGNAL =   5; NT HIT: gi6006030, EVALUE 4.00e-76; EST_HUMAN HIT: BE819436.1, EVALUE 1.00e-82; SWISSPROT HIT: P34991, EVALUE 7.00e-22
tgtgtgctacctacctgggcttcctcctcttcagtaaagtcatttttgatattgaaggtcttgcgaatctcctcaggagttttccccttgatcatattggcaacagtcttgcatgtaacatcaagcaaacctttgatgtctaagtagtttgcagcctgtaa

SEQ ID NO: 23260 - DNA, 166 bp, Homo sapiens
  MAP TO CHR19.3; EXPRESSED IN LUNG, SIGNAL =   1; EXPRESSED IN HEART, SIGNAL = 0.94; EXPRESSED IN ADULT LIVER, SIGNAL = 0.8; EXPRESSED IN BRAIN, SIGNAL = 0.67; EXPRESSED IN BONE MARROW, SIGNAL = 1.1; SWISSPROT HIT: Q9Y6Q5, EVALUE 2.00e-24; NT HIT: gi15302008, EVALUE 6.00e-81; EST_HUMAN HIT: BE795828.1, EVALUE 9.00e-81
tgatcagccgcaactacaagggcgatgtggccatgagcaagattgagcacttcatgcctttgctggtacagcgggaggaggaaggcgccctggccccgctgctgagccacggccaggtccacttcctatggatcaaacacagcaacctctactgtatccaccccac

SEQ ID NO: 23261 - DNA, 189 bp, Homo sapiens
  MAP TO CHRX.3; EXPRESSED IN BONE MARROW, SIGNAL =   1; EXPRESSED IN FETAL LIVER, SIGNAL = 1.8; EXPRESSED IN LUNG, SIGNAL = 1.4; NT HIT: gi16162553, EVALUE 3.00e-95; SWISSPROT HIT: P97355, EVALUE 2.00e-20; EST_HUMAN HIT: BG177229.1, EVALUE 5.00e-95
tccagattaccacccatagtgcgaggaggagccatcgacagatactggcccaccgccgacgggcgcctggttgaatatgacatagatgaagtggtatatgacgaagattcaccttatcaaaatataaaaattctacactcgaagcagtttggaaatattctcatccttagtggggatgttagtaagtat

SEQ ID NO: 23262 - DNA, 134 bp, Homo sapiens
  MAP TO CHR19.3; EXPRESSED IN BONE MARROW, SIGNAL = 0.69; EXPRESSED IN ADULT LIVER, SIGNAL = 0.53; SWISSPROT HIT: P20151, EVALUE 5.00e-20; EST_HUMAN HIT: BE770990.1, EVALUE 2.00e-69; NT HIT: gi16175913, EVALUE 1.00e-69
atgctgccccagcctgaggcgtagcaggtggtccccagtgctggctcctgggtgggcaggcccaggaccttcacaacatctgtgatcttggcaggctctgacaggcggagcagcatgaggtcatggctggagtc

SEQ ID NO: 23263 - DNA, 415 bp, Homo sapiens
  MAP TO CHR6.3; EXPRESSED IN HELA, SIGNAL = 2.5; EXPRESSED IN BRAIN, SIGNAL = 0.89; EXPRESSED IN BONE MARROW, SIGNAL = 1.4; SWISSPROT HIT: P16106, EVALUE 3.00e-72; EST_HUMAN HIT: BG327264.1, EVALUE 0.00e+00; NT HIT: Z80785.1, EVALUE 0.00e+00
tacgctctctccccacgaatgcggcgagcgagctgaatgtccttgggcatgatagtcactcgcttagcatggatggcacacaggttggtatcctcaaagagccccaccaagtaggcctcgcaggcctcctgcagggccatcaccgcggaactctgaaagcgcagatctgtcttgaagtcctgagcgatttctcgcaccaggcgttggaaaggcaacttgcggatcagcagctcagtcgacttctgatagcggcgaatctcgcgcagagccacggtgccgggacggtagcgatgaggtttcttcacgccgccggtggccggcgcgcttttccgagccgccttagtggccagctgcttgcgcggcgctttgccaccggtggacttgcgtgcagtctgcttggtgcgggccatctcag

SEQ ID NO: 23264 - DNA, 157 bp, Homo sapiens
  MAP TO CHR10.3; EXPRESSED IN BONE MARROW, SIGNAL = 0.92; EXPRESSED IN LUNG, SIGNAL = 1.1; EXPRESSED IN HEART, SIGNAL = 0.82; EXPRESSED IN BRAIN, SIGNAL = 0.88; NT HIT: AF261914.1, EVALUE 2.00e-83; SWISSPROT HIT: Q9NR30, EVALUE 4.00e-18; EST_HUMAN HIT: BI252146.1, EVALUE 1.00e-82
acaggcttttggattccgtgcctcccactgccattagtcacttcaaacaatcagctgagaagctgatagaggagaagggagctgtggaagctctggcagcagcactggcccatatttcaggtgccacgtccgtagaccagcgctccttgatcaactc

SEQ ID NO: 23265 - DNA, 225 bp, Homo sapiens
  MAP TO CHR12.3; EXPRESSED IN LUNG, SIGNAL = 1.4; EXPRESSED IN BONE MARROW, SIGNAL = 2.4; EXPRESSED IN HEART, SIGNAL = 3.1; EXPRESSED IN FETAL LIVER, SIGNAL = 1.7; EXPRESSED IN ADULT LIVER, SIGNAL = 2.3; EXPRESSED IN BRAIN, SIGNAL = 2.2; NT HIT: gi4505254, EVALUE 1.00e-124; SWISSPROT HIT: P11161, EVALUE 2.90e-01
tcacctcacagtatttacatatgatacaggacgggatggttccaggggctcggcctggcctccccgcagccctgccctcctctccagggctggagggaggcggccaggggcccacacccagatagacactttgttctcagctggtggggggcacctggccccttgccccctgcggcctggggcttcacattcacaaacctagaaatagtttaaaaaaggtttctt

SEQ ID NO: 23266 - DNA, 130 bp, Homo sapiens
  MAP TO CHR21.3; EXPRESSED IN BONE MARROW, SIGNAL = 1.6; EXPRESSED IN HELA, SIGNAL = 3.4; EXPRESSED IN FETAL LIVER, SIGNAL = 4.3; NT HIT: U53007.1, EVALUE 3.00e-67; EST_HUMAN HIT: BG747409.1, EVALUE 4.00e-67; SWISSPROT HIT: P30042, EVALUE 6.00e-19
cacgaagctcacgtggaccagaaaaacaaggtggtcacgaccccagccttcatgtgcgagacggcactccactacatccatgatgggatcggagccatggtgaggaaggtgctggaactcactggaaagt

SEQ ID NO: 23267 - DNA, 166 bp, Homo sapiens
  MAP TO CHR2.3; EXPRESSED IN FETAL LIVER, SIGNAL =   1; EXPRESSED IN ADULT LIVER, SIGNAL = 1.8; EXPRESSED IN HELA, SIGNAL = 2.7; EXPRESSED IN BONE MARROW, SIGNAL = 1.5; EXPRESSED IN PLACENTA, SIGNAL = 1.2; NT HIT: gi15296129, EVALUE 2.00e-84; EST_HUMAN HIT: AW005794.1, EVALUE 2.00e-84; SWISSPROT HIT: Q9NSD9, EVALUE 8.00e-27
tcttaccttctgatgctttgatcacatatccccccttgtcttcaccaggaggcacatcgagcaactgcataattctgtccagcagcccatgaatgatctcaaacccaggattcttgttgtaataaacagcacagagatgtctgtagttttttgcacctacatctag

SEQ ID NO: 23268 - DNA, 132 bp, Homo sapiens
  MAP TO CHR12.3; EXPRESSED IN FETAL LIVER, SIGNAL =   3; EXPRESSED IN BONE MARROW, SIGNAL =   2; EXPRESSED IN HELA, SIGNAL = 5.8; NT HIT: AB055802.1, EVALUE 1.00e-63; EST_HUMAN HIT: BI769490.1, EVALUE 2.00e-65; SWISSPROT HIT: Q9WU28, EVALUE 3.00e-13
tctgtaggaagtggagttcttgtccacgtccattgctcagctcaaagtggtacagaccaagtatgtggaagccaaggactgtctgaacgtgctgaacaagagcaacgagggtatggggtaggcgggtgaggg

SEQ ID NO: 23269 - DNA, 120 bp, Homo sapiens
  MAP TO CHR2.3; EXPRESSED IN BONE MARROW, SIGNAL = 1.4; EXPRESSED IN FETAL LIVER, SIGNAL = 1.9; EXPRESSED IN BRAIN, SIGNAL = 1.2; EXPRESSED IN LUNG, SIGNAL = 1.9; EXPRESSED IN HEART, SIGNAL = 1.4; EXPRESSED IN PLACENTA, SIGNAL = 0.82; NT HIT: X16396.1, EVALUE 3.00e-54; EST_HUMAN HIT: BE777961.1, EVALUE 5.00e-54; SWISSPROT HIT: P13995, EVALUE 7.00e-14
ttgtttctatgtaggagtcagacaaaaagctgggtatatcactccagttcctggaggtgttggccccatgacagtggcaatgctaatgaagaataccattattgctgcaaaaaaggtgct

SEQ ID NO: 23270 - DNA, 129 bp, Homo sapiens
  MAP TO CHR1.3; EXPRESSED IN PLACENTA, SIGNAL =   3; EXPRESSED IN BONE MARROW, SIGNAL = 4.3; EXPRESSED IN LUNG, SIGNAL = 1.8; EXPRESSED IN HEART, SIGNAL = 3.7; EXPRESSED IN ADULT LIVER, SIGNAL = 3.5; EXPRESSED IN FETAL LIVER, SIGNAL = 4.2; NT HIT: gi4557608, EVALUE 6.00e-65; EST_HUMAN HIT: BI822807.1, EVALUE 9.00e-65; SWISSPROT HIT: O14764, EVALUE 2.00e-16
ccaccgacctgtaggagcccatcaggttccccgggacgcggcgctgccggcgggagatggccagctcctgcgtgacgccggcagcagagagggagaagaggacaatggcgttcctcacgtccatctgca

SEQ ID NO: 23271 - DNA, 245 bp, Homo sapiens
  MAP TO CHR17.3; EXPRESSED IN PLACENTA, SIGNAL = 1.2; EXPRESSED IN BONE MARROW, SIGNAL =   1; EXPRESSED IN LUNG, SIGNAL = 0.76; EXPRESSED IN BRAIN, SIGNAL = 0.98; EXPRESSED IN ADULT LIVER, SIGNAL = 0.99; NT HIT: gi7705900, EVALUE 0.00e+00; EST_HUMAN HIT: BF970086.1, EVALUE 5.10e+00; SWISSPROT HIT: Q9UKN7, EVALUE 2.00e-43
cactcacttgagaaggtacttgttgaagcacggggaaggtgcaaagccactgaggcaggcggccagcagcagccagccccgctcagcattgtgggcattgtgattgtgccacacctgattggccagctgtgccaggatctcatcccgcagctcaggcaccgccagccccttctgcacgatgtagttcccgaagatgttctcccgggcaccatgcaggtgggggtcgcccatgaagcgcaggatct

SEQ ID NO: 23272 - DNA, 160 bp, Homo sapiens
  MAP TO CHR17.3; EXPRESSED IN LUNG, SIGNAL = 1.3; EXPRESSED IN PLACENTA, SIGNAL = 1.3; EXPRESSED IN BONE MARROW, SIGNAL = 1.5; EXPRESSED IN ADULT LIVER, SIGNAL = 1.4; EXPRESSED IN BRAIN, SIGNAL = 1.1; SWISSPROT HIT: Q9UL17, EVALUE 7.00e-28; NT HIT: gi7019548, EVALUE 2.00e-83
acctggcatgctgccctcggcctttccacactgcacccacttgccgctctggtaccgccagtggtgctggtccaccaagaccacgtccacaaacatcctgtagtggctggtgggctccagcccggccacagtaaatgacaggaatgggaacatccgcctg

SEQ ID NO: 23273 - DNA, 183 bp, Homo sapiens
  MAP TO CHR17.3; EXPRESSED IN HELA, SIGNAL = 2.3; EXPRESSED IN BONE MARROW, SIGNAL = 2.2; EXPRESSED IN HEART, SIGNAL = 2.4; EXPRESSED IN ADULT LIVER, SIGNAL = 2.4; NT HIT: U29460.1, EVALUE 5.00e-97; SWISSPROT HIT: P49447, EVALUE 5.00e-28; EST_HUMAN HIT: BF304246.1, EVALUE 3.00e-90
cccatgggactcaccatttccctgcaggaagatcaggcctatgaccatgcagagggggtgcgcgttgaactgcaggtcgctctcccaggcaatgccgcctcggtacagcccgagccacgcgccggtcatggccaccaaggtcaggcccagcagctgggagaaggccacgtagtaaggcagtgc

SEQ ID NO: 23274 - DNA, 204 bp, Homo sapiens
  MAP TO CHR6.3; EXPRESSED IN ADULT LIVER, SIGNAL = 0.99; EXPRESSED IN LUNG, SIGNAL = 0.77; EXPRESSED IN BONE MARROW, SIGNAL =   1; EST_HUMAN HIT: AI041049.1, EVALUE 1.00e-111; NT HIT: AF260330.1, EVALUE 1.00e-111; SWISSPROT HIT: Q01755, EVALUE 1.00e-32
ctgggctggggaaatgagggtttttaggatctcagtgtagtagggaccaaacacctgctgattgtgatgtgtcaagttgacaaacttttggcccagttctgccagttctgcttcaatgagagtaaggcctccaggaaggtctaatagagaccgctgcacaccaagaaccaaacagcatttgagaaacaaatggatccgctgatc

SEQ ID NO: 23275 - DNA, 198 bp, Homo sapiens
  MAP TO CHR3.3; EXPRESSED IN HELA, SIGNAL = 4.2; EXPRESSED IN BONE MARROW, SIGNAL = 5.1; EXPRESSED IN PLACENTA, SIGNAL = 4.5; EXPRESSED IN LUNG, SIGNAL = 7.5; EXPRESSED IN BRAIN, SIGNAL = 7.5; EXPRESSED IN ADULT LIVER, SIGNAL = 3.6; EST_HUMAN HIT: T66938.1, EVALUE 5.00e-89; NT HIT: gi14737649, EVALUE 1.00e-102; SWISSPROT HIT: Q09695, EVALUE 2.00e-08
tttccagtatgcagaccctgtggctgacctcctagaacgctggggtgtgttccgggcccggctcttcagagaatcatgtgtttttcatcgtgggaatctacgtgaaggacctgagtcgccttgggggagctgagcaaagtgatcattgttgacaattcccctgcctcatacatcttccatcctgagaatgcagtaagt

SEQ ID NO: 23276 - DNA, 369 bp, Homo sapiens
  MAP TO CHR17.3; EXPRESSED IN LUNG, SIGNAL = 2.5; EXPRESSED IN HEART, SIGNAL = 3.3; EXPRESSED IN BONE MARROW, SIGNAL = 1.4; EXPRESSED IN ADULT LIVER, SIGNAL = 2.7; EXPRESSED IN PLACENTA, SIGNAL = 2.1; EST_HUMAN HIT: BI463857.1, EVALUE 0.00e+00; NT HIT: gi14774927, EVALUE 0.00e+00; SWISSPROT HIT: Q9UJP4, EVALUE 1.00e-13
acctgtcggccaactccagcacctcgtgcacgctgcccgtgctgacgcggatgcgcccggtgtacatgtactcgattacggcttccactgtgtcgggttcgggccccggctcggagctccacttgcgcatctccacccgtcccgagcgggactcggaaaactggcccgagagcaggggcgtgaagtactcggtggcggcagccagtaccgagcggtgggcccggaactcgcggcctccagccccgccgaagcacagggtaatgtcgcagaagaggccctggcgccgctgctcgttctgccgccaggacagctctgagcagtgagagctgcactcgaaatcctcggcttctgggcccggatcgcccccgc

SEQ ID NO: 23277 - DNA, 195 bp, Homo sapiens
  MAP TO CHR22.3; EXPRESSED IN ADULT LIVER, SIGNAL = 4.1; EXPRESSED IN BRAIN, SIGNAL = 5.3; EXPRESSED IN HELA, SIGNAL = 4.8; EXPRESSED IN PLACENTA, SIGNAL = 5.1; EXPRESSED IN BONE MARROW, SIGNAL = 5.1; EXPRESSED IN LUNG, SIGNAL = 4.4; EXPRESSED IN HEART, SIGNAL = 3.4; NT HIT: AF161466.1, EVALUE 1.00e-103; EST_HUMAN HIT: BF034715.1, EVALUE 1.00e-103; SWISSPROT HIT: P90838, EVALUE 7.00e-22
tacttggtaatcaacagcaatgaggggatggtgaggagggaaagcgcgggtggatcccttcctgtgtactaacagtgtccgttcctttccgtccaccacatgctgctccactttggcaatgttgtgagaaacatcatagatcacatgtaggtccaagtcatcaggggttgtgttgaagaccttggcgaaagccta

SEQ ID NO: 23278 - DNA, 124 bp, Homo sapiens
  MAP TO CHR17.3; EXPRESSED IN ADULT LIVER, SIGNAL = 2.2; EXPRESSED IN BRAIN, SIGNAL = 1.5; EXPRESSED IN BONE MARROW, SIGNAL = 2.1; EXPRESSED IN PLACENTA, SIGNAL = 1.6; SWISSPROT HIT: Q58166, EVALUE 5.30e-01; EST_HUMAN HIT: BG484866.1, EVALUE 2.00e-59; NT HIT: AB023654.1, EVALUE 1.00e-47
gacttacatggggaggcagatgcaggagcgcagagggcagtagcaatgaggatgacagcgagggctgccgcggagaccttcatggtacctgtgggagaggctgtgcgaggtccacgtgctgtct

SEQ ID NO: 23279 - DNA, 250 bp, Homo sapiens
  MAP TO CHR12.3; EXPRESSED IN HELA, SIGNAL = 2.3; EXPRESSED IN PLACENTA, SIGNAL = 3.9; EXPRESSED IN BONE MARROW, SIGNAL = 4.2; EXPRESSED IN LUNG, SIGNAL =   3; EXPRESSED IN ADULT LIVER, SIGNAL = 3.7; EXPRESSED IN FETAL LIVER, SIGNAL = 2.6; EXPRESSED IN BRAIN, SIGNAL = 3.6; EST_HUMAN HIT: BG744254.1, EVALUE 0.00e+00; NT HIT: L23813.1, EVALUE 0.00e+00; SWISSPROT HIT: P26010, EVALUE 5.00e-43
ctcacctggcagagtgcagcctgcagaatggcatcgaagccaccttcaggcgagtccagattgccggacacactctggcgccccacctcccgctcgaaggcttgtgcgtcccccgtcagggacagcacatggtgaaagctgaatggtgactggcagcgctccagccgggtggggcaggggtggcgcagtttggagggtactgtgctcacaaagggcagcaccgttttgtccacaaaggaaccaaaacctg

SEQ ID NO: 23280 - DNA, 128 bp, Homo sapiens
  MAP TO CHRY.3; EXPRESSED IN BONE MARROW, SIGNAL =   1; EXPRESSED IN ADULT LIVER, SIGNAL = 1.9; EST_HUMAN HIT: AL544018.1, EVALUE 1.00e-45; NT HIT: gi4503576, EVALUE 7.00e-46; SWISSPROT HIT: Q99814, EVALUE 2.00e-09
cctaccttccaggtggctgacttgaggttgacagtacggcctctgtctggtgaccgtgcacttcatcctcatgaagaagtcccgctctgtggacatgtctttgctttttttcccaaaaccagagcctg

SEQ ID NO: 23281 - DNA, 122 bp, Homo sapiens
  MAP TO CHR19.3; EXPRESSED IN PLACENTA, SIGNAL = 5.4; EXPRESSED IN BONE MARROW, SIGNAL = 3.7; EXPRESSED IN FETAL LIVER, SIGNAL = 5.6; EXPRESSED IN HELA, SIGNAL = 4.3; EXPRESSED IN HEART, SIGNAL = 6.9; EXPRESSED IN LUNG, SIGNAL = 6.3; EXPRESSED IN BRAIN, SIGNAL = 4.6; EXPRESSED IN ADULT LIVER, SIGNAL = 4.9; EST_HUMAN HIT: AW468183.1, EVALUE 2.00e-62; NT HIT: gi15303727, EVALUE 1.00e-62; SWISSPROT HIT: P10162, EVALUE 1.60e+00
gcagccagcttcatacactctcaaaaggccaggcctcacccggggagagggcgccagccaggtgagtggtccggggagaattcagctccacctcttcaccccaatcggacacaggctggtgg

SEQ ID NO: 23282 - DNA, 112 bp, Homo sapiens
  MAP TO CHR15.3; EXPRESSED IN BRAIN, SIGNAL = 0.98; EXPRESSED IN HELA, SIGNAL = 3.1; EXPRESSED IN BONE MARROW, SIGNAL = 0.9; EXPRESSED IN LUNG, SIGNAL = 1.2; EXPRESSED IN HEART, SIGNAL = 0.95; EST_HUMAN HIT: BG675714.1, EVALUE 2.00e-56; NT HIT: gi16160777, EVALUE 1.00e-56; SWISSPROT HIT: Q9TV36, EVALUE 1.00e-20
caacacactggttccactggtagtgctggaggtagccctgggggcagctgcacctgtagcccccaatgatgttctggcagccatgctggcagcggtggttaccctcacactc

SEQ ID NO: 23283 - DNA, 146 bp, Homo sapiens
  MAP TO CHR9.3; EXPRESSED IN BONE MARROW, SIGNAL =  10; EXPRESSED IN HEART, SIGNAL =  14; EXPRESSED IN PLACENTA, SIGNAL = 8.8; EST_HUMAN HIT: BG491632.1, EVALUE 4.00e-70; NT HIT: U14939.1, EVALUE 8.00e-77; SWISSPROT HIT: Q05932, EVALUE 3.00e-19
tggttgccaggatgccgtgcgcatgctcaataccctgcagaccaatgccggctacctggagcaggtgaagcgccagcggggtgaccctcagacacagttggaagccatggaactgtacctggcacggagtgggctgcaggtaaggt

SEQ ID NO: 23284 - DNA, 440 bp, Homo sapiens
  MAP TO CHR5.3; EXPRESSED IN BRAIN, SIGNAL =   1; EXPRESSED IN HEART, SIGNAL = 0.8; EXPRESSED IN BONE MARROW, SIGNAL = 1.3; SWISSPROT HIT: Q9Y5E5, EVALUE 2.00e-61; NT HIT: gi14861873, EVALUE 0.00e+00; EST_HUMAN HIT: BI600329.1, EVALUE 1.50e-01
catgaagaagctagggagaattcatccaaacaggcaagtgttggcctttattttgatggtgttcttgtctcaggttcgcctcgagcctattcgttattctgtgttggaggaaacagagagcggctcctttgtagcccatctggccaaggatctgggcctgggaattggggaactggcctcccggtcagcccgggtgctgtctgacgatgacaagcagcgtttgcagctggatcgtcagactggagatttgcttctgagggagaaactagaccgggaagagctctgtggtcctattgaaccgtgtgtactgcatttccaagtgttcctggaaatgccggtgcaattttttcaaggagaattattgatccaggacataaatgatcactctccaatattccctgaaagggaagtgctcttgaaaatactagaaaatagccagc

SEQ ID NO: 23285 - DNA, 337 bp, Homo sapiens
  MAP TO CHRX.3; EXPRESSED IN HELA, SIGNAL = 2.1; EXPRESSED IN PLACENTA, SIGNAL = 1.7; EXPRESSED IN LUNG, SIGNAL = 1.1; EXPRESSED IN HEART, SIGNAL = 2.1; EXPRESSED IN BONE MARROW, SIGNAL = 1.6; EXPRESSED IN FETAL LIVER, SIGNAL = 2.2; EXPRESSED IN ADULT LIVER, SIGNAL = 2.6; EXPRESSED IN BRAIN, SIGNAL = 1.7; SWISSPROT HIT: Q15738, EVALUE 2.00e-54; EST_HUMAN HIT: BF980062.1, EVALUE 0.00e+00; NT HIT: U82671.3, EVALUE 0.00e+00
ccaggcatttcacatcaccaatgatgagcccatccctttctggacattcctgtctcgcatcctgacaggcctcaattatgaggcccccaagtaccacatcccctactgggtggcctactacctggccctcctgctatccctgctggtgatggtgatcagtcctgtcatccagctgcagcccaccttcacacccatgcgggtcgcactggctggcacattccactactacagctgcgagagagccaaaaaggccatgggctaccagccactagtgaccatggatgatgctatggagaggaccgtgcagagctttcgccacctgcggagggtcaagtga

SEQ ID NO: 23286 - DNA, 159 bp, Homo sapiens
  MAP TO CHR19.3; EXPRESSED IN HEART, SIGNAL = 0.83; EXPRESSED IN BONE MARROW, SIGNAL = 1.2; EXPRESSED IN BRAIN, SIGNAL = 0.91; NT HIT: gi15309008, EVALUE 2.00e-81; SWISSPROT HIT: P14282, EVALUE 3.40e-02; EST_HUMAN HIT: BE792048.1, EVALUE 3.00e-77
tttccaggtgtcccaggtatccagggcagcccaaatggcagtccccagctcgcggatcctccagttgtcaaagccgaaggccccagccaccctcttggaagagtgggaccccgtgccaaaacccaagccacatgtgtcagaccataaccgcctccttca

SEQ ID NO: 23287 - DNA, 114 bp, Homo sapiens
  MAP TO CHR19.3; EXPRESSED IN BONE MARROW, SIGNAL = 3.3; EXPRESSED IN PLACENTA, SIGNAL = 8.8; EXPRESSED IN HEART, SIGNAL = 3.3; EXPRESSED IN ADULT LIVER, SIGNAL =   3; EXPRESSED IN FETAL LIVER, SIGNAL = 1.7; EXPRESSED IN BRAIN, SIGNAL = 4.6; EST_HUMAN HIT: BG757557.1, EVALUE 1.00e-57; NT HIT: X52785.1, EVALUE 8.00e-58; SWISSPROT HIT: P20273, EVALUE 1.00e-16
agtcaaaccaggtgtagtgggagacgggagggttggcgtcgctctcacaggtcagggttgcactcttcccctccatcacttggtcccccgggctcatggacacacgcagcctcc

SEQ ID NO: 23288 - DNA, 302 bp, Homo sapiens
  MAP TO CHR17.3; EXPRESSED IN FETAL LIVER, SIGNAL = 0.87; EXPRESSED IN BRAIN, SIGNAL = 1.4; EXPRESSED IN BONE MARROW, SIGNAL = 1.2; EXPRESSED IN HEART, SIGNAL = 1.3; SWISSPROT HIT: P13646, EVALUE 1.00e-33; EST_HUMAN HIT: AL603020.1, EVALUE 0.00e+00; NT HIT: AF049259.1, EVALUE 0.00e+00
ctcaccttgtcccggagctcttcaatggtcttgtagtaggggctgtagtcccgctcagggctagctgggctctgcttcaggtgccagtcacggatcttcacctccaggtcagcgttggcctcctccagggcgcgcaccttctccaggtaggaagccaggcggtcgttgaggttctgcatggtgatcttctcattgccagtgaggaggccgccatcacaagcaccaaagtcaacaaagccaccagcaaaacccccaccaaagccacctccaaggccacctccatagccacctccaaggccacc

SEQ ID NO: 23289 - DNA, 137 bp, Homo sapiens
  MAP TO CHR19.3; EXPRESSED IN BONE MARROW, SIGNAL = 4.6; EXPRESSED IN LUNG, SIGNAL = 3.8; EXPRESSED IN PLACENTA, SIGNAL = 6.4; EXPRESSED IN ADULT LIVER, SIGNAL = 4.1; EXPRESSED IN BRAIN, SIGNAL = 7.1; SWISSPROT HIT: Q13526, EVALUE 3.00e-19; NT HIT: gi14756541, EVALUE 4.00e-66; EST_HUMAN HIT: BE888548.1, EVALUE 6.00e-66
cagggggagcctgccagggtccgctgctcgcacctgctggtgaagcacagccagtcacggcggccctcgtcctggcggcaggagaagatcacccggaccaaggaggaggccctggagctgatcaacggtgagcaggg

SEQ ID NO: 23290 - DNA, 211 bp, Homo sapiens
  MAP TO CHR5.3; EXPRESSED IN BONE MARROW, SIGNAL = 2.2; EXPRESSED IN LUNG, SIGNAL = 2.2; EXPRESSED IN ADULT LIVER, SIGNAL = 2.4; EXPRESSED IN BRAIN, SIGNAL = 2.9; EST_HUMAN HIT: BG035730.1, EVALUE 1.00e-104; NT HIT: gi16159223, EVALUE 1.00e-104; SWISSPROT HIT: P48643, EVALUE 3.00e-31
ctcacttttggcatctgtgggtgactgaaatccttgtccacaatcacgcccttaatcagtttagtgtcctccagcctgccgcccactttgccttctactttgataagctcaaagtcaacgtctctccgctccatatctgctacagtgaggacggcattcacagcaatctcagccatctgtcggtgacaactgttgaccctgaggaaaacac

SEQ ID NO: 23291 - DNA, 129 bp, Homo sapiens
  MAP TO CHR17.3; EXPRESSED IN LUNG, SIGNAL = 0.89; EXPRESSED IN BONE MARROW, SIGNAL =   1; EXPRESSED IN HELA, SIGNAL = 1.9; EXPRESSED IN PLACENTA, SIGNAL = 1.2; EXPRESSED IN ADULT LIVER, SIGNAL = 2.5; EXPRESSED IN BRAIN, SIGNAL = 1.5; NT HIT: gi16165564, EVALUE 6.00e-65; EST_HUMAN HIT: BE395814.1, EVALUE 2.00e-65; SWISSPROT HIT: P34896, EVALUE 2.00e-17
caggggttgctgtggcactgaagcaagctatgactctggaatttaaagtttatcaacaccaggtggtggccaactgcagggctctgtctgaggccctgacggagctgggctacaaaatagtcacaggta

SEQ ID NO: 23292 - DNA, 342 bp, Homo sapiens
  MAP TO CHR20.3; EXPRESSED IN LUNG, SIGNAL =   2; EXPRESSED IN HEART, SIGNAL = 3.3; EXPRESSED IN HELA, SIGNAL = 2.6; EXPRESSED IN BONE MARROW, SIGNAL = 3.2; EXPRESSED IN PLACENTA, SIGNAL = 3.5; EXPRESSED IN ADULT LIVER, SIGNAL = 2.8; EXPRESSED IN BRAIN, SIGNAL = 2.9; EST_HUMAN HIT: BI027790.1, EVALUE 1.00e-66; NT HIT: gi14772918, EVALUE 0.00e+00
aggcaagaggtgaaggaaaaggaggctgactttctggcccaggaagcacagctgctggaggagctggaggcgtctcatatcacggagcagcagctgcgagcctccttgtgggcccaggaagccaaggcagcccaactacagctgcgactgcgcagcacagagagccagctagaagcgctggccgcagagcagcagcccgggaaccaggcccaggcccaggcccagctggccagcctctactctgccctgcagcaggccctggggtctgtttgtgagagcaggcctgagctgagtggtgggggagactctgctccttccgtctggggccttgagccaggtgag

SEQ ID NO: 23293 - DNA, 110 bp, Homo sapiens
  MAP TO CHR12.3; EXPRESSED IN FETAL LIVER, SIGNAL = 1.1; EXPRESSED IN ADULT LIVER, SIGNAL = 0.74; EXPRESSED IN BRAIN, SIGNAL = 0.5; EXPRESSED IN HEART, SIGNAL = 0.69; EXPRESSED IN BONE MARROW, SIGNAL = 1.1; EST_HUMAN HIT: BG027511.1, EVALUE 1.00e-54; SWISSPROT HIT: P70314, EVALUE 4.10e-01; NT HIT: gi14784171, EVALUE 7.00e-55
tacctggatgggagtgcgcaggatgccagcactaggtgaacgggggtccgccactcgagccagatgcttgttgtgcggcggaggccgcgctggtgtgactgggacgctct

SEQ ID NO: 23294 - DNA, 116 bp, Homo sapiens
  MAP TO CHR16.3; EXPRESSED IN HEART, SIGNAL = 1.5; EXPRESSED IN FETAL LIVER, SIGNAL = 2.3; EXPRESSED IN BRAIN, SIGNAL =   2; EXPRESSED IN ADULT LIVER, SIGNAL = 2.2; EXPRESSED IN HELA, SIGNAL = 4.6; EXPRESSED IN BONE MARROW, SIGNAL = 1.8; EXPRESSED IN LUNG, SIGNAL = 1.6; EST_HUMAN HIT: BI908537.1, EVALUE 7.00e-59; SWISSPROT HIT: Q9Y5Y2, EVALUE 1.00e-14; NT HIT: gi14774712, EVALUE 8.00e-58
ctcaccttcttgcctgcatggcgcagtgccagggccagctccgtggagatggtgcttttcccaacgcccccctttcctgagaggaccaggatgatgtgcctgacgccggccaggtt

SEQ ID NO: 23295 - DNA, 208 bp, Homo sapiens
  MAP TO CHR2.3; EXPRESSED IN PLACENTA, SIGNAL = 1.3; EXPRESSED IN BONE MARROW, SIGNAL = 1.1; EXPRESSED IN HEART, SIGNAL = 1.1; EXPRESSED IN ADULT LIVER, SIGNAL = 1.2; EXPRESSED IN BRAIN, SIGNAL = 1.3; EST_HUMAN HIT: AW503085.1, EVALUE 8.00e-91; SWISSPROT HIT: Q62245, EVALUE 5.00e-27; NT HIT: gi15529995, EVALUE 6.00e-91
tcctaccttgtcagcacacattgccactttaatatcttgttttgtaatttcataatgccgtatatttcttacataattcccaaccagctttaaaatgtctgcagaaatgtattctaagactgctactatgtaaacagaaacctggtggtcaattttataacctaggacctcctgcaaaattaaaagaaaagcatgtttaaacatcata

SEQ ID NO: 23296 - DNA, 198 bp, Homo sapiens
  MAP TO CHR1.3; EXPRESSED IN LUNG, SIGNAL = 1.4; EXPRESSED IN PLACENTA, SIGNAL = 1.2; EXPRESSED IN HEART, SIGNAL = 1.7; EXPRESSED IN FETAL LIVER, SIGNAL = 1.2; EXPRESSED IN ADULT LIVER, SIGNAL =   2; EXPRESSED IN BRAIN, SIGNAL = 2.5; EXPRESSED IN BONE MARROW, SIGNAL = 2.3; SWISSPROT HIT: Q02094, EVALUE 1.00e-15; NT HIT: AY013265.1, EVALUE 1.00e-105; EST_HUMAN HIT: BF353627.1, EVALUE 1.00e-18
gcaggcttccaggacgtgcatgccatggtcttcgtgggctttgacttcctcatggtcttcctgcagcgttacggcttcagcagcgtgggcttcaccttcctcctggccgcctttgccctgcagtggtccacactggtccagggctttctccactccttccacggtggccacatccatgttggcgtggagaggtgggca

SEQ ID NO: 23297 - DNA, 378 bp, Homo sapiens
  MAP TO CHR1.3; EXPRESSED IN BONE MARROW, SIGNAL = 1.9; EXPRESSED IN HELA, SIGNAL = 2.8; EXPRESSED IN LUNG, SIGNAL = 3.1; EXPRESSED IN HEART, SIGNAL = 1.6; EXPRESSED IN BRAIN, SIGNAL = 2.6; EXPRESSED IN ADULT LIVER, SIGNAL = 1.6; NT HIT: gi16168368, EVALUE 0.00e+00; EST_HUMAN HIT: AW504650.1, EVALUE 0.00e+00; SWISSPROT HIT: Q62203, EVALUE 1.00e-02
acaagcctcggaggtgctggtagctgctgacaaggaaaaggtggctccagtcattgctcccaaaattacctctgttattagccggatgcctgtcagcattgacctggaaaattcacagaagataaccttggcaaaaccagctcctcaaaccctcactggtctggtgagcgcactcactggcctggtgaacgtctccctggtcccggtgaatgccctgaaaggccccgtgaagggctcagtgaccacactgaaaagtttggtgagcacccctgctgggcccgtgaacgtcctgaaagggcctgtgaatgttcttacggggccagtgaatgttctcaccactccagtgaacgccacggtgggcacagtgaatgccgcccc

SEQ ID NO: 23298 - DNA, 113 bp, Homo sapiens
  MAP TO CHR12.3; EXPRESSED IN HEART, SIGNAL = 0.87; EXPRESSED IN PLACENTA, SIGNAL =   1; EXPRESSED IN HELA, SIGNAL = 2.2; EXPRESSED IN BONE MARROW, SIGNAL = 1.3; EXPRESSED IN BRAIN, SIGNAL =   1; EXPRESSED IN ADULT LIVER, SIGNAL = 0.97; NT HIT: gi4504792, EVALUE 2.00e-55; EST_HUMAN HIT: BE745875.1, EVALUE 3.00e-55; SWISSPROT HIT: Q14571, EVALUE 9.00e-16
tacctcaatctgtgcagtgtggttggcataatactttaaggcttcatctccttcatctggatccgatcctggtttgagcatctgctgcaacagtttattgtggcgggccaact

SEQ ID NO: 23299 - DNA, 239 bp, Homo sapiens
  MAP TO CHR2.3; EXPRESSED IN BRAIN, SIGNAL = 2.4; EXPRESSED IN HELA, SIGNAL = 1.9; EXPRESSED IN BONE MARROW, SIGNAL = 1.1; EXPRESSED IN HEART, SIGNAL = 1.7; EXPRESSED IN FETAL LIVER, SIGNAL = 1.8; EXPRESSED IN ADULT LIVER, SIGNAL = 1.3; NT HIT: U51626.1, EVALUE 1.00e-119; EST_HUMAN HIT: BE786454.1, EVALUE 1.00e-119; SWISSPROT HIT: Q99814, EVALUE 3.00e-36
cccattagtgagattgagaagaatgacgtggtgttctccatggaccagactgaatccctgttcaagccccacctgatggccatgaacagcatctttgatagcagtggcaagggggctgtgtctgagaagagtaacttcctattcaccaagctaaaggaggagcccgaggagctggcccagctggctcccaccccaggagacgccatcatctctctggatttcggtgggtgcttcttagc

SEQ ID NO: 23300 - DNA, 152 bp, Homo sapiens
  MAP TO CHR19.3; EXPRESSED IN BONE MARROW, SIGNAL = 1.9; EXPRESSED IN HEART, SIGNAL = 2.2; EXPRESSED IN BRAIN, SIGNAL = 2.6; EST_HUMAN HIT: AL046928.1, EVALUE 3.00e-80; SWISSPROT HIT: Q9UK22, EVALUE 2.30e-01
agtctggacccacctgtcggcagcccctctcagtccactgaaggaccgggtcaggtgaggctgagaacttgaccacttccttttcatacacatccagaaggcggacccggagctggtagacgcagccgcagttctctcgagcgccccacctg

SEQ ID NO: 23301 - DNA, 242 bp, Homo sapiens
  MAP TO CHR1.3; EXPRESSED IN PLACENTA, SIGNAL = 2.2; EXPRESSED IN BONE MARROW, SIGNAL = 3.3; EXPRESSED IN BRAIN, SIGNAL = 2.8; EXPRESSED IN ADULT LIVER, SIGNAL = 2.2; EXPRESSED IN LUNG, SIGNAL = 4.4; EXPRESSED IN HEART, SIGNAL = 2.5; NT HIT: gi14741115, EVALUE 1.00e-123; EST_HUMAN HIT: BI838004.1, EVALUE 1.00e-123; SWISSPROT HIT: O77641, EVALUE 2.00e-40
tctcacctgtcccacatatgggtaggcatcttcagagtcaataccccggttcttctgcacatattggaaggcattggtcatgtagccccctccacagccatcattctcagacacacaatccactaggttctggggactcagatttaagagtttgccagttttcttcttgagttggccctccagggcacccacagagctaaaagcccaacaggaaccacactgaccctgaaaggcatacagag

SEQ ID NO: 23302 - DNA, 259 bp, Homo sapiens
  MAP TO CHR11.3; EXPRESSED IN BONE MARROW, SIGNAL = 1.6; EXPRESSED IN ADULT LIVER, SIGNAL = 1.6; EXPRESSED IN BRAIN, SIGNAL = 1.2; SWISSPROT HIT: O33335, EVALUE 7.60e+00; NT HIT: gi14773418, EVALUE 3.00e-84; EST_HUMAN HIT: BI762768.1, EVALUE 4.00e-84
ttcagccctttgccccacagcatgcagagtcactcctcttggcaggcacactgtggctaacctggcccctcctctccttcgagctacaggtttggccgcaggcccatcctgacctgcagctacctgctgctggcagccagcggctccggtgcagccttcagccccaccttccccatctacatggtcttccgcttcctgtgtggctttggcatctcaggcattaccctgagcaccgtcatcttgagtgagctgcagtggg

SEQ ID NO: 23303 - DNA, 141 bp, Homo sapiens
  MAP TO CHR9.3; EXPRESSED IN FETAL LIVER, SIGNAL = 2.2; EXPRESSED IN HEART, SIGNAL =   2; EXPRESSED IN HELA, SIGNAL = 2.7; EXPRESSED IN BONE MARROW, SIGNAL = 1.2; EXPRESSED IN PLACENTA, SIGNAL = 1.7; EXPRESSED IN ADULT LIVER, SIGNAL = 2.2; EXPRESSED IN BRAIN, SIGNAL = 1.4; NT HIT: U24253.1, EVALUE 7.00e-74; EST_HUMAN HIT: AL526394.1, EVALUE 1.00e-73; SWISSPROT HIT: Q05932, EVALUE 1.00e-14
gggagtcctgatgaccccagctgtcccggcagctctccccacctggtgcaggttcgggagcggatccgcatcaatgggcagcccatcagtcctgagctcttcaccaagtacttctggcgcctctaccaccggctggaggag

SEQ ID NO: 23304 - DNA, 160 bp, Homo sapiens
  MAP TO CHR19.3; EXPRESSED IN LUNG, SIGNAL =   4; EXPRESSED IN ADULT LIVER, SIGNAL = 3.1; EXPRESSED IN BRAIN, SIGNAL =   4; EXPRESSED IN HELA, SIGNAL = 6.1; EXPRESSED IN PLACENTA, SIGNAL = 5.3; EXPRESSED IN BONE MARROW, SIGNAL = 2.9; NT HIT: AF222689.1, EVALUE 4.00e-85; EST_HUMAN HIT: BI197654.1, EVALUE 6.00e-82; SWISSPROT HIT: Q9JIF0, EVALUE 4.00e-25
gcaggaggtggacatctataccgtcaaggtggaagacctgaccttcacctccccgttctgcctgcaagtgaagcggaatgactacgtgcacgccctggtggcctacttcaacatcgagttcacacgctgccacaagaggaccggcttctccaccagtgag

SEQ ID NO: 23305 - DNA, 266 bp, Homo sapiens
  MAP TO CHR2.3; EXPRESSED IN ADULT LIVER, SIGNAL = 5.3; EXPRESSED IN FETAL LIVER, SIGNAL = 2.8; EXPRESSED IN PLACENTA, SIGNAL = 3.8; EXPRESSED IN LUNG, SIGNAL = 5.6; EXPRESSED IN HEART, SIGNAL =   7; EXPRESSED IN HELA, SIGNAL = 6.9; EXPRESSED IN BONE MARROW, SIGNAL = 4.4; EST_HUMAN HIT: AI133103.1, EVALUE 5.00e-31; SWISSPROT HIT: Q34101, EVALUE 2.00e-25; NT HIT: U38269.1, EVALUE 5.00e-58
gctttgtcaactgagaatccacctcagattcattatacaaggtcagtttccatatatgggattgctgatagtagatttgtaattattgtagcacctcagaatgatatttggcctcatgggagtatgtaacctataaatgctgttgctgtggttgtgagtaggaggataatgccaatatttcaggtttttagaaatataaatgacccataatataaacctcggccaacatgtaggaagaggcagatgaaaaatattgaagcgccgtt

SEQ ID NO: 23306 - DNA, 171 bp, Homo sapiens
  MAP TO CHR16.3; EXPRESSED IN FETAL LIVER, SIGNAL = 4.5; EXPRESSED IN BRAIN, SIGNAL = 4.2; EXPRESSED IN LUNG, SIGNAL =  10; EXPRESSED IN BONE MARROW, SIGNAL = 1.8; EXPRESSED IN HELA, SIGNAL = 4.5; NT HIT: AB016243.1, EVALUE 1.00e-91; EST_HUMAN HIT: BG698515.1, EVALUE 4.00e-89
aggggctcagaagttgctgaagatttcacgcttcctgttccagtccatctgtggcgcgcgcttgttgactcgcatggctcgagccttctccttggcctcggccgccgtggggctcaggtggaggccgctctcctggaagggatcttgcttccaggcactgccatcctgggg

SEQ ID NO: 23307 - DNA, 189 bp, Homo sapiens
  MAP TO CHR3.3; EXPRESSED IN BONE MARROW, SIGNAL = 1.1; EXPRESSED IN LUNG, SIGNAL = 1.5; EXPRESSED IN FETAL LIVER, SIGNAL = 6.3; EXPRESSED IN BRAIN, SIGNAL = 1.2; EXPRESSED IN ADULT LIVER, SIGNAL = 6.1; NT HIT: gi10092578, EVALUE 2.00e-99; SWISSPROT HIT: Q06033, EVALUE 2.00e-19; EST_HUMAN HIT: AV697162.1, EVALUE 3.00e-25
acaggtgagagcagacccgaaaaaatccaagagaatgtgcggaatgccatcgggggcaagttccccttgtataacctgggctttggcaacaatctgaattataacttcctggagaacatggccctggagaaccatgggtttgcccggcgcatttatgaggactctgatgccgatttgcagttgcaggta

SEQ ID NO: 23308 - DNA, 177 bp, Homo sapiens
  MAP TO CHRX.3; EXPRESSED IN BRAIN, SIGNAL =   2; EXPRESSED IN BONE MARROW, SIGNAL = 1.8; EXPRESSED IN LUNG, SIGNAL = 2.6; EXPRESSED IN HEART, SIGNAL =   2; NT HIT: gi5174668, EVALUE 1.00e-88; EST_HUMAN HIT: AW367998.1, EVALUE 2.00e-88; SWISSPROT HIT: P29170, EVALUE 5.70e+00
tattatcttaccactagttcctgggggttgtaatacatctcctgtcaggcgacaccacccagctgggaaaatatctcgagaatcatacttgcaccagtaatcaaaagctccactccagccatcaaatgtgatatgaacttcatcccctttaacatctccaatggtcgcaggacagat

SEQ ID NO: 23309 - DNA, 178 bp, Homo sapiens
  MAP TO CHR11.3; EXPRESSED IN HELA, SIGNAL =   2; EXPRESSED IN BONE MARROW, SIGNAL = 2.1; EXPRESSED IN ADULT LIVER, SIGNAL = 1.9; EXPRESSED IN BRAIN, SIGNAL =   2; NT HIT: gi4826975, EVALUE 2.00e-90; EST_HUMAN HIT: BE901784.1, EVALUE 3.00e-90; SWISSPROT HIT: Q9Y256, EVALUE 2.00e-29
agccccccgctcctgggcccgctgcctcacagacatgcgttggctgcggaaccaagtgatcgccccgctgacagaggagctggtgttccgggcctgtatgctgcccatgttagcaccgtgcatgggcctgggccctgctgtgttcacctgcccgctcttttttggagttggtgagtct

SEQ ID NO: 23310 - DNA, 304 bp, Homo sapiens
  MAP TO CHR10.3; EXPRESSED IN BONE MARROW, SIGNAL = 1.6; EXPRESSED IN HEART, SIGNAL = 1.5; EXPRESSED IN LUNG, SIGNAL = 1.7; EXPRESSED IN FETAL LIVER, SIGNAL = 1.1; EXPRESSED IN ADULT LIVER, SIGNAL = 1.3; NT HIT: gi4502666, EVALUE 0.00e+00; EST_HUMAN HIT: BF664417.1, EVALUE 0.00e+00; SWISSPROT HIT: P49961, EVALUE 1.00e-50
ttcaagtgatttttccattcaggttgcaagtaatgaaattctcagggacccatgctttcatcctggatataagaaggtagtgaacgtaagtgacctttacaagaccccctgcaccaagagatttgagatgactcttccattccagcagtttgaaatccagggtattggaaactatcaacaatgccatcaaagcatcctggagctcttcaacaccagttactgcccttactcccagtgtgccttcaatgggattttcttgccaccactccagggggattttggggtaagtttgtgaaatgatgag

SEQ ID NO: 23311 - DNA, 116 bp, Homo sapiens
  MAP TO CHR12.3; EXPRESSED IN HEART, SIGNAL = 1.3; EXPRESSED IN FETAL LIVER, SIGNAL = 1.3; EXPRESSED IN ADULT LIVER, SIGNAL = 2.1; EXPRESSED IN BRAIN, SIGNAL = 1.3; EXPRESSED IN HELA, SIGNAL = 2.5; EXPRESSED IN BONE MARROW, SIGNAL = 1.3; EXPRESSED IN PLACENTA, SIGNAL = 1.6; NT HIT: gi16187903, EVALUE 5.00e-59; EST_HUMAN HIT: AV713843.1, EVALUE 7.00e-59; SWISSPROT HIT: Q10107, EVALUE 2.70e-02
aggtcagtgtggagtatacagagaagatggtgtccatcagtaactaccccctttctgctgccctcacctgtgcaaaacttaccacagcctttgaggaagtatggggggtcatttga

SEQ ID NO: 23312 - DNA, 144 bp, Homo sapiens
  MAP TO CHR2.3; EXPRESSED IN LUNG, SIGNAL = 2.5; EXPRESSED IN BONE MARROW, SIGNAL = 2.3; EXPRESSED IN ADULT LIVER, SIGNAL = 2.1; EXPRESSED IN BRAIN, SIGNAL = 1.7; NT HIT: AB038985.1, EVALUE 1.00e-75; EST_HUMAN HIT: BE271526.1, EVALUE 1.00e-67; SWISSPROT HIT: Q14790, EVALUE 9.00e-22
tatatcccggatgaggctgactttctgctggggatggccactgtgaataactgtgtttcctaccgaaaccctgcagagggaacctggtacatccagtcactttgccagagcctgagagagcgatgtcctcggtaagttttgcct

SEQ ID NO: 23313 - DNA, 189 bp, Homo sapiens
  MAP TO CHRX.3; EXPRESSED IN HEART, SIGNAL =   6; EXPRESSED IN PLACENTA, SIGNAL = 5.5; EXPRESSED IN LUNG, SIGNAL = 4.6; EXPRESSED IN BRAIN, SIGNAL = 8.9; EXPRESSED IN BONE MARROW, SIGNAL = 8.8; NT HIT: X70872.1, EVALUE 1.00e-102; EST_HUMAN HIT: BI768946.1, EVALUE 5.00e-95; SWISSPROT HIT: P27918, EVALUE 1.00e-34
tgctgaccagggcagggcacagctgtgttgcagatgtgggtccgggtggcatcgccagcacagaaggggcccccatgctggggcacagggtgattgcacgtccgttgttccatggtctggcccaggccacaggtcacagggcaggggctcacagggccccaaggcccccagcccccagccactgttgga

SEQ ID NO: 23314 - DNA, 174 bp, Homo sapiens
  MAP TO CHRX.3; EXPRESSED IN LUNG, SIGNAL = 2.4; EXPRESSED IN HELA, SIGNAL = 3.4; EXPRESSED IN PLACENTA, SIGNAL = 1.5; EXPRESSED IN BONE MARROW, SIGNAL = 0.88; EXPRESSED IN FETAL LIVER, SIGNAL = 2.2; EXPRESSED IN ADULT LIVER, SIGNAL = 1.6; NT HIT: U52111.2, EVALUE 2.00e-93; EST_HUMAN HIT: AA318466.1, EVALUE 2.00e-88; SWISSPROT HIT: P51572, EVALUE 3.00e-05
accttcttgagctggtcattctcctccatgtacttcttggccgcctcactagcactctccgcctgctttttaaaggcttcattggaggccagcagcgtggcctgctgcgaaatgagagtcaccaggcgtctaagcaggctgcaattatttacaaaaagaagggagaagtgagaa

SEQ ID NO: 23315 - DNA, 228 bp, Homo sapiens
  MAP TO CHR15.3; EXPRESSED IN BONE MARROW, SIGNAL = 2.1; EXPRESSED IN LUNG, SIGNAL =  15; EXPRESSED IN ADULT LIVER, SIGNAL = 2.3; EXPRESSED IN BRAIN, SIGNAL = 1.9; EXPRESSED IN FETAL LIVER, SIGNAL = 5.8; NT HIT: gi4507484, EVALUE 1.00e-122; EST_HUMAN HIT: AI751155.1, EVALUE 1.00e-121; SWISSPROT HIT: P35441, EVALUE 1.00e-45
cctcaggtgtgcaagccccgtaacccctgcacggatgggacccacgactgcaacaagaacgccaagtgcaactacctgggccactatagcgaccccatgtaccgctgcgagtgcaagcctggctacgctggcaatggcatcatctgcggggaggacacagacctggatggctggcccaatgagaacctggtgtgcgtggccaatgcgacttaccactgcaaaaaggta

SEQ ID NO: 23316 - DNA, 154 bp, Homo sapiens
  MAP TO CHR2.3; EXPRESSED IN LUNG, SIGNAL = 1.4; EXPRESSED IN PLACENTA, SIGNAL = 1.3; EXPRESSED IN ADULT LIVER, SIGNAL = 1.7; EXPRESSED IN FETAL LIVER, SIGNAL = 0.98; EXPRESSED IN BRAIN, SIGNAL = 1.5; EXPRESSED IN BONE MARROW, SIGNAL = 1.3; SWISSPROT HIT: P09245, EVALUE 2.00e+00; NT HIT: gi16160064, EVALUE 1.00e-81; EST_HUMAN HIT: AA150971.1, EVALUE 2.00e-81
gcatcatttatttcaaagtacaacacaaagttgtatttttaagaaatacacattcaatcttgtatctcaagacttggctatgtgcatttcagttcatctttaaaataagttcaggtatacaaatgttacatacctcaagtacaaacagcacaga

SEQ ID NO: 23317 - DNA, 202 bp, Homo sapiens
  MAP TO CHR1.3; EXPRESSED IN BONE MARROW, SIGNAL = 9.1; EXPRESSED IN HEART, SIGNAL = 8.6; EXPRESSED IN PLACENTA, SIGNAL = 7.9; EXPRESSED IN ADULT LIVER, SIGNAL =  21; EXPRESSED IN BRAIN, SIGNAL =  10; SWISSPROT HIT: P57735, EVALUE 3.00e-31; NT HIT: gi11427606, EVALUE 1.00e-105; EST_HUMAN HIT: BE718455.1, EVALUE 1.00e-107
caggtactatcgtggtgcagtgggggccctcctggtgtttgacctaaccaagcaccagacctatgctgtggtggagcgatggctgaaggagctctatgaccatgctgaagccacgatcgtcgtcatgctcgtgggtaacaaaagtgacctcagccaggcccgggaagtgcccactgaggaggcccgaatgttcgctggtgag

SEQ ID NO: 23318 - DNA, 195 bp, Homo sapiens
  MAP TO CHR1.3; EXPRESSED IN LUNG, SIGNAL = 0.89; EXPRESSED IN HEART, SIGNAL = 0.86; EXPRESSED IN BRAIN, SIGNAL = 1.2; EXPRESSED IN BONE MARROW, SIGNAL = 1.2; EXPRESSED IN PLACENTA, SIGNAL = 1.9; SWISSPROT HIT: P39098, EVALUE 2.00e-31; NT HIT: AF053624.1, EVALUE 1.00e-106; EST_HUMAN HIT: BG623111.1, EVALUE 8.00e-94
ttggcttatttaccagtgctgcttcccagccccactgcctgtatcttggatcgtgagtgaatcgccataggtaccaataggtttcaattacttctggacggaggatataatacttttcagcctgccggacagccacagcctccactgcaccatcaaacttgaatgattcaggacctagctttaatgctgtaacat

SEQ ID NO: 23319 - DNA, 282 bp, Homo sapiens
  MAP TO CHR6.3; EXPRESSED IN BONE MARROW, SIGNAL = 1.1; EXPRESSED IN HEART, SIGNAL = 0.79; EXPRESSED IN ADULT LIVER, SIGNAL = 0.7; NT HIT: L29472.1, EVALUE 0.00e+00; EST_HUMAN HIT: BI770984.1, EVALUE 0.00e+00; SWISSPROT HIT: P13765, EVALUE 3.00e-52
ctcactccactccacagaaacagggctcagcaggctggagtgatcgacaaggcaggtgtagacatgtccaagttcaggagtcatttctagcatcaccacagtctgaaaggtccagtctccattcctgatagggccagtggacatgaccccagctctctcctcctgcccattcaggaaccacttgatcttgatatcccctggatagaagcctgtcacagagcagtgcagcagattatgctggtgcaggagtggggtcctctctgggtacactgtcacctctgg

SEQ ID NO: 23320 - DNA, 155 bp, Homo sapiens
  MAP TO CHR17.3; EXPRESSED IN BONE MARROW, SIGNAL = 0.72; EXPRESSED IN LUNG, SIGNAL = 0.83; EXPRESSED IN PLACENTA, SIGNAL = 0.72; EXPRESSED IN ADULT LIVER, SIGNAL = 0.66; NT HIT: gi15313957, EVALUE 3.00e-76; EST_HUMAN HIT: BG436859.1, EVALUE 5.00e-67; SWISSPROT HIT: O95838, EVALUE 1.00e-20
atttacagattggcaaaatcaacactggtcctcattcctttattgggcgttcatgagatcctcttctctttcatcactgatgatcaagttgaaggatttgcaaaacttatacgacttttcattcagttgacactgagctcctttcatgtaagtag

SEQ ID NO: 23321 - DNA, 285 bp, Homo sapiens
  MAP TO CHR1.3; EXPRESSED IN BONE MARROW, SIGNAL = 0.87; EXPRESSED IN FETAL LIVER, SIGNAL = 2.9; NT HIT: X69111.1, EVALUE 0.00e+00; EST_HUMAN HIT: BF312367.1, EVALUE 0.00e+00; SWISSPROT HIT: Q02535, EVALUE 8.00e-48
actccccagcatgaaggcgctgagcccggtgcgcggctgctacgaggcggtgtgctgcctgtcggaacgcagtctggccatcgcccggggccgagggaagggcccggcagctgaggagccgctgagcttgctggacgacatgaaccactgctactcccgcctgcgggaactggtacccggagtcccgagaggcactcagcttagccaggtggaaatcctacagcgcgtcatcgactacattctcgacctgcaggtagtcctggccgagccagcccctggaccccc

SEQ ID NO: 23322 - DNA, 212 bp, Homo sapiens
  MAP TO CHR6.3; EXPRESSED IN BONE MARROW, SIGNAL = 0.92; SWISSPROT HIT: P06489, EVALUE 6.30e+00; NT HIT: gi16174984, EVALUE 1.00e-116; EST_HUMAN HIT: BG323656.1, EVALUE 1.00e-116
caggggggtggccagacagagcgggagcagcagtgtccccacaaatcccagcagccctcttagctttagcagcccccacagccctcccagccgcagggtcccctccagccatagtcctggcagcccttgaggaagcaaagtccccagagggccctgaagcagccacagtaaagccgcgtccaccagcagcagggaggtccagggtctcaggt

SEQ ID NO: 23323 - DNA, 222 bp, Homo sapiens
  MAP TO CHR13.3; EXPRESSED IN ADULT LIVER, SIGNAL = 3.7; EXPRESSED IN BRAIN, SIGNAL =   1; EXPRESSED IN LUNG, SIGNAL = 0.46; EXPRESSED IN BONE MARROW, SIGNAL = 1.2; EXPRESSED IN PLACENTA, SIGNAL = 0.95; EXPRESSED IN HEART, SIGNAL = 1.3; NT HIT: gi14783796, EVALUE 1.00e-122; EST_HUMAN HIT: AL531727.1, EVALUE 3.00e-26; SWISSPROT HIT: P08709, EVALUE 3.00e-37
tgctgcaggcagtcctgggtcatcagccggggcacgttgaggaccatgagctccagggccgtggcgccacggtccagcagctggccccagccgctgaccaatgagaagcgcacgaaggccagcgtcctctcagagaacgtccgttcgggcaggcagaggggcaccacatggtcagtgaggaccacgggctggtgcaggcggagcagcgcgatgtcgtggttg

SEQ ID NO: 23324 - DNA, 236 bp, Homo sapiens
  MAP TO CHR13.3; EXPRESSED IN ADULT LIVER, SIGNAL = 0.59; EXPRESSED IN BRAIN, SIGNAL = 0.7; EXPRESSED IN LUNG, SIGNAL = 0.93; EXPRESSED IN BONE MARROW, SIGNAL = 0.73; EXPRESSED IN HEART, SIGNAL = 0.66; EXPRESSED IN PLACENTA, SIGNAL = 0.66; SWISSPROT HIT: O79679, EVALUE 9.70e-01; NT HIT: gi15301776, EVALUE 1.00e-112; EST_HUMAN HIT: BE504550.1, EVALUE 1.00e-111
taatatctggaataattgtgtctttacaggatgaatgctatcaagtaagacaagtgtttgcccagaaacttcacaaaggcctttcccgtttacggcttccacttgagtatatggcaatctgtgccctttgtgcaaaagatcctgtaaaggagagaagagctcatgctaggcaatgtttggtgaaaaatataaatgtaaggcgggagtatctgaagcagcatgcagctgttagtggt

SEQ ID NO: 23325 - DNA, 160 bp, Homo sapiens
  MAP TO CHR19.3; EXPRESSED IN LUNG, SIGNAL = 9.3; EXPRESSED IN BONE MARROW, SIGNAL = 2.9; EXPRESSED IN ADULT LIVER, SIGNAL = 1.5; EXPRESSED IN BRAIN, SIGNAL = 1.1; SWISSPROT HIT: Q08094, EVALUE 4.00e-26; NT HIT: gi14765608, EVALUE 6.00e-84; EST_HUMAN HIT: BG682800.1, EVALUE 9.00e-84
cccacctggctggcacacttgttcgtgcccatctggaggctgatggtcgagtggtccatggggggcaggatatggttcttggggtcatagagatgccttctcgtgccgtaggcagtcatgcccgactggctggcgcatttgttggtgcccatctgcaggg

SEQ ID NO: 23326 - DNA, 179 bp, Homo sapiens
  MAP TO CHR2.3; EXPRESSED IN BONE MARROW, SIGNAL = 0.87; EXPRESSED IN HEART, SIGNAL = 0.78; EXPRESSED IN ADULT LIVER, SIGNAL = 1.1; SWISSPROT HIT: O95573, EVALUE 6.00e-29; NT HIT: gi14728565, EVALUE 5.00e-94; EST_HUMAN HIT: AL135191.1, EVALUE 7.00e-94
agctttgttttccggaaagttcgaagcttgctagggggaaatattcgtctcctgttgtgtggtggcgctccactttctgcaaccacgcagcgattcatgaacatctgtttctgctgtcctgttggtcagggatacgggctcactgaatctgctggggctggaacaatttccgaaggtag

SEQ ID NO: 23327 - DNA, 142 bp, Homo sapiens
  MAP TO CHR2.3; EXPRESSED IN BRAIN, SIGNAL = 2.2; EXPRESSED IN LUNG, SIGNAL = 1.4; EXPRESSED IN HEART, SIGNAL = 1.7; EXPRESSED IN BONE MARROW, SIGNAL = 1.4; SWISSPROT HIT: P09923, EVALUE 5.00e-22; NT HIT: J03930.1, EVALUE 2.00e-74; EST_HUMAN HIT: AW450908.1, EVALUE 1.00e-70
caggtgatccttggcggaggccgcaagtacatgtttcccatggggaccccagaccctgagtacccagctgatgccagccagaatggaatcaggctggacgggaagaacctggtgcaggaatggctggcaaagcaccaggtga

SEQ ID NO: 23328 - DNA, 114 bp, Homo sapiens
  MAP TO CHR9.3; EXPRESSED IN BONE MARROW, SIGNAL = 0.78; EXPRESSED IN LUNG, SIGNAL = 1.3; EXPRESSED IN HEART, SIGNAL = 0.9; EXPRESSED IN PLACENTA, SIGNAL = 1.3; EXPRESSED IN ADULT LIVER, SIGNAL =   1; EXPRESSED IN BRAIN, SIGNAL = 0.79; NT HIT: gi4506890, EVALUE 8.00e-58; EST_HUMAN HIT: BF736124.1, EVALUE 1.00e-57; SWISSPROT HIT: Q01105, EVALUE 1.00e-16
attttgatgaaaatccttactttgaaaataaagttctctccaaagaatttcatctgaatgagagtggtgatccatcttcgaagtccaccgaaatcaaatggaaatctggaaagg

SEQ ID NO: 23329 - DNA, 169 bp, Homo sapiens
  MAP TO CHR19.3; EXPRESSED IN PLACENTA, SIGNAL = 1.2; EXPRESSED IN BONE MARROW, SIGNAL = 1.3; EXPRESSED IN BRAIN, SIGNAL = 1.2; EXPRESSED IN FETAL LIVER, SIGNAL = 1.6; EXPRESSED IN ADULT LIVER, SIGNAL = 1.3; EXPRESSED IN LUNG, SIGNAL = 1.7; EXPRESSED IN HEART, SIGNAL = 1.3; NT HIT: gi13654973, EVALUE 3.00e-83; EST_HUMAN HIT: BE242078.1, EVALUE 1.00e-86; SWISSPROT HIT: P48380, EVALUE 3.00e-24
tgtccccagctccatggtgatccgggacctgaccctgcgcagcgctgccagcttcggctccttccacctcatccgcctgctctacgacgagtacatgttctacctggtggagcaccgcgtcgcggaggccaccggagagacgccgatcgctgtgatgggagaggtgagg

SEQ ID NO: 23330 - DNA, 191 bp, Homo sapiens
  MAP TO CHR1.3; EXPRESSED IN LUNG, SIGNAL =   5; EXPRESSED IN HEART, SIGNAL = 3.9; EXPRESSED IN BONE MARROW, SIGNAL = 1.4; SWISSPROT HIT: Q9WUQ1, EVALUE 1.30e-01; NT HIT: gi8923027, EVALUE 6.00e-69; EST_HUMAN HIT: BI821675.1, EVALUE 7.00e-88
gtcaggctcagtgtctgttgctttccagaaccctggctactacgacatccaggccaaggacctgggcatctggcatgtgcccaacaagtcccccatgcagcattggagaaacagcgccctgctgaggtaccgcaccaacactggcttcctccagagactgggacataatctgtttggcatctaccaggtac

SEQ ID NO: 23331 - DNA, 293 bp, Homo sapiens
  MAP TO CHR13.3; EXPRESSED IN HEART, SIGNAL = 2.4; EXPRESSED IN FETAL LIVER, SIGNAL = 2.4; EXPRESSED IN ADULT LIVER, SIGNAL = 2.8; EXPRESSED IN BRAIN, SIGNAL =   6; EXPRESSED IN HELA, SIGNAL = 4.6; EXPRESSED IN BONE MARROW, SIGNAL = 2.8; EXPRESSED IN LUNG, SIGNAL = 4.2; SWISSPROT HIT: Q14118, EVALUE 2.00e-37; NT HIT: gi16157344, EVALUE 0.00e+00; EST_HUMAN HIT: AU140768.1, EVALUE 0.00e+00
cagtctcaccttgatgatatctccactggaggcaatcaaatctgttggaatggtcactcgaaatgagcgcccgacgacagccgtgccatcaggaatgccaaccactgtgggaacagcctcgtggaggtctgagagcactgagtgcatggatgcctcaagctggttttcccagtccctgacagcctctgagggttcactgggccagtgggactgagccataaccacagagagcaggaggagaaaggtcctccccgagaggggcagcagcagcgagaggcccacagacatcctca

SEQ ID NO: 23332 - DNA, 157 bp, Homo sapiens
  MAP TO CHR19.3; EXPRESSED IN FETAL LIVER, SIGNAL = 1.5; EXPRESSED IN PLACENTA, SIGNAL = 1.5; EXPRESSED IN BONE MARROW, SIGNAL = 2.1; EXPRESSED IN HEART, SIGNAL = 1.1; EXPRESSED IN ADULT LIVER, SIGNAL = 1.7; EXPRESSED IN BRAIN, SIGNAL = 1.1; SWISSPROT HIT: P41233, EVALUE 5.00e-18; NT HIT: gi16163370, EVALUE 2.00e-83; EST_HUMAN HIT: AW503735.1, EVALUE 5.00e-08
cttcaccagcgtcaggtagtagccggagcccaggtgacggcgcaggaagagtggggagccacagcagcacaagcggccacctgccaccacggccacacggtctcccagcagctctgcctcatccaggtggtgggtggagaggatcagcgtgcgacct

SEQ ID NO: 23333 - DNA, 215 bp, Homo sapiens
  MAP TO CHR11.3; EXPRESSED IN HELA, SIGNAL = 2.1; EXPRESSED IN BONE MARROW, SIGNAL =   4; EXPRESSED IN HEART, SIGNAL = 3.2; EXPRESSED IN BRAIN, SIGNAL =   4; NT HIT: AJ400877.1, EVALUE 1.00e-118; EST_HUMAN HIT: BG199363.1, EVALUE 1.00e-115; SWISSPROT HIT: Q10007, EVALUE 2.00e-13
cctacgggccagccttcacccggaaaaggaatgagcgggaaaggcagcgggtgaaatgtgtcaatgaaggctatgcccagctccgccatcatctgccagaggagtatttggagaagcgactcagcaaagtggaaaccctcagagctgcgatcaagtacattaactacctgcagtctcttctgtaccctgataaagctgagaccaagaataaccct

SEQ ID NO: 23334 - DNA, 234 bp, Homo sapiens
  MAP TO CHR17.3; EXPRESSED IN LUNG, SIGNAL = 0.81; EXPRESSED IN PLACENTA, SIGNAL = 0.72; EXPRESSED IN ADULT LIVER, SIGNAL = 0.6; EXPRESSED IN BRAIN, SIGNAL = 0.65; EXPRESSED IN FETAL LIVER, SIGNAL = 0.61; EXPRESSED IN BONE MARROW, SIGNAL = 0.86; EXPRESSED IN HEART, SIGNAL = 0.69; SWISSPROT HIT: O42945, EVALUE 2.00e-10; NT HIT: gi14774620, EVALUE 1.00e-112; EST_HUMAN HIT: BE252800.1, EVALUE 1.00e-100
aaggctcaccttatttccgcctaggtttttgaaggtccgatagatattgagcagggtcatgtgatccccctcgctggatatgaacttcttgcggaccccttgcacttcctctcgccgggaaggagggttgtggaggacgctgtccacagacagcagggagacaatggtcaggatctcctctgtacagtggaatttgggggacatgaggatggtctgcaaagcaaaatttaaaat

SEQ ID NO: 23335 - DNA, 346 bp, Homo sapiens
  MAP TO CHR14.3; EXPRESSED IN LUNG, SIGNAL = 3.7; EXPRESSED IN BONE MARROW, SIGNAL = 1.1; NT HIT: gi13631481, EVALUE 0.00e+00; EST_HUMAN HIT: BF525953.1, EVALUE 0.00e+00; SWISSPROT HIT: Q00978, EVALUE 2.00e-63
agactactcactgctgctcaccttcatctacaacgggcgcgtggtgggcgaggcccaggtgcaaagcctggattgccgccttgtggctgagccctcaggctctgagagcagcatggagcaggtgctgttccccaagcctggcccactggagcccacgcagcgcctgctgagccagcttgagaggggcatcctagtggccagcaacccccgaggcctcttcgtgcagcgcctttgccccatccccatctcctggaatgcaccccaggctccacctgggccaggcccgcatctgctgcccagcaacgagtgcgtggagctcttcagaaccgcctacttctgcagaggt

SEQ ID NO: 23336 - DNA, 128 bp, Homo sapiens
  MAP TO CHR9.3; EXPRESSED IN ADULT LIVER, SIGNAL = 4.6; EXPRESSED IN LUNG, SIGNAL = 5.4; EXPRESSED IN HELA, SIGNAL = 3.4; EXPRESSED IN PLACENTA, SIGNAL = 3.5; EXPRESSED IN HEART, SIGNAL = 5.8; EXPRESSED IN BONE MARROW, SIGNAL = 4.5; EXPRESSED IN FETAL LIVER, SIGNAL = 3.7; NT HIT: AY048592.1, EVALUE 9.00e-24; EST_HUMAN HIT: AU145238.1, EVALUE 2.00e-22
aatattttacaccattcatatcttaatataattatagaacccaatatactatcaaagataagtaattgtgtggttatatgccatttaaaattatcccgtgtttgtctgatcccattattacaaataat

SEQ ID NO: 23337 - DNA, 111 bp, Homo sapiens
  MAP TO CHR1.3; EXPRESSED IN LUNG, SIGNAL = 0.59; EXPRESSED IN HEART, SIGNAL = 1.7; EXPRESSED IN BONE MARROW, SIGNAL = 1.5; EXPRESSED IN FETAL LIVER, SIGNAL = 0.63; EXPRESSED IN ADULT LIVER, SIGNAL = 1.4; SWISSPROT HIT: Q15431, EVALUE 3.00e-13; NT HIT: AF273043.1, EVALUE 5.00e-56; EST_HUMAN HIT: AL042812.2, EVALUE 1.30e-01
ttgtcttttcctctaattgattaactttatctctggattcctctagcagaaatgttaaatctttcattttattttctttctcagtgatttggatcaatagtagtgatacct

SEQ ID NO: 23338 - DNA, 238 bp, Homo sapiens
  MAP TO CHR6.3; EXPRESSED IN LUNG, SIGNAL = 9.2; EXPRESSED IN HELA, SIGNAL = 6.4; EXPRESSED IN BONE MARROW, SIGNAL = 4.2; EXPRESSED IN ADULT LIVER, SIGNAL = 5.1; SWISSPROT HIT: P30281, EVALUE 1.00e-15; NT HIT: gi11417670, EVALUE 0.00e+00; EST_HUMAN HIT: BG392633.1, EVALUE 1.00e-130
aggactgcctgcgggcctgtcaggagcagatcgaagctgcactcagggagagcctcagggaagcctctcagaccagctccagcccagcgcccaaagccccccggggctccagcagccaagggcccagccagaccagcactcctacagatgtcacagccatacacctgtagccctggagaggccctctggagtggccactaagcagaggaggggccgctgccacccacctccctgcctc

SEQ ID NO: 23339 - DNA, 169 bp, Homo sapiens
  MAP TO CHR19.3; EXPRESSED IN PLACENTA, SIGNAL = 1.7; EXPRESSED IN HEART, SIGNAL = 1.4; EXPRESSED IN BONE MARROW, SIGNAL = 2.2; EXPRESSED IN BRAIN, SIGNAL =   2; SWISSPROT HIT: P20813, EVALUE 2.00e-20; NT HIT: gi14572198, EVALUE 2.00e-90; EST_HUMAN HIT: AW577437.1, EVALUE 4.00e-83
cctgccctctggtgtctgggaaagaaattgtgggtccagcttacctaaggagaaggggataaaagcttcagtctttttcagtgccccattggcatccagaaagtggtcaggattgaaggcgtctggtttttcaaagtagtgtgggtcatggagagcagtgctcaggatg

SEQ ID NO: 23340 - DNA, 168 bp, Homo sapiens
  MAP TO CHR6.3; EXPRESSED IN BRAIN, SIGNAL = 1.1; EXPRESSED IN HELA, SIGNAL = 2.1; EXPRESSED IN HEART, SIGNAL = 0.82; EXPRESSED IN BONE MARROW, SIGNAL = 0.84; SWISSPROT HIT: P26640, EVALUE 2.00e-26; NT HIT: gi16174853, EVALUE 2.00e-84; EST_HUMAN HIT: BE275913.1, EVALUE 2.00e-84
ctcaccaagtagacatcacagagctcatagagccagaagctgtactgggcagtggtgacggccgggaagtcgtaggcctggaagccttgattgctgagcctcacagcctctgtcaggcggctgcggatccagcggtccaccaggctctcatggcctccgggcttgggg

SEQ ID NO: 23341 - DNA, 117 bp, Homo sapiens
  MAP TO CHR22.3; EXPRESSED IN ADULT LIVER, SIGNAL =  13; EXPRESSED IN BONE MARROW, SIGNAL = 2.4; EXPRESSED IN HEART, SIGNAL = 3.2; NT HIT: Z26491.1, EVALUE 3.00e-57; EST_HUMAN HIT: H94343.1, EVALUE 7.00e-53
tcccaggacatcatcccccagctgaagaagaagtatgatgtggacacactggacatggtcttcctcgaccactggaaggaccggtacctgccggacacgcttcttttggaggtgagc

SEQ ID NO: 23342 - DNA, 203 bp, Homo sapiens
  MAP TO CHR17.3; EXPRESSED IN BONE MARROW, SIGNAL = 1.6; EXPRESSED IN HEART, SIGNAL = 2.4; EXPRESSED IN PLACENTA, SIGNAL = 1.6; SWISSPROT HIT: Q12809, EVALUE 6.00e-21; NT HIT: gi13540548, EVALUE 1.00e-109; EST_HUMAN HIT: BG395842.1, EVALUE 1.00e-108
ctgtggtggatctcatcgtggacatcatgttcgtcgtggacatcgtcatcaacttccgcaccacctatgtcaacaccaatgatgaggtggtcagccacccccgccgcatcgccgtccactacttcaagggctggttcctcattgacatggtggccgccatccctttcgacctcctgatcttccgcactggctccgatgaggtg

SEQ ID NO: 23343 - DNA, 157 bp, Homo sapiens
  MAP TO CHR1.3; EXPRESSED IN PLACENTA, SIGNAL = 1.2; EXPRESSED IN BONE MARROW, SIGNAL = 1.2; EXPRESSED IN BRAIN, SIGNAL = 1.3; NT HIT: gi14737383, EVALUE 2.00e-83; EST_HUMAN HIT: AL597323.1, EVALUE 4.00e-83; SWISSPROT HIT: P10155, EVALUE 3.00e-24
ggttaaatcatatctaatgtgaaatttcgaattacatccagagctccagtatcaaagccgcacatatccaacatgcctctatcatctgggtctgcaatggtgaaaccatttgatgtcattccacaaacaatcaatttagctggaatatccattttct

SEQ ID NO: 23344 - DNA, 441 bp, Homo sapiens
  MAP TO CHR12.3; EXPRESSED IN BONE MARROW, SIGNAL = 0.93; EXPRESSED IN FETAL LIVER, SIGNAL = 0.87; EXPRESSED IN BRAIN, SIGNAL = 0.83; EXPRESSED IN ADULT LIVER, SIGNAL = 0.91; EXPRESSED IN PLACENTA, SIGNAL = 1.2; NT HIT: gi14764345, EVALUE 0.00e+00; EST_HUMAN HIT: BF209999.1, EVALUE 6.10e-01; SWISSPROT HIT: P29475, EVALUE 1.00e-78
ggctgttctttgccggccggtggctggtgggacagatccacggctttggtggggggacccaggggctgtgtcacccggatggtcttgggggtcccatcacctgtaaaggtggtctccaggtgcgtggtgaaaccttcagggcccctcagaatgaggaccacgtgggtctcagaggcaatgcctctgagtacctccagggcgctgtcatagctcaggtccaccaagggccggccgttgaccgcaagaatgatgtctccggcctggatgaggccactctgctctgcggcgcccccacgaatcaggtcagagatgatcacgggcggcttactgacccgctccttcaccagaaatcccaggcccccaactttgcgcttgaagagacgaacagaaatgacattgggctggatttgctgaacaccgaacatgtgatcctccatggta

SEQ ID NO: 23345 - DNA, 171 bp, Homo sapiens
  MAP TO CHR22.3; EXPRESSED IN LUNG, SIGNAL = 3.2; EXPRESSED IN HELA, SIGNAL = 2.4; EXPRESSED IN PLACENTA, SIGNAL = 1.8; EXPRESSED IN BONE MARROW, SIGNAL = 1.8; EXPRESSED IN FETAL LIVER, SIGNAL = 1.4; EXPRESSED IN BRAIN, SIGNAL = 2.1; EXPRESSED IN ADULT LIVER, SIGNAL = 1.7; SWISSPROT HIT: P35240, EVALUE 2.00e-25; NT HIT: X72669.1, EVALUE 1.00e-91; EST_HUMAN HIT: H55070.1, EVALUE 1.00e-86
cagagtggaatacatggaaaagagcaagcatctgcaggagcagctcaatgaactcaagacagaaatcgaggccttgaaactgaaagagagggagacagctctggatattctgcacaatgagaactccgacaggggtggcagcagcaagcacaataccattaaaaaggtacc

SEQ ID NO: 23346 - DNA, 109 bp, Homo sapiens
  MAP TO CHR21.3; EXPRESSED IN LUNG, SIGNAL = 3.3; EXPRESSED IN HEART, SIGNAL = 2.2; EXPRESSED IN PLACENTA, SIGNAL = 2.8; EXPRESSED IN BONE MARROW, SIGNAL = 2.4; EXPRESSED IN BRAIN, SIGNAL = 1.7; EXPRESSED IN FETAL LIVER, SIGNAL = 3.1; EXPRESSED IN ADULT LIVER, SIGNAL = 2.5; SWISSPROT HIT: O15393, EVALUE 2.00e-16; NT HIT: AL163285.2, EVALUE 7.00e-55; EST_HUMAN HIT: BF675496.1, EVALUE 8.00e-37
ggcatacttttccacgcagtgggcggctgtcacgatccactcgggggtgatgatggagcctccgcacacgtggacgttctggacgtgcaggctgacctgccagggccag

SEQ ID NO: 23347 - DNA, 207 bp, Homo sapiens
  MAP TO CHR1.3; EXPRESSED IN LUNG, SIGNAL = 0.95; EXPRESSED IN ADULT LIVER, SIGNAL = 1.2; EXPRESSED IN BRAIN, SIGNAL =   3; EXPRESSED IN BONE MARROW, SIGNAL =   1; SWISSPROT HIT: gi399162, EVALUE 1.00e-08; NT HIT: AF019406.1, EVALUE 1.00e-113; EST_HUMAN HIT: BE560499.1, EVALUE 1.00e-112
tgctcaaggccccttgatggatccaggctctgtaaggcgggcagaggcataggccgaagctccaaggcaggcggcaggttcacagaagcccggcagccccacggggcctggcaggccaggtcgacctgcctctcctggagcccctggggaccctcgatctccatccttgccgttgattgcctggccaggccggccagggagtcctgt

SEQ ID NO: 23348 - DNA, 169 bp, Homo sapiens
  MAP TO CHR17.3; EXPRESSED IN BONE MARROW, SIGNAL = 4.6; EXPRESSED IN PLACENTA, SIGNAL = 6.4; EXPRESSED IN HEART, SIGNAL = 4.3; EXPRESSED IN FETAL LIVER, SIGNAL = 2.9; EXPRESSED IN ADULT LIVER, SIGNAL = 3.9; EXPRESSED IN BRAIN, SIGNAL = 5.4; NT HIT: AF274875.1, EVALUE 2.00e-90; EST_HUMAN HIT: AU133983.1, EVALUE 2.00e-82; SWISSPROT HIT: Q14451, EVALUE 4.00e-25
acaactcacatgggggcggctggcatcgcgggggagcagcccccttgcactggaggggcccccgagaattgggctctgtgagggaggactgcagagctcagggaaggggttggggatagaggggagggaggtggcacgcctctcctcctctcgaagtttcctgtggcaa

SEQ ID NO: 23349 - DNA, 135 bp, Homo sapiens
  MAP TO CHR2.3; EXPRESSED IN HEART, SIGNAL = 6.2; EXPRESSED IN BRAIN, SIGNAL = 7.5; EXPRESSED IN HELA, SIGNAL = 3.6; EXPRESSED IN BONE MARROW, SIGNAL = 7.3; EXPRESSED IN PLACENTA, SIGNAL = 5.4; NT HIT: gi14730871, EVALUE 6.00e-59; EST_HUMAN HIT: BF826916.1, EVALUE 9.00e-59; SWISSPROT HIT: O15232, EVALUE 2.00e-15
aaaggatatgtttagtgttcagtctttgaagatacgagctgaccttgtcctggaatgccagtgtagcttcacatccacaagcatcttcagtggaaacaagtcttcgtgcttcctcagtggctgaagacaatgaca

SEQ ID NO: 23350 - DNA, 210 bp, Homo sapiens
  MAP TO CHR17.3; EXPRESSED IN ADULT LIVER, SIGNAL = 0.89; EXPRESSED IN BRAIN, SIGNAL = 1.1; EXPRESSED IN PLACENTA, SIGNAL = 1.9; EXPRESSED IN BONE MARROW, SIGNAL =   1; EXPRESSED IN HEART, SIGNAL = 0.86; SWISSPROT HIT: P02535, EVALUE 1.00e-20; NT HIT: gi14775973, EVALUE 1.00e-112; EST_HUMAN HIT: AL576392.1, EVALUE 1.00e-109
gagcaggcggcggtaggtctcgatctccacctccaggcgtgtcttgatgtccagcaattgctcgtactctgcgttctggcatttagtctcaccccagatctggcagatctcctcctccagggcactgatctgcgtttgaatttctgacagctgagccacgtagccagcttctgtgtcagccagggttccctccagggagcttttctaaga

SEQ ID NO: 23351 - DNA, 119 bp, Homo sapiens
  MAP TO CHR22.3; EXPRESSED IN BONE MARROW, SIGNAL = 1.1; EXPRESSED IN PLACENTA, SIGNAL = 1.4; EXPRESSED IN LUNG, SIGNAL = 2.3; EXPRESSED IN FETAL LIVER, SIGNAL = 0.65; EXPRESSED IN ADULT LIVER, SIGNAL = 0.73; SWISSPROT HIT: P36543, EVALUE 2.00e-03; NT HIT: gi14776833, EVALUE 3.00e-57; EST_HUMAN HIT: BG701517.1, EVALUE 2.00e-56
acttacattttcttctgctgctcaatctgtttctctttcttctcataatattccataatctttagtctttgggtttgcacaagccgacctttctctatgttgaactcttcttctgccta

SEQ ID NO: 23352 - DNA, 169 bp, Homo sapiens
  MAP TO CHRX.3; EXPRESSED IN BONE MARROW, SIGNAL = 0.97; EXPRESSED IN HEART, SIGNAL = 1.4; EXPRESSED IN ADULT LIVER, SIGNAL = 1.5; SWISSPROT HIT: P22304, EVALUE 1.00e-20; NT HIT: L04579.1, EVALUE 2.00e-90; EST_HUMAN HIT: BG614099.1, EVALUE 5.00e-73
accaaagcccctccctcctgtgtagatgctctgaacgttcttctcatcatcgtggatgacctgcgcccctccctgggctgttatggggataagctggtgaggtccccaaatattgaccaactggcatcccacagcctcctcttccagaatgcctttgcgcaggtatgtc

SEQ ID NO: 23353 - DNA, 194 bp, Homo sapiens
  MAP TO CHR1.3; EXPRESSED IN BONE MARROW, SIGNAL = 0.94; EXPRESSED IN LUNG, SIGNAL = 0.93; EXPRESSED IN HEART, SIGNAL =   1; EXPRESSED IN FETAL LIVER, SIGNAL = 0.49; EXPRESSED IN ADULT LIVER, SIGNAL = 0.83; NT HIT: AF101079.1, EVALUE 1.00e-105; EST_HUMAN HIT: AW067903.1, EVALUE 5.00e-61; SWISSPROT HIT: P12107, EVALUE 2.00e-08
cttacctcctctgacctctctagcttggaagaggaaggtcaatgcgagggttgttacggtgaaatcccagagccaccgtttcgttttccacctagaggaccacggctccatctccgagccccgcactcacaactgtgaactcaacccacgaaattgcgactgcagaccaacttcgtcctttccaaggtatcgcc

SEQ ID NO: 23354 - DNA, 129 bp, Homo sapiens
  MAP TO CHR1.3; EXPRESSED IN LUNG, SIGNAL = 1.5; EXPRESSED IN HEART, SIGNAL = 1.3; EXPRESSED IN ADULT LIVER, SIGNAL = 1.4; EXPRESSED IN BRAIN, SIGNAL = 1.4; EXPRESSED IN BONE MARROW, SIGNAL = 1.4; SWISSPROT HIT: P04746, EVALUE 2.00e-18; NT HIT: M18716.1, EVALUE 4.00e-63; EST_HUMAN HIT: BI520380.1, EVALUE 9.00e-62
aattcatcttcatttccagatcttgtgcataatttatagctaactggttggtatctttcccaccaaggtctgaaagggttgtaaattgcaacattttcatttggtggagagacctacaaattaaacagt

SEQ ID NO: 23355 - DNA, 118 bp, Homo sapiens
  MAP TO CHRX.3; EXPRESSED IN BRAIN, SIGNAL = 1.1; EXPRESSED IN BONE MARROW, SIGNAL = 1.2; EXPRESSED IN LUNG, SIGNAL = 0.57; EXPRESSED IN PLACENTA, SIGNAL = 1.1; EXPRESSED IN HEART, SIGNAL = 1.2; EXPRESSED IN FETAL LIVER, SIGNAL = 0.91; SWISSPROT HIT: P51810, EVALUE 9.00e-16; NT HIT: gi13651268, EVALUE 1.00e-56; EST_HUMAN HIT: BG760730.1, EVALUE 2.00e-56
atttacctgcagtcactgtcttttggaacaggatggggttcgccacgagaaccagcagcaggggcaggtacatggtgacatagtgggggatggcgtggtccaggccccgctcacacct

SEQ ID NO: 23356 - DNA, 197 bp, Homo sapiens
  MAP TO CHR22.3; EXPRESSED IN ADULT LIVER, SIGNAL = 4.9; EXPRESSED IN BRAIN, SIGNAL = 6.7; EXPRESSED IN LUNG, SIGNAL = 8.1; EXPRESSED IN HELA, SIGNAL = 5.1; EXPRESSED IN BONE MARROW, SIGNAL = 6.5; EXPRESSED IN PLACENTA, SIGNAL = 6.3; EST_HUMAN HIT: BE891987.1, EVALUE 1.00e-104; SWISSPROT HIT: P17050, EVALUE 1.00e-29; NT HIT: M59199.1, EVALUE 1.00e-107
atcctgcgtccctggatgcctaagggatcctggttgattttgatcatgagtggattctgcagaatgtccatgttctgggcggagatggtacgcaggtctgtggacatcaagaggggggctgccagcaccgtccacagggccatctgggcccgggattgctctaagctgagaccaaagttcccaatgagcagctgggg

SEQ ID NO: 23357 - DNA, 221 bp, Homo sapiens
  MAP TO CHR11.3; EXPRESSED IN ADULT LIVER, SIGNAL = 3.5; EXPRESSED IN FETAL LIVER, SIGNAL =   3; EXPRESSED IN HELA, SIGNAL = 4.5; EXPRESSED IN PLACENTA, SIGNAL =   3; EXPRESSED IN BONE MARROW, SIGNAL = 3.9; NT HIT: gi15312056, EVALUE 1.00e-114; EST_HUMAN HIT: AI929479.1, EVALUE 1.00e-114; SWISSPROT HIT: O52538, EVALUE 1.80e+00
tttctttgactaacaggaatgaattcagggcatggacggacatcaagcctgtgaaaccaataaaggccaagccccagtacaagcccccagatgataagatggttcatgagaccagctacagtgctcagttcaaaggagaggccagcaagccaacaacagctgacaataaggtcattgatcgcagaagaatacgcagcctctacagcgaacccttcaaggaa

SEQ ID NO: 23358 - DNA, 169 bp, Homo sapiens
  MAP TO CHR9.3; EXPRESSED IN ADULT LIVER, SIGNAL = 1.4; EXPRESSED IN HELA, SIGNAL = 2.3; EXPRESSED IN BONE MARROW, SIGNAL = 1.5; EXPRESSED IN LUNG, SIGNAL = 1.3; EXPRESSED IN HEART, SIGNAL = 1.5; EXPRESSED IN PLACENTA, SIGNAL = 1.4; EXPRESSED IN BRAIN, SIGNAL = 1.5; NT HIT: gi13640920, EVALUE 4.00e-88; EST_HUMAN HIT: AL559559.1, EVALUE 6.00e-88; SWISSPROT HIT: O15287, EVALUE 4.00e-25
ttacctggctgccattcagggtctctagtaacaaggccaggtccccaagacggtcagcactcaaccagagggcagcctgcaggccaaccaggcggtgcagggcagacagcagctccggcagaaggcaggaagcacgaaggacagagtcccacagctccctgagcccctg

SEQ ID NO: 23359 - DNA, 153 bp, Homo sapiens
  MAP TO CHR8.3; EXPRESSED IN HEART, SIGNAL = 1.7; EXPRESSED IN PLACENTA, SIGNAL = 1.8; EXPRESSED IN LUNG, SIGNAL = 1.2; EXPRESSED IN ADULT LIVER, SIGNAL = 2.7; EXPRESSED IN BRAIN, SIGNAL = 1.7; EXPRESSED IN BONE MARROW, SIGNAL = 1.6; SWISSPROT HIT: P17097, EVALUE 3.00e-19; NT HIT: M29580.1, EVALUE 5.00e-66; EST_HUMAN HIT: AU121729.1, EVALUE 5.00e-76
agcctcacctagtccagccacactgctgtggttctccagcatcacttccctgtagagggccctctggccagggtccagacactgccactcctcccgagagaagtgcacagccacatcgccaaatgttaccacctcctgaaaggacacacacca

SEQ ID NO: 23360 - DNA, 128 bp, Homo sapiens
  MAP TO CHR2.3; EXPRESSED IN LUNG, SIGNAL =  12; EXPRESSED IN PLACENTA, SIGNAL =   6; EXPRESSED IN HEART, SIGNAL = 8.9; EXPRESSED IN BONE MARROW, SIGNAL = 8.4; EXPRESSED IN BRAIN, SIGNAL = 9.3; SWISSPROT HIT: O77683, EVALUE 1.00e-16; NT HIT: gi16158591, EVALUE 5.00e-56; EST_HUMAN HIT: R10249.1, EVALUE 2.00e-65
tctttgtttcttctcaggttctccttactatgacaatgtccgccccctctcttaccctgattcggatgctgtgctgatttgctttgacatcagtagaccagagaccctggacagtgtcctcaaaaagg

SEQ ID NO: 23361 - DNA, 117 bp, Homo sapiens
  MAP TO CHR11.3; EXPRESSED IN HELA, SIGNAL = 2.4; EXPRESSED IN PLACENTA, SIGNAL = 4.5; EXPRESSED IN LUNG, SIGNAL = 2.5; EXPRESSED IN HEART, SIGNAL = 4.2; EXPRESSED IN ADULT LIVER, SIGNAL = 5.5; EXPRESSED IN FETAL LIVER, SIGNAL = 3.9; EXPRESSED IN BRAIN, SIGNAL = 4.6; EXPRESSED IN BONE MARROW, SIGNAL = 4.3; SWISSPROT HIT: Q92785, EVALUE 2.00e-16; NT HIT: gi14784111, EVALUE 5.00e-56; EST_HUMAN HIT: BE887004.1, EVALUE 7.00e-56
ccacaggattggcctccggacagctgtactcctaccctgcccggcgctggcggaaaaagcggcgagcccatccccctgaggatccacgactttccttcccatctattaagccaggta

SEQ ID NO: 23362 - DNA, 180 bp, Homo sapiens
  MAP TO CHR14.3; EXPRESSED IN FETAL LIVER, SIGNAL = 7.6; EXPRESSED IN ADULT LIVER, SIGNAL =  12; EXPRESSED IN BRAIN, SIGNAL =  15; EXPRESSED IN HELA, SIGNAL =   7; EXPRESSED IN PLACENTA, SIGNAL =  22; EXPRESSED IN BONE MARROW, SIGNAL =  12; EST_HUMAN HIT: BE933692.1, EVALUE 3.00e-87; SWISSPROT HIT: P50281, EVALUE 3.00e-28; NT HIT: gi13027797, EVALUE 2.00e-87
ccatccttccaggaaatgacatcttcctggtggctgtgcacgagctgggccatgccctggggctcgagcattccagtgacccctcggccatcatggcacccttttaccagtggatggacacggagaattttgtgctgcccgatgatgaccgccggggcatccagcaactttatggcgagt

SEQ ID NO: 23363 - DNA, 149 bp, Homo sapiens
  MAP TO CHR2.3; EXPRESSED IN BONE MARROW, SIGNAL =   1; EXPRESSED IN FETAL LIVER, SIGNAL = 1.2; EXPRESSED IN ADULT LIVER, SIGNAL = 1.2; EXPRESSED IN BRAIN, SIGNAL = 1.3; SWISSPROT HIT: Q00416, EVALUE 1.20e+00; NT HIT: AB052741.1, EVALUE 1.00e-78; EST_HUMAN HIT: AA749016.1, EVALUE 1.00e-76
cttcaggtgacttgatggagggtgagctctattctgctctcaaggaagaagaagcatccgaatcggtttctagtaccaatttcagtggtgaaatgcacttctatgagcttgtggaagacacaaaagatggcatctggctggttcaggta

SEQ ID NO: 23364 - DNA, 186 bp, Homo sapiens
  MAP TO CHRX.3; EXPRESSED IN BONE MARROW, SIGNAL = 1.3; EXPRESSED IN FETAL LIVER, SIGNAL =   2; EXPRESSED IN ADULT LIVER, SIGNAL = 1.3; EXPRESSED IN LUNG, SIGNAL = 1.1; SWISSPROT HIT: Q15738, EVALUE 8.00e-25; EST_HUMAN HIT: BF305562.1, EVALUE 2.00e-79; NT HIT: U82671.3, EVALUE 1.00e-100
ttttgtctttctttgcttttccaggatctgtacccagctctgaaaggtgtaaacacagttttccactgtgcgtcacccccaccatccagtaacaacaaggagctcttttatagagtgaattacattggcaccaagaatgtcattgaaacttgcaaagaggctggggttcaggtaaggggaaggctg

SEQ ID NO: 23365 - DNA, 118 bp, Homo sapiens
  MAP TO CHR19.3; EXPRESSED IN BRAIN, SIGNAL = 1.4; EXPRESSED IN PLACENTA, SIGNAL = 0.65; EXPRESSED IN BONE MARROW, SIGNAL = 0.98; EXPRESSED IN LUNG, SIGNAL = 1.5; EXPRESSED IN HEART, SIGNAL = 0.87; SWISSPROT HIT: Q99676, EVALUE 1.00e-15; EST_HUMAN HIT: BE396279.1, EVALUE 7.00e-56; NT HIT: gi14770861, EVALUE 4.00e-13
cattcatagggtttttctccagtatgaatcctctgatgttgaacaagatttgatctctggctgaaggcttttccacactctatacatttatagggtttctctccagtatgaattcttt

SEQ ID NO: 23366 - DNA, 215 bp, Homo sapiens
  MAP TO CHR12.3; EXPRESSED IN LUNG, SIGNAL = 0.98; EXPRESSED IN HEART, SIGNAL = 1.4; EXPRESSED IN BONE MARROW, SIGNAL = 0.94; EXPRESSED IN BRAIN, SIGNAL = 1.5; EXPRESSED IN ADULT LIVER, SIGNAL =   1; NT HIT: gi14763128, EVALUE 1.00e-100; SWISSPROT HIT: Q01064, EVALUE 2.00e-29; EST_HUMAN HIT: BG390932.1, EVALUE 1.00e-99
gggaggctgagtgtgggcgagcctcaccgttccacgaagatcccagcctgcacagcgtgcacaatgcttcggaacttgggcttctcctctgctcggcggcctttggcccgggcctgctgggtgaaggtggaggccagccagtcccgcacctccgaaggcacggcatctgaccgcagctcctgcagctcgtcctccgtgtccaagatttgcctgag

SEQ ID NO: 23367 - DNA, 154 bp, Homo sapiens
  MAP TO CHRX.3; EXPRESSED IN FETAL LIVER, SIGNAL =   1; EXPRESSED IN BRAIN, SIGNAL = 1.5; EXPRESSED IN LUNG, SIGNAL = 0.88; EXPRESSED IN BONE MARROW, SIGNAL = 1.3; EXPRESSED IN ADULT LIVER, SIGNAL = 1.6; SWISSPROT HIT: Q9BZS1, EVALUE 4.00e-22; NT HIT: gi14759883, EVALUE 1.00e-75
ccccagctctcaacggtggatgcccacgcccggacccctgtgctgcaggtgcaccccctggagagcccagccatgatcagcctcacaccacccaccaccgccactggggtcttctccctcaaggcccggcctggcctcccacctggtaacacct

SEQ ID NO: 23368 - DNA, 374 bp, Homo sapiens
  MAP TO CHR1.3; EXPRESSED IN HELA, SIGNAL = 8.4; EXPRESSED IN BONE MARROW, SIGNAL = 7.6; EST_HUMAN HIT: BE881562.1, EVALUE 0.00e+00; SWISSPROT HIT: P20670, EVALUE 2.00e-52; NT HIT: gi16158281, EVALUE 0.00e+00
ttgtggctttcggttttctttggtaacagaacggcctggatgttaggcaaaacgccgccctgggcgatggtgactttgcccagcagcttgttcagttcctcgtcgttgcggatggccagctggaggtgacgagggatgatgcgcgtcttcttgttgtcccgagccgcgttgcccgccagctccaggatctcggcggtcaggtactcgaggaccgccgccatgtagacgggcgcgccggcccccacccgctccgcgtagttgcctttgcgcagcaagcggtgcactcgccctaccgggaactggaggccagcgcgggacgagcgcgacttggccttggcgcgggccttgcctccttgtttgccacgaccagacat

SEQ ID NO: 23369 - DNA, 243 bp, Homo sapiens
  MAP TO CHR8.3; EXPRESSED IN LUNG, SIGNAL = 0.69; EXPRESSED IN BONE MARROW, SIGNAL = 0.79; EXPRESSED IN FETAL LIVER, SIGNAL = 0.59; EXPRESSED IN PLACENTA, SIGNAL = 1.1; EST_HUMAN HIT: BI544605.1, EVALUE 0.00e+00; SWISSPROT HIT: P07196, EVALUE 5.00e-26; NT HIT: gi14782443, EVALUE 0.00e+00
aaactcttggaaggcgaggagacccgactcagtttcaccagcgtgggaagcataaccagtggctactcccagagctcccaggtctttggccgatctgcctacggcggtttacagaccagctcctatctgatgtccacccgctccttcccgtcctactacaccagccatgtccaagaggagcagatcgaagtggaggaaaccattgaggctgccaaggctgaggaagccaaggatgagcccccc

SEQ ID NO: 23370 - DNA, 223 bp, Homo sapiens
  MAP TO CHR3.3; EXPRESSED IN BONE MARROW, SIGNAL = 2.2; EXPRESSED IN LUNG, SIGNAL =   3; EXPRESSED IN ADULT LIVER, SIGNAL = 2.3; NT HIT: gi14733260, EVALUE 1.00e-118; EST_HUMAN HIT: BG765973.1, EVALUE 1.00e-117; SWISSPROT HIT: Q04637, EVALUE 2.00e-06
cgatcctccgtgaggctagctgccttgcgcagcccctcaggctgggagggccgttctctactccgctcctccacttccttgctgaagctccgcttggtagcaggtgtccgcgcacgatcaagccggtccccacggtcccctccccgttcactccgctctaggcggtctcctcggtctccagctttctcgcctcgttctcggctcaagctactcctggaagaca

SEQ ID NO: 23371 - DNA, 133 bp, Homo sapiens
  MAP TO CHR9.3; EXPRESSED IN ADULT LIVER, SIGNAL = 3.3; EXPRESSED IN LUNG, SIGNAL = 7.1; EXPRESSED IN HEART, SIGNAL =   3; EXPRESSED IN HELA, SIGNAL =   3; EXPRESSED IN BONE MARROW, SIGNAL = 2.3; EST_HUMAN HIT: BF810094.1, EVALUE 4.00e-67; SWISSPROT HIT: P04083, EVALUE 2.00e-17; NT HIT: gi14745912, EVALUE 1.00e-63
cagggtgttggaactcgccataaggcattgatcaggattatggtttcccgttctgaaattgacatgaatgatatcaaagcattctatcagaagatgtatggtatctccctttgccaagccatcctggtatgtt

SEQ ID NO: 23372 - DNA, 142 bp, Homo sapiens
  MAP TO CHR15.3; EXPRESSED IN ADULT LIVER, SIGNAL =   2; EXPRESSED IN BRAIN, SIGNAL = 2.1; EXPRESSED IN BONE MARROW, SIGNAL = 1.9; EXPRESSED IN PLACENTA, SIGNAL = 1.8; SWISSPROT HIT: P29762, EVALUE 7.00e-18; EST_HUMAN HIT: AU132726.1, EVALUE 4.00e-58; NT HIT: gi13653763, EVALUE 2.00e-58
taccaggataagttcatcgttggccagctcacgggtccagtaggttttggggccgtccccttcaagaagagtttgcgtgcagtggatcttgttctcattctcccaagtggctaaactctgcaggcgggaaaaccattagtga

SEQ ID NO: 23373 - DNA, 128 bp, Homo sapiens
  MAP TO CHR20.3; EXPRESSED IN ADULT LIVER, SIGNAL = 1.1; EXPRESSED IN BONE MARROW, SIGNAL = 1.2; EXPRESSED IN LUNG, SIGNAL = 3.7; SWISSPROT HIT: P57740, EVALUE 6.00e+00; EST_HUMAN HIT: BG910409.1, EVALUE 6.00e-66; NT HIT: gi4758977, EVALUE 4.00e-66
gaggacaccctcacctatgctgacctggacatggtccacctcaaccggacccccaagcagccggcccccaagcctgagccgtccttctcagagtacgccagcgtccaggtcccgaggaagtgaatggg

SEQ ID NO: 23374 - DNA, 284 bp, Homo sapiens
  MAP TO CHR11.3; EXPRESSED IN HEART, SIGNAL = 1.3; EXPRESSED IN PLACENTA, SIGNAL = 1.2; EXPRESSED IN BONE MARROW, SIGNAL = 1.5; EXPRESSED IN FETAL LIVER, SIGNAL = 2.1; EXPRESSED IN ADULT LIVER, SIGNAL = 1.8; EXPRESSED IN LUNG, SIGNAL = 1.3; SWISSPROT HIT: P43004, EVALUE 1.00e-40; EST_HUMAN HIT: AV719930.1, EVALUE 0.00e+00; NT HIT: gi15306305, EVALUE 1.00e-129
agggacaggatgagaacttcagtcaatgttgtgggtgactcttttggggctgggatagtctatcacctctccaagtctgagctggataccattgactcccagcatcgagtgcatgaagatattgaaatgaccaagactcaatccatttatgatgacatgaagaaccacagggaaagcaactctaatcaatgtgtctatgctgcacacaactctgtcatagtagatgaatgcaaggtacatttcccattcatggatatcgagacttgtatatagtagtgcatgct

SEQ ID NO: 23375 - DNA, 129 bp, Homo sapiens
  MAP TO CHR6.3; EXPRESSED IN LUNG, SIGNAL = 2.8; EXPRESSED IN HEART, SIGNAL = 2.1; EXPRESSED IN PLACENTA, SIGNAL = 1.5; EXPRESSED IN BONE MARROW, SIGNAL = 1.7; EXPRESSED IN FETAL LIVER, SIGNAL = 1.8; EXPRESSED IN BRAIN, SIGNAL = 1.1; NT HIT: Z14977.1, EVALUE 1.00e-66; SWISSPROT HIT: P28065, EVALUE 2.00e-18; EST_HUMAN HIT: BE067069.1, EVALUE 4.00e-64
ctggaggaacctccacttgttttggctgctgcaaatgtggtgagaaatatcagctataaatatcgagaggacttgtctgcacatctcatggtagctggctgggaccaacgtgaaggaggtcaggtgagt

SEQ ID NO: 23376 - DNA, 356 bp, Homo sapiens
  MAP TO CHR3.3; EXPRESSED IN HELA, SIGNAL =   3; EXPRESSED IN PLACENTA, SIGNAL =   3; EXPRESSED IN BONE MARROW, SIGNAL = 2.9; EXPRESSED IN ADULT LIVER, SIGNAL = 3.6; EXPRESSED IN BRAIN, SIGNAL = 4.7; NT HIT: gi14725910, EVALUE 0.00e+00; SWISSPROT HIT: P56539, EVALUE 1.00e-64; EST_HUMAN HIT: W95608.1, EVALUE 4.00e-11
cctggctttagacctccttccgcagcaccaccttgatgctgctgcagacctggcccagggccgcgaagagtgggttgcagaaggtgcggatgcagagtgagtagatgtggctgatgcactggatctcgatcaggtagctcttaatgcatggcaccaccgcccagatgtggcagaaggagatgcaggcgaacaggaagccccagagcagggccagtgggacgcccagcagcgtggacaacagacggtagcaccagtacttggagacagtgaaggtggtgtagctcaccttccacacgccgtcaaagctgtaggtgcccacaggctctgcgatcacgtcttcaaaatccacctgcagg

SEQ ID NO: 23377 - DNA, 165 bp, Homo sapiens
  MAP TO CHR8.3; EXPRESSED IN LUNG, SIGNAL = 3.9; EXPRESSED IN HEART, SIGNAL = 5.7; EXPRESSED IN BONE MARROW, SIGNAL = 3.6; EXPRESSED IN BRAIN, SIGNAL = 4.9; EXPRESSED IN ADULT LIVER, SIGNAL = 4.7; SWISSPROT HIT: Q9UPE1, EVALUE 7.00e-17; EST_HUMAN HIT: AI869878.1, EVALUE 4.00e-52; NT HIT: gi14752654, EVALUE 3.00e-52
tccttcaagggttagaatatctacacagtaagaccaagattactcatactgacataaagccgcaaaacatcttgatgtgtatggatgatgcatatgtgagaagaacggcagctgagaccactgaggggcagaaagcaggtattcctcctccttcagggtctgcag

SEQ ID NO: 23378 - DNA, 102 bp, Homo sapiens
  MAP TO CHR19.3; EXPRESSED IN BONE MARROW, SIGNAL = 0.97; EXPRESSED IN PLACENTA, SIGNAL = 1.2; EXPRESSED IN HEART, SIGNAL = 1.7; SWISSPROT HIT: Q92876, EVALUE 1.00e-14; EST_HUMAN HIT: AW994344.1, EVALUE 6.00e-50; NT HIT: AF149289.1, EVALUE 1.00e-50
aggtgatttccctgacaccatccagtgtgcatacatccacctggtgtcccgtgaggagtgtgagcatgcctaccctggccagatcacccagaacatgttgtg

SEQ ID NO: 23379 - DNA, 180 bp, Homo sapiens
  MAP TO CHR1.3; EXPRESSED IN BONE MARROW, SIGNAL = 3.5; EXPRESSED IN LUNG, SIGNAL = 4.6; EXPRESSED IN PLACENTA, SIGNAL = 2.7; EXPRESSED IN HEART, SIGNAL = 3.4; EXPRESSED IN ADULT LIVER, SIGNAL = 3.7; EXPRESSED IN BRAIN, SIGNAL = 4.2; SWISSPROT HIT: P50342, EVALUE 1.00e-19; EST_HUMAN HIT: BG953129.1, EVALUE 5.00e-92; NT HIT: AF223563.3, EVALUE 5.00e-97
tctgtcctcaggacgactccggggggcctctggtctgccaggtgaacggtgcctgggtgcaggctggcattgtgagctggggtgagggctgcggccgccccaacaggccgggagtctacactcgtgtccctgcctacgtgaactggatccgccgccacatcacagcatcagggggctcag

SEQ ID NO: 23380 - DNA, 143 bp, Homo sapiens
  MAP TO CHR20.3; EXPRESSED IN ADULT LIVER, SIGNAL = 1.8; EXPRESSED IN BRAIN, SIGNAL = 1.6; EXPRESSED IN HEART, SIGNAL = 1.6; EXPRESSED IN BONE MARROW, SIGNAL = 2.2; EXPRESSED IN PLACENTA, SIGNAL = 1.5; SWISSPROT HIT: P00813, EVALUE 2.00e-18; EST_HUMAN HIT: BE877635.1, EVALUE 1.00e-64; NT HIT: M13792.1, EVALUE 5.00e-75
gggttgggggcaactcacgcgatagcaggcatgtagtagtcaaacttggccaggaagtctggaagggtgagcggcttgtccatgccaatgacgttcagcagcccctctgctgtgttagctgggagggcgatccctctcctcct

SEQ ID NO: 23381 - DNA, 227 bp, Homo sapiens
  MAP TO CHR6.3; EXPRESSED IN BONE MARROW, SIGNAL = 1.8; EXPRESSED IN LUNG, SIGNAL = 1.2; EXPRESSED IN PLACENTA, SIGNAL = 1.6; EXPRESSED IN ADULT LIVER, SIGNAL = 1.8; EXPRESSED IN BRAIN, SIGNAL = 4.5; SWISSPROT HIT: Q14833, EVALUE 1.00e-36; EST_HUMAN HIT: AA297070.1, EVALUE 1.00e-99; NT HIT: gi4504140, EVALUE 1.00e-121
actcaccgtcctcacgggacttctggatgaaggcctccacaccgctctcaccatagctgccctccgaggccactgtggacacatagttccacttgagggcacggacgatgtccaccatggcctgggcctggtacgtgtccgagggcaccacgcgggagaagaagtcgtagcggctgttgtcactcaggtctggcgctgtggaggcgtagctgatctggggtatctga

SEQ ID NO: 23382 - DNA, 184 bp, Homo sapiens
  MAP TO CHR17.3; EXPRESSED IN LUNG, SIGNAL = 1.2; EXPRESSED IN HEART, SIGNAL = 1.9; EXPRESSED IN FETAL LIVER, SIGNAL = 1.9; EXPRESSED IN ADULT LIVER, SIGNAL = 1.5; EXPRESSED IN BRAIN, SIGNAL = 1.9; EXPRESSED IN PLACENTA, SIGNAL = 2.3; EXPRESSED IN BONE MARROW, SIGNAL = 1.9; NT HIT: gi14785933, EVALUE 1.00e-88; SWISSPROT HIT: Q92800, EVALUE 9.00e-30; EST_HUMAN HIT: BG470126.1, EVALUE 3.00e-99
cagagtagccccactcacggtgaaggaagcagtcgtatttaaagcagcgccggcaaaaaagtgtgtggaaggagtgcagagattgctcccgctgcacagacttggcattggggccatcgatgttgggtgtgcactgagggggaagtgcattggggtctgacatctctgttagttctcgatacct

SEQ ID NO: 23383 - DNA, 176 bp, Homo sapiens
  MAP TO CHR12.3; EXPRESSED IN FETAL LIVER, SIGNAL = 1.5; EXPRESSED IN ADULT LIVER, SIGNAL = 1.1; EXPRESSED IN PLACENTA, SIGNAL = 0.86; EXPRESSED IN BONE MARROW, SIGNAL = 1.1; EXPRESSED IN LUNG, SIGNAL = 1.7; EXPRESSED IN BRAIN, SIGNAL = 1.4; SWISSPROT HIT: P45973, EVALUE 4.00e-29; EST_HUMAN HIT: AL601877.1, EVALUE 5.00e-92; NT HIT: gi14763000, EVALUE 3.00e-92
agatttgatgtcatcggcactgtttgagaaattggatttcctcttgttactttctgacttctccctgggtttattattttcaccctccttcatcttcttatactttttcataaattcagaaattagctcagggcaatccaagtttttctcaggttcccaagtattgtgctccctgg

SEQ ID NO: 23384 - DNA, 140 bp, Homo sapiens
  MAP TO CHRX.3; EXPRESSED IN ADULT LIVER, SIGNAL =   1; EXPRESSED IN FETAL LIVER, SIGNAL = 0.6; EXPRESSED IN BRAIN, SIGNAL = 1.1; EXPRESSED IN BONE MARROW, SIGNAL = 1.3; SWISSPROT HIT: O14829, EVALUE 5.00e-22; EST_HUMAN HIT: BE546038.1, EVALUE 4.00e-73; NT HIT: gi5453941, EVALUE 3.00e-73
gtttttaatggtgactttgtagatcgaggaaagaattccatagagatcctaatgatcctgtgtgtgagttttcttgtctaccccaatgacctgcacttgaacagagggaaccacgaagattttatgatgaatctgaggta

SEQ ID NO: 23385 - DNA, 142 bp, Homo sapiens
  MAP TO CHR19.3; EXPRESSED IN ADULT LIVER, SIGNAL = 0.73; EXPRESSED IN BRAIN, SIGNAL = 1.8; EXPRESSED IN BONE MARROW, SIGNAL = 1.8; EXPRESSED IN LUNG, SIGNAL = 1.4; EXPRESSED IN HEART, SIGNAL = 0.72; SWISSPROT HIT: Q09568, EVALUE 7.70e+00; EST_HUMAN HIT: BG009446.1, EVALUE 6.00e-23; NT HIT: AF208977.1, EVALUE 2.00e-74
tttctagaaagagaggaaacctgagcatacctgagatcgggactcataagccctggagtccctgtcgtcctctctgtccatttcaaagcttgttttcgccaccacaggaagggaaagatcccgcggaggcatccctgggaag

SEQ ID NO: 23386 - DNA, 113 bp, Homo sapiens
  MAP TO CHR3.3; EXPRESSED IN LUNG, SIGNAL = 1.7; EXPRESSED IN FETAL LIVER, SIGNAL = 1.7; EXPRESSED IN ADULT LIVER, SIGNAL = 1.7; EXPRESSED IN BRAIN, SIGNAL = 1.7; EXPRESSED IN HELA, SIGNAL = 2.5; EXPRESSED IN BONE MARROW, SIGNAL = 1.9; NT HIT: gi14735119, EVALUE 3.00e-57; SWISSPROT HIT: P35249, EVALUE 7.00e-14; EST_HUMAN HIT: AI365242.1, EVALUE 4.00e-57
atagatgagggtcatgcagcaactcagctcgtcaatcaactccatgatgtggttgtagaaaataacttatctgataaacagaagtctattatcacagaaaaacttgccgtaag

SEQ ID NO: 23387 - DNA, 198 bp, Homo sapiens
  MAP TO CHR1.3; EXPRESSED IN LUNG, SIGNAL = 4.3; EXPRESSED IN HELA, SIGNAL =   3; EXPRESSED IN PLACENTA, SIGNAL = 3.8; EXPRESSED IN ADULT LIVER, SIGNAL = 4.5; EXPRESSED IN FETAL LIVER, SIGNAL = 2.3; EXPRESSED IN BONE MARROW, SIGNAL = 4.5; EXPRESSED IN HEART, SIGNAL = 5.7; EXPRESSED IN BRAIN, SIGNAL = 5.5; SWISSPROT HIT: O15350, EVALUE 9.00e-34; EST_HUMAN HIT: BF303874.1, EVALUE 1.00e-100; NT HIT: AF079085.1, EVALUE 1.00e-105
ctcaccttcgttgaagtccctcccgagctcgtggttggggcagcgtttcacgacgtcggtcacgtgctccgctttcttgtaaacaggcatggcccggatggcggtgcctgggggtggcggggtggacaccttgatctggatggggcatgtcttggcgatctggcagtagagtttcttcaagagcggggagtactggag

SEQ ID NO: 23388 - DNA, 427 bp, Homo sapiens
  MAP TO CHR6.3; EXPRESSED IN BRAIN, SIGNAL = 3.1; EXPRESSED IN LUNG, SIGNAL = 3.3; EXPRESSED IN BONE MARROW, SIGNAL = 3.9; EXPRESSED IN HEART, SIGNAL = 4.1; EXPRESSED IN FETAL LIVER, SIGNAL =   3; EXPRESSED IN ADULT LIVER, SIGNAL =   4; SWISSPROT HIT: Q9Y2C3, EVALUE 2.00e-09; EST_HUMAN HIT: AL574599.1, EVALUE 0.00e+00; NT HIT: Y15061.1, EVALUE 0.00e+00
agtgcctcttctgtacttgggccgggtgcactggcgcgtgaacccctctcggacaccggggggcaggcaccgcgtatcagaggagcagtggcctcacacctggggcccctttccaccctatgcctcaggcacggggtatgtgctgtcagcgtctgctgtgcagctcattctcaaggtggccagccgggcaccccttctcccattagaggatgtctttgtgggggtaagtgcccgacgaggaggcctcgccccaacacagtgtgtcaagctggctggtgccacccactacccgctagaccggtgctgctatgggaaattcctgctgacgtcccacaggctggacccctggaagatgcaggaagcctggaagctggtgggtggctctgacggggaaaggactgcgcccttttgctcctggttccaggga

SEQ ID NO: 23389 - DNA, 165 bp, Homo sapiens
  MAP TO CHR3.3; EXPRESSED IN LUNG, SIGNAL = 0.73; EXPRESSED IN HEART, SIGNAL = 0.78; EXPRESSED IN ADULT LIVER, SIGNAL = 0.68; EXPRESSED IN BRAIN, SIGNAL = 1.3; EXPRESSED IN HELA, SIGNAL = 2.3; EXPRESSED IN PLACENTA, SIGNAL = 0.48; EXPRESSED IN BONE MARROW, SIGNAL = 0.9; NT HIT: gi16164868, EVALUE 4.00e-88; SWISSPROT HIT: P29994, EVALUE 1.00e-24; EST_HUMAN HIT: AI222657.1, EVALUE 6.00e-88
agcaggggtgagatgagtctggccgaggttcagtgtcaccttgacaaggagggggcttccaatctagttatcgacctcatcatgaacgcatccagtgaccgagtgttccatgaaagcattctcctggccattgcccttctggaaggaggcaacaccaccatccag

SEQ ID NO: 23390 - DNA, 184 bp, Homo sapiens
  MAP TO CHR19.3; EXPRESSED IN HELA, SIGNAL = 4.2; EXPRESSED IN BONE MARROW, SIGNAL = 2.1; EXPRESSED IN BRAIN, SIGNAL = 3.9; NT HIT: U63131.1, EVALUE 8.00e-93; EST_HUMAN HIT: AW160463.1, EVALUE 1.00e-92
ggggagccccacctcagggagggactcgtagacctcgacggggtccaggccgccggggccgagccgcttcttgcgctcctcctcctcgtactccttcatggccttctcgatgcgcagcttggcacggccccgcacacgctccttgaaggcttccagctcgtcgttgaagccctccatgtactgg

SEQ ID NO: 23391 - DNA, 121 bp, Homo sapiens
  MAP TO CHR12.3; EXPRESSED IN FETAL LIVER, SIGNAL =   4; EXPRESSED IN ADULT LIVER, SIGNAL = 6.2; EXPRESSED IN BRAIN, SIGNAL = 8.2; EXPRESSED IN HELA, SIGNAL = 7.5; EXPRESSED IN BONE MARROW, SIGNAL = 7.7; EXPRESSED IN PLACENTA, SIGNAL = 6.1; SWISSPROT HIT: P34535, EVALUE 9.00e-03; EST_HUMAN HIT: BI766211.1, EVALUE 8.00e-62; NT HIT: AF351620.1, EVALUE 5.00e-62
aggctcgagctgtgcacctttaccctggcaattgccctgggtgctgtcctgctcctgcccttctccatcatcagcaatgaggtgctgctctccctgcctcggaactactacatccagtggc

SEQ ID NO: 23392 - DNA, 140 bp, Homo sapiens
  MAP TO CHR2.3; EXPRESSED IN HELA, SIGNAL = 2.5; EXPRESSED IN BONE MARROW, SIGNAL = 2.7; EXPRESSED IN PLACENTA, SIGNAL = 1.6; EXPRESSED IN ADULT LIVER, SIGNAL = 2.1; EXPRESSED IN BRAIN, SIGNAL = 2.8; SWISSPROT HIT: O54889, EVALUE 1.00e-13; EST_HUMAN HIT: BF197347.1, EVALUE 1.00e-67; NT HIT: gi14732823, EVALUE 6.00e-50
catacctgcatcgtgttcacagttgaacctttggctcccgactgcaccatcatctgcaggctgttctctgggaactgtctgtgtaggccaaaaggcatgcatgcctgcagattaaatcagcacagtggtcagtgacttca

SEQ ID NO: 23393 - DNA, 336 bp, Homo sapiens
  MAP TO CHR13.3; EXPRESSED IN BRAIN, SIGNAL = 3.4; EXPRESSED IN BONE MARROW, SIGNAL = 4.2; EXPRESSED IN HEART, SIGNAL = 3.5; EXPRESSED IN PLACENTA, SIGNAL = 3.9; EXPRESSED IN FETAL LIVER, SIGNAL = 3.1; EXPRESSED IN ADULT LIVER, SIGNAL = 3.4; NT HIT: gi14753410, EVALUE 0.00e+00; SWISSPROT HIT: Q9Y6H8, EVALUE 7.00e-62; EST_HUMAN HIT: BI838275.1, EVALUE 1.00e-16
tcctccctctctttcttcttctcttccatgcgcacgatgtgcagcacgtggcccaggtagatgagggtgggcgtggacacgaagatgatctgcagcgcccagaagcggatgtgggagatggggaaggccctgtcgtagcagacgttctcgcagcccggctgctgggtgttgcaggtgaagtctgactgctcatcgccccacacgtcctccgccgcggcccccagcaccaagatgcggaagatgaacagcacggtcagccaaaccttgccgatgaccgtggagtgctcctgtgcattttctaagagtcttcccagaaagctccagtcgcccattgct

SEQ ID NO: 23394 - DNA, 136 bp, Homo sapiens
  MAP TO CHR3.3; EXPRESSED IN BONE MARROW, SIGNAL = 1.5; EST_HUMAN HIT: AA844897.1, EVALUE 6.00e-60; NT HIT: gi14729501, EVALUE 4.00e-60; SWISSPROT HIT: P15086, EVALUE 2.00e-17
gctgtttgcacatttcagatcctgctgctgggggctctgacgactgggcttatgaccaaggaatcagatattccttcacctttgaacttcgagatacaggcagatatggctttctccttccagaatcccagatccg

SEQ ID NO: 23395 - DNA, 218 bp, Homo sapiens
  MAP TO CHR2.3; EXPRESSED IN HELA, SIGNAL = 2.3; EXPRESSED IN LUNG, SIGNAL = 1.5; EXPRESSED IN BONE MARROW, SIGNAL = 1.7; EXPRESSED IN HEART, SIGNAL = 0.88; EXPRESSED IN ADULT LIVER, SIGNAL = 1.8; EXPRESSED IN BRAIN, SIGNAL =   2; SWISSPROT HIT: P52701, EVALUE 1.00e-34; EST_HUMAN HIT: AU119474.1, EVALUE 1.00e-114; NT HIT: D89645.1, EVALUE 1.00e-119
ttttctttcttaaggcatgcatggtagaaaatgaatgtgaagaccccagccaggagactattacgttcctctataaattcattaagggagcttgtcctaaaagctatggctttaatgcagcaaggcttgctaatctcccagaggaagttattcaaaagggacatagaaaagcaagagaatttgagaagatgaatcagtcactacgattatttcggtaa

SEQ ID NO: 23396 - DNA, 123 bp, Homo sapiens
  MAP TO CHR1.3; EXPRESSED IN BRAIN, SIGNAL = 1.6; EXPRESSED IN BONE MARROW, SIGNAL = 1.4; EXPRESSED IN PLACENTA, SIGNAL =   1; EXPRESSED IN LUNG, SIGNAL = 0.68; EXPRESSED IN HEART, SIGNAL = 1.4; EXPRESSED IN ADULT LIVER, SIGNAL = 1.4; SWISSPROT HIT: P23559, EVALUE 4.00e-07; EST_HUMAN HIT: BI836812.1, EVALUE 2.00e-59; NT HIT: gi14733736, EVALUE 1.00e-59
ggggccgccagtagaaacgcagtcgcttctggtaggtgtccaggttgcgcttcaggcagaaggccacctccttgtcacaggcacacagctgctgctcacaccagcttcccttgtcagctgtgg

SEQ ID NO: 23397 - DNA, 200 bp, Homo sapiens
  MAP TO CHR1.3; EXPRESSED IN ADULT LIVER, SIGNAL = 0.89; EXPRESSED IN LUNG, SIGNAL = 0.92; EXPRESSED IN PLACENTA, SIGNAL = 0.65; EXPRESSED IN HEART, SIGNAL = 1.2; EXPRESSED IN BONE MARROW, SIGNAL =   1; EST_HUMAN HIT: AW387767.1, EVALUE 1.00e-102; NT HIT: gi5032156, EVALUE 1.00e-104; SWISSPROT HIT: P44893, EVALUE 1.40e+00
ttttacctttgatcacgcctaaacacagttccaaatatacaagcctcaaggataagttcgctataatttttagcacttgataaagatccttgggacacatttgaagcagacactatccaagactgacagcagtaacttatcagtgtattgaagactccagtctttatagcagacatttcaattatcttgtacataatctg

SEQ ID NO: 23398 - DNA, 119 bp, Homo sapiens
  MAP TO CHRX.3; EXPRESSED IN BRAIN, SIGNAL = 0.79; EXPRESSED IN BONE MARROW, SIGNAL = 1.1; EXPRESSED IN PLACENTA, SIGNAL = 0.77; EXPRESSED IN FETAL LIVER, SIGNAL = 0.67; SWISSPROT HIT: P53438, EVALUE 7.90e+00; EST_HUMAN HIT: BF087701.1, EVALUE 6.00e-04; NT HIT: gi15313647, EVALUE 2.00e-55
ttctcaccttatttttggagagattcagggtcttgactttgggagccttctctgtaatgtcagaaaggccatccagctggtacagtttgttgttgcacaagttcaaagacaacagcttt

SEQ ID NO: 23399 - DNA, 364 bp, Homo sapiens
  MAP TO CHR16.3; EXPRESSED IN ADULT LIVER, SIGNAL = 5.3; EXPRESSED IN BONE MARROW, SIGNAL = 1.1; NT HIT: gi14777240, EVALUE 0.00e+00; SWISSPROT HIT: P29372, EVALUE 1.00e-54; EST_HUMAN HIT: AI131317.1, EVALUE 0.00e+00
tcagccactctgtcgaccacactgacccaggggctgccccggacatagaagcggaggggtttccgggcccactcccctgcatggccgacgcccacccgggctgctgccactacagccggctcactgggctccaggggaccacgctccagccatacagcttcatcctgtgccaggtccctctggtcaaagctcttgttgatggccagggcctggcacagcttggaggggccactgcagagctcgcggtccttgaggacacggctggcggtgcctttccggagggtgctgcgaagctgacgcatggtctccagaccttccaggggctccagtgctcgcagcaagacgcaagccccgtcccctgtgg

SEQ ID NO: 23400 - DNA, 157 bp, Homo sapiens
  MAP TO CHR22.3; EXPRESSED IN BONE MARROW, SIGNAL = 0.97; EXPRESSED IN FETAL LIVER, SIGNAL = 1.5; EXPRESSED IN BRAIN, SIGNAL = 0.78; EXPRESSED IN ADULT LIVER, SIGNAL = 0.95; NT HIT: AJ011736.1, EVALUE 6.00e-78; SWISSPROT HIT: O75791, EVALUE 2.00e-24; EST_HUMAN HIT: BI518664.1, EVALUE 8.00e-78
cttgatctccaggcatgaggatgacgttcaacacttcaaggtcatgcgagacaacaagggtaattactttctgtggactgagaagtttccatccctaaataagctggtagactactacaggacaaattccatctccagacagaagcagatcttcctt

SEQ ID NO: 23401 - DNA, 161 bp, Homo sapiens
  MAP TO CHR3.3; EXPRESSED IN BRAIN, SIGNAL = 1.4; EXPRESSED IN BONE MARROW, SIGNAL = 1.6; EXPRESSED IN PLACENTA, SIGNAL = 2.6; EST_HUMAN HIT: AA505928.1, EVALUE 2.00e-84; NT HIT: gi16158770, EVALUE 9.00e-77; SWISSPROT HIT: P19836, EVALUE 1.00e-21
aggctggaactcacgttgataaagctgacattgagctcctttgctgtgtagcccctctgcaggttccgcctcgcatacacatcataatcccgcacaattcgggtgatgatgtctgatgtggagataccttctgtcctctgtgttggagcaaacatgcctaa

SEQ ID NO: 23402 - DNA, 158 bp, Homo sapiens
  MAP TO CHR19.3; EXPRESSED IN FETAL LIVER, SIGNAL = 0.88; EXPRESSED IN BRAIN, SIGNAL = 0.9; EXPRESSED IN BONE MARROW, SIGNAL = 1.2; EXPRESSED IN LUNG, SIGNAL = 1.1; EXPRESSED IN HEART, SIGNAL = 1.4; EXPRESSED IN PLACENTA, SIGNAL = 1.1; SWISSPROT HIT: Q9UBX7, EVALUE 8.00e-27; EST_HUMAN HIT: AA436049.1, EVALUE 6.00e-82; NT HIT: gi14755026, EVALUE 6.00e-84
ccagggtgactccgggggccctctggtctgtaaccagtctcttcaaggcattatctcctggggccaggatccgtgtgcgatcacccgaaagcctggtgtctacacgaaagtctgcaaatatgtggactggatccaggagacgatgaagaacaattaga

SEQ ID NO: 23403 - DNA, 238 bp, Homo sapiens
  MAP TO CHRX.3; EXPRESSED IN PLACENTA, SIGNAL = 2.1; EXPRESSED IN HEART, SIGNAL = 2.4; EXPRESSED IN BONE MARROW, SIGNAL = 2.7; EXPRESSED IN FETAL LIVER, SIGNAL = 3.7; EXPRESSED IN BRAIN, SIGNAL =   2; EXPRESSED IN ADULT LIVER, SIGNAL = 2.6; SWISSPROT HIT: P51617, EVALUE 2.00e-33; EST_HUMAN HIT: BF880349.1, EVALUE 1.00e-127; NT HIT: gi14768302, EVALUE 1.00e-103
acctccttcagcctcttcacagcatacaccgtgttcctcatcaccgcccggtacacgcacccaaagccaccctccccgatcttgagctcctccgagaagttgtgggtgccccgggaaatctcacagaggggccagcaaaacggaaaggggcgggctccctgcaggagggacactgagctctctgggcctggctgtgggaagagagcctggatcaggtggggtccctgtctcttccctt

SEQ ID NO: 23404 - DNA, 143 bp, Homo sapiens
  MAP TO CHR22.3; EXPRESSED IN BONE MARROW, SIGNAL =   2; EXPRESSED IN FETAL LIVER, SIGNAL = 2.3; EXPRESSED IN ADULT LIVER, SIGNAL = 3.3; EXPRESSED IN BRAIN, SIGNAL = 3.2; SWISSPROT HIT: P15289, EVALUE 6.00e-21; EST_HUMAN HIT: AI459538.1, EVALUE 1.00e-70; NT HIT: X52150.1, EVALUE 5.00e-75
ggactgaccgggagcgatatgacctggccagaaggccaaggcaggctctcggacaccgccctcgtaggtcgttccctttccacaccgcaagagaccggagcagccgcctcgggacatacgcatggtctcaggtctgggacaca

SEQ ID NO: 23405 - DNA, 140 bp, Homo sapiens
  MAP TO CHR4.3; EXPRESSED IN FETAL LIVER, SIGNAL = 3.9; EXPRESSED IN BRAIN, SIGNAL =   3; EXPRESSED IN LUNG, SIGNAL = 4.1; EXPRESSED IN HELA, SIGNAL = 3.6; EXPRESSED IN PLACENTA, SIGNAL = 2.5; EXPRESSED IN BONE MARROW, SIGNAL = 3.4; EXPRESSED IN HEART, SIGNAL = 2.8; EST_HUMAN HIT: AI417605.1, EVALUE 2.00e-69; NT HIT: gi15296268, EVALUE 1.00e-69; SWISSPROT HIT: Q08288, EVALUE 2.00e-10
ttcacaagcttgactttgtcctttaataacttaaaggtagggttcttgctgattttcttgttaaagatgaccaggagttcctcttcggatctgtgatgctcatctgtcactgtgtagtactgagctaaaaccttcacaaa

SEQ ID NO: 23406 - DNA, 325 bp, Homo sapiens
  MAP TO CHR21.3; EXPRESSED IN BONE MARROW, SIGNAL = 0.92; EXPRESSED IN HEART, SIGNAL = 0.79; EXPRESSED IN PLACENTA, SIGNAL = 0.67; EXPRESSED IN ADULT LIVER, SIGNAL = 0.9; SWISSPROT HIT: P48051, EVALUE 2.00e-46; EST_HUMAN HIT: AW015600.1, EVALUE 2.00e-06; NT HIT: gi14780430, EVALUE 0.00e+00
actttggattcattctccaggtttgccacatcaccatttctttctgtttgctcttcgaggttcttttcttcctcttcagtctccagttctgcatgttggttgagtttgctggatacagaccaactcaggggcagctctgccctgctggctaactcggccagctctttggcactaagggatggggtgctggtctcataggtctcatggaagctgttgtagtcaacttcgtagaacccgtcctccagggtcaggacaggtgtgaaccggtaaccccacaggatctcactggtgatgtaggagcttcgagcttggcatgtcatccctg

SEQ ID NO: 23407 - DNA, 406 bp, Homo sapiens
  MAP TO CHR20.3; EXPRESSED IN LUNG, SIGNAL = 4.4; EXPRESSED IN ADULT LIVER, SIGNAL =   2; EXPRESSED IN BRAIN, SIGNAL = 1.7; EXPRESSED IN FETAL LIVER, SIGNAL = 2.2; EXPRESSED IN HEART, SIGNAL = 2.7; EXPRESSED IN HELA, SIGNAL = 2.8; EXPRESSED IN BONE MARROW, SIGNAL = 1.7; SWISSPROT HIT: P12643, EVALUE 9.00e-47; EST_HUMAN HIT: AA182439.1, EVALUE 0.00e+00; NT HIT: AF040249.1, EVALUE 0.00e+00
ggaggactgggcggggaactcgggtgactcacgtcggtcctgtccgcaggtcgaccatggtggccgggacccgctgtcttctagcgttgctgcttccccaggtcctcctgggcggcgcggctggcctcgttccggagctgggccgcaggaagttcgcggcggcgtcgtcgggccgcccctcatcccagccctctgacgaggtcctgagcgagttcgagttgcggctgctcagcatgttcggcctgaaacagagacccacccccagcagggacgccgtggtgcccccctacatgctagacctgtatcgcaggcactcaggtcagccgggctcacccgccccagaccaccggttggagagggcagccagccgagccaacactgtgcgcagcttccaccatgaaggtga

SEQ ID NO: 23408 - DNA, 420 bp, Homo sapiens
  MAP TO CHR1.3; EXPRESSED IN FETAL LIVER, SIGNAL = 2.2; EXPRESSED IN ADULT LIVER, SIGNAL =   1; EXPRESSED IN BRAIN, SIGNAL = 1.6; EXPRESSED IN BONE MARROW, SIGNAL = 1.5; SWISSPROT HIT: P35354, EVALUE 2.00e-74; EST_HUMAN HIT: BG055155.1, EVALUE 0.00e+00; NT HIT: gi14730537, EVALUE 0.00e+00
tagacttctacagttcagtcgaacgttcttttagtagtactgtgggattgatatcatctagtccggagcgggaagaacttgcattgatggtgactgttttaatgagctctggatctggaacactgaatgaagtaaagggacagcccttcacgttattgcagatgagagactgaattgaggcagtgttgatgatttgaaaacccacttctccaccaaaagtgcttggcttccagtaggcaggagaacatataacattacccataagtcctttcaaggagaatggtgctccaacttctaccatggtttcaccaaagatggcatctggccgaggcttttctaccagaagggcaggatacagctccacagcatcgatgtcaccatagagtgcttccaactctgcagacatttccttttctcctg

SEQ ID NO: 23409 - DNA, 143 bp, Homo sapiens
  MAP TO CHR6.3; EXPRESSED IN LUNG, SIGNAL = 1.7; EXPRESSED IN HEART, SIGNAL = 0.9; EXPRESSED IN PLACENTA, SIGNAL = 1.1; EXPRESSED IN BONE MARROW, SIGNAL = 1.6; EXPRESSED IN FETAL LIVER, SIGNAL = 1.9; EXPRESSED IN BRAIN, SIGNAL = 1.1; EXPRESSED IN ADULT LIVER, SIGNAL = 1.1; SWISSPROT HIT: O02812, EVALUE 3.00e-19; EST_HUMAN HIT: BI025355.1, EVALUE 7.00e-69; NT HIT: gi14782996, EVALUE 5.00e-69
agtgctgcttttgacacaaaaacggggttacgtgtggcagtgaagaagctctccagaccatttcagtccatcattcatgcgaaaagaacctacagagaactgcggttacttaaacatatgaaacatgaaaatgtaagttattc

SEQ ID NO: 23410 - DNA, 149 bp, Homo sapiens
  MAP TO CHR6.3; EXPRESSED IN LUNG, SIGNAL = 2.1; EXPRESSED IN HEART, SIGNAL = 1.6; EXPRESSED IN BONE MARROW, SIGNAL = 1.1; NT HIT: gi14726045, EVALUE 1.00e-57; SWISSPROT HIT: P32359, EVALUE 1.50e+00; EST_HUMAN HIT: AA256096.1, EVALUE 1.00e-73
ttaatatttgttgccagtaatgttctttcttcacagccgctccaggaattatgaagttctgggcctttctcagaagactgtaatgtacctgaagtttttgaaatattgcaaacccacagagtttaggctggtgctgccaaaaagaaaag

SEQ ID NO: 23411 - DNA, 251 bp, Homo sapiens
  MAP TO CHR20.3; EXPRESSED IN LUNG, SIGNAL = 1.6; EXPRESSED IN PLACENTA, SIGNAL = 0.96; EXPRESSED IN BONE MARROW, SIGNAL =   1; EXPRESSED IN BRAIN, SIGNAL = 0.73; EXPRESSED IN FETAL LIVER, SIGNAL = 1.3; EXPRESSED IN ADULT LIVER, SIGNAL = 0.94; EST_HUMAN HIT: W05407.1, EVALUE 1.00e-117; NT HIT: gi11421959, EVALUE 0.00e+00; SWISSPROT HIT: O75362, EVALUE 1.00e-38
ccatcctcagatccgtcttcagaaccaccttcccctcgatccacggctccattttcatccagaggggcggcgaggtcaggagaacacgtccccggctgcctcccgtccacagacatggtgggcgactccgcgccggccctccggtccttcttgtggaccctggagtgcaagaccagctggtggtaggttctgaaagctttgccgcactcggagcagtgagtgggcttctccttgctactgggtaacttggg

SEQ ID NO: 23412 - DNA, 154 bp, Homo sapiens
  MAP TO CHR1.3; EXPRESSED IN HEART, SIGNAL = 2.5; EXPRESSED IN ADULT LIVER, SIGNAL = 2.4; EXPRESSED IN BRAIN, SIGNAL = 2.7; EXPRESSED IN PLACENTA, SIGNAL = 2.8; EXPRESSED IN BONE MARROW, SIGNAL = 2.4; SWISSPROT HIT: Q08211, EVALUE 3.00e-22; EST_HUMAN HIT: BG773821.1, EVALUE 1.00e-76; NT HIT: Y10658.1, EVALUE 9.00e-77
ttaaaggttcaggtggaaggttataattacactggcatgggaaattccaccaataaaaaagatgcacaaagcaatgctgccagagactttgttaactatttggttcgaataaatgaaataaagagtgaagaagttccagcttttggggtaagta

SEQ ID NO: 23413 - DNA, 298 bp, Homo sapiens
  MAP TO CHR1.3; EXPRESSED IN BONE MARROW, SIGNAL =   1; EXPRESSED IN FETAL LIVER, SIGNAL = 0.6; EXPRESSED IN BRAIN, SIGNAL = 0.78; SWISSPROT HIT: P35354, EVALUE 2.00e-54; EST_HUMAN HIT: AA296431.1, EVALUE 2.00e-24; NT HIT: D28235.1, EVALUE 0.00e+00
aatgcttaccctgccagcaatttgcctggtgaatgattcaacaaactgggtaattccatgttccagcaatatagagttgttgtagataaactgttgatagttgtatttctggtcatgaatttgaaaggtgtcaggcagaaggggatgccagtgatagagggtgttaaattcagcagcaatacgattttggtactggaattgtttgttgaaaagtagttctgggtcaaatttcagtttgaagtgatagccactcaagtgttgcacataatcttcaatcacaatcttaatagtctctcct

SEQ ID NO: 23414 - DNA, 221 bp, Homo sapiens
  MAP TO CHR3.3; EXPRESSED IN BONE MARROW, SIGNAL = 1.7; EXPRESSED IN ADULT LIVER, SIGNAL = 2.1; EXPRESSED IN PLACENTA, SIGNAL = 1.5; SWISSPROT HIT: O60683, EVALUE 1.90e-02; EST_HUMAN HIT: BG677169.1, EVALUE 1.00e-120; NT HIT: AF277168.1, EVALUE 1.00e-121
tcagatctgcatgttgacgttcgaacacgagatggaaaaggcctttgccttccaggcaagccaggacaaagtgtgcagtatctgcatggaagtgatcctggagaaggcctctgcttctgagaggagatttgggattctctccaattgcaatcacacgtactgtttgtcctgcatccggcagtggcggtgtgccaaacagtttgaaaacccaatcattaagt

SEQ ID NO: 23415 - DNA, 199 bp, Homo sapiens
  MAP TO CHRX.3; EXPRESSED IN HEART, SIGNAL =   1; EXPRESSED IN BRAIN, SIGNAL = 1.2; EXPRESSED IN LUNG, SIGNAL = 0.94; EXPRESSED IN BONE MARROW, SIGNAL = 1.4; SWISSPROT HIT: P21188, EVALUE 2.00e-16; EST_HUMAN HIT: BG256074.1, EVALUE 6.60e-02; NT HIT: gi12965168, EVALUE 1.00e-106
tataatgacagtcttcaagaggaaatgaatgtagattgtcccccggggcagtacttcatccaagatggcaatgaggatgaggacaagaaggcctgccaatttaagcgctccttcctaaagaactgctctggtctggaggacccaacttttggatactctactggacagccctgcatccttctaaagatgaaccgggtat

SEQ ID NO: 23416 - DNA, 163 bp, Homo sapiens
  MAP TO CHR11.3; EXPRESSED IN BONE MARROW, SIGNAL = 1.9; EXPRESSED IN LUNG, SIGNAL = 1.8; EXPRESSED IN FETAL LIVER, SIGNAL = 1.2; EXPRESSED IN ADULT LIVER, SIGNAL = 1.5; EXPRESSED IN BRAIN, SIGNAL = 1.7; SWISSPROT HIT: P33595, EVALUE 7.60e+00; EST_HUMAN HIT: AU131195.1, EVALUE 5.00e-76; NT HIT: gi7657310, EVALUE 4.00e-76
tgtttgtttttctcagggagagtgtgaagtacactcagcaaacaatggaggaggctctggggagagtgaagcttatgcaggccgacctagggggcactgaaatcttggcaccactccagaacatttacaggggaccctccatcccaggccaccccctacaggt

SEQ ID NO: 23417 - DNA, 114 bp, Homo sapiens
  MAP TO CHR3.3; EXPRESSED IN BONE MARROW, SIGNAL = 1.2; EXPRESSED IN LUNG, SIGNAL = 0.88; EXPRESSED IN HEART, SIGNAL = 1.3; SWISSPROT HIT: Q9Z0E8, EVALUE 6.00e-04; EST_HUMAN HIT: BI910236.1, EVALUE 5.50e-01; NT HIT: AB026898.1, EVALUE 8.00e-58
caggattctcccggagtccccgcggtggctgatgatgaaagggaaggtgaaggaggccaagcaggtgctgtgctacgccgcaagtgtgaacaagaagaccattccttcaaatct

SEQ ID NO: 23418 - DNA, 197 bp, Homo sapiens
  MAP TO CHR4.3; EXPRESSED IN PLACENTA, SIGNAL = 1.1; EXPRESSED IN LUNG, SIGNAL = 1.1; EXPRESSED IN HEART, SIGNAL = 0.99; EXPRESSED IN BONE MARROW, SIGNAL = 1.3; EXPRESSED IN BRAIN, SIGNAL = 1.3; SWISSPROT HIT: P43427, EVALUE 3.00e-08; EST_HUMAN HIT: BF035577.1, EVALUE 1.00e-100; NT HIT: gi14733412, EVALUE 1.00e-103
actcactgcattgaggccacagagctggtagcaggccatggtgacaatcacggtgaccacctgccagcggacgtagggagctctcagcagctccagcacggacaccaggcggatgctcctctgcacgcggctctcagccaggacctcctctacctcttgggaaatgtctgctttacccaagaacgtttggaaggctg

SEQ ID NO: 23419 - DNA, 195 bp, Homo sapiens
  MAP TO CHR1.3; EXPRESSED IN PLACENTA, SIGNAL = 2.2; EXPRESSED IN BONE MARROW, SIGNAL = 2.5; EXPRESSED IN FETAL LIVER, SIGNAL = 1.3; EXPRESSED IN ADULT LIVER, SIGNAL = 2.3; EXPRESSED IN BRAIN, SIGNAL = 1.5; SWISSPROT HIT: Q61670, EVALUE 5.00e-31; EST_HUMAN HIT: BE255797.1, EVALUE 1.00e-103; NT HIT: AF217621.1, EVALUE 1.00e-106
ggcaggtccctatgctgtgctcacgaaggacaccatgccgcagacgtacaaaaggaagcgttcatggtcgcgcgctgtgttctccaacctgcagaggaaaggcctggagaaaaggtttgagattcagaagtacgtgaccaagccggaccgaaagcagctggcggcgatgctgggcctcacggacgcacaggtaag

SEQ ID NO: 23420 - DNA, 189 bp, Homo sapiens
  MAP TO CHR6.3; EXPRESSED IN BONE MARROW, SIGNAL =   1; EXPRESSED IN PLACENTA, SIGNAL = 0.92; EXPRESSED IN HEART, SIGNAL = 1.1; EXPRESSED IN FETAL LIVER, SIGNAL = 0.76; EXPRESSED IN BRAIN, SIGNAL = 0.72; NT HIT: gi4557362, EVALUE 6.00e-69; SWISSPROT HIT: Q61116, EVALUE 1.00e-13; EST_HUMAN HIT: AW815648.1, EVALUE 3.00e-62
ttttctacaaaggtcagaaggtctacccagaaaatactgcgcacctggcattcatgtggcttttctcccgtgtgtaccaggtagtgtttctgcaggtgggcgagctgagtaaagcccttgttgcaagtctgacatttgaaaggccgttctccactgtgcactctcaggtggacctgggaagaagccaca

SEQ ID NO: 23421 - DNA, 251 bp, Homo sapiens
  MAP TO CHR12.3; EXPRESSED IN LUNG, SIGNAL = 5.7; EXPRESSED IN HELA, SIGNAL = 4.3; EXPRESSED IN PLACENTA, SIGNAL = 4.9; EXPRESSED IN BONE MARROW, SIGNAL = 5.3; EXPRESSED IN HEART, SIGNAL = 5.5; EXPRESSED IN ADULT LIVER, SIGNAL = 5.4; EXPRESSED IN BRAIN, SIGNAL = 5.4; SWISSPROT HIT: O15528, EVALUE 6.00e-29; EST_HUMAN HIT: BF529340.1, EVALUE 1.00e-102; NT HIT: AB006987.1, EVALUE 0.00e+00
aactgacaagtttgttttcctttgcaccagacgctggtcactctgtgtcactatgccacttcaagggaccctgcccagttcccagagccaaattcttttcgtccagctcgctggctgggggagggtcccaccccccacccatttgcatctcttccctttggctttggcaagcgcagctgtatggggagacgcctggcagagcttgaattgcaaatggctttggcccaggtgagtgctctagattttatacc

SEQ ID NO: 23422 - DNA, 423 bp, Homo sapiens
  MAP TO CHRX.3; EXPRESSED IN PLACENTA, SIGNAL = 1.7; EXPRESSED IN HEART, SIGNAL = 1.7; EXPRESSED IN BONE MARROW, SIGNAL = 1.1; EXPRESSED IN FETAL LIVER, SIGNAL = 1.6; EXPRESSED IN BRAIN, SIGNAL = 1.7; SWISSPROT HIT: Q12816, EVALUE 9.00e-27; EST_HUMAN HIT: AL570136.1, EVALUE 0.00e+00; NT HIT: U04811.1, EVALUE 0.00e+00
cactggttttggtggtggactgggcaccagtgctggcttcagtggcggactgggcaccagtgctggctttggtggtggactggtcactagtgatggctttggtggtggactgggcaccaatgctagtttcggcagcacacttggcaccagtgctggctttagtggtggcctcagcaccagcgatggctttggcagtaggcctaatgccagcttcgacagaggactgagtaccatcattggctttggcagtggttccaacaccagcactggctttactggcgaacccagcaccagcacgggcttcagtagtggacccagttctattgttggcttcagcggtggaccaagcactggtgttggcttctgcagtggaccaagcaccagtggcttcagcggtggaccgagcacaggagctggcttcgg

SEQ ID NO: 23423 - DNA, 176 bp, Homo sapiens
  MAP TO CHR2.3; EXPRESSED IN PLACENTA, SIGNAL = 4.1; EXPRESSED IN ADULT LIVER, SIGNAL = 4.9; EXPRESSED IN BRAIN, SIGNAL =   4; EXPRESSED IN BONE MARROW, SIGNAL =   4; SWISSPROT HIT: Q99743, EVALUE 1.00e-10; EST_HUMAN HIT: BG770495.1, EVALUE 6.00e-73; NT HIT: gi15294734, EVALUE 2.00e-75
atgtgtgtgtttcaggacaagggctcaagcctggaacctcggcagcactttaacacactcgacgtgggtgcctcgggccttaataccagtcattcgccatcggcgtcctcaagaagttcccacaaatcctcgcacacagccatgtcagaacccacctgtgagtgcgagtccatgga

SEQ ID NO: 23424 - DNA, 323 bp, Homo sapiens
  MAP TO CHR1.3; EXPRESSED IN BONE MARROW, SIGNAL = 6.4; EXPRESSED IN BRAIN, SIGNAL = 6.9; EXPRESSED IN ADULT LIVER, SIGNAL = 7.1; EXPRESSED IN LUNG, SIGNAL = 4.4; EXPRESSED IN HEART, SIGNAL = 6.8; EXPRESSED IN PLACENTA, SIGNAL = 6.1; EST_HUMAN HIT: AL521421.1, EVALUE 0.00e+00; NT HIT: gi15294491, EVALUE 0.00e+00; SWISSPROT HIT: P26480, EVALUE 1.20e-01
cccctttgcctttaccgagttgttcccgccaggtggattttgatgtaggtagtgcatctatttacaagagtgatggccagatacctgccaatgaaatctttgtcactaatgtcagatcacttggtgttcaggaaaaggccaaattaaatgatgagaaagcaaatgatgacaccaacagagatggtggccccctcagccacgaacctgtgggaaatgaccttgcttttgagtgcaaaggccaattttatgattattttgagaccggatataatgaaagaaacaatgtaaatgaatcttggaaaaagtccttacggaaaaaggag

SEQ ID NO: 23425 - DNA, 112 bp, Homo sapiens
  MAP TO CHR11.3; EXPRESSED IN BONE MARROW, SIGNAL = 1.2; EXPRESSED IN HEART, SIGNAL = 1.3; SWISSPROT HIT: P09693, EVALUE 2.00e-15; EST_HUMAN HIT: N76809.1, EVALUE 9.00e-46; NT HIT: X06028.1, EVALUE 1.00e-50
taaaaaaaaatggaatctgggaagtaatgccaaggaccctcgagggatgtatcagtgtaaaggatcacagaacaagtcaaaaccactccaagtgtattacagaagtatgtaa

SEQ ID NO: 23426 - DNA, 124 bp, Homo sapiens
  MAP TO CHR11.3; EXPRESSED IN PLACENTA, SIGNAL = 3.2; EXPRESSED IN BONE MARROW, SIGNAL = 4.6; EXPRESSED IN HEART, SIGNAL = 3.1; EXPRESSED IN ADULT LIVER, SIGNAL = 3.4; EXPRESSED IN BRAIN, SIGNAL = 4.9; SWISSPROT HIT: P51839, EVALUE 1.00e-13; EST_HUMAN HIT: BF513152.1, EVALUE 5.00e-63; NT HIT: L37089.1, EVALUE 3.00e-14
cctcaatgggttcactcagggctgagatgatggtgaaacccacaatgtcactgaagtatatggtaacctggtcaaaataccctggttccacagttgcccccattttccgagcttcagccacaga

SEQ ID NO: 23427 - DNA, 189 bp, Homo sapiens
  MAP TO CHR1.3; EXPRESSED IN BONE MARROW, SIGNAL = 2.8; EXPRESSED IN BRAIN, SIGNAL = 4.1; EXPRESSED IN PLACENTA, SIGNAL = 2.3; EXPRESSED IN HELA, SIGNAL = 2.9; NT HIT: AF023268.1, EVALUE 1.00e-102; SWISSPROT HIT: P49746, EVALUE 6.00e-19; EST_HUMAN HIT: AW510819.1, EVALUE 1.00e-102
cttaccatctgagtccttctgattgggattgggtaccaggcggcagttatcgggaccaggaggcacataatctgggatgccatcattgtcatcatccccatcacactcatctccaagtccatcgttatcagagtccagctgggagctatttggcagctgtgggcagttgtccttggtgtcctgatgccc

SEQ ID NO: 23428 - DNA, 122 bp, Homo sapiens
  MAP TO CHRX.3; EXPRESSED IN LUNG, SIGNAL =   4; EXPRESSED IN HEART, SIGNAL = 2.3; EXPRESSED IN BRAIN, SIGNAL = 2.4; EXPRESSED IN ADULT LIVER, SIGNAL = 2.3; EXPRESSED IN PLACENTA, SIGNAL = 2.8; EXPRESSED IN BONE MARROW, SIGNAL =   3; SWISSPROT HIT: O95239, EVALUE 1.00e-13; EST_HUMAN HIT: AU125738.1, EVALUE 2.00e-53; NT HIT: gi14765683, EVALUE 1.00e-53
cctacttggcttaccgataactgggtaatcaattgctgcaggttacaaattatctctacattttctttcaattcctggtcttccaaagtctccactagcttttgaagatccagtttgcagct

SEQ ID NO: 23429 - DNA, 159 bp, Homo sapiens
  MAP TO CHR17.3; EXPRESSED IN PLACENTA, SIGNAL = 4.4; EXPRESSED IN LUNG, SIGNAL =   2; EXPRESSED IN ADULT LIVER, SIGNAL = 3.7; EXPRESSED IN BRAIN, SIGNAL = 4.4; EXPRESSED IN BONE MARROW, SIGNAL = 6.6; SWISSPROT HIT: P18054, EVALUE 2.00e-14; EST_HUMAN HIT: BI044580.1, EVALUE 7.00e-29; NT HIT: Y08829.1, EVALUE 2.00e-34
ttcctttccacagaacagatccctgtttcaggctgacttcatcccgctggatggaattccagccaatgtgatccaaagagggaagcagtaccaggctgcagccctcgtcatgctgaagatggagcctcctgggaagctgctacccatggtcatccaggt

SEQ ID NO: 23430 - DNA, 233 bp, Homo sapiens
  MAP TO CHR5.3; EXPRESSED IN ADULT LIVER, SIGNAL = 7.8; EXPRESSED IN BRAIN, SIGNAL = 2.4; EXPRESSED IN FETAL LIVER, SIGNAL = 4.4; EXPRESSED IN BONE MARROW, SIGNAL = 2.1; NT HIT: D16362.1, EVALUE 1.00e-128; SWISSPROT HIT: P22352, EVALUE 6.00e-40; EST_HUMAN HIT: BG570196.1, EVALUE 1.00e-125
gctctagaactcctgtcctcccacctcggagctcctgggtacatctgaccgcctcttctgggaacccatgaaggttcacgacatccgctggaactttgagaagttcctggtggggccagatggtatacccatcatgcgctggcaccaccggaccacggtcagcaacgtcaagatggacatcctgtcctacatgaggcggcaggcagccctgggggtcaagaggaagtaactga

SEQ ID NO: 23431 - DNA, 202 bp, Homo sapiens
  MAP TO CHR8.3; EXPRESSED IN LUNG, SIGNAL = 2.1; EXPRESSED IN HEART, SIGNAL =   2; EXPRESSED IN BONE MARROW, SIGNAL = 1.3; EXPRESSED IN ADULT LIVER, SIGNAL = 1.2; EST_HUMAN HIT: AU121893.1, EVALUE 6.00e-98; NT HIT: gi14751373, EVALUE 4.00e-98; SWISSPROT HIT: P06858, EVALUE 1.00e-30
ttcaggtaacaggaatgtatgagagttgggtgccaaaacttgtggccgccctgtacaagagagaaccagactccaatgtcattgtggtggactggctgtcacgggctcaggagcattacccagtgtccgcgggctacaccaaactggtgggacaggatgtggcccggtttatcaactggatggaggtaagactgggagaagg

SEQ ID NO: 23432 - DNA, 293 bp, Homo sapiens
  MAP TO CHR17.3; EXPRESSED IN FETAL LIVER, SIGNAL = 0.76; EXPRESSED IN BRAIN, SIGNAL = 2.3; EXPRESSED IN ADULT LIVER, SIGNAL = 1.5; EXPRESSED IN LUNG, SIGNAL = 1.8; EXPRESSED IN HEART, SIGNAL = 1.4; EXPRESSED IN BONE MARROW, SIGNAL =   1; SWISSPROT HIT: Q16534, EVALUE 4.00e-34; EST_HUMAN HIT: AV656051.1, EVALUE 1.00e-13; NT HIT: M95585.1, EVALUE 1.00e-120
  unsure 115
ttaaaactcctgtgttgttccaggtcagctgttgccagcaaaccgcaatacaccaagtcccattgatcctgacaccatccaggtcccagtgggttatgagccagacccagcagantcttgccctttccagcatccctggccaggaaatgtttgaccctcgcaaacgcaagttctctgaggaagaactgaagccacagcccatgatcaagaaagctcgcaaagtcttcatccctgatgacctgaaggtaaattggaactggtaatcagtctttgggcaaatggagagtgggatc

SEQ ID NO: 23433 - DNA, 118 bp, Homo sapiens
  MAP TO CHR1.3; EXPRESSED IN LUNG, SIGNAL = 1.1; EXPRESSED IN HEART, SIGNAL = 1.1e+02; EXPRESSED IN BONE MARROW, SIGNAL = 1.1; EXPRESSED IN FETAL LIVER, SIGNAL = 1.1; EXPRESSED IN PLACENTA, SIGNAL = 0.95; SWISSPROT HIT: P45379, EVALUE 5.00e-16; EST_HUMAN HIT: T11554.1, EVALUE 1.00e-57; NT HIT: gi16167077, EVALUE 3.00e-60
gacatccaccggaagcgcatggagaaggacctgaatgagttgcaggcgctgatcgaggctcactttgagaacaggaagaaagaggaggaggagctcgtttctctcaaagacaggatcg

SEQ ID NO: 23434 - DNA, 213 bp, Homo sapiens
  MAP TO CHR19.3; EXPRESSED IN HELA, SIGNAL = 2.3; EXPRESSED IN HEART, SIGNAL = 2.8; EXPRESSED IN BONE MARROW, SIGNAL = 2.3; EXPRESSED IN PLACENTA, SIGNAL = 2.1; EXPRESSED IN FETAL LIVER, SIGNAL = 1.8; EXPRESSED IN ADULT LIVER, SIGNAL = 2.7; NT HIT: X12911.1, EVALUE 1.00e-116; SWISSPROT HIT: P06687, EVALUE 7.00e-37; EST_HUMAN HIT: AL561153.1, EVALUE 1.00e-112
cactcacgttgtcaccagaggggtcgtcctcggtgcccgcctggataccgtaggccaggaagcagaggatagccccgatccacagcaggatggagaagcccccgaagagctgccggcaaaacttgacccactctggggtggtaggcggtggcgtgagtgcgttaggcccatcccgggccaggatctcctgggctttgctgtgggtcaaaccct

SEQ ID NO: 23435 - DNA, 163 bp, Homo sapiens
  MAP TO CHR9.3; EXPRESSED IN LUNG, SIGNAL = 3.3; EXPRESSED IN HELA, SIGNAL = 3.2; EXPRESSED IN PLACENTA, SIGNAL = 3.3; EXPRESSED IN BONE MARROW, SIGNAL = 3.6; EXPRESSED IN BRAIN, SIGNAL = 4.5; SWISSPROT HIT: P00568, EVALUE 8.00e-25; EST_HUMAN HIT: BE797967.1, EVALUE 6.00e-85; NT HIT: J04809.1, EVALUE 7.00e-87
tcaccagtggaaccagctgccccttctccatgatttccgacagcttcttgcccctggccgagcctgagctgacctcggaccgcaggaggtccccggtggagaggtgggtgtagccatacttctgcacgatcttctcacactgggtgcccttccctgagccagg

SEQ ID NO: 23436 - DNA, 209 bp, Homo sapiens
  MAP TO CHR11.3; EXPRESSED IN BRAIN, SIGNAL =   2; EXPRESSED IN LUNG, SIGNAL = 2.7; EXPRESSED IN BONE MARROW, SIGNAL = 0.91; EXPRESSED IN HEART, SIGNAL = 0.86; EXPRESSED IN ADULT LIVER, SIGNAL = 1.6; SWISSPROT HIT: Q15293, EVALUE 6.00e-37; EST_HUMAN HIT: BI966161.1, EVALUE 1.00e-110; NT HIT: gi15310664, EVALUE 1.00e-110
ttctagcggatatgttttcccatgaggagaatggccctgagccagactgggttttatcagaacgggagcagtttaacgaattccgggatctgaacaaggacgggaagttagacaaagatgagattcgccactggatcctccctcaagattatgatcatgcacaggctgaggccaggcatctggtatatgaatcagacaaaaacaaggta

SEQ ID NO: 23437 - DNA, 178 bp, Homo sapiens
  MAP TO CHR1.3; EXPRESSED IN BONE MARROW, SIGNAL = 1.6; EXPRESSED IN BRAIN, SIGNAL = 1.3; NT HIT: gi15294491, EVALUE 1.00e-94; SWISSPROT HIT: O54826, EVALUE 5.70e+00; EST_HUMAN HIT: AI808539.1, EVALUE 2.00e-94
cagatctgaggctgtcagagatgactctggttctgtccatgaatagattctgcgagcccattgtctcggaaggagctgctgaaattgctgggtaccaaacactatgggaggctgacagctacggaggcccaagccccccagggccagcacaagctcctttgcagggagaccggggagc

SEQ ID NO: 23438 - DNA, 241 bp, Homo sapiens
  MAP TO CHR2.3; EXPRESSED IN LUNG, SIGNAL = 0.88; EXPRESSED IN BONE MARROW, SIGNAL =   1; EXPRESSED IN FETAL LIVER, SIGNAL = 0.57; EXPRESSED IN BRAIN, SIGNAL = 1.3; EXPRESSED IN PLACENTA, SIGNAL = 0.69; NT HIT: K03003.1, EVALUE 0.00e+00; SWISSPROT HIT: P07315, EVALUE 2.00e-42; EST_HUMAN HIT: BF726870.1, EVALUE 1.00e-126
ttcttcctttgcagatcaccttctatgaggacagggccttccagggccgcagctacgaaaccaccactgactgccccaacctgcagccgtatttcagccgctgcaactccatccgggtggagagcggctgctggatgctctatgagcgtcccaactaccaaggtcaacaatacttgctgcggcgaggggagtaccccgactaccagcaatggatgggcctcagcgactccatccgctcctg

SEQ ID NO: 23439 - DNA, 109 bp, Homo sapiens
  MAP TO CHR12.3; EXPRESSED IN PLACENTA, SIGNAL = 1.2; EXPRESSED IN LUNG, SIGNAL = 1.2; EXPRESSED IN HEART, SIGNAL =   1; EXPRESSED IN BONE MARROW, SIGNAL = 1.2; EST_HUMAN HIT: BG826811.1, EVALUE 1.00e-54; NT HIT: gi14758570, EVALUE 7.00e-55; SWISSPROT HIT: P08151, EVALUE 2.00e-16
agaagccgtatgtatgtaagctccctggctgcaccaaacgctatacagatcctagctcgctgcgaaaacatgtcaagacagtgcatggtcctgacgcccatgtgaccaa

SEQ ID NO: 23440 - DNA, 135 bp, Homo sapiens
  MAP TO CHR6.3; EXPRESSED IN BONE MARROW, SIGNAL = 2.6; EXPRESSED IN HEART, SIGNAL = 1.8; EXPRESSED IN BRAIN, SIGNAL =   2; EST_HUMAN HIT: BI821379.1, EVALUE 9.00e-59; NT HIT: J05008.1, EVALUE 3.00e-70; SWISSPROT HIT: P05305, EVALUE 4.00e-10
ctcccagtccaccctggcggctccgccggtccaagcgctgctcctgctcgtccctgatggataaagagtgtgtctacttctgccacctggacatcatttgggtcaacactcccgagtaagtctctagagggcatt

SEQ ID NO: 23441 - DNA, 145 bp, Homo sapiens
  MAP TO CHR17.3; EXPRESSED IN ADULT LIVER, SIGNAL = 0.65; EXPRESSED IN BRAIN, SIGNAL = 0.95; EXPRESSED IN PLACENTA, SIGNAL = 0.71; EXPRESSED IN BONE MARROW, SIGNAL = 0.99; EXPRESSED IN HEART, SIGNAL = 0.79; SWISSPROT HIT: Q93086, EVALUE 2.00e-22; EST_HUMAN HIT: AL520274.1, EVALUE 1.00e-70; NT HIT: gi14774360, EVALUE 7.00e-71
ttacctgaagttgtacccggaggagacagactttgaaagtttattgtccagacggctaaaagaatagtgagggtggcactcagaggcagctttatcaagatcacagttccattcaatattaattcctatcacgccacccttgata

SEQ ID NO: 23442 - DNA, 175 bp, Homo sapiens
  MAP TO CHR1.3; EXPRESSED IN LUNG, SIGNAL = 1.6; EXPRESSED IN PLACENTA, SIGNAL = 1.3; EXPRESSED IN HEART, SIGNAL = 1.7; EXPRESSED IN BONE MARROW, SIGNAL = 1.5; EXPRESSED IN BRAIN, SIGNAL = 1.4; SWISSPROT HIT: P99026, EVALUE 7.50e+00; EST_HUMAN HIT: BE543207.1, EVALUE 3.00e-53; NT HIT: gi14722846, EVALUE 2.00e-53
cctcaccatcttggtgtaaagggcccggatggaggggctgcctacaaggagctctgagatctcccccttcttcttcttcaagcagaactgggaaagccaggcgtcaaacaattccgggggccctgcagagggacagatgctgacggtcagttgccttggtctgggaaaagaacac

SEQ ID NO: 23443 - DNA, 141 bp, Homo sapiens
  MAP TO CHR19.3; EXPRESSED IN HEART, SIGNAL = 3.7; EXPRESSED IN BONE MARROW, SIGNAL = 2.7; EXPRESSED IN FETAL LIVER, SIGNAL = 4.1; EXPRESSED IN ADULT LIVER, SIGNAL = 3.6; EXPRESSED IN PLACENTA, SIGNAL = 6.4; EXPRESSED IN HELA, SIGNAL = 4.6; EXPRESSED IN LUNG, SIGNAL = 3.7; EXPRESSED IN BRAIN, SIGNAL = 2.9; NT HIT: gi14765050, EVALUE 6.00e-53; SWISSPROT HIT: O95049, EVALUE 4.00e-14; EST_HUMAN HIT: AA860416.1, EVALUE 4.00e-64
ctcacctgtagaatgagatctccttcctgcagcccacggtgccgggcagccaggcccgaatctgtaatgtgcttgatgaagatctgactgcccagcttgacgccaaactctgtaaggggggaggagggaaactgaggcagg

SEQ ID NO: 23444 - DNA, 138 bp, Homo sapiens
  MAP TO CHR4.3; EXPRESSED IN BONE MARROW, SIGNAL = 1.7; EXPRESSED IN PLACENTA, SIGNAL = 1.4; EXPRESSED IN HEART, SIGNAL = 1.4; EXPRESSED IN FETAL LIVER, SIGNAL = 1.1; EXPRESSED IN ADULT LIVER, SIGNAL = 1.3; EXPRESSED IN BRAIN, SIGNAL = 2.2; NT HIT: AB008830.1, EVALUE 2.00e-68; SWISSPROT HIT: O60760, EVALUE 2.00e-19; EST_HUMAN HIT: BF593044.1, EVALUE 7.00e-72
ggcaggaatggcttggactttcttccgtaaagtcaccagccttggatggttgtctaacaggtcaggcttaaagaccaaaagtgtggtactgcaaatctcccagtagaagtctgcccaagttacctagtttaaaggaaa

SEQ ID NO: 23445 - DNA, 174 bp, Homo sapiens
  MAP TO CHR5.3; EXPRESSED IN FETAL LIVER, SIGNAL = 2.3; EXPRESSED IN BONE MARROW, SIGNAL =   4; EXPRESSED IN LUNG, SIGNAL = 2.8; EXPRESSED IN HEART, SIGNAL = 2.6; EXPRESSED IN PLACENTA, SIGNAL = 2.9; EXPRESSED IN ADULT LIVER, SIGNAL = 2.9; EXPRESSED IN BRAIN, SIGNAL = 4.8; SWISSPROT HIT: Q58445, EVALUE 3.30e+00; EST_HUMAN HIT: BI562286.1, EVALUE 9.00e-78; NT HIT: U83601.1, EVALUE 1.00e-76
cgttcaccgtcacaaagcttatcgtgccacactgtggccggtgagccctccaagaaagtcgaagatagaaactggcccatcttaggccagggcagtcccagactcaaggattgttgctggaagtcagggagactccccttccctgatgactcagaacaggaagtgacagcagag

SEQ ID NO: 23446 - DNA, 161 bp, Homo sapiens
  MAP TO CHR19.3; EXPRESSED IN ADULT LIVER, SIGNAL = 1.9; EXPRESSED IN PLACENTA, SIGNAL = 1.7; EXPRESSED IN HEART, SIGNAL = 1.3; EXPRESSED IN BONE MARROW, SIGNAL = 1.5; NT HIT: gi8923581, EVALUE 1.00e-85; SWISSPROT HIT: P17141, EVALUE 6.00e-12; EST_HUMAN HIT: BF967267.1, EVALUE 5.20e-02
ggagtgcgggtgcagcttcagctggaagtcgcagctggtcatccaccgcaagagccacacaggccagcggcgtcacttctgcagtgactgtggccgcgccttcgactggaagtcgcagctggtcatccaccgcaagggccaccggccggaggttccatgag

SEQ ID NO: 23447 - DNA, 147 bp, Homo sapiens
  MAP TO CHR11.3; EXPRESSED IN LUNG, SIGNAL = 1.4; EXPRESSED IN FETAL LIVER, SIGNAL = 0.79; EXPRESSED IN BRAIN, SIGNAL = 2.8; EXPRESSED IN PLACENTA, SIGNAL = 2.6; EXPRESSED IN BONE MARROW, SIGNAL = 2.1; SWISSPROT HIT: O77622, EVALUE 3.00e-13; EST_HUMAN HIT: BG031061.1, EVALUE 9.00e-16; NT HIT: AF068483.1, EVALUE 7.00e-31
gaggaaaaattcacctttattgagaaatataactatcctagctctgtcacattattggccaaagaaccaaataagtatacacacactcaaatcaaagatgctgtaagagatggcttgagggctgtcaaaaaaagctattgatgatgg

SEQ ID NO: 23448 - DNA, 129 bp, Homo sapiens
  MAP TO CHR14.3; EXPRESSED IN FETAL LIVER, SIGNAL = 2.2; EXPRESSED IN ADULT LIVER, SIGNAL = 1.8; EXPRESSED IN BRAIN, SIGNAL = 3.2; EXPRESSED IN LUNG, SIGNAL = 3.6; EXPRESSED IN BONE MARROW, SIGNAL = 2.3; EXPRESSED IN HEART, SIGNAL = 1.2; SWISSPROT HIT: P51003, EVALUE 1.00e-05; EST_HUMAN HIT: BF903156.1, EVALUE 1.00e-66; NT HIT: X76770.1, EVALUE 1.00e-66
gagtgaaagcattcctcaaactgccacacaaccagccatttctccaccaccaaagcctacggtctccagagttgtttcttcaacacgtctggtaaacccaccacctagatcttcaggaaatgcagcaac

SEQ ID NO: 23449 - DNA, 209 bp, Homo sapiens
  MAP TO CHR20.3; EXPRESSED IN BONE MARROW, SIGNAL = 1.9; EXPRESSED IN LUNG, SIGNAL =   7; EXPRESSED IN BRAIN, SIGNAL = 1.2; EXPRESSED IN ADULT LIVER, SIGNAL = 1.2; EST_HUMAN HIT: AU140905.1, EVALUE 3.00e-84; NT HIT: U94333.1, EVALUE 1.00e-110
ctttacctgtactggttctccatggccctgctctcagctcgctctggaacccaggagtaactgtctgccgcattctggggcttcttctccttcttctcctccctcttcgctctccgcttgcgatagaccagtagccccagagccagggccagcaggagtaggatggccaccacggtgcctaggatgtagaataaaagcagcttttgccc

SEQ ID NO: 23450 - DNA, 144 bp, Homo sapiens
  MAP TO CHR19.3; EXPRESSED IN LUNG, SIGNAL = 0.81; EXPRESSED IN HEART, SIGNAL = 0.82; EXPRESSED IN BONE MARROW, SIGNAL = 1.1; EXPRESSED IN FETAL LIVER, SIGNAL = 1.3; EXPRESSED IN BRAIN, SIGNAL = 0.71; SWISSPROT HIT: O60412, EVALUE 1.00e-12; EST_HUMAN HIT: AW514861.1, EVALUE 1.00e-45; NT HIT: gi16177765, EVALUE 1.00e-75
tccctatctcagggatccttttctcttactataaaattgtttcccccattctgagagttccaacatcagatgggaagtataaagccttctccacctgtggctctcacctggcagttgtttgcttattttatggaacagggcttg

SEQ ID NO: 23451 - DNA, 261 bp, Homo sapiens
  MAP TO CHR2.3; EXPRESSED IN BONE MARROW, SIGNAL = 5.8; EXPRESSED IN PLACENTA, SIGNAL = 5.3; EXPRESSED IN HEART, SIGNAL = 3.9; EXPRESSED IN BRAIN, SIGNAL = 5.3; SWISSPROT HIT: P38361, EVALUE 7.00e-11; EST_HUMAN HIT: BG166629.1, EVALUE 1.00e-101; NT HIT: AF102062.1, EVALUE 0.00e+00
ctacttacctagagggtgtgatcggtgtcagatccttccccatggtctggataactcttcttccccaaacccacagaccaacacagataccaacaccaccatagagtagaagccatattggtgttgccacttttgaagaaacatctcctgtgtcataaaccaaatataaagcaaccagaggcccaatggcattgctggaagaaacaaagagggcagaagtgacttttcaggcagaactagatcttggcaagacccaatctg

SEQ ID NO: 23452 - DNA, 160 bp, Homo sapiens
  MAP TO CHR3.3; EXPRESSED IN BRAIN, SIGNAL = 0.8; EXPRESSED IN ADULT LIVER, SIGNAL = 1.3; EXPRESSED IN LUNG, SIGNAL = 1.7; EXPRESSED IN PLACENTA, SIGNAL = 1.1; EXPRESSED IN HEART, SIGNAL = 2.5; EXPRESSED IN BONE MARROW, SIGNAL = 1.1; NT HIT: AB026898.1, EVALUE 4.00e-85; SWISSPROT HIT: P07562, EVALUE 4.40e+00; EST_HUMAN HIT: BE794350.1, EVALUE 8.10e-01
caggtggtgcccctgcgggctgtggtggccgtgcctgagctgcagctctccaccagctgggtggactttgggacctgctttgtgagccagcagcgagtccgggaggtctacctgatgaacctgagcgggtgccgaagctactggactatgctgatgggta

SEQ ID NO: 23453 - DNA, 154 bp, Homo sapiens
  MAP TO CHR3.3; EXPRESSED IN BONE MARROW, SIGNAL = 1.1; EXPRESSED IN LUNG, SIGNAL = 1.2; EXPRESSED IN BRAIN, SIGNAL = 0.88; NT HIT: gi4557754, EVALUE 1.00e-78; SWISSPROT HIT: O75030, EVALUE 2.00e-22; EST_HUMAN HIT: AV717752.1, EVALUE 2.00e-78
cagagacatgcgctggaacaagggaaccatcttaaaagcatccgtggactatatccgaaagttgcaacgagaacagcaacgcgcaaaagaacttgaaaaccgacagaagaaactggagcacgccaaccggcatttgttgctcagaatacaggta

SEQ ID NO: 23454 - DNA, 133 bp, Homo sapiens
  MAP TO CHR9.3; EXPRESSED IN BONE MARROW, SIGNAL = 1.9; EXPRESSED IN ADULT LIVER, SIGNAL = 4.3; SWISSPROT HIT: P27105, EVALUE 2.00e-09; EST_HUMAN HIT: AL544142.1, EVALUE 1.00e-67; NT HIT: X85117.1, EVALUE 4.00e-69
ctggatgatgccactgatgcctggggaataaaggtggagcgtgtggaaattaaggatgtgaaactacctgtgcagctccagagagctatggctgcagaagcagaagcgtcccgcgaggcccgcgccaaggtaa

SEQ ID NO: 23455 - DNA, 140 bp, Homo sapiens
  MAP TO CHR2.3; EXPRESSED IN ADULT LIVER, SIGNAL = 1.6; EXPRESSED IN BONE MARROW, SIGNAL = 1.3; EXPRESSED IN HEART, SIGNAL = 1.5; EXPRESSED IN PLACENTA, SIGNAL = 1.1; SWISSPROT HIT: O75746, EVALUE 1.00e-20; EST_HUMAN HIT: AA404251.1, EVALUE 4.00e-73; NT HIT: gi14747215, EVALUE 3.00e-73
cctttccaaaatgctgagggcccttcttcccggagaatcttcctgaaacagtcgatgacaccactgtatgtcgtctggccagcgcgggcagccacctgcagtcttgtcttgatgacatcagcaggggtcaccagagatgc

SEQ ID NO: 23456 - DNA, 148 bp, Homo sapiens
  MAP TO CHR17.3; EXPRESSED IN BONE MARROW, SIGNAL =   2; EXPRESSED IN HEART, SIGNAL = 3.2; EXPRESSED IN PLACENTA, SIGNAL = 2.5; EXPRESSED IN ADULT LIVER, SIGNAL = 3.3; SWISSPROT HIT: Q9JK42, EVALUE 2.00e-22; EST_HUMAN HIT: BE875246.1, EVALUE 8.00e-78; NT HIT: gi14773213, EVALUE 5.00e-78
aggccctgtccacggactcggtggagcgcctgcctgtctacaacaagtcagcctggcgccactaccagaccatccaggaggccggcgactggtgtgtgcccagcacggagcccaagaacacgtccacgtaccgcgtcagctaagggcc

SEQ ID NO: 23457 - DNA, 137 bp, Homo sapiens
  MAP TO CHR10.3; EXPRESSED IN ADULT LIVER, SIGNAL = 4.9; EXPRESSED IN BONE MARROW, SIGNAL = 4.1; EXPRESSED IN HELA, SIGNAL = 6.1; EXPRESSED IN PLACENTA, SIGNAL = 3.4; SWISSPROT HIT: O76070, EVALUE 6.00e-06; EST_HUMAN HIT: BI457851.1, EVALUE 6.00e-69; NT HIT: AF044311.1, EVALUE 4.00e-69
ggctcaccttgcgcaccaccccggaggtgaccgcgatgttctccgcctcctccacggtcttggtggccacagtgttgacgctgctcaccacagcctcgctcacggcgttggcctgctccttggtcttctcggccact

SEQ ID NO: 23458 - DNA, 176 bp, Homo sapiens
  MAP TO CHR1.3; EXPRESSED IN HEART, SIGNAL = 0.55; EXPRESSED IN PLACENTA, SIGNAL = 0.67; EXPRESSED IN BONE MARROW, SIGNAL = 0.67; EXPRESSED IN ADULT LIVER, SIGNAL = 0.6; EXPRESSED IN BRAIN, SIGNAL = 0.77; SWISSPROT HIT: P09858, EVALUE 3.00e-25; EST_HUMAN HIT: N36741.1, EVALUE 2.00e-91; NT HIT: gi14730823, EVALUE 2.00e-93
caggtcctgagcttatataataccataaatccagaagcatctgcttctccttgctgcgtgtcccaagatttagaacctctaaccattctctactacattggcaaaacacccaagattgaacagctttctaatatgattgtaaagtcttgcaaatgcagctaaaattcttggaaaag

SEQ ID NO: 23459 - DNA, 104 bp, Homo sapiens
  MAP TO CHR1.3; EXPRESSED IN LUNG, SIGNAL = 1.8; EXPRESSED IN HEART, SIGNAL = 1.3; EXPRESSED IN BONE MARROW, SIGNAL = 2.4; EXPRESSED IN ADULT LIVER, SIGNAL = 1.3; EXPRESSED IN BRAIN, SIGNAL = 2.4; NT HIT: gi14725414, EVALUE 6.00e-52; SWISSPROT HIT: Q28147, EVALUE 6.00e-13; EST_HUMAN HIT: AI638210.1, EVALUE 9.00e-52
aaaatatcaaatcagcaaggaaggtgtgggcttcttgcctggccaagcctcttttgcatatttcttcttcttgggttcatttacagcttcagggttatagactg

SEQ ID NO: 23460 - DNA, 104 bp, Homo sapiens
  MAP TO CHR3.3; EXPRESSED IN HEART, SIGNAL = 3.1; EXPRESSED IN PLACENTA, SIGNAL = 1.4; EXPRESSED IN ADULT LIVER, SIGNAL = 2.3; EXPRESSED IN BRAIN, SIGNAL = 2.2; EXPRESSED IN BONE MARROW, SIGNAL = 1.9; SWISSPROT HIT: P56539, EVALUE 1.00e-15; EST_HUMAN HIT: BG572934.1, EVALUE 4.00e-14; NT HIT: gi14725914, EVALUE 6.00e-52
aagagtgggttgcagaaggtgcggatgcagagtgagtagatgtggctgatgcactggatctcgatcaggtagctcttaatgcatggcaccaccgcccagatgtg

SEQ ID NO: 23461 - DNA, 170 bp, Homo sapiens
  MAP TO CHR5.3; EXPRESSED IN ADULT LIVER, SIGNAL = 1.1; EXPRESSED IN BRAIN, SIGNAL = 1.2; EXPRESSED IN BONE MARROW, SIGNAL = 1.6; EXPRESSED IN LUNG, SIGNAL = 0.99; EXPRESSED IN HEART, SIGNAL = 1.3; EXPRESSED IN PLACENTA, SIGNAL = 1.7; SWISSPROT HIT: P20700, EVALUE 5.00e-23; EST_HUMAN HIT: AW604175.1, EVALUE 1.00e-70; NT HIT: L37738.1, EVALUE 2.00e-78
tgttccagctatgctaagaaggaatctgatcttaatggcgcccagatcaagcttcgagaatatgaagcagcactgaattcgaaagatgcagctcttgctactgcacttggtgacaaaaaaagtttagagggagatttggaggatctgaaggatcagattgcccaggtaag

SEQ ID NO: 23462 - DNA, 127 bp, Homo sapiens
  MAP TO CHR6.3; EXPRESSED IN LUNG, SIGNAL = 1.9; EXPRESSED IN HEART, SIGNAL = 1.9; EXPRESSED IN PLACENTA, SIGNAL = 1.7; EXPRESSED IN BONE MARROW, SIGNAL = 1.8; EXPRESSED IN FETAL LIVER, SIGNAL = 2.6; EXPRESSED IN BRAIN, SIGNAL = 1.6; NT HIT: gi5803184, EVALUE 2.00e-34; SWISSPROT HIT: P20488, EVALUE 4.00e-01; EST_HUMAN HIT: AU134991.1, EVALUE 2.00e-34
atcataggaagtttacaactatccagctataggttcgtgtagccagcataaagcagaagggtatcagtgcagtacaggagcacaaagactgcaaagggagcatagaactgtgcagaagaagagtaat

SEQ ID NO: 23463 - DNA, 162 bp, Homo sapiens
  MAP TO CHR19.3; EXPRESSED IN FETAL LIVER, SIGNAL = 2.1; EXPRESSED IN BRAIN, SIGNAL =   2; EXPRESSED IN ADULT LIVER, SIGNAL = 1.9; EXPRESSED IN BONE MARROW, SIGNAL =   2; EXPRESSED IN HEART, SIGNAL = 1.6; NT HIT: gi11424606, EVALUE 1.00e-78; SWISSPROT HIT: Q9PTQ7, EVALUE 1.50e+00; EST_HUMAN HIT: BI834593.1, EVALUE 2.00e-78
ggacagagtgtaccttcatagagaatgccctggttgtccctggtctggaaggacttcagcttccactgtcgcccactcttgtctgtcagcactgtccctgtgggcaaagcttcaagtgaggtggtcactcggctccgcttcagcgtctgagggctctgcctg

SEQ ID NO: 23464 - DNA, 311 bp, Homo sapiens
  MAP TO CHR5.3; EXPRESSED IN LUNG, SIGNAL = 1.2; EXPRESSED IN HEART, SIGNAL = 0.89; EXPRESSED IN ADULT LIVER, SIGNAL = 1.1; EXPRESSED IN BONE MARROW, SIGNAL = 0.87; SWISSPROT HIT: O95450, EVALUE 2.00e-55; EST_HUMAN HIT: BE221989.1, EVALUE 0.00e+00; NT HIT: gi11417110, EVALUE 0.00e+00
gggaagcacaacgacattgacgtgttcatgcctaccctcccagtgcccactgtagccatggaggtgcggccatcaccaagcacccccctggaggtccctctcaatgcctccagcaccaatgccacagaggatcacccagaaaccaatgccgtagatgaaccctacaaaatccatggcctggaagatgaagtccagccacccaacctaatccctcgacgaccgagcccctatgaaaagaccagaaaccaaagaatccaagagctcattgatgagatgcggaagaaagagatgctcggaaagttctaataaaa

SEQ ID NO: 23465 - DNA, 191 bp, Homo sapiens
  MAP TO CHR10.3; EXPRESSED IN BONE MARROW, SIGNAL = 0.88; EXPRESSED IN LUNG, SIGNAL = 2.5; EXPRESSED IN BRAIN, SIGNAL = 0.77; EXPRESSED IN FETAL LIVER, SIGNAL = 0.67; SWISSPROT HIT: Q62833, EVALUE 9.00e-32; EST_HUMAN HIT: AI738477.1, EVALUE 1.00e-102; NT HIT: gi4885348, EVALUE 1.00e-102
caggtcaacctggcctatgcctacgagaccaaggatgcactgtgcttggtcctgaccatcatgaatgggggtgacctgaagttccacatctacaacatgggcaaccctggcttcgaggaggagcgggccttgttttatgcggcagagatcctctgcggcttagaagacctccaccgtgagaacaccgtcta

SEQ ID NO: 23466 - DNA, 137 bp, Homo sapiens
  MAP TO CHR5.3; EXPRESSED IN ADULT LIVER, SIGNAL = 1.3; EXPRESSED IN BRAIN, SIGNAL = 1.2; EXPRESSED IN BONE MARROW, SIGNAL = 1.7; SWISSPROT HIT: P22352, EVALUE 1.00e-20; EST_HUMAN HIT: AL543057.1, EVALUE 4.00e-70; NT HIT: AF217787.1, EVALUE 2.00e-71
gactgccatggtggcataagtggcaccatttacgagtacggagccctcaccattgatggggaggagtacatccccttcaagcagtatgctggcaaatacgtcctctttgtcaacgtggccagctactgaggcctgac

SEQ ID NO: 23467 - DNA, 127 bp, Homo sapiens
  MAP TO CHR4.3; EXPRESSED IN BONE MARROW, SIGNAL = 2.8; EXPRESSED IN LUNG, SIGNAL =   1; EXPRESSED IN HEART, SIGNAL = 2.1; EXPRESSED IN PLACENTA, SIGNAL = 1.9; EXPRESSED IN FETAL LIVER, SIGNAL = 1.1; EXPRESSED IN BRAIN, SIGNAL = 2.2; SWISSPROT HIT: Q9UPY5, EVALUE 3.00e-15; EST_HUMAN HIT: BG326527.1, EVALUE 7.00e-50; NT HIT: gi7657682, EVALUE 1.00e-59
aatactcacttatgcccacagctgtaatgagcttgatcgcaagttcagggatttcacattgaataaaaaatggttccagaatgtagcgtccaaatgccagggatatcacagcagtagctgcagggct

SEQ ID NO: 23468 - DNA, 105 bp, Homo sapiens
  MAP TO CHR11.3; EXPRESSED IN HEART, SIGNAL = 0.71; EXPRESSED IN ADULT LIVER, SIGNAL = 0.65; EXPRESSED IN BRAIN, SIGNAL = 1.1; EXPRESSED IN BONE MARROW, SIGNAL = 1.1; SWISSPROT HIT: P09237, EVALUE 8.00e-15; EST_HUMAN HIT: BF326740.1, EVALUE 9.00e-52; NT HIT: L22520.1, EVALUE 2.00e-52
acctgtaggtgaccactttggaagtccattttgggctatttggaaatagtgagtattctgcaacatctggcactccacatctgggcttctgcattatttctatga

SEQ ID NO: 23469 - DNA, 278 bp, Homo sapiens
  MAP TO CHR2.3; EXPRESSED IN ADULT LIVER, SIGNAL = 1.3; EXPRESSED IN HELA, SIGNAL = 2.1; EXPRESSED IN BONE MARROW, SIGNAL = 1.3; SWISSPROT HIT: P45268, EVALUE 1.00e-17; EST_HUMAN HIT: BG420336.1, EVALUE 0.00e+00; NT HIT: AF102059.1, EVALUE 0.00e+00
aacttaccaaacatagcactgactgagccggccatcagcagcccttgagtcgagttgtacatctccacgtcaatcaagcccttccggatggtttcgctcactttggcccccagtaagacagagcccactgtttcaaagatgctagctaggatgcaggcttgcttcagggtcactacacctgagcccacagctgtaccaaaagaatttgctacatcattggctcccacggagaatgccaagacaaatgcaataatgaagcccaggatgagcatccatag

SEQ ID NO: 23470 - DNA, 253 bp, Homo sapiens
  MAP TO CHR12.3; EXPRESSED IN LUNG, SIGNAL = 0.85; EXPRESSED IN HEART, SIGNAL = 1.1; EXPRESSED IN PLACENTA, SIGNAL = 0.93; EXPRESSED IN BONE MARROW, SIGNAL = 0.81; EXPRESSED IN FETAL LIVER, SIGNAL = 1.5; EXPRESSED IN ADULT LIVER, SIGNAL =   1; NT HIT: gi6754411, EVALUE 1.00e-36; SWISSPROT HIT: O15169, EVALUE 2.40e+00; EST_HUMAN HIT: AI916293.1, EVALUE 0.00e+00
ggagagccatgtagatccaggctctcgcccgcccgcctccttcgggatcgaatcaagggctcccatagtgttaggagggggcgagagtgctgtttatcgtcatttgcctcggagcttcgagagagggtggtattttgcttttccgccccgcatcctccggaactccctgcaccggagagaggacggcgtctccaggttgctggcaaccggtgagaatgggggtagggaaggaacattttcgccgtagctgctc

SEQ ID NO: 23471 - DNA, 167 bp, Homo sapiens
  MAP TO CHR11.3; EXPRESSED IN BONE MARROW, SIGNAL = 0.67; EXPRESSED IN ADULT LIVER, SIGNAL = 0.66; NT HIT: gi14783692, EVALUE 6.00e-81; SWISSPROT HIT: P42664, EVALUE 1.10e+00; EST_HUMAN HIT: BE276336.1, EVALUE 9.00e-81
caggctccatcctccgccgctggaagcggaactggtttgccctgtggctggacgggaccctgggatactaccacgatgagacagcgcaggacgaggaggaccgtgtgctcatccacttcaatgtccgtgacataaagatcggcccagagtgccatggtgagcagaag

SEQ ID NO: 23472 - DNA, 200 bp, Homo sapiens
  MAP TO CHR6.3; EXPRESSED IN LUNG, SIGNAL = 0.8; EXPRESSED IN ADULT LIVER, SIGNAL = 1.2; EXPRESSED IN BRAIN, SIGNAL = 1.1; EXPRESSED IN BONE MARROW, SIGNAL = 1.3; NT HIT: AF034922.1, EVALUE 1.00e-109; SWISSPROT HIT: O00294, EVALUE 9.00e-30; EST_HUMAN HIT: BE780807.1, EVALUE 2.00e-88
ggccctcaggtactcacggtcatcagcgtggacaatctggaagttcttgactgaggcctgggtgacccggccttggaagttgagggtgtaggagccactgtcatcgttccagacaggtggcttgttgtgcagttctatgaggctctccagcgtcttgttctgccagcgcaccagcaggccgtcactagcctggggtgccc

SEQ ID NO: 23473 - DNA, 205 bp, Homo sapiens
  MAP TO CHR11.3; EXPRESSED IN HELA, SIGNAL = 4.8; EXPRESSED IN BONE MARROW, SIGNAL = 4.2; EXPRESSED IN ADULT LIVER, SIGNAL = 4.1; EXPRESSED IN FETAL LIVER, SIGNAL = 3.9; EXPRESSED IN BRAIN, SIGNAL =   4; EST_HUMAN HIT: AA457719.1, EVALUE 1.00e-107; NT HIT: gi12736589, EVALUE 1.00e-106; SWISSPROT HIT: Q15293, EVALUE 4.00e-35
caggaagattgttgatcgaatcgacaatgatggggatggctttgtcactactgaggagctgaaaacctggatcaaacgggtgcagaaaagatacatctttgataatgtcgccaaagtctggaaggattatgatagggacaaggatgataaaatttcctgggaagaatacaaacaagccacctatggttactacctaggtaagagg

SEQ ID NO: 23474 - DNA, 125 bp, Homo sapiens
  MAP TO CHR12.3; EXPRESSED IN LUNG, SIGNAL = 1.7; EXPRESSED IN BONE MARROW, SIGNAL = 1.5; EXPRESSED IN FETAL LIVER, SIGNAL = 1.5; EXPRESSED IN ADULT LIVER, SIGNAL = 1.7; EST_HUMAN HIT: AA069069.1, EVALUE 3.00e-58; NT HIT: gi4759101, EVALUE 2.00e-58
cacaaaaaaagatctcgaacaagatcacgttctcccaagtaccattcgtcatccaagtccaggtctagatcacactcaaaagcaaagcattctcttcccagtgcctatcggacagtgcggcggtc

SEQ ID NO: 23475 - DNA, 117 bp, Homo sapiens
  MAP TO CHR1.3; EXPRESSED IN HEART, SIGNAL = 0.88; EXPRESSED IN FETAL LIVER, SIGNAL = 1.1; EXPRESSED IN BRAIN, SIGNAL = 0.71; EXPRESSED IN HELA, SIGNAL = 4.6; EXPRESSED IN BONE MARROW, SIGNAL = 0.96; SWISSPROT HIT: P55001, EVALUE 2.00e-07; EST_HUMAN HIT: AI075175.1, EVALUE 2.00e-59; NT HIT: gi9665260, EVALUE 1.00e-59
agctgacctctgtcgggacaagttctccaaatgtggcgtgatggccagcagcggcctgtgccaatccgtggcggcctcctgtgccaggagctgtgggagctgctagggtggtgctgg

SEQ ID NO: 23476 - DNA, 252 bp, Homo sapiens
  MAP TO CHR5.3; EXPRESSED IN BRAIN, SIGNAL = 0.62; EXPRESSED IN LUNG, SIGNAL = 1.6; EXPRESSED IN PLACENTA, SIGNAL = 0.8; EXPRESSED IN BONE MARROW, SIGNAL = 0.93; SWISSPROT HIT: Q64692, EVALUE 1.00e-15; EST_HUMAN HIT: BI858673.1, EVALUE 0.00e+00; NT HIT: gi15296457, EVALUE 0.00e+00
gggatcccggctccaagctctcctcgcattttacagatttcacccccgcgactatctccccaaaacggagcctttatatcaagagaaggtgcgggagctggggcaaccaggactttctcgggcacccaagatgcgctccattaggaagaggtggacgatctgcacaataagtctgctcctgatcttttataagacaaaagaaatagcaagaactgaggagcaccaggagacgcaactcatcgggtaaatgca

SEQ ID NO: 23477 - DNA, 148 bp, Homo sapiens
  MAP TO CHR4.3; EXPRESSED IN HEART, SIGNAL = 1.1; EXPRESSED IN ADULT LIVER, SIGNAL = 2.4; EXPRESSED IN BONE MARROW, SIGNAL = 1.7; EST_HUMAN HIT: R94266.1, EVALUE 7.00e-72; NT HIT: M84406.1, EVALUE 1.00e-75; SWISSPROT HIT: P28332, EVALUE 7.00e-20
taaatgcccctcaccttggcagtattgattgcagcaccaaacccagtggaaaagccacagctaattaggcatactttctctagaggagcgactgcatcaatcttggcaactgagatttcctttatcactgtgtattcacagaaggtgc

SEQ ID NO: 23478 - DNA, 121 bp, Homo sapiens
  MAP TO CHR20.3; EXPRESSED IN LUNG, SIGNAL =   7; EXPRESSED IN HEART, SIGNAL =   4; EXPRESSED IN HELA, SIGNAL = 4.4; EXPRESSED IN PLACENTA, SIGNAL = 2.8; EXPRESSED IN BONE MARROW, SIGNAL = 4.6; EXPRESSED IN BRAIN, SIGNAL = 4.4; EXPRESSED IN FETAL LIVER, SIGNAL = 3.7; EXPRESSED IN ADULT LIVER, SIGNAL = 3.5; SWISSPROT HIT: P52736, EVALUE 1.00e-16; EST_HUMAN HIT: BG818388.1, EVALUE 8.00e-59; NT HIT: U09366.1, EVALUE 5.00e-59
ttcagggatgtggctgtggatttcacccaggatgagtggaggctgctgagccctgctcaaaggactctgtacagagaggtgatgctggagaactacagcaacctggtctcactgggtaagc

SEQ ID NO: 23479 - DNA, 115 bp, Homo sapiens
  MAP TO CHR4.3; EXPRESSED IN HELA, SIGNAL = 3.5; EXPRESSED IN PLACENTA, SIGNAL = 1.2; EXPRESSED IN LUNG, SIGNAL =  14; EXPRESSED IN BONE MARROW, SIGNAL = 1.1; EXPRESSED IN FETAL LIVER, SIGNAL = 6.6; EXPRESSED IN BRAIN, SIGNAL = 0.91; SWISSPROT HIT: P19875, EVALUE 2.00e-16; EST_HUMAN HIT: BF847972.1, EVALUE 3.00e-58; NT HIT: AF043340.1, EVALUE 3.00e-57
acatgacttcggtttgggcgcagtggggtccgggggacttcaccttcacactttggatgttcttgaggtgaattccctgcagggtctgcaagcactggcagcgcagttcagtggc

SEQ ID NO: 23480 - DNA, 162 bp, Homo sapiens
  MAP TO CHR2.3; EXPRESSED IN ADULT LIVER, SIGNAL = 1.3; EXPRESSED IN BRAIN, SIGNAL = 0.86; EXPRESSED IN LUNG, SIGNAL = 0.85; EXPRESSED IN BONE MARROW, SIGNAL = 0.87; NT HIT: gi14738407, EVALUE 1.00e-57; SWISSPROT HIT: O95754, EVALUE 1.00e-18; EST_HUMAN HIT: BI823626.1, EVALUE 2.00e-57
catctcctccctgtcgccctgcagggggggtcctctatgctgccactgtgaaaaactacctggggacggagccaattatcaccagagcagtgggtcgtgccgaggactggattcggacagataccttgccttcctggctgaacggtggggagagggagaggg

SEQ ID NO: 23481 - DNA, 153 bp, Homo sapiens
  MAP TO CHR2.3; EXPRESSED IN PLACENTA, SIGNAL = 1.3; EXPRESSED IN HEART, SIGNAL = 1.5; EXPRESSED IN BONE MARROW, SIGNAL = 1.8; EXPRESSED IN FETAL LIVER, SIGNAL = 1.5; EST_HUMAN HIT: BF983355.1, EVALUE 8.00e-81; NT HIT: gi14747215, EVALUE 6.00e-81; SWISSPROT HIT: O75746, EVALUE 1.00e-23
agtccaaagaagccctcataacgcaagactttcttaaaacagtcaaagctgtttttgtacattagctccccaacaacagagccagagccacgctggttttgcattcgggtcttcaccagatctataggatacactgcagtggctcccacagct

SEQ ID NO: 23482 - DNA, 167 bp, Homo sapiens
  MAP TO CHR9.3; EXPRESSED IN PLACENTA, SIGNAL = 1.5; EXPRESSED IN ADULT LIVER, SIGNAL = 3.9; EXPRESSED IN FETAL LIVER, SIGNAL =   3; EXPRESSED IN BRAIN, SIGNAL =   6; EXPRESSED IN BONE MARROW, SIGNAL = 1.9; EXPRESSED IN LUNG, SIGNAL = 3.3; NT HIT: AF288147.1, EVALUE 3.00e-89; SWISSPROT HIT: P49813, EVALUE 2.00e-04; EST_HUMAN HIT: AI879136.1, EVALUE 6.00e-85
tactcacatcagggtccagctcatccagctcattttccagggtcctcagctcttcctctgttagggctccaaggatttcatcttcatccaggtcacggtatttctctagttctcgtctgtacgacatcgtggaagaacttgtctgtgtctcctgaatttctgtgctg

SEQ ID NO: 23483 - DNA, 121 bp, Homo sapiens
  MAP TO CHR21.3; EXPRESSED IN BONE MARROW, SIGNAL = 1.9; EXPRESSED IN HEART, SIGNAL = 1.4; EXPRESSED IN ADULT LIVER, SIGNAL = 1.7; EST_HUMAN HIT: H45392.1, EVALUE 3.00e-61; NT HIT: AB063285.1, EVALUE 5.00e-62; SWISSPROT HIT: P50747, EVALUE 1.00e-16
acccatccaggagacgcatcgttgtgggggtcacttcggcaaacaaaattactttccccaactgcttggtctgcagattttggcgatagatctctaagttgaaatgttctgatgagaaggc

SEQ ID NO: 23484 - DNA, 193 bp, Homo sapiens
  MAP TO CHR4.3; EXPRESSED IN LUNG, SIGNAL = 0.47; EXPRESSED IN BONE MARROW, SIGNAL = 0.92; EXPRESSED IN HEART, SIGNAL = 1.1; EXPRESSED IN BRAIN, SIGNAL = 0.62; SWISSPROT HIT: P22227, EVALUE 2.00e-31; EST_HUMAN HIT: AW665472.1, EVALUE 1.00e-61; NT HIT: M97813.1, EVALUE 3.00e-21
gagagctcaaaactaaagagacatttcctggttcatactggagagaagccgtttcggtgcacttttgaagggtgcggaaagcgcttctctctggactttaatttgcgtacgcacgtgcgcatccacacgggggagaaacgtttcgtgtgtccctttcaaggctgcaacaggaggtttattcagtcaaataacc

SEQ ID NO: 23485 - DNA, 211 bp, Homo sapiens
  MAP TO CHR21.3; EXPRESSED IN BRAIN, SIGNAL = 2.1; EXPRESSED IN BONE MARROW, SIGNAL = 0.74; EXPRESSED IN HEART, SIGNAL = 0.75; EXPRESSED IN PLACENTA, SIGNAL = 1.1; EST_HUMAN HIT: AW197823.1, EVALUE 2.00e-57; SWISSPROT HIT: Q13009, EVALUE 4.00e-24; NT HIT: gi4507500, EVALUE 1.00e-115
ttctttttctttgagtcagtgactgaagacagctgcatttcacccattttcttcatcttttcatccatgtcaatcttctgttccagttttttgatctctgatttcaggagtcggagcgtgtcttccttgtggtggtgcctcgcgaccgcagtggcgcaggcagagtggatggcggtgatccagttttcaagctccgtctggctagtggtct

SEQ ID NO: 23486 - DNA, 125 bp, Homo sapiens
  MAP TO CHR1.3; EXPRESSED IN BONE MARROW, SIGNAL = 1.5; EXPRESSED IN HEART, SIGNAL = 0.96; EXPRESSED IN PLACENTA, SIGNAL = 1.1; EXPRESSED IN BRAIN, SIGNAL = 1.5; EST_HUMAN HIT: BE266903.1, EVALUE 3.00e-64; SWISSPROT HIT: P35953, EVALUE 4.00e-11; NT HIT: gi16159587, EVALUE 2.00e-64
cttcgtcttcttcttctgttgttttcctgtagactgggttgtcaaaattcatgcttttggtgttcttccgcttccagtttctccagatcaggtatccactcatgcacaggagggctatcaccact

SEQ ID NO: 23487 - DNA, 173 bp, Homo sapiens
  MAP TO CHR17.3; EXPRESSED IN BRAIN, SIGNAL = 1.7; EXPRESSED IN BONE MARROW, SIGNAL = 2.2; EXPRESSED IN HEART, SIGNAL = 1.7; EXPRESSED IN PLACENTA, SIGNAL = 1.6; EST_HUMAN HIT: BF856757.1, EVALUE 1.00e-92; SWISSPROT HIT: P13501, EVALUE 8.00e-14; NT HIT: gi4506846, EVALUE 2.00e-56
ccatggggctgagactcacacgactgctgggttggagcacttgccactggtgtagaaatactccttgatgtgggcacggggcagtgggcgggcaatgtaggcaaagcagcagggtgtggtgtccgaggaatctggaagaggaaaggaaggagggagacccttttattcattgc

SEQ ID NO: 23488 - DNA, 238 bp, Homo sapiens
  MAP TO CHR11.3; EXPRESSED IN PLACENTA, SIGNAL = 1.5; EXPRESSED IN HEART, SIGNAL = 2.1; EXPRESSED IN HELA, SIGNAL = 2.7; EXPRESSED IN BONE MARROW, SIGNAL = 1.6; EXPRESSED IN FETAL LIVER, SIGNAL = 2.1; EXPRESSED IN ADULT LIVER, SIGNAL = 2.2; EXPRESSED IN BRAIN, SIGNAL = 1.8; SWISSPROT HIT: P01267, EVALUE 5.00e-04; NT HIT: AJ400877.1, EVALUE 0.00e+00; EST_HUMAN HIT: BF526465.1, EVALUE 1.00e-90
tccacactgaccaggttgtttcccttttggctagtcagttgcagggctgggacctattatgatggagcacgagaacgctgcattttatgtccaaatggaaccttccaaaatgaggaaggacaaatgacttgtgaaccatgcccaagaccaggaaattctggggccctgaagaccccagaagcttggaatatgtctgaatgtggaggtaaggatgctgtctgttccttcctactcctcc

SEQ ID NO: 23489 - DNA, 112 bp, Homo sapiens
  MAP TO CHR11.3; EXPRESSED IN ADULT LIVER, SIGNAL = 0.77; EXPRESSED IN LUNG, SIGNAL = 0.82; EXPRESSED IN HEART, SIGNAL = 0.86; EXPRESSED IN PLACENTA, SIGNAL = 0.84; EXPRESSED IN BONE MARROW, SIGNAL = 0.96; EST_HUMAN HIT: AF121051.1, EVALUE 1.00e-51; SWISSPROT HIT: P04275, EVALUE 2.10e+00; NT HIT: gi14763780, EVALUE 1.00e-56
tctgggctaattgcctgctttgcacctgttccttctcgggaggccctggcaccctagcacctggtgcctgtgccatctcccctctctgccaggacacccagaggcccttgtg

SEQ ID NO: 23490 - DNA, 150 bp, Homo sapiens
  MAP TO CHR14.3; EXPRESSED IN BONE MARROW, SIGNAL = 0.74; EXPRESSED IN ADULT LIVER, SIGNAL = 0.95; EXPRESSED IN LUNG, SIGNAL = 0.97; EXPRESSED IN HEART, SIGNAL = 0.79; EXPRESSED IN PLACENTA, SIGNAL = 0.68; EST_HUMAN HIT: AU121125.1, EVALUE 5.00e-79; SWISSPROT HIT: Q15436, EVALUE 6.00e-25; NT HIT: gi14747688, EVALUE 3.00e-79
cttagttccctttttaacatatttggcattgtctttgtcaatgtcatgccacgatcttataggtgtcttcaactcatctccaaccaccattccaggcccctgagtagcaggaccaccaatgaacatcatgatacgagcaccagtgttggg

SEQ ID NO: 23491 - DNA, 217 bp, Homo sapiens
  MAP TO CHR1.3; EXPRESSED IN BONE MARROW, SIGNAL = 1.2; EXPRESSED IN ADULT LIVER, SIGNAL = 1.6; EST_HUMAN HIT: BE513104.1, EVALUE 1.00e-106; SWISSPROT HIT: P54577, EVALUE 2.00e-31; NT HIT: gi4507946, EVALUE 1.00e-104
ctggcagcacccagatgcagacagcctgtatgtagagaagattgacgtgggggaagctgaaccacggactgtggtgagcggcctcgtacagttcgtgcccaaggaggaactgcaggacaggctggtagtggtgctgtgcaacctgaaaccccagaagatgagaggagtcgagtcccaaggcatgcttctgtgtgcttctatgtgagtgaggacttgg

SEQ ID NO: 23492 - DNA, 140 bp, Homo sapiens
  MAP TO CHR17.3; EXPRESSED IN BONE MARROW, SIGNAL = 0.8; EXPRESSED IN HEART, SIGNAL =   1; SWISSPROT HIT: P30838, EVALUE 2.00e-21; NT HIT: gi4502034, EVALUE 2.00e-68; EST_HUMAN HIT: AA877995.1, EVALUE 7.00e-69
agggaacagcggcatgggatcctaccatggcaagaagagcttcgagactttctctcaccgccgctcttgcctggtgaggcctctgatgaatgatgaaggcctgaaggtcagataccccccgagcccggccaaggtgagag

SEQ ID NO: 23493 - DNA, 219 bp, Homo sapiens
  MAP TO CHR12.3; EXPRESSED IN LUNG, SIGNAL = 1.5; EXPRESSED IN HEART, SIGNAL = 1.5; EXPRESSED IN ADULT LIVER, SIGNAL = 1.2; EXPRESSED IN BONE MARROW, SIGNAL = 1.3; EST_HUMAN HIT: AL558635.1, EVALUE 1.00e-114; SWISSPROT HIT: Q9RXL3, EVALUE 9.30e+00; NT HIT: gi4759277, EVALUE 1.00e-115
cagatggcaggagagctggctgacaaaaaggaccgtgatgcatcaccttccaaggaggaaaggaagcgatcacggactcctgacagagagcgggatagagaccgggaccggaagtcttccccatctaaagatagaaagcggcatcgttcaagggatagacgtcgaggaggcagccgttctcgctctcgttcccgttccaaatctgcagaaaggtaaagt

SEQ ID NO: 23494 - DNA, 426 bp, Homo sapiens
  MAP TO CHR20.3; EXPRESSED IN BONE MARROW, SIGNAL = 2.2; EXPRESSED IN BRAIN, SIGNAL = 1.9; EST_HUMAN HIT: AL449556.1, EVALUE 0.00e+00; NT HIT: gi11420835, EVALUE 0.00e+00; SWISSPROT HIT: P22091, EVALUE 3.70e-02
ctcacctccatcagcataggtctcggtgccatagccgtcttgcaggccattgttccaggtgccctcatacttggcaccgctgcttgagctctgccggattccgtagcgtcccttgaagccatgtgtccactcgcccttgtagagccagcgccccttggtctctatgcccagcccatgccgtttgccctggctccagtatccctcaaaggtgtttccgctgggccaggtgtagacacctgccacctcaaagccaaagttccaggagccagagtattcgccctggcccttggggcctgtgcacagtccatgcccatgggcctttcccccctcccagcccccgcagtacgcccctccatcatcaaagtcgaagcggcccccactcatctcatcatagcccctgacaacctccccgtcctccagcgtggg

SEQ ID NO: 23495 - DNA, 206 bp, Homo sapiens
  MAP TO CHR17.3; EXPRESSED IN LUNG, SIGNAL = 1.9; EXPRESSED IN PLACENTA, SIGNAL = 1.6; EXPRESSED IN BONE MARROW, SIGNAL = 0.78; EXPRESSED IN FETAL LIVER, SIGNAL =   2; EST_HUMAN HIT: BF525673.1, EVALUE 1.00e-103; SWISSPROT HIT: Q61576, EVALUE 5.00e-20; NT HIT: gi14774929, EVALUE 1.00e-103
ccctcagagctcctcgtggacccgctcctcgtcctcatctgacttcagcttgagctcgtcgactgtgatcttgccgtcctggttgcggtcctggttctggaacatgtctcctatggttttctcagggtcctgcccaggcatgaggcgtcctttgccctcactcacttgagccttgatgaaggtggagaactggggcaggggagagc

SEQ ID NO: 23496 - DNA, 133 bp, Homo sapiens
  MAP TO CHR17.3; EXPRESSED IN HELA, SIGNAL = 6.6; EXPRESSED IN PLACENTA, SIGNAL = 6.6; EXPRESSED IN BONE MARROW, SIGNAL = 9.3; EXPRESSED IN FETAL LIVER, SIGNAL =  11; EXPRESSED IN BRAIN, SIGNAL =  11; EST_HUMAN HIT: AA323846.1, EVALUE 3.00e-55; NT HIT: gi4505238, EVALUE 2.00e-55; SWISSPROT HIT: Q13368, EVALUE 3.00e-15
tggtgttttaggttcctggaacatggtgaatataaggaaaatctgtatggaaccagcctggaggccattcaggctgttatggccaaaaacaaagtttgtttggtggatgtggagccagaagtgagttgctggg

SEQ ID NO: 23497 - DNA, 161 bp, Homo sapiens
  MAP TO CHR11.3; EXPRESSED IN BRAIN, SIGNAL = 3.7; EXPRESSED IN BONE MARROW, SIGNAL = 3.4; EXPRESSED IN HEART, SIGNAL =   5; EXPRESSED IN FETAL LIVER, SIGNAL = 1.7; EXPRESSED IN ADULT LIVER, SIGNAL = 2.9; EST_HUMAN HIT: AI344314.1, EVALUE 4.00e-55; NT HIT: AJ006345.1, EVALUE 1.00e-85; SWISSPROT HIT: P51787, EVALUE 2.00e-10
cactcactgtgagatgtgggtgatgggtgtcagcagagtctccccttccaggtccaggtcctcggcgaagctgttggttctcatgaaatggggcatgctcacttccagcagtgttgggctcttccttactgaggagaaagtgtggggacagcacgttaggc

SEQ ID NO: 23498 - DNA, 123 bp, Homo sapiens
  MAP TO CHR6.3; EXPRESSED IN HEART, SIGNAL = 1.2; EXPRESSED IN ADULT LIVER, SIGNAL = 1.2; EXPRESSED IN BRAIN, SIGNAL = 1.5; EXPRESSED IN BONE MARROW, SIGNAL = 1.1; NT HIT: gi7705681, EVALUE 5.00e-56; SWISSPROT HIT: P54944, EVALUE 3.10e-01; EST_HUMAN HIT: BI861855.1, EVALUE 8.00e-56
atacagcttcataaagaaattgaacaaaaggacaatgaaattgcccgcctgaaaaaggagaataaagaactggcagaagtagcagaacatgtacagtatatggcagagctaatagaggtaggt

SEQ ID NO: 23499 - DNA, 115 bp, Homo sapiens
  MAP TO CHR8.3; EXPRESSED IN BONE MARROW, SIGNAL = 2.1; EXPRESSED IN HEART, SIGNAL = 1.7; EXPRESSED IN PLACENTA, SIGNAL = 1.8; EXPRESSED IN ADULT LIVER, SIGNAL = 2.1; EXPRESSED IN BRAIN, SIGNAL = 1.5; NT HIT: gi8922369, EVALUE 2.00e-55; SWISSPROT HIT: O74957, EVALUE 2.70e-02
cacctctgcatatgatcagggctcaggtttgcggtgttgagaacacagacataatgcgtaggaatgccacagccctgccgtacatgatgggcaagaagatagaaatccaccctag

SEQ ID NO: 23500 - DNA, 366 bp, Homo sapiens
  MAP TO CHR20.3; EXPRESSED IN LUNG, SIGNAL = 6.2; EXPRESSED IN HEART, SIGNAL =   4; EXPRESSED IN PLACENTA, SIGNAL = 3.5; EXPRESSED IN BONE MARROW, SIGNAL = 5.2; EXPRESSED IN BRAIN, SIGNAL = 3.4; EXPRESSED IN FETAL LIVER, SIGNAL = 5.8; EST_HUMAN HIT: BI754749.1, EVALUE 0.00e+00; NT HIT: gi14772203, EVALUE 0.00e+00; SWISSPROT HIT: P41146, EVALUE 6.00e-56
ggcacaccaaaatgaagacagccaccaatatttacatctttaacctggccctggccgacactctggtcctgctgacgctgcccttccagggcacggacatcctcctgggcttctggccgtttgggaatgcgctgtgcaagacagtcattgccattgactactacaacatgttcaccagcaccttcaccctaactgccatgagtgtggatcgctatgtagccatctgccaccccatccgtgccctcgacgtccgcacgtccagcaaagcccaggctgtcaatgtggccatctgggccctggcctctgttgtcggtgttcccgttgccatcatgggctcggcacaggtcgaggatgaaggtcagtggg

SEQ ID NO: 23501 - DNA, 238 bp, Homo sapiens
  MAP TO CHR1.3; EXPRESSED IN FETAL LIVER, SIGNAL = 3.6; EXPRESSED IN BRAIN, SIGNAL = 2.6; EXPRESSED IN LUNG, SIGNAL = 2.6; EXPRESSED IN HEART, SIGNAL =   3; EXPRESSED IN BONE MARROW, SIGNAL = 2.5; NT HIT: U65934.1, EVALUE 0.00e+00; SWISSPROT HIT: Q16610, EVALUE 2.00e-45; EST_HUMAN HIT: AL542842.1, EVALUE 1.00e-127
ccttaccacaagtttggcacactctaggcggtttgtgtggctgcggcagtggcagcagcgggaatatccaatctccaggaaattgagggtctcaccctggcgagtgaggtgggagtagctggactgtggtaggttccagggaccatataccacatgctgacggttaggaaggcagatttggttcagattgtctggagaaggccgcccaggggggaagccatccagccggtggccccag

SEQ ID NO: 23502 - DNA, 191 bp, Homo sapiens
  MAP TO CHR1.3; EXPRESSED IN HELA, SIGNAL = 5.4; EXPRESSED IN BONE MARROW, SIGNAL = 1.3; NT HIT: gi4502298, EVALUE 4.00e-98; SWISSPROT HIT: P24539, EVALUE 1.00e-29; EST_HUMAN HIT: AA113748.1, EVALUE 5.00e-98
ccccagaataacattgctatggctttggaagttacttaccgggaacgactgtatagagtatataaggaagtaaagaatcgcctggactatcatatatctgtgcagaacatgatgcgtcgaaaggaacaagaacacatgataaattgggtggagaagcacgtggtgcaaagcatctccacacagcaggtaca

SEQ ID NO: 23503 - DNA, 117 bp, Homo sapiens
  MAP TO CHR2.3; EXPRESSED IN PLACENTA, SIGNAL = 7.3; EXPRESSED IN LUNG, SIGNAL = 8.1; EXPRESSED IN HEART, SIGNAL =  31; EXPRESSED IN HELA, SIGNAL =  13; EXPRESSED IN BONE MARROW, SIGNAL = 7.8; EXPRESSED IN BRAIN, SIGNAL =  13; EXPRESSED IN ADULT LIVER, SIGNAL =  26; SWISSPROT HIT: O79429, EVALUE 3.00e-05; NT HIT: AP002932.1, EVALUE 9.00e-30; EST_HUMAN HIT: AA075255.1, EVALUE 1.00e-23
tcagttgccaaagcctccaattataattggcattactataaagaaaattatgacaaatgcatgagctgtaatgatgacattataaatttgatcatctcctaaaagagtacctggttg

SEQ ID NO: 23504 - DNA, 286 bp, Homo sapiens
  MAP TO CHR15.3; EXPRESSED IN ADULT LIVER, SIGNAL = 1.1; EXPRESSED IN BONE MARROW, SIGNAL = 0.99; SWISSPROT HIT: P49641, EVALUE 1.00e-32; NT HIT: Y08833.1, EVALUE 0.00e+00
gcagagccaaatttctgtgctgcagaaccgcattgagcagctggagcagcttttggaggagaaccatgagattatcagccatatcaaggactccgtgctggagctgacagccaacgcagagggcccgcccgccatgctgccctactacacggtcaatggctcctgggtggtgccaccggagccccggcccagcttcttctccatctccccgcaggactgccagtttgctttggggggccggggtcagaagccagagctgcaggtaagagtcagagctggcagggac

SEQ ID NO: 23505 - DNA, 139 bp, Homo sapiens
  MAP TO CHR19.3; EXPRESSED IN BRAIN, SIGNAL = 2.3; EXPRESSED IN LUNG, SIGNAL = 1.2; EXPRESSED IN BONE MARROW, SIGNAL = 1.5; EXPRESSED IN PLACENTA, SIGNAL = 1.9; EST_HUMAN HIT: BF744079.1, EVALUE 4.00e-39; SWISSPROT HIT: P52737, EVALUE 4.00e-18; NT HIT: gi13652274, EVALUE 1.00e-72
aaggctttaccacattctttacatttgtagggtttttctccagtgtgagttctttcatgagttcgaaagtatgtgggacaactgaaagccttaccacattgcttacattcatagggtttctctccagtgtgagtccttt

SEQ ID NO: 23506 - DNA, 115 bp, Homo sapiens
  MAP TO CHR1.3; EXPRESSED IN BONE MARROW, SIGNAL = 2.1; EXPRESSED IN HEART, SIGNAL = 1.7; EXPRESSED IN FETAL LIVER, SIGNAL = 4.1; EXPRESSED IN ADULT LIVER, SIGNAL = 1.4; EXPRESSED IN BRAIN, SIGNAL =  14; EST_HUMAN HIT: BE908186.1, EVALUE 3.00e-58; NT HIT: gi13638282, EVALUE 2.00e-58
gctgactaatttgttctgagaactgactttctccccatccccttcctaaatatccaaagactgtactggccagtgtcattttattttttccctcctgacaaatattttagaagct

SEQ ID NO: 23507 - DNA, 166 bp, Homo sapiens
  MAP TO CHR13.3; EXPRESSED IN LUNG, SIGNAL = 0.96; EXPRESSED IN BONE MARROW, SIGNAL = 1.1; EXPRESSED IN HEART, SIGNAL =   1; EXPRESSED IN FETAL LIVER, SIGNAL = 0.82; EXPRESSED IN BRAIN, SIGNAL = 1.1; SWISSPROT HIT: P42394, EVALUE 1.10e+00; NT HIT: gi9506634, EVALUE 3.00e-83; EST_HUMAN HIT: AU136520.1, EVALUE 4.00e-83
tctctatagtttagaagaaaagatgatagctgcttatgaaaactcaaaatgggaacctgttaaatgggaaaatgatatgcactgtgctgttaagatccaagataaaaatcagtggcgaagaggccagatcatcagaatggttacagacacattggtagaggtaaat

SEQ ID NO: 23508 - DNA, 162 bp, Homo sapiens
  MAP TO CHR14.3; EXPRESSED IN BONE MARROW, SIGNAL = 1.1; EXPRESSED IN ADULT LIVER, SIGNAL = 1.7; SWISSPROT HIT: Q9UTK5, EVALUE 4.40e+00; NT HIT: AF283991.1, EVALUE 3.00e-86; EST_HUMAN HIT: AI557561.1, EVALUE 1.00e-82
cctcacccaagtgccccgagtcctgcttccgcctccgctgcagcctctcccgcagagagtccagctgcttcttgtgggcctggatagagctccacgtgtccgacatcctagtctcccagccctgacacctctcgaataaggcgcggcggactagcacctccc

SEQ ID NO: 23509 - DNA, 168 bp, Homo sapiens
  MAP TO CHR4.3; EXPRESSED IN LUNG, SIGNAL = 2.4; EXPRESSED IN BONE MARROW, SIGNAL = 2.3; EXPRESSED IN BRAIN, SIGNAL = 3.9; EXPRESSED IN FETAL LIVER, SIGNAL = 3.1; SWISSPROT HIT: P12235, EVALUE 9.00e-22; NT HIT: J04982.1, EVALUE 7.00e-90; EST_HUMAN HIT: W28389.1, EVALUE 1.00e-89
gcttctgggctctgtccacagggatgctgcctgaccccaagaacgtgcacatttttgtgagctggatgattgcccagagtgtgacggcagtcgcagggctggtgtcctacccctttgacactgttcgtcgtagaatgatgatgcagtccggccggaaagggggtaagc

SEQ ID NO: 23510 - DNA, 147 bp, Homo sapiens
  MAP TO CHR12.3; EXPRESSED IN BONE MARROW, SIGNAL =   1; EXPRESSED IN PLACENTA, SIGNAL = 0.76; SWISSPROT HIT: P34678, EVALUE 3.00e-04; NT HIT: gi11525737, EVALUE 4.00e-60; EST_HUMAN HIT: AW601658.1, EVALUE 7.40e-01
ctcttgctgtgtgctctgtaggagtccttcaatcatgggcatcctggctgctaacaggcacttcctgggagagatcgggtctctggatggtggaatgctcatctatggaggagagaacgtggagcttagcctgagggtgggtacatt

SEQ ID NO: 23511 - DNA, 108 bp, Homo sapiens
  MAP TO CHR19.3; EXPRESSED IN HELA, SIGNAL = 2.5; EXPRESSED IN PLACENTA, SIGNAL = 0.86; EXPRESSED IN BONE MARROW, SIGNAL =   1; EST_HUMAN HIT: R18845.1, EVALUE 6.00e-47; SWISSPROT HIT: Q13360, EVALUE 2.00e-16; NT HIT: gi15302165, EVALUE 3.00e-54
aactcacactggagagaaaccctatgactgtaaggaatgtgggaaggctttcactgttccttcatcccttcagaaacatgtgagaacccacactggagagaaacccta

SEQ ID NO: 23512 - DNA, 176 bp, Homo sapiens
  MAP TO CHR13.3; EXPRESSED IN HEART, SIGNAL = 0.95; EXPRESSED IN PLACENTA, SIGNAL = 1.2; EXPRESSED IN FETAL LIVER, SIGNAL = 0.94; EXPRESSED IN ADULT LIVER, SIGNAL = 1.1; EXPRESSED IN BRAIN, SIGNAL = 1.5; EXPRESSED IN BONE MARROW, SIGNAL = 1.1; EST_HUMAN HIT: AI636348.1, EVALUE 2.00e-94; SWISSPROT HIT: P47306, EVALUE 9.80e+00; NT HIT: gi14756990, EVALUE 1.00e-94
tttttgtgtagaaaaataggtgcaataatgatcaaagttttgatgtcttgagtctccatcttaggggattatcttacgtttaagcttaacatttcatgtagtaagatttggagagccacatactttacagtaaaattaagtgtgtataaaacattaattgctaacaattgttagca

SEQ ID NO: 23513 - DNA, 153 bp, Homo sapiens
  MAP TO CHR17.3; EXPRESSED IN BONE MARROW, SIGNAL = 1.3; EXPRESSED IN HEART, SIGNAL = 1.7; EXPRESSED IN PLACENTA, SIGNAL = 2.8; EXPRESSED IN ADULT LIVER, SIGNAL = 1.6; SWISSPROT HIT: Q14451, EVALUE 8.00e-17; NT HIT: AF274875.1, EVALUE 6.00e-81; EST_HUMAN HIT: BG469919.1, EVALUE 6.00e-57
tcaccttgacacagaaaccgaagtcagtgggcatcccgtagagcttgcggccctgcgtcaccacgtacacgttggactcgttcacatctgccacgtactgcaggtgcctcggatcctaagcagcatgagtgagcaggacttggtacaggtaga

SEQ ID NO: 23514 - DNA, 144 bp, Homo sapiens
  MAP TO CHR1.3; EXPRESSED IN BONE MARROW, SIGNAL = 1.1; EXPRESSED IN FETAL LIVER, SIGNAL = 1.5; EXPRESSED IN BRAIN, SIGNAL = 1.4; SWISSPROT HIT: P30957, EVALUE 3.00e-14; NT HIT: AJ300440.1, EVALUE 1.00e-75; EST_HUMAN HIT: BI769638.1, EVALUE 3.00e-68
agaatgacaataacaaagaagaagaaagtgatgtcaaagatgattcgatagatctcatattcatctcctgctgggtcttcgatttcatccccgatccctcctccagcacgaactccaacatacatgtggaacatatagcactgg

SEQ ID NO: 23515 - DNA, 158 bp, Homo sapiens
  MAP TO CHRX.3; EXPRESSED IN ADULT LIVER, SIGNAL = 1.4; EXPRESSED IN BRAIN, SIGNAL = 1.9; EXPRESSED IN BONE MARROW, SIGNAL = 1.3; EXPRESSED IN HEART, SIGNAL = 0.92; SWISSPROT HIT: O34991, EVALUE 3.40e+00; NT HIT: gi13629957, EVALUE 6.00e-84; EST_HUMAN HIT: BF688808.1, EVALUE 9.00e-84
tgaggtagatttcattgaagctctcttgaaaggctcctgtgtgagcccagatgaagactgggtgtgcaacttgaggctgatcgacgacattttggaacagcatgctgctgctcaaaatgccacagcccagaattctgggcaagtcacccaggatgctg

SEQ ID NO: 23516 - DNA, 109 bp, Homo sapiens
  MAP TO CHR1.3; EXPRESSED IN HEART, SIGNAL = 1.4; EXPRESSED IN BONE MARROW, SIGNAL = 1.3; EXPRESSED IN BRAIN, SIGNAL = 1.1; EST_HUMAN HIT: AV651100.1, EVALUE 2.00e-50; SWISSPROT HIT: P28845, EVALUE 2.00e-13; NT HIT: M76664.1, EVALUE 7.00e-55
ctgcctggagcttggagcagcctcagcacactacattgctggcaccatggaagacatgaccttcgcagagcaatttgttgcccaagcaggaaagctcatgggtgaggct

SEQ ID NO: 23517 - DNA, 387 bp, Homo sapiens
  MAP TO CHR1.3; EXPRESSED IN ADULT LIVER, SIGNAL = 1.9; EXPRESSED IN FETAL LIVER, SIGNAL = 1.7; EXPRESSED IN BRAIN, SIGNAL = 1.2; EXPRESSED IN BONE MARROW, SIGNAL =   2; EXPRESSED IN PLACENTA, SIGNAL = 1.7; EST_HUMAN HIT: AW812234.1, EVALUE 0.00e+00; SWISSPROT HIT: O68988, EVALUE 4.80e-01; NT HIT: gi16157341, EVALUE 0.00e+00
ccggctcatcgagggactcacttctcctggaactggaggaatccgggtttgacctggggcttggcgttctctagagaagtcgttgccaagggcgaggcgggcaggtgaggcactgacgctgggatctgaggcatctggggtatggtggaagccagctgcttccaggcgagcagggtgggggtggagggcacggaggccgggctgggagcgggcccctccagagaggacaccgtggccgtggtgacaggagggaccggaggggacgagggggccatgggaggtttggtctcggcggccgaggccggaaaggcagcctctgtgtttccttttgctgctcctccctctgtccggaagtggaagctgcgagaggtagaagagggggtctca

SEQ ID NO: 23518 - DNA, 154 bp, Homo sapiens
  MAP TO CHR12.3; EXPRESSED IN BONE MARROW, SIGNAL = 0.71; EXPRESSED IN LUNG, SIGNAL = 2.7; EXPRESSED IN BRAIN, SIGNAL = 0.55; EST_HUMAN HIT: AU118827.1, EVALUE 3.00e-80; SWISSPROT HIT: P54849, EVALUE 2.00e-20; NT HIT: U77085.1, EVALUE 1.00e-75
acagatgccctcaagacagtgcaggccttcatgattctctctatcatcttctgtgtcattgccctcctggtcttcgtgttccagctcttcaccatggagaagggaaaccggttcttcctctcaggggccaccacactggtgtgctgtgagtatc

SEQ ID NO: 23519 - DNA, 111 bp, Homo sapiens
  MAP TO CHR5.3; EXPRESSED IN HEART, SIGNAL = 1.5; EXPRESSED IN PLACENTA, SIGNAL =   1; EXPRESSED IN BRAIN, SIGNAL =   1; EXPRESSED IN FETAL LIVER, SIGNAL = 1.1; EXPRESSED IN BONE MARROW, SIGNAL = 1.1; NT HIT: gi11417344, EVALUE 5.00e-56; EST_HUMAN HIT: BG209561.1, EVALUE 4.00e-51; SWISSPROT HIT: P35428, EVALUE 7.00e-01
ttgccacatggctcggcgttttctattgtgccaaggttgccagcgtccgtcacccactcttcatctggttgaagatgaggatatccaagctggtcccatggatgatcctgg

SEQ ID NO: 23520 - DNA, 180 bp, Homo sapiens
  MAP TO CHR22.3; EXPRESSED IN BONE MARROW, SIGNAL =   5; EXPRESSED IN HELA, SIGNAL = 8.9; EXPRESSED IN PLACENTA, SIGNAL =   4; EXPRESSED IN HEART, SIGNAL = 5.8; EXPRESSED IN BRAIN, SIGNAL = 7.4; SWISSPROT HIT: P33529, EVALUE 3.80e-01; NT HIT: gi6006018, EVALUE 5.00e-97; EST_HUMAN HIT: BG748324.1, EVALUE 6.00e-76
ctgccccaactctgctgcctccttccctcccctgctctcagactggagggcgtttctccactcgcctggccccagcacaaaggaagagatcgggttccctgcctgggagcccagacatgggtgggagtgggatgggggtggagcaggagggcccacagcttcctggtctgagtcccaggc

SEQ ID NO: 23521 - DNA, 157 bp, Homo sapiens
  MAP TO CHR11.3; EXPRESSED IN FETAL LIVER, SIGNAL = 1.7; EXPRESSED IN BRAIN, SIGNAL = 1.6; EXPRESSED IN ADULT LIVER, SIGNAL = 1.9; EXPRESSED IN BONE MARROW, SIGNAL = 1.3; EXPRESSED IN PLACENTA, SIGNAL =   2; EXPRESSED IN HEART, SIGNAL =   2; EST_HUMAN HIT: BG824822.1, EVALUE 9.00e-81; SWISSPROT HIT: Q02846, EVALUE 2.30e-01; NT HIT: gi16164206, EVALUE 6.00e-81
cccagggctggccgtggaggtgaaggtacccacagagccgctgagcacgcccctggggaagacagccgagctgacctgcacctacagcacgtcggtgggagacagcttcgccctggagtggagctttgtgcagcctgggaaacccatctctgagtcc

SEQ ID NO: 23522 - DNA, 286 bp, Homo sapiens
  MAP TO CHR20.3; EXPRESSED IN HELA, SIGNAL = 2.5; EXPRESSED IN BONE MARROW, SIGNAL = 1.6; EXPRESSED IN ADULT LIVER, SIGNAL = 2.1; EXPRESSED IN HEART, SIGNAL =   4; NT HIT: AF230073.1, EVALUE 0.00e+00; EST_HUMAN HIT: BE295245.1, EVALUE 6.00e+00; SWISSPROT HIT: Q62230, EVALUE 5.00e-35
cctgccttaccctccagccgcagctccagggacgtgttggcctggcccagagggctgcgggcagagcagctgtagaaaccctcatccctgggctgtggccctcgcagctccaggcgcagggtgttggggacagaggctgctgtcgaggaggccaagaggcgaccggcgtggctgagggccagctgggcgggcgggcggctgtccacagtgcacagtaccagggccagctgcccgccatggctctccaggaggtaggtcaggcgcaggttgcggggcgcgtctgcag

SEQ ID NO: 23523 - DNA, 128 bp, Homo sapiens
  MAP TO CHR19.3; EXPRESSED IN FETAL LIVER, SIGNAL = 1.3; EXPRESSED IN ADULT LIVER, SIGNAL = 1.9; EXPRESSED IN BRAIN, SIGNAL = 1.8; EXPRESSED IN BONE MARROW, SIGNAL = 1.8; EXPRESSED IN HEART, SIGNAL = 2.1; NT HIT: gi14759860, EVALUE 4.00e-66; EST_HUMAN HIT: BF334792.1, EVALUE 3.00e-40
cactgaccggcagagcctggctggggtcctcgcctgtcatgtactgcactcgcacagcaaggttgcgcacggagccctggcggctgctgaagttgaggctgtgcgggtacacgtacagcaggttcctg

SEQ ID NO: 23524 - DNA, 145 bp, Homo sapiens
  MAP TO CHR19.3; EXPRESSED IN FETAL LIVER, SIGNAL = 3.1; EXPRESSED IN ADULT LIVER, SIGNAL = 2.1; EXPRESSED IN PLACENTA, SIGNAL = 1.8; EXPRESSED IN BONE MARROW, SIGNAL = 1.8; NT HIT: AF042347.1, EVALUE 3.00e-73; EST_HUMAN HIT: BI115969.1, EVALUE 5.00e-73; SWISSPROT HIT: Q9Y285, EVALUE 2.00e-20
aggtcatcgaggctgaacttcggtccaccaagcactgggagcttactgcggagggcgaggagattgcccgggagggcagccatgaggcccgtgtgtttcgaagcattcccccagagggcctggcccagagcgagcttatggtagg

SEQ ID NO: 23525 - DNA, 196 bp, Homo sapiens
  MAP TO CHR22.3; EXPRESSED IN ADULT LIVER, SIGNAL = 1.8; EXPRESSED IN BRAIN, SIGNAL = 1.8; EXPRESSED IN FETAL LIVER, SIGNAL = 1.3; EXPRESSED IN BONE MARROW, SIGNAL = 2.6; SWISSPROT HIT: P33485, EVALUE 1.90e+00; NT HIT: gi14778700, EVALUE 1.00e-106; EST_HUMAN HIT: BI823024.1, EVALUE 1.00e-106
agtggtaccgcagacacaggagccccatgcacaggagggtgaggagggctccagccaggccccgcgggagccggcactgcattggttggccctgggaccccagacagctcagcccccaaatcccaaccagacagggaggggaagctggtcaggcaggggctccagcagaggcaaaagtctggcaggcatcaggggc

SEQ ID NO: 23526 - DNA, 265 bp, Homo sapiens
  MAP TO CHR11.3; EXPRESSED IN LUNG, SIGNAL = 0.65; EXPRESSED IN HEART, SIGNAL = 0.64; EXPRESSED IN BONE MARROW, SIGNAL = 0.89; EXPRESSED IN ADULT LIVER, SIGNAL = 0.62; EST_HUMAN HIT: BF935000.1, EVALUE 0.00e+00; SWISSPROT HIT: Q09428, EVALUE 3.00e-26; NT HIT: U63445.1, EVALUE 0.00e+00
acctggctgagggagcagttcctggctgcaggggtcagggtcagggcgctgtcggtccacttggccagccagtagtcgatggccaccaggaccatgtgcttgagcagctgtgagaagaccagcaacgacaggagcaggatgccggcggaggacaggtacttggcgcaggctcgccatgggatctcagcacgctggtgcagcatggacgacaggttgtcatcctcctcgctctcagctgcctcctctgcaggccgcaagaacccac

SEQ ID NO: 23527 - DNA, 203 bp, Homo sapiens
  MAP TO CHR1.3; EXPRESSED IN ADULT LIVER, SIGNAL = 0.61; EXPRESSED IN BRAIN, SIGNAL = 1.2; EXPRESSED IN BONE MARROW, SIGNAL = 0.79; EST_HUMAN HIT: AL597799.1, EVALUE 1.00e-110; SWISSPROT HIT: P53611, EVALUE 6.00e-35; NT HIT: gi14725830, EVALUE 1.00e-107
taggaatactgtatgtctgagtatttgagaatgagtggcatctattggggtctgacagtaatggatctcatgggacaacttcatcgcatgaatagagaagagattctggcatttattaagtcttgccaacatgaatgtggtggaataagtgctagtatcggacatgatcctcatcttttatacactcttagtgctgtccaggt

SEQ ID NO: 23528 - DNA, 159 bp, Homo sapiens
  MAP TO CHR1.3; EXPRESSED IN ADULT LIVER, SIGNAL = 1.4; EXPRESSED IN BRAIN, SIGNAL = 0.67; EXPRESSED IN BONE MARROW, SIGNAL = 0.91; EXPRESSED IN LUNG, SIGNAL = 0.76; EXPRESSED IN HEART, SIGNAL = 0.95; EXPRESSED IN PLACENTA, SIGNAL = 0.91; SWISSPROT HIT: P78332, EVALUE 2.00e+00; NT HIT: gi8922620, EVALUE 4.00e-82
caggaggactggcgttagcccaggtgctctttttctacgtgaagtacttggtgctctttggcgtgcctgctctgctcatgcgcctggatggactcactccacccgccctcccccgctgcgtgagcaccatgttcagtttcaccgggatgtggaggtcag

SEQ ID NO: 23529 - DNA, 197 bp, Homo sapiens
  MAP TO CHR17.3; EXPRESSED IN BONE MARROW, SIGNAL = 2.6; EXPRESSED IN HEART, SIGNAL = 2.6; EXPRESSED IN PLACENTA, SIGNAL = 2.9; EXPRESSED IN LUNG, SIGNAL = 3.1; EXPRESSED IN ADULT LIVER, SIGNAL =   2; EXPRESSED IN BRAIN, SIGNAL = 2.4; NT HIT: gi14776450, EVALUE 1.00e-91; EST_HUMAN HIT: BI521451.1, EVALUE 2.00e-91; SWISSPROT HIT: P21978, EVALUE 4.20e+00
ggccagggctgtgtgtatttcaggccacagacaagcggaaggcgctggaggagaccatggccttcactacccaggcactggccagcgtggcctaccaggtgggcaacctggccgggcacactctgcgcatgttggacctgcagggggccgccctgcggcaggtggaagcccgtgtaagcacgctgggccaggtaagg

SEQ ID NO: 23530 - DNA, 140 bp, Homo sapiens
  MAP TO CHR2.3; EXPRESSED IN BONE MARROW, SIGNAL = 1.8; EXPRESSED IN LUNG, SIGNAL = 1.3; EXPRESSED IN HEART, SIGNAL = 1.9; EXPRESSED IN FETAL LIVER, SIGNAL = 1.2; EXPRESSED IN ADULT LIVER, SIGNAL = 1.7; EXPRESSED IN BRAIN, SIGNAL =   2; NT HIT: AB052742.1, EVALUE 3.00e-73; EST_HUMAN HIT: AA749016.1, EVALUE 6.00e-60; SWISSPROT HIT: Q9PKT7, EVALUE 5.90e+00
tctctatttttgggaataggtcatagcaaatgacagaagtcccttggtgggcaaaattcactgggagaaaatggttaaaaaggtgtcaagatttggaatacgtacaggcacatttaactgttccagtgatcccaggtaag

SEQ ID NO: 23531 - DNA, 138 bp, Homo sapiens
  MAP TO CHR15.3; EXPRESSED IN BONE MARROW, SIGNAL = 0.72; EXPRESSED IN HEART, SIGNAL = 0.59; EXPRESSED IN ADULT LIVER, SIGNAL = 0.73; EXPRESSED IN BRAIN, SIGNAL = 2.7; SWISSPROT HIT: Q99963, EVALUE 1.00e-20; NT HIT: AF036269.1, EVALUE 5.00e-72; EST_HUMAN HIT: AA453463.1, EVALUE 7.00e-72
agcatacagagctaagctaggaatgctgaacactgtgtcgaagatccgagggcaggtgaagaccacaggatacccgcagacggaaggcttgctgggggactgtatgctgaaatacgggaaggagctcggggaagactc

SEQ ID NO: 23532 - DNA, 151 bp, Homo sapiens
  MAP TO CHR9.3; EXPRESSED IN BONE MARROW, SIGNAL = 4.2; EXPRESSED IN HELA, SIGNAL =   4; EXPRESSED IN LUNG, SIGNAL = 4.5; EXPRESSED IN HEART, SIGNAL = 4.7; EXPRESSED IN PLACENTA, SIGNAL = 5.1; EXPRESSED IN ADULT LIVER, SIGNAL = 5.2; EXPRESSED IN FETAL LIVER, SIGNAL = 4.7; EXPRESSED IN BRAIN, SIGNAL =   4; EST_HUMAN HIT: BF971829.1, EVALUE 3.00e-68; SWISSPROT HIT: Q9Z139, EVALUE 1.50e+00; NT HIT: gi16161632, EVALUE 8.00e-68
gcattgcctggcccactcaccttcccatctggcacactgctatatccactgaagtgcaggggtcccggcacagtgggcctggagcctgtggggaagtggtggtccaggcaggtggccaggcagaggggcaggccggcccagcagcacagga

SEQ ID NO: 23533 - DNA, 111 bp, Homo sapiens
  MAP TO CHR9.3; EXPRESSED IN BRAIN, SIGNAL = 1.1; EXPRESSED IN BONE MARROW, SIGNAL = 1.4; EXPRESSED IN PLACENTA, SIGNAL = 0.71; EXPRESSED IN LUNG, SIGNAL = 0.84; EXPRESSED IN HEART, SIGNAL = 1.3; EXPRESSED IN ADULT LIVER, SIGNAL = 1.1; EST_HUMAN HIT: AI860608.1, EVALUE 3.40e-02; SWISSPROT HIT: P01571, EVALUE 2.00e-15; NT HIT: M71246.1, EVALUE 5.00e-56
ctgtccttcaggcaggagaaaggagagattcttcccatttgtgccaggagtatcaaggccctcctattacccaggctgtgggtctgaggcagatcacagcctagagaacag

SEQ ID NO: 23534 - DNA, 175 bp, Homo sapiens
  MAP TO CHR19.3; EXPRESSED IN BONE MARROW, SIGNAL = 0.91; EXPRESSED IN HEART, SIGNAL = 1.1; EXPRESSED IN PLACENTA, SIGNAL = 1.8; EXPRESSED IN ADULT LIVER, SIGNAL = 0.79; EXPRESSED IN FETAL LIVER, SIGNAL = 0.72; EST_HUMAN HIT: AI125134.1, EVALUE 7.00e-94; SWISSPROT HIT: Q92570, EVALUE 2.50e+00; NT HIT: gi16193738, EVALUE 1.00e-88
ctgcagccctgaagtcctcgccctccaagaaggggcgcggcggagccttgctagctgtgaaaccgctggggcccaccgctgccttctcggccagccagatccctagcgagcgggaggaggcccagtacgacctgcggggggcccgcagctaccccacgctggaggacgaaggtga

SEQ ID NO: 23535 - DNA, 205 bp, Homo sapiens
  MAP TO CHR11.3; EXPRESSED IN BONE MARROW, SIGNAL = 0.8; EXPRESSED IN LUNG, SIGNAL = 0.81; EXPRESSED IN ADULT LIVER, SIGNAL = 9.3e+02; EXPRESSED IN BRAIN, SIGNAL = 0.68; NT HIT: X01038.1, EVALUE 1.00e-112; EST_HUMAN HIT: AL531303.1, EVALUE 1.00e-111; SWISSPROT HIT: P02647, EVALUE 6.00e-35
cttgcagctcgtgcagcttctggcgcgcgccctcttggagctctgcgcgcagcggctccaccttctggcggtagagctccatctcctcctgccacttcttctggaagtcgtccaggtagggctgcaccttggccttcacctcctccagatccttgctcatctcctgcctcaggccctctgtctccttttccaggttatcccagaa

SEQ ID NO: 23536 - DNA, 200 bp, Homo sapiens
  MAP TO CHR15.3; EXPRESSED IN BONE MARROW, SIGNAL = 0.93; EXPRESSED IN ADULT LIVER, SIGNAL = 1.8; EXPRESSED IN BRAIN, SIGNAL = 1.3; EXPRESSED IN PLACENTA, SIGNAL = 0.66; NT HIT: gi5901977, EVALUE 1.00e-91; EST_HUMAN HIT: BI828557.1, EVALUE 2.00e-91; SWISSPROT HIT: P08910, EVALUE 3.00e-29
ccatgcttaccataggtgaacatgcgtggcgaggtcaattcaatgttgggcagggcacccaggtggttcagcacggcgcaccgatagccatttttctgggcgtagtcaacgaaagtgcggatgtattgcttctcgctgtgattggcaattccagggcagatgaccatggtgatatcatctatagcgtagagaaagagatc

SEQ ID NO: 23537 - DNA, 146 bp, Homo sapiens
  MAP TO CHR2.3; EXPRESSED IN BRAIN, SIGNAL = 4.1; EXPRESSED IN LUNG, SIGNAL = 3.7; EXPRESSED IN HEART, SIGNAL = 4.1; EXPRESSED IN HELA, SIGNAL = 3.5; EXPRESSED IN PLACENTA, SIGNAL = 3.3; EXPRESSED IN BONE MARROW, SIGNAL =   4; NT HIT: gi13518230, EVALUE 5.00e-75; EST_HUMAN HIT: BG338339.1, EVALUE 4.00e-27; SWISSPROT HIT: P10070, EVALUE 6.00e-25
cagcacatcaacaacgagcacatccacggggagaagaaggagtttgtgtgccgctggcaggcctgcacgcgggagcagaagcccttcaaggcgcagtacatgctggtggtgcacatgcggcgacacacgggcgagaagccccacaa

SEQ ID NO: 23538 - DNA, 160 bp, Homo sapiens
  MAP TO CHRX.3; EXPRESSED IN LUNG, SIGNAL = 0.56; EXPRESSED IN PLACENTA, SIGNAL = 0.64; EXPRESSED IN BONE MARROW, SIGNAL = 0.71; EXPRESSED IN ADULT LIVER, SIGNAL = 0.62; NT HIT: AF195953.1, EVALUE 4.00e-85; EST_HUMAN HIT: AL554918.1, EVALUE 1.00e-36; SWISSPROT HIT: Q09795, EVALUE 3.00e-04
aacctagtccaggtcccaagacttggggaacaaatccatgcggcccttctaccttccttatggagctcccagttgcagtccatctgccgctcagcctgagtccagtagcgactgtcggtccagacagctgctttcttcatagtcaccactgcagttcctg

SEQ ID NO: 23539 - DNA, 149 bp, Homo sapiens
  MAP TO CHR17.3; EXPRESSED IN ADULT LIVER, SIGNAL = 0.35; EXPRESSED IN BONE MARROW, SIGNAL = 0.74; SWISSPROT HIT: Q92183, EVALUE 6.00e-17; NT HIT: Y11339.2, EVALUE 1.00e-78; EST_HUMAN HIT: BI224391.1, EVALUE 6.00e-57
ttgagctccatgaagccaaagggtggtgcaaagtgttccaggcggtcccactcactctggttgaagtgtctggagtccaggaagagagtgaggttgggcagaaagagtttctggagccacagcgacttggaggctttgatcttcacaga

SEQ ID NO: 23540 - DNA, 217 bp, Homo sapiens
  MAP TO CHR22.3; EXPRESSED IN BONE MARROW, SIGNAL = 1.4; EXPRESSED IN LUNG, SIGNAL = 0.95; EXPRESSED IN HEART, SIGNAL = 1.3; EXPRESSED IN FETAL LIVER, SIGNAL = 0.57; SWISSPROT HIT: Q9X576, EVALUE 5.10e-02; NT HIT: X63578.1, EVALUE 1.00e-119; EST_HUMAN HIT: AI522145.1, EVALUE 1.00e-116
tggtacaacctttattgcttctccagcattttccagaagaatggtgtcattagagggccacaggggatgggggagtaaaaaataacataaacgaactgaacagaaatgcaggagggtggcgagaggggccgagattgggtgttcagggcagagaggtggaagaccaggggcagtcagtgcttcttagctttcagccaccagagtggagaattctgca

SEQ ID NO: 23541 - DNA, 119 bp, Homo sapiens
  MAP TO CHR12.3; EXPRESSED IN BONE MARROW, SIGNAL = 1.1; EXPRESSED IN FETAL LIVER, SIGNAL = 1.5; EST_HUMAN HIT: AI076964.1, EVALUE 4.00e-54; NT HIT: gi7305022, EVALUE 5.00e-13
taagaattgccttagaacctcttttgaactgaaattcagtaaatgtccaagtaatgtttttataataaactaagccatatttagacaataaacattgataaaagaaaatgttctaaagt

SEQ ID NO: 23542 - DNA, 167 bp, Homo sapiens
  MAP TO CHR11.3; EXPRESSED IN ADULT LIVER, SIGNAL = 2.3; EXPRESSED IN FETAL LIVER, SIGNAL = 1.2; EXPRESSED IN BRAIN, SIGNAL = 3.5; EXPRESSED IN HELA, SIGNAL = 4.3; EXPRESSED IN BONE MARROW, SIGNAL = 2.8; EXPRESSED IN PLACENTA, SIGNAL = 2.7; NT HIT: gi14770564, EVALUE 3.00e-86; EST_HUMAN HIT: BF958361.1, EVALUE 2.00e-85; SWISSPROT HIT: P35563, EVALUE 3.00e-05
aacctacattaaactgaatctgtgcaaatcctccagcgctgctctgcaggatgctgtatgtggaggacacagatagaagttcccactcactgtcattcaaaaacgcctttttgtcatgctgaatgtcttctgggctcctcagaaaggccaggtctacgtcttccact

SEQ ID NO: 23543 - DNA, 212 bp, Homo sapiens
  MAP TO CHR15.3; EXPRESSED IN LUNG, SIGNAL = 2.7; EXPRESSED IN HEART, SIGNAL = 2.2; EXPRESSED IN BONE MARROW, SIGNAL = 2.5; EXPRESSED IN BRAIN, SIGNAL = 2.6; NT HIT: gi6806910, EVALUE 1.00e-45; SWISSPROT HIT: Q05860, EVALUE 5.00e-27
tggatgtctttgtggtcatttgggggtgagagctggcttaaagaggagatattcagctttttgggtactaattgattacttctggttgtcttgctttcactttcacagggcttgaggaaggtctctctgtctgtctggacgcacacatttctgaaggtctttggagggcagtcatcatcggtggaaatgcacacatctttcctctcttcaca

SEQ ID NO: 23544 - DNA, 296 bp, Homo sapiens
  MAP TO CHR11.3; EXPRESSED IN LUNG, SIGNAL = 5.4; EXPRESSED IN HELA, SIGNAL =   3; EXPRESSED IN PLACENTA, SIGNAL = 3.1; EXPRESSED IN BONE MARROW, SIGNAL = 3.2; EXPRESSED IN FETAL LIVER, SIGNAL = 3.4; EXPRESSED IN HEART, SIGNAL = 5.8; NT HIT: AF076613.1, EVALUE 0.00e+00; EST_HUMAN HIT: BG394249.1, EVALUE 0.00e+00; SWISSPROT HIT: Q05516, EVALUE 2.00e-50
gagaagcatctgggcatctactccgtgttgcccaaccacaaggctgacgctgtattgagcatgccgtcttccgtgacctctggcctccacgtgcagcctgccctggctgtctccatggacttcagcacctatggggggctgctgccccagggcttcatccagagggagctgttcagcaagctgggggagctggctgtgggcatgaagtcagagagccggaccatcggagagcagtgcagcgtgtgtggggtcgagcttcctgataacgaggctgtggagcagcacaggtaggcccc

SEQ ID NO: 23545 - DNA, 339 bp, Homo sapiens
  MAP TO CHR12.3; EXPRESSED IN HEART, SIGNAL = 1.2; EXPRESSED IN BONE MARROW, SIGNAL = 1.4; EXPRESSED IN FETAL LIVER, SIGNAL = 1.6; EXPRESSED IN ADULT LIVER, SIGNAL = 1.1; EXPRESSED IN BRAIN, SIGNAL = 1.3; NT HIT: gi6806888, EVALUE 0.00e+00; EST_HUMAN HIT: AL534186.1, EVALUE 0.00e+00; SWISSPROT HIT: Q03933, EVALUE 2.00e-54
tcaaccaggagacctgggtctatgctaaattgtcttcctgacagcatggcttggaagtcgtctaaactgcaatcagtactgtcaagataatccaacaactcaacctttcccaaaagattgatgttatcattcaaaatggaatccatcatggtcactggatcttctgaggtcagactggatgagccatttagctggacagcactagacatgagagggttgctgccatcactgcctgaacttagggattctctggctggttcactctgctctccactctgaatggcaggtgcatactcatcttcattgtcatcttcaaagacgacaatatcagggtactgg

SEQ ID NO: 23546 - DNA, 244 bp, Homo sapiens
  MAP TO CHR2.3; EXPRESSED IN BONE MARROW, SIGNAL = 0.68; EXPRESSED IN LUNG, SIGNAL = 0.84; EXPRESSED IN HEART, SIGNAL = 0.78; EXPRESSED IN BRAIN, SIGNAL = 0.78; SWISSPROT HIT: P07316, EVALUE 2.00e-47; NT HIT: gi14729969, EVALUE 0.00e+00; EST_HUMAN HIT: BF726411.1, EVALUE 0.00e+00
cagatcaccttctacgaggacagggccttccagggccgcagctacgaatgcaccactgactgccccaacctacaaccctatttcagccgctgcaactccatcagggtggagagcggctgctggatgatctatgagcgccccaactaccagggccaccagtacttcctgcggcgtggggagtaccctgactaccagcaatggatgggcctcagcgactccatccgctcctgctgcctcatccccc

SEQ ID NO: 23547 - DNA, 379 bp, Homo sapiens
  MAP TO CHR12.3; EXPRESSED IN BONE MARROW, SIGNAL = 1.8; EXPRESSED IN ADULT LIVER, SIGNAL = 1.4; EXPRESSED IN PLACENTA, SIGNAL = 1.8; EXPRESSED IN LUNG, SIGNAL = 1.5; EXPRESSED IN HEART, SIGNAL = 1.6; SWISSPROT HIT: P17947, EVALUE 8.00e-28; NT HIT: gi6755617, EVALUE 7.00e-21; EST_HUMAN HIT: BI838200.1, EVALUE 0.00e+00
aggcaggaagaagctccgactgtttgaataccttcacgaatccctgtataatccggagatggcatcttgtattcagtgggtagataaaaccaaaggcatctttcagtttgtatcaaaaaacaaagaaaaacttgccgagctttgggggaaaagaaaaggcaacaggaagaccatgacttaccagaaaatggccagggcactcagaaattacggaagaagtggggaaattaccaaaatccggaggaagctgacttaccagttcagtgaggccattctccaaagactctctccatcctatttcctggggaaagagatcttctattcacagtgtgttcaacctgatcaagaatatctcagtttaaataactggaatgcaaat

SEQ ID NO: 23548 - DNA, 330 bp, Homo sapiens
  MAP TO CHR6.3; EXPRESSED IN PLACENTA, SIGNAL = 4.1; EXPRESSED IN BONE MARROW, SIGNAL =   5; EXPRESSED IN FETAL LIVER, SIGNAL = 4.1; EXPRESSED IN BRAIN, SIGNAL = 5.2; EXPRESSED IN LUNG, SIGNAL = 3.9; EXPRESSED IN HEART, SIGNAL = 4.4; NT HIT: gi14550417, EVALUE 0.00e+00; EST_HUMAN HIT: BG912913.1, EVALUE 0.00e+00; SWISSPROT HIT: P40055, EVALUE 1.00e-15
ctggcccactcaccagggaccagcatgctggtgatgcccccagtgtgccccacccccagcacatcttcaaaggggcagaactgaaggccatgcacagggcctgagagccggtgggtgaggtagggctgttcaagggagggtgggctggccttgccctgccctgcccagatgttgacaacgtcacccattcccgccaccagcagtcccctctgggagaaggccaggtgccctgctccatggggcagggtccgagtgctcagaggctggtacgtccctcgcaagtcaaagatcttcagctggtggtctaggccagaggtggccatgtacctg

SEQ ID NO: 23549 - DNA, 140 bp, Homo sapiens
  MAP TO CHRY.3; EXPRESSED IN PLACENTA, SIGNAL = 2.1; EXPRESSED IN LUNG, SIGNAL = 1.5; EXPRESSED IN HEART, SIGNAL = 2.2; EXPRESSED IN BONE MARROW, SIGNAL = 2.4; EXPRESSED IN FETAL LIVER, SIGNAL = 1.9; EXPRESSED IN BRAIN, SIGNAL = 1.8; NT HIT: gi6005939, EVALUE 2.00e-62; EST_HUMAN HIT: AA417679.1, EVALUE 2.00e-62; SWISSPROT HIT: O14607, EVALUE 3.00e-17
tcaaccacctacctttaaactagacttgtagtctgtgttcactttgaacatgagcccaagtcgtaaatgaatttccttggctcgacaaaagctggggtcaacataaaggacatcttgaaatgctttaattgccctgaaaa

SEQ ID NO: 23550 - DNA, 198 bp, Homo sapiens
  MAP TO CHR12.3; EXPRESSED IN BONE MARROW, SIGNAL = 6.2; EXPRESSED IN BRAIN, SIGNAL = 6.8; EXPRESSED IN LUNG, SIGNAL = 7.1; EXPRESSED IN PLACENTA, SIGNAL = 4.5; EXPRESSED IN HEART, SIGNAL = 5.5; SWISSPROT HIT: P04921, EVALUE 9.00e-03; NT HIT: gi16175911, EVALUE 2.80e+00; EST_HUMAN HIT: AL548190.1, EVALUE 1.00e-104
ttccaagttgttatcaccgttgtcttcctcaccctgctctcggtcgtgatcttgatcttcttttacctgtacaagaacaaaggcagctacgtcacctatgaacctacagaaggtgagcccagtgccatcgtccagatggagagtgacttggccaagggcagcgagaaagaggaatatttcatctaatgactcccaggc

SEQ ID NO: 23551 - DNA, 155 bp, Homo sapiens
  MAP TO CHR1.3; EXPRESSED IN LUNG, SIGNAL = 1.5; EXPRESSED IN HEART, SIGNAL = 4.3; EXPRESSED IN BRAIN, SIGNAL =   2; EXPRESSED IN ADULT LIVER, SIGNAL = 3.7; EXPRESSED IN BONE MARROW, SIGNAL = 1.7; EXPRESSED IN PLACENTA, SIGNAL = 1.9; SWISSPROT HIT: Q02061, EVALUE 1.50e+00; NT HIT: gi15299054, EVALUE 9.00e-77; EST_HUMAN HIT: BI910116.1, EVALUE 8.00e-78
ccaggccatctgtcctggacagctttgccttgctttctggacagctgaacactctgaacaaggtcttgaagcatgaaaaaacaccgctgttccgtaaccaggtcatcattcctctggtgttgtctccagaccgagatgaagatctcatggtaaga

SEQ ID NO: 23552 - DNA, 137 bp, Homo sapiens
  MAP TO CHRX.3; EXPRESSED IN FETAL LIVER, SIGNAL = 1.3; EXPRESSED IN LUNG, SIGNAL = 1.4; EXPRESSED IN HEART, SIGNAL = 1.3; EXPRESSED IN BONE MARROW, SIGNAL = 1.2; EXPRESSED IN ADULT LIVER, SIGNAL = 1.6; EXPRESSED IN BRAIN, SIGNAL = 1.6; SWISSPROT HIT: P52788, EVALUE 2.00e-16; NT HIT: gi15307675, EVALUE 2.00e-59; EST_HUMAN HIT: BE738122.1, EVALUE 2.00e-59
tgttctttctggaaggttctaatagaagactgtatcccggtactgaagaggtacgccaaagaagggagagaatttgattatgtgattaatgatttgacagctgttccaatctccacgtctccagaagaaggtagatt

SEQ ID NO: 23553 - DNA, 147 bp, Homo sapiens
  MAP TO CHR15.3; EXPRESSED IN ADULT LIVER, SIGNAL = 0.53; EXPRESSED IN BRAIN, SIGNAL = 0.85; EXPRESSED IN BONE MARROW, SIGNAL = 0.89; EXPRESSED IN PLACENTA, SIGNAL = 1.2; EST_HUMAN HIT: AA858002.1, EVALUE 3.00e-65; SWISSPROT HIT: P53355, EVALUE 5.00e-18; NT HIT: gi14670382, EVALUE 8.00e-77
cagtggccagtttgccatcgtgaagaagtgccgggagaagagcacggggcttgagtatgcagccaagttcatcaagaagcggcagagccgggcgagccggcgcggtgtgagccgggaggagatcgagcgggaggtgagcatcctgcg

SEQ ID NO: 23554 - DNA, 231 bp, Homo sapiens
  MAP TO CHR17.3; EXPRESSED IN FETAL LIVER, SIGNAL = 1.2; EXPRESSED IN BONE MARROW, SIGNAL = 1.3; EXPRESSED IN HEART, SIGNAL = 1.1; EXPRESSED IN PLACENTA, SIGNAL = 1.1; NT HIT: gi14774573, EVALUE 1.00e-118; EST_HUMAN HIT: AA457313.1, EVALUE 1.00e-125; SWISSPROT HIT: P35125, EVALUE 4.00e-39
atttgtagatttctcctcttcaccatctacaaatggaatgttcaccctaactaccaatggggacctacccaaaccaatattcatccccaatggaatgccaaacactgttgtgccatgtggaactgagaagaacttcacaaatggaatggttaatggtcacatgccatctcttcctgacagcccctttacaggttacatcattgcagtccaccgaaaaatggttagttaaat

SEQ ID NO: 23555 - DNA, 180 bp, Homo sapiens
  MAP TO CHR19.3; EXPRESSED IN ADULT LIVER, SIGNAL =   1; EXPRESSED IN BRAIN, SIGNAL =   1; EXPRESSED IN BONE MARROW, SIGNAL =   1; NT HIT: gi14766508, EVALUE 5.00e-94; EST_HUMAN HIT: BG616089.1, EVALUE 3.00e-25; SWISSPROT HIT: P38991, EVALUE 2.00e-11
cttactgtagatgagcctggatctcaatttcccggcgcagctggtgctccagtccttccttctctatctgcgacttgaagagaaccttcagggccacaatgaaatggctttccttgagccgagccaggtacacattcccaaatttccccttgcccaggggacgcccgatttcaaagtcat

SEQ ID NO: 23556 - DNA, 139 bp, Homo sapiens
  MAP TO CHR6.3; EXPRESSED IN BONE MARROW, SIGNAL = 0.7; EXPRESSED IN HEART, SIGNAL = 0.51; EXPRESSED IN PLACENTA, SIGNAL = 0.54; EXPRESSED IN ADULT LIVER, SIGNAL = 0.57; EXPRESSED IN BRAIN, SIGNAL = 0.68; EXPRESSED IN FETAL LIVER, SIGNAL = 0.41; SWISSPROT HIT: Q01755, EVALUE 2.00e-11; NT HIT: gi13642745, EVALUE 1.00e-72; EST_HUMAN HIT: BI520875.1, EVALUE 2.00e-72
ttatctacaaattggggtgagccaaacaaaacactgccggagaaactactggccaccagcaagactgaggccatgacggttaactggtgcaactgggacttcagctcctgcagccgggttctgtccatcagcagggtct

SEQ ID NO: 23557 - DNA, 145 bp, Homo sapiens
  MAP TO CHR2.3; EXPRESSED IN BONE MARROW, SIGNAL = 0.93; EXPRESSED IN HEART, SIGNAL = 0.77; EXPRESSED IN ADULT LIVER, SIGNAL = 0.69; SWISSPROT HIT: P16410, EVALUE 3.00e-18; NT HIT: M37243.1, EVALUE 8.00e-74; EST_HUMAN HIT: BI012118.1, EVALUE 7.30e-01
agtgaacctcactatccaaggactgagggccatggacacgggactctacatctgcaaggtggagctcatgtacccaccgccatactacctgggcataggcaacggaacccagatttatgtaattggtgagcaaagccatttcact

SEQ ID NO: 23558 - DNA, 165 bp, Homo sapiens
  MAP TO CHR9.3; EXPRESSED IN HEART, SIGNAL = 2.4; EXPRESSED IN PLACENTA, SIGNAL = 1.7; EXPRESSED IN BONE MARROW, SIGNAL = 2.4; EXPRESSED IN BRAIN, SIGNAL = 2.7; SWISSPROT HIT: Q40147, EVALUE 1.50e+00; NT HIT: AF090189.1, EVALUE 4.00e-88; EST_HUMAN HIT: AL551896.1, EVALUE 3.30e+00
catacctggctgaagggcactgtcctgcaggtctcccaatgtacttcatggcttttgatgggcaagatgaccccctgagaagccggagtttttctgaacatgaagtggtgccagaatttcttggcttcttcccgaagaggagatttctccattttcattccatct

SEQ ID NO: 23559 - DNA, 162 bp, Homo sapiens
  MAP TO CHR6.3; EXPRESSED IN FETAL LIVER, SIGNAL = 0.97; EXPRESSED IN BRAIN, SIGNAL = 1.9; EXPRESSED IN HELA, SIGNAL = 3.7; EXPRESSED IN BONE MARROW, SIGNAL = 1.6; EXPRESSED IN LUNG, SIGNAL = 2.1; EXPRESSED IN HEART, SIGNAL = 1.2; EXPRESSED IN ADULT LIVER, SIGNAL = 1.2; EST_HUMAN HIT: BF115614.1, EVALUE 4.00e-86; SWISSPROT HIT: Q9WUR2, EVALUE 2.60e-02; NT HIT: AF081258.1, EVALUE 2.00e-84
caggtgcttgaggaatccaaagccctcgtgcgctgcaacatgaagatggagctggagcaggccaacgagagggagtgtgaggtgctgaagaaaatctggggctcggcccaggggatggactccatgttaaagtacttgcagaggaagatcgatgagttctga

SEQ ID NO: 23560 - DNA, 134 bp, Homo sapiens
  MAP TO CHR19.3; EXPRESSED IN BONE MARROW, SIGNAL = 2.2; EXPRESSED IN LUNG, SIGNAL = 1.5; EXPRESSED IN PLACENTA, SIGNAL = 3.4; EXPRESSED IN HEART, SIGNAL = 2.2; EXPRESSED IN FETAL LIVER, SIGNAL = 1.1; EXPRESSED IN ADULT LIVER, SIGNAL =   2; EXPRESSED IN BRAIN, SIGNAL = 4.1; NT HIT: gi15305397, EVALUE 1.00e-69; EST_HUMAN HIT: BF204121.1, EVALUE 2.00e-62; SWISSPROT HIT: P24071, EVALUE 2.00e-05
gagagatggtacagggctagttttcccatcatcacggtgaccgccgcccacagcggaacctaccgatgctacagcttctccagcagggacccatacctgtggtcagcccccagcgaccccctggagcttgtggt

SEQ ID NO: 23561 - DNA, 182 bp, Homo sapiens
  MAP TO CHR14.3; EXPRESSED IN BONE MARROW, SIGNAL = 1.7; EXPRESSED IN LUNG, SIGNAL = 1.7; EXPRESSED IN HEART, SIGNAL = 1.4; EXPRESSED IN ADULT LIVER, SIGNAL = 2.3; EXPRESSED IN BRAIN, SIGNAL = 2.2; NT HIT: gi16190823, EVALUE 1.00e-79; EST_HUMAN HIT: BI562489.1, EVALUE 2.00e-79; SWISSPROT HIT: P49770, EVALUE 1.00e-22
ctctttgggtcttgttgcctctatagactccatggacgcagcgacgagagtgatcagcaggagtccctgcacaaactgttgacatccggaggcctaaacgaggatttcagcttccattatgcccaactccagtccaacatcattgaggcgattaatgagctgctagtggagctgggtaagag

SEQ ID NO: 23562 - DNA, 190 bp, Homo sapiens
  MAP TO CHR19.3; EXPRESSED IN BONE MARROW, SIGNAL =   2; EXPRESSED IN LUNG, SIGNAL = 1.4; EXPRESSED IN HEART, SIGNAL =   1; EXPRESSED IN ADULT LIVER, SIGNAL = 1.2; EXPRESSED IN BRAIN, SIGNAL = 1.3; NT HIT: gi4502658, EVALUE 1.00e-103; EST_HUMAN HIT: BI756629.1, EVALUE 5.00e-86; SWISSPROT HIT: Q62234, EVALUE 2.20e-01
gaggatcagggagctgttggcccagggcccagctgagctggagttgaccttgaatgagccctggctgctgttcccctccagcggcttctcctcaagccgccagcacagggagggggccggccgggctcgaaaggagcatctgcagtgcagaccctcagcctcccaggagcaggaggggcccagcaactgt

SEQ ID NO: 23563 - DNA, 144 bp, Homo sapiens
  MAP TO CHR6.3; EXPRESSED IN BONE MARROW, SIGNAL = 1.2; EXPRESSED IN HEART, SIGNAL = 1.2; EXPRESSED IN PLACENTA, SIGNAL = 1.1; EXPRESSED IN ADULT LIVER, SIGNAL = 1.2; EXPRESSED IN BRAIN, SIGNAL =   1; NT HIT: gi11526387, EVALUE 1.00e-75; SWISSPROT HIT: P58182, EVALUE 2.00e-21
ttttctatgcacctgttcttttcacctatatccatcctgcgttagagagcttcatggaccaggaccggattgttgccatcatgtacactgtggtcactcctgtactaaacccactgatctatactttgaggaacaaggaagtga

SEQ ID NO: 23564 - DNA, 219 bp, Homo sapiens
  MAP TO CHR19.3; EXPRESSED IN BONE MARROW, SIGNAL = 3.5; EXPRESSED IN HEART, SIGNAL =   3; EXPRESSED IN PLACENTA, SIGNAL = 2.9; EXPRESSED IN ADULT LIVER, SIGNAL = 2.6; EXPRESSED IN BRAIN, SIGNAL = 3.2; EST_HUMAN HIT: AI803954.1, EVALUE 1.00e-105; NT HIT: gi14763857, EVALUE 1.00e-105; SWISSPROT HIT: Q9Y463, EVALUE 2.00e-33
ctggctggctgggcaggtatactatgcgaagaagaagcggcgggcccagcaggcgccaccccaggattcgagcaacaagaaggagaagaaggtcctgaaccatggttatgatgacgacaaccatgactacatcgtgcgcagtggcgagcgctggctggagcgctacgaaattgactcgctcattggcaaaggctcctttggccaggtgtgggacacccc

SEQ ID NO: 23565 - DNA, 141 bp, Homo sapiens
  MAP TO CHR22.3; EXPRESSED IN BRAIN, SIGNAL = 0.67; EXPRESSED IN BONE MARROW, SIGNAL = 0.86; EXPRESSED IN PLACENTA, SIGNAL = 0.58; EXPRESSED IN LUNG, SIGNAL = 0.62; SWISSPROT HIT: Q05900, EVALUE 1.30e-01; EST_HUMAN HIT: N28752.1, EVALUE 7.00e-69; NT HIT: gi9506862, EVALUE 4.00e-69
gcacccacctcggaacatgtcgtaccagaccttcttggccttgaggtgctgcagcccgttcaggtgcttcttgcggttgtggaggttgtcctggaaggagcggtcgcagtagtcacagaagtatcgcttccccatggccac

SEQ ID NO: 23566 - DNA, 146 bp, Homo sapiens
  MAP TO CHR6.3; EXPRESSED IN HEART, SIGNAL = 1.5; EXPRESSED IN BONE MARROW, SIGNAL = 1.4; SWISSPROT HIT: Q15349, EVALUE 9.00e-22; EST_HUMAN HIT: F06080.1, EVALUE 3.00e-68; NT HIT: gi13642626, EVALUE 1.00e-72
ggtaccttcaccaggtgcacgtcctgtcggctgagctggtttggggacaggtactctctgttgaccacccacgggtgtttgagcacttgcatcgccgtcaggcgctgatgagggtccacgtggagcatcttggacacgacgtcctg

SEQ ID NO: 23567 - DNA, 136 bp, Homo sapiens
  MAP TO CHR10.3; EXPRESSED IN FETAL LIVER, SIGNAL = 0.52; EXPRESSED IN BONE MARROW, SIGNAL = 0.76; EXPRESSED IN PLACENTA, SIGNAL = 0.53; EXPRESSED IN HEART, SIGNAL = 0.72; NT HIT: gi14735962, EVALUE 7.00e-68; SWISSPROT HIT: Q02218, EVALUE 6.00e-11; EST_HUMAN HIT: BG167351.1, EVALUE 2.00e-29
tgcaggtcatgtccatcctggttcatggggacgccgcctttgctggccagggcgtggtatatgagaccttccacctgagcgacctgccctcctacacgaccaatggtaccgtgcacgtcgtcgtcaacaaccaggt

SEQ ID NO: 23568 - DNA, 232 bp, Homo sapiens
  MAP TO CHR9.3; EXPRESSED IN BRAIN, SIGNAL = 0.98; EXPRESSED IN BONE MARROW, SIGNAL =   1; EXPRESSED IN LUNG, SIGNAL = 8.5; EXPRESSED IN FETAL LIVER, SIGNAL = 5.7; EXPRESSED IN ADULT LIVER, SIGNAL = 1.3; NT HIT: AB010273.1, EVALUE 1.00e-128; SWISSPROT HIT: P50454, EVALUE 6.00e-26; EST_HUMAN HIT: BG425096.1, EVALUE 2.00e-79
acaggcctctacaactactatgacaatgagaaggaaaagctgcaaatcgtggagatgcccctggcccacaagctctccagcctcatcatcctcatgccccaccacgtggagcccctcgaggccttaaaaagctggtaaccaaagagcagctgaagatctggatggggaagaagcagaagcctgtcgccatctccttgcccaagcgggtggtggaagttcccatgacctgcag

SEQ ID NO: 23569 - DNA, 130 bp, Homo sapiens
  MAP TO CHR2.3; EXPRESSED IN ADULT LIVER, SIGNAL = 7.2; EXPRESSED IN BONE MARROW, SIGNAL = 5.1; EXPRESSED IN LUNG, SIGNAL = 6.6; EXPRESSED IN HEART, SIGNAL = 6.9; EXPRESSED IN HELA, SIGNAL = 4.9; EXPRESSED IN PLACENTA, SIGNAL =   6; EST_HUMAN HIT: BI667012.1, EVALUE 4.00e-67; NT HIT: gi4502548, EVALUE 3.00e-67; SWISSPROT HIT: P21251, EVALUE 5.00e-19
cttcatagtttacttgaccatcaccatcaatatctgcttccctgatcatttcatcaacttcttcatctgttaacttctctccaaggtttgtcatcacatggcgaagttctgcagcactaatatagccatt

SEQ ID NO: 23570 - DNA, 225 bp, Homo sapiens
  MAP TO CHR3.3; EXPRESSED IN LUNG, SIGNAL = 1.1; EXPRESSED IN BONE MARROW, SIGNAL = 0.79; EXPRESSED IN HELA, SIGNAL = 2.4; EXPRESSED IN ADULT LIVER, SIGNAL = 1.2; EST_HUMAN HIT: BG706084.1, EVALUE 2.00e-98; NT HIT: gi13648977, EVALUE 1.00e-98; SWISSPROT HIT: O75896, EVALUE 9.00e-07
agtttattcagggttgtggccccagcctgggctcctcaatggaagccacaccttgattgagcctgggagtttcttgccggggcagggggtgcttctgtctgccacctcccagggtcacacctcatagaggatcacagggaaatccacgtggatgcgggggtgatccagcttcacgatgccctgccatggaaacagaggctagtaagggtcagctcagggcctcta

SEQ ID NO: 23571 - DNA, 138 bp, Homo sapiens
  MAP TO CHR1.3; EXPRESSED IN BONE MARROW, SIGNAL = 4.8; EXPRESSED IN LUNG, SIGNAL = 4.4; EXPRESSED IN HELA, SIGNAL = 4.4; EXPRESSED IN HEART, SIGNAL = 3.6; EXPRESSED IN PLACENTA, SIGNAL = 3.6; EXPRESSED IN BRAIN, SIGNAL = 5.5; NT HIT: gi4503150, EVALUE 2.00e-59; SWISSPROT HIT: O77641, EVALUE 6.00e-15; EST_HUMAN HIT: AL547875.1, EVALUE 2.00e-59
tggctggctggagtcacatcttggggaagctggccaggttggcaatgccacaggcgttgttcttatttcgagccatgaggatatatcctttgtttccccagttttctccccagctgtaagaccaatcaagaaaaatac

SEQ ID NO: 23572 - DNA, 244 bp, Homo sapiens
  MAP TO CHRX.3; EXPRESSED IN BONE MARROW, SIGNAL = 1.3; EXPRESSED IN BRAIN, SIGNAL = 0.8; EST_HUMAN HIT: AU125077.1, EVALUE 1.00e-128; NT HIT: AF251550.1, EVALUE 0.00e+00; SWISSPROT HIT: P51864, EVALUE 4.00e-50
ccatcacagccgggtagaaatgcctgaggaaagcagcggagctgaccgtgccagcatttacacagggaacacttcttgggcagccaggtgtcatggggcacagacccacagttctctttgcgcacatcgtgctcacagttccgtccgtagaaggagggagggcaggcacaaaaggactccagcatgcaggttcccccattcaggcagcaggttctgtttagctccttactgtgctgtattccca

SEQ ID NO: 23573 - DNA, 201 bp, Homo sapiens
  MAP TO CHR2.3; EXPRESSED IN HEART, SIGNAL =  10; EXPRESSED IN BRAIN, SIGNAL =  16; EXPRESSED IN BONE MARROW, SIGNAL =  12; EST_HUMAN HIT: AW069298.1, EVALUE 1.00e-105; NT HIT: M17783.1, EVALUE 1.00e-105; SWISSPROT HIT: P07093, EVALUE 3.00e-31
cggaacacggagagctgggccagcattggcacttgataggatttcccgtcggctgccacgaaagtgcgtttctttgtgttctcgggttggaaccgtgatttccacagacccttgaaatacactgcgttgacgaggaccagtctggtgagcacaccatcaataagatctggggacagcagattgtcaatcatatctgtgaag

SEQ ID NO: 23574 - DNA, 158 bp, Homo sapiens
  MAP TO CHR1.3; EXPRESSED IN BONE MARROW, SIGNAL = 5.6; EXPRESSED IN HELA, SIGNAL = 4.3; EXPRESSED IN HEART, SIGNAL = 5.1; EXPRESSED IN PLACENTA, SIGNAL = 4.6; EXPRESSED IN BRAIN, SIGNAL = 6.7; EST_HUMAN HIT: AW580393.1, EVALUE 2.00e-63; NT HIT: gi4826985, EVALUE 1.00e-63; SWISSPROT HIT: P51449, EVALUE 7.00e-18
ggccccagagcacctggtgcagagcgtctgcaagtcctacagggagacatgccagctgcggctggaggacctgctgcggcagcgctccaacatcttctcccgggaggaagtgactggctaccagaggaaggtgaggccaggagacctgcaggaaggga

SEQ ID NO: 23575 - DNA, 151 bp, Homo sapiens
  MAP TO CHR11.3; EXPRESSED IN BONE MARROW, SIGNAL = 3.1; EXPRESSED IN LUNG, SIGNAL = 2.6; EXPRESSED IN HEART, SIGNAL = 3.4; EXPRESSED IN ADULT LIVER, SIGNAL = 4.1; EXPRESSED IN FETAL LIVER, SIGNAL = 3.3; EXPRESSED IN BRAIN, SIGNAL = 4.8; EST_HUMAN HIT: BF973772.1, EVALUE 5.00e-73; NT HIT: gi4506210, EVALUE 1.00e-72; SWISSPROT HIT: O42587, EVALUE 5.00e-21
agggtgtgaacaaagactcctatctgatcctggagacgctgcccacagagtatgactcgcgggtgaaggccatggaggtagacgagaggcccacggagcaatacagtgacattgggggtttggacaagcagatccaggaggtgagggaggc

SEQ ID NO: 23576 - DNA, 170 bp, Homo sapiens
  MAP TO CHR17.3; EXPRESSED IN LUNG, SIGNAL = 1.4; EXPRESSED IN PLACENTA, SIGNAL = 1.2; EXPRESSED IN BONE MARROW, SIGNAL = 1.5; EXPRESSED IN BRAIN, SIGNAL = 0.88; EXPRESSED IN FETAL LIVER, SIGNAL = 1.2; EXPRESSED IN ADULT LIVER, SIGNAL = 0.88; SWISSPROT HIT: P38398, EVALUE 1.00e-26; EST_HUMAN HIT: BE043993.1, EVALUE 7.00e-91; NT HIT: gi13652458, EVALUE 5.00e-91
tttttctttatctcttcactgctagaacaactatcaatttgcaattcagtacaattaggtgggcttagatttctactgactactagttcaagcgcatgaatatgcctggtagaagacttcctcctcagcctattctttttaggtgcttttgaattgtggatatttaattc

SEQ ID NO: 23577 - DNA, 198 bp, Homo sapiens
  MAP TO CHR8.3; EXPRESSED IN BRAIN, SIGNAL = 1.8; EXPRESSED IN ADULT LIVER, SIGNAL = 1.2; EXPRESSED IN HEART, SIGNAL = 2.1; EXPRESSED IN BONE MARROW, SIGNAL = 1.6; EXPRESSED IN LUNG, SIGNAL = 2.5; EXPRESSED IN PLACENTA, SIGNAL = 1.5; NT HIT: AF154570.2, EVALUE 2.00e-81; SWISSPROT HIT: Q04589, EVALUE 1.00e-22; EST_HUMAN HIT: BF981311.1, EVALUE 4.00e-77
taccttccagaacggtcaaccatgcagagtgatgggagagtccgatagagttacccgccaagcacgtatactcccctgcgtcctcaaaggagacatttcttaagtgaagcacctccatctctttgtcggtggtattaactccagcagtctagaagagacaacggaagcaaaatggacaagcacaggacatgagacctc

SEQ ID NO: 23578 - DNA, 248 bp, Homo sapiens
  MAP TO CHR3.3; EXPRESSED IN ADULT LIVER, SIGNAL = 0.63; EXPRESSED IN BRAIN, SIGNAL = 0.63; EXPRESSED IN LUNG, SIGNAL = 1.1; EXPRESSED IN HEART, SIGNAL = 0.72; EXPRESSED IN BONE MARROW, SIGNAL = 0.9; EST_HUMAN HIT: AI272244.1, EVALUE 3.00e-63; NT HIT: U35371.1, EVALUE 7.00e-54; SWISSPROT HIT: Q12860, EVALUE 3.00e-10
tgcatcactaatgctttcatcagccagtgtaaaataaatccattagtcaccgtgtccttcatgtgataatgatatttagagctcattaaaaagtaattgcagccactttcccctactttatcagcaggattcagctggtgatttgatgatccgaaacatccaactgaagcatgctgggaaatatgtctgcatggtccaaacaagtgtggacaggctatctgctgctgcagacctgattgtaagaggta

SEQ ID NO: 23579 - DNA, 226 bp, Homo sapiens
  MAP TO CHR20.3; EXPRESSED IN ADULT LIVER, SIGNAL =  16; EXPRESSED IN BRAIN, SIGNAL = 0.7; EXPRESSED IN BONE MARROW, SIGNAL =   1; EXPRESSED IN LUNG, SIGNAL = 0.65; EST_HUMAN HIT: BG401803.1, EVALUE 1.00e-124; NT HIT: U31519.1, EVALUE 1.00e-124; SWISSPROT HIT: P35558, EVALUE 2.00e-38
atgcctcctcagctgcaaaacggcctgaacctctcggccaaagttgtccagggaagcctggacagcctaccccaggcagtgagggagtttctcgagaataacgctgagctgtgtcagcctgatcacatccacatctgtgacggctctgaggaggagaatgggcggcttctgggccagatggaggaagagggcatcctcaggcggctgaagaagtatgacaactggt

SEQ ID NO: 23580 - DNA, 263 bp, Homo sapiens
  MAP TO CHRX.3; EXPRESSED IN HEART, SIGNAL = 0.56; EXPRESSED IN BONE MARROW, SIGNAL = 0.71; EXPRESSED IN BRAIN, SIGNAL = 0.79; NT HIT: gi14760411, EVALUE 0.00e+00; SWISSPROT HIT: Q12816, EVALUE 8.00e-35; EST_HUMAN HIT: AL535923.1, EVALUE 0.00e+00
cctggctttggcggtgcatttagcaccagtgctggcttcggtggggcacttagtaccgctgctgacttcggtggtactcccagcaacagcattggctttggtgctgctcccagcaccagtgtcagctttggtggtgctcatggcaccagcctctgttttggtggagctcccagcaccagcctctgctttggcagtgcatctaatactaacctatgctttggtggccctcctagcaccagtgcctgctttagtggtgctaccag

SEQ ID NO: 23581 - DNA, 165 bp, Homo sapiens
  MAP TO CHR2.3; EXPRESSED IN ADULT LIVER, SIGNAL =   1; EXPRESSED IN BRAIN, SIGNAL =   1; EXPRESSED IN LUNG, SIGNAL = 0.56; EXPRESSED IN BONE MARROW, SIGNAL = 0.91; EXPRESSED IN PLACENTA, SIGNAL =   1; EST_HUMAN HIT: AA459837.1, EVALUE 6.00e-85; NT HIT: gi14738413, EVALUE 4.00e-85; SWISSPROT HIT: O95754, EVALUE 9.00e-28
tggctcctggttggctcccgtactgaggtgacacaagtgaatacaaccaactgtggccgtctccagagctgctcagagtgcatcctggcccaggacccagtctgtgcctggagcttccggctggatgagtgtgtggcccatgccggggagcaccgagggtgagtg

SEQ ID NO: 23582 - DNA, 216 bp, Homo sapiens
  MAP TO CHR22.3; EXPRESSED IN ADULT LIVER, SIGNAL = 2.7; EXPRESSED IN BRAIN, SIGNAL =   3; EXPRESSED IN FETAL LIVER, SIGNAL = 2.8; EXPRESSED IN PLACENTA, SIGNAL = 2.7; EXPRESSED IN LUNG, SIGNAL = 2.3; EXPRESSED IN BONE MARROW, SIGNAL = 2.9; SWISSPROT HIT: P10323, EVALUE 2.00e-29; EST_HUMAN HIT: BI831427.1, EVALUE 1.00e-114; NT HIT: M77381.1, EVALUE 1.00e-103
agagtggctcaggcagatagtgacctctgtgtccttctggacagggagacagcggcgggcctctcatgtgcaaagacagcaaggaaagcgcctatgtggtcgtgggaatcacaagctggggggtaggctgtgcccgtgccaagcgccccggaatctacacggccacctggccctatctgaactggatcgcctccaagattggttctaacgctttgc

SEQ ID NO: 23583 - DNA, 138 bp, Homo sapiens
  MAP TO CHR19.3; EXPRESSED IN BONE MARROW, SIGNAL = 1.2; EXPRESSED IN PLACENTA, SIGNAL = 1.1; EXPRESSED IN HEART, SIGNAL = 1.5; EXPRESSED IN FETAL LIVER, SIGNAL = 0.74; EXPRESSED IN ADULT LIVER, SIGNAL = 1.3; SWISSPROT HIT: O43240, EVALUE 1.00e-19; EST_HUMAN HIT: BG678912.1, EVALUE 2.00e-62; NT HIT: AF055481.1, EVALUE 1.00e-69
ctccttcctgccacccccagagtgactctggaggccccctggtctgtgacgagaccctccaaggcatcctctcgtggggtgtttacccctgtggctctgcccagcatccagctgtctacacccagatctgcaaataca

SEQ ID NO: 23584 - DNA, 270 bp, Homo sapiens
  MAP TO CHR2.3; EXPRESSED IN BONE MARROW, SIGNAL = 1.2; EXPRESSED IN HEART, SIGNAL = 1.2; EXPRESSED IN BRAIN, SIGNAL = 1.2; SWISSPROT HIT: P41595, EVALUE 7.00e-42; NT HIT: AF156158.2, EVALUE 0.00e+00; EST_HUMAN HIT: H99362.1, EVALUE 2.00e-92
tctggattacagacagaatcaataccagaggaaatgaaacagattgttgaggaacagggaaataaactgcactgggcagctcttctgatactcatggtgataatacccacaattggtggaaatacccttgttattctggctgtttcactggagaagaagctgcagtatgctactaattactttctaatgtccttggcggtggctgatttgctggttggattgtttgtgatgccaattgccctcttgacaataatgtttggtaagtatttc

SEQ ID NO: 23585 - DNA, 219 bp, Homo sapiens
  MAP TO CHR17.3; EXPRESSED IN FETAL LIVER, SIGNAL = 0.93; EXPRESSED IN ADULT LIVER, SIGNAL =   1; EXPRESSED IN BRAIN, SIGNAL = 1.6; EXPRESSED IN BONE MARROW, SIGNAL = 1.4; EXPRESSED IN PLACENTA, SIGNAL = 1.7; EST_HUMAN HIT: AL551589.1, EVALUE 1.00e-117; SWISSPROT HIT: O15491, EVALUE 5.00e-38; NT HIT: gi5031728, EVALUE 1.00e-117
ccaacaggtctatgatattgcatttagccgggccgggggtggcagggacatgtttgcctctgtgggtgctgatggctcggtgcggatgtttgacctccgccatctagaacacagcaccatcatttacgaagacccacagcatcacccactgcttcgcctctgctggaacaagcaggaccctaactacctggccaccatggccatggatggaatggaggt

SEQ ID NO: 23586 - DNA, 373 bp, Homo sapiens
  MAP TO CHR6.3; EXPRESSED IN BRAIN, SIGNAL = 0.36; EXPRESSED IN BONE MARROW, SIGNAL = 0.68; EST_HUMAN HIT: BG943891.1, EVALUE 0.00e+00; SWISSPROT HIT: P43277, EVALUE 5.00e-28; NT HIT: M60747.1, EVALUE 0.00e+00
ccttcttgggcttcttggctgccccagcaggcttcctaggcttggctgcgccagcctttttggccttgggtttgccttccccggaagccgctttcttgttgagtttgaaggagccagaagcaccggtacctttggtctgcaccagagtacctttgctcaccaagctcttgaggccaagcttgatacggctgttgtttttttctacatcgtagccagcagccgcaagcgctttcttaagcgcggccagagaaacgccgctgcgctccttagaagctgccactgccttggtgataagctcagatactgggggtccggatgctttgcgtttcccagcagttgcgcctgccttcttcgcctttttcttcacaggtgt

SEQ ID NO: 23587 - DNA, 165 bp, Homo sapiens
  MAP TO CHR11.3; EXPRESSED IN BONE MARROW, SIGNAL = 1.2; EXPRESSED IN BRAIN, SIGNAL = 1.5; EST_HUMAN HIT: AA180758.1, EVALUE 2.00e-51; SWISSPROT HIT: Q16816, EVALUE 5.00e-23; NT HIT: gi5453881, EVALUE 7.00e-56
tctcaccaggtccttcacggtgtccaagtaatcgtcccactcgggcgatccaaactggtagttgctgcttatgatcatcctcagcaccagcatctgcttccggtggcagaaaggtggggagccagccagtagcgtgtacatgatgacgccagtgctccaactgga

SEQ ID NO: 23588 - DNA, 144 bp, Homo sapiens
  MAP TO CHR16.3; EXPRESSED IN BRAIN, SIGNAL = 0.79; EXPRESSED IN BONE MARROW, SIGNAL = 0.76; EXPRESSED IN HEART, SIGNAL = 0.96; EXPRESSED IN PLACENTA, SIGNAL = 0.75; EXPRESSED IN ADULT LIVER, SIGNAL =   1; NT HIT: D29011.1, EVALUE 3.00e-30; SWISSPROT HIT: O55234, EVALUE 5.00e-07; EST_HUMAN HIT: AA449387.1, EVALUE 2.00e-75
ggttgatctctgtcaccttctttaccatctggaggcaatgtaagcacccactgcagccctatagtctgctgcaactatgactccatgccagaacttgaagaccagggtggtgattccaggaagcattttgattccctgctcctc

SEQ ID NO: 23589 - DNA, 115 bp, Homo sapiens
  MAP TO CHR17.3; EXPRESSED IN BONE MARROW, SIGNAL = 0.83; EXPRESSED IN BRAIN, SIGNAL = 0.97; EXPRESSED IN ADULT LIVER, SIGNAL = 0.95; EXPRESSED IN LUNG, SIGNAL = 1.5; EXPRESSED IN HELA, SIGNAL = 2.1; EXPRESSED IN PLACENTA, SIGNAL = 1.4; NT HIT: AF265206.1, EVALUE 2.00e-58; SWISSPROT HIT: O95817, EVALUE 4.60e+00; EST_HUMAN HIT: BF696817.1, EVALUE 3.00e-58
gacctccgaccggtcccggacaatcaagaagttttctgccatcccgtgacggaccagagcctgatagtggaacttctcgagctgcaggcccacgtacggggcgaagcggctgcgc

SEQ ID NO: 23590 - DNA, 201 bp, Homo sapiens
  MAP TO CHRX.3; EXPRESSED IN BONE MARROW, SIGNAL = 1.8; EXPRESSED IN LUNG, SIGNAL =   1; EXPRESSED IN HEART, SIGNAL = 1.6; EXPRESSED IN FETAL LIVER, SIGNAL = 0.66; EXPRESSED IN ADULT LIVER, SIGNAL = 1.6; EXPRESSED IN BRAIN, SIGNAL = 1.4; EST_HUMAN HIT: AW628668.1, EVALUE 1.00e-55; SWISSPROT HIT: P10908, EVALUE 1.00e-04; NT HIT: gi14765673, EVALUE 5.00e-82
gtcctcacctctaggaaccaggatccagcattgagtctcttcagttcagtccaggagaagtcactgctgtgggctgtgattcgggttgggaatacagaggctacattcgtggtcctgctgaggtgctcatcatgcatgaggaaggggaccccatcggagctgagggcacaaggggtgtcagagggccaagctctggggctg

SEQ ID NO: 23591 - DNA, 197 bp, Homo sapiens
  MAP TO CHR12.3; EXPRESSED IN BONE MARROW, SIGNAL = 3.3; EXPRESSED IN PLACENTA, SIGNAL = 4.2; EXPRESSED IN BRAIN, SIGNAL =   4; EST_HUMAN HIT: BI063548.1, EVALUE 1.00e-107; SWISSPROT HIT: P25991, EVALUE 7.40e-02; NT HIT: AF387506.1, EVALUE 1.00e-100
actcacccgagcagcttccacaatcgcactttcaaactctcggtaagcctcccagagggcgagtcctttggtcatatgtaaaccaacagacgagagagccctttcaaacacggagcgaactttctcaaggccacctttctgaccaatcccaccaactgagtactggccatactctagccaaatgttaggacctaaaa

SEQ ID NO: 23592 - DNA, 170 bp, Homo sapiens
  MAP TO CHR9.3; EXPRESSED IN BONE MARROW, SIGNAL = 0.86; EXPRESSED IN HEART, SIGNAL = 0.63; EXPRESSED IN BRAIN, SIGNAL = 1.2; SWISSPROT HIT: P49813, EVALUE 1.00e-25; EST_HUMAN HIT: BI915726.1, EVALUE 1.00e-83; NT HIT: AF288148.1, EVALUE 5.00e-91
tgttcagtacctcgtttttcccctgtgtaggggaccagatcttctcggtccttaaactcctttgcttgcttttccaagtgatccaagagctcctctcttttaaaggggcccgtgggcgccttggtggtctgatccttctgcctcaggcctgcaggcagcagtgcattcta

SEQ ID NO: 23593 - DNA, 302 bp, Homo sapiens
  MAP TO CHR1.3; EXPRESSED IN HEART, SIGNAL = 0.97; EXPRESSED IN BONE MARROW, SIGNAL = 1.1; EXPRESSED IN ADULT LIVER, SIGNAL = 0.83; EXPRESSED IN BRAIN, SIGNAL = 1.5; EST_HUMAN HIT: AA984317.1, EVALUE 0.00e+00; SWISSPROT HIT: Q13105, EVALUE 2.00e-59; NT HIT: gi4507996, EVALUE 0.00e+00
gcacacctggttgaacttcttgtcgcagtgtgggcacttgtgctccttgtccgtgtcgtgggtctccaggtggcgcatcttggaagtggggtcggagaaggagcggccgcagtagtcgcactggtagggcttctcgccgctgtgcaccagctggtggcgcttgaggttgcccgaggtggtgaagagcttgccgcagtcctcgcagcggtagcgcgcctcgcccgagtgccgcttcttgtgcaggttcagcaggctgatgaggcggtagctcttcccgcactcctcgcagccgtagggcttca

SEQ ID NO: 23594 - DNA, 147 bp, Homo sapiens
  MAP TO CHR1.3; EXPRESSED IN HELA, SIGNAL = 2.1; EXPRESSED IN PLACENTA, SIGNAL = 3.5; EXPRESSED IN BONE MARROW, SIGNAL = 1.4; EXPRESSED IN BRAIN, SIGNAL = 3.2; SWISSPROT HIT: Q15418, EVALUE 1.00e-20; EST_HUMAN HIT: BE797713.1, EVALUE 7.00e-69; NT HIT: gi4506732, EVALUE 5.00e-69
ggaggcccaccttgacagcatactccatgttggtggccttgtggacacagcgcttgcactcagagtaggagcccacaccaattgtctcctttaccacgtagccgtcactaaaaaccaggttcttcccatggagttgctgtaggagac

SEQ ID NO: 23595 - DNA, 141 bp, Homo sapiens
  MAP TO CHR11.3; EXPRESSED IN LUNG, SIGNAL = 2.1; EXPRESSED IN HEART, SIGNAL = 2.8; EXPRESSED IN PLACENTA, SIGNAL = 1.6; EXPRESSED IN BONE MARROW, SIGNAL = 0.86; EXPRESSED IN FETAL LIVER, SIGNAL = 1.4; NT HIT: X03934.1, EVALUE 7.00e-74; EST_HUMAN HIT: BG185608.1, EVALUE 3.00e-68; SWISSPROT HIT: P04234, EVALUE 5.00e-19
actaacccccagacagccttccagtctcatgtccagcaaagcagaagactcccaaagcaaggagcagagtggcaatgacatcagtgacaatgatgccagccacggtggctggatccagctccacacagctctggcacactg

SEQ ID NO: 23596 - DNA, 122 bp, Homo sapiens
  MAP TO CHR11.3; EXPRESSED IN ADULT LIVER, SIGNAL = 0.92; EXPRESSED IN BRAIN, SIGNAL = 0.87; EXPRESSED IN LUNG, SIGNAL = 0.48; EXPRESSED IN HEART, SIGNAL = 1.3; EXPRESSED IN BONE MARROW, SIGNAL = 0.92; EST_HUMAN HIT: BI462531.1, EVALUE 2.00e-56; SWISSPROT HIT: P07864, EVALUE 1.00e-13; NT HIT: M24511.1, EVALUE 5.00e-62
tttcctttttagattacagtgtatctgcaaactccagaatagttattgtcacagcaggtgcaaggcagcaggagggagaaactcgccttgccctggtccaacgtaatgtggctataatgaaa

SEQ ID NO: 23597 - DNA, 319 bp, Homo sapiens
  MAP TO CHR11.3; EXPRESSED IN BONE MARROW, SIGNAL = 1.1; EXPRESSED IN PLACENTA, SIGNAL = 0.73; EXPRESSED IN BRAIN, SIGNAL = 1.2; NT HIT: gi7305340, EVALUE 1.00e-31; SWISSPROT HIT: Q15620, EVALUE 4.00e-20; EST_HUMAN HIT: AV700542.1, EVALUE 2.80e-02
tgggacataatgagtgtatacaacaaaggcttatagatagcctataccggtcatatgccatggcagccagaaggaaacattcagttactacaaaatggccaaaaaaccataactgggcaacacaaccaaagagattacttttttctccatgaagatatcagtcaacatcttgggaccgatggcagaagaggagcagacatccacaaaggacaagtggcagagagaaaagtacttgggggtctggagtcgagaatccatccaaataagagtgatcattcccaagtttcccggaacagtgacaagataaacaaagagaaat

SEQ ID NO: 23598 - DNA, 154 bp, Homo sapiens
  MAP TO CHR19.3; EXPRESSED IN BONE MARROW, SIGNAL = 0.99; EXPRESSED IN HEART, SIGNAL = 1.7; EXPRESSED IN LUNG, SIGNAL = 1.1; EXPRESSED IN BRAIN, SIGNAL = 1.3; EST_HUMAN HIT: AL523337.1, EVALUE 8.00e-81; SWISSPROT HIT: Q17239, EVALUE 2.00e+00; NT HIT: gi14759458, EVALUE 6.00e-81
agggcatggccttgcagcagcgagctggggaggagcgggcgcctgcccatgcccagtcattcctggcacagcagcggctggcaaccaattctcgccgtggacccttgggacgcctggcatctctgaaccttcgccccactgacaagcactgaca

SEQ ID NO: 23599 - DNA, 219 bp, Homo sapiens
  MAP TO CHR2.3; EXPRESSED IN BONE MARROW, SIGNAL = 1.1; EXPRESSED IN BRAIN, SIGNAL = 0.59; EST_HUMAN HIT: BI004162.1, EVALUE 1.00e-110; SWISSPROT HIT: P47241, EVALUE 3.00e-30; NT HIT: X69699.1, EVALUE 4.00e-95
cccagcttctcacctgctcgcctttggtgtggctgggggaggcataggcctctgggtagtgctgccgctcaaatgggcactcgagcggctcgaggtggtgctggctgaaggcatccgtgcgaaggtgctttcggggtccgctgctgctgctctgtgagtcaatgcttagtcggcagctatcctgatcacctggtaccccccgggaaggaagaaagcttt

SEQ ID NO: 23600 - DNA, 226 bp, Homo sapiens
  MAP TO CHR19.3; EXPRESSED IN BONE MARROW, SIGNAL = 2.9; EXPRESSED IN LUNG, SIGNAL = 5.2; EXPRESSED IN HELA, SIGNAL = 5.9; EXPRESSED IN HEART, SIGNAL =   4; EXPRESSED IN ADULT LIVER, SIGNAL = 5.7; EXPRESSED IN FETAL LIVER, SIGNAL = 4.6; EST_HUMAN HIT: BI825008.1, EVALUE 1.00e-118; SWISSPROT HIT: P53633, EVALUE 8.00e-04; NT HIT: AF112202.1, EVALUE 1.00e-117
gaggcactcacacacagtacaggatgaggcccaggaacacgaacacatagttgctctggtagtactccacgttgcgtacgaggcgctggcacagctctcccaggttgcggggccgtgagaagcgctgctggtccacgaaggtgctccagggccggatggtcgcgcggcgccgctccagccactcccggcctgcaccggagggaatcagcttcggcagcagggtcct

SEQ ID NO: 23601 - DNA, 383 bp, Homo sapiens
  MAP TO CHR6.3; EXPRESSED IN ADULT LIVER, SIGNAL = 1.2; EXPRESSED IN FETAL LIVER, SIGNAL = 0.54; EXPRESSED IN LUNG, SIGNAL = 0.67; EXPRESSED IN HEART, SIGNAL = 1.6; EXPRESSED IN BONE MARROW, SIGNAL = 0.92; EST_HUMAN HIT: BI758084.1, EVALUE 0.00e+00; SWISSPROT HIT: O95816, EVALUE 1.00e-66; NT HIT: gi6715587, EVALUE 0.00e+00
tttaggagaaagagaagaattaaatctgactgcaaaccgtttgatgggaagaactctcaccgttgaagtgtcagtagaaacaattagaaacccccagcagcaagaatccctaaagcatgccacaaggattattgatgaggtggtcaataagtttctggatgatttgggaaatgccaagagtcatttaatgtcgctctacagtgcatgttcatctgaggtgccacatgggccagttgatcagaagtttcaatccatagtaattggctgtgctcttgaagatcagaagaaaattaagagaagattagagactctgcttagaaatattgaaaactctgacaaggccatcaagctattagagcattctaaaggagctggttccaaaa

SEQ ID NO: 23602 - DNA, 197 bp, Homo sapiens
  MAP TO CHRX.3; EXPRESSED IN LUNG, SIGNAL =   2; EXPRESSED IN HEART, SIGNAL = 1.7; EXPRESSED IN BONE MARROW, SIGNAL = 1.4; EXPRESSED IN ADULT LIVER, SIGNAL = 1.8; EXPRESSED IN BRAIN, SIGNAL = 1.8; EST_HUMAN HIT: BI908202.1, EVALUE 1.00e-106; SWISSPROT HIT: Q9Y6K9, EVALUE 4.00e-32; NT HIT: AJ271718.1, EVALUE 1.00e-107
cctgttggatgaataggcacctctggaagagccaactgtgtgagatggtgcagcccagtggtggcccggcagcagatcaggacgtactgggcgaagagtctcctctggggaagccagccatgctgcacctgccttcagaacagggcgctcctgagaccctccagcgctgcctggaggagaatcaagagctccgaggt

SEQ ID NO: 23603 - DNA, 178 bp, Homo sapiens
  MAP TO CHR16.3; EXPRESSED IN BONE MARROW, SIGNAL = 1.6; EXPRESSED IN LUNG, SIGNAL = 1.5; EXPRESSED IN BRAIN, SIGNAL = 2.4; EXPRESSED IN FETAL LIVER, SIGNAL = 1.9; NT HIT: AF080524.1, EVALUE 8.00e-96; EST_HUMAN HIT: BI758176.1, EVALUE 3.00e-90; SWISSPROT HIT: Q9UQ90, EVALUE 3.00e-27
tccaggggcacaggacgacctgaggaaggtcacccgcatcgcctactccatggtgaagcagtttgggatggcacctggcatcgggcccatctccttccctgaggcgcaggagggcctcatgggcatcgggcggcgccccttcagccaaggcctgcagcagatgatggaccatgtgagt

SEQ ID NO: 23604 - DNA, 153 bp, Homo sapiens
  MAP TO CHR12.3; EXPRESSED IN BONE MARROW, SIGNAL = 1.9; EXPRESSED IN HEART, SIGNAL =   2; EXPRESSED IN BRAIN, SIGNAL = 3.6; NT HIT: gi4557452, EVALUE 5.00e-78; EST_HUMAN HIT: BG394104.1, EVALUE 8.00e-78; SWISSPROT HIT: Q14839, EVALUE 3.00e-28
actcacgcagtgtgggcagctccacttgccctcgggagccttctccatgtcgggatccaggcagaccatgtggtaagcacggggacaggtatcacacaggatgatctcaccgccttgctggcacacctcgcaatagtcctggtggtctgtctc

SEQ ID NO: 23605 - DNA, 491 bp, Homo sapiens
  MAP TO CHR2.3; EXPRESSED IN BRAIN, SIGNAL = 1.2; EXPRESSED IN BONE MARROW, SIGNAL = 1.1; EXPRESSED IN HEART, SIGNAL = 1.2; NT HIT: M11228.1, EVALUE 0.00e+00; SWISSPROT HIT: P04070, EVALUE 4.00e-95; EST_HUMAN HIT: BI253097.1, EVALUE 0.00e+00
gcccacagccctcaccccagctcaccaggcccaccaggaaccaggtgccgtggaaggaggcgaccatgggccccccactgtcgccctcgcaggcatcctgccggtccccgaggatgcccgcacacagcatgttctcagacaccatgttgctcatgacctcgctgcactcattgtgcgggaccacgggaatcttgatgaagttgaggacgaaggtgcggtttctcttggcctccttctctcggctgctgtggtagccccagcccgtcacgagggtctcctggccggcctgattgagctcgcgctctgcaaggccgctgtccgggaggcagatgggcactatggtctgcgagagggtggcgggctgggccaggtgcagcagtgcgatgtcattgtcggtggtgctcttgctgtagttggggtggacgaagacctccttgatgtccaggtccagctcccacttctcccagcgccgcaggtcatactctcctgca

SEQ ID NO: 23606 - DNA, 296 bp, Homo sapiens
  MAP TO CHRX.3; EXPRESSED IN LUNG, SIGNAL = 0.83; EXPRESSED IN PLACENTA, SIGNAL = 1.1; EXPRESSED IN HEART, SIGNAL = 1.4; EXPRESSED IN FETAL LIVER, SIGNAL = 1.4; EXPRESSED IN ADULT LIVER, SIGNAL = 1.3; EXPRESSED IN BRAIN, SIGNAL = 1.2; EXPRESSED IN BONE MARROW, SIGNAL = 1.3; EST_HUMAN HIT: BF985340.1, EVALUE 4.00e-01; NT HIT: gi13648689, EVALUE 0.00e+00; SWISSPROT HIT: P51841, EVALUE 2.00e-51
ggtttcagtaatcatcatgtgtatgcattcagctttgattgggggagagactcagatgcatctcttggaatgtgctcatgatctgaaaatgactgatggaacctacgtctttgttccttatgatgccctgctctacagtttaccttataagcacaccccctaccgggtcctaaggaacaacccaaagctccgggaagcctatgatgcagtgttgaccattacagtggagtcccaagaaaagaccttctatcaagccttcacagaggcagcagcaagaggtgaaattcctgagaagc

SEQ ID NO: 23607 - DNA, 207 bp, Homo sapiens
  MAP TO CHR10.3; EXPRESSED IN FETAL LIVER, SIGNAL = 1.1; EXPRESSED IN BRAIN, SIGNAL = 1.1; EXPRESSED IN BONE MARROW, SIGNAL = 1.7; EXPRESSED IN LUNG, SIGNAL =   2; SWISSPROT HIT: P09917, EVALUE 1.00e-36; EST_HUMAN HIT: BG759157.1, EVALUE 1.00e-113; NT HIT: J03571.1, EVALUE 1.00e-113
cttgaaaatggggtgcacagcaggcagctggcggtacattgcaatgccaaaaacctcagacaccagatgtgttcgcagaaggtgggtgatggtctggtggacgtggaagtcactggaacgcacccagattttggccaaaagccagtcgtattttgcatccgaagggaggaaaatagggttctcatctcccgggatttggttgagctg

SEQ ID NO: 23608 - DNA, 191 bp, Homo sapiens
  MAP TO CHR13.3; EXPRESSED IN BONE MARROW, SIGNAL = 0.82; EXPRESSED IN HEART, SIGNAL = 0.98; EXPRESSED IN ADULT LIVER, SIGNAL = 0.7; EXPRESSED IN FETAL LIVER, SIGNAL = 1.9; EXPRESSED IN BRAIN, SIGNAL = 0.82; SWISSPROT HIT: P02462, EVALUE 1.00e-06; EST_HUMAN HIT: AL570336.1, EVALUE 5.00e-98; NT HIT: M26566.1, EVALUE 1.00e-103
atgcccttacctggcaggccaggctggccctgaggtccgcggtctcctttgggcccctccgtggcatggcctggggatcccggtaaccccggctgtccctggggccccggaggacccatgaatccttgctctcctttggatccaggaattcctgggctcccggctaatcctgggaaacccacctcaccctt

SEQ ID NO: 23609 - DNA, 132 bp, Homo sapiens
  MAP TO CHR16.3; EXPRESSED IN HEART, SIGNAL = 1.9; EXPRESSED IN PLACENTA, SIGNAL = 1.4; EXPRESSED IN BONE MARROW, SIGNAL = 1.9; EXPRESSED IN BRAIN, SIGNAL = 2.2; SWISSPROT HIT: P56730, EVALUE 4.50e+00; EST_HUMAN HIT: AW663034.1, EVALUE 6.50e-01; NT HIT: AF077344.1, EVALUE 2.00e-68
cccattacctctcactcgacgtttgctgtgcttcctggcttttaatctggatgtgtggctggtggtctggtccaggagtaaggtgatcaccaggatgcaaattacaagtccattctttgccatggctctggg

SEQ ID NO: 23610 - DNA, 158 bp, Homo sapiens
  MAP TO CHR6.3; EXPRESSED IN HEART, SIGNAL = 1.2; EXPRESSED IN PLACENTA, SIGNAL = 1.3; EXPRESSED IN BONE MARROW, SIGNAL = 1.2; EXPRESSED IN ADULT LIVER, SIGNAL = 1.5; NT HIT: AJ009870.1, EVALUE 6.00e-84; SWISSPROT HIT: P56589, EVALUE 2.00e-17; EST_HUMAN HIT: BI771709.1, EVALUE 4.00e-64
tttcttttctctgtgaaggtttcacaagaagtactgtggctgtatacagtacctgtatgctggttgttcttttgcgggtccagttaaacataattggtggatatatttacctggataatgcagcagttggcaaaaatggcactgtaagtttaatagac

SEQ ID NO: 23611 - DNA, 143 bp, Homo sapiens
  MAP TO CHR14.3; EXPRESSED IN BONE MARROW, SIGNAL = 1.8; EXPRESSED IN PLACENTA, SIGNAL = 1.3; EXPRESSED IN HEART, SIGNAL = 1.8; EXPRESSED IN BRAIN, SIGNAL =   2; NT HIT: gi14751733, EVALUE 7.00e-71; SWISSPROT HIT: Q04228, EVALUE 5.90e+00; EST_HUMAN HIT: BI034249.1, EVALUE 7.10e-01
cttaccctacaccccagagatggagcaactactaggaataaaacttggctgcctgtttgccctgttggctctcactctgggctgtggccttactcccatctgcttcaaatggttccagattgatgcagccagaggtatagccc

SEQ ID NO: 23612 - DNA, 151 bp, Homo sapiens
  MAP TO CHR19.3; EXPRESSED IN LUNG, SIGNAL = 1.7; EXPRESSED IN HEART, SIGNAL =   2; EXPRESSED IN BONE MARROW, SIGNAL = 1.4; EXPRESSED IN FETAL LIVER, SIGNAL = 1.9; EXPRESSED IN ADULT LIVER, SIGNAL = 2.1; EST_HUMAN HIT: BI754386.1, EVALUE 9.00e-53; NT HIT: gi14763065, EVALUE 9.00e-80; SWISSPROT HIT: Q9QXW9, EVALUE 2.00e-10
ccccggccttacacatggcctctctactgtgcccacccagaccttcggggagaagctgctgggctacttttcttgggtcatgcctgtctccgtggctctgtcaaccttcggagggatcaatggttacctgttcacctactccaggtgactg

SEQ ID NO: 23613 - DNA, 150 bp, Homo sapiens
  MAP TO CHR12.3; EXPRESSED IN LUNG, SIGNAL = 0.88; EXPRESSED IN BONE MARROW, SIGNAL = 0.97; EXPRESSED IN ADULT LIVER, SIGNAL = 0.72; EXPRESSED IN BRAIN, SIGNAL = 1.2; NT HIT: gi4504820, EVALUE 3.00e-79; SWISSPROT HIT: P22653, EVALUE 5.80e+00
ttctcagagccaaatactctttgtgcaagtgccttcctgagcagaagaactggagaaagggaaccacagagccaggaggaatgtctgagcagagtcaagcaactggcttgaccacagtctgaagcaaggtgccacttaaacagatactgt

SEQ ID NO: 23614 - DNA, 177 bp, Homo sapiens
  MAP TO CHR1.3; EXPRESSED IN BONE MARROW, SIGNAL = 0.98; EXPRESSED IN BRAIN, SIGNAL = 0.72; EXPRESSED IN ADULT LIVER, SIGNAL = 0.57; EXPRESSED IN LUNG, SIGNAL = 0.95; EXPRESSED IN HEART, SIGNAL = 0.79; EXPRESSED IN PLACENTA, SIGNAL = 0.81; SWISSPROT HIT: O15457, EVALUE 3.00e-28; NT HIT: gi16159131, EVALUE 8.00e-93
taggtttggaatcatacttgaaaagattaaaacagtaattaatgatgatgcaagatacatgaaaggatgcctaaacatgaggactcagaagtgctatgcagtgaggtctaacataaatgaatttcttgacatagcaagaagaacatacacagagattgtagatgacatagcaggtaa

SEQ ID NO: 23615 - DNA, 243 bp, Homo sapiens
  MAP TO CHR15.3; EXPRESSED IN BONE MARROW, SIGNAL = 1.2; EXPRESSED IN LUNG, SIGNAL = 1.4; EXPRESSED IN HEART, SIGNAL = 1.1; EXPRESSED IN BRAIN, SIGNAL = 1.6; SWISSPROT HIT: P15442, EVALUE 2.00e-03; EST_HUMAN HIT: BG035829.1, EVALUE 0.00e+00; NT HIT: gi16191888, EVALUE 0.00e+00
agaaatcagtcatctcctggctgttgaaccacgatccagcaaaacggcccacagccacagaactgctcaagagtgagctgctgcccccaccccagatggaggagtcagagctgcatgaagtgctgcaccacacgctgaccaacgtggatgggaaggcctaccgcaccatgatggcccagatcttctcgcagcgcatctcccctgccatcgattacacctatgacagcgacatactgaaggtgg

SEQ ID NO: 23616 - DNA, 122 bp, Homo sapiens
  MAP TO CHR6.3; EXPRESSED IN LUNG, SIGNAL =   2; EXPRESSED IN HEART, SIGNAL = 2.8; EXPRESSED IN PLACENTA, SIGNAL = 2.9; EXPRESSED IN BONE MARROW, SIGNAL = 3.4; EXPRESSED IN BRAIN, SIGNAL =   3; EXPRESSED IN FETAL LIVER, SIGNAL = 3.9; NT HIT: gi14766908, EVALUE 2.00e-55; SWISSPROT HIT: O15540, EVALUE 5.00e-14; EST_HUMAN HIT: N46862.1, EVALUE 2.00e-62
acttaccataaccattttgccatccttaatttctcttacaaaatttgtttctttgccatcccatttctgtatgtgaacaagtttgtctccatccaggctaacaacagactgagaccaacaac

SEQ ID NO: 23617 - DNA, 145 bp, Homo sapiens
  MAP TO CHR8.3; EXPRESSED IN FETAL LIVER, SIGNAL =   4; EXPRESSED IN BRAIN, SIGNAL = 2.5; EXPRESSED IN HEART, SIGNAL =   3; EXPRESSED IN PLACENTA, SIGNAL = 2.6; EXPRESSED IN BONE MARROW, SIGNAL = 3.5; EST_HUMAN HIT: BE407508.1, EVALUE 2.00e-63; NT HIT: AJ249601.1, EVALUE 1.00e-66; SWISSPROT HIT: P10717, EVALUE 4.50e+00
caggaggccaagacctggctgaacattgcactgtcccgcgaggaggccggcgatgcctacgagctgctggccccgtgcttccagaaagcgctcagctgtgcccagcaggcccagcgtccccagctgcaggtgcgagagcccatcc

SEQ ID NO: 23618 - DNA, 285 bp, Homo sapiens
  MAP TO CHR12.3; EXPRESSED IN ADULT LIVER, SIGNAL =   1; EXPRESSED IN BRAIN, SIGNAL =   1; EXPRESSED IN BONE MARROW, SIGNAL = 0.77; SWISSPROT HIT: P37023, EVALUE 3.00e-50; EST_HUMAN HIT: C17679.1, EVALUE 0.00e+00; NT HIT: U77710.1, EVALUE 0.00e+00
acaggcttcatcgcctcagacatgacctcccgcaactcgagcacgcagctgtggctcatcacgcactaccacgagcacggctccctctacgactttctgcagagacagacgctggagccccatctggctctgaggctagctgtgtccgcggcatgcggcctggcgcacctgcacgtggagatcttcggtacacagggcaaaccagccattgcccaccgcgacttcaagagccgcaatgtgctggtcaagagcaacctgcagtgttgcatcgccgacctgggtgag

SEQ ID NO: 23619 - DNA, 200 bp, Homo sapiens
  MAP TO CHR1.3; EXPRESSED IN LUNG, SIGNAL = 3.2; EXPRESSED IN HELA, SIGNAL = 1.9; EXPRESSED IN BONE MARROW, SIGNAL = 2.8; NT HIT: U57623.1, EVALUE 1.00e-109; SWISSPROT HIT: P05413, EVALUE 2.00e-27; EST_HUMAN HIT: BG336702.1, EVALUE 1.00e-108
cccctaccctcaggtgtgggttttgctaccaggcaggtggccagcatgaccaagcctaccacaatcatcgaaaagaatggggacattctcaccctaaaaacacacagcaccttcaagaacacagagatcagctttaagttgggggtggagttcgatgagacaacagcagatgacaggaaggtcaaggtaagtcagggaaa

SEQ ID NO: 23620 - DNA, 113 bp, Homo sapiens
  MAP TO CHR6.3; EXPRESSED IN LUNG, SIGNAL = 0.61; EXPRESSED IN PLACENTA, SIGNAL = 0.89; EXPRESSED IN ADULT LIVER, SIGNAL =   1; EXPRESSED IN BONE MARROW, SIGNAL = 0.87; NT HIT: AF091149.1, EVALUE 3.00e-57; EST_HUMAN HIT: AA782779.1, EVALUE 7.00e-25
tctctttttctggggttggtagaaagaggccatttgtctcttgatggcgcttcttctagcttctgtctctgatttgctctctggtcttggatgatcatgaactcccttggcct

SEQ ID NO: 23621 - DNA, 177 bp, Homo sapiens
  MAP TO CHR1.3; EXPRESSED IN LUNG, SIGNAL = 2.2; EXPRESSED IN HEART, SIGNAL = 1.5; EXPRESSED IN BONE MARROW, SIGNAL = 2.3; EXPRESSED IN BRAIN, SIGNAL = 1.4; EXPRESSED IN FETAL LIVER, SIGNAL = 2.2; EST_HUMAN HIT: BI911241.1, EVALUE 1.00e-92; NT HIT: L42621.1, EVALUE 6.00e-75; SWISSPROT HIT: Q01965, EVALUE 3.00e-11
agctgctcctccaagtccctcttctatctctgcaggactaagagcctctggaaaggactcagccccaacagtggtgtcagggatcctagggggttccgtgactctccccctaaacatctcagtagacacagagattgagaacgtcatctggattggtcccaaaaatgctcttgcttt

SEQ ID NO: 23622 - DNA, 166 bp, Homo sapiens
  MAP TO CHR4.3; EXPRESSED IN BONE MARROW, SIGNAL = 4.2; EXPRESSED IN LUNG, SIGNAL = 2.4; EXPRESSED IN HEART, SIGNAL = 2.1; EXPRESSED IN PLACENTA, SIGNAL = 2.2; EXPRESSED IN ADULT LIVER, SIGNAL = 3.2; EXPRESSED IN BRAIN, SIGNAL = 3.4; SWISSPROT HIT: P27674, EVALUE 2.00e-10; EST_HUMAN HIT: BI517809.1, EVALUE 2.00e-84; NT HIT: gi14733412, EVALUE 7.00e-87
acctcccaagaacctttccaatcatcttcacaattaacgtccccacaagtccaccgatggcgaatatggacacagtcacagaccagagcaaagtcagagtgtctgggtctattggacgtccatgccttctttcccatgactcattgtaaaaggccttgatgtactg

SEQ ID NO: 23623 - DNA, 162 bp, Homo sapiens
  MAP TO CHR2.3; EXPRESSED IN FETAL LIVER, SIGNAL = 3.7; EXPRESSED IN ADULT LIVER, SIGNAL = 6.6; EXPRESSED IN BRAIN, SIGNAL = 1.3; EXPRESSED IN LUNG, SIGNAL = 1.2; EXPRESSED IN HEART, SIGNAL = 1.7; EXPRESSED IN BONE MARROW, SIGNAL = 1.3; NT HIT: gi14724919, EVALUE 2.00e-81; SWISSPROT HIT: P31327, EVALUE 2.00e-18; EST_HUMAN HIT: BG566490.1, EVALUE 4.00e-86
atttaattttagccacaaatcatcaaaatgacgaggattttgacagctttcaaagtggtgaggacactgaagactggttttggctttaccaatgtgactgcacaccaaaaatggaaattttcaagacctggcatcaggctcctttctgtcaaggtaataccc

SEQ ID NO: 23624 - DNA, 429 bp, Homo sapiens
  MAP TO CHR1.3; EXPRESSED IN FETAL LIVER, SIGNAL = 0.84; EXPRESSED IN BONE MARROW, SIGNAL = 0.79; EXPRESSED IN HEART, SIGNAL = 0.82; EXPRESSED IN PLACENTA, SIGNAL = 1.5; NT HIT: X68485.1, EVALUE 0.00e+00; SWISSPROT HIT: P30542, EVALUE 9.00e-50; EST_HUMAN HIT: BI831014.1, EVALUE 0.00e+00
cacaggtgcttgcctcgtgccccttggtgcccgtctgctgatgtgcccagcctgtgcccgccatgccgccctccatctcagctttccaggccgcctacatcggcatcgaggtgctcatcgccctggtctctgtgcccgggaacgtgctggtgatctgggcggtgaaggtgaaccaggcgctgcgggatgccaccttctgcttcatcgtgtcgctggcggtggctgatgtggccgtgggtgccctggtcatccccctcgccatcctcatcaacattgggccacagacctacttccacacctgcctcatggttgcctgtccggtcctcatcctcacccagagctccatcctggccctgctggcaattgctgtggaccgctacctccgggtcaagatccctctccggtgagtccacagcgccgaaggtactc

SEQ ID NO: 23625 - DNA, 205 bp, Homo sapiens
  MAP TO CHR4.3; EXPRESSED IN BRAIN, SIGNAL =   2; EXPRESSED IN BONE MARROW, SIGNAL = 1.4; EXPRESSED IN LUNG, SIGNAL = 0.87; EXPRESSED IN HEART, SIGNAL = 0.85; NT HIT: U63798.1, EVALUE 1.00e-112; SWISSPROT HIT: Q16585, EVALUE 5.00e-32; EST_HUMAN HIT: AL522583.1, EVALUE 1.00e-102
tgtggcaacttacaggctggttgttgccagtgatgaccaaattttcatttcgccttcctcctactgtgcttttataaagagggtggatcactcccatgtcagatacttgcttaaatcgaagcaggccactttcatgaaactccatactatcacagccatttggtccaatgcgaatcacggcccaaataacaagtgttatctgaaa

SEQ ID NO: 23626 - DNA, 169 bp, Homo sapiens
  MAP TO CHR6.3; EXPRESSED IN BONE MARROW, SIGNAL =   1; SWISSPROT HIT: P26640, EVALUE 5.00e-27; EST_HUMAN HIT: BG469119.1, EVALUE 6.00e-85; NT HIT: gi16174853, EVALUE 4.00e-85
tacacaccggatgttgtccatccaggcatgccatgtgcgctgatgggcctcaggcaggatgcggaggtcaccccgagtcacagcggcgctggcagcctgggccatctccccgcagcgaacgtaccactgcggccgcagcagaggctctaccacgtccttcgaccggctg

SEQ ID NO: 23627 - DNA, 156 bp, Homo sapiens
  MAP TO CHR12.3; EXPRESSED IN BONE MARROW, SIGNAL = 5.1; EXPRESSED IN ADULT LIVER, SIGNAL = 2.8; EXPRESSED IN BRAIN, SIGNAL =  35; NT HIT: AF081484.1, EVALUE 9.00e-80; SWISSPROT HIT: P36220, EVALUE 1.00e-23; EST_HUMAN HIT: BF240622.1, EVALUE 3.00e-80
ttaccagcttgcgaattcggtccaacacaaggtcaatgatctccttgccaatggtgtagtgccctcgggcatagttattggcagcatcttccttgcctgtgatgagctgctcagggtggaagagctggcggtaggtgccagtgcgaacttcatctg

SEQ ID NO: 23628 - DNA, 140 bp, Homo sapiens
  MAP TO CHR17.3; EXPRESSED IN LUNG, SIGNAL = 0.8; EXPRESSED IN BRAIN, SIGNAL = 1.3; EXPRESSED IN BONE MARROW, SIGNAL =   1; SWISSPROT HIT: P75063, EVALUE 2.70e-02; EST_HUMAN HIT: BF309766.1, EVALUE 2.00e-62; NT HIT: gi16164704, EVALUE 2.00e-62
gtggcatcatggcggctcagaaagatctctgggacgccattgtgattggggcggggatccagggctgcttcactgcataccacctggccaaacacaggaagaggatcctcctgctggagcaggtactgtgtcccttctgc

SEQ ID NO: 23629 - DNA, 144 bp, Homo sapiens
  MAP TO CHR2.3; EXPRESSED IN PLACENTA, SIGNAL = 0.51; EXPRESSED IN BONE MARROW, SIGNAL = 0.67; EXPRESSED IN LUNG, SIGNAL = 1.3; EXPRESSED IN ADULT LIVER, SIGNAL = 0.39; EXPRESSED IN BRAIN, SIGNAL = 1.2; NT HIT: gi14736960, EVALUE 6.00e-56; SWISSPROT HIT: P31406, EVALUE 3.40e+00; EST_HUMAN HIT: BG025168.1, EVALUE 9.00e-56
caacatacctttcattgtcacattaacaccagatgctaaaaataagcctccaaaccggttgttaaaaatctgattgccttctagtgttgcagttgcgtgatttgtaatttcaatacctgaagtaaaatttacaaacaagtagat

SEQ ID NO: 23630 - DNA, 169 bp, Homo sapiens
  MAP TO CHR1.3; EXPRESSED IN BONE MARROW, SIGNAL = 0.78; EXPRESSED IN LUNG, SIGNAL = 0.67; EXPRESSED IN PLACENTA, SIGNAL =   1; EXPRESSED IN HEART, SIGNAL = 1.4; EXPRESSED IN FETAL LIVER, SIGNAL = 0.34; EXPRESSED IN ADULT LIVER, SIGNAL = 1.4; EXPRESSED IN BRAIN, SIGNAL = 1.3; EST_HUMAN HIT: BE840758.1, EVALUE 6.00e-82; NT HIT: J03565.1, EVALUE 2.00e-84; SWISSPROT HIT: P20023, EVALUE 5.00e-28
ctttcatttagaatgccaggcccctcctaacatcctcaatgggcaaaaggaagatagacacatggtccgctttgaccctggaacatctataaaatatagctgtaaccctggctatgtgctggtgggagaagaatccatacagtgtacctctgagggggtgtggacaccc

SEQ ID NO: 23631 - DNA, 287 bp, Homo sapiens
  MAP TO CHR16.3; EXPRESSED IN LUNG, SIGNAL = 2.4; EXPRESSED IN HELA, SIGNAL = 3.1; EXPRESSED IN BONE MARROW, SIGNAL = 2.8; EXPRESSED IN BRAIN, SIGNAL =   4; EXPRESSED IN ADULT LIVER, SIGNAL = 3.1; SWISSPROT HIT: Q99732, EVALUE 1.70e-01; EST_HUMAN HIT: BF525861.1, EVALUE 1.00e-109; NT HIT: gi7019336, EVALUE 0.00e+00
ttccaggtttctaccctcctccaggcccccacccacccatgggctactaccccccagggccctacacgccagggccctaccctggccctgggggccacacagccacagtcctggtcccttcaggagctgccaccacggtgacagtgctgcagggagagatctttgagggagcgcctgtgcagacggtgtgtccccactgccagcaggccatcaccaccaagatctcctacgagattggcttgatgaatttcgtgctgggtttcttctgttgcttcatggggtaggtg

SEQ ID NO: 23632 - DNA, 115 bp, Homo sapiens
  MAP TO CHR17.3; EXPRESSED IN HEART, SIGNAL = 2.6; EXPRESSED IN PLACENTA, SIGNAL =   5; EXPRESSED IN BONE MARROW, SIGNAL = 2.9; EXPRESSED IN FETAL LIVER, SIGNAL = 2.1; EXPRESSED IN ADULT LIVER, SIGNAL = 2.1; EXPRESSED IN BRAIN, SIGNAL = 2.5; NT HIT: U29464.1, EVALUE 2.00e-55; SWISSPROT HIT: P49447, EVALUE 1.00e-15; EST_HUMAN HIT: BF332630.1, EVALUE 7.00e-56
gactcacctgcacaaagtacaggacaaagacaaggatcccgcaccagctgtgtaggctgtacaggtcagcgtagcccttcttcctgtggtagtcgaacaccgccaccaagcctgg

SEQ ID NO: 23633 - DNA, 127 bp, Homo sapiens
  MAP TO CHR17.3; EXPRESSED IN BONE MARROW, SIGNAL = 1.6; EXPRESSED IN HEART, SIGNAL = 0.86; EXPRESSED IN FETAL LIVER, SIGNAL = 0.83; EXPRESSED IN ADULT LIVER, SIGNAL = 0.81; EXPRESSED IN BRAIN, SIGNAL = 1.3; NT HIT: AJ277557.1, EVALUE 2.00e-65; SWISSPROT HIT: O43524, EVALUE 2.70e+00; EST_HUMAN HIT: BI255109.1, EVALUE 1.00e-63
tccagtatgcctgggtggagaagtactttggccctgactttctggagcagattgtgctgaccagagacaagaccgtggtctctgctgaccttctcatagacgaccggccggacatcacaggcaagtg

SEQ ID NO: 23634 - DNA, 300 bp, Homo sapiens
  MAP TO CHR6.3; EXPRESSED IN BRAIN, SIGNAL = 2.6; EXPRESSED IN ADULT LIVER, SIGNAL = 4.8; EXPRESSED IN BONE MARROW, SIGNAL =   2; SWISSPROT HIT: Q92504, EVALUE 1.00e-19; EST_HUMAN HIT: BG260253.1, EVALUE 0.00e+00; NT HIT: AF117221.1, EVALUE 0.00e+00
tttctcttttctgcccatcaggcgatgcgtctgcaactactgacagcagtaggggcactggcaggcacagcctgtgcccttctcactgaaggaggagcagtgggcagtgaaattgcaggtggtgcaggtcctggctgggtcctgccatttactgcaggtggctttatctacgtagcaacagtgtctgtgttgcccgagctgctgagggaggcatcaccattgcaatcacttctggaggtgctggggctgctggggggagttatcatgatggtgctgattgcccaccttgagtgaggggtg

SEQ ID NO: 23635 - DNA, 134 bp, Homo sapiens
  MAP TO CHR14.3; EXPRESSED IN BONE MARROW, SIGNAL = 1.4; NT HIT: gi14249159, EVALUE 1.00e-69; SWISSPROT HIT: P51004, EVALUE 3.00e-20; EST_HUMAN HIT: BE890146.1, EVALUE 2.00e-69
gccacaacatctattccaatatattaggtttcctcggtggtgtttcctgggctatgctagtagcaagaacttgccagctttatccaaatgcaatagcatcaactcttgtacataaatttttcttggtattttct

SEQ ID NO: 23636 - DNA, 410 bp, Homo sapiens
  MAP TO CHR6.3; EXPRESSED IN BONE MARROW, SIGNAL = 1.9; EXPRESSED IN HEART, SIGNAL = 0.91; EXPRESSED IN HELA, SIGNAL = 3.9; EXPRESSED IN PLACENTA, SIGNAL = 1.7; EXPRESSED IN ADULT LIVER, SIGNAL = 0.93; EXPRESSED IN BRAIN, SIGNAL = 1.5; NT HIT: U91328.1, EVALUE 0.00e+00; SWISSPROT HIT: P16106, EVALUE 8.00e-72; EST_HUMAN HIT: BF094056.1, EVALUE 1.00e-112
gtcatggctcgcactaagcaaactgctcggaagtctactggtggcaaggcgccacgcaaacagttggccactaaggcagcccgcaaaagcgctccggccaccggcggcgtgaaaaagccccaccgctaccggccgggcaccgtggctctgcgcgagatccgccgttatcagaagtccactgaactgcttattcgtaaactacctttccagcgcctggtgcgcgagattgcgcaggactttaaaacagacctgcgtttccagagctccgctgtgatggctctgcaggaggcgtgcgaggcctacttggtagggctatttgaggacactaacctgtgcgccatccacgccaagcgcgtcactatcatgcccaaggacatccagctcgcccgccgcatccgcggagagagggc

SEQ ID NO: 23637 - DNA, 183 bp, Homo sapiens
  MAP TO CHR12.3; EXPRESSED IN PLACENTA, SIGNAL = 0.57; EXPRESSED IN LUNG, SIGNAL = 0.54; EXPRESSED IN HEART, SIGNAL = 0.64; EXPRESSED IN ADULT LIVER, SIGNAL = 0.68; EXPRESSED IN BRAIN, SIGNAL = 0.68; EXPRESSED IN BONE MARROW, SIGNAL = 1.2; NT HIT: gi16187985, EVALUE 2.00e-87; SWISSPROT HIT: Q00872, EVALUE 6.00e-27; EST_HUMAN HIT: AU121097.1, EVALUE 7.00e-85
tctacagtgaaacctctgaagattttgactcctctgactgatcagactgtaaatcttggaaaagaaatctgcctgaagtgtgaaatctctgaaaacataccaggaaaatggactaaaaatggcctacctgttcaggagagtgaccgtctaaaggtggttcacaagggaaggtaagcgagccag

SEQ ID NO: 23638 - DNA, 149 bp, Homo sapiens
  MAP TO CHR11.3; EXPRESSED IN LUNG, SIGNAL = 1.1; EXPRESSED IN HEART, SIGNAL = 1.5; EXPRESSED IN BRAIN, SIGNAL = 1.3; EXPRESSED IN PLACENTA, SIGNAL = 1.8; EXPRESSED IN BONE MARROW, SIGNAL = 1.9; NT HIT: L05921.1, EVALUE 3.00e-76; SWISSPROT HIT: P02735, EVALUE 4.00e-22; EST_HUMAN HIT: BF836858.1, EVALUE 1.00e-73
gttacgtgatcacttctgcagcccaggcacccccaggtccccttttggcagcatcatagttcccccgagcatggaagtatttgtctgagccgatgtaattggcttctctcatgtcagagtaggctctccacatgtcccgagcccctgga

SEQ ID NO: 23639 - DNA, 151 bp, Homo sapiens
  MAP TO CHR9.3; EXPRESSED IN BONE MARROW, SIGNAL = 1.3; EXPRESSED IN LUNG, SIGNAL = 2.4; EXPRESSED IN PLACENTA, SIGNAL = 1.6; EXPRESSED IN ADULT LIVER, SIGNAL = 2.2; NT HIT: gi14744287, EVALUE 1.00e-75; SWISSPROT HIT: P40306, EVALUE 9.00e-07; EST_HUMAN HIT: BE875279.1, EVALUE 2.00e-75
ttcagttgttgtggtgctgggacagctgcagacacagacatgacaacccagctcatttcttccaacctggagctccactccctctccactggccgtcttcccagagttgtgacagccaatcggatgctgaagcagatgcttttcaggtaag

SEQ ID NO: 23640 - DNA, 123 bp, Homo sapiens
  MAP TO CHR15.3; EXPRESSED IN HEART, SIGNAL =   5; EXPRESSED IN FETAL LIVER, SIGNAL = 6.2; EXPRESSED IN ADULT LIVER, SIGNAL =   6; EXPRESSED IN BRAIN, SIGNAL = 8.1; EXPRESSED IN HELA, SIGNAL = 6.3; EXPRESSED IN BONE MARROW, SIGNAL = 5.7; NT HIT: AJ278974.1, EVALUE 4.00e-63; SWISSPROT HIT: O00161, EVALUE 3.00e-15; EST_HUMAN HIT: BF182860.1, EVALUE 8.00e-62
tgatagcataactaatgatgccagagaagatgaaatggaagagaacctgactcaagtgggcagtatcctgggaaatctaaaagacatggccctgaacataggcaatgagattgatgctcaaaa

SEQ ID NO: 23641 - DNA, 121 bp, Homo sapiens
  MAP TO CHR1.3; EXPRESSED IN HELA, SIGNAL = 3.1; EXPRESSED IN BONE MARROW, SIGNAL = 3.3; EXPRESSED IN LUNG, SIGNAL = 3.5; EXPRESSED IN HEART, SIGNAL = 2.5; EXPRESSED IN FETAL LIVER, SIGNAL = 8.6; NT HIT: gi14780959, EVALUE 5.00e-62; SWISSPROT HIT: Q13228, EVALUE 9.00e-18; EST_HUMAN HIT: BI045967.1, EVALUE 1.00e-60
acctgtcctgtgaggcggggtctctgtgggtcagagatgtcatactgcctcaggtccccatgcagccagttgctgaagtagaggaagcggtcgtccagggagagcaggatgtcggtgatca

SEQ ID NO: 23642 - DNA, 152 bp, Homo sapiens
  MAP TO CHR19.3; EXPRESSED IN HELA, SIGNAL = 2.6; EXPRESSED IN BONE MARROW, SIGNAL = 2.2; EXPRESSED IN HEART, SIGNAL = 1.9; EXPRESSED IN FETAL LIVER, SIGNAL = 3.2; SWISSPROT HIT: Q92947, EVALUE 2.00e-22; NT HIT: AF012339.1, EVALUE 2.00e-80; EST_HUMAN HIT: AL535714.1, EVALUE 2.00e-78
caccttcgttgcgattggccaacaggatgcgaggcatgagtctctcctggcagtaggtgcggaaggtgtccctgatgaggatctcatctgtggtcagctgctcctccagcaccagcgggtcctgccagtcaaactcgggacgcgaggctggg

SEQ ID NO: 23643 - DNA, 190 bp, Homo sapiens
  MAP TO CHR16.3; EXPRESSED IN ADULT LIVER, SIGNAL = 1.2; EXPRESSED IN BRAIN, SIGNAL = 1.2; EXPRESSED IN BONE MARROW, SIGNAL = 1.3; EXPRESSED IN PLACENTA, SIGNAL = 0.98; EXPRESSED IN HEART, SIGNAL = 1.2; SWISSPROT HIT: P40313, EVALUE 6.00e-31; NT HIT: X71874.1, EVALUE 1.00e-103; EST_HUMAN HIT: BI521986.1, EVALUE 1.00e-98
ccacaggccattacacaccctagctggaactctaccaccatgaacaatgacgtgacgctgctgaagctcgcctcgccagcccagtacacaacacgcatctcgccagtttgcctggcatcctcaaacgaggctctgactgaaggcctcacgtgtgtcaccaccggctggggtcgcctcagtggcgtgggta

SEQ ID NO: 23644 - DNA, 203 bp, Homo sapiens
  MAP TO CHR19.3; EXPRESSED IN HEART, SIGNAL =  19; EXPRESSED IN HELA, SIGNAL =  32; EXPRESSED IN BONE MARROW, SIGNAL = 8.3; EXPRESSED IN BRAIN, SIGNAL =  10; SWISSPROT HIT: Q29308, EVALUE 5.00e-30; NT HIT: AF092907.1, EVALUE 1.00e-110; EST_HUMAN HIT: BF245330.1, EVALUE 1.00e-101
accctgcttacccatcttggtccttttccaccattttcagcccctccagggcttggaggacccggcgggccacactcttggagcctcggctgaagtggctgggcatgacgccgtttctctgacgtcccccatagatcttggtcatggagccaaccccagcgccaccccggaggtacaggtgccgcgctgtggaagctgggggt

SEQ ID NO: 23645 - DNA, 135 bp, Homo sapiens
  MAP TO CHR2.3; EXPRESSED IN BONE MARROW, SIGNAL = 1.3; EXPRESSED IN BRAIN, SIGNAL = 2.4; EST_HUMAN HIT: BG566814.1, EVALUE 2.00e-68; SWISSPROT HIT: Q64433, EVALUE 9.00e-18; NT HIT: AJ250915.1, EVALUE 3.00e-70
gttgcttgcaatacttttccttgagatttttctggaagcataatgcctcctttggttacagtttcagcagcactcctttcaaccaatactcggtcaaagagtggaagaaactttctaaacgcttgtcctgcctgt

SEQ ID NO: 23646 - DNA, 146 bp, Homo sapiens
  MAP TO CHR2.3; EXPRESSED IN FETAL LIVER, SIGNAL = 0.93; EXPRESSED IN BRAIN, SIGNAL = 0.5; EXPRESSED IN LUNG, SIGNAL = 1.5; EXPRESSED IN HEART, SIGNAL = 0.58; EXPRESSED IN BONE MARROW, SIGNAL = 0.9; EST_HUMAN HIT: AU122649.1, EVALUE 2.00e-63; SWISSPROT HIT: P27487, EVALUE 2.00e-20; NT HIT: U13725.1, EVALUE 8.00e-77
acttaccggaacatctcagctgataatacttcgcctctttactgaatgacacagaatagtactgacacctttccggattcagctcacaactgaggcatgtcacttttgtatagtcactaagttggattctgtaaaaccaacggtgg

SEQ ID NO: 23647 - DNA, 142 bp, Homo sapiens
  MAP TO CHR14.3; EXPRESSED IN BRAIN, SIGNAL = 1.8; EXPRESSED IN FETAL LIVER, SIGNAL = 2.1; EXPRESSED IN BONE MARROW, SIGNAL = 1.9; EXPRESSED IN HEART, SIGNAL = 1.6; SWISSPROT HIT: P11277, EVALUE 2.00e-22; NT HIT: gi14752252, EVALUE 2.00e-74; EST_HUMAN HIT: BE791320.1, EVALUE 3.00e-74
atgttctctagccacccttcatgggaagccagctctgccacaaacgcctggtgctttagccatttattgtgaaggtttcgtgcttcatcataggagacatcctgagatgtcagcagcttgtcgttgatccagagagtgagct

SEQ ID NO: 23648 - DNA, 175 bp, Homo sapiens
  MAP TO CHR10.3; EXPRESSED IN BRAIN, SIGNAL = 1.5; EXPRESSED IN LUNG, SIGNAL = 3.1; EXPRESSED IN PLACENTA, SIGNAL = 1.1; EXPRESSED IN HEART, SIGNAL = 1.6; EXPRESSED IN BONE MARROW, SIGNAL = 1.7; EST_HUMAN HIT: BF569360.1, EVALUE 4.00e-89; SWISSPROT HIT: Q9NR30, EVALUE 1.00e-25; NT HIT: AF261911.1, EVALUE 5.00e-94
ttggcaggatgctcagtccttgcatggagacattccacagaagcaaagggaaatcaccctgaaaggttttagaaatggtagttttggagttttggtggcaaccaatgttgctgcacgtgggttagacatccctgaggttgatttggttatacaaagctctccaccaaaggtatgt

SEQ ID NO: 23649 - DNA, 111 bp, Homo sapiens
  MAP TO CHR19.3; EXPRESSED IN BONE MARROW, SIGNAL = 0.85; SWISSPROT HIT: Q02386, EVALUE 3.00e-17; NT HIT: gi13632813, EVALUE 5.00e-56; EST_HUMAN HIT: BE166260.1, EVALUE 7.00e-56
tgtatggtctctctcctgtgtggaccctctggtgggcttgaaggtaggatctctgtctgaagcgcttaccacacacatcacatcggtatggtttttctcctgtgtggactc

SEQ ID NO: 23650 - DNA, 166 bp, Homo sapiens
  MAP TO CHR16.3; EXPRESSED IN BONE MARROW, SIGNAL = 1.5; EXPRESSED IN BRAIN, SIGNAL = 1.3; EXPRESSED IN ADULT LIVER, SIGNAL = 3.6; SWISSPROT HIT: O60504, EVALUE 1.50e+00; NT HIT: gi14776423, EVALUE 7.00e-87; EST_HUMAN HIT: BI826461.1, EVALUE 6.00e-88
ccaggtcagccatgtcatctgagcctcccccaccaccacagccccccacccatcaagcttcagtcgggctgctggacacccctcggagccgtgagcgctcaccatcccctctgcggggcaacgtggtcccaagcccactgcccactcgccggacgaggaccttctc

SEQ ID NO: 23651 - DNA, 186 bp, Homo sapiens
  MAP TO CHR11.3; EXPRESSED IN ADULT LIVER, SIGNAL = 1.6; EXPRESSED IN FETAL LIVER, SIGNAL = 0.9; EXPRESSED IN LUNG, SIGNAL = 1.4; EXPRESSED IN BONE MARROW, SIGNAL = 1.6; EXPRESSED IN HEART, SIGNAL =   2; SWISSPROT HIT: Q00106, EVALUE 7.40e+00; NT HIT: gi16181828, EVALUE 4.00e-98; EST_HUMAN HIT: BF792065.1, EVALUE 1.00e-100
ccgctgctgttgcagccaatagagcatctccactttgtcactcttcatcttgtccaggtagggccgccccttgaagatcactggctcgccaaagattaactctatctcctccaggagggaaaccaaagaagactccattaagttgagcttcctgtggagatggcttcggacctgattctcctccag

SEQ ID NO: 23652 - DNA, 363 bp, Homo sapiens
  MAP TO CHR12.3; EXPRESSED IN LUNG, SIGNAL = 1.7; EXPRESSED IN BONE MARROW, SIGNAL =   1; EXPRESSED IN ADULT LIVER, SIGNAL = 1.1; EXPRESSED IN BRAIN, SIGNAL = 1.2; EST_HUMAN HIT: BF735959.1, EVALUE 2.00e-59; SWISSPROT HIT: Q9P0K8, EVALUE 1.00e-53; NT HIT: gi14765906, EVALUE 0.00e+00
ttctctgcagaacccagaagtaccatggcttctgacctagagagtagcctcacctccatagactggctcccccagctgaccctccgagctaccattgagaagcttggaagtgcctcccaggctgggcctcccgggagcagccgcaagtgttcaccagggtcacccacagatcctaatgccaccctgagcaaagacgaggcagcagtgcaccaggacggcaagccacgatacagctatgccactctcatcacctatgccatcaactcctctccagccaagaagatgaccctcagcgagatttaccgctggatctgtgataacttcccctattacaagaatgctggcattggttggaaggtggga

SEQ ID NO: 23653 - DNA, 175 bp, Homo sapiens
  MAP TO CHR2.3; EXPRESSED IN BRAIN, SIGNAL = 0.68; EXPRESSED IN LUNG, SIGNAL = 1.1; EXPRESSED IN BONE MARROW, SIGNAL =   1; SWISSPROT HIT: P10696, EVALUE 4.00e-28; NT HIT: gi16157392, EVALUE 2.00e-93; EST_HUMAN HIT: AL540746.1, EVALUE 7.00e-91
tcaatgtccatgttggagatgagctgcgtagcgatgtcctggcacccctcctggcgggcggaggcaggcacgtcggcgtccgagtaccagttgcggttcaccgtgtgggcgtaggtgccggctggcgaggcgtgctgcactcgtgtggtggttaccactcccactgacttcccta

SEQ ID NO: 23654 - DNA, 323 bp, Homo sapiens
  MAP TO CHR5.3; EXPRESSED IN BONE MARROW, SIGNAL = 1.1; EXPRESSED IN ADULT LIVER, SIGNAL =   1; SWISSPROT HIT: Q9Y5E5, EVALUE 2.00e-45; NT HIT: gi14861873, EVALUE 0.00e+00; EST_HUMAN HIT: AA054103.1, EVALUE 1.00e-126
ttggcctcggtgtcgtcgctcttcctcttctcggtgctcctgttcgtggcggtgcggctgtgcaggaggagcagggcggcctcggtgggtcgctgctcggtgcccgagggcccctttccagggcatctggtggacgtaagcggcaccgggaccctgtcccagagctaccagtacgaggtgtgtctgacaggagactctgggactggtgagttcaagttcctgaagccaatatttcctaatctcttggttcaggacaccgggagggaagttaaggaaaaccccaagttcagaaatagcttggtattcagttaagtattgtattt

SEQ ID NO: 23655 - DNA, 105 bp, Homo sapiens
  MAP TO CHR19.3; EXPRESSED IN BONE MARROW, SIGNAL = 0.7; EXPRESSED IN ADULT LIVER, SIGNAL = 0.59; EXPRESSED IN PLACENTA, SIGNAL =   1; EST_HUMAN HIT: BG755883.1, EVALUE 2.00e-52; SWISSPROT HIT: P06734, EVALUE 5.00e-16; NT HIT: gi16175358, EVALUE 2.00e-52
ggctgtggatgctgaccagctgcccttccatgtcgtcacaggcataccgggcgtggacccactgcttggtgcccttgccgaagtagtagcacttccgttggaaat

SEQ ID NO: 23656 - DNA, 225 bp, Homo sapiens
  MAP TO CHR22.3; EXPRESSED IN PLACENTA, SIGNAL = 2.6; EXPRESSED IN LUNG, SIGNAL = 3.2; EXPRESSED IN HEART, SIGNAL = 3.2; EXPRESSED IN BONE MARROW, SIGNAL = 3.1; EXPRESSED IN FETAL LIVER, SIGNAL = 2.7; SWISSPROT HIT: O60610, EVALUE 6.50e-01; NT HIT: gi14778723, EVALUE 1.00e-124; EST_HUMAN HIT: BG163340.1, EVALUE 1.00e-123
aggcccagccccaaccccagctggggtggggtcttccccacctgtctcttatgccttatgggaaggcccagccataactcgggggccatgctggagctggggaccagcttaggcctcctccataggaacccagtgactggggggtgacgcctacacccccagctatttgcactctggtgtgtggtttgactctgcttttcttccggattggccctgtggtcacag

SEQ ID NO: 23657 - DNA, 254 bp, Homo sapiens
  MAP TO CHR17.3; EXPRESSED IN ADULT LIVER, SIGNAL = 1.1; EXPRESSED IN BONE MARROW, SIGNAL = 1.1; EXPRESSED IN LUNG, SIGNAL = 1.7; EXPRESSED IN PLACENTA, SIGNAL = 3.3; EXPRESSED IN HEART, SIGNAL = 1.3; EST_HUMAN HIT: W95802.1, EVALUE 1.00e-34; SWISSPROT HIT: Q99456, EVALUE 2.00e-23; NT HIT: gi7106336, EVALUE 1.00e-58
tcttacctggttcttaagttcgtcaataattgggaaatatctgctgtaatcatgatcaaggccacggcaagaaccaggtccaaatttctcataccaccccttgatcttctgctccaagtcagcgttggcctcctctagggctcgaacattctccaggtaggaggccaagcggtcgttgaggttctgcatggtcaccttctcattgccagagaggaggccgtgctcattccctgtgaaggcagcacaggaagcac

SEQ ID NO: 23658 - DNA, 152 bp, Homo sapiens
  MAP TO CHR16.3; EXPRESSED IN BONE MARROW, SIGNAL = 2.5; EXPRESSED IN PLACENTA, SIGNAL = 2.5; EXPRESSED IN LUNG, SIGNAL = 1.7; EXPRESSED IN HEART, SIGNAL =   3; EXPRESSED IN BRAIN, SIGNAL =   3; SWISSPROT HIT: P49711, EVALUE 7.00e-11; NT HIT: AF145475.1, EVALUE 2.00e-80; EST_HUMAN HIT: AA906281.1, EVALUE 3.00e-71
ttttgttagaataccatggcaagacatgctgataattgtgctggcccagatggcgtagagggggaaaatggaggagaaacgaagaagagtaaacgtggaagaaaaagaaagatgcgctctaagaaagaagattcctctgacagtggtaagtg

SEQ ID NO: 23659 - DNA, 268 bp, Homo sapiens
  MAP TO CHR12.3; EXPRESSED IN LUNG, SIGNAL = 4.8; EXPRESSED IN BONE MARROW, SIGNAL = 2.2; EST_HUMAN HIT: BI907343.1, EVALUE 0.00e+00; SWISSPROT HIT: Q9P0K8, EVALUE 2.00e-15; NT HIT: gi14765906, EVALUE 0.00e+00
cagggcccctcagctgtagggggtgctcctccactgcacaccccaagcacagatggttgtaccccaccagggggaaagcaagctggggcggaaggctatgggcctccccctgtaatggccatgcatccacccccgctgcagcatggaggctaccaccctcatcagcaccatccccactcccaccctgcccagcagccaccacctccacagccacaggcacaaggccaggctcccatcaacaacactggctttggtgagtaaggagggt

SEQ ID NO: 23660 - DNA, 230 bp, Homo sapiens
  MAP TO CHR4.3; EXPRESSED IN FETAL LIVER, SIGNAL = 0.43; EXPRESSED IN ADULT LIVER, SIGNAL = 1.1; EXPRESSED IN BONE MARROW, SIGNAL = 1.1; EXPRESSED IN HEART, SIGNAL =   1; EXPRESSED IN PLACENTA, SIGNAL = 0.75; EST_HUMAN HIT: BG699503.1, EVALUE 1.00e-116; SWISSPROT HIT: P47869, EVALUE 8.00e-40; NT HIT: gi16159265, EVALUE 1.00e-122
aacatacctcatggtatacagcagagtcccatcatcctgaattcgaagcaacttatttggcattgtcatattatgagctactgattttttcccattgtgaaaaaaggtatctggagtccagattttgctagccattaaattgtttagtcgaaggatattcataggacctttaaattttaaacgttcatctttccatttttgtcgaaagaaaacatcaattgtatattcct

SEQ ID NO: 23661 - DNA, 217 bp, Homo sapiens
  MAP TO CHR17.3; EXPRESSED IN ADULT LIVER, SIGNAL = 0.94; EXPRESSED IN LUNG, SIGNAL = 4.8; EXPRESSED IN PLACENTA, SIGNAL = 1.7; EXPRESSED IN BONE MARROW, SIGNAL = 2.5; EXPRESSED IN FETAL LIVER, SIGNAL = 1.3; EXPRESSED IN BRAIN, SIGNAL = 1.5; NT HIT: gi14773209, EVALUE 1.00e-107; EST_HUMAN HIT: BE812458.1, EVALUE 1.00e-108; SWISSPROT HIT: P26006, EVALUE 1.00e-33
cctgtgtaggtggcaggacctcctggtgggcgccccctactacttcgagaggaaagaggaagtagggggtgccatctatgtcttcatgaaccaggcgggaacctccttccctgctcacccctcactccttcttcatggccccagtggctctgcctttggtttatctgtggccagcattggtgacatcaaccaggatggatttcagggtatgagccag

SEQ ID NO: 23662 - DNA, 152 bp, Homo sapiens
  MAP TO CHR11.3; EXPRESSED IN BONE MARROW, SIGNAL = 2.1; EXPRESSED IN LUNG, SIGNAL = 1.5; EXPRESSED IN HEART, SIGNAL = 1.8; EXPRESSED IN PLACENTA, SIGNAL = 1.4; EXPRESSED IN ADULT LIVER, SIGNAL = 1.7; EXPRESSED IN BRAIN, SIGNAL = 1.3; EXPRESSED IN FETAL LIVER, SIGNAL = 1.2; SWISSPROT HIT: O70344, EVALUE 1.00e-22; NT HIT: AB015153.1, EVALUE 2.00e-80; EST_HUMAN HIT: AU141948.1, EVALUE 5.00e-76
acttaccaccccccaccacagcgcatctgcgtagctgccgaactccacgcggcctgactcgttcaccgcgtccttctcagccaggtacacaaagtacgaggagaagatgaggcccaggaagccgatgtacagggtggttatcagctcctagg

SEQ ID NO: 23663 - DNA, 125 bp, Homo sapiens
  MAP TO CHR15.3; EXPRESSED IN HELA, SIGNAL =  35; EXPRESSED IN BONE MARROW, SIGNAL =   4; EXPRESSED IN ADULT LIVER, SIGNAL =  52; EST_HUMAN HIT: BE276603.1, EVALUE 3.00e-64; SWISSPROT HIT: P51410, EVALUE 5.00e-19; NT HIT: gi15321501, EVALUE 2.00e-64
ttgatggggaagtgagcatacacagacctcatcttgtaacggaagcccagtgtaacacccttgatcatgttctgtacatgactacaaatagtccgaacggtagccagttcctttctgttacccca

SEQ ID NO: 23664 - DNA, 243 bp, Homo sapiens
  MAP TO CHR19.3; EXPRESSED IN ADULT LIVER, SIGNAL = 1.7; EXPRESSED IN BRAIN, SIGNAL = 7.8; EXPRESSED IN FETAL LIVER, SIGNAL = 1.3; EXPRESSED IN BONE MARROW, SIGNAL = 2.1; EXPRESSED IN LUNG, SIGNAL = 0.97; EST_HUMAN HIT: BI117426.1, EVALUE 1.00e-126; SWISSPROT HIT: Q14576, EVALUE 5.00e-39; NT HIT: gi16176259, EVALUE 1.00e-126
cccctggcaggtgtctctcggggtgtgggattcatccgctttgacaagaggattgaggccgaagaggctatcaaaggactgaatgggcagaagccgctgggcgcagctgagcccatcacagtcaagttcgcgaacaacccaagtcagaagacggggcaggcgctgctcacccacctctaccagtcatccgcccggcgctacgcaggccccctacaccatcagacccagcgtttccggtgagcc

SEQ ID NO: 23665 - DNA, 208 bp, Homo sapiens
  MAP TO CHR9.3; EXPRESSED IN LUNG, SIGNAL = 0.89; EXPRESSED IN HEART, SIGNAL = 0.91; EXPRESSED IN PLACENTA, SIGNAL = 0.9; EXPRESSED IN BONE MARROW, SIGNAL = 1.1; EXPRESSED IN ADULT LIVER, SIGNAL = 0.91; EXPRESSED IN BRAIN, SIGNAL = 1.6; NT HIT: gi16160883, EVALUE 1.00e-110; EST_HUMAN HIT: BF172043.1, EVALUE 2.00e-36; SWISSPROT HIT: Q05152, EVALUE 1.00e-19
tacctcgttcttctccaggctgcattcagacatcaccttgtccccctgctcctggaaggtgatgatgatcaaagccacaaagatgttgacgaagaagaagggaaagaccacaaagtagaccacgtagaagatggacagctccatgcggtacccagggcttggaccctgctcctcataggtggcatccacggagtgtttcagcaccctg

SEQ ID NO: 23666 - DNA, 221 bp, Homo sapiens
  MAP TO CHR14.3; EXPRESSED IN FETAL LIVER, SIGNAL = 0.81; EXPRESSED IN BRAIN, SIGNAL = 0.87; EXPRESSED IN PLACENTA, SIGNAL = 1.2; EXPRESSED IN LUNG, SIGNAL = 1.2; EXPRESSED IN HEART, SIGNAL = 0.8; EXPRESSED IN BONE MARROW, SIGNAL = 1.2; SWISSPROT HIT: Q9UKJ8, EVALUE 3.00e-44; NT HIT: AF029900.1, EVALUE 1.00e-121; EST_HUMAN HIT: AA758110.1, EVALUE 1.00e-77
ttggtgaagtgaaagatggtactgtgtgtggcccaggaaagatctgcatccataagaagtgtgtcagtctgtctgtcttgtcacatgtctgccttcctgagacctgcaatatgaaggggatctgcaataacaaacatcactgccactgtggctatgggtggtccccaccctactgccagcacagaggctatgggggcagtattgacagtggcccagcatct

SEQ ID NO: 23667 - DNA, 272 bp, Homo sapiens
  MAP TO CHR11.3; EXPRESSED IN BONE MARROW, SIGNAL = 0.9; EST_HUMAN HIT: BF330213.1, EVALUE 1.00e-13; SWISSPROT HIT: Q13315, EVALUE 2.00e-44; NT HIT: U55725.1, EVALUE 0.00e+00
atttttagatcttgttataaggttttgattccacatctggtgattagaagtcattttgatgaggtgaagtccattgctaatcagattcaagaggactggaaaagtcttctaacagactgctttccaaagattcttgtaaatattcttccttattttgcctatgagggtaccagagacagtgggatggcacagcaaagagagactgctaccaaggtctatgatatgcttaaaagtgaaaacttattgggaaaacaggtatggcttcaattttt

SEQ ID NO: 23668 - DNA, 200 bp, Homo sapiens
  MAP TO CHR6.3; EXPRESSED IN PLACENTA, SIGNAL = 0.51; EXPRESSED IN BONE MARROW, SIGNAL = 0.71; EXPRESSED IN BRAIN, SIGNAL = 0.65; EST_HUMAN HIT: N54353.1, EVALUE 2.60e-01; SWISSPROT HIT: P04201, EVALUE 1.00e-33; NT HIT: gi14755352, EVALUE 1.00e-109
tcctttacctgctgtactatgagtattggtcgacctttgggaacctacaccacatttccctgctcttctccacaatcaacagtagcgccaaccctttcatttacttctttgtgggaagcagtaagaagaagagattcaaggagtccttaaaagttgttctgaccagggctttcaaagatgaaatgcaacctcggcgccag

SEQ ID NO: 23669 - DNA, 298 bp, Homo sapiens
  MAP TO CHR2.3; EXPRESSED IN BONE MARROW, SIGNAL = 0.71; EXPRESSED IN BRAIN, SIGNAL = 0.65; EST_HUMAN HIT: BG739787.1, EVALUE 1.00e-130; SWISSPROT HIT: P23760, EVALUE 1.00e-10; NT HIT: AJ007392.1, EVALUE 0.00e+00
tggggtgaggcagccggtcccaggccctgggatccaggcggcgcgctgaggccctcccttaccttccagcgggaacccgctacgcgggtagttctgccccgggcccggccgcatcatcctgggcacagcgccggccagcgtggtcatcctgggggcagcttcgctcggaaattatatccaggtgaaggcgaaacggaaaggcgagtgcggcgcggatgaccctcgggaactatccggagcgtggagagcccctccccaaaacggctggagagagagggagggacgcggggaggggggc

SEQ ID NO: 23670 - DNA, 147 bp, Homo sapiens
  MAP TO CHRX.3; EXPRESSED IN ADULT LIVER, SIGNAL = 0.79; EXPRESSED IN BONE MARROW, SIGNAL = 0.79; NT HIT: L04585.1, EVALUE 2.00e-77; EST_HUMAN HIT: AA131455.1, EVALUE 3.00e-77; SWISSPROT HIT: P22304, EVALUE 2.00e-25
tgggctctaggtgaacatggagaatgggccaaatacagcaattttgatgttgctacccatgttcccctgatattctatgttcctggaaggacggcttcacttccggaggcaggcgagaagcttttcccttacctcgacccttttgat

SEQ ID NO: 23671 - DNA, 106 bp, Homo sapiens
  MAP TO CHR14.3; EXPRESSED IN LUNG, SIGNAL = 1.8; EXPRESSED IN HEART, SIGNAL = 1.5; EXPRESSED IN PLACENTA, SIGNAL = 1.3; EXPRESSED IN BONE MARROW, SIGNAL = 1.4; EXPRESSED IN ADULT LIVER, SIGNAL = 0.87; EXPRESSED IN BRAIN, SIGNAL = 1.7; NT HIT: gi14753942, EVALUE 4.00e-53; EST_HUMAN HIT: BE748702.1, EVALUE 6.00e-53
gataatgatccgaatggaaaagttaacgtgctgtaatgatatttgtcttgcaacatcaaaagcagcagatactgaatagaatttgcttcaatcataaatactgaga

SEQ ID NO: 23672 - DNA, 120 bp, Homo sapiens
  MAP TO CHR17.3; EXPRESSED IN ADULT LIVER, SIGNAL = 0.66; EXPRESSED IN FETAL LIVER, SIGNAL = 1.2; EXPRESSED IN LUNG, SIGNAL = 0.52; EXPRESSED IN BONE MARROW, SIGNAL = 1.2; NT HIT: U75285.1, EVALUE 2.00e-61; EST_HUMAN HIT: AA994786.1, EVALUE 5.00e-60; SWISSPROT HIT: O15392, EVALUE 2.00e-18
gacttacatggggtcgtcatctggctcccagccttccagctccttgaagcagaagaaacactgggccaagtctggctcgttctcagtggggcagtggatgaagccagcctcggccatctg

SEQ ID NO: 23673 - DNA, 211 bp, Homo sapiens
  MAP TO CHR3.3; EXPRESSED IN FETAL LIVER, SIGNAL = 0.81; EXPRESSED IN BONE MARROW, SIGNAL = 1.3; EXPRESSED IN LUNG, SIGNAL = 1.1; EXPRESSED IN HEART, SIGNAL = 1.2; EXPRESSED IN PLACENTA, SIGNAL = 0.73; SWISSPROT HIT: P41180, EVALUE 6.00e-33; NT HIT: gi14721383, EVALUE 1.00e-114; EST_HUMAN HIT: AA846198.1, EVALUE 2.00e-42
ccctggagagacggcagaaccatggcattttatagctgctgctgggtcctcttggcactcacctggcacacctctgcctacgggccagaccagcgagcccaaaagaagggggacattatccttggggggctctttcctattcattttggagtagcagctaaagatcaagatctcaaatcaaggccggagtctgtggaatgtatcaggtaag

SEQ ID NO: 23674 - DNA, 243 bp, Homo sapiens
  MAP TO CHR12.3; EXPRESSED IN BONE MARROW, SIGNAL = 0.92; EXPRESSED IN PLACENTA, SIGNAL = 0.71; EXPRESSED IN ADULT LIVER, SIGNAL = 0.91; EST_HUMAN HIT: BI756741.1, EVALUE 1.00e-124; SWISSPROT HIT: O83990, EVALUE 4.60e-01; NT HIT: gi7662267, EVALUE 1.00e-125
tttcttacataggtgcttcagcgaagagtcctgcgtctccatccctgaagtggagggctacgtggtcgtccttcagcctgacgccccccagatcctgctgagtggcactgctcattttgcccgcccagctgtggactttgagggaaccaacggcgtccctttgttccctgatcttcaaatcacctgctccatttctcaccaggtggaggccaaaaaggatgagagttggcagggcacaggtaa

SEQ ID NO: 23675 - DNA, 221 bp, Homo sapiens
  MAP TO CHR11.3; EXPRESSED IN PLACENTA, SIGNAL = 0.92; EXPRESSED IN ADULT LIVER, SIGNAL = 1.5; EXPRESSED IN BONE MARROW, SIGNAL = 1.3; EXPRESSED IN HEART, SIGNAL = 1.3; EST_HUMAN HIT: N90813.1, EVALUE 1.00e-111; SWISSPROT HIT: P46821, EVALUE 1.10e-02; NT HIT: gi15312056, EVALUE 1.00e-112
gtctgtctctccgtacaggtggaaaaacctagtgttcagagttccaaaccaaaaaagacctcagcgagccataagcccacgaggaaggccaaagacaagcaggcggtgtcaggccaggctgccaagaaaaagagcgcggagggcccgagtaccaccaagccagacgacaaggagcaaagcaaagagatgaacaataaactggctgaggcgaaagagtaaat

SEQ ID NO: 23676 - DNA, 133 bp, Homo sapiens
  MAP TO CHRX.3; EXPRESSED IN BONE MARROW, SIGNAL = 1.1; EXPRESSED IN ADULT LIVER, SIGNAL = 1.6; EST_HUMAN HIT: BE894491.1, EVALUE 1.00e-60; SWISSPROT HIT: P24346, EVALUE 3.00e-17; NT HIT: gi14764080, EVALUE 9.00e-61
ttattttccaggtagcagcaagaggactggacatttcaaatgtgaaacatgttatcaattttgacttgccaagtgatattgaagaatatgtacatcgtattggtcgtacgggacgtgtaggaaaccttggtaa

SEQ ID NO: 23677 - DNA, 104 bp, Homo sapiens
  MAP TO CHR21.3; EXPRESSED IN BONE MARROW, SIGNAL = 1.1; EXPRESSED IN PLACENTA, SIGNAL = 0.73; EXPRESSED IN LUNG, SIGNAL = 1.4; EXPRESSED IN HEART, SIGNAL = 1.4; NT HIT: gi14780359, EVALUE 6.00e-52; EST_HUMAN HIT: AV660462.1, EVALUE 9.00e-52; SWISSPROT HIT: O95500, EVALUE 7.00e-14
actcacacgtagtcgttcagcctgtacccgctgtgcgtggccgaggtcactgagggggcccgattgtctttgtaggcagctggtggctggtaggcaggtgcggt

SEQ ID NO: 23678 - DNA, 157 bp, Homo sapiens
  MAP TO CHR20.3; EXPRESSED IN LUNG, SIGNAL = 2.3; EXPRESSED IN HEART, SIGNAL = 1.8; EXPRESSED IN BONE MARROW, SIGNAL = 1.2; EXPRESSED IN FETAL LIVER, SIGNAL = 1.7; EXPRESSED IN ADULT LIVER, SIGNAL =   2; EXPRESSED IN BRAIN, SIGNAL = 1.8; SWISSPROT HIT: Q05885, EVALUE 3.00e-08; NT HIT: gi7705822, EVALUE 4.00e-79; EST_HUMAN HIT: R36746.1, EVALUE 4.00e-83
aaagaaagggtggattttttgtggatctctttgtaagagtatctaaccaagttgcagttaacatgtacaagcagttgggctacagtgtatataggacggtcatagagtactattcggccagcaacggggagcctgatgaggacgcttatggtaagct

SEQ ID NO: 23679 - DNA, 188 bp, Homo sapiens
  MAP TO CHR18.3; EXPRESSED IN HEART, SIGNAL = 1.1; EXPRESSED IN BONE MARROW, SIGNAL = 1.4; EXPRESSED IN ADULT LIVER, SIGNAL = 1.4; EST_HUMAN HIT: BG704333.1, EVALUE 1.00e-101; SWISSPROT HIT: P02686, EVALUE 4.00e-30; NT HIT: gi14763903, EVALUE 1.00e-102
cttgccagagccccgcttgggcgcacccctgtcaccgccaaagaagcgcccgatggagtcaaggatgcccgtgtctctgtgccttgggaggaagccatgcctggcatggtccatggtacttgctgtggccaggtacttggatccgtgcctctgggagggtctcttctgtgacgccatcacatccaggc

SEQ ID NO: 23680 - DNA, 171 bp, Homo sapiens
  MAP TO CHR3.3; EXPRESSED IN LUNG, SIGNAL = 1.4; EXPRESSED IN HEART, SIGNAL = 0.94; EXPRESSED IN PLACENTA, SIGNAL = 1.4; EXPRESSED IN ADULT LIVER, SIGNAL =   1; EXPRESSED IN BONE MARROW, SIGNAL = 1.7; EST_HUMAN HIT: BF981401.1, EVALUE 2.00e-75; SWISSPROT HIT: P49117, EVALUE 1.00e-22; NT HIT: gi14731329, EVALUE 6.00e-78
gactgaccttgctccatctttgtctgccacaaacgtgggagtagctatcaggggacttctcaggtctttccggatatagattttctcagttgaagcagcacaattgcttggtttctcccgttgcacatcgaagggcttccgttcactctgcacagcttaaatcacaacata

SEQ ID NO: 23681 - DNA, 153 bp, Homo sapiens
  MAP TO CHR18.3; EXPRESSED IN BONE MARROW, SIGNAL = 1.2; EXPRESSED IN LUNG, SIGNAL = 0.91; EXPRESSED IN ADULT LIVER, SIGNAL = 1.1; EXPRESSED IN BRAIN, SIGNAL = 1.3; NT HIT: gi16178137, EVALUE 6.00e-81; EST_HUMAN HIT: AW963777.1, EVALUE 8.00e-81; SWISSPROT HIT: O88506, EVALUE 2.00e+00
gatgccaatggcaacctgctctttccccaccttgatttcatcaccatattgccaaaggagaagcttggggagcgggaagtctacttggcaatcctggctgggatacactccaagtcactggtgcctgtgtatgtgaaggtgaggcctcaggct

SEQ ID NO: 23682 - DNA, 170 bp, Homo sapiens
  MAP TO CHR6.3; EXPRESSED IN BRAIN, SIGNAL =   3; EXPRESSED IN FETAL LIVER, SIGNAL = 1.5; EXPRESSED IN BONE MARROW, SIGNAL = 1.6; EXPRESSED IN HELA, SIGNAL = 3.1; NT HIT: M88006.1, EVALUE 5.00e-91; EST_HUMAN HIT: AU134150.1, EVALUE 4.00e-89; SWISSPROT HIT: P82185, EVALUE 5.00e-26
tacctgattaacaaacaaggtggtcacaaattttcctggcttgaagacttctacaactttcctgatcaggtcatcataggaggtctgacttaagtttgtttcaaagctaacataagaaaattctggttctggagtgatgtgaatagtccaataagttccctgagagaaaa

SEQ ID NO: 23683 - DNA, 196 bp, Homo sapiens
  MAP TO CHR11.3; EXPRESSED IN ADULT LIVER, SIGNAL = 0.58; EXPRESSED IN PLACENTA, SIGNAL = 0.48; EXPRESSED IN LUNG, SIGNAL = 0.94; EXPRESSED IN BONE MARROW, SIGNAL = 0.7; EXPRESSED IN FETAL LIVER, SIGNAL = 0.98; SWISSPROT HIT: P32780, EVALUE 7.00e-26; NT HIT: gi14773063, EVALUE 5.00e-91; EST_HUMAN HIT: AW294904.1, EVALUE 1.00e-106
cagaatgctgcaagaagatcctgttttgtttcagctttataaagaccttgttgtgagtcaagtgatcagtgctgaggaattctgggccaatcgtttaaatgtgaatgcaacagatagttcttccacatccaatcataagcaggatgttggcatttctgctgcatttctggtatgtgagccttctagatttctgaag

SEQ ID NO: 23684 - DNA, 170 bp, Homo sapiens
  MAP TO CHR2.3; EXPRESSED IN BRAIN, SIGNAL = 0.7; EXPRESSED IN BONE MARROW, SIGNAL = 0.83; EST_HUMAN HIT: BG942178.1, EVALUE 1.00e-70; SWISSPROT HIT: Q02790, EVALUE 6.60e-01; NT HIT: AF100751.1, EVALUE 4.00e-70
gtttgaattacctcggctttagagagctgcctgtcattgtccatgtctatttgtttaaatgtctcaatgctccgtggtcctttggtcacagcataaagttcaatctcaaaaatcaatgtagcatccggtggaatcttgccttctgctaagggtataaattttaacagttt

SEQ ID NO: 23685 - DNA, 107 bp, Homo sapiens
  MAP TO CHR1.3; EXPRESSED IN BRAIN, SIGNAL = 2.9; EXPRESSED IN FETAL LIVER, SIGNAL = 1.6; EXPRESSED IN HEART, SIGNAL = 1.6; EXPRESSED IN BONE MARROW, SIGNAL = 1.9; EXPRESSED IN HELA, SIGNAL = 3.1; NT HIT: gi14745866, EVALUE 1.00e-53; EST_HUMAN HIT: AU124992.1, EVALUE 2.00e-53; SWISSPROT HIT: O43865, EVALUE 3.00e-15
aggctgtatcagctctccaaagctgggaagctctgtgttccggccatgaacgtcaatgattctgttaccaaacagaagtttgataacttgtactgctgccgagaatc

SEQ ID NO: 23686 - DNA, 270 bp, Homo sapiens
  MAP TO CHR19.3; EXPRESSED IN ADULT LIVER, SIGNAL = 2.2; EXPRESSED IN BRAIN, SIGNAL = 2.5; EXPRESSED IN BONE MARROW, SIGNAL = 1.9; EXPRESSED IN HELA, SIGNAL = 8.3; EXPRESSED IN HEART, SIGNAL = 2.2; NT HIT: gi14760348, EVALUE 0.00e+00; EST_HUMAN HIT: AL514844.1, EVALUE 0.00e+00; SWISSPROT HIT: P33946, EVALUE 5.00e-46
tctctgcagatcctctggaccttctccatctacctggagtcagtggccatcttgccgcagctgttcatggtgagcaagaccggcgaggcggagaccatcaccagccactacttgtttgcgctaggcgtttaccgcacgctctatctcttcaactggatctggcgctaccatttcgagggcttcttcgacctcatcgccattgtggcaggcctggtccagacagtcctctactgcgatttcttctacctctatatcaccaaaggtagctgg

SEQ ID NO: 23687 - DNA, 228 bp, Homo sapiens
  MAP TO CHR17.3; EXPRESSED IN BONE MARROW, SIGNAL = 0.98; EXPRESSED IN LUNG, SIGNAL = 2.4; EXPRESSED IN HEART, SIGNAL = 0.63; EXPRESSED IN ADULT LIVER, SIGNAL = 0.57; EXPRESSED IN BRAIN, SIGNAL = 0.84; SWISSPROT HIT: P13236, EVALUE 2.00e-07; EST_HUMAN HIT: AV706059.1, EVALUE 1.00e-99; NT HIT: M69201.1, EVALUE 1.00e-121
ttgtcctaggcctcagagtccctataaagagagattcccaactcagtatcagcacaggacacagctgggttctgaagcttctgagttctgcagcctcacctctgagaaaacctcttttccaccaataccatgaagctctgcgtgactgtcctgtctctcctcatgctagtagctgccttctgctctccagcgctctcagcaccaagtaagtctacttttgcagctgct

SEQ ID NO: 23688 - DNA, 211 bp, Homo sapiens
  MAP TO CHR6.3; EXPRESSED IN BRAIN, SIGNAL = 1.2; EXPRESSED IN BONE MARROW, SIGNAL =   1; EXPRESSED IN LUNG, SIGNAL = 1.2; SWISSPROT HIT: P48147, EVALUE 5.00e-35; EST_HUMAN HIT: BG575483.1, EVALUE 1.00e-107; NT HIT: AB020018.1, EVALUE 1.00e-107
tcctgttgagggtatgagttgtagaacattcccttcccatcatgggtccaggccatacagctgaacttgactctttcaagcacatctggaagctctttggcaccatcaactttcatgaacttgattgtcacccagtctgagccactggcactcagaccataggcaaaatattcaccatcttcgctgaacgcataacctatgggacacagga

SEQ ID NO: 23689 - DNA, 239 bp, Homo sapiens
  MAP TO CHRX.3; EXPRESSED IN ADULT LIVER, SIGNAL = 4.8; EXPRESSED IN BRAIN, SIGNAL = 7.9; EXPRESSED IN HELA, SIGNAL = 4.8; EXPRESSED IN BONE MARROW, SIGNAL = 3.8; EXPRESSED IN LUNG, SIGNAL = 7.9; EXPRESSED IN PLACENTA, SIGNAL = 4.1; SWISSPROT HIT: Q13495, EVALUE 1.00e-28; EST_HUMAN HIT: AW371805.1, EVALUE 1.00e-101; NT HIT: gi13629957, EVALUE 0.00e+00
aaaaccctgagcatgatcatgcagcaggggatggcaagctccagcccaggagccacggagccatttacttttggcaacaccaagcccttgtcccattttgtttctgagccgggtccccagaagatgccctccatgcctaccacctctaggcagccttccctgctccactacctgcagcagccgacaccaacgcaggcctcctcagccactgcctcctccacggccactgccaccttgca

SEQ ID NO: 23690 - DNA, 155 bp, Homo sapiens
  MAP TO CHR2.3; EXPRESSED IN HEART, SIGNAL =   6; EXPRESSED IN ADULT LIVER, SIGNAL =  17; EXPRESSED IN BRAIN, SIGNAL =   8; EXPRESSED IN HELA, SIGNAL = 5.7; EXPRESSED IN PLACENTA, SIGNAL =   5; EXPRESSED IN BONE MARROW, SIGNAL = 5.5; NT HIT: gi16156860, EVALUE 1.00e-69; SWISSPROT HIT: P37569, EVALUE 2.60e+00; EST_HUMAN HIT: BE622554.1, EVALUE 2.00e-69
caggtcctcacctgctcaaattcagacttcaattcctgttcttgtaccctaaggacatctcgcaagtgatcagtgtgggcagctgcctgtcggcgaagctgggttctcatttcattttccatggcatctctgacttcttctatctgtgaaaccaa

SEQ ID NO: 23691 - DNA, 281 bp, Homo sapiens
  MAP TO CHR21.3; EXPRESSED IN FETAL LIVER, SIGNAL = 1.4; EXPRESSED IN ADULT LIVER, SIGNAL = 1.9; EXPRESSED IN BRAIN, SIGNAL = 2.9; EXPRESSED IN HELA, SIGNAL =   3; EXPRESSED IN BONE MARROW, SIGNAL = 2.4; SWISSPROT HIT: O60318, EVALUE 2.00e-23; EST_HUMAN HIT: AL523846.1, EVALUE 0.00e+00; NT HIT: AJ010089.1, EVALUE 0.00e+00
cttccttcacaaaccatcttctacttccttctcaacggcgtcccctcctgggctaggcacaagaaccaccagaggaagcgcaggctggaagggcttagcctgcaggagctgcttgagctgcagcaaggccgacagccagtacacgtcctcctctgccatgtcctcactcttcattttggggggaagcagcagcatgagcccactggctcccaggaggtccttctgtgtctccacagcatcaatggcaccatcactgagggcgccatgggccacctgcaaca

SEQ ID NO: 23692 - DNA, 188 bp, Homo sapiens
  MAP TO CHR19.3; EXPRESSED IN ADULT LIVER, SIGNAL = 2.6; EXPRESSED IN FETAL LIVER, SIGNAL = 2.3; EXPRESSED IN BRAIN, SIGNAL =   3; EXPRESSED IN HELA, SIGNAL = 2.8; EXPRESSED IN PLACENTA, SIGNAL = 3.6; EXPRESSED IN BONE MARROW, SIGNAL = 2.8; EXPRESSED IN LUNG, SIGNAL = 2.4; SWISSPROT HIT: P53197, EVALUE 7.00e-13; EST_HUMAN HIT: BE263129.1, EVALUE 1.00e-100; NT HIT: AB033068.1, EVALUE 1.00e-100
cccacctggctggtacaggcactccacaggtacacgcaggtgcctagccccacgctgagcacattgagggacgaccagtccaccagattgaggtagaagtcgtcctgcagctcgggcgcgtccagcaccttgaaggggatcttggagatcttgcgggtgggtttccggggggaccggagcagcttctg

SEQ ID NO: 23693 - DNA, 218 bp, Homo sapiens
  MAP TO CHR20.3; EXPRESSED IN LUNG, SIGNAL = 0.74; EXPRESSED IN ADULT LIVER, SIGNAL = 0.96; EXPRESSED IN FETAL LIVER, SIGNAL =   1; EXPRESSED IN BRAIN, SIGNAL = 1.3; EXPRESSED IN BONE MARROW, SIGNAL = 1.3; SWISSPROT HIT: P18075, EVALUE 4.00e-34; EST_HUMAN HIT: AL560147.1, EVALUE 1.00e-105; NT HIT: gi14786439, EVALUE 1.00e-106
cacctgcccaagtgctcctggagcacctgataaacgctgatccggaacgtctcattgtcgaagcgttcccggatgtagtccttgtagatccggaattcggctgccgtgacagcttccccttctgggatcttggaaagatcaaaccggaactctcgatggtggtagcgtgggtggaagaattccttgtcatgttccactggaagaggaagagaacacac

SEQ ID NO: 23694 - DNA, 131 bp, Homo sapiens
  MAP TO CHR3.3; EXPRESSED IN BRAIN, SIGNAL = 1.5; EXPRESSED IN BONE MARROW, SIGNAL = 1.3; EXPRESSED IN LUNG, SIGNAL = 1.2; EXPRESSED IN PLACENTA, SIGNAL = 1.5; EXPRESSED IN HEART, SIGNAL = 1.7; NT HIT: gi14731329, EVALUE 1.00e-53; SWISSPROT HIT: P49116, EVALUE 2.00e-15; EST_HUMAN HIT: BF512999.1, EVALUE 2.00e-53
tacttttctgttttcagatcatccaggtttgaccagcacaagccagattgaaaaattccaagaaaaggcacagatggagttgcaggactatgttcagaaaacctactcagaagacacctaccggtgaggca

SEQ ID NO: 23695 - DNA, 129 bp, Homo sapiens
  MAP TO CHR17.3; EXPRESSED IN ADULT LIVER, SIGNAL = 7.4; EXPRESSED IN BRAIN, SIGNAL = 1.8; EXPRESSED IN LUNG, SIGNAL = 0.96; EXPRESSED IN BONE MARROW, SIGNAL = 2.1; NT HIT: gi4557598, EVALUE 1.00e-56; SWISSPROT HIT: P35575, EVALUE 4.00e-18; EST_HUMAN HIT: AV694195.1, EVALUE 2.00e-56
tgggacgcttacctggtccagtctcacaggttacagggaactgctttatcaggggcacggaagtgttgctgtagtagtcagtatccaaaacccaccagtatggacgctgtccaaagagaatcctatgga

SEQ ID NO: 23696 - DNA, 318 bp, Homo sapiens
  MAP TO CHR3.3; EXPRESSED IN ADULT LIVER, SIGNAL = 0.74; EXPRESSED IN BONE MARROW, SIGNAL = 0.99; EXPRESSED IN LUNG, SIGNAL = 0.31; EXPRESSED IN PLACENTA, SIGNAL = 0.76; SWISSPROT HIT: P41180, EVALUE 3.00e-55; EST_HUMAN HIT: AI434785.1, EVALUE 0.00e+00; NT HIT: gi14721383, EVALUE 0.00e+00
tcttccaggtataatttccgtgggtttcgctggttacaggctatgatatttgccatagaggagataaacagcagcccagcccttcttcccaacttgacgctgggatacaggatatttgacacttgcaacaccgtttctaaggccttggaagccaccctgagttttgttgctcaaaacaaaattgattctttgaaccttgatgagttctgcaactgctcagagcacattccctctacgattgctgtggtgggagcaactggctcaggcgtctccacggcagtggcaaatctgctggggctcttctacattccccaggta

SEQ ID NO: 23697 - DNA, 151 bp, Homo sapiens
  MAP TO CHR2.3; EXPRESSED IN FETAL LIVER, SIGNAL = 2.7; EXPRESSED IN ADULT LIVER, SIGNAL = 5.7; EXPRESSED IN BRAIN, SIGNAL =   4; EXPRESSED IN BONE MARROW, SIGNAL = 3.1; EXPRESSED IN PLACENTA, SIGNAL = 2.4; SWISSPROT HIT: P09812, EVALUE 3.40e+00; EST_HUMAN HIT: AI791416.1, EVALUE 1.00e-79; NT HIT: AF414120.1, EVALUE 9.00e-80
ttgtgtatttgttaatggtttgaatataaacactatatggcagtgtctttccaccttgggtcccagggaagttttgtggaggagctcaggacactaatacaccaggtagaacacaaggtcatttgctaactagcttggaaactggatgagg

SEQ ID NO: 23698 - DNA, 182 bp, Homo sapiens
  MAP TO CHR22.3; EXPRESSED IN BONE MARROW, SIGNAL = 0.99; EXPRESSED IN LUNG, SIGNAL = 1.7; EXPRESSED IN HEART, SIGNAL = 0.77; EXPRESSED IN ADULT LIVER, SIGNAL = 0.66; EXPRESSED IN BRAIN, SIGNAL = 1.5; SWISSPROT HIT: P90838, EVALUE 7.00e-19; EST_HUMAN HIT: BI560382.1, EVALUE 7.00e-88; NT HIT: AF161466.1, EVALUE 2.00e-84
gtgctcttacttggcattcattgggatgacaccttttgaccccaccccaacaggaatgtggtcaaacatagcttgggcaagttgctccttcacaggctggacatcactttcatctaaattggttcttagcaagcggacaccacagttgatgtcaaacccgacaccacctacaaaatagagaa

SEQ ID NO: 23699 - DNA, 139 bp, Homo sapiens
  MAP TO CHR6.3; EXPRESSED IN HEART, SIGNAL = 0.94; EXPRESSED IN BONE MARROW, SIGNAL = 1.1; EXPRESSED IN FETAL LIVER, SIGNAL = 0.99; EXPRESSED IN ADULT LIVER, SIGNAL =  13; EXPRESSED IN BRAIN, SIGNAL = 0.82; EXPRESSED IN PLACENTA, SIGNAL = 0.98; SWISSPROT HIT: P09210, EVALUE 2.00e-11; EST_HUMAN HIT: AV692119.1, EVALUE 2.00e-72; NT HIT: S45639.1, EVALUE 1.00e-72
tcaccttcagcagagggaagctggaaataaggctagagtcaagctcttccacgtagtagagaagttccaccaggtgaatgtcagcccggctcagcttgttgccaacaaggtagtcttgtccgtggctctttaagacctg

SEQ ID NO: 23700 - DNA, 124 bp, Homo sapiens
  MAP TO CHR19.3; EXPRESSED IN PLACENTA, SIGNAL = 7.8; EXPRESSED IN HEART, SIGNAL =   9; EXPRESSED IN ADULT LIVER, SIGNAL = 8.5; EXPRESSED IN FETAL LIVER, SIGNAL = 5.4; EXPRESSED IN BRAIN, SIGNAL =  12; EXPRESSED IN HELA, SIGNAL = 4.6; EXPRESSED IN BONE MARROW, SIGNAL = 8.5; NT HIT: gi14756535, EVALUE 8.00e-58; SWISSPROT HIT: Q13526, EVALUE 1.00e-15; EST_HUMAN HIT: BI758860.1, EVALUE 8.00e-62
acaggctacatccagaagatcaagtcgggagaggaggactttgagtctctggcctcacagttcagcgactgcagctcagccaaggccaggggagacctgggtgccttcagcagaggtgcgcaag

SEQ ID NO: 23701 - DNA, 249 bp, Homo sapiens
  MAP TO CHR11.3; EXPRESSED IN LUNG, SIGNAL = 0.97; EXPRESSED IN BONE MARROW, SIGNAL = 0.9; EXPRESSED IN BRAIN, SIGNAL = 0.79; NT HIT: gi14773497, EVALUE 1.00e-122; SWISSPROT HIT: P49847, EVALUE 8.00e-06; EST_HUMAN HIT: AW303570.1, EVALUE 1.00e-129
cctcttctcccaacaggtgaaatctgtaagccatgacctggagcaactgcaccggctgctgcaggtggcacggagcctatttcgtaatccgcacctgtgcttggggccctatgtccgctgtctggtgggcagtgtcctctactgtgtcctggagccactggctgcctccatcaaccccctgaatgaccactggactctgcgggatggggctgccctcctgctcagccacatcttctggtagccactggg

SEQ ID NO: 23702 - DNA, 128 bp, Homo sapiens
  MAP TO CHR13.3; EXPRESSED IN ADULT LIVER, SIGNAL = 5.1; EXPRESSED IN BRAIN, SIGNAL = 6.4; EXPRESSED IN FETAL LIVER, SIGNAL = 3.3; EXPRESSED IN LUNG, SIGNAL = 3.3; EXPRESSED IN HEART, SIGNAL = 5.2; EXPRESSED IN BONE MARROW, SIGNAL = 5.4; EXPRESSED IN PLACENTA, SIGNAL = 4.5; EST_HUMAN HIT: AV724319.1, EVALUE 3.00e-55; NT HIT: gi6005927, EVALUE 2.00e-55
actcacccattggccaattgtcatatacatgctttgcaatgtcagaagcagaatcgttaggagaaaacaggaactcttttgtttttccgcttaccaaaatgaggcgcaaatttatctgaaagaagaca

SEQ ID NO: 23703 - DNA, 129 bp, Homo sapiens
  MAP TO CHR6.3; EXPRESSED IN FETAL LIVER, SIGNAL = 3.3; EXPRESSED IN ADULT LIVER, SIGNAL = 3.7; EXPRESSED IN BRAIN, SIGNAL = 5.8; EXPRESSED IN BONE MARROW, SIGNAL = 5.3; EXPRESSED IN LUNG, SIGNAL = 2.8; EXPRESSED IN PLACENTA, SIGNAL = 4.1; NT HIT: AF050179.1, EVALUE 1.00e-66; SWISSPROT HIT: P55781, EVALUE 7.80e+00; EST_HUMAN HIT: BE531318.1, EVALUE 1.00e-66
tgaggccgcattggggagtgggtgggagggccctggctgagcagctgcttcatcttcgtcatcatcatccagcacgatgatgctgttagcggtggccataggggatcaaatcccccggagggaggaagt

SEQ ID NO: 23704 - DNA, 101 bp, Homo sapiens
  MAP TO CHR5.3; EXPRESSED IN LUNG, SIGNAL = 2.8; EXPRESSED IN BONE MARROW, SIGNAL = 1.6; EXPRESSED IN ADULT LIVER, SIGNAL = 1.6; NT HIT: gi14724343, EVALUE 4.00e-50; EST_HUMAN HIT: AL119917.1, EVALUE 2.00e-31
tcagacctcactctgtacctggtggtagcggtggccgcggtctcctgcgtcttcctggccttcgtcatcttgctgctggcgctcaggctgcggcgctggca

SEQ ID NO: 23705 - DNA, 102 bp, Homo sapiens
  MAP TO CHR10.3; EXPRESSED IN HEART, SIGNAL = 1.7; EXPRESSED IN BONE MARROW, SIGNAL = 2.1; EXPRESSED IN BRAIN, SIGNAL = 1.2; EST_HUMAN HIT: AU121657.1, EVALUE 1.00e-50; NT HIT: gi14744905, EVALUE 1.00e-49; SWISSPROT HIT: P49961, EVALUE 3.00e-14
ctacccctttgacttccagggtgccaggatcattactggccaagaggaaggtgcctatggctggattactatcaactatctgctgggcaaattcagtcaggt

SEQ ID NO: 23706 - DNA, 155 bp, Homo sapiens
  MAP TO CHR11.3; EXPRESSED IN ADULT LIVER, SIGNAL = 1.2; EXPRESSED IN PLACENTA, SIGNAL = 1.1; EXPRESSED IN HEART, SIGNAL = 1.3; EXPRESSED IN BONE MARROW, SIGNAL = 1.6; EXPRESSED IN FETAL LIVER, SIGNAL = 1.9; EXPRESSED IN BRAIN, SIGNAL = 1.2; EST_HUMAN HIT: BF217917.1, EVALUE 2.00e-78; NT HIT: AJ277546.2, EVALUE 4.00e-82; SWISSPROT HIT: P52747, EVALUE 5.00e-22
actcacctgaactgcaatctgggtgccattggatgttgctactaaggtcagaggtctggtttctgtggttactaagtgatggctatgctgctggtgccccatttctgatgaggcagtatggaatgctgccaagtcttgagctacaattgcaacct

SEQ ID NO: 23707 - DNA, 110 bp, Homo sapiens
  MAP TO CHR3.3; EXPRESSED IN FETAL LIVER, SIGNAL = 1.4; EXPRESSED IN ADULT LIVER, SIGNAL = 1.8; EXPRESSED IN BRAIN, SIGNAL = 1.1; EXPRESSED IN LUNG, SIGNAL =   1; EXPRESSED IN HEART, SIGNAL = 1.4; EXPRESSED IN PLACENTA, SIGNAL = 1.2; EXPRESSED IN BONE MARROW, SIGNAL = 1.5; SWISSPROT HIT: P25793, EVALUE 1.60e+00; EST_HUMAN HIT: AL553305.1, EVALUE 3.00e-55; NT HIT: AF120999.1, EVALUE 2.00e-55
tcagatgaatacctgacaaagcagtggaagtatccaattgagcttcatgggattggtaaatatggcaacgactcttaccgaattttttgtgtcaatgagtggaagcaggt

SEQ ID NO: 23708 - DNA, 312 bp, Homo sapiens
  MAP TO CHR2.3; EXPRESSED IN LUNG, SIGNAL = 1.1; EXPRESSED IN BONE MARROW, SIGNAL =   2; EXPRESSED IN FETAL LIVER, SIGNAL = 9.4; EXPRESSED IN ADULT LIVER, SIGNAL =  12; EXPRESSED IN BRAIN, SIGNAL = 2.5; SWISSPROT HIT: Q60688, EVALUE 1.00e-58; EST_HUMAN HIT: AW236501.1, EVALUE 3.00e-76; NT HIT: U13223.1, EVALUE 0.00e+00
gcagccggcaaagcccccctactcgtacatcgcgctcatcaccatggccatcctgcaaagcccgcacaagcgcctcacgctcagcggcatctgcgccttcattagtggccgcttcccctactaccgccgcaagttccccgcctggcagaacagcatccgccacaacctctcgctgaacgactgcttcgtcaagatcccccgcgagccgggccacccaggcaagggcacctactggagcctggaccccgcctcccaggacatgttcgacaatggcagctttctccggcgtaggaagcgtttcaagcgccacca

SEQ ID NO: 23709 - DNA, 190 bp, Homo sapiens
  MAP TO CHR2.3; EXPRESSED IN BONE MARROW, SIGNAL = 1.5; EXPRESSED IN HEART, SIGNAL = 1.6; EXPRESSED IN FETAL LIVER, SIGNAL = 0.96; NT HIT: AF030310.1, EVALUE 1.00e-103; SWISSPROT HIT: Q62452, EVALUE 2.00e-27; EST_HUMAN HIT: BG328092.1, EVALUE 1.00e-103
tccagatcctccagagtgtatgaggttgagtaagtcttcactgtgcaattcagtgattttcccagttgccaactcacctctggcatgactacaaccacctcatgccccctgaggataagtttctccaccaccgactgcatggtgaaccagtgactcccatccatgggcactaccagcagcttccctgcct

SEQ ID NO: 23710 - DNA, 189 bp, Homo sapiens
  MAP TO CHR16.3; EXPRESSED IN BRAIN, SIGNAL = 0.71; EXPRESSED IN ADULT LIVER, SIGNAL = 0.35; EXPRESSED IN BONE MARROW, SIGNAL = 0.83; NT HIT: AF325426.1, EVALUE 1.00e-102; SWISSPROT HIT: Q9WYG0, EVALUE 6.50e-01; EST_HUMAN HIT: BF347991.1, EVALUE 8.00e-97
gcagccatataaataaaagaaccacctacttggacccaagactggcgtttactgtggatgataatccgaccaagccaaccacccggcaaagatacgacggcagcaccactgccatggaaattctccagggccgggatttcactggcaaagtggttgtggtcactggagctaattcaggaataggtaggc

SEQ ID NO: 23711 - DNA, 109 bp, Homo sapiens
  MAP TO CHR12.3; EXPRESSED IN FETAL LIVER, SIGNAL = 1.7; EXPRESSED IN LUNG, SIGNAL = 1.9; EXPRESSED IN BONE MARROW, SIGNAL =   2; EXPRESSED IN HEART, SIGNAL = 1.6; EXPRESSED IN PLACENTA, SIGNAL = 3.8; NT HIT: gi7706500, EVALUE 7.00e-55; EST_HUMAN HIT: AW577451.1, EVALUE 1.00e-54
tgctgcttttgtgattgcttttctgcttcagagtcatcagaatcatcttcatcatcgtcctctgaaaattcctctacttcccgtccctcctcagggatttcttgacctg

SEQ ID NO: 23712 - DNA, 214 bp, Homo sapiens
  MAP TO CHR3.3; EXPRESSED IN LUNG, SIGNAL = 5.9; EXPRESSED IN HEART, SIGNAL = 3.2; EXPRESSED IN HELA, SIGNAL = 4.9; EXPRESSED IN BONE MARROW, SIGNAL = 4.1; EXPRESSED IN BRAIN, SIGNAL = 4.7; EXPRESSED IN ADULT LIVER, SIGNAL = 3.8; NT HIT: gi14724656, EVALUE 1.00e-112; SWISSPROT HIT: O15440, EVALUE 4.00e-33; EST_HUMAN HIT: AA649161.1, EVALUE 1.00e-102
tagattggagagcgaggagccaacctgagcggtgggcagcgccagaggatcagccttgcccgggccttgtatagtgacaggagcatctacatcctggacgaccccctcagtgccttagatgcccatgtgggcaaccacatcttcaatagtgctatccggaaacatctcaagtccaagacagttctgtttgttacccaccagttacaggtatggt

SEQ ID NO: 23713 - DNA, 129 bp, Homo sapiens
  MAP TO CHR2.3; EXPRESSED IN BRAIN, SIGNAL = 1.4; EXPRESSED IN BONE MARROW, SIGNAL = 1.2; EXPRESSED IN HELA, SIGNAL =   2; NT HIT: D82362.1, EVALUE 1.00e-66; SWISSPROT HIT: P29558, EVALUE 4.00e-14; EST_HUMAN HIT: AU127659.1, EVALUE 8.00e-56
atttgccacctactgttccggtgctgcctagtgacagatgactcatctgctgggccagagggctgatcattgatgcgggctgtagtgacatggtgtgctccattgagggagttaacacggcaccctggg

SEQ ID NO: 23714 - DNA, 194 bp, Homo sapiens
  MAP TO CHR21.3; EXPRESSED IN PLACENTA, SIGNAL = 1.7; EXPRESSED IN BONE MARROW, SIGNAL = 1.8; EXPRESSED IN HEART, SIGNAL = 1.2; EXPRESSED IN ADULT LIVER, SIGNAL =   2; EXPRESSED IN BRAIN, SIGNAL = 1.8; NT HIT: gi14780245, EVALUE 1.00e-91; SWISSPROT HIT: P22102, EVALUE 2.00e-25; EST_HUMAN HIT: AU152074.1, EVALUE 2.00e-91
gatcttgccattttctccaagctgtacagttccactggccaccagctgaagggctgcaggaaatattttatgttctgctaattttactctttcagaaagagttgcgacagtatcacccctcttcacgggaacagcttcttgcaaaataatctgtccagcatccacatcttcctggaaaagtaagcaaaagtttt

SEQ ID NO: 23715 - DNA, 172 bp, Homo sapiens
  MAP TO CHR19.3; EXPRESSED IN HELA, SIGNAL = 3.5; EXPRESSED IN BRAIN, SIGNAL = 3.7; EXPRESSED IN FETAL LIVER, SIGNAL = 2.3; EXPRESSED IN BONE MARROW, SIGNAL = 2.3; NT HIT: gi10880122, EVALUE 2.00e-78; SWISSPROT HIT: Q99418, EVALUE 2.00e-21; EST_HUMAN HIT: BF725832.1, EVALUE 6.00e-79
cctcacctgccctcattggcctccagcccctccacctcgctcatggcttcactgagctcctcccgcaggcgctgaatctccaccagcagctcctgcttccgccgccggatgttctccagctccatccgctcctccggagtcaggtctgggggttctagggatcggggtcaag

SEQ ID NO: 23716 - DNA, 235 bp, Homo sapiens
  MAP TO CHR12.3; EXPRESSED IN BONE MARROW, SIGNAL = 2.3; EXPRESSED IN PLACENTA, SIGNAL =   2; EXPRESSED IN LUNG, SIGNAL = 1.1; EXPRESSED IN ADULT LIVER, SIGNAL = 1.8; EXPRESSED IN FETAL LIVER, SIGNAL = 1.6; EXPRESSED IN BRAIN, SIGNAL = 1.8; SWISSPROT HIT: O09012, EVALUE 2.00e-13; EST_HUMAN HIT: AL045669.2, EVALUE 9.00e-88; NT HIT: U35407.1, EVALUE 1.00e-127
tgcagctagagatggtcaggggaggggtgagtacagggtcctcttgggcatggttgagagtgcacacctggaagtcctttcccaagtggcctgtgtgtgtctctgtgccccagttcctgaaattcgtgcggcagattggcgaagggcaggtgtccctggagtccggtgcagggtcgggccgagctcaggcagaacagtgggcagcagagtttatacagcagcaggtaggacattg

SEQ ID NO: 23717 - DNA, 315 bp, Homo sapiens
  MAP TO CHR20.3; EXPRESSED IN PLACENTA, SIGNAL = 1.2; EXPRESSED IN BONE MARROW, SIGNAL = 1.4; EXPRESSED IN LUNG, SIGNAL = 1.1; EXPRESSED IN HEART, SIGNAL = 1.7; EXPRESSED IN FETAL LIVER, SIGNAL = 0.72; EXPRESSED IN ADULT LIVER, SIGNAL = 1.3; NT HIT: gi6912609, EVALUE 0.00e+00; SWISSPROT HIT: O46501, EVALUE 2.60e-01; EST_HUMAN HIT: BI461403.1, EVALUE 0.00e+00
tctgcatgctgctcttcagccacctctctgcggtccagacgaggggcatcaagcacagaatcaagtggaaccggaaggccctgcccagcactgcccagatcactgaggcccaggtggctgagaaccgcccgggagccttcatcaagcaaggccgcaagctcgacattgacttcggagccgagggcaacaggtactacgaggccaactactggcagttccccgatggcatccactacaacggctgctctgaggctaatgtgaccaaggaggcatttgtcaccggctgcatcaatgccacccaggcggcgaaccagg

SEQ ID NO: 23718 - DNA, 216 bp, Homo sapiens
  MAP TO CHR1.3; EXPRESSED IN BONE MARROW, SIGNAL = 2.3; EXPRESSED IN FETAL LIVER, SIGNAL = 6.5; EST_HUMAN HIT: BE791104.1, EVALUE 1.00e-113; NT HIT: S71381.1, EVALUE 1.00e-113; SWISSPROT HIT: P28070, EVALUE 1.00e-33
gacttacaccatctggccgagaacttgcttcaaatactggaaatcagcgtagtcgccagaggcacccagcatggtactgttgttgactcgcataatgcgagagatgttgcggaaacgagccaaggagccgtaggatcccagcatgtctgcggcaatcaccactccgccctcgaacttaacgccgaggactgaggtcccggtcaccatggggttcct

SEQ ID NO: 23719 - DNA, 198 bp, Homo sapiens
  MAP TO CHR10.3; EXPRESSED IN ADULT LIVER, SIGNAL = 1.3; EXPRESSED IN BRAIN, SIGNAL = 1.4; EXPRESSED IN BONE MARROW, SIGNAL = 1.8; EXPRESSED IN HEART, SIGNAL = 1.5; EST_HUMAN HIT: AW976294.1, EVALUE 1.00e-105; NT HIT: gi15297428, EVALUE 1.00e-106; SWISSPROT HIT: P78325, EVALUE 1.00e-38
tcacctggcccccagaaggcctggcactgctgggccagtgtgggacaggccccgttgtagcagtagcccccggagcagggcgtgccgttctcctggaaggcgtcttccgggcactcagggtgccggccgtcacagaactcctcgaggtcacacatgtccttcttgggacggcacagctcaccagccggcttcacctgg

SEQ ID NO: 23720 - DNA, 144 bp, Homo sapiens
  MAP TO CHR1.3; EXPRESSED IN ADULT LIVER, SIGNAL = 1.7; EXPRESSED IN BONE MARROW, SIGNAL = 0.96; SWISSPROT HIT: Q01459, EVALUE 2.00e-21; EST_HUMAN HIT: BG704290.1, EVALUE 2.00e-75; NT HIT: AF085702.1, EVALUE 1.00e-75
cctgtgatccctcaatttcacgatggaaagagtctgtagtttctttgactaaagcagttaatgcatcatattcaggtgataaacaattaacttcttgctctatatctatattaattccatccatatattgtgttttggccaaat

SEQ ID NO: 23721 - DNA, 124 bp, Homo sapiens
  MAP TO CHR17.3; EXPRESSED IN BONE MARROW, SIGNAL = 1.8; EXPRESSED IN LUNG, SIGNAL = 0.94; EXPRESSED IN PLACENTA, SIGNAL = 0.98; EXPRESSED IN FETAL LIVER, SIGNAL = 1.5; EXPRESSED IN BRAIN, SIGNAL = 1.6; NT HIT: gi16164323, EVALUE 8.00e-52; SWISSPROT HIT: Q10085, EVALUE 1.20e-02; EST_HUMAN HIT: BF957968.1, EVALUE 1.00e-51
gtcatccatcctcatacagaccactgaggaagctcccgacctcataggcccaccactccatgcacagcatgagcatgctggggatggccaggcggaggaaggaggcccagtcctgcaggcactc

SEQ ID NO: 23722 - DNA, 115 bp, Homo sapiens
  MAP TO CHR17.3; EXPRESSED IN PLACENTA, SIGNAL = 0.65; EXPRESSED IN HEART, SIGNAL = 0.62; EXPRESSED IN BONE MARROW, SIGNAL =   1; SWISSPROT HIT: P34910, EVALUE 9.00e-16; EST_HUMAN HIT: BG531408.1, EVALUE 3.00e-58; NT HIT: gi5729817, EVALUE 2.00e-58
acagctggtgttggttgtccagcagtgactttggcaggtgatattgattgtccagaaaaagtgtcgctgaattgtgttggttgacccaaaggattccctgttgtgttttgagaat

SEQ ID NO: 23723 - DNA, 189 bp, Homo sapiens
  MAP TO CHR14.3; EXPRESSED IN BONE MARROW, SIGNAL = 2.6; EXPRESSED IN LUNG, SIGNAL = 2.1; EXPRESSED IN FETAL LIVER, SIGNAL = 2.4; EXPRESSED IN ADULT LIVER, SIGNAL = 2.2; EXPRESSED IN BRAIN, SIGNAL = 2.2; NT HIT: X14889.1, EVALUE 3.00e-95; SWISSPROT HIT: P10600, EVALUE 1.00e-31; EST_HUMAN HIT: AL532438.1, EVALUE 3.00e-93
gggcccagtctcaccggaagcagtaattggtgtccaaagcccgcttcttcctctgacccccctggcccgggttgtcgagccggtgtgggggaatcatcatgaggattagatgagggttgtggtgatccttctgcttcttgaggcgccccagatctccacggccatggtcatcctcattgtccacgcctg

SEQ ID NO: 23724 - DNA, 116 bp, Homo sapiens
  MAP TO CHR12.3; EXPRESSED IN BONE MARROW, SIGNAL = 1.2; EXPRESSED IN LUNG, SIGNAL = 2.6; EXPRESSED IN HEART, SIGNAL = 0.87; SWISSPROT HIT: P51853, EVALUE 1.60e+00; EST_HUMAN HIT: BE163485.1, EVALUE 2.00e-56; NT HIT: gi14768694, EVALUE 3.00e-54
gactgcaggacaatgccatccgctccatggttcattcagcgccttgtcccaaggtagttggtggagagcaggaccacgttgtgcagcaagagagacagctcagcttctgaaaacac

SEQ ID NO: 23725 - DNA, 309 bp, Homo sapiens
  MAP TO CHR8.3; EXPRESSED IN FETAL LIVER, SIGNAL = 1.5; EXPRESSED IN ADULT LIVER, SIGNAL = 1.8; EXPRESSED IN BONE MARROW, SIGNAL = 1.8; EXPRESSED IN LUNG, SIGNAL = 1.9; EXPRESSED IN HEART, SIGNAL =   2; EXPRESSED IN PLACENTA, SIGNAL = 1.6; SWISSPROT HIT: O19113, EVALUE 7.00e-14; EST_HUMAN HIT: AA405905.1, EVALUE 1.70e+00; NT HIT: gi14748715, EVALUE 0.00e+00
cctctgccctccccccgcaggccctctctccagcccctacgaccatggactttaccccagctccactggaggacacctcctcacgcccccaattctgcaagtggccatgtgagtgcccgccatccccaccccgctgcccgctgggggtcagcctcatcacagatggctgtgagtgctgtaagatgtgcgctcagcagcttggggacaactgcacggaggctgccatctgtgacccccaccggggcctctactgtgactacagcggggaccgcccgaggtacgcaataggagtgtgtgcacgtaagtgag

SEQ ID NO: 23726 - DNA, 227 bp, Homo sapiens
  MAP TO CHR4.3; EXPRESSED IN BRAIN, SIGNAL = 0.49; EXPRESSED IN BONE MARROW, SIGNAL = 0.73; EXPRESSED IN LUNG, SIGNAL = 0.8; SWISSPROT HIT: O14967, EVALUE 1.00e-41; EST_HUMAN HIT: AV722140.1, EVALUE 1.00e-120; NT HIT: gi14723386, EVALUE 1.00e-120
ttcttccagggaatctggagtcctcgaaaaattcctaatccagattatttcgaagatgatcatccatttcttctgacttctttcagtgctcttggtttagagctttggtctatgacctctgatatctactttgataattttattatctgttcggaaaaggaagtagcagatcactgggctgcagatggttggagatggaaaataatgatagcaaatgctaataaggt

SEQ ID NO: 23727 - DNA, 175 bp, Homo sapiens
  MAP TO CHR1.3; EXPRESSED IN LUNG, SIGNAL = 1.5; EXPRESSED IN FETAL LIVER, SIGNAL = 1.4; EXPRESSED IN BRAIN, SIGNAL = 1.8; EXPRESSED IN ADULT LIVER, SIGNAL = 2.2; EXPRESSED IN PLACENTA, SIGNAL = 2.1; EXPRESSED IN BONE MARROW, SIGNAL = 1.5; NT HIT: gi15299244, EVALUE 3.00e-58; SWISSPROT HIT: Q9UBY9, EVALUE 6.00e-17; EST_HUMAN HIT: AI745224.1, EVALUE 7.00e-94
cctggagcagacgtcccctccctgtgcacctcccctcccctcagggcccggatcacttgcctgggaaggccaggggctccgagtggggccgcatgaagctgccaaagtcatcggaaaacatgctcagggccttctccatgggcgggtcctgggccgggagagcacgggaggccga

SEQ ID NO: 23728 - DNA, 231 bp, Homo sapiens
  MAP TO CHR1.3; EXPRESSED IN HEART, SIGNAL = 1.7; EXPRESSED IN BONE MARROW, SIGNAL = 1.5; EXPRESSED IN LUNG, SIGNAL = 2.4; EXPRESSED IN PLACENTA, SIGNAL = 2.5; EXPRESSED IN BRAIN, SIGNAL = 2.2; EXPRESSED IN FETAL LIVER, SIGNAL = 2.2; NT HIT: gi14743918, EVALUE 1.00e-115; SWISSPROT HIT: Q13105, EVALUE 1.00e-26; EST_HUMAN HIT: BG471344.1, EVALUE 1.00e-113
ctgcccacagcccgcacctgtgagctgagtgacggctgtcgctgccagtgcctcggtagccagcgtgaccatgtcatccacagtgaccacgctgacctcactgccctcctcgggctccaggatcttgatgcctgccttgccctggtgcacggtcttcacgtgggagcgcaggttgtctacccggttgaagccacgcccacacttatcacacaggtaaggcttctctcctgg

SEQ ID NO: 23729 - DNA, 117 bp, Homo sapiens
  MAP TO CHR12.3; EXPRESSED IN HEART, SIGNAL = 1.5; EXPRESSED IN BONE MARROW, SIGNAL = 1.6; EXPRESSED IN FETAL LIVER, SIGNAL = 0.87; EXPRESSED IN BRAIN, SIGNAL = 1.7; NT HIT: gi6679031, EVALUE 4.00e-38; SWISSPROT HIT: P33215, EVALUE 6.00e-15; EST_HUMAN HIT: BI459781.1, EVALUE 2.00e-59
aaaagcagacatgtgtcaatttaaattctacatctatgtatttggtaagcggaggcctaaataacactgttaatatttgggatttaaaatcaaaaagagttcatcgatctcttaagg

SEQ ID NO: 23730 - DNA, 290 bp, Homo sapiens
  MAP TO CHR1.3; EXPRESSED IN ADULT LIVER, SIGNAL = 1.5; EXPRESSED IN BRAIN, SIGNAL = 2.2; EXPRESSED IN BONE MARROW, SIGNAL = 1.9; EXPRESSED IN LUNG, SIGNAL = 1.1; EXPRESSED IN PLACENTA, SIGNAL = 2.2; SWISSPROT HIT: P54677, EVALUE 1.00e-16; EST_HUMAN HIT: BF886722.1, EVALUE 0.00e+00; NT HIT: gi14780975, EVALUE 0.00e+00
aagtcacctacctgtccttgacttgcagcaggtagcagaccaagcagtacccagcacaactttgcacaaaattgcgctgtgcactgaggaatgcctcagtggtgtaactgccgtgctcctgtaggaagtaatcgagcaaggagagctgtgactgtttcttcacctgatggatggacacagcattgaccactggttcaatcatgccactatcagccgaaatcacaagaatcttgtatggcttgatccaaaggggcactcgctcctgttcccaaatggactgtgaggagaca

SEQ ID NO: 23731 - DNA, 196 bp, Homo sapiens
  MAP TO CHR3.3; EXPRESSED IN HEART, SIGNAL = 1.3; EXPRESSED IN PLACENTA, SIGNAL = 0.93; EXPRESSED IN BONE MARROW, SIGNAL = 1.4; EXPRESSED IN BRAIN, SIGNAL = 1.2; EXPRESSED IN ADULT LIVER, SIGNAL = 1.5; NT HIT: gi13644166, EVALUE 1.00e-102; SWISSPROT HIT: P19836, EVALUE 8.00e-18; EST_HUMAN HIT: BG481960.1, EVALUE 2.00e-97
accagtgctccttccggaccaaacatttccagaaaacttccaatgaattctcgggacttctcctcccacttctgaatgaggtcaatgcttttttcctccaccttctgaacaaattcttttgacttttcctccacatctttcactttcttctttactttgtcaaccctctcctgcaagtggtatttcttctcctaga

SEQ ID NO: 23732 - DNA, 207 bp, Homo sapiens
  MAP TO CHR17.3; EXPRESSED IN BONE MARROW, SIGNAL = 0.98; EXPRESSED IN LUNG, SIGNAL = 1.7; EXPRESSED IN PLACENTA, SIGNAL = 0.65; EXPRESSED IN BRAIN, SIGNAL =   1; NT HIT: gi14775713, EVALUE 1.00e-112; SWISSPROT HIT: O00182, EVALUE 9.00e-36; EST_HUMAN HIT: BI838262.1, EVALUE 1.00e-111
accttgaaatctgagctctgcaccaggaagcagaggtcaaagggcatccccttctggaagggcatgtgcatcttcctctcctcgggcccccatgttcctttctgcctcgtgttgcacaccacataccctccgtcttcaaaccgagggttgaagtggaaggcaatgtcgtttccactgaagcccgtctgaaagtccacagcaaaccta

SEQ ID NO: 23733 - DNA, 137 bp, Homo sapiens
  MAP TO CHR12.3; EXPRESSED IN BONE MARROW, SIGNAL = 1.7; EXPRESSED IN LUNG, SIGNAL = 1.4; EXPRESSED IN HEART, SIGNAL = 1.2; EXPRESSED IN BRAIN, SIGNAL = 1.3; EXPRESSED IN ADULT LIVER, SIGNAL = 1.2; NT HIT: AF274874.1, EVALUE 3.00e-64; SWISSPROT HIT: P13647, EVALUE 3.00e-18; EST_HUMAN HIT: BG678933.1, EVALUE 1.00e-67
accctacctgcttcttgacattgtcaatctcggctctcagcctctggatcatccggttcatctcagagatctcatgcttggtgttgcggaggtcatcgccatgccggccagctgtctgctgcagctcctcatactga

SEQ ID NO: 23734 - DNA, 242 bp, Homo sapiens
  MAP TO CHR17.3; EXPRESSED IN FETAL LIVER, SIGNAL = 1.2; EXPRESSED IN BRAIN, SIGNAL = 2.3; EXPRESSED IN BONE MARROW, SIGNAL = 1.7; EXPRESSED IN HEART, SIGNAL = 1.5; NT HIT: gi14775569, EVALUE 1.00e-130; SWISSPROT HIT: Q9WVS8, EVALUE 6.00e-37; EST_HUMAN HIT: BG720654.1, EVALUE 1.00e-130
accatggccgagcctctgaaggaggaagacggcgaggacggctctgcggagccccccgggcccgtgaaggccgaacccgcccacaccgctgcctctgtagcggccaagaacctggccctgcttaaagcccgctccttcgatgtgacctttgacgtgggcgacgagtacgagatcatcgagaccataggcaacggggcctatggagtggtgtcctccgcccgccgccgcctcaccggtgagct

SEQ ID NO: 23735 - DNA, 391 bp, Homo sapiens
  MAP TO CHR11.3; EXPRESSED IN BONE MARROW, SIGNAL = 1.8; EXPRESSED IN HEART, SIGNAL = 0.84; EXPRESSED IN FETAL LIVER, SIGNAL = 0.62; EXPRESSED IN BRAIN, SIGNAL = 1.9; NT HIT: U82828.1, EVALUE 0.00e+00; SWISSPROT HIT: Q13315, EVALUE 7.00e-57
atccttttttttttttttttaggctacagattgcaacccaattaatatcaaagtatcctgcaagtttacctaactgtgagctgtctccattactgatgatactatctcagcttctaccccaacagcgacatggggaacgtacaccatatgtgttacgatgccttacggaagttgcattgtgtcaagacaagaggtcaaacctagaaagctcacaaaagtcagatttattaaaactctggaataaaatttggtgtattacctttcgtggtataagttctgagcaaatacaagctgaaaactttggcttacttggagccataattcagggtagtttagttgaggttgacagagaattctggaagttatttactgggtcagcctgcagaccttc

SEQ ID NO: 23736 - DNA, 179 bp, Homo sapiens
  MAP TO CHR6.3; EXPRESSED IN PLACENTA, SIGNAL = 1.3; EXPRESSED IN BONE MARROW, SIGNAL = 1.9; EXPRESSED IN FETAL LIVER, SIGNAL = 1.9; EXPRESSED IN ADULT LIVER, SIGNAL = 1.3; EXPRESSED IN BRAIN, SIGNAL = 1.2; EST_HUMAN HIT: BF737309.1, EVALUE 3.00e-96; NT HIT: gi11419034, EVALUE 2.00e-84; SWISSPROT HIT: Q9ULC3, EVALUE 7.00e-24
catcttacttctttatacaagaatcatccagaagatcaatcttgttttgcacaagtacagttggtatatctcccacttcggctactactttctctctccaactggaaactgcttcaaaagattccctatctgtggtagagaacacgagcacacaagcctgggctcctgtaagttcacaa

SEQ ID NO: 23737 - DNA, 163 bp, Homo sapiens
  MAP TO CHR1.3; EXPRESSED IN BONE MARROW, SIGNAL = 1.5; EXPRESSED IN BRAIN, SIGNAL = 1.1; EXPRESSED IN ADULT LIVER, SIGNAL = 3.1; EXPRESSED IN HEART, SIGNAL = 1.4; EXPRESSED IN PLACENTA, SIGNAL = 0.96; EST_HUMAN HIT: AW580393.1, EVALUE 3.00e-68; NT HIT: gi13626599, EVALUE 9.00e-71; SWISSPROT HIT: P51449, EVALUE 3.00e-22
cctcctccctccctgcagtccatgtgggagatgtgggaacggtgtgcccaccacctcaccgaggccattcagtacgtggtggagttcgccaagaggctctcaggctttatggagctctgccagaatgaccagattgtgcttctcaaagcaggtgcccagggat

SEQ ID NO: 23738 - DNA, 194 bp, Homo sapiens
  MAP TO CHR14.3; EXPRESSED IN HEART, SIGNAL = 1.3; EXPRESSED IN BRAIN, SIGNAL =   2; EXPRESSED IN BONE MARROW, SIGNAL = 1.1; NT HIT: gi14750991, EVALUE 1.00e-85; SWISSPROT HIT: O95741, EVALUE 2.00e-30; EST_HUMAN HIT: BI669795.1, EVALUE 2.00e-85
caggtagagcgcacagaggtgcttcgctcctgttccagccctgtcttctcccgggtgctggcccttgagtatttttttgaggagaagcagcccctgcagttccacgtgttcgatgccgaggacggagccaccagcccccgaaatgataccttcctcggctctacggagtgcaccttgggccaggtctgcattcc

SEQ ID NO: 23739 - DNA, 102 bp, Homo sapiens
  MAP TO CHR19.3; EXPRESSED IN HEART, SIGNAL = 5.2; EXPRESSED IN BRAIN, SIGNAL = 4.5; EXPRESSED IN ADULT LIVER, SIGNAL = 4.3; EXPRESSED IN HELA, SIGNAL = 2.9; EXPRESSED IN BONE MARROW, SIGNAL = 3.5; NT HIT: gi5031890, EVALUE 1.00e-50; SWISSPROT HIT: P50895, EVALUE 3.00e-13; EST_HUMAN HIT: BE259257.1, EVALUE 1.00e-50
aagtggaagacatggcgcttgttcccgtgggggttggaggcttcacaggagatgccatcgcggctcagggcgctggtcactttcagggtcagagagctgctc

SEQ ID NO: 23740 - DNA, 101 bp, Homo sapiens
  MAP TO CHR8.3; EXPRESSED IN BONE MARROW, SIGNAL = 1.1; EXPRESSED IN LUNG, SIGNAL =  11; EXPRESSED IN BRAIN, SIGNAL = 5.7; NT HIT: gi4885590, EVALUE 4.00e-50; SWISSPROT HIT: P48875, EVALUE 8.00e+00
agtatttccatagtcaatgatggtttaataggtaaaccaaaccctataaacctgacctcctttatggttaatactattaagcaagaatgcagtacagaatt

SEQ ID NO: 23741 - DNA, 141 bp, Homo sapiens
  MAP TO CHR19.3; EXPRESSED IN FETAL LIVER, SIGNAL = 1.9; EXPRESSED IN BRAIN, SIGNAL = 0.88; EXPRESSED IN PLACENTA, SIGNAL = 1.1; EXPRESSED IN HEART, SIGNAL = 1.1; EXPRESSED IN BONE MARROW, SIGNAL = 0.92; SWISSPROT HIT: O75792, EVALUE 5.00e-20; EST_HUMAN HIT: BG338009.1, EVALUE 1.00e-70; NT HIT: gi5454009, EVALUE 7.00e-71
gcgcacccagcacggggcccctgcccgcctcatcgacgcccaggacgcaaggctccttgcggcacaccgcgggcacaggcgaactcaggcgacagcggcctgtattgtctctctccagctcgctgagatccatgccgcctc

SEQ ID NO: 23742 - DNA, 127 bp, Homo sapiens
  MAP TO CHR22.3; EXPRESSED IN LUNG, SIGNAL =   7; EXPRESSED IN ADULT LIVER, SIGNAL = 0.98; EXPRESSED IN BONE MARROW, SIGNAL = 0.83; NT HIT: U33113.1, EVALUE 2.00e-65; SWISSPROT HIT: P79121, EVALUE 6.00e-21; EST_HUMAN HIT: BF846640.1, EVALUE 1.00e-63
taggtcgcgtctatgatggcaagatgtacacggggctgtgcaacttcgtggagaggtgggaccagctcaccctctcccagcgcaaggggctgaactatcggtatcacctgggttgtaactgcaaggt

SEQ ID NO: 23743 - DNA, 173 bp, Homo sapiens
  MAP TO CHR22.3; EXPRESSED IN LUNG, SIGNAL = 1.6; EXPRESSED IN PLACENTA, SIGNAL = 1.7; EXPRESSED IN BONE MARROW, SIGNAL = 1.5; EXPRESSED IN BRAIN, SIGNAL = 1.4; EXPRESSED IN FETAL LIVER, SIGNAL = 2.7; NT HIT: X58468.1, EVALUE 7.00e-81; SWISSPROT HIT: Q29488, EVALUE 5.00e-22; EST_HUMAN HIT: AV657559.1, EVALUE 1.00e-73
gacagggagccgggctccccacaggcacctgctgagaaaggcaggaaggcctccagcttcacaaagtggccctgggcatccaggaagtgttcggggtggaagcggaagggcttctcccagacggcctcatccttcagcaccgatgacaggttggtgaagagcatcatcccctg

SEQ ID NO: 23744 - DNA, 117 bp, Homo sapiens
  MAP TO CHR5.3; EXPRESSED IN ADULT LIVER, SIGNAL = 0.68; EXPRESSED IN PLACENTA, SIGNAL = 0.52; EXPRESSED IN BONE MARROW, SIGNAL = 0.83; NT HIT: gi14731774, EVALUE 3.00e-57; SWISSPROT HIT: P53215, EVALUE 2.00e-04; EST_HUMAN HIT: AL530910.1, EVALUE 5.00e-57
ctcagggaactcttgcagcagacaagaatgagattttgttttctgaattcaacatcaactataataatgagctgccgatgtataggaaagggactgtgttgatatggcagaaggtaa

SEQ ID NO: 23745 - DNA, 178 bp, Homo sapiens
  MAP TO CHR10.3; EXPRESSED IN LUNG, SIGNAL =   1; EXPRESSED IN FETAL LIVER, SIGNAL = 0.6; EXPRESSED IN BRAIN, SIGNAL = 1.2; EXPRESSED IN BONE MARROW, SIGNAL =   1; EXPRESSED IN PLACENTA, SIGNAL = 0.75; NT HIT: gi4557824, EVALUE 1.00e-91; SWISSPROT HIT: Q02962, EVALUE 8.00e-25; EST_HUMAN HIT: AA834107.1, EVALUE 4.00e-86
agatgtgtctgagggctcagtcccaatggagattcccagagtggtgtggacagtttgcggaagcacttgcgagctgacaccttcacccagcagcagctggaagctttggatcgggtctttgagcgtccttcctaccctgacgtcttccaggcatcagagcacatcaaatcagaacagg

SEQ ID NO: 23746 - DNA, 197 bp, Homo sapiens
  MAP TO CHR4.3; EXPRESSED IN LUNG, SIGNAL = 1.5; EXPRESSED IN HEART, SIGNAL = 1.2; EXPRESSED IN BONE MARROW, SIGNAL = 1.8; EXPRESSED IN PLACENTA, SIGNAL = 1.6; EXPRESSED IN ADULT LIVER, SIGNAL = 1.1; EXPRESSED IN BRAIN, SIGNAL = 1.5; NT HIT: U63797.1, EVALUE 1.00e-107; SWISSPROT HIT: Q16585, EVALUE 1.00e-30; EST_HUMAN HIT: AU099434.1, EVALUE 1.00e-102
atactcactattaaattgatgacagccaggataaacaagaggataatcacacagatggctaaattgccctttcttcctctcaaccctgttttgtggagacgatcttcatcaatcggaatgtatccagctttaaagttactgttgtgctctttattgacactccttctctcaacagccttctcacgcatggacttctt

SEQ ID NO: 23747 - DNA, 226 bp, Homo sapiens
  MAP TO CHR17.3; EXPRESSED IN BONE MARROW, SIGNAL = 0.99; EXPRESSED IN ADULT LIVER, SIGNAL = 0.96; EXPRESSED IN BRAIN, SIGNAL =   1; SWISSPROT HIT: O76011, EVALUE 1.00e-35; EST_HUMAN HIT: BG118909.1, EVALUE 1.00e-111; NT HIT: Y16790.1, EVALUE 1.00e-124
actcacttgcagtcctcactctccaggaggctccggtacgtgttgatctcacactccagccgggcacgcacgtccagcagcacctggtactcctggttctgccgctccaggtcacagcggatctctgccagctgagactccacgttggtgatcaggctctgcacctgggacagctgggagctgtagtgggcctcgctctccgtcagcgtgttttccagagagtctc

SEQ ID NO: 23748 - DNA, 180 bp, Homo sapiens
  MAP TO CHR6.3; EXPRESSED IN BONE MARROW, SIGNAL = 2.2; EXPRESSED IN HEART, SIGNAL =   3; EXPRESSED IN ADULT LIVER, SIGNAL = 2.3; EXPRESSED IN BRAIN, SIGNAL = 2.1; NT HIT: AF129756.1, EVALUE 5.00e-97; SWISSPROT HIT: P47899, EVALUE 6.50e-01; EST_HUMAN HIT: BG497317.1, EVALUE 3.00e-90
aagtgttcttaccttcacgaacaattcgacctgcggttgttcttcagccatggttgcgtcggggaccaggaagtggccgtccctgggggaactgggaggggctgggaccggggaaggcgggtctcacactcagggactctctcccctagacccagggctgtcccttcagcacaacacaag

SEQ ID NO: 23749 - DNA, 167 bp, Homo sapiens
  MAP TO CHRX.3; EXPRESSED IN BONE MARROW, SIGNAL = 1.5; EXPRESSED IN HEART, SIGNAL = 0.84; EXPRESSED IN ADULT LIVER, SIGNAL = 0.85; EST_HUMAN HIT: BE767245.1, EVALUE 2.00e-69; NT HIT: gi15310931, EVALUE 2.00e-77; SWISSPROT HIT: P11532, EVALUE 2.00e-22
attcaaatattcacagacctgcaattccccgagtctctgctccatgatttcatagtcggtgacactaagttgaggtatggagagtttggtttctgactgctggacccatgtcctgatggcactcatggtctcctgatagcgcattggtggcaaagtgtcaaaaactt

SEQ ID NO: 23750 - DNA, 222 bp, Homo sapiens
  MAP TO CHR19.3; EXPRESSED IN ADULT LIVER, SIGNAL = 1.4; EXPRESSED IN BONE MARROW, SIGNAL = 1.1; NT HIT: AF361890.1, EVALUE 1.00e-122; SWISSPROT HIT: Q14145, EVALUE 4.00e-37; EST_HUMAN HIT: BG822754.1, EVALUE 1.00e-114
ttgcaggtatgagccagagcgggatgagtggcacttggtggccccaatgctgacacgaaggatcggggtgggcgtggctgtcctcaatcgtctcctttatgccgtggggggctttgacgggacaaaccgccttaattcagctgagtgttactacccagagaggaacgagtggcgaatgatcacagcaatgaacaccatccgaagcggggcaggtgggtgggg

SEQ ID NO: 23751 - DNA, 141 bp, Homo sapiens
  MAP TO CHR21.3; EXPRESSED IN LUNG, SIGNAL =  10; EXPRESSED IN HEART, SIGNAL = 7.7; EXPRESSED IN ADULT LIVER, SIGNAL =  11; EXPRESSED IN BRAIN, SIGNAL =  10; EXPRESSED IN FETAL LIVER, SIGNAL = 4.7; EXPRESSED IN PLACENTA, SIGNAL =   6; EXPRESSED IN BONE MARROW, SIGNAL = 8.8; NT HIT: AL163303.2, EVALUE 7.00e-74; SWISSPROT HIT: P57722, EVALUE 2.00e-11; EST_HUMAN HIT: BE258224.1, EVALUE 4.00e-67
ccctaggatatcatcaactccatgagcaacagccctgccaccagcaagcccccagtgacgctgaggctggtggtgcctgccagccagtgtgggtccctgatcggcaaaggaggctccaagatcaaggagatcagggaggta

SEQ ID NO: 23752 - DNA, 313 bp, Homo sapiens
  MAP TO CHR6.3; EXPRESSED IN BONE MARROW, SIGNAL = 0.78; EST_HUMAN HIT: AW963932.1, EVALUE 0.00e+00; NT HIT: gi12732489, EVALUE 0.00e+00; SWISSPROT HIT: P02304, EVALUE 8.00e-41
catgtctggtcgcggcaaaggcggaaagggactgggtaaaggaggcgctaagcgtcaccgtaaggtcctgcgagataacatccagggcattaccaagcctgccatccggcgccttgctcgtcgcgggggtgtcaagcgcatttctggtctcatctacgaggagactcgcggggttctgaaggtgtttctggaaaacgtgattcgtgatgctgtgacttacacggagcacgccaaacgcaagacagtgacagcgatggatgtggtctacgcgctgaagagacagggacgcactctttacggcttcggcggctaa

SEQ ID NO: 23753 - DNA, 417 bp, Homo sapiens
  MAP TO CHRX.3; EXPRESSED IN LUNG, SIGNAL = 0.81; EXPRESSED IN PLACENTA, SIGNAL = 0.7; EXPRESSED IN BONE MARROW, SIGNAL = 0.91; EXPRESSED IN ADULT LIVER, SIGNAL = 0.6; EXPRESSED IN BRAIN, SIGNAL = 0.6; EST_HUMAN HIT: BG707051.1, EVALUE 0.00e+00; SWISSPROT HIT: P32247, EVALUE 3.00e-75; NT HIT: X76498.1, EVALUE 0.00e+00
tccccctatagattgaatcccgaaagagaattgccagaacggtattggtgttggtggctctgtttgccctctgctggttgccaaatcacctcctgtacctctaccattcattcacttctcaaacctatgtagacccctctgccatgcatttcattttcaccattttctctcgggttttggctttcagcaattcttgcgtaaacccctttgctctctactggctgagcaaaagcttccagaagcattttaaagctcagttgttctgttgcaaggcggagcggcctgagcctcctgttgctgacacctctcttaccaccctggctgtgatgggaacggtcccgggcactgggagcatacagatgtctgaaattagtgtgacctcgttcactgggtgtagtgtgaagcaggcagaggaca

SEQ ID NO: 23754 - DNA, 101 bp, Homo sapiens
  MAP TO CHR16.3; EXPRESSED IN BONE MARROW, SIGNAL = 0.96; EXPRESSED IN PLACENTA, SIGNAL = 0.98; EXPRESSED IN ADULT LIVER, SIGNAL = 2.3; EXPRESSED IN BRAIN, SIGNAL = 1.2; SWISSPROT HIT: P52505, EVALUE 7.00e-12; NT HIT: gi13648792, EVALUE 4.00e-50; EST_HUMAN HIT: BI551076.1, EVALUE 6.00e-50
gggtttgaaattcctgatatagatgctgaaaagttaatgtgtccacaagaaattgtagattacattgcagataagaaggatgtatatgaataaagtatcag

SEQ ID NO: 23755 - DNA, 223 bp, Homo sapiens
  MAP TO CHR11.3; EXPRESSED IN BONE MARROW, SIGNAL = 0.72; EXPRESSED IN BRAIN, SIGNAL = 0.65; SWISSPROT HIT: P08110, EVALUE 3.20e+00; NT HIT: AJ400877.1, EVALUE 1.00e-122; EST_HUMAN HIT: BF330948.1, EVALUE 1.00e-111
gtttctgtagcttcttgtgacctgagctgcatcgtaaagcgaaccgagaagcggctccgtaaagccatccgcacgctcagaaaggccgtccacagggagcagtttcacctccagctctcaggcatgaacctcgacgtggctaaaaagcctcccagaacatctgaacgccaggcagagtcctgtggagtgggccagggtcatgcagaaaaccaatgtggtgagt

SEQ ID NO: 23756 - DNA, 189 bp, Homo sapiens
  MAP TO CHR22.3; EXPRESSED IN BONE MARROW, SIGNAL = 1.5; EXPRESSED IN ADULT LIVER, SIGNAL = 3.9; EXPRESSED IN LUNG, SIGNAL = 3.7; SWISSPROT HIT: P51966, EVALUE 5.00e-22; NT HIT: gi4507788, EVALUE 1.00e-101; EST_HUMAN HIT: AA101831.1, EVALUE 1.00e-102
aggacaaccctccatatgataagggagccttcagaatcgaaatcaactttccagcagagtacccattcaaaccaccgaagatcacatttaaaacaaagatctatcacccaaacatcgacgaaaaggggcaggtctgtctgccagtaattagtgccgaaaactggaagccagcaaccaaaaccgaccaag

SEQ ID NO: 23757 - DNA, 172 bp, Homo sapiens
  MAP TO CHR17.3; EXPRESSED IN FETAL LIVER, SIGNAL = 1.6; EXPRESSED IN BONE MARROW, SIGNAL = 1.3; EXPRESSED IN HEART, SIGNAL = 1.3; EST_HUMAN HIT: AW630111.1, EVALUE 4.00e-92; SWISSPROT HIT: Q60803, EVALUE 2.00e-04; NT HIT: gi4759251, EVALUE 7.00e-84
agagccaccagtaccagtgcccaaggctgcctgttgcctgccccaaccaatgtggtgtgggcactgtggctcgggaggacctgccaggccatctgaaggacagctgtaacaccgccctggtgctctgcccattcaaagactccggctgcaagcacagggtgagatgcccctt

SEQ ID NO: 23758 - DNA, 110 bp, Homo sapiens
  MAP TO CHR6.3; EXPRESSED IN LUNG, SIGNAL = 3.6; EXPRESSED IN HEART, SIGNAL = 2.6; EXPRESSED IN BONE MARROW, SIGNAL = 1.9; EXPRESSED IN FETAL LIVER, SIGNAL = 2.9; SWISSPROT HIT: P20618, EVALUE 1.00e-14; NT HIT: gi14760144, EVALUE 2.00e-55; EST_HUMAN HIT: BE728379.1, EVALUE 3.00e-55
ccttcttcatcaagtccaccgatgatgttgtaaacatagtatggaaagaagcgccttgaatacaggattgtagacagcattgcagcaattgcccccgtagtcatggcctt

SEQ ID NO: 23759 - DNA, 314 bp, Homo sapiens
  MAP TO CHR13.3; EXPRESSED IN ADULT LIVER, SIGNAL = 0.72; EXPRESSED IN LUNG, SIGNAL =   1; EXPRESSED IN PLACENTA, SIGNAL = 0.82; EXPRESSED IN BONE MARROW, SIGNAL = 0.73; SWISSPROT HIT: Q02401, EVALUE 1.00e-17; NT HIT: AB009667.1, EVALUE 0.00e+00; EST_HUMAN HIT: AW572920.1, EVALUE 0.00e+00
ctcttgtcccctcttccctttgcagccatcaagctggatggggtggatgtcatcgggtataccgcatggtccctcatggatggtttcgagtggcacagaggttacagcatcaggcgtggactcttctatgttgactttctaagccaggacaagatgttgttgccaaagtcttcagccttgttctaccaaaagctgatagagaaaaatggcttccctcctttacctgaaaatcagcccctagaagggacatttccctgtgactttgcttggggagttgttgacaactacattcaagtaagtcagctgacaaaacc

SEQ ID NO: 23760 - DNA, 163 bp, Homo sapiens
  MAP TO CHR1.3; EXPRESSED IN BONE MARROW, SIGNAL = 1.1; EXPRESSED IN LUNG, SIGNAL = 4.9; EXPRESSED IN HEART, SIGNAL = 3.7; EXPRESSED IN FETAL LIVER, SIGNAL = 2.8; NT HIT: gi16161876, EVALUE 1.00e-85; EST_HUMAN HIT: AA148275.1, EVALUE 1.00e-86; SWISSPROT HIT: Q62159, EVALUE 5.00e-25
ttcacctgcttgccgtccacctcaatgtccgcaatatagttctcaaagacagtagggacgtagacctccggaaactgatccttgctgaagacgatgaggaggcaggtcttcccacaggcaccatccccaacgatcaccagcttctttcggattgcagccatgg

SEQ ID NO: 23761 - DNA, 139 bp, Homo sapiens
  MAP TO CHR9.3; EXPRESSED IN BONE MARROW, SIGNAL = 6.5; EXPRESSED IN FETAL LIVER, SIGNAL =  20; SWISSPROT HIT: P10660, EVALUE 7.00e-20; NT HIT: X67309.1, EVALUE 1.00e-72; EST_HUMAN HIT: AL537478.1, EVALUE 4.00e-70
tagctgaacatctccttcccagccactggctgccagaaactcattgaagtggacgatgaacgcaaacttcgtactttctatgagaagcgtatggccacagaagttgctgctgacgctctgggtgaagaatggaaggtaa

SEQ ID NO: 23762 - DNA, 173 bp, Homo sapiens
  MAP TO CHR17.3; EXPRESSED IN ADULT LIVER, SIGNAL = 3.6; EXPRESSED IN BRAIN, SIGNAL = 4.6; EXPRESSED IN HELA, SIGNAL = 7.8; EXPRESSED IN BONE MARROW, SIGNAL = 3.3; SWISSPROT HIT: P36091, EVALUE 2.50e+00; NT HIT: gi14785899, EVALUE 8.00e-93; EST_HUMAN HIT: AI281216.1, EVALUE 1.00e-92
tctctgtcttccaacccccaataatatttccaccggggatgcatcatttttactcccaatattctgtagagagggagtcaggatgctgtcttcccacgaatagtactcagtaacaaaccaattgcattttagttgggcagtgctcccacccaccctccagatcccttccagct

SEQ ID NO: 23763 - DNA, 138 bp, Homo sapiens
  MAP TO CHR2.3; EXPRESSED IN ADULT LIVER, SIGNAL = 0.95; EXPRESSED IN BRAIN, SIGNAL =   1; EXPRESSED IN BONE MARROW, SIGNAL = 1.4; EXPRESSED IN FETAL LIVER, SIGNAL = 0.96; NT HIT: L15533.1, EVALUE 6.00e-53; EST_HUMAN HIT: AW002913.1, EVALUE 2.00e-62; SWISSPROT HIT: Q06141, EVALUE 6.00e-15
tccaccccaggtgaagaaacccagaaggaactgccctctccacggatcagctgtcccaaaggctccaaggcctatggctccccctgctatgccttgtttttgtcaccaaaatcctggatggatgcagatgtgagtggt

SEQ ID NO: 23764 - DNA, 280 bp, Homo sapiens
  MAP TO CHR6.3; EXPRESSED IN HEART, SIGNAL = 1.3; EXPRESSED IN PLACENTA, SIGNAL = 0.95; EXPRESSED IN BONE MARROW, SIGNAL = 1.6; EXPRESSED IN BRAIN, SIGNAL = 1.8; NT HIT: L29472.1, EVALUE 0.00e+00; EST_HUMAN HIT: BF795118.1, EVALUE 0.00e+00; SWISSPROT HIT: P18467, EVALUE 3.00e-49
caccttttctccccacagtgaagggtgcgcccagcctgtagttgtgtctacagaccccatccacggcctgtctgctcctctccaagagatccagccggctgttccactgctcagcatctggctgccccagcttggtcaatgccacaaacatccccacatcactgtcgaaacgtacatactcctccaagttaaagatgaatctgaccacaaactgcaccttttctgtcccgttggtgaagtaacagtcagcctttgcctgaatcacaaaatcttctggaaa

SEQ ID NO: 23765 - DNA, 210 bp, Homo sapiens
  MAP TO CHR6.3; EXPRESSED IN HELA, SIGNAL = 2.4; EXPRESSED IN BONE MARROW, SIGNAL = 1.2; EXPRESSED IN LUNG, SIGNAL = 2.5; EXPRESSED IN HEART, SIGNAL = 1.1; EXPRESSED IN BRAIN, SIGNAL = 1.2; SWISSPROT HIT: Q03519, EVALUE 1.00e-33; NT HIT: X66401.1, EVALUE 1.00e-115; EST_HUMAN HIT: AW390813.1, EVALUE 1.00e-89
acctgatggcgggtgttgtacaccttctccgctgctattgtgaagggcatgtgcagcagagaaaggagggtgagtcgaggcgatatgctgagcatgaagccatacagccccaccactttcaccaggcttcgcaagagcacattggcatttaaaggaagccagttactcatcagggtggtatccgagctcagccgtgagttcagctcccct

SEQ ID NO: 23766 - DNA, 267 bp, Homo sapiens
  MAP TO CHR8.3; EXPRESSED IN BRAIN, SIGNAL = 1.5; EXPRESSED IN PLACENTA, SIGNAL = 0.58; EXPRESSED IN BONE MARROW, SIGNAL = 0.9; SWISSPROT HIT: P40472, EVALUE 9.50e-01; NT HIT: AJ272427.1, EVALUE 1.00e-130; EST_HUMAN HIT: AA281267.1, EVALUE 9.00e-05
tgtatcttaaacttactattttgttgtctaggatagtgaatgagagccgacaggtactccaggaacctgattttgctcagtctctcctgagggatccaaatactcctatcataagaaagtcaaggggaacttccactcaaggaacatccacccatgcttcttcaactcagctggctatggtggatgatcaaagaagcaaagcaggaagcatccacagcaaagtgagcagctaccacggcagcctccacagatcacgtgatggcaggt

SEQ ID NO: 23767 - DNA, 128 bp, Homo sapiens
  MAP TO CHR12.3; EXPRESSED IN BONE MARROW, SIGNAL = 0.75; EXPRESSED IN FETAL LIVER, SIGNAL = 0.8; EST_HUMAN HIT: AV647598.1, EVALUE 6.00e-66; SWISSPROT HIT: P50170, EVALUE 4.00e-18; NT HIT: gi14760949, EVALUE 4.00e-66
actgcatggagcatgcgctgattgcctgccacccccgtactcgctactcagctggctgggatgccaagcttctctacctccccatgagctacatgcccaccttcctggtggatgccattatgtactgg

SEQ ID NO: 23768 - DNA, 150 bp, Homo sapiens
  MAP TO CHR5.3; EXPRESSED IN LUNG, SIGNAL = 2.7; EXPRESSED IN HEART, SIGNAL = 2.9; EXPRESSED IN PLACENTA, SIGNAL = 2.4; EXPRESSED IN FETAL LIVER, SIGNAL = 2.1; EXPRESSED IN ADULT LIVER, SIGNAL = 2.7; EXPRESSED IN BRAIN, SIGNAL =   3; EXPRESSED IN HELA, SIGNAL = 2.7; EXPRESSED IN BONE MARROW, SIGNAL = 2.9; NT HIT: AF040753.1, EVALUE 3.00e-79; EST_HUMAN HIT: BG695985.1, EVALUE 7.00e-32; SWISSPROT HIT: Q13751, EVALUE 1.50e-02
caccagacttctttctcccacatcttgcctttgccatggaagggctgcccgtggctccccgaggccaggcagcaaggccaacccacggggagcccacactgctcacctctggaaagagaaaagaggccatgagcccagccaggggtgggg

SEQ ID NO: 23769 - DNA, 185 bp, Homo sapiens
  MAP TO CHR18.3; EXPRESSED IN BONE MARROW, SIGNAL = 0.72; EXPRESSED IN FETAL LIVER, SIGNAL = 1.9; EST_HUMAN HIT: BE891345.1, EVALUE 3.00e-99; SWISSPROT HIT: P28835, EVALUE 5.60e+00; NT HIT: gi14764579, EVALUE 2.00e-99
agttgcaggaagaggcagaggaagaggaagaggaagaggacgtggccgtggcagaggaagagggggtcctaggcgataatgtctctcaagatttcaaagtcatatgagatttgggatattttttgtacaggttgtgtttgtttatgtcagtttttaataaacataaatgtgggacagagctgtct

SEQ ID NO: 23770 - DNA, 119 bp, Homo sapiens
  MAP TO CHR11.3; EXPRESSED IN HEART, SIGNAL = 9.4; EXPRESSED IN PLACENTA, SIGNAL = 8.5; EXPRESSED IN FETAL LIVER, SIGNAL = 6.1; EXPRESSED IN BRAIN, SIGNAL =  13; EXPRESSED IN LUNG, SIGNAL = 5.7; EXPRESSED IN BONE MARROW, SIGNAL =  10; NT HIT: J02986.1, EVALUE 8.00e-61; EST_HUMAN HIT: BF842915.1, EVALUE 7.00e-53
tccaaaaaaggcaaacaggagtttataaagttgtccaagggtctctcccatctggtagatcgaggaagattgactacaggaaagttcaaaggtcagtcttggcagatctaaaaacagag

SEQ ID NO: 23771 - DNA, 131 bp, Homo sapiens
  MAP TO CHR6.3; EXPRESSED IN HELA, SIGNAL = 3.8; EXPRESSED IN BONE MARROW, SIGNAL = 3.8; EXPRESSED IN ADULT LIVER, SIGNAL = 3.8; EXPRESSED IN BRAIN, SIGNAL =   4; NT HIT: gi11417509, EVALUE 2.00e-65; EST_HUMAN HIT: BI461421.1, EVALUE 9.00e-68; SWISSPROT HIT: Q03958, EVALUE 1.00e-16
tcaggaactggccctgctggatgggtccaacgtggtctttaaacttctgggtccggtgctagtcaaacaggagctgggggaggctcgggccacagtagggaagaggctggactatatcacagctgaaatgt

SEQ ID NO: 23772 - DNA, 208 bp, Homo sapiens
  MAP TO CHR1.3; EXPRESSED IN HELA, SIGNAL =   3; EXPRESSED IN BONE MARROW, SIGNAL = 1.3; EXPRESSED IN HEART, SIGNAL = 1.4; EXPRESSED IN PLACENTA, SIGNAL = 1.5; EXPRESSED IN BRAIN, SIGNAL = 1.4; NT HIT: gi4557842, EVALUE 1.00e-110; EST_HUMAN HIT: AW401875.1, EVALUE 1.00e-110; SWISSPROT HIT: P48382, EVALUE 5.00e-33
caccagcaagccccatggccttaagcacatgggcatgtgcagatcgggcagagatgagatgctgctgtagcaggaagcgggcgacctcaacgatggaactgaaggaccgtttcaggatccgctctgcccagtcacaggtcagggcacacgctgcctccaccagttcatctcgaggtgctggggttacttctgggcccatttctggctg

SEQ ID NO: 23773 - DNA, 181 bp, Homo sapiens
  MAP TO CHRX.3; EXPRESSED IN BONE MARROW, SIGNAL = 0.97; EXPRESSED IN ADULT LIVER, SIGNAL = 1.1; EXPRESSED IN BRAIN, SIGNAL = 0.86; EXPRESSED IN LUNG, SIGNAL = 1.1; EXPRESSED IN PLACENTA, SIGNAL = 1.3; SWISSPROT HIT: P46100, EVALUE 5.00e-29; NT HIT: U72937.2, EVALUE 1.00e-97; EST_HUMAN HIT: BG654578.1, EVALUE 2.00e-97
agaggacgattatttatcatttctactaaagcaggatctctaggaattaatctggtagctgctaatcgagtaattatattcgacgcttcttggaatccatcttatgacatccagagtatattcagagtttatcgctttggacaaactaagcctgtttatgtatataggttcttagctcagg

SEQ ID NO: 23774 - DNA, 139 bp, Homo sapiens
  MAP TO CHR18.3; EXPRESSED IN BONE MARROW, SIGNAL =   1; EXPRESSED IN ADULT LIVER, SIGNAL = 1.9; EXPRESSED IN BRAIN, SIGNAL = 2.3; NT HIT: gi14764193, EVALUE 1.00e-72; EST_HUMAN HIT: BE769302.1, EVALUE 2.00e-72
aggtgacacattacaaagccaccctaccatgaatccgctcccaagggtctcactgctcacctgaggataactcaatataactatgtggctgaaaatgcaaagctgaagaccatggatttcatggtgattccagcaagta

SEQ ID NO: 23775 - DNA, 351 bp, Homo sapiens
  MAP TO CHR2.3; EXPRESSED IN BONE MARROW, SIGNAL = 0.93; EXPRESSED IN FETAL LIVER, SIGNAL = 1.9; NT HIT: gi5453775, EVALUE 0.00e+00; EST_HUMAN HIT: BF799366.1, EVALUE 0.00e+00; SWISSPROT HIT: Q16236, EVALUE 1.00e-62
tttaggaccattctgtttgacacttccaggggcactatctagctcttccacttcagaatcactgaggccaagtagtgtgtctccatagctggaagattccactgagtgttctggtgatgccacactgggacttgtgtttagtgaaatgccggagtcagaatcattgaattctgctgtgctttcagggtggttttggttgaaagctttgcaaagtgatagatcagaaacatcaatgggcccatttagaagttcagagagtgaatggcttaaagtagcaggtgagggcatgctgttgctgatactgggctcagctatgaaagcagaataaaattcatcaccaaaatctgtgtt

SEQ ID NO: 23776 - DNA, 226 bp, Homo sapiens
  MAP TO CHR3.3; EXPRESSED IN HELA, SIGNAL = 2.7; EXPRESSED IN BRAIN, SIGNAL = 4.8; EXPRESSED IN FETAL LIVER, SIGNAL = 2.6; EXPRESSED IN BONE MARROW, SIGNAL = 2.6; NT HIT: Z22521.1, EVALUE 1.00e-110; EST_HUMAN HIT: BG721228.1, EVALUE 1.00e-110; SWISSPROT HIT: Q05655, EVALUE 2.00e-34
acccagaactcagccttgccattgttcttcttgcagcgctcggccagcaccgacacacccacggtcacctcagacactggctcctctgctgcccgcattagcacaatctggatgacgcgcccctcatagatgtgggcatcgaacgtcgacttccactcaggatacatggtcggcttcttctgcaccagtgttttcccacgctctgcaacaaggccaggcagagaag

SEQ ID NO: 23777 - DNA, 160 bp, Homo sapiens
  MAP TO CHR3.3; EXPRESSED IN ADULT LIVER, SIGNAL = 1.4; EXPRESSED IN PLACENTA, SIGNAL = 0.67; EXPRESSED IN LUNG, SIGNAL = 0.67; EXPRESSED IN HEART, SIGNAL = 0.63; EXPRESSED IN BONE MARROW, SIGNAL = 0.69; NT HIT: L00620.1, EVALUE 2.00e-83; EST_HUMAN HIT: BG739902.1, EVALUE 2.00e-29; SWISSPROT HIT: Q9R0K7, EVALUE 6.00e-25
ctgttgaactccttgccctcgaggcacagaaagtcctccccaggatggatgatgccacacttgatggcgatggcccgagccgtgttgatattgtcgccagtgaccatgcggaccgtgatgcctgcccgctggcacttgcggatggcttctgggacctggg

SEQ ID NO: 23778 - DNA, 132 bp, Homo sapiens
  MAP TO CHR19.3; EXPRESSED IN BONE MARROW, SIGNAL = 1.7; EXPRESSED IN ADULT LIVER, SIGNAL = 4.3; EXPRESSED IN BRAIN, SIGNAL = 5.9; SWISSPROT HIT: O35308, EVALUE 9.00e-01; NT HIT: AF112202.1, EVALUE 8.00e-52; EST_HUMAN HIT: BE904125.1, EVALUE 1.00e-51
cagaccctgtactcacccagcacccagaagacggccgagcccgcaccagccagccagaagaaggggaaggagatgcctccagccagagcatactgatgcgctgggctcacctctcggcctgggggcagatgg

SEQ ID NO: 23779 - DNA, 180 bp, Homo sapiens
  MAP TO CHR15.3; EXPRESSED IN HELA, SIGNAL = 2.6; EXPRESSED IN PLACENTA, SIGNAL = 1.9; EXPRESSED IN BONE MARROW, SIGNAL = 1.1; EXPRESSED IN ADULT LIVER, SIGNAL = 1.2; EST_HUMAN HIT: BF203958.1, EVALUE 3.00e-87; SWISSPROT HIT: O42400, EVALUE 4.30e+00; NT HIT: gi13653063, EVALUE 5.00e-97
ccaggaagcggccctggtgctgtggtgcgacctccaaaggcaccagaagacttttctcaaaactggaaggtgctgcaagagtggctgctgaaacaaaaatctcaggccccagaaaagccttttgtcatctctcagatgggttccaaaaagaagcccaaaattatccagcaaaacaaaaaa

SEQ ID NO: 23780 - DNA, 297 bp, Homo sapiens
  MAP TO CHRX.3; EXPRESSED IN ADULT LIVER, SIGNAL = 1.6; EXPRESSED IN BRAIN, SIGNAL = 1.3; EXPRESSED IN BONE MARROW, SIGNAL = 1.3; EXPRESSED IN PLACENTA, SIGNAL = 1.3; NT HIT: gi14759883, EVALUE 1.00e-122; EST_HUMAN HIT: BE795427.1, EVALUE 6.30e+00; SWISSPROT HIT: Q9BZS1, EVALUE 9.00e-25
gacaaggacccgatgcccaaccccaggcctggcaagccctcggccccttccttggcccttggcccatccccaggagcctcgcccagctggagggctgcacccaaagcctcagacctgctgggggcccggggcccagggggaaccttccagggccgagatcttcgaggcggggcccatgcctcctcttcttccttgaaccccatgccaccatcgcagctgcaggtgaggccctgggcccaggatggggcaggcagggtggggtacctggacctacaggtgccgacctttactgtggca

SEQ ID NO: 23781 - DNA, 371 bp, Homo sapiens
  MAP TO CHR14.3; EXPRESSED IN PLACENTA, SIGNAL = 1.2; EXPRESSED IN BONE MARROW, SIGNAL = 1.5; EXPRESSED IN HEART, SIGNAL = 1.6; EXPRESSED IN FETAL LIVER, SIGNAL = 1.1; EXPRESSED IN BRAIN, SIGNAL = 1.3; SWISSPROT HIT: Q13258, EVALUE 7.00e-59; NT HIT: U31332.1, EVALUE 0.00e+00; EST_HUMAN HIT: AI460323.1, EVALUE 2.00e-16
ttcgccttcttcatgtccttctttgggctctcctcgacactgcaactcctggccatggcactggagtgctggctctccctagggcaccctttcttctaccgacggcacatcaccctgcgcctgggcgcactggtggccccggtggtgagcgccttctccctggctttctgcgcgctacctttcatgggcttcgggaagttcgtgcagtactgccccggcacctggtgctttatccagatggtccacgaggagggctcgctgtcggtgctggggtactctgtgctctactccagcctcatggcgctgctggtcctcgccaccgtgctgtgcaacctcggcgccatgcgcaacctctatgcgatgcaccggcg

SEQ ID NO: 23782 - DNA, 244 bp, Homo sapiens
  MAP TO CHR15.3; EXPRESSED IN FETAL LIVER, SIGNAL = 6.4; EXPRESSED IN BRAIN, SIGNAL = 2.1; EXPRESSED IN LUNG, SIGNAL =  18; EXPRESSED IN HEART, SIGNAL = 2.8; EXPRESSED IN BONE MARROW, SIGNAL = 2.4; EST_HUMAN HIT: BI335828.1, EVALUE 0.00e+00; SWISSPROT HIT: Q28178, EVALUE 3.00e-26; NT HIT: X04665.1, EVALUE 0.00e+00
cagctggactctgactcagaccgcattggagatacctgtgacaacaatcaggatattgatgaagatggccaccagaacaatctggacaactgtccctatgtgcccaatgccaaccaggctgaccatgacaaagatggcaagggagatgcctgtgaccacgatgatgacaacgatggcattcctgatgacaaggacaactgcagactcgtgcccaatcccgaccagaaggactctgacggtgagt

SEQ ID NO: 23783 - DNA, 137 bp, Homo sapiens
  MAP TO CHR10.3; EXPRESSED IN FETAL LIVER, SIGNAL = 0.62; EXPRESSED IN ADULT LIVER, SIGNAL = 1.2; EXPRESSED IN BRAIN, SIGNAL = 1.5; EXPRESSED IN BONE MARROW, SIGNAL = 1.7; EXPRESSED IN PLACENTA, SIGNAL = 0.78; NT HIT: gi14736360, EVALUE 6.00e-59; EST_HUMAN HIT: AL560834.1, EVALUE 9.00e-59; SWISSPROT HIT: P51268, EVALUE 1.30e-01
aggctgttcttgctggagatttaattctttctgcagcatctatagctctggcacgaattggaaatacaactgttatatctattttaacccaagttattgaagatttggtgcgtggtacgttgattctgatttttctt

SEQ ID NO: 23784 - DNA, 135 bp, Homo sapiens
  MAP TO CHRX.3; EXPRESSED IN ADULT LIVER, SIGNAL = 2.2; EXPRESSED IN FETAL LIVER, SIGNAL = 2.5; EXPRESSED IN BRAIN, SIGNAL =   2; EXPRESSED IN HELA, SIGNAL = 3.1; EXPRESSED IN BONE MARROW, SIGNAL = 2.1; EST_HUMAN HIT: BE904129.1, EVALUE 4.00e-70; SWISSPROT HIT: P09131, EVALUE 1.00e-12; NT HIT: gi10938005, EVALUE 3.00e-70
agcagtgctgaggctggtgctggctgtcccttgggccccccatggcaggctgatgagcagcagggcagctctgagcatgcttaagggacctgtgccaccaccctcgccccccagaccaggccactgctgagagct

SEQ ID NO: 23785 - DNA, 152 bp, Homo sapiens
  MAP TO CHR17.3; EXPRESSED IN HELA, SIGNAL = 9.5; EXPRESSED IN BONE MARROW, SIGNAL = 1.4; EXPRESSED IN FETAL LIVER, SIGNAL =  14; NT HIT: M62403.1, EVALUE 2.00e-80; EST_HUMAN HIT: BE881670.1, EVALUE 3.00e-80; SWISSPROT HIT: Q05716, EVALUE 1.00e-23
cagtgtcacccagctctggatgggcagcgtggcaagtgctggtgtgtggaccggaagacgggggtgaagcttccggggggcctggagccaaagggggagctggactgccaccagctggctgacagctttcgagagtgaggcctgccagcagg

SEQ ID NO: 23786 - DNA, 271 bp, Homo sapiens
  MAP TO CHR4.3; EXPRESSED IN FETAL LIVER, SIGNAL = 1.9; EXPRESSED IN ADULT LIVER, SIGNAL = 1.8; EXPRESSED IN HELA, SIGNAL = 7.1; EXPRESSED IN BONE MARROW, SIGNAL = 1.6; NT HIT: gi14723624, EVALUE 0.00e+00; EST_HUMAN HIT: AL568973.1, EVALUE 0.00e+00; SWISSPROT HIT: P50223, EVALUE 1.10e-01
gtactcgcttcccactcccaaagggggcacatacgccatcaacccccatctcaccgaggatcagcgcttccctcaaccgcgactctcccgaaaggccaggcagaaaaccaacgtgttcgcccctgactacatcgccgggatgtcgccctttgtcgagaatgacatctccagccgctcagctaccctacaggtccgggacagcaccttgggagctgggcggagacgcttaaatcccaacgcttccagaaagaagtttgtgaagaaaaggtga

SEQ ID NO: 23787 - DNA, 158 bp, Homo sapiens
  MAP TO CHR19.3; EXPRESSED IN BONE MARROW, SIGNAL = 0.94; EXPRESSED IN LUNG, SIGNAL = 0.69; EST_HUMAN HIT: BI753164.1, EVALUE 7.00e-63; SWISSPROT HIT: P34644, EVALUE 8.00e-06; NT HIT: gi9945321, EVALUE 5.00e-63
ccactttgagaccccaccactgtacctgttggctgcaaatttttgacagataaatcctcctggaatctgagtgacaatgtagccccagaaaaaggagccgtgtatgaggccgacagtctctggatcccagctgaactgggctttctgcgggccaaaat

SEQ ID NO: 23788 - DNA, 180 bp, Homo sapiens
  MAP TO CHR14.3; EXPRESSED IN HELA, SIGNAL = 2.8; EXPRESSED IN LUNG, SIGNAL = 1.6; EXPRESSED IN BONE MARROW, SIGNAL = 3.9; EXPRESSED IN PLACENTA, SIGNAL = 3.9; EXPRESSED IN FETAL LIVER, SIGNAL = 2.6; EXPRESSED IN ADULT LIVER, SIGNAL = 3.2; EXPRESSED IN BRAIN, SIGNAL =   3; EST_HUMAN HIT: AU123875.1, EVALUE 1.00e-92; SWISSPROT HIT: P97924, EVALUE 4.40e-02; NT HIT: gi14751683, EVALUE 8.00e-93
tctccagatagatctgaaggagcagggacagctcttgcatcgagaccccttcactgtcatctgtggccgaaagaagtgccttcgccatgtctttctcttcgagcatctcctcctgttcagcaagctcaagggccctgaaggggggtcagagatgtttgtttacaagcaggcctttaaggt

SEQ ID NO: 23789 - DNA, 147 bp, Homo sapiens
  MAP TO CHR1.3; EXPRESSED IN ADULT LIVER, SIGNAL =   1; EXPRESSED IN BRAIN, SIGNAL = 1.9; EXPRESSED IN BONE MARROW, SIGNAL =   1; NT HIT: X65964.1, EVALUE 2.00e-77; EST_HUMAN HIT: AW168445.1, EVALUE 3.00e-77; SWISSPROT HIT: P48681, EVALUE 2.00e-22
cctctatggctgtttctttctctaccaacccccagatttgcccttcaccttcccctcggcatatgctgaacactctagacccaccggattctccatccttagcctctaaactggagtggtcagggctgaggggtggtgccaaggagg

SEQ ID NO: 23790 - DNA, 161 bp, Homo sapiens
  MAP TO CHR6.3; EXPRESSED IN LUNG, SIGNAL = 1.1; EXPRESSED IN HEART, SIGNAL = 1.4; EXPRESSED IN PLACENTA, SIGNAL = 1.3; EXPRESSED IN BONE MARROW, SIGNAL = 1.6; EXPRESSED IN BRAIN, SIGNAL = 1.3; NT HIT: AB020018.1, EVALUE 5.00e-72; EST_HUMAN HIT: BE386750.1, EVALUE 8.00e-72; SWISSPROT HIT: Q9QUR6, EVALUE 3.00e-22
accgttttcctttcttgaagtggcaactatacttgggataatcatatagttcagtcattctctctttgtataaacctctgatgggacactgctcaagaaatggcacagtaatcttattctgggcctccacaaaggcctgtggagaaattaaaatggacaaa

SEQ ID NO: 23791 - DNA, 105 bp, Homo sapiens
  MAP TO CHR6.3; EXPRESSED IN ADULT LIVER, SIGNAL = 8.5; EXPRESSED IN BRAIN, SIGNAL = 3.5; EXPRESSED IN BONE MARROW, SIGNAL = 5.1; EXPRESSED IN LUNG, SIGNAL =  15; NT HIT: gi13645838, EVALUE 4.00e-50; EST_HUMAN HIT: AW865734.1, EVALUE 4.00e-51; SWISSPROT HIT: P25232, EVALUE 5.00e-12
agtctctagtgatccctgaaaagttccagcatattttgcgagtactcaacaccaacatcgatgggcggcggaaaatagcctttgccatcactgccattaaggtaa

SEQ ID NO: 23792 - DNA, 248 bp, Homo sapiens
  MAP TO CHR4.3; EXPRESSED IN BONE MARROW, SIGNAL = 0.85; EXPRESSED IN ADULT LIVER, SIGNAL = 0.91; NT HIT: gi7661687, EVALUE 0.00e+00; SWISSPROT HIT: P97588, EVALUE 2.00e-22; EST_HUMAN HIT: AW293136.1, EVALUE 0.00e+00
gtgctggttccaagacacagcgaatataatcctcagcacagcctcttagctcagttccgtaacttaggacaaaatgagcctcacatgccactcaacgccacttttccagattctttccagcaacccaacagccacccgtttcctcactctcccaatagcagttacccaaactctcctgggagcagcagcagcacctaccctcactctcccaccagctcagacccaggaagccctttccagatgccagg

SEQ ID NO: 23793 - DNA, 109 bp, Homo sapiens
  MAP TO CHR4.3; EXPRESSED IN LUNG, SIGNAL = 6.6; EXPRESSED IN BONE MARROW, SIGNAL = 1.6; SWISSPROT HIT: Q9D1R9, EVALUE 9.00e-14; EST_HUMAN HIT: C14458.1, EVALUE 6.00e-53; NT HIT: gi14734144, EVALUE 4.00e-53
caggttcgtgctgtaagacctaaagttcttatgagattgtccaaaacaaagaaacatgtcagcagggcctatggtggttccatgtgtgctaaatgtgttcgtgacaggt

SEQ ID NO: 23794 - DNA, 221 bp, Homo sapiens
  MAP TO CHR17.3; EXPRESSED IN LUNG, SIGNAL = 3.9; EXPRESSED IN PLACENTA, SIGNAL = 1.1; EXPRESSED IN HEART, SIGNAL = 2.2; EXPRESSED IN FETAL LIVER, SIGNAL =  16; EXPRESSED IN BONE MARROW, SIGNAL = 1.3; SWISSPROT HIT: O00767, EVALUE 2.00e-36; NT HIT: gi16179031, EVALUE 1.00e-121; EST_HUMAN HIT: BI850486.1, EVALUE 1.00e-104
aggtactacaaacccggcttgctgttgatgtgcttcatcctgcccacgcttgtgccctggtgtttctggggtgaaacttttcaaaacagcgtgttcgttgccactttcttgcgatatgctgtggtgcttaatgccacgtggctggtgaacagtgctgcccacctcttcagatatcgtccttatgacaagaacattagcctccgggagaatatcctggtttc

SEQ ID NO: 23795 - DNA, 140 bp, Homo sapiens
  MAP TO CHR2.3; EXPRESSED IN BONE MARROW, SIGNAL = 0.67; EXPRESSED IN ADULT LIVER, SIGNAL = 0.55; SWISSPROT HIT: Q02156, EVALUE 3.00e-22; NT HIT: gi15295562, EVALUE 2.00e-71; EST_HUMAN HIT: BG211130.1, EVALUE 3.00e-71
cagttcatgacgaagaatccccacaagcgcctgggctgtgtggcatcgcagaatggcgaggacgccatcaagcagcacccattcttcaaagagattgactgggtgctcctggagcagaagaagatcaagccacccttcaa

SEQ ID NO: 23796 - DNA, 184 bp, Homo sapiens
  MAP TO CHR5.3; EXPRESSED IN LUNG, SIGNAL = 1.7; EXPRESSED IN BONE MARROW, SIGNAL = 1.3; EXPRESSED IN PLACENTA, SIGNAL = 2.2; EXPRESSED IN ADULT LIVER, SIGNAL = 0.93; EXPRESSED IN BRAIN, SIGNAL = 1.9; SWISSPROT HIT: P48643, EVALUE 2.00e-25; NT HIT: gi16159221, EVALUE 3.00e-86; EST_HUMAN HIT: AL538718.1, EVALUE 2.00e-88
tttcttaccaaccactcctgtggttccatctccaatttcatcatcctgagacttggacagttccaccatcagcttggcaatctgatgatcaacatccatcatgcttaagatggtggccccatcattagttacagtcacatccccatccttatccaccatcatcttatcaagccctaaaaaacaa

SEQ ID NO: 23797 - DNA, 131 bp, Homo sapiens
  MAP TO CHR8.3; EXPRESSED IN ADULT LIVER, SIGNAL = 0.68; EXPRESSED IN BONE MARROW, SIGNAL = 0.75; NT HIT: gi14782443, EVALUE 1.00e-66; SWISSPROT HIT: P07196, EVALUE 5.00e-18; EST_HUMAN HIT: AA131433.1, EVALUE 1.00e-66
acaggacacgatcaacaaattagaaaatgaattgaggaccacaaagagtgaaatggcacgatacctaaaagaataccaagacctcctcaacgtgaagatggctttggatattgagattgcagcttacaggt

SEQ ID NO: 23798 - DNA, 101 bp, Homo sapiens
  MAP TO CHRX.3; EXPRESSED IN BONE MARROW, SIGNAL = 0.97; EXPRESSED IN PLACENTA, SIGNAL = 1.1; EXPRESSED IN FETAL LIVER, SIGNAL = 0.52; EXPRESSED IN BRAIN, SIGNAL = 1.4; SWISSPROT HIT: P17971, EVALUE 3.00e-03; NT HIT: gi11420025, EVALUE 4.00e-50; EST_HUMAN HIT: AL120075.1, EVALUE 6.00e-50
aagattttcgggtccatctgctcactcagtggcgtcttggtcattgccctgcctgtgccagtcattgtgtccaactttagccgcatctaccaccagaacca

SEQ ID NO: 23799 - DNA, 197 bp, Homo sapiens
  MAP TO CHR2.3; EXPRESSED IN ADULT LIVER, SIGNAL = 0.83; EXPRESSED IN BONE MARROW, SIGNAL = 0.74; EXPRESSED IN HEART, SIGNAL = 0.83; EST_HUMAN HIT: AW118919.1, EVALUE 6.00e-98; SWISSPROT HIT: Q91836, EVALUE 3.00e-12; NT HIT: gi14781423, EVALUE 9.00e-62
gacagaaatttcgatagtcattcatcatctgaaaatatttcaaatgcctttaattgtaagaaataagtaccagtttccataaatgactctagcctgcaaattgtagtatattctctcttatgagcaggtcctccctcctgggaaagggtatattcaggaagtctccagccatgatgaatagccaattcctataaaat

SEQ ID NO: 23800 - DNA, 282 bp, Homo sapiens
  MAP TO CHR17.3; EXPRESSED IN BONE MARROW, SIGNAL = 1.9; EXPRESSED IN ADULT LIVER, SIGNAL = 2.3; EXPRESSED IN BRAIN, SIGNAL = 2.9; SWISSPROT HIT: P19838, EVALUE 4.70e-01; NT HIT: gi14774381, EVALUE 0.00e+00; EST_HUMAN HIT: BF879151.1, EVALUE 9.00e-30
gccagagccagcggcgtcattcccttcttgttggtgagctcctccagcttcagcgtcgggtgcagtttggcccccaggatcagaatctcattgtacatgctcgtcacaaacttcgtgttgtcggccgtgttgtcggccacctccaccagggcgtgcagcaccgtgttgcccaccgagtccctggcgctgatgtcggccgtctgccaggagttctgcagcaggaacttcacgatgcccagctggttggtgcacgcggccagggacaggggcagttcacctgca

SEQ ID NO: 23801 - DNA, 171 bp, Homo sapiens
  MAP TO CHR8.3; EXPRESSED IN LUNG, SIGNAL = 0.52; EXPRESSED IN BONE MARROW, SIGNAL = 2.1; EXPRESSED IN FETAL LIVER, SIGNAL = 0.54; NT HIT: gi5739523, EVALUE 2.00e-90; SWISSPROT HIT: Q14191, EVALUE 4.00e-29
ctgggaatttgaaggtccaacaatcatctactgtccttctagaaaaatgacacaacaagttacaggtgaacttaggaaacttaatctatcctgtggaacataccatgcgggcatgagttttagcacaaggaaagacattcatcataggtttgtaagagatgaaattcaggt

SEQ ID NO: 23802 - DNA, 106 bp, Homo sapiens
  MAP TO CHR1.3; EXPRESSED IN FETAL LIVER, SIGNAL = 1.3; EXPRESSED IN PLACENTA, SIGNAL = 1.6; EXPRESSED IN BONE MARROW, SIGNAL = 1.3; EXPRESSED IN BRAIN, SIGNAL = 1.1; NT HIT: AF149301.1, EVALUE 4.00e-53; EST_HUMAN HIT: BE074096.1, EVALUE 3.00e-45; SWISSPROT HIT: Q9UN79, EVALUE 3.00e-13
cggttgaagtccagcttctcctggcttccagaggcagcctccgacactcctggtctcttgggttctggggacccattaccctctggagagctacagtcctgcaaga

SEQ ID NO: 23803 - DNA, 127 bp, Homo sapiens
  MAP TO CHR1.3; EXPRESSED IN ADULT LIVER, SIGNAL = 0.94; EXPRESSED IN BRAIN, SIGNAL = 1.3; EXPRESSED IN PLACENTA, SIGNAL = 0.81; EXPRESSED IN BONE MARROW, SIGNAL =   1; SWISSPROT HIT: P34820, EVALUE 4.00e-18; NT HIT: gi16168530, EVALUE 3.00e-48; EST_HUMAN HIT: AA534806.1, EVALUE 2.00e-59
cccccaggactgggtcatcgccccccaaggctactcagcctattactgtgagggggagtgctccttcccgctggactcctgcatgaacgccaccaaccacgccatcctgcagtccctggtcagtacc

SEQ ID NO: 23804 - DNA, 131 bp, Homo sapiens
  MAP TO CHR15.3; EXPRESSED IN PLACENTA, SIGNAL = 1.2; EXPRESSED IN BONE MARROW, SIGNAL = 0.81; SWISSPROT HIT: P24062, EVALUE 9.00e-18; NT HIT: gi11068002, EVALUE 1.00e-63; EST_HUMAN HIT: BE893437.1, EVALUE 1.00e-63
atgattcagatggccggagagattgcagacggcatggcatacctcaacgccaataagttcgtccacagagaccttgctgcccggaattgcatggtagccgaagatttcacagtcaaaatcggaggtgtgtc

SEQ ID NO: 23805 - DNA, 114 bp, Homo sapiens
  MAP TO CHR20.3; EXPRESSED IN BONE MARROW, SIGNAL = 2.9; EXPRESSED IN LUNG, SIGNAL = 4.4; EXPRESSED IN FETAL LIVER, SIGNAL = 5.3; SWISSPROT HIT: P01034, EVALUE 6.00e-17; NT HIT: M27890.1, EVALUE 8.00e-58; EST_HUMAN HIT: AV751337.1, EVALUE 7.00e-56
tcagatgtggctggtcatggaaggggcagttgtccaagttgggctgggtcttggtacacgtggttcggcccagctccacgtccaagaagtagttcaccccagctacgatctaca

SEQ ID NO: 23806 - DNA, 294 bp, Homo sapiens
  MAP TO CHR1.3; EXPRESSED IN BONE MARROW, SIGNAL =   3; EXPRESSED IN ADULT LIVER, SIGNAL = 2.8; EXPRESSED IN BRAIN, SIGNAL = 4.1; SWISSPROT HIT: O02818, EVALUE 2.00e-10; NT HIT: gi14723970, EVALUE 0.00e+00; EST_HUMAN HIT: BG743195.1, EVALUE 0.00e+00
ggctgtcagtgcacgtccacattgtgtgtttcacaccactgcaggccgccatatcacagggcctcagttcaaggacacaccttctgaacttccccctgtcccatgccagaagtggggcagtgaaggaaaggggcacgggattaggctgttgctcctgggctatctgcagttcttgggcccaaagcccctgaatccccatagttagttgctgtcattcttgatgacgacctctaatccgtggtgccgcaactgagctcgaagcagcagattcttgtttttaagatcttccacctg

SEQ ID NO: 23807 - DNA, 139 bp, Homo sapiens
  MAP TO CHR4.3; EXPRESSED IN HEART, SIGNAL = 0.57; EXPRESSED IN LUNG, SIGNAL = 0.65; EXPRESSED IN BONE MARROW, SIGNAL = 0.69; SWISSPROT HIT: P25874, EVALUE 4.00e-15; NT HIT: X51953.1, EVALUE 2.00e-52; EST_HUMAN HIT: BG203995.1, EVALUE 3.00e-49
gcagacctgtttgttatatgaaatgggaagttacctgctaatatgttgtttttcacaaaggcctccttcattagatcatatgttactagctctgtacaattgatgatgacacttctcatcagattgggagtagtccctg

SEQ ID NO: 23808 - DNA, 205 bp, Homo sapiens
  MAP TO CHR12.3; EXPRESSED IN HEART, SIGNAL = 0.5; EXPRESSED IN BONE MARROW, SIGNAL = 0.81; EXPRESSED IN LUNG, SIGNAL = 1.3; SWISSPROT HIT: Q9ULV4, EVALUE 5.00e-33; NT HIT: gi7656990, EVALUE 1.00e-109; EST_HUMAN HIT: AL537184.1, EVALUE 1.00e-109
accttgtgcagagggaggacaaggaacgctcctcccccacttgcctctatgattatggcaacaaatctgggattgacagcacaaaaggaactatcccaggtcacacgagaaacccggatgtcatcatagcactggtcatttttcaccgcttgcccaaatacatgccgaaacttgctctgtcgtaccactcgcctcatcgtgtctg

SEQ ID NO: 23809 - DNA, 118 bp, Homo sapiens
  MAP TO CHR18.3; EXPRESSED IN BONE MARROW, SIGNAL = 2.7; EXPRESSED IN PLACENTA, SIGNAL = 2.4; EXPRESSED IN ADULT LIVER, SIGNAL = 2.1; EXPRESSED IN BRAIN, SIGNAL = 2.2; SWISSPROT HIT: P04818, EVALUE 2.00e-15; NT HIT: D00596.1, EVALUE 3.00e-60; EST_HUMAN HIT: AW815475.1, EVALUE 5.00e-60
acctcttggattccaagcgcacatgatgattcttctgtcgtcagggttggttttgatggtgtcaatcactctttgcagttggtcaactccctgtcctgaataatctgtagaattgtca

SEQ ID NO: 23810 - DNA, 188 bp, Homo sapiens
  MAP TO CHR17.3; EXPRESSED IN BRAIN, SIGNAL = 1.2; EXPRESSED IN LUNG, SIGNAL = 2.2; EXPRESSED IN PLACENTA, SIGNAL = 1.5; EXPRESSED IN BONE MARROW, SIGNAL = 1.7; SWISSPROT HIT: Q13368, EVALUE 8.00e-27; NT HIT: gi4505238, EVALUE 3.00e-89; EST_HUMAN HIT: AA346722.1, EVALUE 5.00e-86
agctggtcttcggaggagcttccggctgggctgtagggagagactgggtggctcgcaggaaggaaagatgtcctccggagctgagtctccggagctgctgacttacgaagaggtggccaggtaccaacaccagcccggagagcggccccgcctggtggttctgatcggtaggtgccatcctgggtttc

SEQ ID NO: 23811 - DNA, 141 bp, Homo sapiens
  MAP TO CHR19.3; EXPRESSED IN ADULT LIVER, SIGNAL = 1.7; EXPRESSED IN BRAIN, SIGNAL = 2.5; EXPRESSED IN BONE MARROW, SIGNAL = 1.9; NT HIT: gi15307371, EVALUE 1.00e-72; EST_HUMAN HIT: AL521392.1, EVALUE 2.00e-72; SWISSPROT HIT: P55199, EVALUE 5.00e-20
acccacctgctggaggaggccatccagcgcgtccttgtccgcctgcgtcaggccgtccttctgcagtcgcagcagcagctcagccttgcggtagggccgtagtgccaggaggtgcagcactcggtcacggaagggcctctg

SEQ ID NO: 23812 - DNA, 417 bp, Homo sapiens
  MAP TO CHRX.3; EXPRESSED IN BONE MARROW, SIGNAL =   4; EXPRESSED IN BRAIN, SIGNAL = 4.5; SWISSPROT HIT: P52795, EVALUE 4.00e-40; NT HIT: gi14769583, EVALUE 0.00e+00; EST_HUMAN HIT: BG420725.1, EVALUE 0.00e+00
ttcctcagagactgtgaaccaggaagagaagagtggcccaggtgcaagtgggggcagcagcggggaccctgatggcttcttcaactccaaggtggcattgttcgcggctgtcggtgccggttgcgtcatcttcctgctcatcatcatcttcctgacggtcctactactgaagctacgcaagcggcaccgcaagcacacacagcagcgggcggctgccctctcgctcagtaccctggccagtcccaaggggggcagtggcacagcgggcaccgagcccagcgacatcatcattcccttacggactacagagaacaactactgcccccactatgagaaggtgagtggggactacgggcaccctgtctacatcgtccaagagatgccgccccagagcccggcgaacatctactacaaggt

SEQ ID NO: 23813 - DNA, 234 bp, Homo sapiens
  MAP TO CHRX.3; EXPRESSED IN LUNG, SIGNAL = 1.2; EXPRESSED IN HEART, SIGNAL = 0.99; EXPRESSED IN PLACENTA, SIGNAL = 0.88; EXPRESSED IN BONE MARROW, SIGNAL = 0.75; EST_HUMAN HIT: BI753094.1, EVALUE 3.00e-32; NT HIT: gi14757491, EVALUE 1.00e-129; SWISSPROT HIT: P26550, EVALUE 7.20e-01
acacattctgctatagctgtggggaagacggccacatcagggtacagtgcatcaacccctccaacctgctcttggtaaagcagaagaaacaggctgcagttgagtcgggaaacgggaactgggcttgggacaagagccatcccaagtccaaggccaagtaggctcgggagaacagggcaacatttcctaccacaggccaaggagacaaaagagatattggaaggaggggaaaga

SEQ ID NO: 23814 - DNA, 377 bp, Homo sapiens
  MAP TO CHR11.3; EXPRESSED IN LUNG, SIGNAL = 2.6; EXPRESSED IN BONE MARROW, SIGNAL = 1.2; SWISSPROT HIT: P17405, EVALUE 4.00e-73; EST_HUMAN HIT: BI818723.1, EVALUE 0.00e+00; NT HIT: M81780.1, EVALUE 0.00e+00
gcaggttaccgtgtgtaccaaatagatggaaactactccgggagctctcacgtggtcctggaccatgagacctacatcctgaatctgacccaggcaaacataccgggagccataccgcactggcagcttctctacagggctcgagaaacctatgggctgcccaacacactgcctaccgcctggcacaacctggtatatcgcatgcggggcgacatgcaacttttccagaccttctggtttctctaccataagggccacccaccctcggagccctgtggcacgccctgccgtctggctactctttgtgcccagctctctgcccgtgctgacagccctgctctgtgccgccacctgatgccagatgggagcctcccaga

SEQ ID NO: 23815 - DNA, 108 bp, Homo sapiens
  MAP TO CHR5.3; EXPRESSED IN ADULT LIVER, SIGNAL = 1.4; EXPRESSED IN PLACENTA, SIGNAL = 1.7; EXPRESSED IN BONE MARROW, SIGNAL = 1.6; SWISSPROT HIT: Q16637, EVALUE 1.40e-01; EST_HUMAN HIT: BI113735.1, EVALUE 4.00e-14; NT HIT: U80017.1, EVALUE 2.00e-18
attcttcttttggcttttattcttcttagcaggttttcttttaggtgtggtttttggtttacccgaagtttcacaaatgtcaccattctttagagcatgctacgaaaa

SEQ ID NO: 23816 - DNA, 216 bp, Homo sapiens
  MAP TO CHR19.3; EXPRESSED IN BONE MARROW, SIGNAL = 0.7; EXPRESSED IN HELA, SIGNAL = 3.9; EXPRESSED IN FETAL LIVER, SIGNAL =  47; SWISSPROT HIT: P01024, EVALUE 3.00e-35; EST_HUMAN HIT: BF338882.1, EVALUE 1.00e-113; NT HIT: J04763.1, EVALUE 1.00e-113
cccacccttcttgatgagctccaaggccccctgccgcttctctaggccgaacttctcccactgctccgtttcatccaggtaatgcacagcgatgaccgtgggcgtcatgccgatcatgttctgttccccgcagcccgagggggtcacaatgaggtgcttcagccgttccgcgtcgacggcatcctctgtcatctgggccactggggtccctgcagc

SEQ ID NO: 23817 - DNA, 179 bp, Homo sapiens
  MAP TO CHR20.3; EXPRESSED IN BONE MARROW, SIGNAL = 1.7; EXPRESSED IN HEART, SIGNAL = 1.8; EXPRESSED IN PLACENTA, SIGNAL = 1.6; EXPRESSED IN FETAL LIVER, SIGNAL = 1.2; NT HIT: AF110020.1, EVALUE 5.00e-94; SWISSPROT HIT: O43526, EVALUE 7.00e-26; EST_HUMAN HIT: AI418222.1, EVALUE 7.00e-94
ctcaccttgctgtgggcatagaccacagagcccagcagcttccaggtgcctccccgccggtccatgcggatcatccgcagaatctgcaggaagcgcaggctccggagcgcagatgtggcaaagacgttgccctgggagccggcggccagcaccgcaatggaggcgatgagcaccatgat

SEQ ID NO: 23818 - DNA, 115 bp, Homo sapiens
  MAP TO CHR17.3; EXPRESSED IN LUNG, SIGNAL =   2; EXPRESSED IN BONE MARROW, SIGNAL = 1.5; EST_HUMAN HIT: AW188245.1, EVALUE 3.00e-58; NT HIT: gi14770919, EVALUE 2.00e-58
attcttgcactaatgggtttctatcacatcatgtctataaatgggtgcactttactgtttgaatttgtaactgaagtactggatatttaagtgtgagtaatgtcttcattagaaa

SEQ ID NO: 23819 - DNA, 181 bp, Homo sapiens
  MAP TO CHR5.3; EXPRESSED IN BONE MARROW, SIGNAL =   1; EXPRESSED IN HELA, SIGNAL =   3; SWISSPROT HIT: P14733, EVALUE 5.00e-28; EST_HUMAN HIT: BG261333.1, EVALUE 1.00e-92; NT HIT: L37740.1, EVALUE 1.00e-97
caggagattaacgagaccagaaggaagcatgaaacgcgcttggtagaggtggattctgggcgtcaaattgagtatgagtacaagctggcgcaagcccttcatgagatgagagagcaacatgatgcccaagtgaggctgtataaggaggagctggagcagacttaccatgccaaagtgagct

SEQ ID NO: 23820 - DNA, 234 bp, Homo sapiens
  MAP TO CHR5.3; EXPRESSED IN BONE MARROW, SIGNAL = 0.89; EXPRESSED IN LUNG, SIGNAL = 0.39; EXPRESSED IN PLACENTA, SIGNAL = 0.8; SWISSPROT HIT: Q93088, EVALUE 2.00e-43; EST_HUMAN HIT: AI244216.1, EVALUE 1.00e-129; NT HIT: AF118377.1, EVALUE 1.00e-129
caggactggaacccagagttgccaccagatgggatattcaaaaatacgccagagaggcctacaacctgggggtcaggtacattggcgggtgctgtggatttgagccctaccacatcagggcaattgcagaggagctggccccagaaaggggctttttgccaccagcttcagaaaaacatggcagctggggaagtggtttggacatgcacaccaaaccctgggttagagcaaggt

SEQ ID NO: 23821 - DNA, 159 bp, Homo sapiens
  MAP TO CHR9.3; EXPRESSED IN BONE MARROW, SIGNAL = 1.9; EXPRESSED IN LUNG, SIGNAL = 5.6; SWISSPROT HIT: P13552, EVALUE 6.70e-01; EST_HUMAN HIT: BG167927.1, EVALUE 2.00e-84; NT HIT: AB002283.1, EVALUE 2.00e-84
gggctgctggccagaacaaacaacattctattaccaagaacacggccaagctggaccgggagacagaggagctgcaccatgacagggtgaccctggaggtgggcaaggtgatccagcaaggtcggcagagcaaggggcttacgcagaaggacctggcca

SEQ ID NO: 23822 - DNA, 123 bp, Homo sapiens
  MAP TO CHR1.3; EXPRESSED IN PLACENTA, SIGNAL = 1.4; EXPRESSED IN BONE MARROW, SIGNAL = 1.9; SWISSPROT HIT: Q9UPN3, EVALUE 2.00e-16; EST_HUMAN HIT: AU133489.1, EVALUE 5.00e-63; NT HIT: gi14745189, EVALUE 4.00e-63
tcatcaggtagcaagttgaaacgaccaacaccaacttttcattctagtcggacatcccttgctggtgataccagcaatagttcttccccggcctccacaggtgccaaaactaatcgggcaggt

SEQ ID NO: 23823 - DNA, 124 bp, Homo sapiens
  MAP TO CHR20.3; EXPRESSED IN PLACENTA, SIGNAL = 0.93; EXPRESSED IN BONE MARROW, SIGNAL =   1; EST_HUMAN HIT: BG826847.1, EVALUE 2.00e-59; NT HIT: gi8922713, EVALUE 1.00e-56; SWISSPROT HIT: O07170, EVALUE 6.00e+00
cacttacccccatgactctgccgcgctgctgaacatcctcccacataaaatgaactatgatacgacacatgtacttcccactccggccttcctgcttcattcggactagacacatcctgggtgg

SEQ ID NO: 23824 - DNA, 207 bp, Homo sapiens
  MAP TO CHR1.3; EXPRESSED IN FETAL LIVER, SIGNAL = 0.47; EXPRESSED IN BONE MARROW, SIGNAL = 1.6; EXPRESSED IN LUNG, SIGNAL = 0.6; EXPRESSED IN HEART, SIGNAL = 1.3; EST_HUMAN HIT: BF826427.1, EVALUE 1.00e-113; NT HIT: AF077374.1, EVALUE 1.00e-112; SWISSPROT HIT: O09116, EVALUE 4.00e-09
cctggctcagggaccttggtacagcctggctctggaatctttgtgtttccaggttgtggaacctttgagtggcatggctccttggttgtgggaacaaatatttcctgaggtggaggctggctgggttgtttcacctgctgctgttgaagctgaggtggtggggtaaaggtctgcttctgctggtaagaactcatgcttcaaaggatg

SEQ ID NO: 23825 - DNA, 220 bp, Homo sapiens
  MAP TO CHRX.3; EXPRESSED IN LUNG, SIGNAL = 0.81; EXPRESSED IN HEART, SIGNAL = 1.3; EXPRESSED IN BONE MARROW, SIGNAL = 1.8; EXPRESSED IN PLACENTA, SIGNAL = 1.7; NT HIT: gi15309058, EVALUE 1.00e-115; SWISSPROT HIT: Q13613, EVALUE 2.00e-35; EST_HUMAN HIT: AW503613.1, EVALUE 1.00e-113
ttttctgaagatgctgcttgctggggcagtaagaattgctgataaaatagaatctgggaaaacatctgtggtggtgcattgcagcgacggttgggaccgaacagcccagctcacatctctggctatgctaatgttggacagttactacaggaccattaaaggatttgaaactctcgtagaaaaggagtggataagctttggacacaggtttgcactggta

SEQ ID NO: 23826 - DNA, 162 bp, Homo sapiens
  MAP TO CHR10.3; EXPRESSED IN BONE MARROW, SIGNAL = 1.9; EXPRESSED IN ADULT LIVER, SIGNAL = 2.8; SWISSPROT HIT: P33260, EVALUE 3.00e-23; EST_HUMAN HIT: BG545330.1, EVALUE 3.00e-77; NT HIT: L16870.1, EVALUE 3.00e-86
cttttctatgtttagttctcaaaagtctatggccctgtgttcactgtgtattttggcctgaagcccattgtggtgttgcatggatatgaagcagtgaaggaggccctgattgatcatggagaggagttttctggaagaggaagttttccagtggctgaaaaa

SEQ ID NO: 23827 - DNA, 236 bp, Homo sapiens
  MAP TO CHR22.3; EXPRESSED IN FETAL LIVER, SIGNAL = 5.5; EXPRESSED IN BONE MARROW, SIGNAL = 2.8; NT HIT: gi14778414, EVALUE 1.00e-130; SWISSPROT HIT: Q04917, EVALUE 7.00e-40; EST_HUMAN HIT: BI028364.1, EVALUE 1.00e-130
atcagcaaagagcagatgcaacccacgcatcccatccggctgggcctggccctcaacttctccgtgttctactatgagatccagaatgcacctgagcaagcctgcctcttagccaaacaagccttcgatgatgccatagctgagctggacacactaaacgaggattcctataaggactccacgctgatcatgcagttgctgcgagacaacctcaccctctggacgagcgaccagca

SEQ ID NO: 23828 - DNA, 122 bp, Homo sapiens
  MAP TO CHR1.3; EXPRESSED IN FETAL LIVER, SIGNAL = 5.4; EXPRESSED IN HELA, SIGNAL =  43; EXPRESSED IN BONE MARROW, SIGNAL = 2.6; EST_HUMAN HIT: BI760467.1, EVALUE 5.00e-60; NT HIT: gi14721333, EVALUE 1.00e-59; SWISSPROT HIT: Q63716, EVALUE 6.00e-17
acacctaagaaacaaggaggactgggacccatgaacattcctttggtatcagacccgaagcgcaccattgctcaggattatggggtcttaaaggctgatgaaggcatctcgttcaggtatgt

SEQ ID NO: 23829 - DNA, 282 bp, Homo sapiens
  MAP TO CHR6.3; EXPRESSED IN PLACENTA, SIGNAL = 1.5; EXPRESSED IN HEART, SIGNAL = 1.6; EXPRESSED IN FETAL LIVER, SIGNAL = 0.96; EXPRESSED IN BONE MARROW, SIGNAL = 1.6; EST_HUMAN HIT: BG747345.1, EVALUE 0.00e+00; NT HIT: Y09800.1, EVALUE 0.00e+00; SWISSPROT HIT: Q30201, EVALUE 4.00e-53
gagtcccacaccctgcaggtcatcctgggctgtgaaatgcaagaagacaacagtaccgagggctactggaagtacgggtatgatgggcaggaccaccttgaattctgccctgacacactggattggagagcagcagaacccagggcctggcccaccaagctggagtgggaaaggcacaagattcgggccaggcagaacagggcctacctggagagggactgccctgcacagctgcagcagttgctggagctggggagaggtgttttggaccaacaaggtatg

SEQ ID NO: 23830 - DNA, 256 bp, Homo sapiens
  MAP TO CHR6.3; EXPRESSED IN BONE MARROW, SIGNAL = 3.6; EXPRESSED IN FETAL LIVER, SIGNAL = 4.7; NT HIT: gi14782538, EVALUE 0.00e+00; SWISSPROT HIT: P01903, EVALUE 3.00e-48; EST_HUMAN HIT: BF870523.1, EVALUE 0.00e+00
agccctgtggaactgagagagcccaacgtcctcatctgtttcatagacaagttcaccccaccagtggtcaatgtcacgtggcttcgaaatggaaaacctgtcaccacaggagtgtcagagacagtcttcctgcccagggaagaccaccttttccgcaagttccactatctccccttcctgccctcaactgaggacgtttacgactgcagggtggagcactggggcttggatgagcctcttctcaagcactggggta

SEQ ID NO: 23831 - DNA, 139 bp, Homo sapiens
  MAP TO CHR1.3; EXPRESSED IN LUNG, SIGNAL =   2; EXPRESSED IN HEART, SIGNAL = 1.3; EXPRESSED IN BONE MARROW, SIGNAL = 1.1; NT HIT: V01511.1, EVALUE 1.00e-72; SWISSPROT HIT: O74537, EVALUE 3.00e-01
cacagagttttggccagtggtcgtgcagtccaaggggctggatggcatgctggacccaagctcagctcagcgtccggacccaataacagttttaccaagggagcagctttctatcctggccacactgaggtaagtgcct

SEQ ID NO: 23832 - DNA, 243 bp, Homo sapiens
  MAP TO CHR12.3; EXPRESSED IN FETAL LIVER, SIGNAL = 1.5; EXPRESSED IN BONE MARROW, SIGNAL = 1.2; NT HIT: gi14767728, EVALUE 1.00e-122; SWISSPROT HIT: Q03669, EVALUE 1.00e-34; EST_HUMAN HIT: BF036658.1, EVALUE 1.00e-122
ttccctttcagactggcgatggcgtgaacgatgctcctgctctgaagaaagccgagattggcattgctatgggctctggcactgcggtggctaaaaccgcctctgagatggtcctggcggatgacaacttctccaccattgtggctgccgttgaggaggggcgggcaatctacaacaacatgaaacagttcatccgctacctcatctcgtccaacgtcggggaagttgtctggtaggtctctg

SEQ ID NO: 23833 - DNA, 179 bp, Homo sapiens
  MAP TO CHR1.3; EXPRESSED IN BONE MARROW, SIGNAL = 0.81; EST_HUMAN HIT: AW504657.1, EVALUE 5.00e-95; NT HIT: gi4504960, EVALUE 3.00e-95; SWISSPROT HIT: Q14739, EVALUE 6.00e-27
accttaatatcattctctttcaattcaagctctgttccatctttatacttcacagtgtaaagctgggaggtgctgtcgtggctcagaatttctacttcataataaagtgaactcccaggccatcgacctcttaccacttcaccatcggcaaatttcctacttggcattttctataatta

SEQ ID NO: 23834 - DNA, 132 bp, Homo sapiens
  MAP TO CHR12.3; EXPRESSED IN HEART, SIGNAL = 1.5; EXPRESSED IN ADULT LIVER, SIGNAL = 2.4; EXPRESSED IN BONE MARROW, SIGNAL =   2; EST_HUMAN HIT: AI609722.1, EVALUE 2.00e-68; NT HIT: gi7706500, EVALUE 2.00e-68
ttcttcccacatatcctgccttgtattaggaaatgacattgtgatccatttcattacaagtaaaatattacaaaatatttacaggaaaatattaaaaataactcaaacacaaaaggcaagatgaaataaact

SEQ ID NO: 23835 - DNA, 139 bp, Homo sapiens
  MAP TO CHR21.3; EXPRESSED IN BONE MARROW, SIGNAL = 0.84; EST_HUMAN HIT: BG742214.1, EVALUE 4.00e-67; NT HIT: U53004.1, EVALUE 1.00e-72; SWISSPROT HIT: P30042, EVALUE 6.00e-17
tgctctttcccaggaatgttttgaccgagtctgcgaggatcgcccgtggcaaaatcacagacctggccaacctcagtgcagccaaccatgatgctgccatctttccaggaggctttggagcggctaaaaacctgtgcgt

SEQ ID NO: 23836 - DNA, 238 bp, Homo sapiens
  MAP TO CHR1.3; EXPRESSED IN HELA, SIGNAL = 2.5; EXPRESSED IN BONE MARROW, SIGNAL = 0.82; SWISSPROT HIT: P11766, EVALUE 2.00e-21; EST_HUMAN HIT: BG741187.1, EVALUE 4.00e-84; NT HIT: gi14724058, EVALUE 2.00e-84
aggtggggcctggctctgtttgggccgtctttggcctgggaggagttggattgacagttatcgtgggcggtaaagtggctggtgcatcccggatcattggtgtggacatccatcaagataaatttccaagggctaaagagtttggagccactgaatgtatgaaccgtcaggattttagtcaacccatccaggaagtgctcattgagcggactgatggaggagtggactactcctttga

SEQ ID NO: 23837 - DNA, 224 bp, Homo sapiens
  MAP TO CHRX.3; EXPRESSED IN BONE MARROW, SIGNAL = 0.7; EXPRESSED IN BRAIN, SIGNAL = 0.52; NT HIT: L05636.1, EVALUE 1.00e-123; SWISSPROT HIT: P11532, EVALUE 3.00e-25; EST_HUMAN HIT: BE767245.1, EVALUE 1.00e-108
ttacctgaatttttcggagtttattcatttgctcctctagcttttgacaatgctcaaccagctgggaggagagcttcttccagcgtccctcaatttcttcaaattctgattgatatttccggctaatttcagagggcgctttcttcgacatctctttcacagtggtgctgagatagtataggccactttgttgctcttgcagagaactttgtaaagcctaaaaa

SEQ ID NO: 23838 - DNA, 285 bp, Homo sapiens
  MAP TO CHR9.3; EXPRESSED IN HEART, SIGNAL = 1.4; EXPRESSED IN ADULT LIVER, SIGNAL = 2.6; EXPRESSED IN BONE MARROW, SIGNAL = 1.7; NT HIT: AF029308.1, EVALUE 0.00e+00; SWISSPROT HIT: O67062, EVALUE 9.40e+00; EST_HUMAN HIT: BG610830.1, EVALUE 0.00e+00
atatttaatgagaaaaaagaagcttgcaggcagcacatgaagcattcacagcaggtatatgattgaaaactagtaaaataagtgtaagttgttgactgatgtaggtactaatagcatctgactttcagcactggccttgattacacaggagatggagaagtcgttacaattaagaaaacatatttaacaaatcattgtcaatttttataatgtttcaagcccattctttgttgatagcctccacatttatatggttaagtcattgttgctgtgtttcttatctat

SEQ ID NO: 23839 - DNA, 150 bp, Homo sapiens
  MAP TO CHR6.3; EXPRESSED IN FETAL LIVER, SIGNAL = 1.9; EXPRESSED IN BONE MARROW, SIGNAL = 1.4; NT HIT: M88006.1, EVALUE 3.00e-79; SWISSPROT HIT: P17707, EVALUE 4.00e-17; EST_HUMAN HIT: AU121345.1, EVALUE 3.00e-77
taatcaactctgctgttgttgctgcttcttagcaaaactggtaaaaacaaaattgtaatcattgaacatagcactctggcaatcaagacgcttaaaaccttcaatcttctggggcgaagcaagcactgtgcgacatttagaactctgggg

SEQ ID NO: 23840 - DNA, 128 bp, Homo sapiens
  MAP TO CHR19.3; EXPRESSED IN BONE MARROW, SIGNAL = 1.5; SWISSPROT HIT: P32788, EVALUE 3.50e+00; EST_HUMAN HIT: AI950351.1, EVALUE 5.00e-57; NT HIT: gi8923901, EVALUE 1.00e-56
ccccacaggctcacgctgacaagcagagccacatcctatgggccctcacaggccacgtgcagcggcagaggcgggagatggtggcacagcagcatcggctgcgacagatccaggagaggtgagcctgg

SEQ ID NO: 23841 - DNA, 517 bp, Homo sapiens
  MAP TO AC007363.3; EXPRESSED IN PLACENTA, SIGNAL = 1.6; EXPRESSED IN BRAIN, SIGNAL = 0.81; EXPRESSED IN HEART, SIGNAL = 1.6; EST_HUMAN HIT: BF037138.1, EVALUE 0.00e+00; NT HIT: AF069553.1, EVALUE 2.80e-01; SWISSPROT HIT: O43405, EVALUE 1.00e-49; EST_HUMAN HIT: BF727228.1, EVALUE 0.00e+00
ccttcagatgggcagccatggctgggatccggacgtcgtcgtaggacctcccgtcggtgatgaggatcattaacttcctcttgttgggcttggacttcttgaagagctgctccagggcgaagttgatggcagcccccgtgctggtgccaccactccagtagcccaccctcttgatggcgttgaggatgtcaggcttgctgctgtacttgtcgaacccaaactccagccgctgttcgtaggtgtactgcacggccccgatgcgcgtgtccgtgtcggaaatctcaaactctttggtgaggttggtcacaaactggaggacggtgcggaagttgcccgtccccacactgctggagccgtcgatgacgaagccaatgtcagccgagttcaagcaggtcttgctgcaggccaggcggtcagtgtcgcagacccgcttcaccagaggctgcagggtcttgtggaggccaaaccagctctgcacgtggagcgagtagaagccgtttgttctgcacacggccta

SEQ ID NO: 23842 - DNA, 554 bp, Homo sapiens
  MAP TO AP000346.1; EXPRESSED IN BRAIN, SIGNAL = 0.8; EXPRESSED IN HELA, SIGNAL = 1.4; NT HIT: AJ289880.1, EVALUE 5.30e-01; EST_HUMAN HIT: BI833755.1, EVALUE 3.10e+00; NT HIT: U29895.1, EVALUE 8.90e-02; SWISSPROT HIT: P70460, EVALUE 3.50e-01; EST_HUMAN HIT: BF345671.1, EVALUE 5.20e-01; SWISSPROT HIT: Q00613, EVALUE 4.20e-01
agatgccagcgaccaaaggctggccctccctgggtcctctgcgcctgccctctcattcaactgctgacatggctgtcacccacccacagcctcctgctggcttctcaggcccctggccaggcagcttcgtggggtgatggggaacttacaagttctcctgtcaaacccaccaagttgctctgcaaaatccttcctgcaccctgcaggccaaccagcatgggagggggtgtggccggtccaccctcagtgccctttcctgttgtgcaggggcccacgatgtcatcagcaagggtctgatccgctcactgatgtggaagctgtagagggaggagcgttccgggagctcgtcctggacccgctgtctcctgcctgcaggaggatgcaggagagggtctggcacctccaccccatgaggaaggcgagaacaggagaagcactggtgacgatcctgacacccagtggtcactgagtgtgtcctgtgtgccaggcattgtctccaaacctcacatttagacaaccctccagggaggcgatgtctgccttcacaggtgagg

SEQ ID NO: 23843 - DNA, 542 bp, Homo sapiens
  MAP TO AC007900.1; EXPRESSED IN PLACENTA, SIGNAL = 1.5; EXPRESSED IN BRAIN, SIGNAL =   1; EXPRESSED IN HELA, SIGNAL = 1.3; EXPRESSED IN LUNG, SIGNAL =   1; NT HIT: AJ012166.1, EVALUE 5.20e-01; NT HIT: U82671.2, EVALUE 1.00e-03; EST_HUMAN HIT: BI914297.1, EVALUE 1.00e-08; EST_HUMAN HIT: T87103.1, EVALUE 3.00e-05
gaccagaaaaccaggtttcatggtcatttcaatgttcttccaattacactatgcaacatatctaatgataataaacaccagaggtctaaaaacagtgccagtgtacatgttttgtttcatttttttaatcacttcatttttctttcatacattctttttaatttttttattattgcatgtatttttaaataaataaaaattaccttcctgtccttaactttgtcatgaacctatttcttttgggccccaagtccatggatcattatcagtgtatcagactgagcaataacatgaatgaatctcaaaaacctcatgttcagagaaggaaaccagacacaaaaaagtatataccatatgactccatttatatgacaaggataactaatctacagtgcagaacacgaatcagtgggctggggctgtgggaaccgactgcaagggagtatgggaatgatggaaacgttctatatcttgatctcatagtaatggttacatgggtagatatatgtgttaaaaccatcaaactacataattttaaaagg

SEQ ID NO: 23844 - DNA, 556 bp, Homo sapiens
  MAP TO AL008723.8; EXPRESSED IN BRAIN, SIGNAL = 1.3; EXPRESSED IN HELA, SIGNAL = 1.6; NT HIT: gi14744244, EVALUE 6.00e-07; EST_HUMAN HIT: BI062619.1, EVALUE 3.00e-06; NT HIT: AF116571.1, EVALUE 9.00e-05; EST_HUMAN HIT: AW579789.1, EVALUE 2.00e-06; SWISSPROT HIT: P10383, EVALUE 6.20e+00
aaataagtctttggaggggcaaagccaagagttttgagccatgatgggaacttcatcctccagttccctctgcccattagtaacggccctaagcctcctaggacagagtgtgtgtggatgggaagcatgtggtgtcatggttgtgggccatgacatggttgtgggccaaaagttgaaagatcataaggaaggaaagagggtcccttcctccctcctgtgtgtcagggtggaggaaggtggaagaaatgtagccaacccttgatggagtaggagatcacctggtcaagtcctgagctctgtaccctactccatttctgttcaccacagcaatgatcaccttctggcatcctaataatttatgtatttcctatgtggtttattttctatctcatactactagattttgagttccaagaggtaggggactttatgcctatttcactgatgttttgttagcaccaaagcagtgcctggcacttagtaggcactcaataaatagttgcagattaaatagattgagatctattatttggttatcactagccccaaaaatgcc

SEQ ID NO: 23845 - DNA, 592 bp, Homo sapiens
  MAP TO AL049649.4; EXPRESSED IN PLACENTA, SIGNAL = 1.8; EXPRESSED IN BRAIN, SIGNAL = 1.3; EXPRESSED IN HEART, SIGNAL = 1.3; EXPRESSED IN LUNG, SIGNAL = 1.2; EXPRESSED IN FETAL LIVER, SIGNAL = 1.5; EXPRESSED IN HELA, SIGNAL = 2.5; NT HIT: AF275271.1, EVALUE 9.50e-02; EST_HUMAN HIT: BF332591.1, EVALUE 5.60e-01; SWISSPROT HIT: Q02384, EVALUE 3.00e+00; NT HIT: AJ235271.1, EVALUE 2.20e+00
ttccacattgagagtggtgctattatgctgaaccgtgaggattactatctagtttccatatgttacgtcctcaatctgtgtttttaataatgtttccaatgcaaatttccctatcttttcgaagcaaaaattagcacttaaatacccctacatatgcccgcttgaatgcctgtaggagcaacatatccagtcacagatagaccccagtcattgacttacaagggacatgtgcaaaaattttatcaatcacctctccatcatagtagggcagatggttttcaccaccattctcccagtggcccttgaagcagctccgggggtggacccccggaagaggggtggcaaatacatccttacaatggaagttgatcagctggtctcctcccagggcatcaggaagacttagactacaccaacactatcctggaggtatgagaatccatcacagatatgaatttcagaagatttcacaagcacgtttatcaaactcctatctttgcagaaactcttccttgtttctgcaaatggcactatgctaaatggctaaaatgcattatggtaaattattatgaaaatcttggaaggcattgtt

SEQ ID NO: 23846 - DNA, 1117 bp, Homo sapiens
  MAP TO AC007567.1; EXPRESSED IN BRAIN, SIGNAL = 0.85; EXPRESSED IN HELA, SIGNAL = 1.1; NT HIT: AB026898.1, EVALUE 0.00e+00; NT HIT: AF009668.1, EVALUE 0.00e+00; EST_HUMAN HIT: AU134310.1, EVALUE 0.00e+00; SWISSPROT HIT: P26808, EVALUE 4.00e-64
ggaaactcagaaagccaatacccatttagtaagatggacacctgaagcagaagcggctttccaggccctgaagaaggccctaacccaagccccagtgttaataagcttgccaacggggcaagactttcctttatatgtcacagaaaaaacagaaatagctctaggagtccttacacaggtccaagggacaagcctgcaacccatggcatacctgagtaaggaaactgatgtagtggcaaagggttggcctcattgtttacaggtagtggcggcagtagcagtcttagtatctgaagcagttaaagtaatacaggaaagagatcttactgtgtggacatctcatgatgtgaatggcatactcactgctaaaggagacttgtggctgtcagacaaccgtttacttaaatatcaggctctactgcttgaaggaccagtgctgcgactgtgcacttgtgcaactcttaacccagccacatttcttccaggcaatgaagaaaagatataacataactgtcaacaagtaattgttcaaacctacgccactcaaggggaccttttagaggttcccctgactgatcccgacctcaacttgtatactgatggaagttccttcgtagaaaaagggcttcaaaaagtggggtatgcagttgtcagtgataatggaatacttgaaagtaatcccctcactccaggaactagtgctcagctggcagaactaatagccctcattcaggcagtagaattagaaggaaaaagggtaaatatatatacagactctaagtatgcttacctagtcctccatgcccatgcagcaatatggagagaaaggggattcctaacttccgagggaacacctatcaaacatcaggaagccattaggagattattattggcggtacagaaacctaaagaggtggcagtcttacactgctggggtcatcagaaaggaaaggaaagggaaatagaagggaactgccaagcggacattgaagcaaaaagagctgcaaggcaggaccctccattagaaatgcttatagaaggacccctagtatgtggtaatcccctctgggaaaccaagccccagtactcaaaagaagaaatagaatggggaacctca

SEQ ID NO: 23847 - DNA, 586 bp, Homo sapiens
  MAP TO AC007462.2; EXPRESSED IN BRAIN, SIGNAL = 1.1; EXPRESSED IN HELA, SIGNAL =   1; EXPRESSED IN LUNG, SIGNAL = 1.1; NT HIT: D16583.1, EVALUE 2.00e-05; EST_HUMAN HIT: BF744923.1, EVALUE 2.00e-04; EST_HUMAN HIT: AA938388.1, EVALUE 2.00e-03
ttgtggctctttattttcatgcactagagggtacttccagtgctccttaggaaccacattaggtcaatcagcgtcccccattgacatcacatgaatgtggttttctgtgtccattcttaaaagtggcccctttttggcctttgcaattaattattttggttgttcgtaaggacaatacaagaagcatatagcattataattaataatacagtctttgacgtcagaaagacctgggtgaaatagcatctctgccatttcttttgtgtatttccttaggcagggtatatcactatcaccatcatcatcaccatcatcctcatctacctttactaggcattaggtaagacagctacatatattttctctttaatttttgtgacaaactgatgaagttgctgttcttatcaccatgtaacaggtgatgaaactaacatgaggcttggggaggttaagcatctcaccagaacaataatgatagtaatactaaatagaaattattgtaaccatttctaagggttcgtcgtatctcatgtactgttataaagatttgcacatggtatctcatctcaattaattcccagaacaa

SEQ ID NO: 23848 - DNA, 583 bp, Homo sapiens
  MAP TO AL031588.1; EXPRESSED IN BRAIN, SIGNAL = 0.79; EXPRESSED IN HELA, SIGNAL = 0.6; EXPRESSED IN HEART, SIGNAL = 1.3; EXPRESSED IN LUNG, SIGNAL = 0.92; EST_HUMAN HIT: BI010342.1, EVALUE 1.00e-21; NT HIT: AF183401.1, EVALUE 6.00e-03; EST_HUMAN HIT: AU142880.1, EVALUE 5.50e-01; SWISSPROT HIT: Q02388, EVALUE 5.00e-03
gtgtttgctgctcctccatcgccctcggcatcctgggtgtttgggaagtgtggggagaagcttattccccacggagacagtgctagggaggggccgtctggaaggatggggatcctcggggctgcactgagcgggtcattcccttactgtgcttccctgaggctgcctgcggggatcacgtttagaccccaccttgttccaggagctcctggcagggtcggggacacagacgtgccagcaagatgtttaacggggccctggggaagcaagggtggctcgtgtccacctgacctgggcatcttctaaagccagctgagcctgcccagagcctggagcacagtctcctggccagctggggaggcagggacatgcaggggaggtagtgcctgacatggacaccaggcagtgtggcccgctggggacccgtgagtgagctgtgcagtgaggcagtgaggtggagcgccaggaggcccagagctgctgggagatcccgcatgaagcagatgtgggaggcggtgagcagccgcgtcaggatttcccacctgggcactgccgccccttggggacgatgacccttcattgt

SEQ ID NO: 23849 - DNA, 588 bp, Homo sapiens
  MAP TO AL079300.11; EXPRESSED IN LUNG, SIGNAL = 0.96; EXPRESSED IN FETAL LIVER, SIGNAL = 0.94; EXPRESSED IN HELA, SIGNAL = 0.58; EXPRESSED IN BRAIN, SIGNAL = 0.95; NT HIT: U31815.1, EVALUE 9.40e-02; EST_HUMAN HIT: BF438131.1, EVALUE 1.40e-01; NT HIT: M67516.1, EVALUE 1.40e-01
tgtgatcagagctaaacaagggaactatacacttttgggtttactttttcaaagtgcttatatcattcaatctatgattacatgtggacacacacatacgtacacacacacacacacacacacacacactccaccaaagaaaccaaggtaggtattatctgcatttgacagatacagatgctgaagcccagaaaagatagagaactggctcaggtaacagacaaaattggtatcatgcccaagtctccagcttctagcttgggttctttctccaccagaccaccaggagcatccaaacagcctcctggtggccagaaccagtccaaatgctgaacattaataagagatgctacagagagagactgctccatttatattgttcatctgtgaatcctccttagtttcactgagaaggacatcaaagaagagaattctggattcagtagaggttgagttaagtcattggaagaccttgttggggtcctttgatcttagtctaagacatttagaacaagggcttgtttgggcttatttgaagggattcactcttcttggtcttcatgttttggccctgaaatccatcagatg

SEQ ID NO: 23850 - DNA, 221 bp, Homo sapiens
  MAP TO AD000833.1; EXPRESSED IN LUNG, SIGNAL =  11; EXPRESSED IN FETAL LIVER, SIGNAL = 6.8; EXPRESSED IN PLACENTA, SIGNAL = 7.7; EXPRESSED IN HEART, SIGNAL = 5.8; EXPRESSED IN BRAIN, SIGNAL = 6.2; EST_HUMAN HIT: BI838436.1, EVALUE 4.00e-16; NT HIT: AF019563.1, EVALUE 1.00e-121; SWISSPROT HIT: O43914, EVALUE 1.60e-01
cataagcttgtggttgatcattcggcccagttttggacagatgtcccatgtgccttcaaggtttgggggtgctttaggcagagtggctttgaggtccctctgatggcatgaaggagtatctggggcagatatccctggcaggagtgaaatgtgaggaggacagtctggttttctcacctgataaggcgactcggtctcagtgatacgctgtttccgggtcg

SEQ ID NO: 23851 - DNA, 351 bp, Homo sapiens
  MAP TO AF196969.1; EXPRESSED IN BRAIN, SIGNAL = 1.4; EXPRESSED IN LUNG, SIGNAL = 4.3; EXPRESSED IN FETAL LIVER, SIGNAL =   2; EXPRESSED IN PLACENTA, SIGNAL = 2.8; EST_HUMAN HIT: BE293315.1, EVALUE 0.00e+00; NT HIT: AF149817.1, EVALUE 0.00e+00; SWISSPROT HIT: Q9UGP9, EVALUE 2.00e-08
tcccaagggtgcgcttcgccaatgatgaccgacaccgcctggcctgctgctcactcgacggcagcatctccctgtgccagctggtgcctgccccacccacagtgcttcgcgtgctacggggccacacccgtggtgtctccgacttcgcctggtccctctccaatgacatcctcgtgtccacctcactggatgccaccatgcgcatctgggcctctgaggatggtcgctgcatccgagagatccctgaccccgatagcgctgaactgctctgctgcaccttccagcctgtcaacaacaacctcactgtggtcaggctccaggacacccactcaccaagggctggtgggctgg

SEQ ID NO: 23852 - DNA, 220 bp, Homo sapiens
  MAP TO AC005854.2; EXPRESSED IN HEART, SIGNAL = 1.6; EXPRESSED IN FETAL LIVER, SIGNAL = 0.44; EXPRESSED IN BRAIN, SIGNAL = 0.52; SWISSPROT HIT: P46571, EVALUE 1.40e+00; EST_HUMAN HIT: AU118969.1, EVALUE 6.00e-61; NT HIT: AF305814.1, EVALUE 2.00e-63
ctgtaataaatccagttcttcccatcaagaccctgttttccatgtccacatcctgtcttatttttccatggaacatagtaatttttaaccccatacctgctcattgctgccttttctgaatttcctatcccgatgtagctatctggagcactttctccactgctgctctcatcatctggttcgatgttgacatttctcagttccatgggatccatttgag

SEQ ID NO: 23853 - DNA, 124 bp, Homo sapiens
  MAP TO AC013646.3; EXPRESSED IN BRAIN, SIGNAL = 0.92; EXPRESSED IN PLACENTA, SIGNAL = 0.68; EXPRESSED IN FETAL LIVER, SIGNAL = 0.98; EST_HUMAN HIT: BE965705.2, EVALUE 6.10e-01; NT HIT: AF332218.1, EVALUE 1.60e+00
gaactaagacaatgctagacacacaaatatccacacacaaacgcactgaagagagaatcagtgatggtgttagtgtcaagcataatgtaccaaaaacacatactggacagaatggaaatcaact

SEQ ID NO: 23854 - DNA, 403 bp, Homo sapiens
  MAP TO AC008713.5; EXPRESSED IN BRAIN, SIGNAL = 0.69; EXPRESSED IN FETAL LIVER, SIGNAL = 0.63; EXPRESSED IN PLACENTA, SIGNAL =   1; NT HIT: AF055460.1, EVALUE 0.00e+00; EST_HUMAN HIT: BF984659.1, EVALUE 0.00e+00; SWISSPROT HIT: O76061, EVALUE 2.00e-76
tcacctccggatatcagaatactcagactgttcgtcttcccactcgctgcttccggaaggtccctgagccccaaggcccccgactctgcctcgggcatgggcgtttgggtggctcttgctacctcgctcacccttggcacctcggccagtctccctactgctgggctctgggaggtgatgtcctgcttccccgtggtgggccctggagagcttggttctgtccacctggggctggcgctcggggggcgccgtgggaggcttctggatggccgaggtgcagaagctcaagatggagcacaggcttccccagttctgctcacactgaacctgcacgctgtgggtgatggcctccttcacctcctccccacaggtcagcagcaagttcacgaggtccacgtagggt

SEQ ID NO: 23855 - DNA, 303 bp, Homo sapiens
  MAP TO AC008984.5; EXPRESSED IN BRAIN, SIGNAL = 0.91; EXPRESSED IN PLACENTA, SIGNAL = 0.85; EST_HUMAN HIT: BF901857.1, EVALUE 0.00e+00; NT HIT: gi14768441, EVALUE 0.00e+00; SWISSPROT HIT: Q64281, EVALUE 3.00e-20
gattctacaacaaacccaccctctcagccctgcccagtcctgtggtgacctcaggagagaacgtgaccctccagtgtggctcacggctgagattcgacaggttcattctgactgaggaaggagaccacaagctctcctggaccttggactcacagctgacccccagtgggcagttccaggccctgttccctgtgggccctgtgacccccagccacaggtggatgctcagatgctatggctctcgcaggcatatcctgcaggtatggtcagaacccagtgacctcctggagattccggtctcag

SEQ ID NO: 23856 - DNA, 254 bp, Homo sapiens
  MAP TO AC008413.5; EXPRESSED IN PLACENTA, SIGNAL = 1.1; EXPRESSED IN HEART, SIGNAL = 1.7; EXPRESSED IN BRAIN, SIGNAL = 0.89; EXPRESSED IN FETAL LIVER, SIGNAL = 1.4; SWISSPROT HIT: P40582, EVALUE 1.90e+00; NT HIT: gi14150224, EVALUE 8.00e-63; EST_HUMAN HIT: AL555271.1, EVALUE 1.00e-62
ttatgattttccttctttgattttacagaaaatggaaagtacttcaaaatcaaattttcggacgtctacaaaaggccaggttttacttaagaagaaaaaggttttaggcactcctgacactcctgaaaagactgtggatacccagggccccacaccggtttgtacatcaacatttttggggagatgaaaatgtgagtgtctgaaatgaatgatgatgacgaggaaaatgaaatagttttcaaacagcccatatc

SEQ ID NO: 23857 - DNA, 183 bp, Homo sapiens
  MAP TO AC010514.4; EXPRESSED IN PLACENTA, SIGNAL =   1; EXPRESSED IN FETAL LIVER, SIGNAL = 0.98; EXPRESSED IN BRAIN, SIGNAL = 0.78; NT HIT: AF109718.1, EVALUE 9.00e-99; SWISSPROT HIT: Q24270, EVALUE 1.50e+00; EST_HUMAN HIT: BF796079.1, EVALUE 1.00e-98
ctgcaggacaagttcgagcatcttaaaatgattcaacaggaggagataaggaagctcgaggaagagaaaaaacaactggaaggagaaatcatagatttttataaaatgaaagctgcctctgaagcactgcagactcagctgagcaccgatacaaagaaagacaaacatcgtaagaagcaatag

SEQ ID NO: 23858 - DNA, 363 bp, Homo sapiens
  MAP TO AC008772.5; EXPRESSED IN BRAIN, SIGNAL = 0.92; EXPRESSED IN PLACENTA, SIGNAL = 1.1; EXPRESSED IN FETAL LIVER, SIGNAL =   1; NT HIT: gi9910563, EVALUE 1.30e+00; EST_HUMAN HIT: AL043011.1, EVALUE 3.00e-27
ctgctggaactacgagatcttcgcgatgcattgtaactcctgggtggtgttctggattttttatccttctttcttttttcatctatctctttggatctgtctttttctcgttccttttctttgtcctgttccttttccttctctttgtctcgatccttctcatgctctttttcccgttctctctctctgtccttttccttgtctttttcccggtccttttcccgttccttgtcccggtctttgtttttaccccgttccttttctttttcacgttccttttccctctctctctccttttccctgtctttctctttcactctttccttttccttgatcttttctcgagtgtcttttctcttgtcc

SEQ ID NO: 23859 - DNA, 93 bp, Homo sapiens
  MAP TO AC008777.4; EXPRESSED IN BRAIN, SIGNAL = 4.7; EXPRESSED IN PLACENTA, SIGNAL = 3.3; EXPRESSED IN HEART, SIGNAL = 3.2; EXPRESSED IN LUNG, SIGNAL =  18; EXPRESSED IN FETAL LIVER, SIGNAL = 2.8
agttaccaccaccaccaccaccaccaccactaccaccaccaccaccaccaccaccaccaccaccaccaccaccactacacctagagaagcatg

SEQ ID NO: 23860 - DNA, 277 bp, Homo sapiens
  MAP TO AC000395.1; EXPRESSED IN HELA, SIGNAL = 1.8; EXPRESSED IN BRAIN, SIGNAL = 1.2; EST_HUMAN HIT: AW582943.1, EVALUE 1.00e-110; SWISSPROT HIT: P19835, EVALUE 6.00e-39; NT HIT: gi16161507, EVALUE 0.00e+00
ggaccccaacatgggccactcggctgtgcccacacactgggaaccctacactacggaaaacagcggctacctggagatcaccaagaagatgggcagcagctccatgaagcggagcctgagaaccaacttcctgcgctactggaccctcacctatctggcgctgcccacagtgaccgaccaggaggccagttccatgccctccacaggggactctgaggccactcccatctcccccgacaggcaactccgagtctgcccccgtccctgcaacgggtga

SEQ ID NO: 23861 - DNA, 198 bp, Homo sapiens
  MAP TO AC011513.2; EXPRESSED IN PLACENTA, SIGNAL = 1.6; EXPRESSED IN LUNG, SIGNAL = 9.9; EXPRESSED IN BRAIN, SIGNAL = 0.78; EXPRESSED IN HELA, SIGNAL = 0.71; NT HIT: gi14756165, EVALUE 1.00e-107; EST_HUMAN HIT: BF093570.1, EVALUE 1.00e-107; SWISSPROT HIT: O24585, EVALUE 2.50e+00
gatgatgctgtcattagtatttcacaagaagtagcttcagagggtaacttaacagagtatcagatctatcttgtcaatcccaacgttttacataaaataagagatcctttagtgcacccagtgactgacattagcagcatctttaacacagccgtgtgttcaaatgtacagtggtccttttcagagttggacttctag

SEQ ID NO: 23862 - DNA, 207 bp, Homo sapiens
  MAP TO AC002325.1; EXPRESSED IN FETAL LIVER, SIGNAL = 0.54; EXPRESSED IN BRAIN, SIGNAL = 0.64; EXPRESSED IN PLACENTA, SIGNAL = 0.68; NT HIT: gi14734956, EVALUE 1.00e-113; EST_HUMAN HIT: AI190297.1, EVALUE 1.00e-110; SWISSPROT HIT: Q09456, EVALUE 1.00e-03
tcaggttccttcctttcccttccaggactgagggtcctgcatctccggtacccatgattggagggtccagtactggccccgcaggctggcctgagccttcaggaagccctcgctgaactccatctcagcctggctgctctctgactcccagtagagcacctgctgcccatggaacgctgtggtcctcaagctgtgggtgtcccggat

SEQ ID NO: 23863 - DNA, 309 bp, Homo sapiens
  MAP TO AC007565.1; EXPRESSED IN HEART, SIGNAL = 2.6; EXPRESSED IN BRAIN, SIGNAL = 2.7; EXPRESSED IN PLACENTA, SIGNAL = 2.4; EST_HUMAN HIT: BI912598.1, EVALUE 0.00e+00; SWISSPROT HIT: Q95242, EVALUE 5.50e-01; NT HIT: gi9628002, EVALUE 1.10e+00
gctccttggcgatcccagcaccatccatccggctggtgcccccgtacccaagcagccaagaggaccccatccacatcgcatgcatggcccctgggaacttcccgggggcgaatttcacactgtatcgaggggggcaggtggtccagctcctgcaggcccccacggaccagcgcggggtgacatttaacctgagcggcggcagcagcaaggctccagggggacccttccactgccagtatggagtgttaggtgagctcaaccagtcccagctgtcagacctcagcgagcccgtgaacgtctccttcccag

SEQ ID NO: 23864 - DNA, 206 bp, Homo sapiens
  MAP TO AC000125.1; EXPRESSED IN LUNG, SIGNAL = 7.5; EXPRESSED IN BRAIN, SIGNAL = 1.3; EXPRESSED IN HELA, SIGNAL = 0.67; EST_HUMAN HIT: AW937699.1, EVALUE 2.70e-01; NT HIT: Z27492.1, EVALUE 7.30e-01
caccagcaccactacaccattgccaccatcactaccatcaccaccaccactaccaccactactatcatcaccaccatcaccaccaccaccacatcattgccacctttactaccagcatcaccaccaccaccaccacaacactaccgctactaccataccacaaccaccactgtccccaccatcactatcagtaccaagcagcctag

SEQ ID NO: 23865 - DNA, 128 bp, Homo sapiens
  MAP TO AC022127.3; EXPRESSED IN BRAIN, SIGNAL = 3.6; EXPRESSED IN PLACENTA, SIGNAL = 3.5; EXPRESSED IN LUNG, SIGNAL = 4.7; EXPRESSED IN HELA, SIGNAL = 4.1; EXPRESSED IN FETAL LIVER, SIGNAL = 3.5; NT HIT: AE008433.1, EVALUE 1.70e+00; SWISSPROT HIT: P49047, EVALUE 3.50e+00; EST_HUMAN HIT: AI393982.1, EVALUE 6.30e-01
gggaagaagggaatagaatatggatgcccttccagaccaaaacacaaatctccaacaaagaagaactcttggctgaccagcactctccttgcagcttctctcagcatctgaattcaaagctgccgtga

SEQ ID NO: 23866 - DNA, 132 bp, Homo sapiens
  MAP TO AC001642.1; EXPRESSED IN BRAIN, SIGNAL = 0.38; SWISSPROT HIT: Q13315, EVALUE 7.00e-22; NT HIT: U55752.1, EVALUE 2.00e-68; EST_HUMAN HIT: BE541772.1, EVALUE 6.00e-66
cgaagtggtgttcttgaatggtgcacaggaactgtccccattggtgaatttcttgttaacaatgaagatggtgctcataaaagatacaggccaaatgatttcagtgcctttcagtgccaaaagaaaatgatg

SEQ ID NO: 23867 - DNA, 122 bp, Homo sapiens
  MAP TO AC022150.5; EXPRESSED IN PLACENTA, SIGNAL = 4.5; EXPRESSED IN HEART, SIGNAL = 6.4; EXPRESSED IN LUNG, SIGNAL = 2.9; EXPRESSED IN FETAL LIVER, SIGNAL = 5.6; EXPRESSED IN BRAIN, SIGNAL = 3.1; SWISSPROT HIT: P36775, EVALUE 4.60e+00; NT HIT: gi7662405, EVALUE 6.30e+00; EST_HUMAN HIT: BF821736.1, EVALUE 2.00e-62
atgacctgctttagatttggctgtgatgtcctcatacagagaaaggccccgaagatggtctctgtgtctgagtctaccgctctgtttcttccattcttctgcttttcttcatttttggggta

SEQ ID NO: 23868 - DNA, 122 bp, Homo sapiens; identical to SEQ ID NO: 20135
  MAP TO AC002498.1; EXPRESSED IN BRAIN, SIGNAL = 0.84; EXPRESSED IN PLACENTA, SIGNAL = 0.96; EXPRESSED IN HEART, SIGNAL = 1.7; NT HIT: gi11466954, EVALUE 6.30e+00; SWISSPROT HIT: P20828, EVALUE 7.90e+00

SEQ ID NO: 23869 - DNA, 191 bp, Homo sapiens
  MAP TO AF037338.1; EXPRESSED IN HELA, SIGNAL = 5.7; EXPRESSED IN BRAIN, SIGNAL = 3.2; EXPRESSED IN PLACENTA, SIGNAL = 2.9; EST_HUMAN HIT: BG121424.1, EVALUE 1.00e-103; NT HIT: gi14755895, EVALUE 1.00e-103; SWISSPROT HIT: Q60843, EVALUE 6.50e-01
atatccagttctggaacagccggcagtccctggagggcctgtccgtgcgctccgtcttcttcggcgttttccagtcattcgtggtcctcctctacatcctggacaacgagaccaacttcgtggtccaggtcagcgtcttcattggggtcctcatcgacctctggaagatcaccaaggtcatggacgtccgg

SEQ ID NO: 23870 - DNA, 193 bp, Homo sapiens
  MAP TO AF050154.1; EXPRESSED IN BRAIN, SIGNAL =   8; EXPRESSED IN LUNG, SIGNAL = 5.4; NT HIT: gi14755853, EVALUE 1.00e-104; SWISSPROT HIT: P02649, EVALUE 3.00e-32; EST_HUMAN HIT: BI546740.1, EVALUE 1.00e-104
gatgccaggccaaggtggagcaagcggtggagacagagccggagcccgagctgcgccagcagaccgagtggcagagcggccagcgctgggaactggcactgggtcgcttttgggattacctgcgctgggtgcagacactgtctgagcaggtgcaggaggagctgctcagctcccaggtcacccaggaactgag

SEQ ID NO: 23871 - DNA, 110 bp, Homo sapiens
  MAP TO AC006166.1; EXPRESSED IN BRAIN, SIGNAL = 0.74; NT HIT: gi15295007, EVALUE 1.40e+00; EST_HUMAN HIT: AV655043.1, EVALUE 2.10e+00
ccggctgcgaatgcctagaatgcttgctctctgtaccaacattccatttgtttgacattcatcatggggatctgctgagtcttcatatgaggaaaagtacttgttaagct

SEQ ID NO: 23872 - DNA, 171 bp, Homo sapiens
  MAP TO AC005854.2; EXPRESSED IN HEART, SIGNAL = 1.1; EXPRESSED IN FETAL LIVER, SIGNAL = 2.6; EXPRESSED IN BRAIN, SIGNAL = 1.3; EXPRESSED IN PLACENTA, SIGNAL = 1.2; NT HIT: AF305814.1, EVALUE 1.00e-91; SWISSPROT HIT: Q07494, EVALUE 3.30e+00; EST_HUMAN HIT: AA680367.1, EVALUE 2.00e-91
ccgggagttgaatacaaagtatttgggttcacacttgtcatcactatgagcttcatattctactccactgtcatgaagagagcccttggcctggttctcatccagccctgcaggattgcggtgggtgtaatccatcatgaagttcacatcagaactctcagagttgttggg

SEQ ID NO: 23873 - DNA, 83 bp, Homo sapiens
  MAP TO AC026717.3; EXPRESSED IN FETAL LIVER, SIGNAL = 1.4; EXPRESSED IN PLACENTA, SIGNAL = 1.3; EXPRESSED IN HEART, SIGNAL =   2; EXPRESSED IN BRAIN, SIGNAL = 1.1; EXPRESSED IN LUNG, SIGNAL = 1.9; EST_HUMAN HIT: AI253544.1, EVALUE 2.00e-39; NT HIT: gi14725561, EVALUE 2.00e-39; SWISSPROT HIT: O75347, EVALUE 8.00e-09
tagtatccgttgaagatccaaatatgcggcttccaacctgcgctggcaatctgggatcatcatcctggattcttgtaggatct

SEQ ID NO: 23874 - DNA, 100 bp, Homo sapiens
  MAP TO AC007459.1; EXPRESSED IN PLACENTA, SIGNAL =   1; EXPRESSED IN HELA, SIGNAL = 0.83; EXPRESSED IN BRAIN, SIGNAL = 0.73; SWISSPROT HIT: Q9NSI6, EVALUE 2.10e+00; EST_HUMAN HIT: BG619901.1, EVALUE 1.80e+00; NT HIT: U39723.1, EVALUE 3.20e-01
atgactgttcctgaagcaaatgaacaggtgcacagattcggcgacaccagaccttcaggtcaactgtcagccagtgctgaggactgggatccccctgcag

SEQ ID NO: 23875 - DNA, 133 bp, Homo sapiens
  MAP TO AC005578.1; EXPRESSED IN PLACENTA, SIGNAL = 3.7; EXPRESSED IN HEART, SIGNAL = 1.7; EXPRESSED IN BRAIN, SIGNAL = 2.8; EXPRESSED IN FETAL LIVER, SIGNAL = 1.8; EXPRESSED IN LUNG, SIGNAL = 3.3; SWISSPROT HIT: O88436, EVALUE 7.90e-02; NT HIT: gi15305948, EVALUE 4.00e-69; EST_HUMAN HIT: AL545623.1, EVALUE 6.00e-69
ggcccccagcagctctgacactgccccgggtgcaatgccgagcctctcggtacccgatcgccgtggattgctcctggaccctgccgcctgctccaaactccaccagccccgtgtccttcattgccacgtacag

SEQ ID NO: 23876 - DNA, 145 bp, Homo sapiens
  MAP TO AC013738.4; EXPRESSED IN HEART, SIGNAL = 2.4; EXPRESSED IN BRAIN, SIGNAL = 1.2; EXPRESSED IN LUNG, SIGNAL = 2.1; SWISSPROT HIT: P44372, EVALUE 3.40e+00; NT HIT: gi16120353, EVALUE 4.90e-01; EST_HUMAN HIT: AW578671.1, EVALUE 1.80e-01
cttttgagaaatctggcttctccttacccatggcctcagctgctctccagcctaatctctgccctcctagccacagcttcactccacagatacctttctgttgatggccaccacctgatgctggtggatggctccatttgcccat

SEQ ID NO: 23877 - DNA, 210 bp, Homo sapiens
  MAP TO AC022517.1; EXPRESSED IN PLACENTA, SIGNAL = 1.5; EXPRESSED IN BRAIN, SIGNAL = 1.5; EXPRESSED IN FETAL LIVER, SIGNAL = 1.6; EST_HUMAN HIT: BG236071.1, EVALUE 1.00e-112; SWISSPROT HIT: P37938, EVALUE 9.60e-02
atggcgtctgagaggctgaaggacggtccccaggccgggcggcacagggtgctgttcgctgcagtgggacaggggccttcactgtggcagcctctggagaaactggcgcccggccccagcaaccagctggcggtgttggggagcgcagccgtactgcctggaccccgcctgctaccatgcatggtgccagcagccgctctgaggctggtg

SEQ ID NO: 23878 - DNA, 173 bp, Homo sapiens
  MAP TO AF196970.1; EXPRESSED IN BRAIN, SIGNAL = 0.91; EXPRESSED IN HELA, SIGNAL = 0.85; EXPRESSED IN PLACENTA, SIGNAL = 4.6; EXPRESSED IN HEART, SIGNAL = 1.7; EST_HUMAN HIT: BG433676.1, EVALUE 1.00e-43; SWISSPROT HIT: P47945, EVALUE 1.90e+00; NT HIT: AF009648.1, EVALUE 9.40e+00
gcgctgagccagaggattgtcgggaggaccctgggcaaagacgcctaccctgccatgctgcgccatctgccctccaggctgccagtcaagatgtggggcaggactttggagaaacaggtgaacaagatggcccctggggatctggggcaagggtgttggcactgaaactggtc

SEQ ID NO: 23879 - DNA, 161 bp, Homo sapiens
  MAP TO AC007379.2; EXPRESSED IN PLACENTA, SIGNAL = 1.8; EXPRESSED IN BRAIN, SIGNAL = 1.4; EXPRESSED IN LUNG, SIGNAL = 1.1; EXPRESSED IN FETAL LIVER, SIGNAL = 1.9; NT HIT: gi16167590, EVALUE 9.00e-03; EST_HUMAN HIT: AI685027.1, EVALUE 7.00e-20; SWISSPROT HIT: P10267, EVALUE 3.00e-03
ctgtgctcatgggccttacagttgtcacagctactgctgctgttgctgctggtgttgcctcccagacttctattccacctgcgggctttctggcagaaaaatacttcttagctttggaattcccaaagccaaatacatcaaaaattggcaaattaagttaa

SEQ ID NO: 23880 - DNA, 156 bp, Homo sapiens
  MAP TO AC026736.3; EXPRESSED IN PLACENTA, SIGNAL = 2.4; EXPRESSED IN HEART, SIGNAL = 2.6; EXPRESSED IN BRAIN, SIGNAL = 1.5; EXPRESSED IN FETAL LIVER, SIGNAL = 2.1; EST_HUMAN HIT: BE540611.1, EVALUE 2.00e-01; SWISSPROT HIT: P39795, EVALUE 3.40e+00; NT HIT: AF267496.1, EVALUE 1.40e-01
ctgtcctactatctcagcaggtggggaggaggagagaaatgggatctggggcatggaaatgggctgcagctccaggaccttcttgaatcccaccatgtaggggaacactgccctggaggtagggatcttgaaattctgccttttcaagagcagcat

SEQ ID NO: 23881 - DNA, 157 bp, Homo sapiens
  MAP TO AC016604.4; EXPRESSED IN BRAIN, SIGNAL = 0.88; EXPRESSED IN PLACENTA, SIGNAL = 1.2; EXPRESSED IN HEART, SIGNAL = 1.2; NT HIT: AJ298105.1, EVALUE 5.40e-01; EST_HUMAN HIT: BF739813.1, EVALUE 8.00e-01; SWISSPROT HIT: P57485, EVALUE 2.00e+00
ctgccatgttgtgagtctgtctgtgaaaaggccacgtatcaaggaactgcaggtggcctctaaaagcttagaatgctcccagacaacagcctgcaagaaaacaggaatctttgtcctacacctacaaagactcaactttgtcaacaaccacatgagc

SEQ ID NO: 23882 - DNA, 153 bp, Homo sapiens
  MAP TO AC006165.1; EXPRESSED IN BRAIN, SIGNAL = 4.4; EXPRESSED IN LUNG, SIGNAL = 4.6; SWISSPROT HIT: O75955, EVALUE 4.00e-22; NT HIT: gi6552331, EVALUE 6.00e-81; EST_HUMAN HIT: AI355972.1, EVALUE 8.00e-81
gaagctaaagccaagcaggaaaaggtgtctgctcagtacctgagtgagatcgagatggccaaggcacagagagattacgaactgaagaaggccgcctatgacatcgaggtcaacacccgccgagcacaggctgacctggcctatcagcttcag

SEQ ID NO: 23883 - DNA, 181 bp, Homo sapiens
  MAP TO AC005853.1; EXPRESSED IN BRAIN, SIGNAL = 0.41; EXPRESSED IN PLACENTA, SIGNAL = 0.4; NT HIT: AF135028.1, EVALUE 2.50e+00; EST_HUMAN HIT: AI929608.1, EVALUE 2.40e-01; SWISSPROT HIT: P48044, EVALUE 1.50e-02
ccttcatctgctgttggagtccatacttcctgtttgacattttggacaatttcaacctccttccagacacccaggagcgtttctatgcctctgtgatcattcagaacctgccagcattgaatagtgccatcaaccccctcatctactgtgtcttcagcagctccatctctttcccctgcag

SEQ ID NO: 23884 - DNA, 274 bp, Homo sapiens
  MAP TO AC004237.1; EXPRESSED IN FETAL LIVER, SIGNAL = 3.3; EXPRESSED IN BRAIN, SIGNAL = 1.4; EXPRESSED IN PLACENTA, SIGNAL = 2.7; SWISSPROT HIT: Q9Y496, EVALUE 6.00e-49; NT HIT: gi14781205, EVALUE 0.00e+00; EST_HUMAN HIT: BI561517.1, EVALUE 0.00e+00
atcaataaatcagagaagccagaaagctgcgataatgtgaaggttgttgttaggtgccggcccctcaatgagagagagaaatcaatgtgctacaaacaggctgtcagtgtggatgagatgaggggaactatcactgtacataagactgattcttccaatgaacctccaaagacatttacttttgatactgtttttggaccagagagtaaacaacttgatgtttataacttaactgcaagacctattattgattctgtacttgaaggctacaatg

SEQ ID NO: 23885 - DNA, 172 bp, Homo sapiens
  MAP TO AC012644.1; EXPRESSED IN BRAIN, SIGNAL = 0.41; EST_HUMAN HIT: BG824236.1, EVALUE 4.00e-92; SWISSPROT HIT: Q22703, EVALUE 6.60e-01
gaaaggctaaccggtggtttggggttgctccccctaaatctggaaaaatgaacatgaacatccttcaccaggaagagctcatcgctcagaagaaacgggaaattgaagccaaaatggaacagaaagccaagcagaatcaggtggccagccctcagcccccacatcctggcga

SEQ ID NO: 23886 - DNA, 198 bp, Homo sapiens
  MAP TO AF196972.1; EXPRESSED IN PLACENTA, SIGNAL = 1.6; EXPRESSED IN HEART, SIGNAL = 1.5; EXPRESSED IN BRAIN, SIGNAL = 1.7; EXPRESSED IN FETAL LIVER, SIGNAL = 2.3; NT HIT: gi14759610, EVALUE 1.00e-107; SWISSPROT HIT: Q9UET6, EVALUE 7.00e-24; EST_HUMAN HIT: BI256910.1, EVALUE 1.00e-107
ctagagggcggctcagagtacaagtacactccacccacacagccccccatctcgccaccataccaggaggcctgcacgttgaagaggaaggggcagctggccaaggagatccgcccccaggactgccccatcagcagagtggacacgtttccccagcccctggccgcccctcagtgccacaccctgctggcccctgag

SEQ ID NO: 23887 - DNA, 178 bp, Homo sapiens
  MAP TO AL118556.2; EXPRESSED IN LUNG, SIGNAL = 1.1; EXPRESSED IN FETAL LIVER, SIGNAL = 1.1; EXPRESSED IN BRAIN, SIGNAL = 1.2; EXPRESSED IN PLACENTA, SIGNAL = 1.1; NT HIT: gi14746897, EVALUE 8.00e-96; SWISSPROT HIT: P43616, EVALUE 9.80e+00; EST_HUMAN HIT: AU128984.1, EVALUE 1.00e-95
ctgcaccaatttctgtaaaccatgaagatgcagagttcaaattgattgtctcaaactgaactacctgattcgattcagtgcctttgctaatagctacacagaccatagggtattcctgttcaggtatcaccagcatttcaaaaacattcaaaggacttggcaaaggaaaatcaaagtg

SEQ ID NO: 23888 - DNA, 207 bp, Homo sapiens
  MAP TO AC000080.2; EXPRESSED IN BRAIN, SIGNAL = 0.76; SWISSPROT HIT: Q12034, EVALUE 1.90e+00; EST_HUMAN HIT: AI860136.1, EVALUE 7.00e-39; NT HIT: L41825.1, EVALUE 3.00e-65
gagatcgtcaatcccgtctgggtgcccactaggagacttaaacttcgtgtgaatactgacaataaaaaccacgaggaagagacgttcgcgtcagagactgccctcatacctgatgagatctgtaccgactcctcagaaactggcatgccaaatcaaaatgggtctggttcaatcctccctaatggcaatgtaaacccctctaactaa

SEQ ID NO: 23889 - DNA, 210 bp, Homo sapiens
  MAP TO AC016951.9; EXPRESSED IN HELA, SIGNAL = 1.5; EXPRESSED IN BRAIN, SIGNAL =   1; SWISSPROT HIT: Q34947, EVALUE 3.20e+00; NT HIT: AL163285.2, EVALUE 1.20e-02; EST_HUMAN HIT: BG743433.1, EVALUE 2.80e-01
aaaaatgatgcaaagctttgtctaccagcagaagaaaacacatatctactttatttagtggactcttacctagccagccatggtgcaactaagagagcactggagttgaagtcaaaagataaaggttccaatctaagctgtgttgataatggcaatgtggcactgggtaacccacacaacctctctgagccccagatttcttatcagtag

SEQ ID NO: 23890 - DNA, 271 bp, Homo sapiens
  MAP TO AL117259.3; EXPRESSED IN BRAIN, SIGNAL = 4.8; EXPRESSED IN PLACENTA, SIGNAL = 5.7; EXPRESSED IN HEART, SIGNAL = 4.1; EXPRESSED IN LUNG, SIGNAL =  28; EXPRESSED IN FETAL LIVER, SIGNAL = 4.5e+02; SWISSPROT HIT: P01009, EVALUE 3.00e-48; NT HIT: J02619.1, EVALUE 0.00e+00; EST_HUMAN HIT: AI064974.1, EVALUE 0.00e+00
gcaaatgggagagaccctttgaagtcaaggacaccgaggaagaggacttccacgtggaccaggcgaccaccgtgaaggtgcctatgatgaagcgtttaggcatgtttaacatccagcactgtaagaagctgtccagctgggtgctgctgatgaaatacctgggcaatgccaccgccatcttcttcctgcctgatgaggggaaactacagcacctggaaaatgaactcacccacgatatcatcaccaagttcctggaaaatgaagacagaag

SEQ ID NO: 23891 - DNA, 224 bp, Homo sapiens
  MAP TO AF196969.1; EXPRESSED IN FETAL LIVER, SIGNAL = 4.5; EXPRESSED IN BRAIN, SIGNAL = 0.79; NT HIT: gi14759560, EVALUE 1.00e-123; EST_HUMAN HIT: AI042055.1, EVALUE 1.00e-123; SWISSPROT HIT: Q9ZHA5, EVALUE 7.50e-02
gccagatctatggggatgtgctctacttcctgacagagcaccgcgacggattccagcacggagagctgggccaccctctctacttctggttttactttgtcttcatgaatgccctgtggctggtgctgcctggagtccttgtgcttgatgctgtgaagcacctcactcatgcccagagcacgctggatgccaaggccacaaaagccaagagcaagaagaactga

SEQ ID NO: 23892 - DNA, 238 bp, Homo sapiens
  MAP TO AL023495.1; EXPRESSED IN LUNG, SIGNAL = 4.6; EXPRESSED IN BRAIN, SIGNAL = 5.8; EXPRESSED IN FETAL LIVER, SIGNAL = 7.1; EXPRESSED IN PLACENTA, SIGNAL = 7.8; SWISSPROT HIT: P11584, EVALUE 2.20e+00; NT HIT: AL163282.2, EVALUE 6.00e-42; EST_HUMAN HIT: AW857140.1, EVALUE 2.00e-52
agtgcttgtggcttttccaggtgcatggtgcaagctgtcagtggatctaccattctggggtctggaggatggtggccttcttctcacagctccactgggtggtactccagtagggactgtgcttgggggttccaaccccacatttcccttctgtgctgccctagcagaggttctccatgaggaacctgctcctgcagcaagcttctgcctggtcatccaggtgtttccatacatcttc

SEQ ID NO: 23893 - DNA, 264 bp, Homo sapiens
  MAP TO AL118557.2; EXPRESSED IN PLACENTA, SIGNAL = 1.5; EXPRESSED IN HEART, SIGNAL = 1.3; EXPRESSED IN FETAL LIVER, SIGNAL = 1.7; EXPRESSED IN LUNG, SIGNAL =   2; EXPRESSED IN BRAIN, SIGNAL = 2.1; SWISSPROT HIT: Q12185, EVALUE 4.60e-01; NT HIT: AB029804.1, EVALUE 9.60e-01; EST_HUMAN HIT: AI267368.1, EVALUE 5.00e-62
atgagacaagtgtgggctctggttcattccaccttggaaccttttcacactaatgatgaggaggaaggaaagtataacaaagtaacagaccaggtttgtttgccagctaaagctaaagcagcaaaggaggaagaggttcatccctacccttctgcaccccctccttattttgaagaaaaagagtggcctgaccctccagatctttcttttctggaggaccctgggagaaaagtagttgccccagtgactgttcaagcagctcct

SEQ ID NO: 23894 - DNA, 120 bp, Homo sapiens
  MAP TO AC009318.11; EXPRESSED IN HEART, SIGNAL = 1.8; EXPRESSED IN LUNG, SIGNAL = 0.61; EXPRESSED IN FETAL LIVER, SIGNAL = 0.69; EXPRESSED IN BRAIN, SIGNAL =   1; EXPRESSED IN HELA, SIGNAL = 1.1; NT HIT: gi14764145, EVALUE 2.00e-61; SWISSPROT HIT: P17301, EVALUE 6.00e+00; EST_HUMAN HIT: AI352433.1, EVALUE 3.00e-61
aaaaaactgccagaatggcatgtgctcctcagtaactgtcaccataagagaactgagatcatatttcataaatatcccagagactccatggctgcctgcagcatggttaatgatacgttc

SEQ ID NO: 23895 - DNA, 279 bp, Homo sapiens
  MAP TO AL031707.17; EXPRESSED IN PLACENTA, SIGNAL = 2.3; EXPRESSED IN BRAIN, SIGNAL = 1.8; SWISSPROT HIT: P48434, EVALUE 1.40e+00; NT HIT: AJ289159.1, EVALUE 6.50e-02
agccccgctcctcctggtcctgcccaccctcctggtgctgcccaccctcctggcctgcacaccctcctggcctgcacaccctcctggcctgcacaccctcctggcctacccaggctgccactggcccgagggtcccagtgaggatgagccggagatggacactgagggggttgatgggcctggggcaggctggccggggcaggggggctgggcctgtccagcggccgcctgccctcagaagaatgacaccctgctttctcccctgcccgaggaggtggg

SEQ ID NO: 23896 - DNA, 169 bp, Homo sapiens
  MAP TO AC007292.1; EXPRESSED IN PLACENTA, SIGNAL = 1.4; EXPRESSED IN FETAL LIVER, SIGNAL = 1.5; EXPRESSED IN BRAIN, SIGNAL = 1.6; EST_HUMAN HIT: BG250101.1, EVALUE 3.00e-90; SWISSPROT HIT: P46737, EVALUE 2.00e-04; NT HIT: gi14763264, EVALUE 2.00e-90
atctaccagagcctgttcctgcggggcctgtccctggtgggctggtaccacagccacccacacagcccggcgctgccatctctgcaggacatcgacgcacagatggactaccagctgcggctgcagggctccagcaatggcttccagccctgcctcgccctgctctgct

SEQ ID NO: 23897 - DNA, 182 bp, Homo sapiens
  MAP TO AC005569.1; EXPRESSED IN PLACENTA, SIGNAL = 0.63; EXPRESSED IN FETAL LIVER, SIGNAL = 0.47; EXPRESSED IN BRAIN, SIGNAL = 0.4; EXPRESSED IN HELA, SIGNAL = 0.5; NT HIT: U57499.1, EVALUE 2.50e+00; EST_HUMAN HIT: BF798192.1, EVALUE 2.40e-01; SWISSPROT HIT: Q9WUH7, EVALUE 3.80e-01
atggtctccctcacctacaacagaggcaaaaacaaatcttccgatccaagttggcaagaatctaacagaagaatgtacgaagagcctgaacttcctggaggagttgccttgcagccaccctttgtgcctggccttcaaggaagagttagtgagatggagaagagatgcacagagaccaccag

SEQ ID NO: 23898 - DNA, 155 bp, Homo sapiens
  MAP TO AC009509.7; EXPRESSED IN BRAIN, SIGNAL =   1; EXPRESSED IN LUNG, SIGNAL = 1.7; EXPRESSED IN HELA, SIGNAL = 0.58; NT HIT: gi4505986, EVALUE 4.00e-82; EST_HUMAN HIT: BF037882.1, EVALUE 5.00e-82; SWISSPROT HIT: P11279, EVALUE 2.00e+00
gcaaagatggagaatatgaagagctgctcaattccagttccatctcctctttgctggatgcacagggtttcagtgatctggagaaaagtccatcacccactccagtaatgggatctcccagttgtgacccatttaacacaagtgttcccgaagag

SEQ ID NO: 23899 - DNA, 139 bp, Homo sapiens
  MAP TO AC007559.3; EXPRESSED IN BRAIN, SIGNAL = 0.6; SWISSPROT HIT: O15230, EVALUE 2.30e-01; NT HIT: X96983.1, EVALUE 3.00e-02; EST_HUMAN HIT: BG980652.1, EVALUE 1.80e-01
ctgcccaaagtcacccagtcactgtgcattgtcatttccaagctggtgcttgcctcacctgatggtgtctggtctctgaatctcttcctctccaggggccactttatggctggttctgaagggccctgggacgcatcgg

SEQ ID NO: 23900 - DNA, 82 bp, Homo sapiens
  MAP TO AF198097.1; EXPRESSED IN BRAIN, SIGNAL = 0.41; EST_HUMAN HIT: BG058466.1, EVALUE 3.60e-01; NT HIT: X91637.1, EVALUE 2.50e-01
atggatcctgcaggagagggagacttctcttagctttctcttgcacatggtgcagcccctcatactcagggataggcacagc

SEQ ID NO: 23901 - DNA, 136 bp, Homo sapiens
  MAP TO AF235093.1; EXPRESSED IN FETAL LIVER, SIGNAL = 1.8; EXPRESSED IN LUNG, SIGNAL = 2.7; EXPRESSED IN BRAIN, SIGNAL = 1.5; EXPRESSED IN PLACENTA, SIGNAL = 2.5; EXPRESSED IN HEART, SIGNAL = 1.6; NT HIT: AL163210.2, EVALUE 7.00e-71; SWISSPROT HIT: P36334, EVALUE 5.90e+00; EST_HUMAN HIT: BI819407.1, EVALUE 6.70e-01
gttcttttgtgttccctgccacgtagtccttggtgtcaccatatcctactggtgctaccacatcccaccagattgtgatggaatgttgctgtgcccaccaggcttcattgccccactgggcattaccactaacatc

SEQ ID NO: 23902 - DNA, 171 bp, Homo sapiens
  MAP TO AC012310.4; EXPRESSED IN PLACENTA, SIGNAL = 1.1; EXPRESSED IN BRAIN, SIGNAL = 0.99; EXPRESSED IN FETAL LIVER, SIGNAL =   1; SWISSPROT HIT: P29315, EVALUE 9.00e-05; EST_HUMAN HIT: AA421452.1, EVALUE 4.00e-89
gttggaagaatgtgggttaacgagcacctgctgtaaggatctcgcgtctgttctcacctgcagtaagaccctgcagcagctcaacctgaccttgaacaccttggaccacacaggggtggttgtactctgtgaggccctgagacacccagagtgtgccctgcaggtgctcgg

SEQ ID NO: 23903 - DNA, 459 bp, Homo sapiens; identical to SEQ ID NO: 22633
  MAP TO AF260011.1; EXPRESSED IN HELA, SIGNAL = 1.1; EXPRESSED IN BRAIN, SIGNAL = 1.2; EXPRESSED IN FETAL LIVER, SIGNAL = 1.2; EXPRESSED IN PLACENTA, SIGNAL = 1.5; SWISSPROT HIT: P53072, EVALUE 8.00e-03; EST_HUMAN HIT: BF219939.1, EVALUE 0.00e+00; NT HIT: AL163248.2, EVALUE 0.00e+00

SEQ ID NO: 23904 - DNA, 140 bp, Homo sapiens
  MAP TO AB023052.1; EXPRESSED IN BRAIN, SIGNAL = 0.56; EXPRESSED IN FETAL LIVER, SIGNAL = 2.4; EST_HUMAN HIT: AA587878.1, EVALUE 3.00e-71; NT HIT: gi14761357, EVALUE 3.00e-73
cttctctagcctctcagcagctgtgtcatccccttgttccagctgtccctgaagccgccgctcctcttccagcagcttcaatcgcttggtgtcagctcgaagaacagcctggactgctggtgtctcatctgctaccacct

SEQ ID NO: 23905 - DNA, 154 bp, Homo sapiens
  MAP TO AC000070.2; EXPRESSED IN BRAIN, SIGNAL = 0.49; EXPRESSED IN FETAL LIVER, SIGNAL = 0.41; EXPRESSED IN PLACENTA, SIGNAL = 0.56; SWISSPROT HIT: Q9Y5R5, EVALUE 5.10e-01
tggcttagtctgaggctggggcctgcctgccatccctttccctctctcactgagtggctgctgcttgcccgtctctgacctttgagagtctcaggtctgatggtggtggagatggagcacaggtgactgattcgggggactcggagacacaccc

SEQ ID NO: 23906 - DNA, 363 bp, Homo sapiens
  MAP TO AC012617.5; EXPRESSED IN BRAIN, SIGNAL = 0.84; EST_HUMAN HIT: AL048811.1, EVALUE 0.00e+00; SWISSPROT HIT: P81489, EVALUE 5.60e-01; NT HIT: X04912.1, EVALUE 0.00e+00
gccggcggcgggctgggggtggggtgtactttgtccaaacctctcggctcctctggcgggcctccctgaacgtggcgtggactcgcgcacaggccctgtctcgcaggttttcaggtgcgcttggcttttcctccgctttgtggggcaggtctccagtggccccccgggcgcacgcctggacatcactgtccgtctcgtcgtcgccccctacggcctcaaagacacacgctgcctgcatgtgctcttgggggacgacagtgccacatgtggacacactggctccagctcggactcgcctctgtctctctttgcccgtgtcgccggaagccgcctcgggttgccggagccctcgggccttggaga

SEQ ID NO: 23907 - DNA, 245 bp, Homo sapiens
  MAP TO AC020952.4; EXPRESSED IN BRAIN, SIGNAL = 1.4; EXPRESSED IN PLACENTA, SIGNAL = 1.7; EXPRESSED IN HEART, SIGNAL =   2; EXPRESSED IN LUNG, SIGNAL = 1.3; EXPRESSED IN FETAL LIVER, SIGNAL = 1.1; SWISSPROT HIT: Q9UKS7, EVALUE 3.10e+00; NT HIT: Z32529.1, EVALUE 2.20e-01; EST_HUMAN HIT: BE001452.1, EVALUE 1.30e+00
ctgcagggcccagaaagagagcaccaaacactgacagcagagctacccagcagagccccacccgtaggtgccttgagccccagccagcccacagccacaggaatgacagaaatgtttattgttgtgtaccactgacatggtgtatttgcttgcagtgcaacaatagcaagtccacacataatctttctctgactcaacttcatgtcatccagtcccccagatggatgaccctgtacccaagacac

SEQ ID NO: 23908 - DNA, 219 bp, Homo sapiens
  MAP TO AC016831.1; EXPRESSED IN PLACENTA, SIGNAL = 1.9; EXPRESSED IN BRAIN, SIGNAL = 1.6; EST_HUMAN HIT: AW864385.1, EVALUE 1.00e-120; SWISSPROT HIT: P39768, EVALUE 9.00e+00
ggtcacagaaatggaaccttctccgtcacacctcctgatggcagtcagctgtgacccgctgaatccaggacatcatgcattccagtttcatttgcgagaacatttccaggtccggctgaagcctagtggctccagcagaggtctcaacccctttgggatgctcagtgggagacagaatcaagggccaatgatccatgacctagtcctagtgcccatgtc

SEQ ID NO: 23909 - DNA, 233 bp, Homo sapiens
  MAP TO AL023654.2; EXPRESSED IN FETAL LIVER, SIGNAL = 1.8; EXPRESSED IN BRAIN, SIGNAL = 0.75; NT HIT: gi14779513, EVALUE 1.00e-128; SWISSPROT HIT: Q11186, EVALUE 5.00e-11; EST_HUMAN HIT: BI914652.1, EVALUE 1.00e-120
agcagactctgcaggtcctctcagatcttgtgcggaaggccaggagtcggaacattggcatcttccatccatccttcaacttaagcaagttcctccgacagggtctctgcaaatgcctcccggccaatgtccaccagctcatctccggcaaaataggcatctctcttaccagagtgtctgatggggaaaacgttctggtgtctgactttcggtccaaagacgaagtcgtggat

SEQ ID NO: 23910 - DNA, 147 bp, Homo sapiens
  MAP TO AL109769.4; EXPRESSED IN BRAIN, SIGNAL = 0.65; EXPRESSED IN HELA, SIGNAL = 0.48; NT HIT: L18784.1, EVALUE 1.30e-01; EST_HUMAN HIT: AA427878.1, EVALUE 7.40e-01
tggaaagcagcccttgctggtacataccttcttttccttcatcacatttccaaattcaaattcagatatcaccaaacacctcaactatccttacactctgctgaactacaaaagcattatctgtaacttagctgtggccatcttcat

SEQ ID NO: 23911 - DNA, 244 bp, Homo sapiens
  MAP TO AC004179.1; EXPRESSED IN BRAIN, SIGNAL = 0.47; NT HIT: gi14783121, EVALUE 0.00e+00; SWISSPROT HIT: P08565, EVALUE 3.00e-04; EST_HUMAN HIT: BG290370.1, EVALUE 0.00e+00
atctgccatcatcttcccatcttccagtctctttccattgcaagtcacaatctgggtctcagggattatacccgtcttagtctcgatcattgctttcacttgtgccactgagctggaccttcgcacctggaggaggtgcctctttgcctcatcacctgactccacaagaaacaagggcagctcctcatcactgggcttcaccactttcagggtaaggtggatggtcttctctttgtcagtgcca

SEQ ID NO: 23912 - DNA, 172 bp, Homo sapiens
  MAP TO AC005580.1; EXPRESSED IN BRAIN, SIGNAL = 0.56; SWISSPROT HIT: P08548, EVALUE 2.50e+00; NT HIT: AE004199.1, EVALUE 6.00e-01; EST_HUMAN HIT: BE908810.1, EVALUE 1.40e-02
tcggcaaggtgtagaaggctcactagaggcacgacaccccaacatagagggagagcacctttggcaaggtgcagaaggctcactggaggcatcccaccccaacacagagagtgagagccctcagcgaggtatacaaggcccactggagtcatcacatcccaaaacagacaaa

SEQ ID NO: 23913 - DNA, 152 bp, Homo sapiens
  MAP TO AL049590.10; EXPRESSED IN HEART, SIGNAL = 3.1; EXPRESSED IN BRAIN, SIGNAL = 2.1; EXPRESSED IN FETAL LIVER, SIGNAL = 2.6; EXPRESSED IN PLACENTA, SIGNAL = 5.3; NT HIT: Z37506.1, EVALUE 5.20e-01; SWISSPROT HIT: P50185, EVALUE 5.80e+00; EST_HUMAN HIT: AV741797.1, EVALUE 1.90e-01
atgaggtttgtgctgagtgagcgcaacgacctacgtcaaagcaaactatttagaaccaatttggtggtatccagtactacttcagagatcacaaaccagttccattactgcttgatagaatcaaagatgttcagtggcatcagaaagggagt

SEQ ID NO: 23914 - DNA, 218 bp, Homo sapiens
  MAP TO AC004750.1; EXPRESSED IN BRAIN, SIGNAL = 0.62; SWISSPROT HIT: P10383, EVALUE 3.00e+00
tcattggtcctgctggtcataggagctgaaagaaaatggctgaatcagcaaatatttattgtgtgcttgctctgtgttgaatgctttggagaagaagaagaaggtgaagtcatagaggagcagggaattcccgccgacaggcagtgtttgcccagggccaagggagtgggagatacccagcaacagaggacggtacccactggggctaggaaggcttt

SEQ ID NO: 23915 - DNA, 305 bp, Homo sapiens
  MAP TO AC013602.2; EXPRESSED IN HEART, SIGNAL = 9.4; EXPRESSED IN LUNG, SIGNAL = 7.5; EXPRESSED IN FETAL LIVER, SIGNAL = 6.8; EXPRESSED IN BRAIN, SIGNAL = 7.2; EXPRESSED IN PLACENTA, SIGNAL =   5; NT HIT: gi14767838, EVALUE 0.00e+00; SWISSPROT HIT: P24507, EVALUE 5.00e-13; EST_HUMAN HIT: F08762.1, EVALUE 1.00e-115
ttacaggtgcagctggtgccacatggcaatctgccggcgagggtttttgagcatctcctcccagtggctgcgctcagagcccgaggtgtgcaggcccaggctgcagtggccaagcgcacagctctgccctgaatcgtcctggcccagcacttccagctccacactggaggcctgcagcaggtcgtcaggcagctcaaacatgatcatctcgttccacacggggttgatcttgtgcttagctcgtttagtctgcttcttcttcagcttccgagcctggtgcttcaaggtcaccttgacagagacat

SEQ ID NO: 23916 - DNA, 166 bp, Homo sapiens
  MAP TO AC007207.22; EXPRESSED IN PLACENTA, SIGNAL = 0.76; EXPRESSED IN HEART, SIGNAL =   1; EXPRESSED IN BRAIN, SIGNAL = 0.73; SWISSPROT HIT: P03123, EVALUE 8.70e-01; NT HIT: AL139077.2, EVALUE 5.70e-01
gctggccacaccctccccaccagctttgcccagagtccacactgcaggctttgcccacagagtccatactgtaggctctgaacctccactgtggaaccacatggggagccacagggaccagtcccacggaaaagccaggacatgctccaaaagatggcccaaggag

SEQ ID NO: 23917 - DNA, 253 bp, Homo sapiens
  MAP TO AF228727.2; EXPRESSED IN HELA, SIGNAL = 1.3; EXPRESSED IN BRAIN, SIGNAL = 1.1; EXPRESSED IN PLACENTA, SIGNAL = 1.5; EXPRESSED IN FETAL LIVER, SIGNAL = 1.3; EST_HUMAN HIT: BF002777.1, EVALUE 1.00e-123; SWISSPROT HIT: Q00196, EVALUE 1.80e-02; NT HIT: gi7705782, EVALUE 1.00e-123
gcgatttcacctaaacctcaaagtcagaaaaaaaatgaagctgacattagcagttctgccaacactcagaaacctgcactgttatcctcaactttgtcttcagggaaggctcgcagcaagaaatgcaaacatgaatctggagattcttctgggtgtataaaaccccctaaatcaccactttccccagaattaatacaagtcgaggatttgacgctggtatctcagctttcttcttcagtgataaataaaacta

SEQ ID NO: 23918 - DNA, 175 bp, Homo sapiens
  MAP TO AC004800.1; EXPRESSED IN BRAIN, SIGNAL = 0.54; EXPRESSED IN LUNG, SIGNAL = 0.42; NT HIT: AE001485.1, EVALUE 9.50e+00; EST_HUMAN HIT: AA553359.1, EVALUE 3.00e-84; SWISSPROT HIT: P34413, EVALUE 3.00e-04
ctgatgtggtattgtatttgatccactgtaaaagttcttcctgaggcaaattattaaattctcctattatgctccattgattacggaggtttgcataaccttgtattgacatcactgttagaatgccaaagataacattatcaaaacgaactctgcgaaaaagccagccaaagag

SEQ ID NO: 23919 - DNA, 116 bp, Homo sapiens
  MAP TO AC004462.3; EXPRESSED IN PLACENTA, SIGNAL = 1.3; EXPRESSED IN BRAIN, SIGNAL = 0.69; NT HIT: L77570.1, EVALUE 5.00e-59
ggtcagcacacttttccttcaagggccagatgataagtatttccaggtggccagcttcacaggccaccctctctctgccacagctgctcaaccctgctgccgtggagctaaagcag

SEQ ID NO: 23920 - DNA, 100 bp, Homo sapiens
  MAP TO AC009567.8; EXPRESSED IN FETAL LIVER, SIGNAL = 1.2; EXPRESSED IN BRAIN, SIGNAL =   2; EXPRESSED IN PLACENTA, SIGNAL = 1.5; EST_HUMAN HIT: AI831462.1, EVALUE 1.00e-38; NT HIT: AL163227.2, EVALUE 3.00e-32; SWISSPROT HIT: P15620, EVALUE 8.00e+00
agtagctttgcccaaaatgctgataatgatatggacaatgaaatgcaggctgaggtggtctcagatggagatgaggaacgtgttgggaactggagcaaag

SEQ ID NO: 23921 - DNA, 178 bp, Homo sapiens
  MAP TO AC007570.23; EXPRESSED IN BRAIN, SIGNAL = 1.1; EXPRESSED IN PLACENTA, SIGNAL = 0.89; SWISSPROT HIT: P54795, EVALUE 3.30e+00; EST_HUMAN HIT: BE780480.1, EVALUE 7.00e-91; NT HIT: M33291.1, EVALUE 2.50e+00
ccataatccacagattgggagaaccagccaaggacaggatgccagtgggtcaggttggacttcttctgagacacatacttccgacagtagcacagcgtctgggtgagcaaactcacgaacccatctgtctcctcctctaacactctggggctgagggagcccaagtgtaggaggttgc

SEQ ID NO: 23922 - DNA, 133 bp, Homo sapiens
  MAP TO AL035609.7; EXPRESSED IN LUNG, SIGNAL = 2.9; EXPRESSED IN FETAL LIVER, SIGNAL =   2; EXPRESSED IN BRAIN, SIGNAL = 2.4; EXPRESSED IN PLACENTA, SIGNAL = 2.1; EXPRESSED IN HEART, SIGNAL = 1.7
ctgacaatattcacgctctcctttagaccctttgaaatgggcctaactttgagttggattaatatacaaatgcagaggctgctggatctatcatggatatatagcatttttatcaaatttgcaagtagcaaca

SEQ ID NO: 23923 - DNA, 231 bp, Homo sapiens
  MAP TO AC011387.4; EXPRESSED IN BRAIN, SIGNAL = 2.5; EXPRESSED IN HELA, SIGNAL = 1.7; EST_HUMAN HIT: BG654971.1, EVALUE 3.00e-84; NT HIT: U07563.1, EVALUE 2.00e-91
aaagggtacactcgccagcagcttagccacgagagtacactgaacaaacgagacagggtcatttataacctgacatgtccaccctactgccgtgtccagtttcaattggctggaacaggacctcacattttgtatttgtcccgattggctagcaacttagaactttttaaaagaggcaaaggcagaggagaacaaaggaagaaggaagtaacttgtggaatgctgagaaag

SEQ ID NO: 23924 - DNA, 127 bp, Homo sapiens
  MAP TO AF274858.1; EXPRESSED IN BRAIN, SIGNAL =   1; EXPRESSED IN FETAL LIVER, SIGNAL = 0.9; SWISSPROT HIT: P34810, EVALUE 4.60e+00; EST_HUMAN HIT: W21788.1, EVALUE 2.00e-04; NT HIT: AE004901.1, EVALUE 4.20e-01
tcagaagcccggaggagctggtggtgggagaatgacggcagggacgcagccacagttcagaccctgtcccctcagcacctggatggactcccactgtttgctttggcaaatgccgaggagtcctcgg

SEQ ID NO: 23925 - DNA, 330 bp, Homo sapiens
  MAP TO AC022163.3; EXPRESSED IN BRAIN, SIGNAL = 1.1; EXPRESSED IN HELA, SIGNAL = 2.1; EXPRESSED IN PLACENTA, SIGNAL = 1.8; EXPRESSED IN FETAL LIVER, SIGNAL =   3; SWISSPROT HIT: P47107, EVALUE 5.50e-02; NT HIT: U08988.1, EVALUE 9.00e-17; EST_HUMAN HIT: BG113167.1, EVALUE 1.00e-38
ctagagctggtttgcaactaagtttacggaatattctaaattatttgttattacttcaacaatgttcacaaaatcttcatcagaagtagatttcatctcaataaatgcctttcttttcatatctgtaaaaaagaacatttcatctgttaaacttttatcatgagaccgtagtaattcagctgcatcatcgggctcaacttctaattctaggtttttgctattctcaccacatttgcagttacttcctccactgaagtcttgatccctccaagtcaaatcatccatgaaggttggaatcaccttcttccaaactcctgttaatgttgacat

SEQ ID NO: 23926 - DNA, 138 bp, Homo sapiens
  MAP TO AC019209.3; EXPRESSED IN HEART, SIGNAL = 3.4; EXPRESSED IN FETAL LIVER, SIGNAL = 2.2; EXPRESSED IN HELA, SIGNAL =   3; EXPRESSED IN BRAIN, SIGNAL = 1.8; EXPRESSED IN PLACENTA, SIGNAL =   2; EST_HUMAN HIT: BG284254.1, EVALUE 1.70e-01; SWISSPROT HIT: Q9K896, EVALUE 8.90e-01; NT HIT: AF200363.1, EVALUE 7.30e+00
cacttcttagttcacactagcaccgtactagacagagaagctcactggaatgaagtggaggagactggagtggatgcagatcccagtccagagattacttcagaagtccctgagaaagataaggactgcttggattaa

SEQ ID NO: 23927 - DNA, 109 bp, Homo sapiens
  MAP TO AC025467.3; EXPRESSED IN HEART, SIGNAL = 2.4; EXPRESSED IN FETAL LIVER, SIGNAL = 1.8; EXPRESSED IN LUNG, SIGNAL = 1.7; EXPRESSED IN BRAIN, SIGNAL = 1.5; EXPRESSED IN PLACENTA, SIGNAL =   5; SWISSPROT HIT: Q92462, EVALUE 8.00e+00; NT HIT: X62880.1, EVALUE 1.40e+00; EST_HUMAN HIT: BG818000.1, EVALUE 1.30e-01
ctccaggtctggcccatgagaacgtcccacaggcatgggggagcctccatgctctttctccggctgcctgggatgctgattcccagggtaatcttggaagccattgtca

SEQ ID NO: 23928 - DNA, 465 bp, Homo sapiens
  MAP TO AC000090.2; EXPRESSED IN PLACENTA, SIGNAL = 0.83; EXPRESSED IN HEART, SIGNAL = 0.98; EXPRESSED IN LUNG, SIGNAL = 0.58; EXPRESSED IN BRAIN, SIGNAL = 0.7; EXPRESSED IN FETAL LIVER, SIGNAL = 0.45; SWISSPROT HIT: P25953, EVALUE 2.80e-01; NT HIT: AJ223837.1, EVALUE 2.80e-02; EST_HUMAN HIT: H11869.1, EVALUE 2.00e-38
gctcctgcggccccaactcagacagcccaggaccatatctatgctaactcttccctctccaaacctttacagtctttgcctccggagccatccaaactacaatttacctgtaattctgcaggccctcccccatccaccacagcccctcaccctcctatcattttggtccctcaaccggtcactttgccatccactcaacctgcttctctgtacccttcttcatgcagggacacccctgccactctggttgtgcaggactgggccagtaatcaccagtatgcttctgcctcttctgctcccccaatgcccctttctcacactcttataccagtccgaccccgtcaatctcagtttctcttatctatacatacttttcctgtcacttctatgccgactctatctcatgtgcctgctcttgaaactttcatgcaatgcttattacgccaaaacaaacaagtagattag

SEQ ID NO: 23929 - DNA, 137 bp, Homo sapiens
  MAP TO AL110118.3; EXPRESSED IN BRAIN, SIGNAL = 0.86; EXPRESSED IN PLACENTA, SIGNAL = 0.92; NT HIT: gi14748505, EVALUE 5.00e-47; EST_HUMAN HIT: BI488657.1, EVALUE 8.00e-47
ccatagaacgtattgtcatacaacaaatatttattttaaaaggtgatgatgaagatgatgcagaagatgaaaataacattgataacagaactaacttcgatggaccatctgcaaaacggccaaaaacaccgtcttaa

SEQ ID NO: 23930 - DNA, 317 bp, Homo sapiens
  MAP TO AC008524.5; EXPRESSED IN HEART, SIGNAL =  14; EXPRESSED IN LUNG, SIGNAL = 5.9; EXPRESSED IN BRAIN, SIGNAL = 3.5; EXPRESSED IN PLACENTA, SIGNAL =  10; EST_HUMAN HIT: BE881232.1, EVALUE 1.00e-121; NT HIT: AF116710.1, EVALUE 1.00e-119; SWISSPROT HIT: P13471, EVALUE 2.00e-46
ctcaggtggctgacggagaaaacatatttggtgtccgccatatcgttgcacccttcaatgacacttttgtccatgtcactgatctttctggcaaagaaaccctctgccgtgtgactggtgggatgaaggtgaaggcagaccgagatgaatctttgccatatgctgctatgttggctgcccaggatatggctcagaggtgcaaggaactgggtattactgccttacacatcaaacaccgggccacaggaggaaataggacaaagactcctggacctggggcccagtcggccctcgagcccttgccccctcgggtatga

SEQ ID NO: 23931 - DNA, 163 bp, Homo sapiens
  MAP TO AC011311.11; EXPRESSED IN HELA, SIGNAL = 2.1; EXPRESSED IN BRAIN, SIGNAL = 0.43; EXPRESSED IN PLACENTA, SIGNAL = 1.5; SWISSPROT HIT: Q9Y2R3, EVALUE 7.00e-24; EST_HUMAN HIT: BF689046.1, EVALUE 1.00e-86; NT HIT: gi14591931, EVALUE 3.00e-86
acctggaaatagatgaccactgcaaagacaaagatggtggcgatgagattcatgaggttgggaagattctggcggtagaacgcctcccgaagggctcggaccttgtctgtgcgtgtggccagcagatggaaaagtgcgatgatagcaccttcaaattccattc

SEQ ID NO: 23932 - DNA, 142 bp, Homo sapiens
  MAP TO AC011532.6; EXPRESSED IN PLACENTA, SIGNAL = 1.4; EXPRESSED IN HEART, SIGNAL = 1.8; EXPRESSED IN BRAIN, SIGNAL = 1.5; EXPRESSED IN FETAL LIVER, SIGNAL = 0.98; NT HIT: AF264023.1, EVALUE 4.80e-01; EST_HUMAN HIT: BF968678.1, EVALUE 2.80e+00; SWISSPROT HIT: Q9WUU9, EVALUE 4.50e+00
cacatgagagcttccaggaacggctcatcaacagcttcccggaagcaggggagatgccattgcttcagaataacttccccagccagatgttttaccagttcctcgagatggtagagtctgtgcatggctgtgacgcatcagg

SEQ ID NO: 23933 - DNA, 78 bp, Homo sapiens
  MAP TO AC010527.4; EXPRESSED IN PLACENTA, SIGNAL = 1.4; EXPRESSED IN BRAIN, SIGNAL = 1.3; EXPRESSED IN HELA, SIGNAL = 1.2; NT HIT: AY050809.1, EVALUE 3.70e+00; EST_HUMAN HIT: BF378925.1, EVALUE 2.00e-21
ctggcttgggaggaaggtccttgtagggaggtgttgagttctcatagtcatcatcctcctcctcctcctccatggtcc

SEQ ID NO: 23934 - DNA, 153 bp, Homo sapiens
  MAP TO AC024070.2; EXPRESSED IN BRAIN, SIGNAL = 0.48; EXPRESSED IN HELA, SIGNAL = 0.66; NT HIT: AF006548.1, EVALUE 2.10e+00; SWISSPROT HIT: Q22307, EVALUE 4.40e+00
atggcatttagctatgacggcttcaggttgtggactgtatccttggggtccttgtccttggaagcaatgtcttctccttggattcagtattttgcacttgccaacctacgtggacctgagagatacaccgtccagaagctgatgccttttcca

SEQ ID NO: 23935 - DNA, 207 bp, Homo sapiens
  MAP TO AC010644.6; EXPRESSED IN BRAIN, SIGNAL = 0.64; EXPRESSED IN FETAL LIVER, SIGNAL = 0.72; EXPRESSED IN PLACENTA, SIGNAL = 0.61; SWISSPROT HIT: Q07873, EVALUE 1.40e+00; NT HIT: gi16168594, EVALUE 2.90e+00
ctatcggaggtcggagcagcagaggagatggagaaggagcagccagtcccgctgcaaggggaaggccaggagagcctggggccagaggcgcagccaggagggagggaccaaggaaggggaggactggaaactgacctcgggcttaggaacgtggaggtcagtggtgcccttgatgaaggatcttggtggggtggtgggagcagatgc

SEQ ID NO: 23936 - DNA, 92 bp, Homo sapiens
  MAP TO AC005852.1; EXPRESSED IN BRAIN, SIGNAL = 0.4; NT HIT: AJ277516.1, EVALUE 7.20e-02; EST_HUMAN HIT: BG771242.1, EVALUE 6.60e+00
ttaaaccatttgtcaccatagcaacgaagctggcaggattggtaggagtttttgcttctaccaactgtgaaacatgcttgttgctggcaagt

SEQ ID NO: 23937 - DNA, 217 bp, Homo sapiens
  MAP TO AC010609.5; EXPRESSED IN LUNG, SIGNAL = 1.6; EXPRESSED IN FETAL LIVER, SIGNAL = 0.35; EXPRESSED IN BRAIN, SIGNAL = 0.82; SWISSPROT HIT: Q08881, EVALUE 2.00e-38; NT HIT: gi16159882, EVALUE 1.00e-119; EST_HUMAN HIT: BI018346.1, EVALUE 4.50e+00
caagtctctgtggatgacacatgcctcttccaggtaggccatgccctcacacacatccagacacatgcccagcagggtctctgcagcaaaaagtccccgctgggtgcgtagataatctgacaggcagccgtgctccatgaactcaaacaccaggcagatgggggcctgctccaggcacaccccatacagctgcaccagtttgggatgagagagtttc

SEQ ID NO: 23938 - DNA, 226 bp, Homo sapiens
  MAP TO AC008953.4; EXPRESSED IN BRAIN, SIGNAL = 1.1; EXPRESSED IN LUNG, SIGNAL = 2.1; EXPRESSED IN HELA, SIGNAL = 5.8; EXPRESSED IN HEART, SIGNAL = 1.3; EST_HUMAN HIT: BE547904.1, EVALUE 1.00e-122; SWISSPROT HIT: Q92973, EVALUE 1.00e-39; NT HIT: U72069.1, EVALUE 1.00e-124
ctgcaggcagcttcttgtactctcttgttgctgtccaggatgcgctttagcaattctgtcattaatggcttcaggtacgtgtctggcggctggctgaccacccagtgtgcatagcggctaagagtccagcatgttatggaacgcacaagagcctttttatcagagaggcactgaataaggtgaggaataagctcaggcaagtatggaatcatgccctgcatgcaac

SEQ ID NO: 23939 - DNA, 195 bp, Homo sapiens
  MAP TO AL096870.3; EXPRESSED IN FETAL LIVER, SIGNAL = 2.3; EXPRESSED IN HELA, SIGNAL = 2.1; EXPRESSED IN BRAIN, SIGNAL = 2.4; EXPRESSED IN PLACENTA, SIGNAL = 2.2; SWISSPROT HIT: P39929, EVALUE 8.00e-06; NT HIT: gi14750838, EVALUE 6.00e-97; EST_HUMAN HIT: BE395591.1, EVALUE 9.00e-97
ggtatgggctgggtcagctgccctacaggctttgcggaggaagaaaagattcgaacagcagctggcacaaactgacgggacattatccaccctggagtttcagcgtgaggccattgagaatgccactaccaatgcagaagtccttcgtaccatggagcttgctgcccaaagcatgaagaaggcctaccaggacat

SEQ ID NO: 23940 - DNA, 405 bp, Homo sapiens
  MAP TO AC010327.5; EXPRESSED IN PLACENTA, SIGNAL = 0.92; EXPRESSED IN HEART, SIGNAL = 1.1; EXPRESSED IN BRAIN, SIGNAL = 1.3; EST_HUMAN HIT: BG397528.1, EVALUE 2.00e-93; SWISSPROT HIT: P12949, EVALUE 5.00e-03; NT HIT: gi13376063, EVALUE 9.60e-02
atgggccttcctcactggtaccccacccctctcccgccaggcatggccgcctttgccaccgcccacctcctctacgtctgggccttcggcttctctcccctgcagcccggcctgctgctgctcatcatcctggcccctggcccctacctcagccttgtgctccagcacctcgagccggatatggtcctgccggtggcagcctatgggctgatcctgatggccatgctgtggcgcggcctggcccagggcgggagtgccggctggggcgcgctgctcttcacgctctctgatggcgtgctggcctgggacaccttcgcccagcccctgccccatgcccacctggtgatcatgaccacctactatgctgcccagctcctcatcacactgtcagccctcaggagcccg

SEQ ID NO: 23941 - DNA, 204 bp, Homo sapiens
  MAP TO AL096870.3; EXPRESSED IN BRAIN, SIGNAL = 1.2; EXPRESSED IN PLACENTA, SIGNAL = 1.2; EST_HUMAN HIT: BE733834.1, EVALUE 1.00e-111; SWISSPROT HIT: Q92696, EVALUE 8.00e-37; NT HIT: gi14750750, EVALUE 1.00e-111
ttcactgctgggactatcggcggtttgtggccacacaggcagccgtgccccctgcagaagagctagccttcactgacagcctcatcacccgaaacttctccaactactcttcctggcattaccgctcctgtctcttgccccagctgcacccccagccggattctggaccacaggggcgcctccctgaggatgtgctgctcaaag

SEQ ID NO: 23942 - DNA, 220 bp, Homo sapiens
  MAP TO AC004792.1; EXPRESSED IN PLACENTA, SIGNAL = 0.79; EXPRESSED IN BRAIN, SIGNAL =   1; EST_HUMAN HIT: BF210926.1, EVALUE 1.20e+00; NT HIT: L42140.1, EVALUE 7.90e-01; SWISSPROT HIT: Q15485, EVALUE 1.00e+00
ctagcctgttcgccgttgtggtttgtcctcccggttcctctgaaggagttggtcagtagaaccatggcctccattgactacgtcctcagagtcgcagctctcttcagtcgagctccagtcacagaggacggttgtggtgagacccaggcagaagtatttccggtcaacgaggtcgcgggtagtgcgcatgcgcttcgtgcagggccctgcgcaagggcgc

SEQ ID NO: 23943 - DNA, 225 bp, Homo sapiens
  MAP TO AC008971.5; EXPRESSED IN BRAIN, SIGNAL = 0.86; EXPRESSED IN HELA, SIGNAL =   1; EXPRESSED IN FETAL LIVER, SIGNAL = 0.89; EXPRESSED IN PLACENTA, SIGNAL =   1; EST_HUMAN HIT: BG767219.1, EVALUE 1.00e-123; NT HIT: gi7705868, EVALUE 1.00e-124; SWISSPROT HIT: P45403, EVALUE 5.00e-01
ctaatccacatatctaacaaagagagcgacaaagcaacagcctatcagtgccaccgcagacgctgtgatcaccacgacgacaacggtcccggctgtgttgaccagaaagcccaggccacctccgaccaggatctgagccagctgcaccatgcatgtgagggtggcgcagtccatgcccttccctctcacgctgttgtctgggtcccctcctggggcctgctgcct

SEQ ID NO: 23944 - DNA, 174 bp, Homo sapiens
  MAP TO AC004511.1; EXPRESSED IN BRAIN, SIGNAL = 1.6; EXPRESSED IN PLACENTA, SIGNAL = 2.2; EXPRESSED IN HEART, SIGNAL = 1.9; NT HIT: AF063837.1, EVALUE 1.50e-01; EST_HUMAN HIT: BI767960.1, EVALUE 5.70e-02; SWISSPROT HIT: P03400, EVALUE 5.00e-01
atggatgaggctgggtcatctggtgccctgctgtgcaccagagccctgaacctgtttcaggagctctgctatgaggagtttacaaagaactttaccttcaccctgaagagtctcattaacaaatatgacaaacaggaccatcacataacgaaggtttacatggacatggaataa

SEQ ID NO: 23945 - DNA, 315 bp, Homo sapiens
  MAP TO AL035402.7; EXPRESSED IN PLACENTA, SIGNAL = 1.4; EXPRESSED IN BRAIN, SIGNAL = 1.3; EXPRESSED IN LUNG, SIGNAL = 1.4; SWISSPROT HIT: Q9ULD4, EVALUE 6.50e+00; EST_HUMAN HIT: AI539359.1, EVALUE 8.00e-83; NT HIT: U48488.1, EVALUE 4.60e+00
gtcggtaacctctatacatctggaaaggctagatgtggcaaatgtttccttgtaaaagttttgggggaagctgagagcagctttctcacattatacacgcaggtctcctataaacgccggtacatcctcccaaagcgtgatgggaatctccaaatcgctaaatgtgtcctgttactccgtttctcttttcccacatcaacgtctggtagaaggaaggccaactgccccatggtcgctaccattccacccgtcctcatccgggacttcgctgaccttccggccgttaaggctgttgtctgttgtcatcaggaccag

SEQ ID NO: 23946 - DNA, 208 bp, Homo sapiens
  MAP TO AC009482.4; EXPRESSED IN BRAIN, SIGNAL = 1.5; EXPRESSED IN LUNG, SIGNAL = 0.45; EXPRESSED IN PLACENTA, SIGNAL = 2.4; EST_HUMAN HIT: BF337565.1, EVALUE 1.10e+00; SWISSPROT HIT: Q9VS79, EVALUE 4.20e+00
cttcagacttttcaccttggcacaacaggaaatccttttctgtgcctctcttccacttttcatgatcatttctctggcatcctcccccattctgtcctctggatgccctgggatctgttccttctccgaggacatcccctttcagttctgccctccctaggtaataatattccatgatctggaacttctttggggctttctttcccat

SEQ ID NO: 23947 - DNA, 217 bp, Homo sapiens
  MAP TO AC008857.4; EXPRESSED IN PLACENTA, SIGNAL = 1.4; EXPRESSED IN HEART, SIGNAL = 1.2; EXPRESSED IN BRAIN, SIGNAL = 0.77; EXPRESSED IN LUNG, SIGNAL = 0.43; NT HIT: U92877.1, EVALUE 7.70e-01; SWISSPROT HIT: Q92685, EVALUE 3.80e+00; EST_HUMAN HIT: N95049.1, EVALUE 1.10e+00
atttttcttgaatagctggaatcctcagggtggccactggagacttcccaagagaattataagaaatcatagacacccaaaagctctcgcctcccagatgcagttcaagctgctggttagtagtgttcattgtttctgtgaggttagtgttgctttctggatagtaccatatgttgtagccaagtgttttctctaggactggggctcctcttgcctt

SEQ ID NO: 23948 - DNA, 118 bp, Homo sapiens
  MAP TO AC009509.7; EXPRESSED IN FETAL LIVER, SIGNAL = 1.1; EXPRESSED IN LUNG, SIGNAL = 0.83; EXPRESSED IN PLACENTA, SIGNAL = 0.84; EXPRESSED IN BRAIN, SIGNAL = 1.1; NT HIT: gi14767658, EVALUE 2.00e-12; SWISSPROT HIT: P21860, EVALUE 4.10e-01; EST_HUMAN HIT: BG576315.1, EVALUE 2.00e-03
atggagggtgtgggctgggtgtctgcaggctgtggtgcaccgagagccttcccgaaactgggctgcctggccacagctgctgcatccgagaactacaaatcttatattcagcatgtag

SEQ ID NO: 23949 - DNA, 165 bp, Homo sapiens
  MAP TO AC010252.3; EXPRESSED IN PLACENTA, SIGNAL = 1.4; EXPRESSED IN HEART, SIGNAL = 1.9; EXPRESSED IN FETAL LIVER, SIGNAL = 1.4; EXPRESSED IN LUNG, SIGNAL = 1.1; EXPRESSED IN BRAIN, SIGNAL = 1.5; SWISSPROT HIT: O15126, EVALUE 1.00e-13; EST_HUMAN HIT: BG028022.1, EVALUE 6.00e-88; NT HIT: gi14781218, EVALUE 4.00e-88
ttaaatctggttacccttgaaagcattctgagctgcactagatgctgcagttgaagctgcatttgcagctgcggtctggacagttttgttggacatcacacctgttgcaaactcctgttgggccttctcaaaactagcacctgttgtgcgatatagtccatgtac

SEQ ID NO: 23950 - DNA, 102 bp, Homo sapiens
  MAP TO AC009087.4; EXPRESSED IN HEART, SIGNAL =   2; EXPRESSED IN BRAIN, SIGNAL = 1.2; EXPRESSED IN HELA, SIGNAL = 1.4; EXPRESSED IN PLACENTA, SIGNAL = 1.4; EST_HUMAN HIT: BG566369.1, EVALUE 1.00e-50; NT HIT: M10935.1, EVALUE 1.00e-50; SWISSPROT HIT: P00737, EVALUE 9.00e-16
catctccttctgtgcgcagtttgtagtagttcttacactggtagcgaaccgagtgctccacatagccatgtgcaatctcggggggcttcgggcagccgtcat

SEQ ID NO: 23951 - DNA, 189 bp, Homo sapiens
  MAP TO AF196972.1; EXPRESSED IN PLACENTA, SIGNAL = 0.88; EXPRESSED IN HEART, SIGNAL = 0.99; EXPRESSED IN BRAIN, SIGNAL = 1.1; EXPRESSED IN LUNG, SIGNAL = 1.1; EXPRESSED IN FETAL LIVER, SIGNAL = 1.5; SWISSPROT HIT: O60224, EVALUE 2.00e-22; NT HIT: gi13629995, EVALUE 3.00e-71; EST_HUMAN HIT: W00507.1, EVALUE 1.00e-58
ctgaacacagccagggaagccagaggggttgttcccgaattctttcctcttaccagatgtcttgttaatcttctccaaggtacttggatttcccggggggcacagctgtttcccatcattttgtgggccagatgcctctggcacttccttcaaaccattttcttcctctgctggcttcttgggcatgat

SEQ ID NO: 23952 - DNA, 279 bp, Homo sapiens
  MAP TO AC061958.9; EXPRESSED IN HEART, SIGNAL = 1.2; EXPRESSED IN BRAIN, SIGNAL = 1.2; EXPRESSED IN LUNG, SIGNAL = 1.6; EXPRESSED IN PLACENTA, SIGNAL = 1.4; SWISSPROT HIT: P37774, EVALUE 1.40e+00; NT HIT: AE006341.1, EVALUE 2.60e-01
gattatacccatacttcagtgaaggtttgtattatagagcagaccatgaaatggttactaaatgttatgttactttatgattcctacattgtggtagtaagagatgagccaagagaggaaaccaagcaatctggagaactactacttaaggttagcctaaaaggaaaacagagtggcacacaaagtaaacccacatctagattacgtttttcactaaaaagatataaaaaagcaattatagaaagacaaggaagagaaaaagacaacattgaagactga

SEQ ID NO: 23953 - DNA, 279 bp, Homo sapiens
  MAP TO AC004180.1; EXPRESSED IN HEART, SIGNAL = 2.5; EXPRESSED IN LUNG, SIGNAL = 2.3; EXPRESSED IN BRAIN, SIGNAL = 1.3; EXPRESSED IN PLACENTA, SIGNAL =   1; EST_HUMAN HIT: BI036998.1, EVALUE 0.00e+00; SWISSPROT HIT: P18466, EVALUE 3.00e-16; NT HIT: Y16803.1, EVALUE 0.00e+00
cagagggcacagggtgagtgctgtgattcccgctgtgttccatgtagcaggtgaacctctgctcctctccttggcaaatcctggtggccacccaggtctggtaggttccattcccatcaggcaggacatccccccactgctgggtgtcgtggctcaaagataccccatcctgacgccaggtcagtgtgatattccggggatagaagctggaagccctgcatgtcacggtgatgttgccctctgaggcctcgctgcgggtgacattcaccatggggggca

SEQ ID NO: 23954 - DNA, 104 bp, Homo sapiens
  MAP TO AC009286.31; EXPRESSED IN BRAIN, SIGNAL = 0.73; EXPRESSED IN FETAL LIVER, SIGNAL = 0.49; EST_HUMAN HIT: BI764018.1, EVALUE 3.00e-08; SWISSPROT HIT: P01702, EVALUE 2.00e-03; NT HIT: X14613.1, EVALUE 5.00e-34
tcattgttggtaccaggacacaatcccaagacccttattgctgctgcttccagtgcaggagatggtgactggtttagccacagacagactgtgcaggttaccaa

SEQ ID NO: 23955 - DNA, 110 bp, Homo sapiens
  MAP TO AC002309.2; EXPRESSED IN FETAL LIVER, SIGNAL = 2.7; EXPRESSED IN LUNG, SIGNAL = 4.5; EXPRESSED IN BRAIN, SIGNAL = 1.3; EXPRESSED IN PLACENTA, SIGNAL = 2.4; NT HIT: AL163209.2, EVALUE 3.00e-14; SWISSPROT HIT: Q43716, EVALUE 3.50e+00; EST_HUMAN HIT: BG699875.1, EVALUE 6.00e-53
actgcttcagctgccataacaaaatatcacagactggatggattaaacaacaaaaatttatttctcacagttctggaggctgggaagtccaagatcaaggtgtcagcaag

SEQ ID NO: 23956 - DNA, 242 bp, Homo sapiens
  MAP TO AC005306.1; EXPRESSED IN BRAIN, SIGNAL = 0.81; NT HIT: gi11079647, EVALUE 1.00e-123; EST_HUMAN HIT: AL522794.1, EVALUE 1.00e-123; SWISSPROT HIT: P78368, EVALUE 1.00e-12
cagagtcaccgtggagaggccagggtatcacaaacttatggattttgacaagaaaggagggaaaggggagacggaggagggccggagaatgtccaaggccggcgggggccggagcagccacggcatccggagctcggggaccagctcgggggtcctgatggtgggccccaacttccgcgtcggcaagaagatcggctgcggcaacttcggggagctccgcctaggtgaggccctgctcggtg

SEQ ID NO: 23957 - DNA, 483 bp, Homo sapiens
  MAP TO AC004035.1; EXPRESSED IN PLACENTA, SIGNAL = 7.1; EXPRESSED IN FETAL LIVER, SIGNAL = 9.8; EXPRESSED IN LUNG, SIGNAL =  16; EXPRESSED IN BRAIN, SIGNAL = 4.2; SWISSPROT HIT: Q02760, EVALUE 1.10e+00; EST_HUMAN HIT: AL557628.1, EVALUE 0.00e+00; NT HIT: gi13648473, EVALUE 0.00e+00
caagtctgtttgggaacagcactggcaggtctagtttcctgacttcctggccaggattcctgaagtccttttcatccctgtctgcaccatccacagtgccatcttctacctccgtgggttccccattctggtgattcagctctccagcctcaatatcacttccttcttggccaggaacagcatcgcttgccataggaggtgcagaggcccaggagcctgaaagagcattcatttcctcatgaaagatacaaggctcaggcacacggcctctcctcactttgcggtaactcaactgtaggcttttgaacttggtgcgacactgttctggggtccgcagaaaaccctgctcccagagtccttccgccatggccctgtagatctggctgttctgctgacaggtctggagttttccataaaattgagaactactaagaatagccaggagcgtcttggtctcttcatagccccagggcacacctgttg

SEQ ID NO: 23958 - DNA, 278 bp, Homo sapiens
  MAP TO AC004192.1; EXPRESSED IN LUNG, SIGNAL =  27; EXPRESSED IN FETAL LIVER, SIGNAL = 8.6; EXPRESSED IN BRAIN, SIGNAL =   2; EXPRESSED IN PLACENTA, SIGNAL = 7.5; SWISSPROT HIT: P30515, EVALUE 9.00e-36; NT HIT: AF055066.1, EVALUE 0.00e+00; EST_HUMAN HIT: BE277632.1, EVALUE 0.00e+00
tcactcacaggcctcactctggttgtagtagccgctcagggtccgcaggttcactcggtaaaactgtgctttggccttggcggtccctgtctcctcttcccaatattccggcccctcctgctccatccacggcgcccgcggctccatcctgggactcgtggcgtcgctgtcgagccgcacgcactgcgtgtcgtccacgtcgcccacggagaggaagcggggatccgcgcggccgggccgggacatggtggtgtggaaatacctcaaggagtggaagc

SEQ ID NO: 23959 - DNA, 118 bp, Homo sapiens
  MAP TO AC005621.1; EXPRESSED IN HEART, SIGNAL = 0.98; EXPRESSED IN BRAIN, SIGNAL = 0.85; EXPRESSED IN FETAL LIVER, SIGNAL = 0.5; EXPRESSED IN PLACENTA, SIGNAL = 0.76; SWISSPROT HIT: P40973, EVALUE 2.70e+00; NT HIT: AE006747.1, EVALUE 9.80e-02
ttatgacttgttcttgacaatgagatatgtcatttctgggtcacaacattcaacttcccttgcaaaatcctccagaactctctccccagtggtggctgctgctgtgtccatctgggtc

SEQ ID NO: 23960 - DNA, 89 bp, Homo sapiens
  MAP TO AC006167.1; EXPRESSED IN BRAIN, SIGNAL = 0.63; NT HIT: M37940.1, EVALUE 7.00e-02; EST_HUMAN HIT: BG259148.1, EVALUE 1.00e-01
gctttgataaagagtttcctgaggctcaccaccggcagctgaattctggtctcctcttcctgcctctgcttgcctccgtggactcctag

SEQ ID NO: 23961 - DNA, 210 bp, Homo sapiens
  MAP TO AC002107.1; EXPRESSED IN FETAL LIVER, SIGNAL = 0.62; EXPRESSED IN BRAIN, SIGNAL = 0.68; SWISSPROT HIT: O75683, EVALUE 4.00e-09; NT HIT: gi12735216, EVALUE 3.00e-74; EST_HUMAN HIT: BI758612.1, EVALUE 4.00e-74
ctgcagggttccctgctgagctggaagcccaagctgcttcctctttggctgcctcaggcctcctggccccagaggctgctggagatttctcccccaaggacttggccttgtgctcagcagccttctcttctcgcttccggaatttcttttgtgttttcttccttttcttttttgggggccctgcagtttctgagccttgagttttgccag

SEQ ID NO: 23962 - DNA, 123 bp, Homo sapiens
  MAP TO AC005604.1; EXPRESSED IN BRAIN, SIGNAL = 0.41; SWISSPROT HIT: O67738, EVALUE 1.20e+00; NT HIT: AB026898.1, EVALUE 4.10e-01; EST_HUMAN HIT: W72793.1, EVALUE 2.40e+00
ggttccaatagaagatttgagcagctggaaaaaagaatcagtgaacttgatagatcaaatgaaatgattcagtctgaagagcaggaaaatgaaagaatgacaacaaaaaagaatagagcctaa

SEQ ID NO: 23963 - DNA, 80 bp, Homo sapiens
  MAP TO AC006022.1; EXPRESSED IN BRAIN, SIGNAL = 0.41; NT HIT: AF146687.1, EVALUE 2.40e-01; EST_HUMAN HIT: BG498803.1, EVALUE 1.40e+00
atgacacccagagcacgacggatacttatcattacctgcgttgttctcatctgccatgtccttgaccttcccattcccag

SEQ ID NO: 23964 - DNA, 234 bp, Homo sapiens
  MAP TO AC008488.6; EXPRESSED IN BRAIN, SIGNAL = 0.77; EXPRESSED IN FETAL LIVER, SIGNAL = 0.97; SWISSPROT HIT: P57044, EVALUE 7.00e-03; NT HIT: gi6980975, EVALUE 8.40e-01
atacagtggtccacactctggaccgcagctttaaccaaaatgaaaacttccagaaactccattgcagcccttactattgaaggagcatgctctcctggcacaggggtttctacgtcgagtgtgtctctgttgcaggggggaaacactgccttgcacctcgctgcgaagcatggtcacagtcctgcagtgcaggtgctgctagcccagtggcaagacataaatgagatgaatgag

SEQ ID NO: 23965 - DNA, 183 bp, Homo sapiens
  MAP TO AL109764.2; EXPRESSED IN HELA, SIGNAL = 2.5; EXPRESSED IN BRAIN, SIGNAL = 2.8; EXPRESSED IN PLACENTA, SIGNAL = 2.9; SWISSPROT HIT: P53924, EVALUE 4.30e+00; EST_HUMAN HIT: N73172.1, EVALUE 4.00e-86
tcagaagaagcagtgtgaagctgttttcagggagcccatccaccacttctggagacactcgcttttcaggtgcaccgtctttgtggaatctgtctcagctccccaggcagagagcaggggctcctcctctatgttccagagcccttcttcccagagctcttttgctatgtgccgcaattgcat

SEQ ID NO: 23966 - DNA, 226 bp, Homo sapiens
  MAP TO AL109797.18; EXPRESSED IN LUNG, SIGNAL = 1.6; EXPRESSED IN HELA, SIGNAL = 1.7; EXPRESSED IN FETAL LIVER, SIGNAL = 1.7; EXPRESSED IN BRAIN, SIGNAL = 1.3; SWISSPROT HIT: Q93008, EVALUE 3.00e-40; NT HIT: gi11641422, EVALUE 1.00e-124; EST_HUMAN HIT: AU121085.1, EVALUE 1.00e-124
gtatgatgcattgtgtattctccttcgtcacagcaagaatgtacgtttttggtttgctcataacgtcctttttaatgtttcaaatcgcttctccgaataccttctggagtgccctagtgcagaagtgaggggtgcgtttgcaaaacttatagtctttattgcacatttttccttgcaagatgggccatgtccttcaccttttgcctctcctggaccttctagtcag

SEQ ID NO: 23967 - DNA, 222 bp, Homo sapiens
  MAP TO AC008625.4; EXPRESSED IN FETAL LIVER, SIGNAL = 0.7; EXPRESSED IN BRAIN, SIGNAL = 0.41; NT HIT: gi15297117, EVALUE 1.00e-122; EST_HUMAN HIT: BE273893.1, EVALUE 1.00e-122; SWISSPROT HIT: P34678, EVALUE 2.00e-12
ctccccccaagctgcagccgggggctccacgggtgggtagaatttgggcaggtcccaggctatcttcgtcataaaccacttgaaactcttgcagttaagggagctgcggagctttttctggactgcgacatccccagcggagaggtggcggtattcaggccggcgctggtaaatgtactctgcgtactcatccatccacacttcggccacccgcttaaggtt

SEQ ID NO: 23968 - DNA, 210 bp, Homo sapiens
  MAP TO AL109772.2; EXPRESSED IN BRAIN, SIGNAL = 0.57; EXPRESSED IN LUNG, SIGNAL = 0.55; EXPRESSED IN PLACENTA, SIGNAL = 0.56; SWISSPROT HIT: P55755, EVALUE 1.90e+00; NT HIT: gi14771057, EVALUE 9.00e-13; EST_HUMAN HIT: BI765926.1, EVALUE 8.00e-11
atggccgtggctgggccatatgtattgcatgtgacttccactgaggacacccatggctggacaaggagaacatggtggcgccagaggcttggatattccaagaactacaaagcctcaaagagaatgtcacagctctggcttggggagcccctaggtctgggcttcacaaagggcctcagctcttctcgccttctcattgcccgcaatgtg

SEQ ID NO: 23969 - DNA, 186 bp, Homo sapiens
  MAP TO AC016594.5; EXPRESSED IN BRAIN, SIGNAL = 0.42; EXPRESSED IN FETAL LIVER, SIGNAL = 0.93; EST_HUMAN HIT: BG611127.1, EVALUE 1.00e-100; SWISSPROT HIT: P38110, EVALUE 5.00e-01; NT HIT: AF367997.1, EVALUE 1.00e-100
cttggagacatgcgctgtgaattccattttcaatggcctcttgggagaccttcaaaaggccttcattgatactttcagcatactcaaactcaatcacaggcataacagatgatgtttcaattggccttgcttccacttctacagtcacaagatgccttttgtctcctaaagttctatctaaggtat

SEQ ID NO: 23970 - DNA, 91 bp, Homo sapiens
  MAP TO AC010514.4; EXPRESSED IN FETAL LIVER, SIGNAL = 2.3; EXPRESSED IN BRAIN, SIGNAL = 2.1; EXPRESSED IN PLACENTA, SIGNAL = 3.5; NT HIT: AF109718.1, EVALUE 3.00e-44; EST_HUMAN HIT: T18984.1, EVALUE 3.00e-42
ctgccatgctcctgagaatctcgggagtcatagaagtcttctatgaggaggtgatgccaaagcggacaagtgacagaggagtcaaagctag

SEQ ID NO: 23971 - DNA, 122 bp, Homo sapiens
  MAP TO AF274855.1; EXPRESSED IN HELA, SIGNAL = 0.74; EXPRESSED IN BRAIN, SIGNAL = 1.4; EST_HUMAN HIT: AA491464.1, EVALUE 3.00e-06; NT HIT: AF314199.1, EVALUE 1.00e-01
catgctgagaggacaggagagtggcaaaagtagaagtgaggacaccagagaggaggcagttgcagaagtccaggtgagagatgattataacctggacttaaaaagtgccactaaaacagatg

SEQ ID NO: 23972 - DNA, 183 bp, Homo sapiens
  MAP TO AC010168.6; EXPRESSED IN FETAL LIVER, SIGNAL = 1.7; EXPRESSED IN LUNG, SIGNAL = 3.6; EXPRESSED IN BRAIN, SIGNAL = 2.5; EXPRESSED IN PLACENTA, SIGNAL = 1.9; NT HIT: AF198490.1, EVALUE 1.00e-79; EST_HUMAN HIT: AA227848.1, EVALUE 1.00e-98; SWISSPROT HIT: Q03637, EVALUE 8.50e-01
cctgtttggtggtctcttcacacggacgcgcatgaaatttggtgccatgactcggatcgggggacctcccttgggagatcaatcccctgtcctcctgctctttgctctgtgagaaacatccgcctacgacctcaggtcctcagaccgaccagcccaagaaacatctcaccaatttcaaatccg

SEQ ID NO: 23973 - DNA, 311 bp, Homo sapiens
  MAP TO AC025436.2; EXPRESSED IN BRAIN, SIGNAL =   2; EXPRESSED IN PLACENTA, SIGNAL = 0.99; NT HIT: AF169689.1, EVALUE 1.00e-113; EST_HUMAN HIT: BI753524.1, EVALUE 1.00e-113; SWISSPROT HIT: Q9UN72, EVALUE 2.00e-38
aaccagaggcaggagaagtgtcccctccagtcggtgcgggtgtcaacagcaacagctggacctttaaatacggaccaggcaaccccaaacaatccggtcccggtgagttgcccgacaaattcattatcccaggatctcctgcaatcatctccatccggcaggagcctactaacagccaaattgacaaaagtgacttcataaccttcggcaaaaaggaggagaccaagaaaaagaagaaaaagaagaagggtaacaagacccaggagaaaaaagagaaagggaacagcacgactgacaacagtgaccagtga

SEQ ID NO: 23974 - DNA, 245 bp, Homo sapiens
  MAP TO AC004224.1; EXPRESSED IN BRAIN, SIGNAL = 0.72; EXPRESSED IN LUNG, SIGNAL = 1.7; NT HIT: gi16165382, EVALUE 1.00e-129; EST_HUMAN HIT: AI086196.1, EVALUE 0.00e+00; SWISSPROT HIT: Q49857, EVALUE 6.20e-01
ttaaggatataaaatcgtccagggagggtggccgccgttgatgtagaggacataggtgaagccatctttgaggacccctcgaatggagtagtaataggggagatagtggtgctgcttgaagtctctgttttcatagaagtttattgctgtgttgttggtggtgaggacatgcaggtaaatggctttgcagtggtcctgggcggtggttgatatgtgatcctttaaactttcaagtaagagggaac

SEQ ID NO: 23975 - DNA, 193 bp, Homo sapiens
  MAP TO AF196971.1; EXPRESSED IN LUNG, SIGNAL = 4.1; EXPRESSED IN BRAIN, SIGNAL = 2.4; EXPRESSED IN PLACENTA, SIGNAL = 2.6; EXPRESSED IN HEART, SIGNAL = 4.8; EXPRESSED IN FETAL LIVER, SIGNAL = 3.5; NT HIT: gi14760233, EVALUE 1.00e-104; EST_HUMAN HIT: AL560928.1, EVALUE 1.00e-104; SWISSPROT HIT: Q9UBN7, EVALUE 4.00e-34
tgtgctatatgtgtccctgcaccgctatgatcatggcaccttcttccccatgggggatgagggtgccagcagccagatcggccgggctgcgggcacaggcttcaccgtcaacgtggcatggaacgggccccgcatgggtgatgctgactacctagctgcctggcatcgcctggtgcttcccattgcctacgag

SEQ ID NO: 23976 - DNA, 116 bp, Homo sapiens
  MAP TO AC044786.2; EXPRESSED IN BRAIN, SIGNAL = 0.57; SWISSPROT HIT: Q9W6S8, EVALUE 2.70e+00; EST_HUMAN HIT: AI694072.1, EVALUE 2.20e+00
tcaaagaaaataattttggtcctggaaggtatcgagggaaccaaatcggtcctccatgaggcagccgtgagtatactggctgcccacgccctgcaggtgcacacctttcccaagga

SEQ ID NO: 23977 - DNA, 159 bp, Homo sapiens
  MAP TO AC008145.1; EXPRESSED IN BRAIN, SIGNAL = 4.8; EXPRESSED IN PLACENTA, SIGNAL = 4.8; EXPRESSED IN FETAL LIVER, SIGNAL = 3.1; EXPRESSED IN LUNG, SIGNAL = 6.5; EST_HUMAN HIT: AI055817.1, EVALUE 6.00e-82; SWISSPROT HIT: Q57984, EVALUE 5.80e+00; NT HIT: gi14149656, EVALUE 4.00e-82
tcagtcccactccccctccccctcagcgtcgtcctcgtgcggcgcctccaggtcgttgaggtggaagttggccatcatgtcgcgcacagccagcatcagcctgttcaggccatggttgcggttcagacccccagccactccttcctcgggcctctcccc

SEQ ID NO: 23978 - DNA, 181 bp, Homo sapiens
  MAP TO AL031716.8; EXPRESSED IN FETAL LIVER, SIGNAL = 1.4; EXPRESSED IN BRAIN, SIGNAL = 1.6; EXPRESSED IN PLACENTA, SIGNAL = 7.3; EXPRESSED IN HEART, SIGNAL = 1.5; NT HIT: gi14777071, EVALUE 1.00e-97; EST_HUMAN HIT: AL562131.1, EVALUE 1.00e-92; SWISSPROT HIT: P54777, EVALUE 1.10e+00
cgaatctgggctcgggccgggcccctcggatgtccctctgcatctgcagaactcggtccttcaggctgcctggcccagaggggaacaagaatcccagggtggcgtcatcaaagcaggccaggctgggcaccatagtcagccagttcaggaagctgaggttcccgctgacgatgaggacggc

SEQ ID NO: 23979 - DNA, 128 bp, Homo sapiens
  MAP TO AC002055.2; EXPRESSED IN BRAIN, SIGNAL = 1.3; EXPRESSED IN FETAL LIVER, SIGNAL = 2.2; EXPRESSED IN HELA, SIGNAL = 1.2; EST_HUMAN HIT: AI905466.1, EVALUE 9.00e-62; SWISSPROT HIT: Q9UBK7, EVALUE 3.00e-12; NT HIT: gi14725110, EVALUE 5.00e-47
cttgctagctacctctgcagtcaaccacaccttcacaacattggtaccatcagcagccgagacgaaatacaggggcagggagaacttcttggcaaaattgaagcttttttgggtcacgtttatgtctg

SEQ ID NO: 23980 - DNA, 221 bp, Homo sapiens
  MAP TO AC012055.8; EXPRESSED IN PLACENTA, SIGNAL = 2.1; EXPRESSED IN FETAL LIVER, SIGNAL = 1.6; EXPRESSED IN BRAIN, SIGNAL = 1.7; SWISSPROT HIT: Q92729, EVALUE 1.10e+00
catgatttttgtgttttttgaaggtgtgttttgcttggtgaaaagtgcttttgccatcaggtgccccagatgtgtctaagtgttggcaggtgtctgagtcagcaggtgaacaaacacatttatgccagttggaagttattctgtggatgaggtcagctggtggctgcttagttagaatactcctaggaccttttaaatacagttggatggggatggggaag

SEQ ID NO: 23981 - DNA, 304 bp, Homo sapiens
  MAP TO AC012085.4; EXPRESSED IN FETAL LIVER, SIGNAL = 1.7; EXPRESSED IN BRAIN, SIGNAL = 1.3; EXPRESSED IN PLACENTA, SIGNAL = 1.5; SWISSPROT HIT: P78560, EVALUE 2.00e-40; NT HIT: gi14763467, EVALUE 0.00e+00; EST_HUMAN HIT: AI733057.1, EVALUE 0.00e+00
ggagaaatggaggccagagacaaacaagtactccgctcacttcgcctggagctgggtgcagaggtattggtggagggactggttcttcagtacctctaccaggaaggaatcttgacggaaaaccatattcaagaaatcaatgctcaaaccacaggcctccggaaaacaatgctcctgctggatatcctaccttccaggggccctaaagcatttgatacattcctagattccctacaggagtttccctgggtcagggagaagctgaagaaggcaagggaagaggccatgaccgacctgcctgcag

SEQ ID NO: 23982 - DNA, 177 bp, Homo sapiens
  MAP TO AC007570.23; EXPRESSED IN BRAIN, SIGNAL = 1.1; NT HIT: AF245511.2, EVALUE 1.00e-14; EST_HUMAN HIT: BI821961.1, EVALUE 5.00e-95; SWISSPROT HIT: P53119, EVALUE 2.60e-02
cttgaacagattgagtgctgggtcaaaaactctcttgatgatctcttccaagaactccttaaaaacaccgtcttgatcaatccctgcttcgtccaccccgaggtcattgacaaacttcacacggatgacccccttcatggcgtgctgggagagctgcctaagctgctcgtagccgtc

SEQ ID NO: 23983 - DNA, 474 bp, Homo sapiens
  MAP TO AC008626.5; EXPRESSED IN BRAIN, SIGNAL = 0.82; EXPRESSED IN LUNG, SIGNAL = 0.88; EXPRESSED IN FETAL LIVER, SIGNAL = 0.76; SWISSPROT HIT: P31792, EVALUE 6.00e-31; EST_HUMAN HIT: BF996761.1, EVALUE 1.00e-115; NT HIT: AF009668.1, EVALUE 0.00e+00
taagatggacacctgaagcaaaagaggctttccaggccctaaagaaggccctaacccaagccccaatgttaagtttgccaacagggcaaggcttctctttatatgtcacagaaaaaacaggaatagctctaggaatccttacacaggttcaagggaccagcttgcaacctgtggcatacttgagtaagaaaattgatgtagtggcaaagggttggcctcattgtttacaggtagtgacggcagtagcagtcttagtatctgaagcagttaaaataatacagggaagagatcttactgtgtggacatctcatgatgtaaatggtatactcactgctaaaggaaacttgtggctgtcagacaaccatttgcttaaaaatcaggctctattaattgaaggactagtgctgagactgcgcacttgtgcaactcttaacccagccacatttcttccagacaatgaagaaaagagagaac

SEQ ID NO: 23984 - DNA, 152 bp, Homo sapiens
  MAP TO AC009003.7; EXPRESSED IN HEART, SIGNAL =   2; EXPRESSED IN LUNG, SIGNAL = 2.5; EXPRESSED IN FETAL LIVER, SIGNAL = 2.9; EXPRESSED IN BRAIN, SIGNAL = 2.1; EXPRESSED IN PLACENTA, SIGNAL = 2.3; SWISSPROT HIT: P53277, EVALUE 2.00e+00; EST_HUMAN HIT: BI008031.1, EVALUE 2.00e-47; NT HIT: gi14757758, EVALUE 1.00e-47
gggccccaagactctgtgggccccccctaagagcctcaccagtgtcaccccacaggtgcttgccttcccaagctctggcttcactgacttggcagagattgtgtcccggattgagccccccacgagctatgtctctgatggctgtgctgacg

SEQ ID NO: 23985 - DNA, 124 bp, Homo sapiens
  MAP TO AC000381.1; EXPRESSED IN BRAIN, SIGNAL = 0.48; EXPRESSED IN PLACENTA, SIGNAL = 0.7; NT HIT: gi14770432, EVALUE 2.00e-61; EST_HUMAN HIT: BG191573.1, EVALUE 3.00e-61
ctaacttccacttttcttcctgatttgctttgctttccggggtttgaggatggtgtagtttacgtacactgtatactgatctgacaggaaggggacatagaatgcccgcagcagctttgaagat

SEQ ID NO: 23986 - DNA, 287 bp, Homo sapiens
  MAP TO AC010387.4; EXPRESSED IN BRAIN, SIGNAL = 0.62; EXPRESSED IN FETAL LIVER, SIGNAL = 0.48; EXPRESSED IN PLACENTA, SIGNAL = 0.55; SWISSPROT HIT: P20126, EVALUE 4.30e+00; NT HIT: AY052035.1, EVALUE 1.00e+00
atggctcttgatgtatcagttggcaatggctcctcctgtaccatgatattactgtcactgtgcaacctaccacaagatctggtaaggggaagacttgatcttcagctggatgatttgaagaagcagaatatctatagaagtagtaccagagcagatctgatattcagaatctttagagtcctatttctgacaccaaaaccagaggtctcaccgctgatgtcttttcctcaagtttattgtgtaagaatcagtggtaccagtcttaatgagcttattcaactacacgt

SEQ ID NO: 23987 - DNA, 221 bp, Homo sapiens
  MAP TO AL109797.18; EXPRESSED IN PLACENTA, SIGNAL = 2.2; EXPRESSED IN BRAIN, SIGNAL = 0.72; NT HIT: gi14764088, EVALUE 1.00e-121; SWISSPROT HIT: Q93008, EVALUE 3.00e-39; EST_HUMAN HIT: AU138833.1, EVALUE 1.00e-121
cttgtgaagcacttactgagtgggaatatctgccacctgttggaccccgcccacccaaaggattcgtggggctgaaaaatgccggtgctacttgttacatgaattctgtgattcagcaactctacatgattccttccattaggaacggtattcttgccattgaaggcacaggtagtgatgtagatgatgatatgtctggggatgagaagcaggacaatgag

SEQ ID NO: 23988 - DNA, 427 bp, Homo sapiens
  MAP TO AF230666.1; EXPRESSED IN FETAL LIVER, SIGNAL = 0.53; EXPRESSED IN BRAIN, SIGNAL = 0.65; NT HIT: gi14748787, EVALUE 0.00e+00; SWISSPROT HIT: P22555, EVALUE 2.40e-01; EST_HUMAN HIT: BE696439.1, EVALUE 0.00e+00
gaataaacatcatcctgaccttcatctctgggcttgttccgggaagcgaaaagaccaagatcaaataatagctggggtggagaaaaaaatagctcaagacacagttaatcgagaagaaaagaaatatgtacagaaccataaagaaccacctcgtttgcccctaaaaatggaaggaacttatataacaagtgagcatagctatcaaaagccacaaagttttggtcaggactgtaaatctctcgcagaccctgggagctcagatgatgatgatgttagtagtttggaagaagaacaagaattccacatgagaagtaaaaacagtttacagtactcagcaaaagaacatggaatgcctgaaaaggtaaaactagttcatttttctttgcttggaaactatgagagaagaacaaaggaaaattttataaaa

SEQ ID NO: 23989 - DNA, 193 bp, Homo sapiens
  MAP TO AC016594.5; EXPRESSED IN LUNG, SIGNAL = 1.5; EXPRESSED IN FETAL LIVER, SIGNAL = 1.1; EXPRESSED IN BRAIN, SIGNAL = 0.58; EXPRESSED IN PLACENTA, SIGNAL = 0.77; NT HIT: gi7662676, EVALUE 1.00e-104; SWISSPROT HIT: P40078, EVALUE 1.00e-22; EST_HUMAN HIT: W67590.1, EVALUE 1.00e-104
ggcttgcgtttcaagaaagcccatgtaacacatcctgaactgaaagccaccttttgcctaccaatacttggtgtaaagaagaatccctcatccccactgtatacaactttgggtgttattaccaaaggtactgtcattgaagtaaatgtgagcgaattgggccttgtgacacaaggaggcaaagttatttggg

SEQ ID NO: 23990 - DNA, 338 bp, Homo sapiens
  MAP TO AC009006.5; EXPRESSED IN BRAIN, SIGNAL = 1.8; EXPRESSED IN PLACENTA, SIGNAL = 1.9; EXPRESSED IN HEART, SIGNAL = 2.4; EXPRESSED IN FETAL LIVER, SIGNAL = 1.4; EST_HUMAN HIT: AA883982.1, EVALUE 2.00e-06; SWISSPROT HIT: P03360, EVALUE 7.00e-11
aaggcacagctcccatttcctgaatttctgggggtcgagtaggtccttgttttggattagatattgttcgcaggatagacattgttcgcaaacagcacgggtgatggcagagagccgtggcacatagaagtgttgacctatcaaagtctctagggccgtgcttccagcatgtgttccttgatggatctgcttcacaaaccttggggctattgtctctgggacagctagcctcccgtcagagaacagccaccatccacctttaatatattttcctgtttcctggccaaaccaagctttttcaattgaagagtaattgggtacctctggcaaagggggct

SEQ ID NO: 23991 - DNA, 156 bp, Homo sapiens
  MAP TO AC005197.1; EXPRESSED IN BRAIN, SIGNAL = 0.4; SWISSPROT HIT: O14579, EVALUE 2.00e-25; EST_HUMAN HIT: BE674906.1, EVALUE 1.00e-82; NT HIT: AJ249366.1, EVALUE 9.00e-83
cttgtctagcgcctcctgcagcaggccctcagcggcctcccagcggccctgggccatgtggcaggccgcctgcccattgagcagcagcagggtgggcgagcacttgtcagccatctcctggaagatgtagtaggcatcctgcagcttctcaccacc

SEQ ID NO: 23992 - DNA, 473 bp, Homo sapiens
  MAP TO AC012331.9; EXPRESSED IN HEART, SIGNAL = 1.3; EXPRESSED IN BRAIN, SIGNAL = 1.1; EXPRESSED IN PLACENTA, SIGNAL = 1.4; SWISSPROT HIT: P01717, EVALUE 4.00e-29; EST_HUMAN HIT: H62289.1, EVALUE 0.00e+00; NT HIT: L29162.1, EVALUE 0.00e+00
cttctgtagggcctccgtagagatctggaaggaaggaggcctcagagtctctgatctgggtgtactgggccagacctgttcgtggctttgtccacagtcctcctggggctggaggaagaaggtgacacagatggcaaggggtttgtgtctcatttctccatctgcctgtgtcactgtgagattgttgtcagccgcagagtaacagtaatagtcagcctcatcctcaacctgggccccgctgatggtcaaggtgactgtggtccctgagctggagccggagaatcgctcagggatccctgagggccgctcactgtctttataaatcaccagcacaggggcctggcctggcttctgctggaaccaccgagcatatttttttgccagtacatctcctgagcaggtgatcctggctgtctgtcccggagacactgacactgaggatggctgtgtcagctcataggaggccacagaga

SEQ ID NO: 23993 - DNA, 200 bp, Homo sapiens
  MAP TO AC010238.4; EXPRESSED IN BRAIN, SIGNAL = 0.9; EXPRESSED IN PLACENTA, SIGNAL = 0.92; SWISSPROT HIT: P16356, EVALUE 2.50e-02
ctccaagcaaaattgccaggaaatccatgctaggtttggtgatggtgctggggcttccatgtggggtgctggtgacggtgtcagggcttgtggtggcaggtgctgggcacacagtggacaccatcatcctcacagggctgggcttggaagctcagggtgtttgcccaacgccatcagagaagctgggtctagtctattgt

SEQ ID NO: 23994 - DNA, 191 bp, Homo sapiens
  MAP TO AC009086.5; EXPRESSED IN BRAIN, SIGNAL = 0.47; EXPRESSED IN PLACENTA, SIGNAL = 0.77; NT HIT: AB015601.1, EVALUE 6.70e-01
agccattccctaccaccctctgggcaccaccatccacatctcctgctgccgcctcagccttaacctctgcaaaaccaaatccgttctttctctcgagctctgcagaagctaagctgtttcaccaggccacgattcaggaaacgctttgggattcagcttctgttcttgtgaaatgggaagaatccctgtgg

SEQ ID NO: 23995 - DNA, 390 bp, Homo sapiens
  MAP TO AC000109.1; EXPRESSED IN BRAIN, SIGNAL = 0.41; EXPRESSED IN PLACENTA, SIGNAL = 0.39; NT HIT: AF202635.1, EVALUE 1.00e-28; EST_HUMAN HIT: AL039363.2, EVALUE 4.00e-54
agaaaactgtatccagacgttgttcataacttcccagaatttacaaaagagccaatcaaggaaattatgaaagagattggggatatggcaaaaaagttggggagtgaagggtttcaagatacgaatcttggaaatattcaagcgctaatagataccatgccagaggaattaacagaagatgacttcatggaggtgagttcttctgaaccagtgctagacaatgaggaagaagatgtggaagaagcagtgccagaaaacaaattgacattagacaatctgggagaagggctcagattatccaagattgctttttatttcttttatgacatgggctttctgtatatgggcactgaaactaaagcaaatggtggaagaattggtactaaatag

SEQ ID NO: 23996 - DNA, 179 bp, Homo sapiens
  MAP TO AC009265.5; EXPRESSED IN BRAIN, SIGNAL = 0.74; SWISSPROT HIT: Q03410, EVALUE 5.00e-01; NT HIT: gi11641266, EVALUE 2.00e-96; EST_HUMAN HIT: BG184610.1, EVALUE 3.00e-96
cctacaatggttggaagaaaaaatacttggaaacaaagaaagtcacagcatcaatggaggaggttttaacaaaacttcgagaagatttggaactctactataaaaaactgctcatgcaacttgaagccagggagatcaagatgagaccaaagaatctggcaaacatcacagactccaag

SEQ ID NO: 23997 - DNA, 117 bp, Homo sapiens
  MAP TO AC000073.1; EXPRESSED IN PLACENTA, SIGNAL = 0.86; EXPRESSED IN HEART, SIGNAL =   1; EXPRESSED IN FETAL LIVER, SIGNAL = 1.8; EXPRESSED IN BRAIN, SIGNAL = 0.97; SWISSPROT HIT: P54198, EVALUE 6.00e-09; NT HIT: gi14777002, EVALUE 1.00e-59; EST_HUMAN HIT: BI833228.1, EVALUE 2.00e-59
ctacttgtccctcaggatgtcgagctgttcctgacactcggtgaagaggcgctggaatcggaggttctgcccgatgactggtagcagctccttcagcagctccctcttccgcagacc

SEQ ID NO: 23998 - DNA, 201 bp, Homo sapiens
  MAP TO AC000081.2; EXPRESSED IN FETAL LIVER, SIGNAL = 0.43; EXPRESSED IN BRAIN, SIGNAL = 0.84; EXPRESSED IN PLACENTA, SIGNAL = 0.7; SWISSPROT HIT: P53675, EVALUE 6.00e-33; NT HIT: gi4502902, EVALUE 1.00e-109; EST_HUMAN HIT: BF882652.1, EVALUE 2.00e-66
cttatcttctttcagccacttctctaggagttgcttacgcccctgctgaagaaccagatggcaaagttctaaggattcaagtttattgagctgaccctggtcgagcaggattccgaagtactgcagcaatggagaagcctggccagactgagcgggtatactctggaatttctggaccgtctctctggtacgcaggattcc

SEQ ID NO: 23999 - DNA, 164 bp, Homo sapiens
  MAP TO AC010163.7; EXPRESSED IN BRAIN, SIGNAL = 0.48; EST_HUMAN HIT: AW176731.1, EVALUE 5.40e-02; SWISSPROT HIT: P26189, EVALUE 5.80e+00; NT HIT: AB015308.1, EVALUE 1.40e-01
acaccatggccatccctgccaacagtgctggcactgaacatgaagtctgccacatagccatagccatagctgccccagagactggatatggttactgcattaaggacacccttgtcagcctgcagcctgtacagccccagctcctttgtgtcactcacttctga

SEQ ID NO: 24000 - DNA, 123 bp, Homo sapiens
  MAP TO AC008995.5; EXPRESSED IN BRAIN, SIGNAL = 0.4; EXPRESSED IN FETAL LIVER, SIGNAL = 1.4; EXPRESSED IN HELA, SIGNAL = 0.7; SWISSPROT HIT: P40989, EVALUE 3.50e+00; NT HIT: L08109.1, EVALUE 4.10e-01; EST_HUMAN HIT: AL514462.1, EVALUE 1.50e-01
cttgaccctgactagagggggcttattgtatttctcagcatctatcttgtaggggttgtgcctttttcctgcctgttctctaccctcagggaagattgtgactgggtctggcaaccaggtcat

SEQ ID NO: 24001 - DNA, 135 bp, Homo sapiens
  MAP TO AC000039.3; EXPRESSED IN BRAIN, SIGNAL = 0.42; NT HIT: AF369030.1, EVALUE 1.10e-01; SWISSPROT HIT: P50317, EVALUE 3.50e+00
tttgtcacaggcctgatgagcaaggatatcttgataaaggtgataactggccgaaaagcagttggggcgcccaatggcgcagccttcagaagcaccttctgtgtttttggaactgttggcagcatcccaaggtga

SEQ ID NO: 24002 - DNA, 188 bp, Homo sapiens
  MAP TO AC000051.2; EXPRESSED IN HELA, SIGNAL = 0.44; EXPRESSED IN BRAIN, SIGNAL = 0.43; EST_HUMAN HIT: AW938809.1, EVALUE 9.70e-01; NT HIT: AF180812.1, EVALUE 1.70e-01; SWISSPROT HIT: P45271, EVALUE 4.90e-01
gaggacatgcagagatgcgacacccacttaaactcgaagttgcaaagatgcaaatgagactggggtctcaggcaccagagaccacccatgggcacgtggcttttgggagtggggacctgctgccacagatctctgaagagtctggacctgctgggtctccccgagtgactgtctgggggtctccatag

SEQ ID NO: 24003 - DNA, 353 bp, Homo sapiens
  MAP TO AC018844.2; EXPRESSED IN BRAIN, SIGNAL = 1.1; EST_HUMAN HIT: AU118966.1, EVALUE 3.10e-02; NT HIT: AJ271735.1, EVALUE 1.30e+00; SWISSPROT HIT: Q92750, EVALUE 2.10e+00
tcatgggacaacagagctgatcttgagaggatcaagagagatcagcaagtgcaaaggcccaagacgggatggaataaggatggctcctagaggaacgactgcagttgcaggaggcaagatgggagtggtgccaggtaccaggttatgcagagccttgcaagcaaggatgaggacctccagctttgttctcacaaaaccattgtgtgataaagccactgggaacagacaggagaagatgcgtgcatttaaagcatgactcgggctggatggaggagaatctagatgcaggatctgtgtatgaggctctggtggtaatgactcaaagatgacggtgtttgcccagggtgatggtg

SEQ ID NO: 24004 - DNA, 208 bp, Homo sapiens
  MAP TO AC000086.1; EXPRESSED IN BRAIN, SIGNAL = 0.41; SWISSPROT HIT: P47974, EVALUE 4.20e+00; EST_HUMAN HIT: BF871595.1, EVALUE 1.80e-02; NT HIT: U66532.1, EVALUE 1.20e-02
ctgggtctccgtagaagctgcagcgagctggggctgaggcagacaagcctgtggacatgagaacagatgcatgtgctcctcagacagacagacagtagggtgttgtggaaggggtcatctttagaggccacatactgtagtccatctccctcacagagcaggaaggtgaagcttgccaagcctgagggaatcctccagcccagacatc

SEQ ID NO: 24005 - DNA, 316 bp, Homo sapiens
  MAP TO AC021090.5; EXPRESSED IN LUNG, SIGNAL = 1.8; EXPRESSED IN BRAIN, SIGNAL = 1.5; EXPRESSED IN FETAL LIVER, SIGNAL =   2; EST_HUMAN HIT: BE618517.1, EVALUE 7.00e-34; SWISSPROT HIT: Q02773, EVALUE 7.50e-01; NT HIT: gi13654291, EVALUE 6.00e-24
tctgtaaacatcccaaactcttcccagtcacagtctgggggggtcctgcctttccagaggcctggagaaatacacccatttagagccatgctggcaggcctgcagaccttgacctttactgtggtccctgaagcagttccatgactcagttccagctccctgagccatagttcatggccggttttgcctatgtagaaacccaaagttacctcggaaaatcctctcctgtactcagtgaaagccatgctcatccacatcctgatataaaactcaccatatgcaggcctgagtgcagaaacctgcccttgggtctgcc

SEQ ID NO: 24006 - DNA, 282 bp, Homo sapiens
  MAP TO AC018766.2; EXPRESSED IN FETAL LIVER, SIGNAL = 2.2; EXPRESSED IN LUNG, SIGNAL = 1.5; EXPRESSED IN BRAIN, SIGNAL = 0.87; EXPRESSED IN PLACENTA, SIGNAL = 1.4; EXPRESSED IN HEART, SIGNAL = 1.5; SWISSPROT HIT: P35198, EVALUE 8.10e-01; NT HIT: gi14786915, EVALUE 0.00e+00; EST_HUMAN HIT: BF315056.1, EVALUE 0.00e+00
cttgccctggggtttcaccccagctgcggtgaacactagcaacttctccaagttctcccagccggggtttgacttccgcatacgcttcttcggcagctcagcatctctcttctcatcttgggacaccagaggggtgccaggcggagtatctggctgggattctggtgtgcgggtctcttcccagcgcagggtcagtgggtggaggccattgaccaaatacagtgtgtcccccacccccagagagccctccaaccccggcttcaactcctgggtcccggtagt

SEQ ID NO: 24007 - DNA, 222 bp, Homo sapiens
  MAP TO AL078581.11; EXPRESSED IN BRAIN, SIGNAL = 8.1; EST_HUMAN HIT: AW337284.1, EVALUE 1.00e-122; SWISSPROT HIT: P25232, EVALUE 2.00e-34; NT HIT: gi14751693, EVALUE 1.00e-122
atgccagcctggttcttgaacagacagaaggatgtaaaggatggaaaatatagccaggtcctagccaatggtctggacaacaagctctgtgaagacctggagcgactgaaaaagattcgggcccgtagagggctgcgtcacttctggggccttcgtgtccgaggccagcacaccaagaccacaggctgccgtggccgcatcgtgggtgtgtctaagaagaag

SEQ ID NO: 24008 - DNA, 120 bp, Homo sapiens
  MAP TO AJ251973.1; EXPRESSED IN BRAIN, SIGNAL = 0.67; EST_HUMAN HIT: BF768884.1, EVALUE 2.30e+00; SWISSPROT HIT: O25599, EVALUE 2.70e+00; NT HIT: AJ251973.1, EVALUE 2.00e-61
ttaaagatagatgaccctggggagggtgagggccggggtcaccagctgctggggcttcttgccctgagttaggctggggatcatttgcagggagaatgcagccaggaccaccagccctgg

SEQ ID NO: 24009 - DNA, 230 bp, Homo sapiens
  MAP TO AL049824.4; EXPRESSED IN FETAL LIVER, SIGNAL = 0.6; EXPRESSED IN BRAIN, SIGNAL = 0.45; EST_HUMAN HIT: BE745519.1, EVALUE 1.00e-101; SWISSPROT HIT: Q9QZH3, EVALUE 3.00e-35; NT HIT: gi14745094, EVALUE 1.00e-101
agaatttccgctgcctgtgcactcatgaaaagggctttggctttaagggaagcagcttccaccgcatcatcccccagttcatgtgccagggcggtgatttcacaaaccacaatggcactgggggcaagtccatctatgggaagaagttcgatgatgaaaactttatcctcaagcatacgggaccaggtaggagccagttggcatgtggtgacgagggaggctgggcaagg

SEQ ID NO: 24010 - DNA, 286 bp, Homo sapiens
  MAP TO AC010320.7; EXPRESSED IN BRAIN, SIGNAL = 4.2; EXPRESSED IN HELA, SIGNAL = 5.9; EXPRESSED IN FETAL LIVER, SIGNAL = 3.3; NT HIT: gi7657474, EVALUE 1.00e-129; SWISSPROT HIT: P54612, EVALUE 3.00e-39; EST_HUMAN HIT: AL540199.1, EVALUE 1.00e-129
tgtcgaagttccgccttcacagcactggacactcgggggtagcagacggagaagaggccgcaggccgaggtgcgggaggtgaaccagtcgccgcccgccagccgcttcactagcggcacaaagtgcgcctccaggtcagagggcgagtgctcgtgtgagatggcccgtaaggactccactgccttgtcccgcaccactgtctcctccactgtggccagcgactccagcggtggctgtggtgagaacacaaagtcactggacagctccctctccaccatccgcagcc

SEQ ID NO: 24011 - DNA, 206 bp, Homo sapiens
  MAP TO AC010285.4; EXPRESSED IN HEART, SIGNAL = 1.7; EXPRESSED IN BRAIN, SIGNAL = 1.3; EXPRESSED IN LUNG, SIGNAL = 1.5; EXPRESSED IN FETAL LIVER, SIGNAL = 1.4; SWISSPROT HIT: P04413, EVALUE 3.20e+00; NT HIT: AF113915.1, EVALUE 1.80e-01; EST_HUMAN HIT: AV647141.1, EVALUE 1.00e-112
caagcaacttcgcagccactaggaatatctctctgctgaaaggccttagagcccattaccagctctttataagaatcaagtccaaaatctgtctcctgcctaccgtcaccaccacctacagcagacacaccaaaccacacaactcgctgatcctgctctgtgcggtcctcactgtgtgccctaattatgcccaggctggttcctaa

SEQ ID NO: 24012 - DNA, 212 bp, Homo sapiens
  MAP TO AL118558.2; EXPRESSED IN BRAIN, SIGNAL = 7.5; EXPRESSED IN FETAL LIVER, SIGNAL = 4.8; NT HIT: gi15300984, EVALUE 1.00e-116; EST_HUMAN HIT: AW384282.1, EVALUE 1.00e-116; SWISSPROT HIT: Q9JHU4, EVALUE 5.00e-34
gtgtggacatgatcagtaaaatgctgaagatgcagatgttggaggatgaggacgacctggcctacgcagagactgagaagaagacgaggacagactccacgtccgacgggcgccctgcctggatgcggacactgcacaccaccgcgtccaactggctgcacctcatcccccagacgctgagccacctcaagcgcaccgtggagaatatcaag

SEQ ID NO: 24013 - DNA, 141 bp, Homo sapiens
  MAP TO AC002110.1; EXPRESSED IN BRAIN, SIGNAL = 0.55; EXPRESSED IN PLACENTA, SIGNAL = 0.41; EST_HUMAN HIT: BF764402.1, EVALUE 1.10e-02; SWISSPROT HIT: Q9X8R6, EVALUE 2.00e+00
atggatgacagggctggcagaaggactgtgtgcaggaaaagcaaccgtgtctattccaatgaggccgagcccccttctcctccatggggaacgaagtccaatggcatcaacctgctgccacttggctggctgcttccccag

SEQ ID NO: 24014 - DNA, 128 bp, Homo sapiens
  MAP TO AC002991.1; EXPRESSED IN HELA, SIGNAL = 0.71; EXPRESSED IN BRAIN, SIGNAL =   1; EXPRESSED IN PLACENTA, SIGNAL = 0.6; NT HIT: gi14778138, EVALUE 4.00e-66; EST_HUMAN HIT: BG396205.1, EVALUE 6.00e-66; SWISSPROT HIT: P39806, EVALUE 4.60e+00
actggatcttatagaggttgctggtttccttcttggacagcagggtggagtgggcatccttccggggatccactttgtgaacaaagagggagcggaaccagctgccttcattgtccttggaatagaaa

SEQ ID NO: 24015 - DNA, 144 bp, Homo sapiens
  MAP TO AC016604.4; EXPRESSED IN PLACENTA, SIGNAL = 0.75; EXPRESSED IN BRAIN, SIGNAL = 1.2; EXPRESSED IN LUNG, SIGNAL = 0.65; NT HIT: gi9626694, EVALUE 4.90e-01; SWISSPROT HIT: P57680, EVALUE 2.00e+00; EST_HUMAN HIT: AI827915.1, EVALUE 1.20e-02
cctctagggccttggggtcacaggcacccccacatggacactgccgcagggcccgcaaggaattcgcttctgccagcaccaaagtggccggttcctgcacttgctcactccggttcctgcattcaatcactggcatgctccttc

SEQ ID NO: 24016 - DNA, 216 bp, Homo sapiens
  MAP TO AC067968.1; EXPRESSED IN BRAIN, SIGNAL = 0.74; NT HIT: AB026133.1, EVALUE 7.70e-01; SWISSPROT HIT: P30945, EVALUE 1.10e+00
atgaagacaagtcctatgaattattgtgtcacagcagcaaaaagaaatgaagtgattaaaagtaaacaaagcctaaaggaccacatgtgcattataggtgtcctgggtagagagaaagaaagccaagagagattacttatagaaataaaagctgaaaacttctcaaatatgaaaaacacatcattctgtaaatccaagaagctcaatgcatttcaa

SEQ ID NO: 24017 - DNA, 77 bp, Homo sapiens
  MAP TO AC010398.6; EXPRESSED IN FETAL LIVER, SIGNAL = 0.61; EXPRESSED IN BRAIN, SIGNAL = 0.71; EXPRESSED IN PLACENTA, SIGNAL = 0.64; EST_HUMAN HIT: BI601308.1, EVALUE 3.30e-01; NT HIT: gi6680018, EVALUE 3.60e+00
atgtccttagtgttagaaaaattcttcaacgtatattcttctccactgcatggaaaattacttcttgtacagagata

SEQ ID NO: 24018 - DNA, 216 bp, Homo sapiens
  MAP TO AC000395.1; EXPRESSED IN PLACENTA, SIGNAL = 0.88; EXPRESSED IN BRAIN, SIGNAL = 0.81; SWISSPROT HIT: Q12967, EVALUE 3.00e-38; EST_HUMAN HIT: BG178670.1, EVALUE 1.00e-118; NT HIT: gi14734851, EVALUE 1.00e-118
cctggccacctcgatccagtgctccaccaccctggccctgtctggggctttcgtgcttcggttcccgaggcaggtggtgatgacacagttggccacactgttgaactgggtgacagtggcgcggatggtgggcgccaggtgctccttgcccttcttgtcccgctgggaccagatggagcccaggcagtggtagggcaccaccttcttgaacagttc

SEQ ID NO: 24019 - DNA, 104 bp, Homo sapiens
  MAP TO AC011387.4; EXPRESSED IN BRAIN, SIGNAL = 0.74; EXPRESSED IN FETAL LIVER, SIGNAL = 0.68; EST_HUMAN HIT: BF826395.1, EVALUE 1.90e+00
ttttttccattgggattgaacttgatgtgagtttggagcttctcagccctcttgtcaccataaaagaagagcctgaaacttttgcagacaccacgtacagcctg

SEQ ID NO: 24020 - DNA, 134 bp, Homo sapiens
  MAP TO AC010520.5; EXPRESSED IN LUNG, SIGNAL = 2.8; EXPRESSED IN BRAIN, SIGNAL = 3.7; NT HIT: AF186772.1, EVALUE 7.00e-40; EST_HUMAN HIT: AV655785.1, EVALUE 3.00e-55
cactttcccggtctgctaagtagcgggtgttgtttcttgacaccttttgctaccgctggaccatgatcagcttggtaacgggcatcttcccagaagctggcgtcaccgctagaccaaggagccctctggtggcc

SEQ ID NO: 24021 - DNA, 219 bp, Homo sapiens
  MAP TO AC004461.3; EXPRESSED IN BRAIN, SIGNAL = 0.51; NT HIT: L77570.1, EVALUE 1.00e-120; SWISSPROT HIT: P24804, EVALUE 4.00e-02
agctggggggcctcttccacctccaccagggccatggggcccgagcagccctgcctcacagcccagctggggacctggtgcaggggtcactgtagcacccagagccacatctgctccgactctgggctccatgacctgtgcagctcggagcacatgtgcccctcctgcctccagcaccactagagtgccacgctgctgcttccccagcacaggaacaca

SEQ ID NO: 24022 - DNA, 318 bp, Homo sapiens
  MAP TO AC004826.3; EXPRESSED IN BRAIN, SIGNAL = 0.45; NT HIT: gi14781177, EVALUE 0.00e+00; SWISSPROT HIT: O95235, EVALUE 5.00e-47; EST_HUMAN HIT: AW975835.1, EVALUE 0.00e+00
gaccagactctggctgaactgcagaacaacatggtgctagtgaaactggaccttcggaagaaggcagcatgtattgctgagcagtatcatactgtgttgaaactccaaggccaggtttctgccaaaaagcgccttggtaccaaccaggaaaatcagcaaccaaaccaacaaccaccagggaagaaaccattccttcgaaatttacttccccgaacaccaacctgccaaagctcaacagactgcagcccttatgcccggatcctacgctcacggcgttcccctttactcaaatctgggccttttggcaaaaagtactaa

SEQ ID NO: 24023 - DNA, 162 bp, Homo sapiens
  MAP TO AC000073.1; EXPRESSED IN BRAIN, SIGNAL = 0.65; EXPRESSED IN PLACENTA, SIGNAL = 0.6; NT HIT: gi14776998, EVALUE 3.00e-86; EST_HUMAN HIT: H23459.1, EVALUE 2.00e-84; SWISSPROT HIT: P54198, EVALUE 2.00e-16
cagacagagagtgtggctgcagcggtgagcgccatgacgtaggagcctgtgcaatgcaaagtagagatcggggatggcaggaggatgggagagaggagacggcgaccacaggtggagaacactgacagcatccttttttcacaggcgacacacaccacgtca

SEQ ID NO: 24024 - DNA, 269 bp, Homo sapiens
  MAP TO AC000092.1; EXPRESSED IN BRAIN, SIGNAL = 0.69; SWISSPROT HIT: P54198, EVALUE 4.00e-28; EST_HUMAN HIT: BI914128.1, EVALUE 4.00e-53; NT HIT: gi7219909, EVALUE 3.00e-53
cctgtccctgggcatatgtccatgtctttagcgccaccaggcagggctctcaccttcctgatatcttcaagactctccccgttgacaacgcctgcgactgaggtggctgagcccatctccctggtcgcagcactcttctggtccagctgctgctgctgctgccttcgctggtacttgagcatctcagggttctcaatgacggctgtggagagctgggcctcggtcatgatggctaggctcttgccataggtggactggtgaatgcggct

SEQ ID NO: 24025 - DNA, 296 bp, Homo sapiens
  MAP TO AC004798.1; EXPRESSED IN LUNG, SIGNAL = 1.5; EXPRESSED IN BRAIN, SIGNAL = 1.5; EST_HUMAN HIT: AW505318.1, EVALUE 0.00e+00; SWISSPROT HIT: O60885, EVALUE 8.00e-53; NT HIT: gi7657217, EVALUE 0.00e+00
cttgaggtttccttttcttccgcaaacaggaggtgacatagcgctccagctcacgcagtgtggacggcttcagggtctcaaagtcgatttcaatctcgtcggggttggaattcttcagggagggctcccgtgactggatgatgtgcaccacgcggcccagcttctcgccggggagcttgttgatgtccaagctgagctgccgcttctcctcataggacataggcttgcacttgtcctcttcctccgactcatacgtgggagggggcttgctcttcatgggcgctggctccttcttg

SEQ ID NO: 24026 - DNA, 274 bp, Homo sapiens
  MAP TO AC004509.1; EXPRESSED IN LUNG, SIGNAL = 0.52; EXPRESSED IN BRAIN, SIGNAL = 0.47; SWISSPROT HIT: Q92793, EVALUE 1.00e-29; EST_HUMAN HIT: AI934977.1, EVALUE 1.00e-117; NT HIT: gi14778077, EVALUE 5.00e-98
cttgaaaactctggccgtcagcttccgaactacagctctggtggtgcttgttgtctcgtagatggccatttctccttcccgaatgcctcagcctccgaacatgatgggtgcacacaccaacaacatgatggcccaggcgcccgctcagagccagtttctgccacagaaccagttcccgtcatccagcggggcgatgagtgtgggcatggggcagccgccagcccaaacaggcgtgtcacaggtactgtgccccactgggaccgtggctccctag

SEQ ID NO: 24027 - DNA, 94 bp, Homo sapiens
  MAP TO AC005502.1; EXPRESSED IN BRAIN, SIGNAL = 0.39; NT HIT: AJ296931.1, EVALUE 1.20e+00; EST_HUMAN HIT: T64949.1, EVALUE 1.00e-16
ctgaggctcagctagggaagcatctgcttctccacttgtatggttgttgatagcattcaatcccttgcagctgaaggatgcatagcagtttgct

SEQ ID NO: 24028 - DNA, 453 bp, Homo sapiens
  MAP TO AC004826.3; EXPRESSED IN PLACENTA, SIGNAL = 1.1; EXPRESSED IN BRAIN, SIGNAL = 0.92; NT HIT: gi5730052, EVALUE 0.00e+00; SWISSPROT HIT: P14317, EVALUE 3.50e-01; EST_HUMAN HIT: BG475862.1, EVALUE 0.00e+00
ctctgtcttcacatttgtaagtggagtctcatcgcctttcccaatggcaacatctgcttcaacaatctctccagctgcagtacttcccagttcctcatctaagtcctgactcctgagttctggtggctccatacttgtggctggaacaactccagctactatttcggctcctgaaatgactggctctggttctgcaggttccaccttgatctctgcactgggctccctgatgtccaccagttcatgtattcccttgttttccgtttcctcaaagtccagtctctcttgcttgaccgtcatttctggtgcagggagaggtactggcttgtcccgctcctgctggataggatgctcccaggggccaggcagggactgaggatcatcattttcttcacaaaatgacagtgctgcttccactgctgccacatccagcacttcaggatgatcatctac

SEQ ID NO: 24029 - DNA, 510 bp, Homo sapiens
  MAP TO AL022342.6; EXPRESSED IN PLACENTA, SIGNAL = 1.3; EXPRESSED IN LUNG, SIGNAL = 1.3; EXPRESSED IN BRAIN, SIGNAL =   1; EST_HUMAN HIT: BG397203.1, EVALUE 0.00e+00; SWISSPROT HIT: O77788, EVALUE 3.00e-03; NT HIT: gi14786223, EVALUE 0.00e+00
gcataaatgaaatctcggaagatgtctatacggccgtagagcacagcgattcggaggattctgagaagtcagatagtagcgatagtgagtatatcagtgatgatgagcagaagtctaagaacgagccagaagacacagaggacaaagaaggttgtcagatggacaaagagccatctgctgttaaaaaaaagcccaagcctacaaacccagtggagattaaagaggagctgaaaagcacgtcaccagccagcgagaaggcagaccctggagcagtcaaggacaaggccagccctgagcctgagaaggacttttccgaaaaggcaaaaccttcacctcaccccataaaggataaactgaagggaaaagatgagacggattccccaacagtccatttgggcctggactctgattcagagagcgaacttgtcatagatttaggagaagaccattctgggcgggagggtcgaaaaaataagaaggaacccaaagaaccatctcccaaacaggatg

SEQ ID NO: 24030 - DNA, 164 bp, Homo sapiens
  MAP TO AC008536.5; EXPRESSED IN BRAIN, SIGNAL = 1.5; EST_HUMAN HIT: AL562370.1, EVALUE 9.00e-84; SWISSPROT HIT: P26013, EVALUE 4.40e+00
tcaaaggtccaagattttcattatagcattatggtcaaacttgaaactcaaaaaggctctggatgaaaaggggaacttgcaatgtccattacatgccacgggctgtccctcagcatgttctagcaactggtcttcactggagctaggcaagtcatatacagcat

SEQ ID NO: 24031 - DNA, 276 bp, Homo sapiens
  MAP TO AB014080.1; EXPRESSED IN BRAIN, SIGNAL = 4.6; NT HIT: gi15304518, EVALUE 0.00e+00; EST_HUMAN HIT: BG698804.1, EVALUE 0.00e+00; SWISSPROT HIT: P13747, EVALUE 1.00e-53
tccatctcagggtgacgggctcgggtagcccctcatgctgcacatggcacgtgtatctctgctcctctccagaaggcaccaccacagctgcccacttctggaaggttccatcccctgcaggcctggtctccacgagctccgtgtcctgggtatggccctccccatcctgctgccaggtcagtgtgatctccgcagggtagaagcccagggcccagcacctcagggtggcctcatggtcagagatggggtggtgagtcacgtgtgtctttgggggct

SEQ ID NO: 24032 - DNA, 140 bp, Homo sapiens
  MAP TO AC002471.5; EXPRESSED IN BRAIN, SIGNAL = 0.47; SWISSPROT HIT: Q59088, EVALUE 4.50e+00; EST_HUMAN HIT: BG122694.1, EVALUE 2.00e-22; NT HIT: U80745.1, EVALUE 6.00e-25
ctctgtcatgagtccagccggctccagccgggccaggagcagctgtactgggacacgctgaagcagctgtccaagcacatcaagcccctgcaccgcgtggtcaacaagatcgacaagagtgaaggtgggctgcggccggg

SEQ ID NO: 24033 - DNA, 220 bp, Homo sapiens; identical to SEQ ID NO: 19648
  MAP TO AC004179.1; EXPRESSED IN BRAIN, SIGNAL = 0.71; SWISSPROT HIT: P32094, EVALUE 4.60e-01; EST_HUMAN HIT: BE737432.1, EVALUE 7.40e-02; NT HIT: Y09085.1, EVALUE 2.00e-01

SEQ ID NO: 24034 - DNA, 142 bp, Homo sapiens
  MAP TO AC002984.1; EXPRESSED IN BRAIN, SIGNAL = 1.8; NT HIT: gi5031738, EVALUE 2.00e-59; SWISSPROT HIT: P27272, EVALUE 1.20e+00; EST_HUMAN HIT: BF894369.1, EVALUE 2.00e-62
ggcgtgggaacctagagtgggagagattaagctgaagggagatcttgtggaaaggggtgatattgtggggatgttagaagaaacatttgtcgtatagaatgattggtgatcgcctggatacggttttgtatgaattgaaaaa

SEQ ID NO: 24035 - DNA, 331 bp, Homo sapiens
  MAP TO AC020952.4; EXPRESSED IN BRAIN, SIGNAL = 0.68; NT HIT: AF093016.1, EVALUE 1.00e-03; SWISSPROT HIT: Q14031, EVALUE 8.20e-01; EST_HUMAN HIT: AI160488.1, EVALUE 1.10e-01
gggttgatccctctgaaacatcttgcaaccaaaactccatcttggcgtctgcttccttctgaagaactcaacctgggacacagtaagaggacagatcacctacctgtgaggacccctgtgattcaggtgggtggtcagggaaaaactctgcagaggtagcatgtaagcagaacccagaagcaagggcaggagcaacaagaccctgtgggggagactggtgcacagaggagccaagaaatactgcaaagatcgtggagaaggagacaggcaaggcccgtgtggtctggtgggagtagtaggagatgaggtcagaaaaggaagaggtgatcat

SEQ ID NO: 24036 - DNA, 267 bp, Homo sapiens
  MAP TO AB014086.1; EXPRESSED IN HEART, SIGNAL = 0.96; EXPRESSED IN BRAIN, SIGNAL = 0.55; SWISSPROT HIT: Q62191, EVALUE 3.00e-04; EST_HUMAN HIT: BI917277.1, EVALUE 1.00e-127; NT HIT: gi10864060, EVALUE 1.00e-128
tcagcctgaggggctatgcaggggcaaaggtcgaaccttaagcatctcgaagcctgactgtaagcacttgccctccacctcggcagccaagtgggccaggtcccggcgcttgtccccaaggtgagcagcattttctcggagtcgctgcagaatgtcctgttcctcttcttccagtcgtgaaagcaacacctgctgctcttcatccagccgcctatgaagctcttcaaactccctcaagatctgctgtcggcgactttccactagtct

SEQ ID NO: 24037 - DNA, 85 bp, Homo sapiens
  MAP TO AC000374.1; EXPRESSED IN BRAIN, SIGNAL = 0.47; EST_HUMAN HIT: BG820206.1, EVALUE 1.50e+00; NT HIT: AB026841.1, EVALUE 2.60e-01
ctatataaattccacttttgtaagttccatctgcaggtttcttcttgttagttggatttctgctttgttcttcgaatagaaggtg

SEQ ID NO: 24038 - DNA, 222 bp, Homo sapiens
  MAP TO AC004182.1; EXPRESSED IN BRAIN, SIGNAL = 0.42; SWISSPROT HIT: P00374, EVALUE 1.00e-29; EST_HUMAN HIT: AL525560.1, EVALUE 3.00e-72; NT HIT: gi16160405, EVALUE 2.00e-72
atgatttggatagttggtggcagttctgtttataaggaagccatgagtcgcccaggccatcttaaactatttgtgacaaggatcatgcaggactttgaaagtgacacgttttttccagaaattgatttggagaaatataaaattctgccagaatatccaggcgttctcttggatgtattaagtacaaatttcaagtatatgagaagaatgattaatatgaag

SEQ ID NO: 24039 - DNA, 177 bp, Homo sapiens
  MAP TO AC008821.4; EXPRESSED IN BRAIN, SIGNAL = 0.82; SWISSPROT HIT: P47806, EVALUE 1.90e+00
ctttcagtatactgtgacagcagacaggatgagggagcactattagcaaataacgttaaaagtacattctcggaagaagccaggccaacagcgaataacaatctacggctgccggagtggccaaacgtctttaagcaatgcatggctgcatctgaggttcttgaagatttaatttga

SEQ ID NO: 24040 - DNA, 173 bp, Homo sapiens
  MAP TO AC000355.1; EXPRESSED IN BRAIN, SIGNAL = 0.66; EST_HUMAN HIT: BI494731.1, EVALUE 8.90e-01; NT HIT: gi7706187, EVALUE 6.00e-01; SWISSPROT HIT: P25304, EVALUE 8.60e-01
ttatgtacaaatggcttcatttccattccccttcgctgtgggagcctcaagaaccacagttacaggagctagaggatgacgctgacagcggtcacacaggcagtacccactcgtttcaatagccttcgccttttccatttgttggtttgcggaaagacaaaactgtgctgatc

SEQ ID NO: 24041 - DNA, 243 bp, Homo sapiens
  MAP TO AC003038.1; EXPRESSED IN BRAIN, SIGNAL = 1.8; EXPRESSED IN HEART, SIGNAL = 2.5; EST_HUMAN HIT: BI966271.1, EVALUE 0.00e+00; NT HIT: gi15307907, EVALUE 0.00e+00; SWISSPROT HIT: Q62280, EVALUE 2.30e+00
aaacaggcttgcatgctgatccgaaacctggtggcccacggccaggccttctcgaagcccatcctggacctgggggctgaggcactcatcatgcaggcccgatctgcccaccgtgactgtgaggacgtggccaaggccgccctgcgggacctgggttgtcatgtcgagctccgagagctgtggacaggccagaggggcaacctggcgccatgaccccaggcccagtctgggccgtgactctgg

SEQ ID NO: 24042 - DNA, 228 bp, Homo sapiens
  MAP TO AC010371.5; EXPRESSED IN BRAIN, SIGNAL =   1; EST_HUMAN HIT: N22558.1, EVALUE 7.70e-02; SWISSPROT HIT: P36642, EVALUE 1.40e+00; NT HIT: AB001596.1, EVALUE 8.20e-01
atgaacctctctggcctctcacagaaaaggcctaaaataatcactaagaagtgcccagtgtcatggagaacagagggagaaaacaacagccacgtaagaggaacaagtaccactacccctatcatccgcctctatctccatgacaaaacaaaagccttaatctgtaagaagacaagtaacactactggccttatggcactggctagttttaagatccttataccacag

SEQ ID NO: 24043 - DNA, 387 bp, Homo sapiens
  MAP TO AC002102.1; EXPRESSED IN BRAIN, SIGNAL = 0.58; SWISSPROT HIT: Q13751, EVALUE 2.50e-02; NT HIT: gi9903608, EVALUE 1.40e+00; EST_HUMAN HIT: AA081883.1, EVALUE 1.40e-01
atgccagggatgccaatcagaatcttcaagggcggtttctccaaaaagtgcagaaatgaccgatcctttgccccatctgcccttggtaaaaaaccaaaggcagagcctgcgcacatggtcccaggaggcgggggaccggacgcgcacacagtaggtgcacaatcgacactcatcacggaacctgccagttttctgaagacctacagggagggggcaaagtcagggcaaacagcagggccacgactgagaactcccaaccccatggagatgctcagatgccaggccttgggcaccacgcccaggtcagtgagcctcggggccggctgtacgctcgtgggagctgacactgccattgggggcagccatggtgggatattcgggaagcag

SEQ ID NO: 24044 - DNA, 256 bp, Homo sapiens
  MAP TO AC008685.6; EXPRESSED IN BRAIN, SIGNAL = 0.62; EST_HUMAN HIT: AL135179.1, EVALUE 1.00e-13; SWISSPROT HIT: O58698, EVALUE 6.50e-01; NT HIT: gi15208635, EVALUE 1.00e-06
tcttgtccctcccttttgtagtttcaacaaaataatacacagcatttctttctggtaagagaccaccaaccatggagtggttctggccagctgatggaggatgcatggtaagagtttccagtcctctgcttcgctttttgacatcagagggccgaaaactctccccttggattatgctaacactgtcattttttgaacatgggtccaatggagaggtatgaggctcaattgcacatgcatacctttctgctttcat

SEQ ID NO: 24045 - DNA, 119 bp, Homo sapiens
  MAP TO AC000071.2; EXPRESSED IN BRAIN, SIGNAL = 0.44; NT HIT: AF081535.1, EVALUE 8.00e-61; EST_HUMAN HIT: BF509824.1, EVALUE 1.00e-60; SWISSPROT HIT: O75419, EVALUE 1.00e-16
acaaagaaccggcgctgcaaactgctgcccctggtgatggctgcccccctgagcatggagcatggcacagtgaccgtggtgggcatccccccagagaccgacagctcggacaggaagaa

SEQ ID NO: 24046 - DNA, 467 bp, Homo sapiens
  MAP TO AL121915.8; EXPRESSED IN HEART, SIGNAL = 6.5; EXPRESSED IN BRAIN, SIGNAL =   4; SWISSPROT HIT: P38982, EVALUE 1.00e-60; EST_HUMAN HIT: BG119459.1, EVALUE 0.00e+00; NT HIT: gi9845501, EVALUE 0.00e+00
gtgcagaggagaatctgtgtgacacagagcaatggtaggtaggttataacataagatgcctctgcgagaggctggtggccggtcctgcaatcagtaaccacaagaacccgtggattcgggaatgttgcctggatctggttagtgaaggttccaggagtgaagtggccagcaataggagtggctccagtggcagcagcacacttcagcatggccctctggccagtgctactggaggatatgacactgacatcagcagggttttcaatggcaacgatggcaggagccaccagcagaagcttctcccagctcctctttagatttatgatgtagatgccaccacttttcctcttacagatgtgctgttccattcggaagtcaaggtcggtgccacctaagtgggttcctgctgcaaggaacttaaggacatcctcctctttcatttgcaggacatcaagggctgtggacat

SEQ ID NO: 24047 - DNA, 198 bp, Homo sapiens
  MAP TO AC000081.2; EXPRESSED IN BRAIN, SIGNAL = 0.55; SWISSPROT HIT: P53675, EVALUE 7.00e-26; NT HIT: gi14776991, EVALUE 1.00e-107
ctttggtgcagacgctgcaactttggcggcttcagcatagctgccctgtgcaaagagggtattgaattttctcacaaacaacttctctgccccagccaggttactacgaacggccaaacgcagaccaaggtctggattctgaagcacgttggttgcataattcacaatgttatcttcctcaacacaaactgacagtac

SEQ ID NO: 24048 - DNA, 343 bp, Homo sapiens
  MAP TO AC000024.1; EXPRESSED IN BRAIN, SIGNAL = 0.87; EST_HUMAN HIT: BG769045.1, EVALUE 0.00e+00; SWISSPROT HIT: P78395, EVALUE 1.00e-55; NT HIT: gi5174640, EVALUE 0.00e+00
ctagttaggcatgaaacaggggcacaggatgggctccgggtcatagaaggttctgtccccacagtgaggacaggggttggcactaagccagaccatgctgggccgccccaactcacacagcaactccctgagcctggcatgcagataggcaagcctctccaggtggagggtaccatggatgtcctcataactctccagggggacaggatacagcacgtgggtcagattgctcagcccgatgaggtgctgcaggagactctgcaaggcagatatggagatggaattcccgtagaagcttaaggttgtaagctgggagcagtggctcagggaaggcaggagggca

SEQ ID NO: 24049 - DNA, 288 bp, Homo sapiens
  MAP TO AC002132.1; EXPRESSED IN BRAIN, SIGNAL = 2.7; NT HIT: gi14766572, EVALUE 0.00e+00; EST_HUMAN HIT: AL582364.1, EVALUE 0.00e+00; SWISSPROT HIT: P20916, EVALUE 3.00e-49
tcgcccctgtgctcctcctggagtcccactgcgcggcagcccgagacacggtgcagtgcctgtgcgtggtgaagtccaacccggagccgtccgtggcctttgagctgccatcgcgcaatgtgaccgtgaacgagagcgagcgggagttcgtgtactcggagcgcagcggcctcgtgctcaccagcatcctcacgctgcgggggcaggcccaggccccgccccgcgtcatctgcaccgcgaggaacctctatggcgccaagagcctggagctgcccttccagggagccc

SEQ ID NO: 24050 - DNA, 781 bp, Homo sapiens
  MAP TO AC008910.2; EXPRESSED IN FETAL LIVER, SIGNAL = 2.3; EXPRESSED IN BRAIN, SIGNAL = 2.2; EXPRESSED IN HELA, SIGNAL = 3.1; EXPRESSED IN LUNG, SIGNAL = 2.2; EST_HUMAN HIT: AL527696.1, EVALUE 0.00e+00; SWISSPROT HIT: P48612, EVALUE 8.00e-98; NT HIT: AF143952.2, EVALUE 0.00e+00
gtttataccaatccctctgcccattcttaattatccctgggtaagattgttttacctgaagaaatttggaccggttttccaggagcagtttgttgtcggtcttcactgcttgttgaaacaggtagtcgcagaactgctccctcacaaatcctgggctggccaccaggatgcactttacaacatcaaagtgtatgtggcgctggatagcctggaccacctgttcatagaaccgctccaaggcccggtcatgctgagagcaattgcctttccttttcctagggatgttcacctccaccttggcccgagtgagggtcatgctgggagtgactaagcagatatgggcgaggccttcctgcatgaccacagccgccacatcagcgctccaggctgggtcacaggcctgctcgatgcgctccagtaccacactatcccactgcttcttggccagggtgaactggcggttgggctccagctcgatggtgtggtaagcccccatcttgacatactcattctcttggatgttggtccccttaacccgcagctggcaggcttgagagtcgaagtcgatggcctccacgcagagagtgagggtagtgcggacccggttgctgcccacgctgcccgtggaggactctgtctgtaccttgcggatggtggaggcgcgcaggctgtcgcccacctgcacgaggttgtaagtgtgccacatgtcctcaggctcctcggggaccagggtcacctggcccgcattgtccttctcgatgttcttcctcacgagcttcat

SEQ ID NO: 24051 - DNA, 1250 bp, Homo sapiens
  MAP TO AC022377.1; EXPRESSED IN LUNG, SIGNAL = 0.98; EXPRESSED IN BRAIN, SIGNAL = 1.5; EST_HUMAN HIT: BE783075.1, EVALUE 0.00e+00; SWISSPROT HIT: Q03164, EVALUE 4.10e-01; NT HIT: gi15296509, EVALUE 0.00e+00
gtggagatgctagaacgaaagtatggggggcgcctggtaacccgccatgcggcccgcaccatccagacggcgtttcgccagtaccagatgaacaagaacttcgagcgcttgcgcagctccatgtcagagaaccgcatgtcacgccggattgtgctgtccaacatgaggatgcagttctcctttgaggggcctgagaaagtgcacagctcctacttcgaggggaagcaggtctcagtgactaacgacggctcccagctgggagccctggtgtcccctgagtgtggtgacctcagcgagcccaccaccctcaagtctccggccccctccagtgactttgcggacgccatcaccgagctggaggacgccttctctaggcaagtgaaatcactggccgagtccatcgacgatgccctcaactgccgcagcctgcacactgaggaggcaccggccctggatgcggcgcgggcccgggacaccgaaccccagacagccctgcacggcatggaccaccgcaaactggacgagatgacggcctcgtacagtgatgtcaccctgtacatcgatgaggaggagctgtcgccccctctgcccctctcgcaggcaggggaccggccgtccagcaccgagtcggacctgcggctacgggctgggggcgcagccccagactactgggccctggcccacaaagaggacaaggctgacacggacacgagctgccggagcacgccgtcgctggagcggcaggagcagcggctgcgggtggagcatctgccgctgctcaccatcgagccacccagcgacagctctgtggaccttagtgaccgctcggagcgggggtcactcaagaggcagagtgcttacgagcgcagccttggcgggcagcagggcagtcccaagcatggtccccacagcggcgcccccaagagcctcccccgggaggagcctgagttgcggccccggccccccaggcccctggacagccacttggccatcaatggctcagccaaccggcagagcaagtctgagtcggactactcagacggtgacaatgacagcatcaacagcacgtccaactccaacgataccatcaactgcagctccgagtcatcgtcccgtgacagcctgcgggagcagacgctcagcaagcagacctaccacaaggaggcccgcaacagctgggactcgcctgcctttagcaacgatgtcatccgcaagaggcactaccgcatcggcctgaacctcttcaacaa

SEQ ID NO: 24052 - DNA, 566 bp, Homo sapiens
  MAP TO AC007498.2; EXPRESSED IN FETAL LIVER, SIGNAL = 0.99; EXPRESSED IN BRAIN, SIGNAL = 1.3; EXPRESSED IN HELA, SIGNAL = 1.1; SWISSPROT HIT: P39806, EVALUE 8.00e-35; NT HIT: gi15316964, EVALUE 0.00e+00
aaactccttgtctgccttggcccagcaaagaaaaagcaagccaccaaatgtcactgcctttgaagcgaaaagtacttccgatgaggcattcttcaaacacaagtgcaggttctgcgcgaaggtctttgggagtgacagtgccttgcagatccacttgcgttcccataccggagagaggccattcaagtgcaacatctgcgggaacaggttctccaccaaggggaatctgaaagtccactttcagcgccacaaagagaaataccctcatatccagatgaacccctatcctgtgcctgagcatttggacaatatccccacgagtactggcatcccatatggcatgtccatccctccagagaagccagtcaccagctggctagacaccaaaccagtcctgcctactctgaccacttcagtcggcctgccgttgcccccaaccctcccaagcctcatacccttcatcaagacggaagagccagcccccatccccatcagccattctgccaccagccccccaggctcagtcaaaagtgactccgggggccctgagtcagccacaagaaacc

SEQ ID NO: 24053 - DNA, 519 bp, Homo sapiens
  MAP TO AC005609.1; EXPRESSED IN HEART, SIGNAL = 1.4; EXPRESSED IN LUNG, SIGNAL = 1.3; EXPRESSED IN FETAL LIVER, SIGNAL = 0.95; EXPRESSED IN BRAIN, SIGNAL = 1.8; EXPRESSED IN HELA, SIGNAL = 0.48; EST_HUMAN HIT: BG719192.1, EVALUE 1.00e-109; SWISSPROT HIT: Q9Y5H9, EVALUE 6.00e-96; NT HIT: gi14165406, EVALUE 0.00e+00
ctggaactgcagcagctccacttcctcgtggtccagcggctgcagcgcgtacaccttgccgctctccgcgtgcaccgaaacgtagctcgacaacgcgcgctcgcccacccgccgctccaccagcgagtaggacaccagcgcgttctcctgcgcgtccgcatcccacgctgacaccgtgaagatgtggcagcccggcgggttgttctccttcacgaatactgtgtactcaggctgtgcgaacgccggcgcgttgtcgttcacgtcggccacctcgatggacacgctggtggtggcccacagtgaaggcgagcccccgtcccgtgcggtcaccaccagctcataggctgacacgctctcgcggtccagggcgctgtccagcaccaacgagtagtaattcttgaaggtggacaccagcttgaaagggacgtggggcgtcagggagcaggtgacatgtccattcgtaccagagtcgcgatccgacaccgtgatgagagcaatgacagtgcccagggaagcgtt

SEQ ID NO: 24054 - DNA, 1361 bp, Homo sapiens
  MAP TO Z98044.13; EXPRESSED IN BRAIN, SIGNAL = 0.8; EXPRESSED IN HELA, SIGNAL = 0.61; EXPRESSED IN LUNG, SIGNAL = 0.92; EST_HUMAN HIT: BE746508.1, EVALUE 0.00e+00; SWISSPROT HIT: O95479, EVALUE 0.00e+00; NT HIT: gi14726996, EVALUE 0.00e+00
tcatcccaggaaggcgtcgtagtccatgtaccacaccagctggccggagtgcggcaggacacccgagatgggccacttcttgggctcatggcccacccggctcaccagcgtggtgatctcacgcttcatcctgcccatgaccaggactgccaccttcttggcgcggttgatgagaggcaggctaaggctcatgcggcggtgtggctgggaggggctcgtggtcagcacgaccagctgctcgccatccaggccagtgggtgactgtgggaagagggaggctgtgtgcccgtcggcacccatgcccagcagcaccaggtcgaagctgctgttggccaccagggctgagatctccctggcatagatctgggcgccctggtcctcctcggcgcagagccgctgctgcaggtgcacaggcatggggtggatgttgtagtaggggatccggacgtgctgcagcaggtgggcctgcaggccctggaagttggactccgggtctgagagtgggacgcagcgctcgtcaaccagccacaggtgcgtgtgggcccaggggaagccatagtgcgccgtggccagctgctggaacagggccacggggctcgagccccccgacagtgccaggtggaactggccaaagcgccgcacggctcgcacagcggtggcctcgatgtcattagccagcttagagatcagctcctcggaccaggcggagaccagcgggctctctcggtacttggccctgaggacctggaagtcactgggcattggggccggccctggccctggcaccagctgctccggctgctgctgggaaaagaacaaccggccgctactgaactcaaagtccaacagacggccattctcagctcctccagggtagaggcgtggggccttatgggccaggctctccagcagaggggtccagaagttccaggaggccagcaagttctctgtggtgatgaagaaattcttccggccatggaagatatgggataagaggacggagtgggcgtcccgctcccgcacagggctgtaggcgtagtaatcggacagagggctgccgaaaaggcggagcccaggtggtccctccatttccttccagctggagggcagggagggcctgaacaggttcctgctgaccagcacggcagggctgcccaggtcgccatggccgatgtggaagacgagctgccggggcaggcactggctctgcgccgcggcccagtgcttttcgctctgcacacagcaggcctggttcttgaacaagatccgagcgtagcccactctctcgtccaaggctttgccagacatcaggatgaaaggcacgccctcccagcgaaggttgtcaatgtgcactaggacgg

SEQ ID NO: 24055 - DNA, 925 bp, Homo sapiens
  MAP TO U73167.1; EXPRESSED IN BRAIN, SIGNAL = 1.2; EXPRESSED IN HELA, SIGNAL = 0.66; SWISSPROT HIT: Q28107, EVALUE 5.90e-02; NT HIT: gi14737404, EVALUE 0.00e+00; EST_HUMAN HIT: AL576483.1, EVALUE 0.00e+00
gcaagagctgactctgagccctggcccagccaagctgacccctacactagaccctacacaccggatggagctgatcctgagtaccagcccagctgagctgactctggatcctgcgtgccagccaaagctgcccctggattccacatgccaaccagagatgaccttcaatcctggtccaactgagcttaccctggatcctgaacaccagccagaggagaccccagctcctagcctggctgagttgaccctggagcctgtgcaccgccgacccgagctcctggatgcttgtgctgacctcatcaatgatcagtggccccgcagccgcacctcccgcctgcactccctgggccagtcctcagatgccttccccctctgcctgatgctgctaagcccccaccccacacttgaagcagcacccgttgtggtgggccatgcccgcctgtcacgggtgctgaaccagccccagagcctcttagtggagacagtggtggtggcccgggccctgaggggccgtggctttggccgccgcctcatggagggcctggaggtctttgctcgggcccggggcttccgcaagctgcatctcaccacccatgaccaggtgcacttctatacccacctgggctaccagctgggtgagcctgtgcagggcctggtcttcaccagcagacggctgcctgccaccctgcttaatgccttccccacagccccctctccccggccacccaggaaggccccaaacctgactgcccaagctgccccaaggggtcccaagggacctccattgccaccaccccctcccctacctgagtgcctgaccatctcacccccagttccatcagggcccccttcaaaaagcctgctggagacacaatatcaaaatgtgagggggcgccccatattctggatggaaaaagacatctga

SEQ ID NO: 24056 - DNA, 604 bp, Homo sapiens
  MAP TO AL133375.3; EXPRESSED IN BRAIN, SIGNAL = 0.83; EXPRESSED IN HELA, SIGNAL = 0.68; SWISSPROT HIT: Q14999, EVALUE 7.00e-45; NT HIT: gi14781548, EVALUE 3.00e-12; EST_HUMAN HIT: BI918402.1, EVALUE 0.00e+00
gaggtcaggatggtgggggaacggcatgctggggacctcatggtgcccttagggcctcggctgcaggcatatcctgaagaactcattcgacagaggcctgggcatgacgggcatcctgaatacctgatccgatggagtgtcctgaagtgtggggaagtgggcaaagtgggtgtggaagaaggcaaagcagagcacatcctcatgtggctgtcggctcctgaggtctacgccaactgccctgggctgttaggtgagcgggcactatctaagggacttcagcacgaaccagctggggtttcaggaagctttcctcgagatccaggaggcctggatgaagtggcaatgggagagatggaggctgatgttcaggcgctggtacgcagggcggccaggcagctggcagaaagtgggaccccaagcctcacggccgctgtgcttcacaccatccacgtgctcagtgcctacgccagcatcgggcccctcactggtgtcttcagggagacaggagccctggacctgctcatgcacatgttatgcaatcctgagcctcagatccgccggagtgcaggcaaaatgctgcaggctctggcagcccacgatgctg

SEQ ID NO: 24057 - DNA, 525 bp, Homo sapiens
  MAP TO AC006379.2; EXPRESSED IN BRAIN, SIGNAL = 0.93; EXPRESSED IN HELA, SIGNAL = 0.66; EXPRESSED IN FETAL LIVER, SIGNAL =   1; EXPRESSED IN HEART, SIGNAL = 1.4; EST_HUMAN HIT: AL521707.1, EVALUE 1.00e-120; NT HIT: AL163303.2, EVALUE 2.00e-53; SWISSPROT HIT: P74055, EVALUE 9.40e-01
atattaaaaatgattccaaccctcatgggtgactctgaggggtccaagacttcagcagaggaagtcactgcagatgtggtggaaacagcaagagaacttgaattagaagtagagcctgaagacgtgactgaattgctgcaatctcatgataaaactttaatggatgaggagttgcttcttatggataagcaaagacagtggtttcttgagatagaatctactcctggtgaacatgctgtgaacactgttgaaatgaaaacaaaggattcagaagatgacatagatttggttgataaagcatggcagggtttgagaggactgactccaattttgaaagtagttctactgttggtaaaatgctatcaaacagcattgtatgctacagagcaatttttcacgaaaggaagggtcaatcaatgtggcaaacttcattgtcttattttaagaaattgctacggccacctgatcagtcagaagctatcaccattgaagcaagaccttctaccagcagaaagattacaactc

SEQ ID NO: 24058 - DNA, 552 bp, Homo sapiens
  MAP TO AC006965.2; EXPRESSED IN BRAIN, SIGNAL = 1.1; EXPRESSED IN HELA, SIGNAL = 0.8; EST_HUMAN HIT: Z43767.1, EVALUE 0.00e+00; SWISSPROT HIT: O00187, EVALUE 6.00e-01
cattctgattaactccagaaagttgggaagccgctcctgctcatttgcatacatcctgagaaaatccttaagtctgagtcggaggtccctactcagctcaccgcctaaaaggagctgctgcaagcgagtccggtttgcatctttctcagctataatgcctgcctgaatagcgttctggagctgcacctctaaacggatcacataaagggaggctttctccccttgagcttgtagggtgttaaaaaatttaccatgggcagtcacactgctttcagactccccaaacaccaatttcatggctcgcaagaaatctgccacacttaggttagggttggtcgcctgaagcacacgcatgacctcgcgggcagggcccctaagggttttcatcaagcgcttgagcttttcctcctcagacatattccaatctggcaggacgccattgacttgggtcagccagttttcaaaggtttcttccccttgggctggcaccaccctccccgagaacaacttcatgtttctgtctgccatgctggccattataggaccgagact

SEQ ID NO: 24059 - DNA, 817 bp, Homo sapiens
  MAP TO AC005670.1; EXPRESSED IN LUNG, SIGNAL =   1; EXPRESSED IN BRAIN, SIGNAL = 1.2; EXPRESSED IN HELA, SIGNAL = 0.77; NT HIT: gi7662181, EVALUE 0.00e+00; EST_HUMAN HIT: BI560166.1, EVALUE 0.00e+00; SWISSPROT HIT: O60309, EVALUE 0.00e+00
atgacttccgctcagtgcccggcactagcgtgtgtcatgtcccggctgcgtttctggggcccatggcccctccttatgtggcaactattgtggctactagtcaaggaggctcagcctctggagtgggtcaaggacccgctccagctgacctctaaccccctggggccgcctgagccctggtcttcccactcctcccatttcccacgggaatctccccatgcgcctactctcccagcagacccgtgggactttgatcacctggggccctctgcttcctcagagatgccagccccaccccaggaatcgactgaaaatttggttccattcctggacacctgggattcagctggagagctgcccctggagccagagcagttcttggcttcacagcaggatttaaaggacaagctgagtccacaggaaaggctccctgtttcacccaagaagctgaagaaagatccagctcagcgttggagccttgctgagattattggaattatacgccaattatccacacctcatagtcagaaacagaatttgcagaatgaatattccagtacagatacaccgtatcccggtagcctgcctccagaactccgggtgaagtcagatgagcctccagggccctctgagcaagttggaccttctcaattccatctagagcccgaaactcaaaatccagagacccttgaagacatccagtcctcttcactccaacaagaagccccagcacagcttccacagctccttgaggaagaaccttcttcaatgcagcaggaggccccagctctgcctccagagtcctctatggagagtc

SEQ ID NO: 24060 - DNA, 636 bp, Homo sapiens
  MAP TO AF127019.2; EXPRESSED IN HELA, SIGNAL = 0.61; EXPRESSED IN BRAIN, SIGNAL = 0.93; EXPRESSED IN LUNG, SIGNAL = 0.93; SWISSPROT HIT: P41809, EVALUE 9.00e-04; NT HIT: U28960.1, EVALUE 6.10e-01
caatgtgacatttgaagttaagcttgccactcgctttgcaggatggcttcactgtgcaggtggctgggtgcaagcgcagtctgagaggttcctgacctgaattttctgcgatgtgctctagagctgcaattgacagccccatcagatctgctgtgtgctctagagttgctattgacagccctgttagatctgtggtgtgctctagagctgcaattgacagccccatcagatctgccgtgtgctctagagctgcaattgacagccccatcagatctgccctgtgctctagagctgcaattgacagccccatcagatctgcaatgtgctctagagttgcaattgacagccctgtcagatgtgcggtgtgctctagaactgcaattgacagtcccattagatctgctgtgtgctctagagttgcaattgacagccggccagatctgccaggtgctctggagctgcatttgacagtcccatcagaactgcgacgtgctctagaggtgcagttgacagccccatcagatgctaccagactaggggaacatctaaccatacttagcaatggcccccaatccatgggattagaacttgtcctgaaaatacactccacatgatctctatcatgatacacgtggg

SEQ ID NO: 24061 - DNA, 538 bp, Homo sapiens
  MAP TO AC004590.1; EXPRESSED IN HELA, SIGNAL = 0.79; EXPRESSED IN BRAIN, SIGNAL = 1.8; SWISSPROT HIT: O43497, EVALUE 1.00e-106; EST_HUMAN HIT: BE781203.1, EVALUE 0.00e+00; NT HIT: AB032949.1, EVALUE 0.00e+00
gcagcaataaggactgactccttggacgttcagggtctgggcagccgggaagacctgctggcagaggtgagtgggccctccccgcccctggcccgggcctactctttctggggccagtcaagtacccaggcacagcagcactcccgcagccacagcaagatctccaagcacatgaccccgccagccccttgcccaggcccagaacccaactggggcaagggccctccagagaccagaagcagcttagagttggacacggagctgagctggatttcaggagacctcctgccccctggcggccaggaggagcccccatccccacgggacctgaagaagtgctacagcgtggaggcccagagctgccagcgccggcctacgtcctggctggatgagcagaggagacactctatcgccgtcagctgcctggacagcggctcccaaccccacctgggcacagacccctctaaccttgggggccagcctcttggggggcctgggagccggcccaagaaaaaactcagcccgcctagtatcacca

SEQ ID NO: 24062 - DNA, 669 bp, Homo sapiens
  MAP TO AC009336.12; EXPRESSED IN BRAIN, SIGNAL =   1; EXPRESSED IN HELA, SIGNAL = 0.92; EST_HUMAN HIT: BG766603.1, EVALUE 0.00e+00; SWISSPROT HIT: Q01822, EVALUE 6.00e-60; NT HIT: gi16157968, EVALUE 0.00e+00
ctttcttagaggcattcctcttcactttcatccactcgaacgtgctgaaggcggcagggaggccggaggcgggagagacggacttggggtaggtgcctggggccggggatgcggtctggaaagcaccagggtggccgtcggctgacgctttgagacaagccggaaaagggccgggttcgccgaaggccgcgtaatccacctggccgctgaggaggaaagagccgccgcccgagaagacggccgaggtggcgtagtggacgtgagacccgccgtcgtcggccgcccgccccagcacgcccgggaagtcgtacgccggcccggaccccaggaagccgtagtccgcgcccccagctgccgcggcaggtgcggcaccaggttcgtaggccccctccagggtgcactgcgcgtactggggcgcggccggaggcggtacggacggccgcgcgggggcggccgggggcgaaggcgagggtcgggcggcggccaggggcagacagctgacgaaggcgccgtcgccgttgcccagagggaaggcgggctgcagagccacgggccgggcgtcggagcggcagaacttgggtgccaagctgagcacgtcgccgccgaccccgccgctgctgctgcatgacacgtactccaggtaggagctcatggttcgggccccacctt

SEQ ID NO: 24063 - DNA, 884 bp, Homo sapiens
  MAP TO AC002310.1; EXPRESSED IN BRAIN, SIGNAL =   1; EXPRESSED IN HELA, SIGNAL = 1.1; NT HIT: gi16166067, EVALUE 1.00e-12; EST_HUMAN HIT: BG830276.1, EVALUE 0.00e+00; SWISSPROT HIT: Q07230, EVALUE 5.00e-56
gggaatgaggagaaggaaaggctgaagaagtgtccaaaacaaaaagaggtggcgcatgaagtggctgtcaaggagtggtggcccagcgtcgcctgcccagagttctgcaaccctaggcagagccccatgaatccctggctcaaggacactctgacccgaagactgccccactcttgcccagactgtggccgcaacttcagctacccttccctcctggccagccaccagcgggtccactccggggagcggcccttctcctgcggccagtgtcaggcgcgtttctcccagcgcaggtacctgctccagcatcagttcatccacaccggcgagaagccctacccctgccccgactgcgggcgccgcttccgccagaggggttccctggctatccacaggcgggctcacaccggggagaagccttacgcgtgctcagactgcaagagtcgcttcacttacccctacctgctggccatccaccagcgcaagcacacgggcgagaagccctacagctgccccgattgcagcctccgtttcgcctacacctccctgctggccatccacaggcgcatacacaccggcgagaagccctacccctgtcctgactgcggccgccgcttcacctattcttccctcctcctcagtcaccggcgcattcactccgacagccggcccttcccctgcgtggagtgtgggaaaggcttcaagcgcaagaccgccctggaagcccatcggtggatccaccgctcctgcagcgagaggcgcgcgtggcagcaggccgtggtggggcgttcagagcccatccctgttttgggaggcaaggatcccccagttcacttccggcactttccagatatatttcaagagtgtgggtgatggcgttcaca

SEQ ID NO: 24064 - DNA, 1453 bp, Homo sapiens
  MAP TO AC000113.1; EXPRESSED IN HELA, SIGNAL = 1.6; EXPRESSED IN BRAIN, SIGNAL = 0.78; EXPRESSED IN LUNG, SIGNAL = 0.92; EST_HUMAN HIT: AL040448.1, EVALUE 0.00e+00; SWISSPROT HIT: P08640, EVALUE 1.00e-15; NT HIT: gi15312977, EVALUE 0.00e+00
ccatgccacatccagaggctgtggctcttggtagtggcatgggcatcgatccagaaactgaggctctcataaatgatgtggaccttgctccagaagcagaggctctaattggcgctgtggccatccttccagacacggtatatgttgtttgtgacaaggacatagatctagagttcgcaacactggtttgcaatgtggacgttgctccagaggccatggtttccattagcggcatagacatctctccagaagccatggctgacattaaaggcatgggcattgttccagaggccggggctctcattaatggcttggacatccctccagagaccatggctgttgtttgtgcagtggacatatgtccagaggctgaagctctcattaactctgtggacacagtctcacaggctgagggtctccttagtggtgtggacatagttccagaggctggagctcttactagtggtgaggacacccctccagaggctggggctcgcactggtagtgtgcacatgtctccagaagctgtgggcatcatttgtgatgtggatgtcactctagagtctggggctctcatcagtggcatggacatccctccagaggctgtggatcttgttagtggcatggacattgctccagagatgggagccttcacttgtggcatggatgacatcattccagaggctgtggctgtcatttgtggagcagacatggctccataagctggggatctcagaggcgtggctatctctccagaagctggagctctcattagtggtagggacatctctccagaggatgaagctcttgtgagcagtgagggcctctctccagggtctgaggttctcattagtggtgtggacattgtttcagaggtccaggctctcactgttggtgtggacatcacatcagaggttggggaattcatctgcatccctccagcggtcatggacttcatgggcgacatggacatccctccaggatcttgggtgctcattggctgactgagcatctttccagacactttggctctcattagtgaggcaggcattactcctgggtcttgagctctcattagtggcatggacatccctccagagactgtggctgtcatttgtgatgtggacattgctccagaagctgtgtctctcattagcgatgcagacaaccctccagaggctgtgtctgtcatttgcggcatggacagagctccagaaactgtgtctctcattagcagtgtgggcattgcttcagaagctgtggttgtcattttctccgtgaacatcgttcctgaggctttgggtgtcattagtggcttggacaatgctccagaggccagagatctcatttgtggacaggacatcactcctgaggctgtgtctctcattaacagcgtggatgttgatccagaggtttgggctgtcattagtggggtggacattgctccagaagt

SEQ ID NO: 24065 - DNA, 493 bp, Homo sapiens
  MAP TO X66401.1; EXPRESSED IN PLACENTA, SIGNAL = 1.4; EXPRESSED IN HELA, SIGNAL =   1; EXPRESSED IN BRAIN, SIGNAL = 1.3; EXPRESSED IN FETAL LIVER, SIGNAL = 1.6; EXPRESSED IN LUNG, SIGNAL = 1.4; EXPRESSED IN HEART, SIGNAL = 1.6; SWISSPROT HIT: Q03519, EVALUE 2.00e-17; EST_HUMAN HIT: BG323656.1, EVALUE 0.00e+00; NT HIT: AF097669.1, EVALUE 0.00e+00
atgcggctccctgacctgagaccctggacctccctgctgctggtggacgcggctttactgtggctgcttcagggccctctggggactttgcttcctcaagggctgccaggactatggctggaggggaccctgcggctgggagggctgtgggggctgctaaagctaagagggctgctgggatttgtggggacactgctgctcccgctctgtctggccacccccctgactgtctccctgagagccctggtcgcgggggcctcacgtgctcccccagccagagtcgcttcagccccttggagctggctgctggtggggtacggggctgcggggctcagctggtcactgtgggctgttctgagccctcctggagcccaggagaaggagcaggaccaggtgaacaacaaagtcttgatgtggaggctgctgaagctctccaggccggacctgcctctcctcgttgccgccttcttcttccttgtccttgctgttttgg

SEQ ID NO: 24066 - DNA, 477 bp, Homo sapiens
  MAP TO AL135998.2; EXPRESSED IN HELA, SIGNAL = 1.1; EXPRESSED IN BRAIN, SIGNAL = 0.93; EXPRESSED IN LUNG, SIGNAL = 1.1; EXPRESSED IN FETAL LIVER, SIGNAL = 1.1; SWISSPROT HIT: P55042, EVALUE 5.00e-18; NT HIT: gi12083632, EVALUE 1.00e-81; EST_HUMAN HIT: H19231.1, EVALUE 1.70e-01
agagcaccgagaggtcgtgacacgacctggagcgctgcttgaagaacttggcgttgcgcggcaccaggttggcgaggaacctcttggctttcttggtgaggctctcgcggcgtgcaggtggcgcagggccctcggggctgcccggatcgggcctctggcctccggcgtggtttcggccccgccgcagccggatctggcgcaccgcgccctcgaagagctccctcgtgttgtggtgcagtgcggccgacgtctcgatgtgcttgcagctcagcgtcccggccaggtggcggccctctgcaggaaggcaccggctcaggcgcccgctgggctgtacgggacccggggcgagggtgggtctagggagggcctgggcgtgcggtggcaagggattggtactagtgaatcttgcaaccgagagaacatggctgagctcatatggtgggtctgtggaggtgcgaaggagagggagaaggaggc

SEQ ID NO: 24067 - DNA, 629 bp, Homo sapiens
  MAP TO AC005058.1; EXPRESSED IN BRAIN, SIGNAL = 1.3; EXPRESSED IN HELA, SIGNAL = 2.4; SWISSPROT HIT: P75327, EVALUE 2.40e-01; NT HIT: gi14752269, EVALUE 0.00e+00; EST_HUMAN HIT: AL529506.1, EVALUE 0.00e+00
ggcttgtccaccgtatgtacagattctgagcctggcttataagccaggatgccaggatctggagatcttaatttcccctcttctacctttttatcttcaagttctgatttgtcccggaaatgttcattttccttttgttgagacattttttccttacgtttgaaatatgaattaatatgatttgataaaaagtagaatgagtctccaaattttgtggttatagaacttgtgtaatgaaaaagactgcgtttacctatatcttcttctttgtctataatgtgacttttctcttctggaaaaggactcttttctgctgatttgtcactatattttttcagagatttgatggcttgtttgatgtttttctgttttaaccagccactatccgatacttttcttaaaatttgggaacttggcttaaattgagctaaacgtgaaatcatttcattttgattgccaaaaacagcctttgaaacagagttcaaagtacttttaatacgggacatacaaatgttcacttttgtaagtcccttgggagcagaagtgctaagtttcaaaatcccaatatgtaaaccatggttgcttggagagtaacagtgcttactgcaagaatgtgcttcacttttggt

SEQ ID NO: 24068 - DNA, 679 bp, Homo sapiens
  MAP TO AL157773.3; EXPRESSED IN HELA, SIGNAL = 1.4; EXPRESSED IN BRAIN, SIGNAL = 1.1; EXPRESSED IN LUNG, SIGNAL = 1.2; EXPRESSED IN HEART, SIGNAL = 1.6; SWISSPROT HIT: Q9P2J3, EVALUE 6.00e-45; EST_HUMAN HIT: AW294693.1, EVALUE 3.00e-53
atacgatccccgcttcaacacctggatacacctggccagcatgaaccagaagcgcacgcacttcagcctgagcgtgttcaacgggctcgtgtacgccgcgggcggccgcaacgcagaaggaagcctggcctcgctggagtgctacgtgccctccaccaatcagtggcagccgaagacgcccctggaggtggcgcgctgctgccacgctagcgcggtcgccgacggccgcgtgctggtgaccggaggctacatagccaacgcctactcgcgctctgtgtgcgcctacgacccggccagcgactcgtggcaggagctgccgaacctcagcacaccccggggctggcactgcgcggtcacgctgagcgacagagtgtacgtgatgggcggcagccagctggggccgcgcggggagcgcgtggacgtgctcaccgtggagtgctacagccccgcgaccggccagtggagctacgcggcgccgctgcaggtgggagtgagcactgcgggcgtctcggcgctgcatggccgcgcctacctggtggggggctggaacgagggcgagaagaagtacaagaagtgcatccagtgcttcagccccgagctcaacgagtggacggaggacgacgagctacccgaggccactgtcggcgtgtcctgctgcaccctctcgatgcccaacaac

SEQ ID NO: 24069 - DNA, 1491 bp, Homo sapiens
  MAP TO AC004883.2; EXPRESSED IN BRAIN, SIGNAL =   1; EXPRESSED IN HEART, SIGNAL = 1.5; EXPRESSED IN LUNG, SIGNAL = 1.1; EXPRESSED IN HELA, SIGNAL = 0.54; NT HIT: gi14149895, EVALUE 0.00e+00; SWISSPROT HIT: Q01389, EVALUE 2.30e-01; EST_HUMAN HIT: BI225384.1, EVALUE 0.00e+00
cagaatcccactgggaatcctttaactgggagcagtattttgttttgctcagtttcataatggagaacagctgttcgcagatgtaggtgctcccgaacatggaaagaatctttgcgcaatggtgcttgtatttcgggtagctaccccagaggtacttgtagaattctggtattcccaccttgtcgtatttcgtcttcaggaccgtgttgcattgcaggtcgataacctccatctggagctcctcgtgcacactgtcgatcttcgtggagaacggggagctgaacagagtcagttcgctttcgtagagtttgaaatcagacagccttttctggaattcggtcttgagttccgcgattttgggaatgtagttcaggccatcgctttcatttctggaagccaatttcagggtgggaaagtgggccagattattcctcgtcaaatgagtctcccagaggcacagttttgctaggaacgcccggatcaggtcatacatctgcgtgacgatttgggagtgtccttggagagagatgttcaaagcgttcagatgcatcgtcatgtcaaccaagaaggccaggtctcggatccaatctatggagctcagttgaggcaggggtttccctctggatgacatgaaggagtcgatttcttccaaggattcgaaaaatctctttagcacgagcccgcgactgagccacttaatctccgtgtagtacaggaggctaccatactggctgtccagctcatagagcaaggttgtgaactcactgtggttcagtccccgggagcatatccagttcacggacttcactaccacgtccatgacgtggtccatcttcaacttctgagcacagagtgattccggatgaattatacaacagatggacttcagttccgcacccttgcagaacgtcgccaccctggacttcagttttgtgacaagcccgttattggcatccaccatcgctggggtgccagtggaggccacgcttactaatttcgaccagtcgatacagaactttttcaggctcttctcaacacgcgaaaagatctcgttgccagattttgtacccgtcatgggcaccgtgtccagaagttcttcggacacatcgaaattctcatcgacaccacggatgaatatggccaactgggtggtattatttatatccgtgatctcatcgattgcgatagaatatgccacaaaagacctgattttttcacgtaacttctcccataagttcccagctaggtcctctacaggctgcacgggggatttctgggttggacttgggtttgcaaacacttgtttttgctcgggacactcggtgtctgacaagcctaagagatacttcctgagcccttttttcagctcgtgaagcttctcgtcacgcattctttccatatactggtcataatgcttgctgtgattggtttgatagtggcgtcttaggttatattctttggacacagacatgctttgtttgcatatgagac

SEQ ID NO: 24070 - DNA, 823 bp, Homo sapiens
  MAP TO AL109754.13; EXPRESSED IN HELA, SIGNAL = 0.76; EXPRESSED IN BRAIN, SIGNAL = 0.94; SWISSPROT HIT: P28492, EVALUE 2.00e-03; NT HIT: gi14771960, EVALUE 0.00e+00; EST_HUMAN HIT: AI888450.1, EVALUE 0.00e+00
gatgtgacctgaaatggaagaatttagatcataaaacgcccagggctgtggctaaggaaggcggcttcaaagcagcaagcaaagaaatacgccgagcagagagaatcgctaataaactagccaggccaggagccaaaaatccaaatccactgtgggcccttagactgcacgattggtccgtagaacgtgaggctttcctccgggaagcctttgcggttttagacaggggtgatggaagcatcagcaagaacgacttcgtgatggtgttggaggaaaggcaggattatgcaagctcagaacagctggctgccatcgctcaccttcatgagaaaacccggggaggaggggtcaatattaatgaattctttaaaggaaccagatatttaaacaagtcttttgtcttaggatcgtatggacctaagaaaaaggaaaaagggatgggcaaaaaaggaaagaaagggaaatttgtcttaccccttccaatctgtgtcattcctgagtacgcgtttccacgccggcaggatggtgggccaccgtattacatgattgagacctacaagaatgtcactgatagcagccggtttaatagagatcatcccccagaacatcccattcaggatgactctgtttggtacattgatgattcagagaaggtattttcaaacattaatattatcaccaaagcaggggatctggcttctctgaaaaaggcctttgaatcaggaatacctgtggatatgaaggataattattacaaaactccgctaatgacggcgtgtgcaagtggaaacatagatgtggtcaagtttcttcttgaaaaagg

SEQ ID NO: 24071 - DNA, 3723 bp, Homo sapiens
  MAP TO AL121907.2; EXPRESSED IN HEART, SIGNAL = 2.7; EXPRESSED IN LUNG, SIGNAL = 2.2; EXPRESSED IN FETAL LIVER, SIGNAL = 1.5; EXPRESSED IN HELA, SIGNAL = 0.67; EXPRESSED IN BRAIN, SIGNAL = 1.9; SWISSPROT HIT: Q9PK00, EVALUE 1.00e-23; EST_HUMAN HIT: BG761449.1, EVALUE 0.00e+00; NT HIT: gi14769949, EVALUE 0.00e+00
ggcggcagttccgggtcgtggtgctcagcactgtgcacacctgccagagcctgctcagccctggggcactggcccctgagttcttcaccgacgcccgcgtgctcaacaccgtcctgacccgcgcccagtcccagctggtggtagtgggggacgccgtggccctctgctccttcggggcctgcggcaagctctgggagagcttcatccgtgagtgcgtggagcggcacagtgtctgccccgagggcctgtccatggagcaggtcgagcagggtgtggcgcagagacggcgctggcctccccgaggcacacaggctggggcagcggggaactgggaggctgccccagagccagtaggggacctggccgaggagcaggcggctgtggtgacggccatggtgaaggcagagccgggagatgaggctctgagcccagcatcccgtgacatcacggcaaccacagcgcagacggaggctgcggcagcaccagcaggagacgcagtgaaggaagacgtggtgcccggggcctgtgcggcaggagcggctgctgcagcgggcgtggagtccacggaggctgaggatgcagaggctgacttctggccgtgggacggggagctcaacgctgacgacgccatcctacgggagcttctggacgagagccagaaggtgatggtgaccgtcggggaggacgggctgctggacactgtcgccaggcccgagtccctgcagcaggcccggctgtacgagaacctgcccccggctgcgctacggaagctgctgcacgcggagcccgagcggtaccgccactgctctttcgtgccagagaccttcgagcgggcgtcagccatcccgctggacgatgcctcctcgggccccatccaggtcaggggccgcctggactgtgggatggccttcgccggggatgaggtgctggtgcagctcctttcgggagacaaggcgcccgaggggcggcttcggggccgcgtgctgggcgtgctgaagaggaagaggcacgagctggcgtttgtgtgccgcatggacacgtgggacccgcgcatcatggtccccatcaatggctccgtgaccaagatcttcgtggccgagctgaaggacccatcgcaggtccccatctacagcctccggaagggccggctgcagcgtgtggggcttgagaggctcaccgccgaggcccggcacagccggctcttctgggtccaaattgtcctgtggcggcaaggcttctactacccgctgggcatcgtccgggaggtgctgcctgaggccagcacctgggagcagggcctccgcatcctcggcctggagtacagcttgagggtgcccccgtcggaccaggccaccatcaccaaggtgctgcagaaataccacacggagcttggccgggttgccggccgccgagaggactgccgcgccttcttgaccttcactgtggacccccagggcgcctgcaacctcgatgatgccctcagtgtccgagacctgggtcccaggtgcgaggtggctgtgcacatcactgatgtggccagcttcgtgcccagggacggggtgctggacgtggaggcgcgaaggcagggcgctgcgttctatgcccccggcagggagccagtgcccatgctgccggccagcctctgccaggacgtcctcagcctcctgcctggccgggaccgcctggccatctccctgttcctcaccatggagaaggccagtggccagctgaagagcctgcgctttgcaccctccgtggtccagtctgaccgccagctgtcctacgaggaggcggaggaggtgatcaggcagcacccgggtgccggccgtgagctgccggcccgcctggactccgtggacgcctgcgtcgtggccgcgtgctacttctctcggctgctgcgccggcaccgcctgcggtccgactgcttctatgagcagccggacgaggacggcaccctgggcttccgcgcggcccacatcatggtgaaggagtacatgattcagtttaataggctcgtggctgagttcctggtgggcagcgagtgcacgcggacggtcacgcctctgcggtggcagccagcaccccgcagccagcagctcaaggccctgtgtgagaagcatggggaccgggtgcccctgtcactgcacctcggccaccacctgcacggcggcgggggcagtccccccgacacgcggctgcacctcctggcctccctctggaagcaggtccagtttgctgcccgcacccaggactacgaacagatggtggacttggtcaccacggacgacatgcacccattcctggctcctgcaggccgcgacctccgcaaggccctggagcgctcggcgttcggccgctgcgcccggggccaccagcagcagggcggccactactcgctgcaggtggactggtacacgtgggccacctcgcccatccgcaggtacctggacgtggtgttgcagcggcagatcctgctggcgctgggccatgggggctctgcctactctgccagggacatcgatgggctctgccaggccttcagcctccagcacgcacttgcccagagctatcagcggcgggcgcgcagcctgcacctggccgtgcagctcaaggcccagcctctggacaagctgggcttcgtggtggacgtggaggcgggctcccgctgcttccggctgctcttccccagcaaccgggagacgctgcctgacccctgccccgtcccctacggctccctgcagctggccgagcacccccacgccctggcaggccggccgggcctgcggctcctgtggcggcgccgtgtctactcagcgcagggatccagcccgcccctgccactgcctggcactgtgccggacccacacaccctggccgtggagacggccctgtggaagcagctgctggagctggtggagctgcagcgctggccggaggcggctgctctcatccaggagaagggcgaggcgtcccagcggcgggagctggtgcaggtgcagcggagccactgtggccatttcctggaggtggcccgggagctgggcagtggggacaccctgcaggtgcagctcggcaccagcctgcagcacggcttcctggtaccgagccctcagctctggacggtggcaccgggcttcagcctctgcctggagcacgtggagcggcccggagactgcttctcaggccgtgtgtaccgggccccgagggaccggtaccgcgacgtggatgagtacgcctgcgtgtgggaaccattctgcgccctggagtcggccaccggcgcggttgccgagaatgactccgtcacacttcagcacctgagtgtctcctgggaggcgtcacggacgccgcaggggcagctgcagggcgccttccgcctggaggccgccttcctcgaggagaactgtgccgacatcaacttcagctgctgctacctctgcatccggctcgaggggctgccggctcccacggccagcccacgccctgggcccagcagcctcggccctggcctgaatgttgaccccggcacgtatacctgggtggcccacgggcagacgcaggactgggaccaggagcgccgggcagaccggcaggaggctcccagacgggtgcacctcttcgtccaccacatgggcatggagaaggttccggaagaggtgctgaggccgggcaccctgttcaccgttgagctgctgcccaagcagcttcctgatctgtgagtggctt

SEQ ID NO: 24072 - DNA, 1812 bp, Homo sapiens
  MAP TO AC007191.1; EXPRESSED IN PLACENTA, SIGNAL = 1.6; EXPRESSED IN BRAIN, SIGNAL = 1.1; SWISSPROT HIT: P37318, EVALUE 1.30e-01; NT HIT: gi14761169, EVALUE 0.00e+00; EST_HUMAN HIT: BE880418.1, EVALUE 0.00e+00
tcacctcccctcctcccggccggcccggcccccgcctggcccattgcagggcagcacccagttgttatcgtggaggcccaggcggcagccgggagtctcgcggtcggctcgacggcagcacatccagtaggaacgtccgtaaggcaggtcatggtggtagggcttggggtgccagcggcagagcgacacgtcgcccttctcgtatctcttgcggcactgtttgcacggatcatcgcggtagagcgggtctcggctccagcgcgagtctgtggcccgcacgccaaacgcctcgatgatgcccttgaagtggtggcaggtgcacttgagggcggccagcgcgcgcgtgggcaggaagctgaagatcttgaccagcacgtgctcgggcagcagcagcatgtactgtcgcggctccagcagccgctgaatcttgaagcggatctctaggaagtcgtgcgacacgtgccggtacaagcggcacagggaggtgtccgccgtgccctcggcatcgtctgggccgggcgcagtggccggggagtcggccgggggtggctccgggggcccgtccggcccgcggttctggagaaagaagagctggcccggaggcggcggttcctccgggctgaccgtcaggcacacagtctcctccttcacgttcttggtgccgtccttgccaaagaagatgcactcatctaccacgcccgtcaccaccacgtccacgtggaagcctgacgctccgcagtcccgggcagggggcggagggggcgccgggggagtgtcctcaggcctggcgggtgccgggctgtcaccctcactggcctcatccgccctggccagcaggaactccacgttgctggggagggcatcccgcgaggggctgatgagctggtataagtcacatgtgatcttgtccttggctcgggccccaggacctgggctgccagggtaggcacaaccaggcctgcccccgcccccactgggcaggccgctgtctggtgcacggggctcccggccgttggagatgcggaaggcgatgcgcacctccccagggcctggcccgggccgctcttccttgcggaggcccttggtgggagggctgtccctctgcgcttcaaagtgggccacggcctcggctacacggctgcagtccccaccaccggaccgccgttcagatcccacccccttggccggtccaccttgctcggcggacacaaagactacaggcgctggggtggtcggtcgtgggtagctctgcagggccagggctgcccgctgttccaccagggccaccatctcggccacagagagcaggtccacgtcctcaccggctgaggcggggccctcctcagcagcaggggggccctcccggccccctgggtcaggaggagccttggtggggtcaagacagcgcctccgccgcttggccttggagctatcgctgccccagtgccccttgaccttcatggagctggcccggctgcccccaccacactggtgggccacaaagaaggccaccttctcctttgtattcccgggcttgatgacataccacgtgtccaggaggactcgaccctcatcaccagcagctgctgctgagaggagcggagccggctgggaggcagggacctcagtggccaaggcgggtggtgtgttctctgagtgggcaggcccatggtctggctcggccccgccaccaggctcagggcaggctgatggcttgagggccgcagaaggcgggcgtggctggttctgtgagtaggtgccaaagggccgggggcaccatagctggaagggcaggaggctcccacggtccat

SEQ ID NO: 24073 - DNA, 1604 bp, Homo sapiens
  MAP TO AC010130.2; EXPRESSED IN BRAIN, SIGNAL = 1.8; EXPRESSED IN HELA, SIGNAL = 0.45; EXPRESSED IN LUNG, SIGNAL = 1.4; SWISSPROT HIT: O60315, EVALUE 0.00e+00; NT HIT: gi16159039, EVALUE 0.00e+00; EST_HUMAN HIT: AI879705.1, EVALUE 0.00e+00
gtgaaaaaccttacgagtgcccaaactgcaagaaacgtttctcccattctggttcctacagttcgcacatcagcagcaagaaatgtattggtttaatctctgtaaatggccgaatgagaaacaatatcaagacgggttcttcccctaattctgtttcttcttctcctactaattcagccattacccagttaagaaacaagttggagaatggaaaaccacttagtatgtctgaacagacaggcttacttaaaattaaaacagaaccactagacttcaatgactataaagttcttatggctacacacgggtttagtggcactagtccctttatgaatggtgggcttggagccaccagccctttaggagttcatccatctgctcagagtccaatgcagcacttaggtgtagggatggaagcccctttacttgggtttcccaccatgaatagtaatttaagtgaggtacaaaaggttctacagattgtggacaatactgtttccaggcaaaaaatggactgcaaggctgaagaaatttcaaagttgaaaggttatcacatgaaggatccatgctctcaacctgaggaacaaggagttacttctcctaatattccgcctgtcggtcttccggtagtgagtcataatggtgccactaaaagtattattgactatacgttggaaaaagtcaatgaagccaaagcttgcctccagagcttgactactgactcaaggagacagatcagtaatataaagaaagagaagctacgtactttaatagatttggtcactgatgacaaaatgattgagaaccacaacatatccactccattttcatgccagttctgtaaagaaagttttcctggccccatccctttgcatcagcatgaacgttacctttgtaagatgaatgaagagatcaaggcggtcctgcagcctcatgaaaacatagtccccaacaaagccggagtttttgttgataataaagccctcctcttgtcatctgtactttctgagaaaggaatgacaagccccatcaacccatacaaggaccacatgtctgtactcaaagcatactatgctatgaacatggagcccaactccgatgaactgctgaaaatttccattgctgtgggccttcctcaggaatttgtgaaggaatggtttgaacaacgaaaagtctaccagtactcaaattccaggtccccatccctggaaagaagctccaagccgttagctcccaacagtaaccctcccacaaaagactctttattacccaggtctcctgtaaaacctatggactccataacatcaccatctatagcagaactccacaacagtgttacgaattgtgatcctcctctcaggctaacaaaaccttcccattttaccaatattaaaccagttgaaaaattggaccactccaggagtaatactccttctcccttaaatctttcctccacatcttctaaaaactcccacagtagttcatacactccaaacagcttctcttctgaggagctccaggctgagccctttagacttgtcattaccaaaacaaatgaaagaacccaaaagtattatagccacaaagaacaaaacaaaagctag

SEQ ID NO: 24074 - DNA, 627 bp, Homo sapiens
  MAP TO AC013602.2; EXPRESSED IN BRAIN, SIGNAL = 1.1; EXPRESSED IN HELA, SIGNAL = 1.7; EXPRESSED IN HEART, SIGNAL = 1.2; EXPRESSED IN FETAL LIVER, SIGNAL = 1.2; NT HIT: gi14767848, EVALUE 0.00e+00; EST_HUMAN HIT: AW968153.1, EVALUE 0.00e+00; SWISSPROT HIT: P45446, EVALUE 4.80e-02
gagagaagaggttgcagagggagaagtctgagcaggttctggataacccagaagacctgaggggtcccattcatctctctgtgctgagacagggcaaaagtccctacaagcgtggctttgatgagggggatgtacacccccaagctaagaagaagaaaattgacctgattttcaaggatgttctggaggcctcactggaatctgcgaaggtggaagcccaccagttggccctgagcacctcactggtcatcaggaaagtccccaaataccaggatgacgcctacagtcagtgtgcaacaacaatgacccatggtgtgcagaatataggccagacccagggggagggggactggaaggtcccccagggggtctccaaggagccaggccaattggaggatgaagaagaggagccttcatcattcaaggccgacagtcctgccgaggcctcccttgcatctgaccctcatgaacttcccaccacctctttttgccctaactgtattcgcctaaagaagaaggttcgggagctccaggcagaattagacatgcttaagtctgggaaacttcctgagccccccgtattgccaccacaggtactggagctcccagagttctcggaccctgcag

SEQ ID NO: 24075 - DNA, 503 bp, Homo sapiens
  MAP TO AC005224.1; EXPRESSED IN BRAIN, SIGNAL = 0.94; EXPRESSED IN FETAL LIVER, SIGNAL = 1.2; EXPRESSED IN HELA, SIGNAL = 1.5; SWISSPROT HIT: P52849, EVALUE 3.00e-14; NT HIT: gi11425459, EVALUE 0.00e+00; EST_HUMAN HIT: AW628705.1, EVALUE 0.00e+00
tagaactcgcgcagcctgcgcaccacctcgcggtcgatctcaggatgggtcctgcccttggtcttgcccaggcaatggggccggctgctgccctccgccttcttcaggcaggggaagcccttggtcttgttgaagtagaagtgcttgtccgtgatgatcctcttgaggcccaggaagtcttgcacgcggcccagctccccggccgggtcgctgatgagccgctcgccgctcacgaagagcatctggcggatggggaagtggcgcagccagtgctccaggtgcttggcgtagatgccgatctggatggcgctccacgacgtgtcgatgaggcccgctgtcctgtttttgaacgtcaagctctcgaaggtggggatgtcgggccgcttggacagcgtctgcgtgtagtccgagatggccctggtcaccgggtcccgcaccaccacgatgagcttggtgtccttggacatggccgagatgcgcgcaggggcctcccgcgtgacgaa

SEQ ID NO: 24076 - DNA, 902 bp, Homo sapiens
  MAP TO U58675.1; EXPRESSED IN BRAIN, SIGNAL = 0.81; NT HIT: U04680.1, EVALUE 0.00e+00; EST_HUMAN HIT: BG193339.1, EVALUE 5.10e+00; SWISSPROT HIT: P47883, EVALUE 0.00e+00
ccgacgtccagcagagatgtccagtagatgagtgggttcagcatggggctgatgacagtgttgaggatgccaatgcccttgtccttgtccgaagactccactgaacccagccttgtgtagctgaagacgcccgtcccatagaagatgcccaccacagtgaggtgggaactacacgtggagaaggctttctttttgccctctgcagagcggattcgcaggactgcagctgccacatgggcataggacacagtgatgaggaccaagggggccacacccatgaaagctgctgctacaaacagcaactgcccattgagatgaacactggcgcaggagagctggaagggctgtgggaggtcacagtagaagtgattgatcacattggggccacagaagttaagaggagacagggcaacagtttgggtcagtgcattggtgaaggaaaagacacatgacatgcccaccagggcttgctggattccccagctcatgcggctgctgtaggtgagggactggcagatggccagatagcggtcataggccatgatggtcagcaagaagcagtctgccccagccaggaggtggaagaagaagagctcggagaggcaggccttatagggaatgcttctgtcgttggatatgaaatggctcagcatggcagggacagtgacactgacacaccccacatctggcagggacaagttccccaggaagaagtacatggggctgtggagtttggtttccataaggatggccgccaggatgctgagggtgcctccaatggtagtgacgtaagcaagaaggaagatgacaaagaggatgggctgtagagctgcagtctctgtgaggcccagcaggacaaacttggtcacaactgaatcattccctgagttccccagatccat

SEQ ID NO: 24077 - DNA, 575 bp, Homo sapiens
  MAP TO AF129756.1; EXPRESSED IN BRAIN, SIGNAL = 0.77; EXPRESSED IN HELA, SIGNAL = 0.75; SWISSPROT HIT: P48634, EVALUE 7.00e-22; NT HIT: AF129756.1, EVALUE 0.00e+00; EST_HUMAN HIT: BI031365.1, EVALUE 0.00e+00
ctgggctggcttcgaagctgccactgctggtgctactggtactgccaccaccactcaccagagtgggagccgcagccacacctggagtaggagtagattgggcaggaggggcctgtgctggctcttcaggttctttctctggtgttggggctgatgctggaggtggagctggaggtgcagggagttctttagggactgcaggtggtggagctggggtagaaggggcagcaggtggggcagcaggctctgctttgagccgcttgtcaggtgccccaaacttttcatcgagtcgcttgagcttctcagcacaggctgcccggcgctcttcttgcatgcgccgctcctcttcttctcgccgtcgccgggcccgctccactgccagggaaatctcagatgacgactgctttcgtcgctgccgccatgcctcatcctcatcttcaggtgctgggggcttgcagggaggacccccacgatcctgtcaattggcaagacccagcagggccaggggaatcagttactatgctttctatcatctcttttacaacaaatcaactgtcgctacttgcaggatgcaa

SEQ ID NO: 24078 - DNA, 1023 bp, Homo sapiens
  MAP TO AL121997.7; EXPRESSED IN BRAIN, SIGNAL = 0.93; EXPRESSED IN HELA, SIGNAL = 1.7; EXPRESSED IN FETAL LIVER, SIGNAL = 0.97; EST_HUMAN HIT: AI114747.1, EVALUE 0.00e+00; NT HIT: gi15298936, EVALUE 0.00e+00; SWISSPROT HIT: Q99698, EVALUE 0.00e+00
agaactcaagttcacaaagatccactcaggaaaaattacatttagaaggaagtgccctgtctagtcaggtttctgcaaaagtaaatgtttttcgaaaaagcagacgacagcgtaaaattacccatcgctattctgtaagagatgcaagaaagacacagctctccacctcagattcagaagccaattcagatgaaaaaggcatagcaatgaataagcatagaaggccccatctgctgcatcattttttaacatcgtttcctaaacaagaccaccccaaagctaaacttgaccgcttagcaaccaaagaacagactcctccagatgctatggctttggaaaattccagagagattattccaagacaggggtcaaacactgacattttaagtgagccagctgccttgtctgttatcagtaacatgaacaattctccatttgacttatgtcatgttttgttatctttattagaaaaagtttgtaagtttgacgttaccttgaatcataattctcctttagcagccagtgtagtgcccacactaactgaattcctagcaggctttggggactgctgcagtctgagcgacaacttggagagtcgagtagtttctgcaggttggaccgaagaaccggtggctttgattcaaaggatgctctttcgaacagtgttgcatcttctgtcagtagatgttagtactgcagagatgatgccagaaaatcttaggaaaaatttaactgaattgcttagagcagctttaaaaattagaatatgcctagaaaagcagcctgacccttttgcaccaagacaaaagaaaacactgcaggaggttcaggaagattttgtgttttcaaagtatcgtcatagagcccttcttttacctgagcttttggaaggagttcttcagattctgatctgttgtcttcaaagtgcagcttcaaatcccttctacttcagtcaagccatggatttggttcaagaattcattcagcatcatggatttaatttatttgaaacagcagttcttc

SEQ ID NO: 24079 - DNA, 1290 bp, Homo sapiens
  MAP TO AC005764.1; EXPRESSED IN BRAIN, SIGNAL = 0.78; EXPRESSED IN HELA, SIGNAL = 0.34; EST_HUMAN HIT: BI831718.1, EVALUE 0.00e+00; NT HIT: gi6755665, EVALUE 1.00e-12; SWISSPROT HIT: Q9NVW2, EVALUE 4.00e-10
atgccgctctgccgtccggagcacttaatgcctagagccagcagggtcccagtggccgcgtcactgcctctgagccacgcggtcattccaactcaactgccctcgcgtcctggccacaggccccctgggagaccccggagatgcccaaaggcctcatgcctgccgcctccagtgggacctagcagcacacagacagcgaagcgggtgaccatggggtggccacggccgggccgagccctcgtggcagtcaaagccttgctggtcttgtcgctgctccaggtgcccgcgcaggcagtggtacgggccgtgctggaagacaactcgagctcggtggactttgcggatctgccggcgctgttcggcgtccccctggcccccgagggcatacggggctacctgatggaggtcaagccagccaacgcgtgccatcccatcgaggccccgcgactgggcaaccgctctctgggcgccatcgtgctgatccgccgctacgactgcaccttcgacctcaaggtgctgaacgcccagcgcgccggcttcgaggcggccatcgtgcacaacgtccactccgacgacctcgtgagcatgacccacgtctacgaggacttgaggggccagatcgccatcccctcagtgttcgtgagcgaggccgcctcgcaggacctgcgggtcatcctgggctgcaacaagtcggcccacgcgctgctcctgcccgacgacccaccgtgccacgacctgggctgtcaccccgtgctgaccgtgtcctgggtgctgggctgtaccctggccctggtcgtatcagccttctttgtcctgaaccacctgtggctctgggcccaggcctgctgcagccacagacggccggtgaagacgtctacctgccagaaggcccaggtccgcaccttcacgtggcacaacgacctgtgtgccatctgcctggatgagtatgaggagggcgaccaactcaagatcctgccctgctcccacacctaccactgcaaatgcattgacccctggttctcccaagccccccggcgctcctgccccgtgtgcaaacagtcggtggccgccacagaagacagctttgactccaccacctacagcttcagggacgaggacccctccctaccgggccaccggccccccatctgggccattcaagtccagctacgctcccggaggctggagctgctgggccgcgccagtccccactgccactgcagcaccacgtccctggaggcagagtataccactgtctcctcagcccctcctgaggcccctggtcagtaa

SEQ ID NO: 24080 - DNA, 615 bp, Homo sapiens
  MAP TO AF030453.1; EXPRESSED IN PLACENTA, SIGNAL = 1.5; EXPRESSED IN BRAIN, SIGNAL = 1.4; EXPRESSED IN LUNG, SIGNAL = 1.4; EXPRESSED IN FETAL LIVER, SIGNAL = 1.5; NT HIT: gi14739530, EVALUE 0.00e+00; SWISSPROT HIT: P17473, EVALUE 1.20e+00; EST_HUMAN HIT: BI114718.1, EVALUE 0.00e+00
gcgcacaagttctgccgtttcctgcgggacaacccagcttacgacacgcccgacgccggcgcctccttctcccgccacttcgccgccaacttcctggacgtcttcggcgaggaggtgcgccgcgtgctggtggctgggccgacgactcggggcgcggccgtgagcgcagaggccatggagccggagctcgcggacacctctgcactcaaggcggcgcctacggccactcgcggagctcggaggacgtgtccacgcacgcggccaccaaggcccgcgttcgcaagggcttctcgctgcgcaacatgagcctgtgcgtggtggacggcgtgcgcgacatgtggcaccggcgcgcctcgcccgagcccgacgcggcagctgccccgcgcaccgccgagccccgcgacaagtggacgcggcgcctgaggctgtcgcggacgctggctgccaaggtggagctggtggacattcaacgcgagggggcgctgcgcttcatggtggccgacgacgcggccgcgggctccgggggctcggctcagtggcagaagtgccgcctgctcctgcgcagggctgtggccgaggaacgcttccgcctggagttcttcgtgccgcccaaag

SEQ ID NO: 24081 - DNA, 574 bp, Homo sapiens
  MAP TO AL008726.1; EXPRESSED IN BRAIN, SIGNAL = 1.3; SWISSPROT HIT: P29503, EVALUE 1.30e-01; NT HIT: gi6679436, EVALUE 5.00e-29; EST_HUMAN HIT: AW515245.1, EVALUE 0.00e+00
gcgagccgctggccccgggccaggtcttcctggtcgagatcgaggagaaagagctgggctggtgcggacatctgcgtctcggtctgaccgcgctggaccccgccagtctggcccccgttcccgagttttctctgcccgatctggtcaacctgggccacacctgggtcttcgccatcacgcgccaccacaaccgcgtgccccgggagggccgcccggaggcggaggcagcggcccccagccgacctccaaccctcctcgtggaaccatatctgcgcattgagcagtttcgcattccccgggaccgcctggtgggccgcagccggccagggctctacagccatctcttggaccagctctatgagctgaacgtgctgcctccgaccgcgcgccgtagccgcctgggtgtcctcttttgcccgcgccccgatggcacggccgacatgcacatcatcatcaacggcgaggacatgggcccgagcgcccggggactgccagctgcgcagcccctctacgcggtggtggacgtgtttgcttccacaaagagcgtgcgccttgtccagctcgagtatggctg

SEQ ID NO: 24082 - DNA, 529 bp, Homo sapiens
  MAP TO U66083.1; EXPRESSED IN PLACENTA, SIGNAL = 1.5; EXPRESSED IN BRAIN, SIGNAL = 0.8; EXPRESSED IN HELA, SIGNAL = 0.33; EST_HUMAN HIT: BG288125.1, EVALUE 0.00e+00; NT HIT: gi14765533, EVALUE 0.00e+00; SWISSPROT HIT: P43362, EVALUE 3.00e-73
  unsure 6
gtgaangaggtggaccccgccggccactcctacatccttgtcactgctcttggcctctcgtgcgatagcatgctgggtgatggtcatagcatgcccaaggccgccctcctgatcattgtcctgggtgtgatcctaaccaaagacaactgcgcccctgaagaggttatctgggaagcgttgagtgtgatgggggtgtatgttgggaaggagcacatgttctacggggagcccaggaagctgctcacccaagattgggtgcaggaaaactacctggagtaccggcaggtgcccggcagtgatcctgcgcactacgagttcctgtggggttccaaggcccacgctgaaaccagctatgagaaggtcataaattatttggtcatgctcaatgcaagagagcccatctgctacccatccctttatgaagaggttttgggagaggagcaagagggagtctgagcaccagccgcagccggggccaaagtttgtggggtcagggccccatccagcagctgccctgccccatgtgaca

SEQ ID NO: 24083 - DNA, 835 bp, Homo sapiens
  MAP TO Z79996.2; EXPRESSED IN LUNG, SIGNAL =   1; EXPRESSED IN FETAL LIVER, SIGNAL = 0.98; EXPRESSED IN BRAIN, SIGNAL = 0.82; EXPRESSED IN HELA, SIGNAL = 0.86; NT HIT: gi14778515, EVALUE 0.00e+00; EST_HUMAN HIT: BF914899.1, EVALUE 0.00e+00; SWISSPROT HIT: O95236, EVALUE 8.00e-24
ggatgaggatgacgctcctctgtgtgaagacgtggagctacaagacggagatctgtcccccgaagaaaaaatatttttgagagaatttcccagattgaaagaagatctgaaagggaacattgacaagctccgtgccctcgcagacgatattgacaaaacccacaagaaattcaccaaggctaacatggtggccacctctactgctgtcatctctggagtgatgagcctcctgggtttagcccttgccccagcaacaggaggaggaagcctgctgctctccaccgctggtcaaggtttggcaacagcagctggggtcaccagcatcgtgagtggtacgttggaacgctccaaaaataaagaagcccaagcacgggcggaagacatactgcccacctacgaccaagaggacagggaggatgaggaagagaaggcagactatgtcacagctgctggaaagattatctataatcttagaaacaccttgaagtatgccaagaaaaacgtccgtgcattttggaaactcagagccaacccacgcttggccaatgctaccaagcgtcttctgaccactggccaagtctcctcccggagccgcgtgcaggtgcaaaaggcctttgcgggaacaacactggcgatgaccaaaaatgctcgcgtgctgggaggtgtgatgtccgccttctcccttggctatgacttggccactctctcaaaggaatggaagcacctgaaggaaggagcaaggacaaagtttgcggaagagttgagagccaaggccttggagctggagaggaaactcacagaactcacccagctctacaagagcttgcagcagaaa

SEQ ID NO: 24084 - DNA, 714 bp, Homo sapiens
  MAP TO AC005033.1; EXPRESSED IN LUNG, SIGNAL = 1.3; EXPRESSED IN FETAL LIVER, SIGNAL = 1.1; EXPRESSED IN PLACENTA, SIGNAL = 1.7; EXPRESSED IN BRAIN, SIGNAL = 1.2; EXPRESSED IN HELA, SIGNAL = 1.3; SWISSPROT HIT: P56945, EVALUE 2.00e-03; EST_HUMAN HIT: BI834613.1, EVALUE 0.00e+00; NT HIT: gi14738425, EVALUE 0.00e+00
ctggctgtacagggctgagttgtggcttttgatgccactgccagttgcagtaccaggttcagggaaggctgggccctggggcttgggagcaaggaggggctttgtgctccgagggggtggcacagcgtagtcatcagtggcagggttgtaggggagctcatagccctcctccttcacccgagcttggcaccaccatgcatccttgggctcccgaggcagatcataaaggccctggggagggactggggccaggccctcaggttcatcatagatgggatcctctttggggtctgtcagcttggccttcagcaactgctgctgcgcatgctcatacaagtcccaatagagaggtttcttccgttgtactccctctcctgcctgagcagacgtgctgtccaaggggtctgagtatagggagtcctgggaagggcatggagcaatgcgcagggagtctaagggctcagcatacagggctgggggactgtcgaggagctcttgggggccaggtggggaaggcaacttcccctctgccacctccccttcatgggagtcagctctgagaacatcgtgcccctgtccggcctttccctgggccttctgccggtggatggcagtctcaactgcctggaagatgtcatttccctgtgccgtctggaaggtgaaggttccagggcctgaggggcagcggcggccggcctcgaaagagaacatgac

SEQ ID NO: 24085 - DNA, 857 bp, Homo sapiens
  MAP TO AC008770.3; EXPRESSED IN LUNG, SIGNAL = 0.99; EXPRESSED IN BRAIN, SIGNAL = 0.97; EXPRESSED IN HELA, SIGNAL = 1.4; SWISSPROT HIT: P17024, EVALUE 1.00e-113; NT HIT: gi15304226, EVALUE 0.00e+00; EST_HUMAN HIT: BG675741.1, EVALUE 0.00e+00
agaatgccctctggagaaagaccttataaatgtagtatatgtgagaaaggcttttattctgccaagtcatttcaaacacatgaaaaaactcacactggagagaaaccctatgaatgcaaccaatgtggtaaagccttcagatgttgcaattcccttcgatatcatgaaaggactcacactggagagaaaccctatgagtgtaagcaatgtgggaaagccttcagatctgcctcacaccttcgaatgcatgaaaggactcacactggagagaaaccctatgagtgtaagcaatgtgggaaagccttcagttgtgcctcaaaccttcgaaagcatggtaggactcacactggagagaaaccctatgagtgtaagcaatgtgggaaagccttcagatctgcctcaaaccttcagatgcatgaaaggactcacactggagagaaaccctatgaatgtaaggaatgcgaaaaagcattctgtaaattctcttcttttcaaatacatgaaaggaagcacagaggagagaagccctatgaatgtaagcattgtgggaatggattcacatctgccaagattcttcaaatacatgcaagaacacacattggagagaaacactatgaatgtaaggaatgcggaaaagcattcaattatttttcttccttgcatatacacgcaaggactcatatgggagagaagccatatgaatgtaaggattgtgggaaagcattcagctagcctggttccttttatggacatgaatagactcacactggaaggaagcactatgaatgcaagcaatgtggcaaaactttcacattttccagttcttttcgatatcatgaaaggactcacactgggga

SEQ ID NO: 24086 - DNA, 937 bp, Homo sapiens
  MAP TO AL137790.1; EXPRESSED IN BRAIN, SIGNAL = 0.96; EXPRESSED IN HELA, SIGNAL =   1; SWISSPROT HIT: Q03721, EVALUE 0.00e+00; NT HIT: gi14739513, EVALUE 0.00e+00; EST_HUMAN HIT: BE797730.1, EVALUE 0.00e+00
ctgcccgtttcctctcgatcataccctcttcccgggcaggggggctggtatcactgcaggtgctgtcccggggggaagtctcctcagacttgcagtacatgggtgactccagctgcgccggccgtggcacgtgcttcttccgtttcttgggcagcttctgcttggccatggccagggagtagtacatgccgaagttgttgacgatgacaggcaccggcatggcgatggtgagcacgccagccagtgcacacagtgcccctaccagcatgcctgaccacgtcttggggtacatgtctccgtagcccagtgtcgtcatggtgaccacagcccaccagaagccaatggggatgttcttgaagtcggtgtggtcattaccccgagggtcggagggcctggccccaatgcgctcagcgtagtagatcatggtggcaaagatgagcacacccagggccaggaagatgataagcagcaggaactcattggtgctggccctcagggtgtggcccagcacgcgtagccccacgaagtggcgtgtgagcttgaagatacgcaggatgcgcacgaagcgcaccacgcgcaggaagcccagcacgtcgcgggccgccttggatgacaggccgctcagccccacctccaggtagaagggcaggatggccacaaagtcgatgatgttgagcaggttcttgacgaagtccagcgtgtcggggcagcacacgatgcgcaccaggaactccagtgtgaaccacagcacacatacgccctcgatgtaggtcaggatgggctctgtctctacctcccgccggaagtgcacgctggtgatgttccctacgcggaggatctctgtcacgttgcggtcgatattaaaggcctcatgggtctccaggcagaaagtggtgatggagaccaggatgaagaagagagaggcaaaggccactac

SEQ ID NO: 24087 - DNA, 1359 bp, Homo sapiens
  MAP TO AL117376.2; EXPRESSED IN LUNG, SIGNAL = 2.8; EXPRESSED IN HEART, SIGNAL = 2.4; EXPRESSED IN BRAIN, SIGNAL = 2.8; EXPRESSED IN HELA, SIGNAL = 1.4; EST_HUMAN HIT: AI738593.1, EVALUE 0.00e+00; SWISSPROT HIT: Q13439, EVALUE 2.00e-06; NT HIT: gi14786584, EVALUE 0.00e+00
ctctcctggtccttctccagggcttcctgctcagcctccaggctagcctggagccctgactgctctctgctgccactgttcagactggcaagtttctgcctctgctcttcaatctccatgcccagggtggagtgcctctgcagcgcagaatgtctcctctccagcctggccagggcccgctccagcgcctctctctgctgcttctctctggactccaaaatctccttttcctttttcctcactttttcctcctgacgtgcaatgttggcagtgaattcaaaggtggcttggagcttttgcagctggtttgcattggcctggtactgtgcaagctgttcttctttttcttccatttccttttctacttgataaagagtgttgtctaagctgagagggcctctgtcaagaatttcaaatgctctctgcttttcttccaacagagttggcaagtgattctgcaggaggtactgtagctggcgttctttatattgcagcctgtactccactggctttattttctcgaaatcttgaggcacttccgtgacatctgtgacactctcatcatgtttttccaacaatctagattctttgtcatgttcacattttaaacactctaggatctcctgttcttcttggacttcttttttcaggatgtctttctgctgaaccaggtccttctccaagttcactagcttgacaagctgccttctcttgaattcgaagaaacgcagttgagccttttctaactcctcgccatcttcatcccctccggcacgagcctccttcacccgcaggagggattcccgaatgccttccaggtccctcttctcctcttccacccactgtacctccccacgccgcaggagctggatcatctcctgcttctctcggagctgctcttccagatgggccacgagcatgacctgctccttctcctgctcctctagtctctttttttccagttcaagcttggcatactgttcatctttttccttttggagctggtccagttcttgaaatatctgaaacttctcagccttctcgttgttgttgagttctttgagtcgttggagttcttcttggacgcggagaaaggtctcttcttcttgtctcttcttctgcagctcgatttcctgctgttccctcagcctctcctcttcaaatttttccttctccgcaagtaaatcctttagcttgttctcgatgtggaagctgcggcgtttgaggctctcctcctgcttgcgaatctggagctgcacgatttctgtctccttgcgctgggtctccacctcctgctgcatccgctccagttcagccttgtctgatttctgcttttcctccatttcttctatgagtttc

SEQ ID NO: 24088 - DNA, 960 bp, Homo sapiens
  MAP TO AC002511.1; EXPRESSED IN HELA, SIGNAL = 2.7; EXPRESSED IN BRAIN, SIGNAL = 1.7; EXPRESSED IN HEART, SIGNAL = 1.5; SWISSPROT HIT: O15529, EVALUE 0.00e+00; NT HIT: AF024689.1, EVALUE 0.00e+00; EST_HUMAN HIT: AA860692.1, EVALUE 2.20e-02
tggccaccaccatggatacaggccccgaccagtcctacttctccggcaatcactggttcgtcttctcggtgtaccttctcactttcctggtggggctccccctcaacctgctggccctggtggtcttcgtgggcaagctgcggtgccgcccggtggccgtggacgtgctcctgctcaacctgaccgcctcggacctgctcctgctgctgttcctgcctttccgcatggtggaggcagccaatggcatgcactggcccctgcccttcatcctctgcccactctctggattcatcttcttcaccaccatctatctcaccgccctcttcctggcagctgtgagcattgaacgcttcctgagtgtggcccacccactgtggtacaagacccggccgaggctggggcaggcaggtctggtgagtgtggcctgctggctgttggcctctgctcactgcagcgtggtctacgtcatagaattctcaggggacatctcccacagccagggcaccaatgggacctgctacctggagttctggaaggaccagctagccatcctcctgcccgtgcggctggagatggctgtggtcctctttgtggtcccgctgatcatcaccagctactgctacagccgcctggtgtggatcctcggcagagggggcagccaccgccggcagaggagggtggcggggctggtggcggccacgctgctcaacttccttgtctgctttgggccctacaacgtgtcccatgtcgtgggctatatctgcggtgaaagcccggtgtggaggatctacgtgacgcttctcagcaccctgaactcctgtgtcgacccctttgtctactacttctcctcctccgggttccaagccgactttcatgagctgctgaggaggttgtgtgggctctggggccagtggcagcaggagagcagcatggagctgaaggagcagaagggaggggagg

SEQ ID NO: 24089 - DNA, 555 bp, Homo sapiens
  MAP TO AC010198.8; EXPRESSED IN BRAIN, SIGNAL = 0.9; EXPRESSED IN HELA, SIGNAL = 1.4; EXPRESSED IN LUNG, SIGNAL = 0.93; EST_HUMAN HIT: AL536436.1, EVALUE 0.00e+00; SWISSPROT HIT: P18490, EVALUE 3.30e-01; NT HIT: gi15305172, EVALUE 0.00e+00
tttcttaacagacgctatatgacagaagtagattattcaaacaaacaaggcgaagagcaaccttgggaagcagattatgctagaaaaccaaatctcccaaaacgttgggatatgcttactgaaccagatggtcaagagaagaaacaggagtcctttaagtcctgggaggcttctggtaagcaccaggaggtatccaagcctgcagtttccttagaacagaggaaacaagacacctcaaaactcaggtctactctgccggaagagcagaagaagcaggagatctccaaatccaagccatctcctagccagtggaagcaagatacacctaaatccaaagcagggtatgttcaagaggaacaaaagaaacaggagacaccaaagctgtggccagttcagctgcagaaagaacaagatccaaagaagcaaactccaaagtcttggacaccttccatgcagagcgaacagaacaccaccaagtcatggaccactcccatgtgtgaagaacaggattcaaaacagccagagactccaaaatcctgggaaaacaatgttgag

SEQ ID NO: 24090 - DNA, 812 bp, Homo sapiens
  MAP TO AC004472.1; EXPRESSED IN BRAIN, SIGNAL = 0.97; EXPRESSED IN LUNG, SIGNAL = 0.94; SWISSPROT HIT: P11067, EVALUE 5.80e-01; NT HIT: gi9910491, EVALUE 1.00e-106; EST_HUMAN HIT: BE710056.1, EVALUE 0.00e+00
atttccacagggagtcttagaggactccttgtctctcctctccatgaaccctgggaaccaacaggagggatcaatttgcttggctatggcaggtaagagagaggacaccaagaagaccttcctagttgtgtggggcatgggaccctctgtcaagctcaggaacatgaggagcaacacctccttgaaaacaagaggggccgaactcacatcactattgtctttaagtgaatcagagctgagatatttaccaggggtggtgacgggtatcccagcagcaagcagatgtaggagaaggaagctctgcagaaacagaagcaggaacacaaggctgatgcgctccgcatgcaacagcagaagtgggaaggccaacagggtgagggctgtgaccatagcagctgagtagacactccccaactgataagcagccacagtcaggggaccctgagatttggtcctctctaaccggccccggaactcctcctgcatgtgtcggtagatttgagggaccacataatccaagtcagcttgagaagtgggggggcctgagaagggagtgaggacagtcctggtccttggagcgcctgccccagccttcaccagcactgtcacaggcttccagagcagcagcgcgagccctgaagcagccagccctgctacagcccgaggcagcaccatggatgccccagagaccaggacccggagacgggggggagcctcatctgcccccgacgccaatgcccagtaggcagcagtacccaatgccattaggggcagtccccagcgcacaaagagcatgggtggctcggggctct

SEQ ID NO: 24091 - DNA, 2329 bp, Homo sapiens
  MAP TO AC005028.1; EXPRESSED IN HEART, SIGNAL = 1.2; EXPRESSED IN LUNG, SIGNAL = 1.2; EXPRESSED IN FETAL LIVER, SIGNAL = 1.1; EXPRESSED IN BRAIN, SIGNAL =   1; EXPRESSED IN HELA, SIGNAL = 0.58; SWISSPROT HIT: P10071, EVALUE 0.00e+00; NT HIT: gi13628940, EVALUE 0.00e+00; EST_HUMAN HIT: AU123517.1, EVALUE 0.00e+00
gcacacagtccaacaacacctgcagcttgggtgggcccatgacgcttctcccgggcagaagcgacctctctggggtggacgtcactatgctgaacatgctcaacagaagggacagcagcgccagcaccatcagctcggcctacctgagcagccgccgctcctcagggatctcgccctgcttctccagccgccgctccagcgaggcgtcacaggccgagggccggccgcagaacgtgagcgtggccgactcctacgaccccatctccaccgacgcctcgcgccgctccagcgaagccagccagagcgacggcctgcccagcctgctcagcctcacgcccgcccagcagtaccgcctcaaggccaagtacgcggctgccacaggagggccgccgccgacgcccctgcccaacatggagaggatgagcctgaagacgcgcctggcgctgctcggggatgccctcgagcctggcgtggccctgcctccagttcatgccccgaggaggtgcagcgacgggggagcccacggctacgggcggcgccacctgcagccgcacgatgcgccgggccacggcgtgaggagggccagcgacccggtgcggacaggctccgagggcctggccctgcctcgtgtgccgcgcttcagcagcctcagcagctgcaaccccccggcgatggccacgtccgcggagaagcgcagtctcgtgcttcagaattacacgcggcccgagggcggccagtcccgaaacttccactcgtccccctgtcctcccagcatcaccgagaacgtcaccctggagtccctgaccatggacgctgatgccaacctgaacgatgaggatttcctgccggacgacgtggtgcagtatttaaattcccagaaccaagcagggtacgagcagcacttccccagcgccctcccggacgacagcaaagtgccccacgggcccggtgactttgacgcgcccgggctgccagacagccacgctggccagcagttccatgccctcgagcagccctgccccgagggcagcaaaaccgacctgcccattcagtggaacgaagtcagctccggaagcgccgacctgtcctcctccaagctcaagtgtgggccgcggcccgctgtgccgcagactcgcgcctttgggttctgcaacggcatggtcgtccacccgcagaaccccttgaggagcgggcctgctgggggctatcagaccctcggggagaacagcaacccctacggtggcccagagcacttgatgctccacaacagccccggaagtggcaccagtggaaacgccttccatgaacagccctgtaaggccccgcagtatgggaactgtctcaacaggcagccagtggcccctggtgcactcgacggtgcctgtggtgccgggattcaagcctcaaagctgaagagcacccccatgcaagggagcgggggccagctgaatttcggcctgccggtagcgccaaatgagtcagctggcagcatggtgaatggcatgcagaaccaggacccagtgggacaggggtacctggctcaccagctcctcggcgacagcatgcagcacccgggggcaggccgccccggtcagcagatgcttgggcagattagtgctacctcacacatcaacatctaccaagggccagagagctgcctgccaggggctcacggcatgggcagccagccgtcaagcttggcagttgtcaggggctaccagccatgtgccagctttgggggcagcaggcgccaggctatgccgagggacagccttgctctgcagtcaggacagctcagtgacacaagtcagacctgcagggtgaatggtatcaagatggagatgaaagggcagccccatccgctgtgctctaatctgcagaattactctggtcagttctatgaccaaaccgtgggcttcagtcagcaagacacgaaagctggttcattctctatttcagacgccagctgcctgctacaggggaccagcgccaaaaactctgagttactttccccaggtgctaatcaggtgacaagcacagtggacagcctcgacagccatgacctggaaggggtacagattgacttcgatgccatcatagacgatggggaccactccagcctgatgtcgggggccctgagcccaagtatcattcagaacctttcccatagctcctcccgcctcaccacgcctcgggcgtccctcccattcccagcgctgtccatgagcaccaccaacatggctatcggggacatgagttctttgctgacctccctagcggaagaaagcaaattccttgcagttatgcaataggctttaggaaaaaaaga

SEQ ID NO: 24092 - DNA, 1343 bp, Homo sapiens
  MAP TO AP000348.1; EXPRESSED IN HELA, SIGNAL = 1.2; EXPRESSED IN BRAIN, SIGNAL = 0.93; EXPRESSED IN FETAL LIVER, SIGNAL = 1.1; SWISSPROT HIT: P52742, EVALUE 0.00e+00; NT HIT: X60077.1, EVALUE 0.00e+00; EST_HUMAN HIT: BF908482.1, EVALUE 0.00e+00
ctatagcttctccccagaatgaatcttctgatggcgaatcaggtgcgagctcccccggaaggacttgccgcacagattgcacacgtagggcttctctctggtgtgggttttatagtgctcaatgagggctgaccggtgccggaaggctttgccacactcgcaggtgtagggcttcttgccggtgtggattctctggtgctggatcagcgcagagctgtggcaaaaggccttgccacactgacagcactcgtagggcttctcaccggtgtggatgcgctggtgctcaatgagggaggagctctggctgaaggctttcccacacttctggcatttgtagggcttctcgccagtgtgggtcttgcggtgctcaatgaggttggagctctggctgaaggccttcccgcactcatcgcatttgtatggtttcttcccagtgtggatccgctggtgtcggatgaggtgtgacctgtgacaaaaggctttcccacagagatcgcactcgtgaggtttctttagggtgtggatcttccgatgctggctcaggcctgagctctggttgaaggatttcccacattccttacactgataaggtctctctcctgtatgaattctctcgtgttttctgaggctggagctccggctgaaatctttcccgcattccctgcactcgtagggcctctttccggtgtggatcttttggtgttgcgtgagggctgagctctggcggaaggccttcccacactcccggcactcgtagggcttctccccggtgtggatgatctggtgcctgagcaggtgggagctctggctgaaggccttcccgcactcacagcactcatagggcttctccccagtgtggatcaccaggtgtcggagcaggtgcgagctctggctgaaggccttcccacactctcgacacgcatagggcttggctggttgtggggttctgtgaggtgcgttaggtcctgagtcccctctgtctgtttctgcacaatcgcatggactgggctcttcactgtggattatctgacacatgctgaggtcggatttctggaggaaggtttgtccgaagagctcatcatcctggggtctggttcctggggggatactttgatgctgaacagggcttgagcacaaactgaaattcccctcgtaatcatcattttcttcgtcctgctcaccaagagggatctccttgtagatcacagccatttgctccaaacctctttcctgaagaaaagggtcccccaggtcctcccctgggaaaagcccttgttgtgactctaacctgttctcaaatgcaaaggtctcaccaaactttgttgctgggggaacctccattg

SEQ ID NO: 24093 - DNA, 587 bp, Homo sapiens
  MAP TO AP000123.1; EXPRESSED IN PLACENTA, SIGNAL = 1.6; EXPRESSED IN BRAIN, SIGNAL = 1.3; EXPRESSED IN HELA, SIGNAL = 2.3; EXPRESSED IN LUNG, SIGNAL = 1.4; EXPRESSED IN HEART, SIGNAL = 1.6; NT HIT: AF288992.1, EVALUE 6.00e-07; EST_HUMAN HIT: AI741597.1, EVALUE 4.00e-06; SWISSPROT HIT: P23647, EVALUE 5.00e-01
ctgcagcagaaatcctttacacttgaactgtaacatcagttcattcctgggtctccagcctgtcaacccaccctggagattttggacttgccagtcactataattgtatgagccaatttcttaaaacaaacttttccctatatacatatacatcctattggttctatttctctggagaacgctgtagtcaataagcatttcataaacataatgttgaacaaaagaaacaagacacaaatgatgaaaaacatgcttccacttatataaagttccagacaagcaaaactcctctatggtgatggaggtcagcatggtgggtaacttggtgggccatggtggtgactggtgagtaatagctggggagggacatgaaggatgcttccaggtgtgctggcattgttctatttcttgacctgatatgggtgtgtttattttgtaaaatttcagcaaggttttgatttgtgtatttttctgtatgtatgttatacttcaattagaaaagtatagctttttattgattatacctcatagccattaggatggctagtatcaaaaacagaaaataacaagagttggcaaggaggtag

SEQ ID NO: 24094 - DNA, 577 bp, Homo sapiens
  MAP TO AC011465.4; EXPRESSED IN LUNG, SIGNAL = 1.1; EXPRESSED IN HELA, SIGNAL = 0.99; EXPRESSED IN BRAIN, SIGNAL = 0.83; NT HIT: AB011117.1, EVALUE 0.00e+00; SWISSPROT HIT: P46062, EVALUE 4.00e-34; EST_HUMAN HIT: T67226.1, EVALUE 0.00e+00
caaagacgctcctcctttcggcccccccatccccagtggaaccacattccgcaaatccgacgtcttcagagacttcttgctggccaaggtgattaacgctgagaacgccgcgcacaagtccgacaagttccacaccatggccaccaggacccgccaggagtatctcaaggacctggccgaaaactgtgtctccaacacccccatcgactccaccggcaaattcaacctcatctccctgacctccaagaagaaggaaaagacaaaagcacgggctggcgctgagcagcacagtgcaggggccatcgcctggagggtggtggcccaggactacgcccagggggtggaaatcgactgcattttgggaatttccaatgagtttgtggtgctcctggacttacgcaccaaggaggtggtgttcaactgctactgcggggatgtcattggctggactccagactcctccacactcaaaatcttctatggacgaggagaccacatcttcctacaggcgacagagggttctgtggaggacataagggagatagtgcagagactgaaggtaagggagagagcccgg

SEQ ID NO: 24095 - DNA, 1078 bp, Homo sapiens
  MAP TO AC008543.4; EXPRESSED IN FETAL LIVER, SIGNAL = 2.4; EXPRESSED IN HEART, SIGNAL = 1.9; EXPRESSED IN BRAIN, SIGNAL = 2.9; EXPRESSED IN HELA, SIGNAL = 1.5; NT HIT: gi16176192, EVALUE 2.00e-42; SWISSPROT HIT: P17024, EVALUE 0.00e+00; EST_HUMAN HIT: BG570853.1, EVALUE 0.00e+00
aaatcatatggcagagagactctgtgaatgtaaagatggtcaatgtggagaaactttcagcctgattccagatggtataatgaacaagaacactcttcctggggtaaaaccatgtgaaagcagtgtgtgtggagaaggcaacgtggatcattcatctctgaattgctacatcagagctgacactggacacaaaccgtatgagtgtcaggaacatggagagaagccacataaatgtaagcagtgtgtaaaaaccttcagctgcctccactccttccaaacacatgaaaagcctcacacaggagagaaaccctatgattgtaaggaatgggaaaaaaccttcgattctccccaaaccgttcgaagatacagggtagtgcacagtggagatggaccttataaatgtaagttttgtgggaaagcctttgataatctcagtttatatctcacacatgaaagatctcatactggacagaagccatatgaatgtaatgaatgtgggaaagcctttggttttcccagctcctttcatagacatgaaagaatgcacaccggggagaaaccatatgaatgtaagcaatgtgggaaaacctttagttgttccagttccattaaaaaacatgaaagaatccacactggagagaagccctatgaatgcaagcaatgtgggaaagccttcgcttcttccaattcctttcagtatcatgaaaggactcacactggagagaaaccctatgaatgtaagcaatgtgggaaagcctttaattgttccagttcccttagaaaacatgcaagaattcacactggagagaaaccctatatatgtaaacaatgtggtaaagcttttagatttcccagttctattaaaaatcatgaaaagactcacactggagagaagccctatgaatgtcaggaatgtgggaaagccttcagatattccagttcacttcgagtacataaaagaattcacactggagagaagccgtatgaatgtgaggactgtgggaaagccttcagtcatcccacgacctttcatagacataaaattacccacactgcagagaaaccttatgaatgtcag

SEQ ID NO: 24096 - DNA, 525 bp, Homo sapiens
  MAP TO AC011899.2; EXPRESSED IN BRAIN, SIGNAL =   1; EXPRESSED IN HELA, SIGNAL = 1.3; SWISSPROT HIT: P54681, EVALUE 7.00e-06
aaacagtggatgcctgcagtctcacaggctgggtttggagaccttgcttggaggtgtctgcagggccttgaaggggacaccgacccttcctgactcccagcctctgcgttgccagcagccctcggcccacagacacagcgcttccctcctgcctccgagccacgcagacggcttccctctgcatgccggagtctgtcctctccgtcgcagggacacggatgcttcgaggactctgtgtgccggagtctgtcctccccatcacagggacactgctgcttcgaggactctgtgtgccggagtctgtcctccccatcacagggacactgctgcttcgaggactctgtgtgccggagtctgtcctccccatcacagggacactgctgcttcgaggactctgtgtgccggagtctgtcctccccatcacagggacactgctgcttcgaggactctgtgtgccggagtctgtcctccccatcacagggacactgctgcttcgaggactctgtgtgctggagtttgtccttc

SEQ ID NO: 24097 - DNA, 750 bp, Homo sapiens
  MAP TO AL135838.2; EXPRESSED IN HEART, SIGNAL = 2.3; EXPRESSED IN PLACENTA, SIGNAL = 1.6; EXPRESSED IN BRAIN, SIGNAL = 3.2; EXPRESSED IN HELA, SIGNAL = 0.69; SWISSPROT HIT: O43772, EVALUE 7.00e-26; EST_HUMAN HIT: BI824048.1, EVALUE 0.00e+00
gtgctgggcctgtacaagggcctgggctcgccgctcatggggctcaccttcatcaacgcgctggtgttcggggtgcagggcaacaccctccgggccctgggccacgactcgcccctcaaccagttcctggcaggtgcggcggcgggcgccatccagtgcgtcatctgctgccccatggagctggccaagacgcggctgcagctgcaggacgcgggcccagcgcgcacctacaagggctcgctggactgcctcgcgcagatctacgggcacgagggtctgcgtggcgtcaaccggggcatggtgtccacgttgctgcgtgagacgcccagcttcggcgtctacttcctcacctatgacgctctcacgcgggcgctgggctgcgagccgggcgaccgcctgctggtgcccaagctgctgttggcgggcggtacgtcaggcatcgtgtcctggctctctacctatcctgtggacgtggtcaagtcgcggctgcaggcggacggactgcggggcgccccgcgctaccgcggcatcctggactgcgtgcaccagagctaccgcgccgagggctggcgcgtcttcacacgggggctggcgtccacgctgctgcgcgccttccccgtcaacgctgccaccttcgccaccgtcacggtggtgctcacctacgcgcgcggcgaggaggccgggcccgagggcgaggctgtgcccgccgcccctgcggggcctgccctggcgcagccctccagcctgtga

SEQ ID NO: 24098 - DNA, 781 bp, Homo sapiens
  MAP TO AF107256.1; EXPRESSED IN HELA, SIGNAL = 1.5; EXPRESSED IN BRAIN, SIGNAL = 2.2; SWISSPROT HIT: O15197, EVALUE 0.00e+00; EST_HUMAN HIT: BI518694.1, EVALUE 0.00e+00; NT HIT: gi14743786, EVALUE 0.00e+00
tgggacgaggtgagtgttctggacgaccagcgacgcctgactcggacctttgaggcatgtcatgtggcaggggcccctccaggcaccgggcaggacaattggttgcagacacactttgtggagcggcgcggggcccagagggcgcacattcgactccacttctctgtgcgggcatgctccagcctgggtgtgagcggcggcacctgccgggagaccttcaccctttactaccgtcaggctgaggagcccgacagccctgacagcgtttcctcctggcacctcaaacgctggaccaaggtggacacaattgcagcagacgagagctttccctcctcctcctcctcctcctcctcttcttcctctgcagcgtgggctgtgggaccccacggggctgggcagcgggctggactgcaactgaacgtcaaagagcggagctttgggcctctcacccaacgcggcttctacgtggccttccaggacacgggggcctgcctggccctggtcgctgtcaggctcttctcctacacctgccctgccgtgctccgatcctttgcttcctttccagagacgcaggccagtggggctgggggggcctccctggtggcagctgtgggcacctgtgtggctcatgcagagccagaggaggatggagtagggggccaggcaggaggcagcccccccaggctgcactgcaacggggagggcaagtggatggtagctgtcgggggctgccgctgccagcctggataccaaccagcacgaggagacaaggcctgccaag

SEQ ID NO: 24099 - DNA, 583 bp, Homo sapiens
  MAP TO AC010209.13; EXPRESSED IN HELA, SIGNAL = 0.37; EXPRESSED IN BRAIN, SIGNAL = 0.78; EXPRESSED IN FETAL LIVER, SIGNAL = 1.1; NT HIT: AJ271736.1, EVALUE 0.00e+00; EST_HUMAN HIT: AW867015.1, EVALUE 8.00e-35; SWISSPROT HIT: P21416, EVALUE 5.00e-28
ctttatctgaggtcttttgttccaaatcagcttgcttttccttcagctggggacacttatctttccaatgtcctatttccttacagtaggtgcattggttacattgcaagcatggacgattagactgggtattcttcccggaacccccctttccctgtcctttcaggggaattcccctaatggccgcagccagtaagtcggcattttgcctagcctggcattggccttccttatggctttctctgtggcttgttgcatctccattcacaaacccttgattggctatttccagtaactgtgaggtattcatacctgcaaacccagcctgtttctgcaattttctcctgatatcttccgtgctttgactgactaaggccatgttaatcatgcgctgattttcagggctatctggatcaaaaggagtgtacatacggtaaacctcacatagtctttcatagaattgtgcaggactcttctcttttccttggatgacctcagaaaccttatttacatttgtagccttttgagcccctttctttagaccttctattaatgcctcacggtgccatcttagcctctccat

SEQ ID NO: 24100 - DNA, 890 bp, Homo sapiens
  MAP TO AC005538.2; EXPRESSED IN HELA, SIGNAL = 1.3; EXPRESSED IN BRAIN, SIGNAL = 0.86; SWISSPROT HIT: P50536, EVALUE 1.00e-05; NT HIT: gi14764477, EVALUE 0.00e+00; EST_HUMAN HIT: BG481237.1, EVALUE 0.00e+00
gcctctccatcgaagaaaaaaatgaaaatgatgaaaactcattaagcagttcctctgacagtagtgaagacaaggatgaaaaaataagtgaagaatgtgatattgaagaaaagactgaagtgaaagaagaaccggagcttcaaacaaaaagggaaatggaagaaagaacagtaactctagaaatccctgaagttctgaagaggcagctggaggatgattgttactacattaatcggaggaaacggttagtgcaacttccatgccacaccaacatcataacgattttggaatcctatgtgaagcattttgctatcagtgcagccttttcagccaatgagaggcctcgtcaccatcacgctatgccacatgccagcatgaacgtgccttatatcccagcagaaaagaatattgacctttgtaaggagatggtggatggattaagaataacctttgattacactctcccgttggttttactctatccctatgaacaagctcagtataaaaaggtgactgcatctaaggtttttcttgcaattaaggaaagtgccacaaatactaataggagccaggagaagctctctcccagcttacgtttgttgaatccatccaggccgcagtctacagagagtcagtcgaccagcggtgaaccagccacccctaaaaggcgcaaagccgagccgcaagcagtgcagtctctgaggcggtcctcgccccacaccgccaactgtgacaggctttctaagagcagcacctcacctcagcccaagcgctggcagcaggacatgtccaccagtgtgcccaagctgttcctgcacctggaaaagaagacacctgtgcatagcagatcatcttcacctactctgactcctagccaggaagggagtcct

SEQ ID NO: 24101 - DNA, 453 bp, Homo sapiens
  MAP TO AC010876.1; EXPRESSED IN BRAIN, SIGNAL = 0.9; EXPRESSED IN HELA, SIGNAL = 0.85; EXPRESSED IN LUNG, SIGNAL = 0.92; NT HIT: gi11545921, EVALUE 0.00e+00; EST_HUMAN HIT: AI906351.1, EVALUE 0.00e+00; SWISSPROT HIT: P35446, EVALUE 7.90e-01
ccggtttctgtcttcaattgtcaacagttcctcctccatgcacttatccaagacgtctctaactagaagcttgtccaccagagtgggctgaaggaggttcagcagttggagatattcatcatgagcgttctcaaacgatggagagggcaagtccgtgagctcagggttcatgtagcgggcggccagagggctgccggttctccggagggcctccacgaattcccgagtccaaccaaggtgccagactcccttctccaaggtgctcagcagcagttcaactgcctgcatgttcccggaggtggcgactgtcctctgaatctgctccttcacctctgcaggcagaaaggtcaggtagtccagcacaggctccacctggatgtacattttcaccctggccctgaagcacgagatgagatagcggaaattctcgtctgtggaatacccattcgacat

SEQ ID NO: 24102 - DNA, 550 bp, Homo sapiens
  MAP TO AC006115.1; EXPRESSED IN HELA, SIGNAL = 3.1; EXPRESSED IN HEART, SIGNAL = 1.7; EXPRESSED IN BRAIN, SIGNAL = 1.5; EXPRESSED IN FETAL LIVER, SIGNAL = 1.7; EXPRESSED IN LUNG, SIGNAL = 1.7; NT HIT: gi7657696, EVALUE 0.00e+00; EST_HUMAN HIT: AW086429.1, EVALUE 2.00e-38; SWISSPROT HIT: Q99676, EVALUE 9.00e-25
agatgttgaagaagatgcacattctggagaaaagctttgccgcactgaaaacattcaaagtagtcctcctgactgtgaattcttacacgttcacagagattcgcacactggacggaaggctttctaccttcattgcagccagaagtcttcctaccagaatgggtcttctgatgtctgttgaggtgtggcatgagatagaaggcttcagcacactgtttacattcatagggtttcttcccagtatggatccgttcgtgtctcctaagggctacttgcgtactaaaggttcgtttgcaaaattcacatctgttgtgtttgttctcttgggatgctgactggggactcgtacatattccaggagcagtgccttcctggggatcctttcctagaggatcctttgattgtttactaagattagagcttctctcaaattcatcactgccatagcttctttccggagtgagggtcttggggtcattcattgttataggagtcaaaagtttctcttggttgccctggtgtggttccaatggatcatcatgagactctc

SEQ ID NO: 24103 - DNA, 556 bp, Homo sapiens
  MAP TO AC008468.4; EXPRESSED IN BRAIN, SIGNAL = 1.1; EXPRESSED IN HELA, SIGNAL = 0.33; EST_HUMAN HIT: BG023736.1, EVALUE 3.00e-77; SWISSPROT HIT: Q9UN75, EVALUE 1.00e-103; NT HIT: gi14861872, EVALUE 0.00e+00
gagtgtccgtggaggtggccgacgtgaacgacaatgcgcctgcgttcgcgcagcccgagtacacagtgttcgtgaaggagaacaacccgccgggctgccacatcttcacggtgtcggcatgggacgcggacgcgcagaagaacgcgctggtgtcctactcgctggtggagcggcgggtgggcgagcacgcactgtcgagctacgtgtcggtgcacgcggagagcggcaaggtgtacgcgctgcagccgctagaccacgaggagctggagctgctgcagttccaggtgagcgcgcgcgacgccggcgtgccgcctctgggcagcaacgtgacgctgcaggtgttcgtgctggacgagaacgacaacgcgccggcactgctggcgactccggctggcagcgcaggaggcgcagttagcgagttggtaccgcggtcggtgggtgcgggccacgtggtggcgaaagtgcgcgcggtggacgctgactccggctataacgcttggctgtcctacgagttgcaaccggcggcggtcggcgcgcacatcccgttccacgtggg

SEQ ID NO: 24104 - DNA, 1470 bp, Homo sapiens
  MAP TO AC004913.2; EXPRESSED IN BRAIN, SIGNAL = 0.86; EXPRESSED IN HELA, SIGNAL = 0.79; EST_HUMAN HIT: AL544128.1, EVALUE 0.00e+00; SWISSPROT HIT: O15226, EVALUE 0.00e+00; NT HIT: gi14764865, EVALUE 0.00e+00
atttgcttgaggcataacaagctcgtaatggcccacttggccttcctgtttgagctgatctagtaggtcttccttccgtctttttctacctaccactaggtacctatcatggcccaccccatgagacttactcttaagaccatacttctgggcaatctgatgtatttgcttccgttcatcattagtcagctctctagagaaagtcaaatctgtgtggctctcggagcgggcgtagtttctgatgatctgttcaatatctctcttggcaattttattcaccctctctacatccagaccaagcccttcccgcttatgctgctctttcactgagataggctcccgtatgccctcaccagatttacctaaaccaccaccagtccaacccatctttctcagcagctgatttccaatattatcttctttgatttgctgtttgtaagcctcctctgctgagcggccctgaatttcatttcttgaaatcacatcttcaacagctcctttcttcaagttgttaatgacagttggctgggtctttttgagggttttcacagcttccccagcagcttcatatttgacagttttcttcaccccaactgcttctgcaattacttcactctctagaatcactttgcatttccagcggaggcctgtcatcctttcatagacatactcaactgtcattcggttaaactgagctgtgtcgttcagcgtgcacacgggatttgaagaattctcataaactacaagatcctttatatctttcttctttccagatcctctgggtgaagagcctgtatggcattgtgaacttttgacagatggataagtgggctgtgttttttgaagaattttcaaagcctcgtcggcagctgcatgtttacttgttttcttggttccataaccttcagctaagcagtgatcttgtaaaaacactcgacaacgccatgtgcgatttggcatcatctcatatttgtattcaattgacatcttgttgaatgaggcagaattgttaaggataccaattgcatcatttgcattttctgtaatgacaaaattggtccagtgtttggcagaagcattaaaaattggctgcccggaagcatctttacccagcaccaccaggtcttctggtggcttcagagctggaggaaattcataggaggacatgccaatctgacacaccacgaggtcctctccaaatgtatgcttgaatttccgccggacaactctaacttcaatacgtttctgcaagagttttacagctagctctgtagctcgatccctggacccattcttgctgccagcataacctgtagttaagtagatattttggcatctaacttcacaagcatagccatcagttagaagttttttatttttggggatgtcggcaggaggaatttcctttaaaggagcatatatatactcaggatttgtcttacacgcctgaatacaacgagttaacatata

SEQ ID NO: 24105 - DNA, 1100 bp, Homo sapiens
  MAP TO AL049732.11; EXPRESSED IN BRAIN, SIGNAL = 1.3; EXPRESSED IN HELA, SIGNAL = 0.87; EXPRESSED IN LUNG, SIGNAL =   1; EST_HUMAN HIT: AL530336.1, EVALUE 0.00e+00; SWISSPROT HIT: P28968, EVALUE 2.50e-02; NT HIT: gi14760407, EVALUE 0.00e+00
ataccctgttggcggcaaccaaggactccctggccatggacccaccagttgtcaaccggcctaagaaaagcaagaccaagaaggcccctataaagactattactaaggctgcacctgctgcccctccagtcccagctgccaatgagattgccaccaacaagcccaaaataacttggcaggctttaaacctgccagtcattacccagatcagccaggctttacctaccactgaggtaaccaatactcaggcttcttcagtcactgctcagcctaagaaagccaacaagatgaagagagttactgccaaggcagcccaaggctcccaatccccaactggccatgagggtggcactatacagctgaagtcacccttgcaggtcctaaagctaccagtcatctcacagaatattcacgctccaattgccaatgagtcagccagttcccaagccttgataacctctatcaagcctaagaaagcttccaaggctaagaaggctgcaaataaggccatagctagtgccaccgaggtctcgctggctgcaactgccacccatacagctaccacccaaggccaaattaccaatgagacagccagtatccacaccacagcagcctccatccgaaccaagaaagcctccaaagccaggaagacaattgctaaggtcataaatactgacactgagcatatagaggctctaaatgtcactgacgcagctaccaggcagattgaggcctcagtagtggctatcaggcccaaaaaatccaagggcaagaaggctgccagcaggggcccaaattctgtctctgagatctctgaggccccacttgccactcagatagtcacaaaccaagccctggcagccaccctgcgggtcaagagagggtctagggctcggaaggctgccactaaggctcgggcaactgaaagccagactccaaatgctgaccaaggggcccaggccaagatagcctctgctcagaccaacgtaagtgcccttgagactcaggttgctgctgctgtccaggccctggcagatgactatctggctcagttgagcctggagcccacaaccaggacccggggcaaaagaaaccgaaag

SEQ ID NO: 24106 - DNA, 1063 bp, Homo sapiens
  MAP TO AL022323.7; EXPRESSED IN PLACENTA, SIGNAL = 1.5; EXPRESSED IN HELA, SIGNAL = 0.34; EXPRESSED IN BRAIN, SIGNAL = 0.88; EXPRESSED IN HEART, SIGNAL = 1.4; EXPRESSED IN LUNG, SIGNAL = 0.96; SWISSPROT HIT: P24152, EVALUE 9.00e-06; NT HIT: AF174488.1, EVALUE 1.70e-02
ggcccgaggacgagctcgcccctcttcaacaaggctgtgttcctgcggcccagctccagcaccatgattctcttcgaaaccaccaaaagcggccccgctctggggaaggcggttagtgagggggcggaggaggccaagctaggtgtgtccggctcccggcctgaggtggctgccaagcccgccctgcccacccagaagcctgcggggacccttccccggtcagctcccctgtctcaggacacaaaaccacctgtaccccaagaggaggcaggccaagaccatcctccctcaaaggccagcagtgtggaggacacggcacgcccccttgtggagcccaggcctcgcctgaagagaaggcccgtgtctgccattttcacggagtccattcagcctcagaagccaggccccggcgcagcggccacagtgggcaaagtgccacccacccctcccgagaagacgtgggtgaggaagcccaggcccttgtccatggacctcacggcccggtttgagaacaaagaggccttgctgaggaaggtggccgatgaaggaagtggacccacagcaggggatatggctgggctagagaggcccagagcagcgtccaagctggacagggactgtttggtcaaggcggaggctcctcttcatgatcctgatttggacttcctggaggtggccaagaaaatccgtgaacggaaggagaagatgctttcgaagccggagatgggcagccccagagccctggtggggggctcatctggggtcacccccagcaatgaccagagtccctgggaagaaaaggccaagctggacccagagccagagaaggctgctgagtccccctcacccaggctgggaaggggcctagaacttgctgaggttaagagcagagtggcggatggggaggccgcggcagggggagagtgggcctccaggaggagtgtcaggaagtgcatcagcctgtttcgggaggacagcaccttggccttggcagtggggtctgaatctcccctggccacccctgcgtccccatcggcggcaccagagccggagaaaggggttg

SEQ ID NO: 24107 - DNA, 562 bp, Homo sapiens
  MAP TO AC024166.1; EXPRESSED IN BRAIN, SIGNAL = 0.85; EXPRESSED IN HELA, SIGNAL = 1.5; SWISSPROT HIT: P35367, EVALUE 1.00e-109; NT HIT: gi14726259, EVALUE 0.00e+00; EST_HUMAN HIT: AW904938.1, EVALUE 4.00e-89
atctgatcctctgatatctcgctggccccatgtgtgttcaggccctgctcatctgtcttgagctggccatggctccggttgacggctacatagtccctgctactcccctctgccgcagcctgcatgtgcacaatatcaagtggaaagcagtagagtttgtctacttctctatcatcctcttggctgaagacaactggggatttcatctccttgggggtttgggatggtgacttcaagacagatccaccaccagcatcttttggcttccttttcagaacctcccagggagactccttccctggtttcttggcatcccccttggggttctctggcctcagcttaatttctgagaaggaagggagggacctattgatgagctcccggtgctggcagtgttgtcgtacggccttgtagatcttggcatagaaccagagcatgagcaaggtgggcaggtagaagttgatgatggcagtcatgaccttgaaccaggtgacatcatagaagtctgtctcacacttgtcctctcggcgcaccgaggtctgctgcatgaagtgattccagc

SEQ ID NO: 24108 - DNA, 516 bp, Homo sapiens
  MAP TO AC005063.1; EXPRESSED IN HELA, SIGNAL = 0.48; EXPRESSED IN BRAIN, SIGNAL = 1.5; EST_HUMAN HIT: AI815669.1, EVALUE 0.00e+00; NT HIT: AB033105.1, EVALUE 0.00e+00; SWISSPROT HIT: Q9V0B9, EVALUE 9.40e-01
ggtctgcgagaaattccaggcggcgctcgctctgtcgcgggtggaactgcataaaaatccggagaaggaaccatacaagtccaaatacagcgcccgggcgctactggaagaggtcaaggcgctgctcggccctgcgcctgaggacgaggatgagcggcctgaggccgaggacagcccgggtgccggtgaccacgccctggggctgccggctgaggtggtggagcccgaggacgccgtcgcccagcgagcggtgaggctggcagtcatcgagttccacctcggggtgaaccacatcgacacggaggagctgtcggcgggggaggagcacctggtgaaatgcctgcggctgctgcgcaggtaccggctctcgcacgactgcatctctctctgcatccaggcgcaggtgagagcgagcccggccaggccggcccctgttggcaaatggcgagggatggggaggagcccctgccaaggccaagggcagacgttgtaaggcgcaattcgtccccacgtttt

SEQ ID NO: 24109 - DNA, 741 bp, Homo sapiens
  MAP TO Z73417.1; EXPRESSED IN PLACENTA, SIGNAL = 2.4; EXPRESSED IN BRAIN, SIGNAL =   2; EXPRESSED IN LUNG, SIGNAL = 1.7; EXPRESSED IN FETAL LIVER, SIGNAL = 2.1; EXPRESSED IN HELA, SIGNAL = 1.8; EST_HUMAN HIT: AL519484.1, EVALUE 0.00e+00; SWISSPROT HIT: P40078, EVALUE 1.00e-70; NT HIT: AF077615.1, EVALUE 0.00e+00
tcaaaccagtaagactgcatttatgcatccatcattttcaggattgttggtaacctgggcatattttccccaaataactttgcctctttgcgtcacaagtcccagtttgctcacatttacctcaatgacagtacctttggtaataacacccaaagttgtatacagtgggaatgagggattcttctttacaccaagtattggtaagcaaaaggtggctttcagttcaggatgtgttacatgggctttcttgaaatgcaagcccattggcctgatgagtctttcatatttaggtggttttcttataaagccatctccaacaaagcagactttagtaaccatcctcttccatgccttcttctttctctttcctgttcgaataacttttaatacttttgtttctccttgggcacatacttcaggcagagggacttcccattttcccaccttctcttttcgtttctgtttaatcatattggaaagtactgtagctcgagattgtgcctctctgtccagcagataggcaggtactgatccccgtggagtcttttcattattcttgtgtttggtgtttctcttttcatgcatcttgatagtctttttcatttgtattttctcagcatggcacggtttatggtaaagcttagccttcagaccatcattttctttgccttctttgaacgttcgtagcctctcgactttccttctttctctttttctcatggtaatccaaacgatatccat

SEQ ID NO: 24110 - DNA, 1164 bp, Homo sapiens
  MAP TO AC004770.1; EXPRESSED IN HELA, SIGNAL = 2.3; EXPRESSED IN BRAIN, SIGNAL = 0.91; EXPRESSED IN FETAL LIVER, SIGNAL = 1.3; EST_HUMAN HIT: AL560007.1, EVALUE 0.00e+00; NT HIT: gi14784566, EVALUE 0.00e+00; SWISSPROT HIT: P39748, EVALUE 0.00e+00
ttattttccccttttaaacttccctgctgccccagtctttgccttcttcttagtggatcccttgggttctggctccttgcgcttagctgaagagagtgagccggtcaccttgaagaaatcatccaggcggccctgggtgctgccttggcggctcttactcagcctcttgaccccactgcggattcgctcctcagagaactgcttttcaccacacatgaacttgatcagctcttcttcatttggctcgctccacttcagctccacagactctgggtccagcacctcaggttccaagaagagctggtgagcctccttgtggagccaattttctggcacagggtacttgttggggtcaagtcgccgcacgatctcctcgatgctcttgtgcttctggatgaggtccacagcccgcttgggcccaataccccggatactctcacagtagtcactgcctagcaggatgcacagatccacaaactgttcctggttcaggcccagctcctgcagaatccggctcaggtggaattcctggattggcagctttttggcttcactggcagtcaggtgtcgcattagcacagggctgccgaaggtgaggcagtccatgtcctcggtagccgcagcatagactttgccagccttcaccagggcagcacagctggcctctgcctcactgggtgcatcaagataagggatgcccatgaggctcagcagatgtttgcactcatcattgtgctgcttagtgaccttcaccagccgcttagtgaatttttccacctcctgctcggccccagcagcctgagcctgctgcagctgcttctctgcctcagcccgccgctcactgcgtttggccagctcgcctgacttgagctgtggcggcttgccatcaaagacatacacgggcttgatgccgttctccatcatgcgaatggtgcggtagaacatgcccatcaggtggctggtggtctcaccctcctcattctgcagcacatccccaccctggcgaacagcaatcaggaactgataaatgctcatagaggcatcaatggccaccttacggccaaagtagctcttgatgtcattctcccggatggcactgggggccacatcagcaattagtttggccaggccttgaattcccatggcaacacagaggagggatga

SEQ ID NO: 24111 - DNA, 806 bp, Homo sapiens
  MAP TO AP000505.1; EXPRESSED IN BRAIN, SIGNAL = 0.9; EXPRESSED IN HELA, SIGNAL = 0.8; EXPRESSED IN LUNG, SIGNAL = 1.6; NT HIT: AF129756.1, EVALUE 0.00e+00; EST_HUMAN HIT: BF664178.1, EVALUE 0.00e+00; SWISSPROT HIT: Q06643, EVALUE 1.00e-87
agtccttcggctccatgattccagtgctcggtttcccacccgcttcacgaccttttgtcgctcgtgcccactcttacgctcgtccccgcagtgtagtttcttcttccctccggtgcaagcaaaagccggcctggaggtccccactacagcgttctgcaccccacatccgtgttccctcggcccccaactcgcactcatcccagaaacagcaccatccctcctcccccggcccggctcggctcccgcaggggctaaaagccgccacttccccagaagtcccaagcctttaggatcgcattcccaagagcgcgtcggcccgtgtctccgcaggcgctccgctgaaggggcaggggctaggctgggagacgacgaaggaacaggcgtttctgacgagcgggacgcagttctcggacgccgaggggctggcgctcccgcaggacggcctctattacctctactgtctcgtcggctaccggggccgggcgccccctggcggcggggacccccagggccgctcggtcacgctgcgcagctctctgtaccgggcggggggcgcctacgggccgggcactcccgagctgctgctcgagggcgccgagacggtgactccagtgctggacccggccaggagacaagggtacgggcctctctggtacacgagcgtggggttcggcggcctggtgcagctccggaggggcgagagggtgtacgtcaacatcagtcaccccgatatggtggacttcgcgagagggaagaccttctttggggccgtgatggtggggtgagggaatatgagtgcgtggtgc

SEQ ID NO: 24112 - DNA, 537 bp, Homo sapiens
  MAP TO AF188030.1; EXPRESSED IN BRAIN, SIGNAL = 0.95; SWISSPROT HIT: P10496, EVALUE 1.00e-16
agttcccatcggtatgcggaatatcacgtgcacttactacagaagaagcttcccgccctggggaaagagacgattcggccctggtttaaacgcggtaccgaggcagggaggcggatacggccctggtttaaacgcggtaccgaggcagggaggcggatacggccctggtttaaacgcggtaccgaggcagggaggcggatacggccctggtttaaacgcggtaccgaggcagggaggcggatacggccctggtttaaacgcggtaccgaggcagggaggcggatacggccctggtttaaacgcggtaccgagccagggaggcggatacggccctggtttaaacgcggtaccgaggcagggaggcggatacggccctggtttaaacgcggtaccgaggcagggaggcggatacggccctggtttaaacgcggtaccgaggcagggaggtggatatggccctggtttaagcagtaccgaggcagggaggctgcaagggggagtggagaacaggaagaggcgggctgcagcagcgcggcg

SEQ ID NO: 24113 - DNA, 516 bp, Homo sapiens
  MAP TO AL133418.2; EXPRESSED IN BRAIN, SIGNAL = 0.9; EXPRESSED IN HELA, SIGNAL = 0.99; NT HIT: gi14741752, EVALUE 0.00e+00; EST_HUMAN HIT: AV709169.1, EVALUE 0.00e+00; SWISSPROT HIT: P91679, EVALUE 2.10e+00
cattgtatttcttagttggtgtcatctttgcttttgtttcttcttcatcttcatctgaagagctgttgctactgttttccatgcaaagtgattctttgttcttggccttctcttcctttttgccaggtgatccagtttttagacactcttctgtattgcaataccttcttttaccacgttttatttgtggttttgaagatttatctgttgtgtccttcttgacatcctttctcttttttgtgacttcatcttcttcataatcagtatcttcggataatacttctatatctttccttaatctttctggagattttgacactggtttggatattaccaaatctgcatgaactttgttttcttctagcaaagatgaactgttctgttcctcctttgaaataagatcatttctgttgttggtcaaatgatcaatcttagattcctctttgccattattatccatgtcttgagcacctctctcatcttcctgctcactgtcttcagcagaactttcagaag

SEQ ID NO: 24114 - DNA, 1669 bp, Homo sapiens
  MAP TO AC006014.2; EXPRESSED IN LUNG, SIGNAL =   1; EXPRESSED IN BRAIN, SIGNAL = 0.94; SWISSPROT HIT: Q9Y2N3, EVALUE 0.00e+00; NT HIT: gi14782029, EVALUE 0.00e+00; EST_HUMAN HIT: AU124082.1, EVALUE 0.00e+00
gtgctgcccacgttgaaggcaaacggtgtgctctggccggtggtgcccagggcgttctgacctaagccccctgtgaagggggtggaggtggctgtgctcccactctgtcctgctccaaagctgaaagctccggtggtggcgctggagcctggggtggccacgttgatcccaaagctcccactgccagcgggggctgccgaacccccaaacgtgaagggtgatggtgttgtgctgccaaacaccgagctgctgctcccgctgctggcggtctgggtggtggctccaaagccggagctggtggctgcaccgaaggagaagacagcagtggagccgccaaaggcgggctgtgagctggcgggagcgccgaaggcggaagccgtggctttcaatccaaacgccgagtgcgtggcaccgccaaaggtaggctggatgggcgtaggcacgtgcgcaggcacgatcttgatcgtggacgcaggtgcaggtgtgggtgcagtagccggggccggggctgcagagtttccaaaagtgaaagagctgccaaagctgggggtaagggctggcttggcggcccccggtggctgcccctcagcggccccaaatgcgggctgggggttggctcccggatatgatgggagcggggacttggcgcttgagccaaagggaatgttgaacgtgggggtgctcgtgttactgaacgtcagagtgggctggctgctggtggccggggcggaggtggcgagggtgctgccaaaaccactaaagtcggcagcgctgctgctggtggccgttggcacggcagtgggcagggactggctgaaggtggtgactgtggtggttgtgggcaaggcaggaggtttgccaaactggaatatggagcccatggccggggtgaagctggcagcagaggcctggggcgccccgaagaggaaaggctgtgaggcggcagtggcggtgctggtcgtggtactcacactgctgctgctcacactgtttatgccaaagccaaacgcaggcttcgaagcagagtctgtggatggactggcagaggtgatgggagccacagcagaggtggcgctggccaggccagtgaagagcggggcagttgtggtgggagcagtggcgggagtagttgtctgcttgaagaagggagcaggcaagggcacagatgcaggtggccccatgctgctaaagacaggctggaaggtcggggctgtggtgctggtggtcgtggggagggaggagctggagggcgctgtggctgtgactgaagggccaggcggtgtggggccttccttctcactcttgggtggagccgtgaaaatgggcttgaacatgggagatgctgaagatgcagcaggggcggcagggctggaaggtgaggtgttctgtgttccaaacaggaagctttgcttgggggcgggggacggggcagatgtggcttggggtttggtagccgtctctgcttgaagggttggaggtgccttggtgtcagtggctggtaccatggatggagcagggatcagccccagcaaagtggtcgggggtttggagtcaaaggaggggctggggagcagccctggcggccctgactgtgataaacccagcgggggtaggaggctgggtgtctttggaggtgagagggcctcagtggttgctgctccagcagatt

SEQ ID NO: 24115 - DNA, 1355 bp, Homo sapiens
  MAP TO AC008806.4; EXPRESSED IN HELA, SIGNAL = 0.68; EXPRESSED IN BRAIN, SIGNAL =   1; EXPRESSED IN LUNG, SIGNAL = 0.99; SWISSPROT HIT: Q14585, EVALUE 0.00e+00; NT HIT: U81557.1, EVALUE 0.00e+00; EST_HUMAN HIT: BE396279.1, EVALUE 0.00e+00
ctataggacttggtgattgactgggttgggtggtgacagtgactccccaatgtgaattctctggtgatgagcaaggtgtgcatgctgcctgaaggtttttttgcattccttacattcatagggtctctctccagtatgaattctctgatgttgggcaagggatccacagtaactaaaagcctttccacaaacagtacattcataaggtttctctccagtatgaactcgctgatgttgagtaagggacgagtcattgctaaaagccttcccacattcaatacattcatagggtttctctccagtatgaactctttgatgctgagcaaggtaggcaatctggctgaatgctttcctacattcctgacacttataaggtttttctccagtatgaattctctgatgttgagcaaggtgtgaattctggctaaaggccttcccacattccttacattcatagggtctctctccagtatgtattctctgatgtacagtaaggtatgcacgaaggctaaatgctttcccacagacattacattcatagggtttctctcctgtatgaactctctggtgttgagcaatggatgatctgttgctaaatgctttcccacattcgatacattcatagggtttctctcccgtgtgaactctctgatgttgagcaaggtaggcaaactggctgaaggcttttcgacataccttacattcgtaaggtttttctccagtatgaactcgcagatgttgaactaggtgtgcattctgactgaaggctttcctacattccttacattcatagggtttttctccagtatgaatcctctgatgttgaacaagatttgatctctggctgaaggcttttccacactctatacatttatagggtttctctccagtatgaattctttgatgaagagtaagggatgaactctggctgaagactttttcacagtcattacatttcaaaagtttcttctctgcacagacactcttgggcttaatagccattaaattttttttaaagcttctcttttgtgtgtcatgtttatgtactttctcctctttggggattatcttttgtgtacaaagcagtgggttctgatgaaaacttccccaagatttatattcttgttctctctcatcaaaaaggggttcttcatgagtgattatctcttccttgaaacacgccttctgattacctggttgcctttcaaaatagccctcacatttccactcttctctcaaactggagtattcaaggttatagcttgtaagtgtttctattatcttctgggattgatgttcttcataaaaatcctgctttggggttaattcttcagtctcacatataggctcccagc

SEQ ID NO: 24116 - DNA, 478 bp, Homo sapiens
  MAP TO AC008174.2; EXPRESSED IN BRAIN, SIGNAL = 0.8; EXPRESSED IN HELA, SIGNAL = 1.2; EXPRESSED IN LUNG, SIGNAL = 0.98; SWISSPROT HIT: P22607, EVALUE 5.00e-01; EST_HUMAN HIT: BG206007.1, EVALUE 2.00e-29; NT HIT: gi13357558, EVALUE 1.80e+00
attgctttcaaagtgataatctacttctatttctttggacagtacatgaatcactcctactaagagatcctgaaagaggtcatcaaagccaccagaaactattcctggacagtaagtgtattttgtaggtatggcaaccattttctgtgcaatgtcagcctgtataattttattattaaaaagaattttaataatgatttcagaaatacataaagcaagttctccaatggaaattgacctgctctcaaacacttgagaatgaattgaaataatcttgctaaatgttgcttcttgaatttcccatgctttctctttttctctaccctttttggtgccatcagaaatgctcgaagttaaatggtaaagtactgactcagtgagatgttcacaacattgataaattgaagaatcatcgtatatgtttcttaggaactgttttgattcatattttttccttgaccatgtagaaacagacatc

SEQ ID NO: 24117 - DNA, 1089 bp, Homo sapiens
  MAP TO AC005752.1; EXPRESSED IN HELA, SIGNAL = 0.7; EXPRESSED IN BRAIN, SIGNAL = 1.2; EXPRESSED IN LUNG, SIGNAL = 1.2; NT HIT: gi14861873, EVALUE 0.00e+00; SWISSPROT HIT: Q9Y5F1, EVALUE 0.00e+00; EST_HUMAN HIT: BG722685.1, EVALUE 0.00e+00
aacttatttgacctggagcctccagtcacacacacctcatagtggtagctctgggacagggtcccggtgccactcacgtccaccagatgtcctggaaaggggccctcaggcaccgagcagcgaccgaccggggccgccctgctcctcctgcacagccgcaccgccacgaacaggagcaccgagaagaggaagagcgacgacactgaggccaacgccaccaccaggtagacagtgagcgagtcggcctgggcctgggccggggccgcctccgggagaggcaggtagggctgggagaagccgtccaccaggagcacgtgcagcgtggcggtggccgagcgcggaggctcgccattgtccttgaccagcaccaccagcctgtgcttggccgcgtcgcgctcgctcagcagcctggcggtgcgcacctcgccattgtgcgcccacacgccgaatagcccgggctccgtggccttgagcagctggtacgacagccaggcgttctggcccgagtcaccgtccaccgccaccaccttggtcaccaggtagcccggctcggccgcccagggcaccagctcggtgcagggcgcggagccgttctgcagcgggtacagcacgaagggcgagttgtcgttggcgtccagcaccagcacgcgcaccagcgcctcgctgctcaaagccggggagccgtggtctgtggcgcccacgcggaactggaacccctgcagggcctcgtagtccagcgacctgagggcaaacaggtggccgttgtccgcgttgatggagaccagggaggcgaggggcaggtgcgggtcctgggacggcagcagcgagtagttgacctgggcgttggtgcccgagtctctgtctgtggcgctgatgctgccgatgtgcagggcggggctgttgttctcgcggacgaacagggcgtaggaagtttgggtgaaggcgggggcgttgtcattgacgtcggagaccagcacggttatgttgtgctcggtttttagcctgggggtccccaagtcggtgacggtgatggtgatgttgtactcggctctgctctctctgtccagcggtctctctgtttccaaagtg

SEQ ID NO: 24118 - DNA, 762 bp, Homo sapiens
  MAP TO AL009030.4; EXPRESSED IN PLACENTA, SIGNAL = 4.7; EXPRESSED IN BRAIN, SIGNAL = 5.6; EXPRESSED IN HEART, SIGNAL = 6.2; NT HIT: gi14777543, EVALUE 0.00e+00; SWISSPROT HIT: P52591, EVALUE 1.20e-02; EST_HUMAN HIT: BI061609.1, EVALUE 0.00e+00
  unsure 169
  unsure 513
aagcacccactatggacgcacagcaggacagacccaagtcccaagactgcctgggcctagtggcccccctagcatctgctgcagaggtcccctctacagctcccgtgtctgggaagaagcacagaccaccaggacccctgttctcctcctcagatccccttcctgccanctcttcccactcccgggactcagcccaggtcacctcgctgattcctgccaccttcacagctgcaagcagggatgccggcatgagaagaacaaggcctggcacctcggctcctgcagctgccgcagcagcccttcccccctccacattgaaccccacgtcggggtcgctactcaatgcagtggatggaggcccctcacatttcttggcctcagccacagctgcagcacgtgcccagaggtcagaagtgagatataaccagagatcccagacctcccggaccagatcctgcctcaaacgaaatgccagctccagctcccacagctctacggaaggcctccaggaantaaagcggaggagggggccagcctcatcccactgccagctggcccacagttcctcaaacacagtgagtgaggacggacctcaggctgtctcttcgggtcaccgctgtgaaaacaaggcaggtacagcaccagggcagacactcgcccccaggggtggctcccccagatcccaggcctctaggccccgcatcaacagtgcactgcacgttgaggacaaggccatctcggactgcagaccctcacggcctt

SEQ ID NO: 24119 - DNA, 738 bp, Homo sapiens
  MAP TO AP000563.1; EXPRESSED IN HELA, SIGNAL = 0.7; EXPRESSED IN BRAIN, SIGNAL = 1.6; EXPRESSED IN HEART, SIGNAL = 1.6; EXPRESSED IN LUNG, SIGNAL = 1.2; EXPRESSED IN FETAL LIVER, SIGNAL = 1.4; NT HIT: AF151064.1, EVALUE 0.00e+00; SWISSPROT HIT: Q57814, EVALUE 3.40e+00; EST_HUMAN HIT: BG623230.1, EVALUE 0.00e+00
agcaagaccctatttcgaaacaacaacaacaaaagaaaggttataagcgccatggctatgactagtgtcaaattgcttgccattgttttaagaaagccagatacctggattggactctggggtgttctccgagggacaccttcgtcacacaaactctgtacttcctggaatcgatatagcactaagttatgtgcaccaaattataaaagacttatccataatattttctcactgaaattctcagggcttttaatatctccagaatatatttttccattttccataagactcaaaagtaataaaagctctaataaatctactacaaagtcactgcaaaaagtagaagatgaagaggactctgaggaagacagcaatcatgatgagatgagtgagcaggaagaggagcttgaggatgaccctacgatagtcaaagactatcaagacctggaaaaagcagtgcagtctttttggtatgacgatgtcctgaagacaggcctagatattgggagaaacaaagtggaagatgcgttctacaaaggtgaactcaggctgaatggggaaaagttatggaagaaaaacagaacggtcaaagtgggagatacactggatcttctcattggagatcttctggatccaatgtatctgggagatatattggatcttctgtttggagaggataaagaaggaggaaccgagacagtgatgaggattctcctgaaaaaagtgtttgaagactga

SEQ ID NO: 24120 - DNA, 1283 bp, Homo sapiens
  MAP TO AL121906.18; EXPRESSED IN FETAL LIVER, SIGNAL = 1.3; EXPRESSED IN LUNG, SIGNAL = 1.2; EXPRESSED IN HEART, SIGNAL = 1.7; EXPRESSED IN BRAIN, SIGNAL = 1.3; EXPRESSED IN HELA, SIGNAL = 0.23; EST_HUMAN HIT: BG468340.1, EVALUE 0.00e+00; SWISSPROT HIT: O65314, EVALUE 2.00e-66; NT HIT: gi15595198, EVALUE 1.20e+00
ggctccggaggcagagccaaaggctgaaggggactactccctaggacagaggccgggaggtatcgggccgacgaagccgagtggcgcggaggagcggagccttcagccccgcggctgggccgagcccgaaggtggcgtcggtgtcggggagccgccgcgtgcaccggccgtcctccctgggccgcatcgcggtggtggtggaccagggctcgggcttcaccaaggcgggcttcgcgggcgagaaccagccgcgcatagtgctgaagagctctagcttggtgcccagctgggaccggccggtgctgcccggagcgccgggctgcgagctggcgggcggcgtggcgcgggcgcaccccatcaagcacggcgtggtggcggactgggaggcgctggaagggctgtgggagcgcctgctggtgggcggcctgcgggtgtgcccagagcagtggcccgtgctggtgagcgactcgccgttggcgccgcccgcgggccgcgaaagggtggcggagctgctgttcgagaccctggcagtgcccgcgtgccacatggctagcaccgcgttgctggcgctctgctccaccggcgcgttcagcgggctggccgtggaggcgggcgcgggcgtgtgccacgccacgcccatctacgcgggtcactcgtggcaccaggccaccttccgactgaacgtggcaggcagcaccctgtcgcgctacctgcgggatctgctggtggcggcgaaccctgacctcttgcagcaggccctgccccgcaaggccatcacacatctcaagaagcgcagctgctacgtgtccctggacttcgagggcgacctccgcgaccccgcccgccaccatccggccagtttcagcgtgggtaacgggtgctgcgtctgcctcagcagtgagcgcttccgctgccccgaacccatcttccagccgggcctgctgggccaggctgagcaggggctgcccgcgctggccttccgggcgctgcagaagatgcccaaaacgctgcggacacgcctggcagacaccgtggtgctagccggcggctccacactgtttcctggcttcgccgagcgcctggacaaggagctggaggcgcagtgccggcggcacggctacgcggccctgcggccccacctggtggccaagcatgggcgtggcatggctgtgtggaccggcggctccatggtggcctccctgcactccttccagcgccgctggataactcgggccatgtaccaggagtgtggctccaggctgctgtacgatgtgttcaactga

SEQ ID NO: 24121 - DNA, 576 bp, Homo sapiens
  MAP TO AC009948.2; EXPRESSED IN BRAIN, SIGNAL =   1; EXPRESSED IN HELA, SIGNAL = 1.5; NT HIT: gi16157781, EVALUE 0.00e+00; EST_HUMAN HIT: BI463872.1, EVALUE 0.00e+00; SWISSPROT HIT: P11799, EVALUE 2.00e-17
ctggagaggccccaggaatacgcaaagaaatgaaggatgttaccacaaaattgggtgaagctgctcaactctcatgccagattgttggaaggcctcttcctgacattaaatggtacagatttggtaaagagctcatacaaagccggaaatacaaaatgtcttcagatggacgcacacacactcttacagtaatgacagaggaacaggaagatgaaggtgtttatacctgcatagccaccaatgaggttggagaagtagaaaccagtagtaagcttctcctgcaagcaacaccgcagttccatcctggttacccactgaaagagaaatattatggagctgtgggttccacacttcggcttcatgttatgtacattggtcgtccagtacctgccatgacttggttccatggtcagaaacttttgcaaaactcagaaaacattactattgaaaacactgagcactatactcatcttgtcatgaagaatgtccaacgtaagactcatgctgggaaatacaaagtccagctcagcaatgtttttggaacagttgatgccatccttgatgtggaaatacaag

SEQ ID NO: 24122 - DNA, 810 bp, Homo sapiens
  MAP TO AC004152.1; EXPRESSED IN HEART, SIGNAL =   2; EXPRESSED IN FETAL LIVER, SIGNAL = 1.3; EXPRESSED IN LUNG, SIGNAL = 1.7; EXPRESSED IN BRAIN, SIGNAL = 2.3; EXPRESSED IN HELA, SIGNAL = 0.48; SWISSPROT HIT: P28284, EVALUE 3.00e-03; NT HIT: D89870.1, EVALUE 0.00e+00; EST_HUMAN HIT: AW574550.1, EVALUE 0.00e+00
tcagtcccacagcagcgccagggcctggcccatcgaggactcggtggcctcggccaggtattcgcaacacagccagtcctcgaggctgggagcttccccacctgcggcccgctctgctaggcgcaggaccagcagcccgcggcgcacccgcagccagggcccgagcgctcggagccagggaccaagcggtgctccgcggccgcgcagctcaggcccgggcccccagagcagcgcctgcagcgcgccccgcgtccgggacgccgagggccgcaagcgggtcagctgtgctgccaggagctccaggcccgcggccaaaggcgtggtcgagggcgcagcaaggctgagcagcgctcggaggaggctgcccagctgcggcgcgtgggggcccggggatcccgggggtccagggggctgcagacagacgcggccaaagtcagtgaggagcaggcgtgggggccccgtcgtcgcacagccccgaggtgccaccagcagcaagttctccggccgcaactcgactagggccgcgccccacgcctccaggaacttcagggccgcgctcagctgcagcagcagcagggccacagcccacacgaactcctccggcggctgcgtgcaggcctccgccagccactgcgccaccgtgcgctctggaacctcggctgccagcgccactgcgcctctccagggcgccccgggcagtgtgccttcaggcaccaggccacacagcccctgcagattgaagtgtggagacagggaggcctgcagctccaggccccacgggtggggcacgtccgccccgggcttgggcac

SEQ ID NO: 24123 - DNA, 1065 bp, Homo sapiens
  MAP TO AL157858.2; EXPRESSED IN HELA, SIGNAL = 0.55; EXPRESSED IN BRAIN, SIGNAL = 0.88; EST_HUMAN HIT: BF921516.1, EVALUE 0.00e+00; SWISSPROT HIT: P53278, EVALUE 8.00e-03; NT HIT: gi14748462, EVALUE 0.00e+00
ctggatctttctgttctcccagtttgtccagaatgttgaaggagatgtcgaggtactctctctggatagcactgacagcaatcttcctctgcttcctctgcctgggaacaatctgaatcttaaattcggattcctcagctccatcctcttccaccttcctttcaggattctgttctgtatcagattctgcactggtatcaggcttctcactttctgtggggttctctgcatcttcgggaactttgaggaggacggtttttgcccctgaacttggcatcagctccccaggcttctccccctcagtgcccgggtcagggtgatcatccagcgacatctcggggagagcaaacgacttctgaaggaggtctcgtttttgcttcagcgtcagtgggctaccgcaggagaactctggcagctcctctggctttgaggatccttcggcgtccatagggtcttccagagtgatgagggcagagtcagtgttccctgctgactgattatttcctgagtccttagaagaaaagtctttggaacaatcctccacacttacttgtacaagcggagctgtgctcaggctgaggacggagggatggctggggacggagggagaagaggcagcatttttaccggaggggccgtcatcgccttggttcatcgtctcctcttcttcgtcactctcgactattctgagagggggaagaggctcaaatacaagagagtcgctgtcggaggttgagagtatagagtgtttttcaggccccgaggttgaatctgaggatagatctatcagatctaaatcctctttaggagcaggctttaccggcgagtcaactttcacctcgaaagtctccatacagtttaacctaacctctggtatgacaggccttcgagcatctggaaacccttccatagctgggttctcggggatttcactattgtcaggcctcgtagcagagttctgtctagaacgtccagggtcgtttggtctttgtgcgatatacgcagcttgggtcggaggcttctctatgtcacaccgatctatgcacgacttcctacgatgttcgt

SEQ ID NO: 24124 - DNA, 1698 bp, Homo sapiens
  MAP TO AC003046.1; EXPRESSED IN BRAIN, SIGNAL = 0.81; EXPRESSED IN HELA, SIGNAL = 1.3; EXPRESSED IN LUNG, SIGNAL = 0.93; SWISSPROT HIT: P22792, EVALUE 2.00e-16; NT HIT: gi11421043, EVALUE 0.00e+00; EST_HUMAN HIT: AI307338.1, EVALUE 7.00e-81
cacctgactataggccacatgattgtctgtggccagggcgttctttagacactgccagaagtatgggtgagcttgcgggtttgttggccactcaaggacagaactcccacagagccttttccggagctggaggaacttggacttctgaaagggcttctcaagaaatatcaagataatcacatcaactttttcatccatgagcctctgatgggacaagtaaaatgctatcttaaaattttcagtctttgcatacttgtctgtcatcacaaacactgtctttttgctaagctgtatgctctgggaaaggttttccagaactggctgccctggtaaccagtccctttcctcgagacataaattaaaatgtttctctcttgggtcttccagtttggccaccagctcagccaaaacccactcggtcacagctgggtctttagtgtcatacacaataaaagcatcatagcaacagtctggtgatattagacgctgatacccctttatcttggccttacagaaatggtaaatataccacacatcccagaaatagaggtgacttgctgtcatcatcaccatgagaaagagagatacagatatggaaagtgagaacagaatcaggttagtcagatctaactcacaggtgtacagatccagggagatcacactttggcccttgtgtgctcctggccccacacaagtcacatctgtggccaggtaaggaatagtcacctccgtatggttaacccaccagacaaaccacacagcatcacaggtgcacagaaaccgattatgatgcaaaagcaacatcttcagattgttgaggacattttctgggaagctggtcttttggatcatctggattttatttgagctgagatccagatatcgcaactggaaggcatcttgtagaaaatacttcgtcagactcctgatttgattattcttaagaatcagattcttgaggcttctggaacagttggataatctctcagggacagtggtcagttggttgtggctgaggtccaaagtttccaggttctttagacactggagtttcttccaactgaaagatttgagcccatttttggccaaagagagattctttagatttggaggcataccatcaaaaactccagaaggcaagaaacttagggaatttttagagatgtctaattcctctaattttagcagattcttgaataattgtaagtatctgttatcaccttctctccataaaacatctaagtgatttcctctgaattccagagttctaagagactcactctccatggtcctgctggtggaggaagagatgtcattgtcgttcatcatcagtttctgcagaacctttaggttcttggtaaagtttagcatatgagtaattccttctgattgaaaataatggctattactgcttatatccagaacttccagtttgtgaagctcttcaaatgctgttgaatggagtaaatcaagccggttgttggagaagtccaaatatctcagctctgctaaaggttggaattcactgccattaagagtttggctaatgagatttcctgacagattcaggcatttgaggaaagaaagatgctgaaaatcagaggacttgacaaaaaatatactatttttacttagatccaaggtctgcccatacttgtagcagctttcattaacagacatgaaagaagcctctttgtt

SEQ ID NO: 24125 - DNA, 728 bp, Homo sapiens
  MAP TO AP001711.1; EXPRESSED IN BRAIN, SIGNAL = 0.87; EXPRESSED IN HELA, SIGNAL = 0.72; NT HIT: gi4507500, EVALUE 1.00e-20; EST_HUMAN HIT: BI226939.1, EVALUE 1.00e-112; SWISSPROT HIT: P98174, EVALUE 1.50e+00
tcagaacgtgcccggcacgggcaccgaggctccgggcatcctcgccgccgtctcccggggcggctccggccggacgcccgcgcaccccaggcccgcggtactcacccgcgacggtcgtccgggatctccgcgacggggccgggcacgatgcggggcagccgtgcccctggggctgcgggcgccaaggcgtccgcggagctgcagagctgcgcgcccgacggcggcggcgctgctctgccggccgcgctcgaacccgctcgtggtctgccaatcggagctgtcagggcccctccgcctgcggcctcgggggccgggccgcgggagcccgtgggaaaccgagctccgattgggccgcctgacaatcgctccgcctccggccagccaatccgaggcggtggatgcaggagcggggcgttcggagttgggctgtagagcgactatgggcgcacgccgggtatccgcgccgcagccaggctcggagcgcgcggctggaggggcgcgggcggcgcgcgctccagagatgccttcctgcgaggctccgtcagcgcggcccggggagatcgcccgcaggcagcggaggcgcggcgggccgggggacgaccagggagcccctaacaaagcagctttgggagggccggaggcctctgcctccctcggcgataggtccgcgaagctgcctgtcatctcgcataggtggaggtggccaatggcgtgcacagacggagctc

SEQ ID NO: 24126 - DNA, 940 bp, Homo sapiens
  MAP TO AC022014.2; EXPRESSED IN BRAIN, SIGNAL = 1.2; EXPRESSED IN HELA, SIGNAL = 2.6; EXPRESSED IN LUNG, SIGNAL = 0.99; EXPRESSED IN FETAL LIVER, SIGNAL = 1.4; SWISSPROT HIT: P41594, EVALUE 0.00e+00; NT HIT: gi14762655, EVALUE 0.00e+00; EST_HUMAN HIT: AW296587.1, EVALUE 1.00e-53
cttaaggtttccccagaggagccccttctcttccacaggttgactaggctgctggatctgctggctgcggaggatgacttgccatcccctacatgcatgcgcaccacggtagatgtggtgaaggcgctgcgcacgtttctctctggtttggccaggatgatgtacaccttcggcacaaacatgcagcctagggccactgtggcactgaggctgaccgagaaacacatggtgatgattttgtagttgctgccaaagtagattggcacaaaagctagccatataatgcaggtcgtgtacattgtgaaggcgatatacttggcctcgttgaagttagctggaacatttctggtcttgaacgcatagaaggtgcagctcaaaatcaacaatccattgtatccaagtggagtgacaactcctaggttggtggtgttacagatcaggtagacttctcgaatgcttgggtagtcatgcattatgtcaggaggctccattataaagagggcaacgatgatgcccaactggatgcatatgagaatgaaagcaatcactagctgggcacaggcactcatgaatctgggctttttggtacagatcttcttcttgctgccagccaggatccttgcaatacggttggtctttgttacaagggctgagtagctcatggctggggagagaccaatgccaattctctgaaggtagcagtaaatctgtttgggcttcgcaatgaggcagaaggtacataagtagcccaggcagatgccagcaaggataatgtagcagagttccctgcttgaggacttgactactggtgtatcacggtaaatgatgaagactacagtaacaaacagggtggccaggaggccaaggcaggcaaacaccacagctgcaatgggttcagggtcaccccatcgaagatactgtactgggatcaagtcacaac

SEQ ID NO: 24127 - DNA, 618 bp, Homo sapiens
  MAP TO AC001237.1; EXPRESSED IN LUNG, SIGNAL = 1.8; EXPRESSED IN BRAIN, SIGNAL = 1.3; EXPRESSED IN HELA, SIGNAL = 1.9; SWISSPROT HIT: Q9QXZ0, EVALUE 1.60e-02; NT HIT: gi16164876, EVALUE 0.00e+00; EST_HUMAN HIT: AL547137.1, EVALUE 0.00e+00
atgtctgtggatccaatgacctacgaggcccagttctttggcttcacgccacaaacgtgcatgcttcggatctacattgcatttcaagactacctatttgaagtgatgcaggccgttgaacaggttattctgaagaagctggatggcatcccagactgtgacattagcccagtgcagattcgcaaatgcacagagaagtttttttgcttcatgaaaggagattttgataacctttttagcaaaatggagcaactgtttttgcagctgattttacgtattccctcaaacatcttgcttcctgaagataaatgtaaggagacaccttatagtgaggaagattttcagcatctccagaaagaaattgaacagttacaggagaagtacaagactgaattatgtactaagcaggcccttcttgcagaattagaagagcaaaaaattgttcaggccaaactcaaacagacgttgactttctttgatgagcttcataatgttggcagagatcatgggactagtgattttagggagagtttagtatccctggttcagaactccagaaaactacagaacattagagacaatgtggaaaaggaatcgaaacgactgaaaatatcttaa

SEQ ID NO: 24128 - DNA, 1935 bp, Homo sapiens
  MAP TO AC007721.10; EXPRESSED IN BRAIN, SIGNAL = 0.78; EXPRESSED IN HELA, SIGNAL = 0.94; SWISSPROT HIT: Q92125, EVALUE 5.00e-03; EST_HUMAN HIT: BG390523.1, EVALUE 0.00e+00
tcactttgggagctcagacgtgtcgctggccctgacgctcattggtctgaaggacaaatcgaaggccctctggtcacggaagctctgggctttgtacttggccaggtgcctggacctcccgcgacgctcgggctccgatgcctccatcctgtcctgcagggccctctcagccccagggtggtctggggacccctcctgggccggggcctggggagtcccgcagcccccagcctcaggcttgggctcagttgggctctttcccagccccaggggagaggtggcaatgctcttgcccctgagggggcggcttcctgggggtgggtacccggcgctgggctcccccaggccactgccccctgactgtccaccatccctgggggctgggcttctggaccccccactcctgccagcagcatccactccctcagctatgccactaatgggctgctcccaggcccgaggcgccatcccacttgtcaaggcctgttcccgaccctgttcccaagcccgttcctgagcccctttctgggtctgcctctgagtctctatctgggtctgctcccagccctgatcccgagcccgatcccgagcccattcctgagcccctttctgggcctgaccctgagcctctatgtgggtctgctcccgaccctgttcctgagcccgttcctgagcccctttctgggcctgttcccgagcccgttcctgagcccctttctgggcctgttcccgagcccgttcctgagcccctttctgggcctgttcccgagcccgctcctgagcccctttctgggcctgttcccgagcccgttcctgagcccctttctgggcctgttcccgagcccgttcctgagcccctttctgggcctgttcccgagcccgttcctgagcccccttctgggcctgaccctgagcctctatctgggtctgctcctgagcctgttcctgggcccgttcctgagcccctttctgggcctgaccctgaacccgttcctgagcccctttctgggtctgttcctgagcccatttctgggcctttatctgggtctgccactgggcctgtccctgagcctcttcctgggcccatttctgaacctctccttgaacctgtttctgggcctgtccctgaatctgcccctgagcccatttctgggcctgtccctgaacctgtccctgggccccaccctgagctggttcctgtgcctgcccctgggcctctatctgggtctgccactgggcctgttcttgagcgtgtccctgagcctgtccctgggcccaattctgaaactgtttctgggcctgtccctgactgtgtccctgggtcccaccctgagcctgttcctgtgcctgcccctgggcctctatctgggtctgccactgggcctgttcttgagcgtgtccctgaacctgtccccggtcccattcctgaacctgtttctgggcctgtccttgggctgccgggcttcccggcccctcgggctcccctggaggcacagctgggttcctggcagccctggtgccctctccccacgccgtgctccgcccccgctcctcccagggtccctgcagatgctgctgaccttggtcactgcgctggcaggcgcccccaaccccaatggccatccctttgtccccggccagatcctgtgcccaccatgtctgaggctcttttgctgggttcagcacaaccttcgagcccgacggcgccaccctcttccccgcatccccgggctggggggtctcctcctgtgcctggtgactctgttgcctccccaggtccgcctgtgtcaggggacgctcctgggattcacctgcctgcgtcctaggctcggggacactggcccggagctttgcctgtgtgtcaccagcagtagggggcaggtgtgcctgtagatggggagggccccgctggtgggtgccacctacccaccccat

SEQ ID NO: 24129 - DNA, 578 bp, Homo sapiens
  MAP TO AP000344.1; EXPRESSED IN BRAIN, SIGNAL = 0.8; EXPRESSED IN HELA, SIGNAL = 0.54; SWISSPROT HIT: Q07284, EVALUE 2.20e-01; NT HIT: AF306785.1, EVALUE 1.40e-01; EST_HUMAN HIT: BF245212.1, EVALUE 3.20e+00
ccctaaatgttgtctggataaaagacacttaggtgagtgctgtggccaggaaggcaagagggatgggggaccaaccaactagagacaagggaaggtatcactaaggacacggcagtggaactgagtcctgaagggacccacgagcaattatttctcagggaagaaaatggtaaggggttttcaggggtaggaacagtaggagccaaagtgtgggtatgtgagagtgtgtgactatgtgtgcacgtaaaatggaaatgagatggagggatgggttggaacctggattcgaagaagcaggtatcggccctggggtatttggcctgggacagtgaggcattattttacaggagagtggcctggtgggatgtgtgctttagagtgtggacacacagctgtggcacagaaggattgctggcaggggagggcgacaggaggctgccagagttgtccagctggacttcttccctgacacagacaggctggcataggattggtgtggtagtggggatgggaaggagggaatgccgcgaggtcaggaacttcctccagtcgccaagaggcgtcttgaccgtttaaaa

SEQ ID NO: 24130 - DNA, 880 bp, Homo sapiens
  MAP TO AC002104.1; EXPRESSED IN BRAIN, SIGNAL = 1.3; EXPRESSED IN HELA, SIGNAL = 1.4; EXPRESSED IN HEART, SIGNAL = 1.7; EXPRESSED IN FETAL LIVER, SIGNAL = 1.5; NT HIT: gi11429600, EVALUE 1.00e-113; EST_HUMAN HIT: BE674923.1, EVALUE 4.00e-99; SWISSPROT HIT: Q60992, EVALUE 7.00e-36
atgggggccaggactggggccaagtggccctggggatcctcgaggcggctcgacccgggagccaggactggcgccaagtggcccgggtccgggtccgggaagaggcggaggccggcgagggggcggtgcccggggccaacccagctccctccggccccgagggctcccgccccgcgcccctcccgggccctccagccgcgccccgggccggcgcagcgaccgcgcccgctcttccaccggcgtccggccaggaggcgcgaggcccaaggatgcgacccacgacgcgcacacccggctcggcaggctccctgggaaatgaggggccactcgcagggccccgcagagcgagcgcagcgccggagcctcccccatcccaggccgcgcagaccgcggaaccggcgcaccagagcagtgcccgcgggcggcggcggcgcgacccaggctgaggggactttggccaacttcgcgcctcctgaggtcgcgtctcggaggcccggggcgcaccctccagccgcccgcccgcgtcccggagcccggccgccccagccagggcgcctgggccgccgccgctgcgacctccgcgttcagtccgcgcgtcgggcagcgcgaacgccgcctccccggggccctcccgcccgccgggcgctcacctgggacatctgcggccggaagttgatgtccttgaggtcgatggagccgggggagaggttgtgcagcagctggcacagaaggaccccgtcgcgcagcgcctgcgccaggtcgaagaccacggccgagggccacaccacccggtggttgggcggcaggaccttgcaatcgatgagccagcggccgcactgccgccactgctccatggcgcccgcgggcccgaccggctcag

SEQ ID NO: 24131 - DNA, 623 bp, Homo sapiens
  MAP TO AP001479.1; EXPRESSED IN LUNG, SIGNAL = 1.5; EXPRESSED IN HELA, SIGNAL = 0.85; EXPRESSED IN BRAIN, SIGNAL =   1; EXPRESSED IN HEART, SIGNAL = 2.8; SWISSPROT HIT: P12109, EVALUE 1.00e-112; NT HIT: gi15320399, EVALUE 0.00e+00; EST_HUMAN HIT: AL550254.1, EVALUE 0.00e+00
tcacgttctcctccccggctgacatcaccatcctgctggacggctccgccagcgtgggcagccacaactttgacaccaccaagcgcttcgccaagcgcctggccgagcgcttcctcacagcgggcaggacggaccccgcccacgacgtgcgggtggcggtggtgcagtacagcggcacgggccagcagcgcccagagcgggcgtcgctgcagttcctgcagaactacacggccctggccagtgccgtcgatgccatggactttatcaacgacgccaccgacgtcaacgatgccctgggctatgtgacccgcttctaccgcgaggcctcgtccggcgctgccaagaagaggctgctgctcttctcagatggcaactcgcagggcgccacgcccgctgccatcgagaaggccgtgcaggaagcccagcgggcaggcatcgagatcttcgtggtggtcgtgggccgccaggtgaatgagccccacatccgcgtcctggtcaccggcaagacggccgagtacgacgtggcctacggcgagagccacctgttccgtgtccccagctaccaggccctgctccgcggtgtcttccaccagacagtctccaggaaggtggcgctgggctag

SEQ ID NO: 24132 - DNA, 1230 bp, Homo sapiens
  MAP TO AC013584.3; EXPRESSED IN BRAIN, SIGNAL = 1.1; EXPRESSED IN FETAL LIVER, SIGNAL = 1.2; EXPRESSED IN HEART, SIGNAL = 1.4; EXPRESSED IN LUNG, SIGNAL = 1.1; EST_HUMAN HIT: AU148548.1, EVALUE 0.00e+00; SWISSPROT HIT: Q9UBP0, EVALUE 3.00e-64; NT HIT: gi14721470, EVALUE 0.00e+00
atgcccgacaacagcatttcaaacacaaatcgggggaatggctttgacagaagtgctgaaacatcatccttagcatttaagccaacgaagcagctaatgtcctctgaacagcaaaggaaattcagcagccagtccagtagggctctgacccctccttcctacagtactgctaaaaattcattgggatcaagatccagtgaatcctttgggaagtacacatcgccagtaatgagtgagcatggggacgagcacaggcagctcctctctcacccaatgcaaggccctggactccgtgcagctacctcatccaaccactctgtggacgagcaactgaagaatactgacacgcacctcatcgacctggtaaccaatgagattatcacccaaggacctccagtggactggaatgacattgctggtctcgacctggtgaaggctgtcattaaagaggaggttttatggccagtgttgaggtcagacgcgttcagtggactgacggccttacctcggagcatccttttatttggacctcgggggacaggcaaaacattattgggcagatgcatcgctagtcagctgggggccacatttttcaaaattgccggttctggactagtcgccaagtggttaggagaagcagagaaaattatccatgcctcttttcttgtggccaggtgtcgccagccctcggtgatttttgttagtgacattgacatgcttctctcctctcaagtgaatgaggaacatagtccagtcagtcggatgagaaccgaatttctgatgcaactggacactgtactaacttcggctgaggaccaaatcgtagtaatttgtgccaccagtaaaccagaagaaatagatgaatcccttcggaggtacttcatgaaacgacttttaatcccacttcctgacagcacagcgaggcaccagataatagtacaactgctctcacagcacaattactgtctcaatgacaaggagtttgcactgctcgtccagcgcacagaaggcttttctggactagatgtggctcatttgtgtcaggaagcagtggtgggccccctccatgccatgccagccacagacctttcagccattatgcccagccagttgaggcccgttacatatcaagactttgaaaatgctttctgcaagattcagcctagcatatctcaaaaggagcttgatatgtatgttgaatggaacaaaatgtttggttgcagtcagtga

SEQ ID NO: 24133 - DNA, 804 bp, Homo sapiens
  MAP TO AC006544.19; EXPRESSED IN BRAIN, SIGNAL = 0.77; EXPRESSED IN LUNG, SIGNAL =   1; EST_HUMAN HIT: BI834613.1, EVALUE 0.00e+00; SWISSPROT HIT: P56945, EVALUE 2.00e-03; NT HIT: gi14738425, EVALUE 0.00e+00
gtcatgttctctttcgaggccggccgccgctgcccctcaggccctggaaccttcaccttccagacggcacagggaaatgacatcttccaggcagttgagactgccatccaccggcagaaggcccagggaaaggccggacaggggcacgatgttctcagagctgactcccatgaaggggaggtggcagaggggaagttgccttccccacctggcccccaagagctcctcgacagtcccccagccctgtatgctgagcccttagactccctgcgcattgctccatgcccttcccaggactccctatactcagaccccttggacagcacgtctgctcaggcaggagagggagtacaacggaagaaacctctctattgggacttgtatgagcatgcgcagcagcagttgctgaaggccaagctgacagaccccaaagaggatcccatctatgatgaacctgagggcctggccccagtccctccccagggcctttatgatctgcctcgggagcccaaggatgcatggtggtgccaagctcgggtgaaggaggagggctatgagctcccctacaaccctgccactgatgactacgctgtgccaccccctcggagcacaaagcccctccttgctcccaagccccagggcccagccttccctgaacctggtactgcaactggcagtggcatcaaaagccacaactcagccctgtacagccaggtccagaagagcggggcctcagggagctgggactgtgggctctctagagtagggactgacaagactggggtcaagtcagagggctctacc

SEQ ID NO: 24134 - DNA, 675 bp, Homo sapiens
  MAP TO AL139227.1; EXPRESSED IN BRAIN, SIGNAL = 1.1; EXPRESSED IN PLACENTA, SIGNAL = 1.4; EST_HUMAN HIT: AV698159.1, EVALUE 0.00e+00; SWISSPROT HIT: Q61967, EVALUE 1.00e-116; NT HIT: gi6756066, EVALUE 5.00e-94
ctagagtttatttcgagtatgaattctctggtgtttagtaagagctgaacttcggctgaagtttttcccacattccttacaagaatagggtttttctccagtatgaattctctgatgatcatgcaggttggttttttttcggaaggctctcccacattcattacattcatagggcttctctccagtatgagttctctcatgctgaatgagagatgaactttgactaaaggctttcccacagtcaatacattcatagggtttctctccagtgtgggttctctcatgttgagtaagcgatgagcgtcgactaaaggcttctccacactcattacattcatagggtttctctccagtatgaattctgtgatgctctatgaaacttgtactccttttgaaagctttcccacatacattacattgatagggtttctctccaggatgagaaatagcttgctgactaaaagcctgctcacaatcataggggttctctgcagtatggatcctctgatggtcagtaaagtctgtaatgtgactaaagtcttccccacagtcattacaatggtaggatttcacttcggtaagagtgctttcatcttgagtgagagatgtgctgtgcttgaaatctatgctgtagttactgctttggtaaggtttgcctctcttatgaatcctcat

SEQ ID NO: 24135 - DNA, 777 bp, Homo sapiens
  MAP TO AL049872.3; EXPRESSED IN BRAIN, SIGNAL = 0.82; EXPRESSED IN HELA, SIGNAL = 0.84; NT HIT: gi14748743, EVALUE 0.00e+00; EST_HUMAN HIT: BI713015.1, EVALUE 0.00e+00; SWISSPROT HIT: P30622, EVALUE 3.00e-11
attgagtttaattaaatgctcatgttccagctgtaaggcagaggtattcaaattacgtgcatttgacagttcttcaatggttttctcatacttgtttgcttcttccaacagcctctttttagcccaacacaattctgcctctatctctcctttttccatttttagagtctccacaatagtgtttttttccagagaaagctgattgttaccagcaagacattcttctaactgatgcctcacatcttcacatgctaaaactaacttttcattttccattttgacatcaaaagcaactttctttaaattttcattgagctgttctaattctgaaagattttgctttaagtttctaacttcagcttctctttctttaagtaaggtatccttaaaattactattagagtcttgatttagagactgcattaactcattccttattctagaaagctcctcctcattttgtctaatatgctccttaagttctaaattctccttctggatgcttacattactttcttgtgatttatttagctgatctactaaattttctactttgtcctcaagtttctgcttggttaaatgtaaatcatttagggccacttcactttgaattagcttttctttctgtacatctaactctttagtaatgtccattttatcatcttcaagttgatgaactctctttttttcatcatttagatcttgtttcagtttactgatgatgctatctccttcattttgttgttttgatagctgatcttttatcaaaatcatgtg

SEQ ID NO: 24136 - DNA, 964 bp, Homo sapiens
  MAP TO AL355833.1; EXPRESSED IN BRAIN, SIGNAL = 0.9; EXPRESSED IN FETAL LIVER, SIGNAL = 0.96; EST_HUMAN HIT: AI460323.1, EVALUE 1.00e-108; SWISSPROT HIT: Q13258, EVALUE 1.00e-128; NT HIT: U31332.1, EVALUE 0.00e+00
tcagcagcaaaccttcctggcccagggcgcagctcgcctggcgccgcgtccatcccgatccgctccacccttcccgccccgcatccgcggccggacagtctcagtgccctgctgcctcggggcccggggactcacaattacgggcagagaacacatagtgaagagcacggtcatcagcgccagcagcaggaggtgatccagctcctccaggggctgaggggacgcttccctcccgtccgcgcgcggctcggcacagtccctggtgcaggagcgcgggtgccgctgcagccgccggtgcatcgcatagaggttgcgcatggcgccgaggttgcacagcacggtggcgaggaccagcagcgccatgaggctggagtagagcacagagtaccccagcaccgacagcgagccctcctcgtggaccatctggataaagcaccaggtgccggggcagtactgcacgaacttcccgaagcccatgaaaggtagcgcgcagaaagccagggagaaggcgctcaccaccggggccaccagtgcgcccaggcgcagggtgatgtgccgtcggtagaagaaagggtgccctagggagagccagcactccagtgccatggccaggagttgcagtgtcgaggagagcccaaagaaggacatgaagaaggcgaaggcttggcacaacgagttgtccaatgcgggcgcaagcacccgcagactccggttctgagcgtaggcagccagcaccaccgggcttaggaggcacttgcccagcaagtcggtgaccgtcaggccacacaccagcatgtagaagaccgagggcagcgggcgcagtggacgccgcgagcaccaccccagccccgagcgcgccagcagccccagggccagcaggttgcccaggaggccggtgctgaagagcaccccgcccatcaccgccgagttgcctttttccacagaggtggtgttctggcagcgg

SEQ ID NO: 24137 - DNA, 575 bp, Homo sapiens
  MAP TO AP000344.1; EXPRESSED IN BRAIN, SIGNAL = 0.78; EXPRESSED IN HELA, SIGNAL = 0.31; SWISSPROT HIT: P49901, EVALUE 1.30e-01
ccaggggaggttcctgaaggctgccgccgccctctggcagctaacagacagcctccagtagccagggccaggtatccagccgcctctgctggggaggccccacgtggcactgagaacaggagagaggtcttctgcagacaagatctttcaagacacttcttgaagtggagagcagaggctgacatagcaggacaccctggcaggaagaaggcaagcagctggcaagcagtagcctcgtcactggtatgaggagacgtgtgctgcaaacaagcatggcaggacagcagcgggagctggtactgtccccactccagaccgcagccctgcagcccgagacgagtgggagccggtactgcccccactccagaccgcagccctgcagcccgagacgagtgggagccagtactgcccccactccagaccgcagccctgcagcccgagacgagtgggagccgggactgtccccactccagactgcagccctgcagcccaagatgctgcctggaggcaggaggcctcccttccaagacctgggtgtccggctttctcaagttaacaaggagagaggagtgccg

SEQ ID NO: 24138 - DNA, 664 bp, Homo sapiens
  MAP TO AL121787.22; EXPRESSED IN HELA, SIGNAL = 1.1; EXPRESSED IN BRAIN, SIGNAL = 0.81; SWISSPROT HIT: P97303, EVALUE 2.00e-88; NT HIT: gi6671607, EVALUE 0.00e+00; EST_HUMAN HIT: AA504587.1, EVALUE 0.00e+00
gtcacagccaggggctttgggccgctgttacagtttgcctacactgccaagctgttactcagcagagaaaacatccgcgaggtcatccgctgtgctgagttcctgcgcatgcacaacctggaggactcctgcttcagcttcctgcagacccagctcctgaacagtgaggatggcctgtttgtgtgccggaaggatgctgcgtgccagcgcccacacgaggactgcgagaactctgcaggagaggaggaggatgaagaggaggagacgatggattcagagacggccaagatggcttgccccagggaccagatgcttccagagcccatcagctttgaggccgccgccatccccgtagcagagaaggaagaagccctgctgcccgagcctgacgtgcccacagacaccaaggagagctcagaaaaggacgcgttaacgcagtaccccagatacaagaaataccagcttgcatgtaccaagaatgtctataatgcatcatcacacagtacctcaggttttgcaagcacattccgggaagataactctagcaacagcctcaagccggggcttgccagggggcagattaaaagtgagccgcccagtgaagagaatgaggaagagagcatcacgctctgcctgtctggagatgagcctgacgccaaggaca

SEQ ID NO: 24139 - DNA, 553 bp, Homo sapiens
  MAP TO AL133448.4; EXPRESSED IN LUNG, SIGNAL = 1.9; EXPRESSED IN FETAL LIVER, SIGNAL = 0.94; EXPRESSED IN BRAIN, SIGNAL = 1.1; EXPRESSED IN HELA, SIGNAL = 1.2; EST_HUMAN HIT: BG679712.1, EVALUE 0.00e+00; SWISSPROT HIT: Q04592, EVALUE 5.00e-03; NT HIT: gi14751381, EVALUE 0.00e+00
aactcagtgctgggcaacctgcgttctctgctacagatcttacgccaggatatgactccaggaggtggcccaggtgcccgccgtcgtcagcggggccgcttgatgcgacgcctggtacgccgtctccgccgctggggcttgctccctcgaaccaacaccccggctcgggcctctgaggccagatcccaggtcacaccttctgctgctccccttgaggccctagatggtggcacaggtccagcccgtgagggcggggcagtgggtgggcaagatggggagcaggcacccccactgcccatcaaggctcccctcccatctgctagcacgtctccagcccccactactgtccctgaagccccagggccactgccctcactgcccctagagccatcactattgtctggagtggtgcaggccctgcgaggccgcctgttgcccagcctggggcccccaggaccaacccggagcccccctggaccccacacagcagtcctggccctggaagatgaggacgatgtgctactggtgccactggctgagccgggggtgtggg

SEQ ID NO: 24140 - DNA, 576 bp, Homo sapiens
  MAP TO AC005954.1; EXPRESSED IN BRAIN, SIGNAL = 0.87; SWISSPROT HIT: O96018, EVALUE 3.00e-72; NT HIT: gi13633014, EVALUE 0.00e+00; EST_HUMAN HIT: BG488505.1, EVALUE 0.00e+00
ctgggcaccagcgggtggctcttcaggtgtgactagaggcaccgtctccagccagggttccggggaactgcttgagctcctgctgccctcctgctcagcagaggccccctccacccattctggggagtcagaatcctcatctgggtcctcagggggctgcaacagtcggggggcaggctctagaggctcttcaggaccagtctgggaaggcgggcattcctcgcagtgcaagaggcccagcaggtcatcccggccagcttcggcagacaggagcccgtgggcatcagcaatctcctgggaggccaggccatggcctgtggcaatgtgtaggggacagggggctccacctggggatgggcccaccagatcgcctggcagagcttcaaactgctgcaccagctcctgaaggcttgactcatcaagttccatccgactgaggctgccggggcctcctggcatagggtcccactggctgtcaggggtgaggtcctccgaaggcacaagaatgtccctgggcccctccaagtccatggctggaggccccgaaggggatcgggaaattgtggggaagtccat

SEQ ID NO: 24141 - DNA, 514 bp, Homo sapiens
  MAP TO Z97632.1; EXPRESSED IN HELA, SIGNAL = 0.76; EXPRESSED IN BRAIN, SIGNAL = 0.86; SWISSPROT HIT: P32247, EVALUE 2.00e-76; NT HIT: X76498.1, EVALUE 0.00e+00; EST_HUMAN HIT: BG707051.1, EVALUE 0.00e+00
ctagaatctgtcctctgcctgcttcacactacacccagtgaacgaggtcacactaatttcagacatctgtatgctcccagtgcccgggaccgttcccatcacagccagggtggtaagagaggtgtcagcaacaggaggctcaggccgctccgccttgcaacagaacaactgagctttaaaatgcttctggaagcttttgctcagccagtagagagcaaaggggtttacgcaagaattgctgaaagccaaaacccgagagaaaatggtgaaaatgaaatgcatggcagaggggtctacataggtttgagaagtgaatgaatggtagaggtacaggaggtgatttggcaaccagcagagggcaaacagagccaccaacaccaataccgttctggcaattctctttcgggattcaatctatagggggaagaaacatagcaaaaaaaaaaaaaaaaaaaaaaaaaacacaaaaaacaacaacaacaaaaaaaacaaaacatttagctgtgagagattt

SEQ ID NO: 24142 - DNA, 639 bp, Homo sapiens
  MAP TO AC004144.1; EXPRESSED IN LUNG, SIGNAL = 1.2; EXPRESSED IN HELA, SIGNAL = 0.98; EXPRESSED IN BRAIN, SIGNAL = 1.2; EXPRESSED IN FETAL LIVER, SIGNAL = 1.4; NT HIT: gi14767158, EVALUE 0.00e+00; EST_HUMAN HIT: BG332912.1, EVALUE 0.00e+00; SWISSPROT HIT: Q02388, EVALUE 3.00e-04
ctccctgccttacgagcctggcgtcctgtgtccctgcttcctccgtgctgcccacagacaggaatctcccaacgcccacatctgcacccaccccaggcctggctcagggtgtccatgccccctccacctgttcctacatggaggccactgccagctcccgtgccaggatatcacgcagcatctccctcggtgacagtgagggccctatcgtggccacactggcccagcccctccgtaggccatcgtccgttggggagctggcctccttgggccaggagcttcaggccatcaccaccgcgacaacacccagtttggacagtgagggccaagagcctgccctgcgttcctggggcaaccacgaggcccgggccaacctgagactgaccctgtcaagtgcctgtgatgggctcctgcagccccccgtggatacccagcctggcgtcaccgtccctgcagtgagcttcccagcccctagccctgtggaagagagcgccctgaggctccacggctctgcctttcgcccaagtctcccagctcctgagtcccctggccttcctgcccaccccagtaacccccagcttccagaggcccggcctggcatccctggcggcactgcctccctcctggagcccacctccg

SEQ ID NO: 24143 - DNA, 534 bp, Homo sapiens
  MAP TO AP001754.1; EXPRESSED IN BRAIN, SIGNAL = 1.3; EXPRESSED IN HELA, SIGNAL = 1.1; EXPRESSED IN LUNG, SIGNAL = 1.1; EXPRESSED IN FETAL LIVER, SIGNAL = 1.1; NT HIT: AF234171.2, EVALUE 5.10e-01
ctctcttcagatcagaaccaatgttcggatttgctgaccgtgatgatagtgatgatagtgatagtgatgatagtgacagtgatgatagtgacggtgatagtgatgatagtgacagtgactgtgattgtgatgatgatagtggatagtgatatgacagcgatggtgacagcaaggatagtgatgatagtgacagtgatagtgatgatagtgacagtgactgtgatgatagtggatagtgatatgacagtgatggtgacagcaagggtagtgatgatagtgacagtgatagtgatgatagtgacagtgactgtgatgatagtggatagtgatatgacagtgatggtgacagcaaggatagtgatgatagtgacagtgatagtgatgatagtgacagtgactgtgatgatagtggatagtgatatgacagtgatggtgacagcaagggtagtgatgatagtgacagtgatagtgatgatagtgacagtgactgtgatgatgatagtggatagtgatgtgacagtgacagtgaggata

SEQ ID NO: 24144 - DNA, 1559 bp, Homo sapiens
  MAP TO AC007782.20; EXPRESSED IN BRAIN, SIGNAL = 0.9; EXPRESSED IN HELA, SIGNAL = 1.1; NT HIT: gi11434203, EVALUE 0.00e+00; EST_HUMAN HIT: BG461174.1, EVALUE 0.00e+00; SWISSPROT HIT: P13830, EVALUE 2.00e-05
aatggacagtttagaagaacctcagaaaaaagtctttaaggctcgaaaaacgatgagagtgagtgatcgtcagcaacttgaagcagtgtacaaggtcaaagaagaactgttgaaaactgatgtcaagctgttaaatggcaaccatgaaaatggagatttggacccaacctcacctttggaaaacatggattacattaaagacaaggaagaggtgaatggcattgaagagatttgttttgatcctgaaggaagtaaagcagaatggaaggaaacaccctgtatcctaagtgttaatgtaaaaaacaagcaggatgatgatttaaattgtgaacctttgtctccccataatataactccagaaccagtctctaaactgcctgctgaaccagtttctggtgatccagcccctggtgatctggatgccggagatccagcctccggagtactggcctctggtgattccacctctggtgatcccacctctagcgagccctcctctagtgatgctgcctctggtgatgcaacctctggtgatgccccttctggtgatgtgtcccctggtgatgccacctctggtgatgccactgctgatgatctctcctctggtgatcccacctctagtgatcccatcccaggtgaaccggtccctgttgaacccatttctggtgattgtgccgctgatgatatagcctctagtgaaataacttctgttgatctggcttctggagcaccagcttccactgatccagcctctgatgatctggcctctggtgatctatcctctagtgaactggcctctgatgatctggccactggtgaactggcctctgatgagctgacttctgaatcaacctttgatcgtacctttgaaccaaagtctgtaccagtttgtgaaccagttcctgaaattgacaatatagaaccaagtagcaataaagatgatgattttcttgaaaaaaatggagctgatgaaaaattagagcaaattcagagtaaagactcattggatgagaaaaataaagctgataataatattgatgctaatgaagaaactctagaaacagatgatacaactatttgttcagatcgacctcctgaaaatgaaaagaaggtagaggaagatattatcacagagcttgctcttggagaagatgctatatctagcagtatggaaattgaccaaggtgaaaagaatgaagatgaaacttctgcagatcttgtagaaacgattaatgaaaatgttattgaagataacaaaagtgagaatatcttagaaaatacagactctatggagacagatgaaatcattcctattttggaaaagcttgcaccttctgaggatgaacttacttgcttttctaaaacatctctccttccaatcgatgagacaaatccagatttggaagagaaaatggaaagttcttttggttcaccatctaaacaagaaagtagtgagagtttgccaaaagaagcctttctggtcctctctgatgaagaggatatttcgggtgaaaaagatgagtctgaagttatatcgcaaaatgaaacgtgctctccag

SEQ ID NO: 24145 - DNA, 555 bp, Homo sapiens
  MAP TO AJ009612.1; EXPRESSED IN HEART, SIGNAL = 1.7; EXPRESSED IN LUNG, SIGNAL = 1.3; EXPRESSED IN HELA, SIGNAL = 3.3; EXPRESSED IN PLACENTA, SIGNAL = 1.6; EXPRESSED IN BRAIN, SIGNAL = 1.4; NT HIT: gi14770861, EVALUE 0.00e+00; SWISSPROT HIT: P52742, EVALUE 2.00e-75; EST_HUMAN HIT: AL535717.1, EVALUE 6.00e-11
ttaattacgatgtttggcacctgtatgaacacgttgatgctgaataaggtttgtactctgggtgaaggttttaccacatatacgacatgcatagggtttctctcctgtgtgaattctctggtgttgaataaggcatgttctctggctaaaatccttatcacattcattacatttatagggtctctctccagtatgagttctctgatgttgattaagtgatgaggaataaatgaaagctttcccacattcattacatttatagggtttttctccagtatgaatcctttgatgctgagtaagatttgcgccttgtctatatgctttcccacatatattgcatttaaagggtttttctccattatgaatcctctgatgttgagtaaggtgcacactctggctgaatgctttcccacacacactgcatttatatggtttctctccagtatgtgttctatgatgttgagtaagatttgcactctggctgaaggctttcccacatatattacatatataggatttctctccagtgtgagtggtttgatgttgaataagggt

SEQ ID NO: 24146 - DNA, 457 bp, Homo sapiens
  MAP TO AL031777.2; EXPRESSED IN BRAIN, SIGNAL = 0.8; EXPRESSED IN HELA, SIGNAL = 1.1; SWISSPROT HIT: P16106, EVALUE 2.00e-69; EST_HUMAN HIT: AI351370.1, EVALUE 1.00e-112; NT HIT: Z80786.1, EVALUE 0.00e+00
caaacagctcgtaagtccactggcggcaaagccccgcgcaagcagctggccactaaggcggctcgcaaaagcgcgccagccaccggtggcgtgaagaagccccaccgctacaggcctggtactgtcgccctccgtgaaatccgccgctatcagaaatcgactgagctactgattcgcaagctaccattccagcgtctggtacgtgagatcgcgcaggacttcaagaccgacctgcgcttccagagctcggctgtgatggcgctgcaggaggcctgcgaggcttacctggtggggctctttgaggacaccaacctgtgtgctatccacgccaagcgagtgactatcatgcccaaggacatccagctcgctcgccgcattcgcggagagagggcataagttgtactgagggtgtgcgccaacttaaaccaaaggctcttttcagagccaccaacaattt

SEQ ID NO: 24147 - DNA, 566 bp, Homo sapiens
  MAP TO Z82188.2; EXPRESSED IN BRAIN, SIGNAL = 0.84; EXPRESSED IN HELA, SIGNAL = 0.47; SWISSPROT HIT: P78741, EVALUE 1.80e+00; EST_HUMAN HIT: BF828726.1, EVALUE 7.90e-01
gtctggcacctccacagaacttagcaagtcctgaggtgggactgactgtgcaggcactgttgtgcccatgtcggaacttcttaaatcctcacaacaaccccgcctctcttttaaagaaactcccctttgcttatcaccttcggggtccagcattgtttcatttcactgctgaaatgaacactttcccatgacctccagtagtggaggttgagggtttctcgcccaaattcccaaattcccgccaggctctcagcccactttggaactcaccctcccccccagtacacacgctttcgctggggttgccgcagttctgttccagcatggcatatggtccatgcctggccagtcagagcacagcactgcaccactctgacaaatatgattggttaaaagggggcccaggacctaagctggtccaatcacagtaaatcttagttagaactttgcctgggatagacatttgctctttttggctgaacttgaacttggaaggatgaggccctgaacttgaacttggaaggatgaaaccctgaacttgaacttgggaggatgaagccctaagt

SEQ ID NO: 24148 - DNA, 1978 bp, Homo sapiens
  MAP TO AC022423.2; EXPRESSED IN HELA, SIGNAL = 0.52; EXPRESSED IN BRAIN, SIGNAL =   1; NT HIT: gi16171325, EVALUE 0.00e+00; SWISSPROT HIT: P42568, EVALUE 8.00e-04; EST_HUMAN HIT: AU140961.1, EVALUE 0.00e+00
atgacaccagctggtgctgtcctgccaggagaccccctcacatcccaggagcagagacagggagctccaggtaaccacagtaaggctctggaaatgacaggaatccatgcacctgaaagctcccaggagccttccctgctggagggagcagattctgtgtcctcaagggcaccgcaggccagcctctccatgctgccatccactgacaacaccaaagaagcatgtggccatgtctcggggcactgctgcccgggggggagtagagagagccctgtgacggacattgacagcttcatcaaggagctggatgcttctgcagcaaggtctccgtcttcccagacgggggacagtggctctcaggagggcagtgctcagggccacccaccagccggggctggaggtgggagctcctgccgtgccgaaccagtcccggggggccagacctcctccccgaggagggcctgggctgctggtgcccccgcctacccacaatgggcctcccagccttcggttttagattcaattaatcccgacaaacattttactgtgaacaaaaactttctgagcaactactctagaaattttagcagttttcatgaagacagcacctccctatcaggcctgggtgacagcacggagccgtctctgtcatccatgtatggcgatgctgaggattcttcttctgaccctgagtcactcactgaagccccacgagcttctgccagggacggctggtcccctcctcgttcccgtgtgtctttgcacaaggaagatccttcggagtcagaagaggaacagattgagatttgttccacacgtggctgccccaatccaccctcgagtcctgctcatcttcccacccaggctgccatctgtcctgcctcagccaaagttctgtcattaaaatacagcactccgagagagtcggtggccagtccccgtgagaaggccgcctgcttgccaggctcatacacttcaggcccagactcttcccagccatcatcactcttggagatgagctctcaggagcatgaaactcatgcggacataagcacttcacagaaccacaggccctcgtgtgcagaagaaaccacagaagtcaccagcgctagctcagccatggaaaacagtccgctgtctaaagtagccaggcattttcacagtccgcccatcattctcagctcccccaacatggtaaatggcttggaacatgacctgctagatgacgaaaccctgaatcaatacgaaacaagcattaatgcagctgccagtctgtcctccttcagtgtggatgtccctaagaatggagaatctgttttggaaaacctccacatctctgaaagtcaagacctggatgacttgctacagaaaccaaaaatgatcgctaggaggcccatcatggcctggtttaaagaaataaataaacataaccaaggcacacatttgaggagcaaaaccgagaaggaacaacctctaatgcctgccagaagtcccgactccaagattcagatggtgagttcaagccaaaaaaagggcgttactgtgcctcatagccctcctcagccgaaaacaaacctggaaaataaggacctgtctaagaagagtccggcagaaatgcttctgactaatggtcagaaggcaaagtgtggtccgaagctgaagaggctcagcctcaagggcaaggccaaagtcaactctgaggcccctgctgcgaatgctgtgaaggctggggggacggaccacaggaaacccttgatctcaccccagacctcccacaaaacactttctaaggcagtgtcacagcggctccatgtagccgaccacgaggaccctgacagaaacaccacagctgcccccaggtccccccagtgtgtgctggaaagcaagccacctcttgccacctctgggccactgaaaccctcagtgtctgacacgagcatcaggacatttgtctcgcccctgacctctcccaagcctg

SEQ ID NO: 24149 - DNA, 598 bp, Homo sapiens
  MAP TO AL160313.1; EXPRESSED IN BRAIN, SIGNAL = 0.79; EXPRESSED IN HELA, SIGNAL = 0.43; SWISSPROT HIT: P08699, EVALUE 2.00e-04; EST_HUMAN HIT: BE876298.1, EVALUE 2.00e-23; NT HIT: gi15300951, EVALUE 1.00e-82
ctctcagagctgtggtccacggcgttctcgtcatcctcggagactctgaactcgctgatgcggatccactcactgctgcggatacccactgagtagtagacgtagagcctgcggttgtgctggaagctggggtggaaggcaatgcccaggaagccacgctcgtcaccctcccagggcgaggtgagcaccacccggctgatgttcaggaaaggcttccccagcctcgagcggtcgggcaggtaggcccacaccagccccacctgctcggccacgaagaagcggtgggtgccatccctggcatggaccatggccacggggttgcgcagcccgttggccacctcctccaggcacagctgcaggcagcccttggcatcggctaccacgtggcccaggtttgagttgaggttcttgttgaccagcaggtaagggaagcagtagtccgtgtcatccagggacaggtagcggcagaacctggcaaggttgccctccagcgcccagagctcctggtcagttgacaggtgacggaacagcccccggcacttatgccacatgtccaggcagtaatcctggcagagcccgggcaccgtgcgcaggggcg

SEQ ID NO: 24150 - DNA, 1127 bp, Homo sapiens
  MAP TO U82672.1; EXPRESSED IN HELA, SIGNAL = 0.9; EXPRESSED IN BRAIN, SIGNAL = 0.99; SWISSPROT HIT: P52742, EVALUE 1.00e-102; EST_HUMAN HIT: BI333283.1, EVALUE 0.00e+00; NT HIT: gi13648594, EVALUE 0.00e+00
agggggaagatgcccagccacaggagatggcgtccacaagcttcccaagggccagtggtcccagtcctgaattcagacagcacggggactctgacgggaagagagggagcccacagaatctgcccatagaacatcattttgcttgtaaagagtgtggggacacctttcggcttaaagtcctgcttgtccagcaccagagagtccacagtgaggagaagggctgggaatgtggcgactgcgggaaggtctttaggggggtggcggagtttaatgagcacaggaaaagccacgtagctgcggagccccagcccggccccagtagggccctggagaatgccgcggagaagagggagcagatggagagggaggcaaagcccttcgagtgcgaggagtgcggaaaacggtttaagaagaatgcaggcctgagtcagcatctgagggtccacagcagagagaagccctttgattgcgaggaatgcgggcggtcgttcaaagtcaacacccacctcttccgacatcagaaacttcacacttcggaaaagcctttcgcctgcaaggcgtgcagcagggatttcctggatcgccaggagcttctcaagcaccagcgcatgcacactggccacctgcccttcgactgcgacgactgcggcaagtccttccgaggggtcaacgggctggccgagcaccagcgcatccacagtggggccaagccatacgggtgtccccactgcggcaagctcttccgaaggagctcggagctcaccaagcaccggcggatccacacgggcgagaagccctacgcctgcggccagtgcggcaaggccttccgccagagctccagcctcctggagcacgcacgcatccacagtggcgagcggccctacgcatgcggcgagtgtggcaaggccttccgtgggccctctgacctcatcaagcaccggcgcatccacagcggactgaaaccctatgagtgcgacaaatgcggcaaggccttccgccggagctccggcctcagtcgccaccggcggatccacagtggggcgcggcgctgcgaatgcagccagtgtggccgcgtgttcaagaggcgctcggcactgcagaagcatcagccaacccaccacgagtag

SEQ ID NO: 24151 - DNA, 752 bp, Homo sapiens
  MAP TO AL035462.17; EXPRESSED IN HELA, SIGNAL = 1.3; EXPRESSED IN BRAIN, SIGNAL = 1.3; EXPRESSED IN LUNG, SIGNAL = 1.4; EXPRESSED IN FETAL LIVER, SIGNAL = 1.1; EST_HUMAN HIT: BI559806.1, EVALUE 0.00e+00; NT HIT: AB024444.1, EVALUE 0.00e+00
ggctacggagtacgccagagcgtgccctacgggatggccgtggtggtgcgctcgccgctgcgcacgtcgctgtcgtccctgcgcagcgagcacagcaacggcacggtggccccggactctcccgcctcgccggcctccgacggccccgcgctgccctcgcccgccatcccgcgtggcggcttcgcgctcagcctcctggccaatgccgaggcggccgcgcgggcgcccaagggcggcggcctcttccagcggggcgcgctgctgggcaagctgcggcgcgcagagtcgcgcacgtccgtgggtagccagcgcagccgtgtcagcttccttaagagcgacctcagctcgggcgccagcgacgccgcgtccaccgccagcctgggagaggccgccgagggcgccgacgaggccgcacccttcgaggccgatatcgacgccaccaccaccgagacctacatgggcgagtggaagaacgacaaacgctcgggcttcggcgtgagcgaacgctccagtggcctccgctacgagggcgagtggctggacaacctgcgccacggctatggctgcaccacgctgcccgacggccaccgcgaggagggcaagtaccgccacaacgtgctggtcaaggacaccaagcgccgcatgctgcagctcaagagcaacaaggtccgccagaaagtggagcacagtgtggagggtgcccagcgcgccgctgctatcgcgcgccagaaggccgagattgccgcctccag

SEQ ID NO: 24152 - DNA, 1251 bp, Homo sapiens
  MAP TO AL049547.9; EXPRESSED IN HELA, SIGNAL = 1.1; EXPRESSED IN BRAIN, SIGNAL = 0.81; EXPRESSED IN FETAL LIVER, SIGNAL = 1.2; SWISSPROT HIT: P22105, EVALUE 0.00e+00; EST_HUMAN HIT: BF732663.1, EVALUE 0.00e+00; NT HIT: gi15208634, EVALUE 0.00e+00
gtcagacagatgtgcggaccctctgcagtctccatggtgtgtttgatctgagccgctgcacctgttcctgtgagccaggctggggtgggcccacctgctcagaccccacagatgctgagatccctccctcttccccaccctcagcctcggggtcctgcccagatgactgcaatgatcagggtcgctgtgtccgtggtcgttgcgtgtgctttcccggctacactggccccagctgtggctggccatcctgtcccggggactgccaaggccgtgggcgctgcgtgcagggcgtgtgtgtgtgccgggcaggcttctcaggccccgactgcagccagcgctcctgccctcgaggttgcagccagaggggacgctgtgagggtgggcgctgcgtgtgtgacccaggctacactggtgacgactgtggcatgaggagctgccctcgcggttgcagtcagagggggcgctgtgagaatgggcgctgcgtgtgtaaccccggctacgctggcgaggactgtggggtgaggagctgccctcggggctgcagccagcggggacgctgcaaggacgggcgctgcgtgtgtgaccccggctacactggcgaggactgtggtacgcggagctgcccctgggactgtggcgagggcgggcgctgcgtggacggccgctgcgtgtgctggcccgggtacacaggcgaggactgcagcacgcggacatgtccgagggactgccggggccgcgggcgctgcgaggacggcgaatgcatttgcgacacgggctacagcggggacgactgcggcgtgcgcagctgccctggcgactgcaaccaaaggggccgctgcgaggacggccgctgcgtgtgctggccggggtacactggaaccgattgcggctcgcgcgcctgcccacgcgactgtagaggtcgcgggcgctgcgagaacggcgtgtgtgtttgcaatgcgggctacagcggcgaggactgcggtgtgcgcagctgtcctggggactgtcgtggccggggccgctgtgagagtggccgctgcatgtgttggccggggtacacaggccgggactgcggcacgcgcgcctgtcctggcgactgtcgcgggcgcgggcgctgcgtggatggccgctgcgtgtgcaacccgggcttcaccggtgaggactgtgggagccgtcgctgtcccggggactgccgtgggcacggcctttgcgaggatggcgtgtgcgtgtgtgacgcaggctactcagggg

SEQ ID NO: 24153 - DNA, 1021 bp, Homo sapiens
  MAP TO AL031447.4; EXPRESSED IN BRAIN, SIGNAL = 1.2; EXPRESSED IN HELA, SIGNAL = 0.98; SWISSPROT HIT: Q9UJP4, EVALUE 0.00e+00; NT HIT: gi11421399, EVALUE 0.00e+00; EST_HUMAN HIT: BG699287.1, EVALUE 0.00e+00
atggagcgaccggcgcccctggccgtgcttcccttctcggaccccgcgcacgccctgagcctgctgcgcggcctgagccagctgcgcgccgagcgcaagttcctggacgtgaccctggaggcggcgggcgggcgcgacttcccggcgcaccgtgcggtgctggccgccgccagcccctacttccgcgccatgttcgcggggcagctgcgcgagagccgcgccgagcgggtgcgcctgcacggagtgcctcccgacatgctgcagctgctgctggacttcagctacacgggccgcgtggcggtaagcggcgacaacgctgagccgctgctgcgcgccgccgacctgctgcagttcccggccgtgaaggaggcgtgcggggccttcctgcagcagcagctcgacctggccaactgcctggacatgcaggacttcgctgaggccttcagctgctcgggactggcgagcgcggcgcagcggttcattctgcgccacgtgggcgagctgggcgccgagcagctggagcggctgccactggcgcgcctgctgcgctacctgcgggacgacgggctgtgtgtgcccaaggaggaggccgcctaccagctggcgctgcgctgggtccgcgctgacccgccgcgccgcgccgcgcactggccgcagctgctggaggccgtgcgcctgcccttcgtgcgccgcttctacctgttggcgcacgtcgaggccgagccgctggtggcgcgctgcccaccctgcctgcgcctgctgcgcgaggcgcgcgacttccaggcggcgcgctacgaccgccacgaccgcgggccctgtccccgaatgcgtcctcgcccgtccaccggtctcgccgagatcctcgtgctcgtgggcggctgcgaccaggactgtgacgagctggtcactgtcgactgctacaacccgcagacgggtcagtggcgctacctggccgagttcccagaccacctgggcggaggctacagcatcgtggcgctgggcaatgacatctacgtgacgg

SEQ ID NO: 24154 - DNA, 627 bp, Homo sapiens
  MAP TO AC020663.1; EXPRESSED IN BRAIN, SIGNAL = 0.9; EXPRESSED IN HELA, SIGNAL = 1.4; EXPRESSED IN LUNG, SIGNAL = 0.97; SWISSPROT HIT: Q03309, EVALUE 5.00e-55; NT HIT: gi16166361, EVALUE 0.00e+00; EST_HUMAN HIT: BE798070.1, EVALUE 0.00e+00
tcaggctttggcaccggggcctccaggagccaccggctggagcgtcggcaaggagcctgcccccatgtgggtccgctggtgcttgtgcaggtcggtgccccggcggaagccccggccacaggccgggcaggtgtagggcttctcacctgtgtgcgtccggcggtgggcgctgaagtgcgagctgttgttgaagcgcttcccgcactgggtgcaggcatagggccgctccccgctgtgtgtcctgcggtggatgaccaggctggagctctggctgaagcgcttcccacactcggggcacgggtagggcttctcgcctgtgtgcaccctctggtgcgtgctgaagttggagcggtcgctaaagcccttcccacagactaggcacttgtaaggccgctcgcccgtgtgtgtgcgctggtgcttggtcaagtgggacgtcttgctgaagcctttgccacattcggggcaggtgtacggcttgtcagccccatgggaagcccgtcttcctggtggggggccgcctcttggctgatcaggcctgaccaagcccctgactggggctggcctctgacctgggagcgggtggccaggcccctggcatcgtgccgagagcactcggtaccactccat

SEQ ID NO: 24155 - DNA, 966 bp, Homo sapiens
  MAP TO AC010615.5; EXPRESSED IN BRAIN, SIGNAL = 1.5; EXPRESSED IN HELA, SIGNAL = 2.8; EXPRESSED IN FETAL LIVER, SIGNAL = 1.5; EST_HUMAN HIT: BG470039.1, EVALUE 2.00e-89; SWISSPROT HIT: P11930, EVALUE 8.00e-72; NT HIT: gi14861847, EVALUE 2.00e-17
ctatgcgggggtcccttgggggcctgggccgctgggaggggtcctccctctcacgtcctggcggtccgcagcaaggccctgagcaggccttacctggtagcccaccacctccgccaagtcggggtagacgggcggcggctcgcgcaggcagcacaggaagaaggccgtgtcaaagcggcgagtggtgccccgcaagaaaggggtgagccaggcgctccagttgtgcagcgcccagatgtcgggtgtgcagtcgaggtgggcgcacagccgcaggaagtggcgcgggtcctggcgcacgcggtcgcgccaggaggccaggcccggcggtggctccagggcgaggccaggcccgggtgctgggcctggtggggaagtcctgggccgcagcagcagcacgcccgcctcctcaaaggcctcccgcacggcgcagatgcggaaggctacgtcctcaggcagcgtcccagtgttgtcggtcttgtggtcatcggtgtcgggcagcgacgggaaagcggtgcggctgaatggcgccgggcccaggccgaagcgcggcggcccgtggtgcggcgcgaagaggcccagccagtccgccgagcggtcggccgcatccagcactccgccggagaagacgtgcgcgcccggcatgaagccttggtgcggggagcgctgcagcagcagcagccggaagccctcggccggcggcgggcgcgacggcggggtggcggtctccgggcgcgaccagccagccgccaggacgatgctggccgcccgccgccagcggctggggcccggccgcagggagctgctcatggcgcgcagcttcccggatccgattctggcgcggcctgagctccacggcaggtggcccggccctgcagggaccccagcacctccgggggcctcgcgggaattgaggacgagcctctggcgttgggtgaacctgggcgtttggtcggcaacggcgcctgc

SEQ ID NO: 24156 - DNA, 504 bp, Homo sapiens
  MAP TO AC006486.1; EXPRESSED IN BRAIN, SIGNAL = 0.95; EXPRESSED IN HELA, SIGNAL = 0.92; NT HIT: AF188702.1, EVALUE 5.00e-04; SWISSPROT HIT: Q9WUI9, EVALUE 3.50e+00
tcctgagcctcctatttttctgcatctactggggtcaatatgccaccgatggcattggcaacgagagtgtgaagatcttgggtgagaatgaagctgggtggggagagggtggagcccagggctcaggttgggcatcaggtctgagcctggctctgagccgccccctcctcccttctcccagccaagctgctcttctcctccagcttcctcatcttcctgctgatgcttatcctcctggggaagggattcacggtgacacggtgcccgggcagggcgtgctcgtggggcggctggtgggggagcagggcaggggcagggttggggggctgggtgcatcctcctccctgacggcccccaccctgctgtctcccctcatggcctgctgccaggggccgcatcagccacgcgggctccgtgaagttgtctgtctacatgaccctgtacacgctcacccatgtggtgctgctcatctacgaggcggaagtgagtccgactggcccctgg

SEQ ID NO: 24157 - DNA, 947 bp, Homo sapiens
  MAP TO AL135841.9; EXPRESSED IN HELA, SIGNAL = 0.83; EXPRESSED IN BRAIN, SIGNAL = 0.88; EST_HUMAN HIT: BG197640.1, EVALUE 1.30e+00; NT HIT: gi11429041, EVALUE 0.00e+00; SWISSPROT HIT: Q9NQN1, EVALUE 0.00e+00
ccttttggtctcagcagtctcctcacagcagccttcacatccttgttcctcaggctatagatgatggggttgagcatcggggtcaccaccccatagaaaagggggatgagtttgtctgaaagatcctctttgtctgctcccatggagtccttagacttaggcttcccatacatgaagaataaggtcccgtagaagacgatcaccacggtgaggtgggcagagcaggtggagaagacctttttcctcccctcagctgaggggatcctcaggatggtggtgatgatgaagacataggagaaagagatgaacagaaccgggactcctaggaagatcacattcgtcacctccatgctgatcacattgatggaaatgtcagcacaggccaactttagaacagccagaatctcacaggtgaagtggttgatgacattgtctccacagaagggcagctgaattgccaaggatgtgtgtaccacggaagcagcaccaccaatagcccaggagctggcagccatgggcatgtaggcagccttgctcatgatcacggagtacctaagggggttgcagatggccacatagcgatcaaatgccatcatgctcaggagcaagcactctgttcctgccatggcaaaggagagtgccatctgcacagcacaggctgagaaggagatggtttcctggggagtcaaaaagctgtccaggaccagtgggactgaggaggtagtgaagcagatgtccaggaaggagaggttccctaggaagaagtacatgggcgtgtgcaggcgggagtcaaggatggtcaccaggatgaggaccccattgcccagcaggatcacgaggtacatcagcaggatgagcacgaagaatgtcttttccagctctgggtgggcagagagcctcaggagaacgaaccccatcacaggggaggtctcattggctttttccat

SEQ ID NO: 24158 - DNA, 848 bp, Homo sapiens
  MAP TO AL031003.1; EXPRESSED IN FETAL LIVER, SIGNAL =   1; EXPRESSED IN LUNG, SIGNAL = 1.1; EXPRESSED IN BRAIN, SIGNAL = 1.8; NT HIT: gi14750074, EVALUE 0.00e+00; SWISSPROT HIT: Q99107, EVALUE 1.80e+00; EST_HUMAN HIT: BF943974.1, EVALUE 0.00e+00
gactgtatgaacagcctggcgctgtgctgatccgcctcctggttcttcagcagttttagagacagggcggcagttcgcagggaccggtggcctaggcagtcccggggtgtctgctcttcatcggctagtgaacagttgtccgacccaatgtctgacacgtcggacctgcccgagtccttttctgctgccatagagtactgatcacaggaatcaaactctgtcctagaaaggtcttggtcatcaacgctaaaattgctctcactatacctagatccataggaccttgtcctgcagtctactgacaggaagttagttatgtcagggtaagggaccgtgtggcttctctgcacgacatctggctggtctaccgcctctgtttccaatactttgctcagcgtctccttaccctctgggatggctggcgacttgagactgttcttgtggtttcccgaatggtcctcgggtgtagtctgacccaactctccctcgagagtggtctggcctgtgtctgtggtgacactgatgctgatgtcaaggctcctctcgttccctgactcccacggcgtgtgttctgaggacagcactcgccgctgccagcggaagtcagcctcattgatctccatggaatctcggctccactcagccccatccttcagctcctcaaggcgcagaagcagcagttgcacctgaccttcgctcaagcccttcccctggctgagctcatccagggcacccagcaaggtgcagacacaggacacggctgcatagcaagcttcgatgccacccttgatgcatgcttcggtcatgccatccatgatgctaaacagtgttcaaaagagaaaatggaa

SEQ ID NO: 24159 - DNA, 598 bp, Homo sapiens
  MAP TO AC026805.3; EXPRESSED IN BRAIN, SIGNAL = 0.8; SWISSPROT HIT: P97445, EVALUE 1.00e-16; EST_HUMAN HIT: BF726609.1, EVALUE 3.00e-31; NT HIT: Z80128.1, EVALUE 0.00e+00
atcctgacgggcgaagactggaacgaggtcatgtacgacgggatcaagtctcaggggggcgtgcagggcggcatggtgttctccatctatttcattgtactgacgctctttgggaactgtatccttcatggagagagagaaggggacaggcctggacctctggcagaggagaggttgcaggggctcaagggagggtactgagagacccagatacccaggcccaagtggtgtcccaccagtggttgcttttcctgactcagacatttgcagacaccctcctgaatgtgttcttggccatcgctgtggacaatctggccaacgcccaggagctcaccaaggtggaggcggtgggagaatgtttctctggcaaagttaccacctgcccatggcagatcaggacgggggtgggggtgggggtgggggtgggggtgggggcatgggaacaggggttagaacttttgccggggatgcaccatgcaaagagaaggcgcctctccccccactcccagaaacagactgtccctcatcaagcaaattctacagccaagagggtgggaagggggaaggcagtgaggtcgctgcaggaaacggatggcaa

SEQ ID NO: 24160 - DNA, 612 bp, Homo sapiens
  MAP TO AL163301.2; EXPRESSED IN HELA, SIGNAL = 1.2; EXPRESSED IN BRAIN, SIGNAL = 1.7; EXPRESSED IN HEART, SIGNAL = 1.3; EXPRESSED IN LUNG, SIGNAL = 1.9; NT HIT: gi14780762, EVALUE 0.00e+00; SWISSPROT HIT: P78563, EVALUE 7.00e-77; EST_HUMAN HIT: BG955496.1, EVALUE 0.00e+00
gttccagcagcactgatgtgaaggaaaaccgcaatctggacaacgtgtcccccaaggatggcagcacacctgggcctggcgagggctctcagctctccaatgggggtggtggtggccccggcagaaagcggcccctggaggagggcagcaatggccactccaagtaccgcctgaagaaaaggaggaaaacaccagggcccgtcctccccaagaacgccctgatgcagctgaatgagatcaagcctggtttgcagtacacactcctgtcccagactgggcccgtgcacgcgcctttgtttgtcatgtctgtggaggtgaatggccaggtttttgagggctctggtcccacaaagaaaaaggcaaaactccatgctgctgagaaggccttgaggtctttcgttcagtttcctaatgcctctgaggcccacctggccatggggaggaccctgtctgtcaacacggacttcacatctgaccaggccgacttccctgacacgctcttcaatggttttgaaactcctgacaaggcggagcctcccttttacgtgggctccaatggggatgactccttcagttccagcggggacctcagcttgtctgcttccccggtgc

SEQ ID NO: 24161 - DNA, 460 bp, Homo sapiens
  MAP TO AC003042.1; EXPRESSED IN HELA, SIGNAL =  19; EXPRESSED IN BRAIN, SIGNAL = 7.8; SWISSPROT HIT: P25444, EVALUE 1.00e-72; EST_HUMAN HIT: BI085459.1, EVALUE 0.00e+00; NT HIT: gi16163097, EVALUE 0.00e+00
tgggccgcctggtcaagcacatgaagatcaagtccctggaggagatgtatgtcttctccctgcccatgaaggaatctgagatcactaactttttcctgggggcctctctcaaggacgaggttttgaagattatgccagtgcagaagcagacccgtgccggccagcgcaccaggttcaagatgtttgttgccatcgtggactacaatggccacatcggtctgggtgttaagtgctccaaggaggtggccactgccatccacggggccatcatcctggccaagctctctattgtccctgtgcacagaggctactgggggaacaagatcagcaagccccacaccatcccttgcaagccgacaggccaccacggctctgtgctggtgcgcctcatccctacgcccagaggcactggcatcgtctcagtgcctgtacccaagaagctgcttatgatggctggtat

SEQ ID NO: 24162 - DNA, 538 bp, Homo sapiens
  MAP TO AF176815.1; EXPRESSED IN PLACENTA, SIGNAL = 1.8; EXPRESSED IN HELA, SIGNAL = 0.38; EXPRESSED IN BRAIN, SIGNAL = 1.5; EXPRESSED IN LUNG, SIGNAL = 1.4; NT HIT: AF176815.1, EVALUE 0.00e+00; SWISSPROT HIT: P51403, EVALUE 2.20e+00; EST_HUMAN HIT: BI461138.1, EVALUE 0.00e+00
atgggagagctagagaagccctgtggggtgtccagggtcctttctgaatcccggagcacggtctttcgagcctcagcgggcgggcggggatccgtggcgaaagtgcagctcagtagcgccgcggcgccacgtttaccctgcgcagacgccgtcgccgccgctgctgccgccgccgctgccacagcctttgccgccacggtctccgccgccgctgtcctcgcgctgcctctgggagcctccattgttccagcagcgcccggtcccgagaccgggcatcttgggggctcgcgaaacgggcggcggccgacggagttgagaccccagggcgccggcgggaccaggagcggcaggggtcagctcaggaatcccggggagccgggaccaaagcgtggggcggcagggggccggggtggcgaggtctacggtctccggagttggggctcccccttcccggcccgactttccccgccgacctccccaagtggggtcggagccccggcgggcgcccccggcgatgagcccggactcgaggtggccg

SEQ ID NO: 24163 - DNA, 493 bp, Homo sapiens
  MAP TO AL008715.1; EXPRESSED IN HELA, SIGNAL = 1.1; EXPRESSED IN BRAIN, SIGNAL = 0.98; EXPRESSED IN HEART, SIGNAL = 1.3; SWISSPROT HIT: Q20591, EVALUE 2.00e+00; NT HIT: gi9910441, EVALUE 8.00e-03; EST_HUMAN HIT: BE811922.1, EVALUE 2.00e-41
gccctctgtgaggaagaatgagacatttatgcttgcatctccccgactgacccacccacacctgtcatagcactttgtccttttttaaatacttacttctttgcacatttctctcctcctccaagtcatacatgacttggaagcaggttaattattcacatccacatctatagcacctggcacagagtaggccctcaataaatgtttttgcttgagttgaatgaatagatttggggagctggcatgaaccaaaagagccagcagcagatggcaagaataataaccacacaagctggttcttacgccaggaggctttaggctttccagaaagcccaaataagggtggaaaaaaaccaacaccccacaaagatgaaaagcatactcattctgctctcctgtgcccttatctctctcaccacattgcacataaatctcccagccatccatgcccctgggaggtcctctcggcccacctcaccctacctccagggat

SEQ ID NO: 24164 - DNA, 899 bp, Homo sapiens
  MAP TO AC006479.2; EXPRESSED IN HEART, SIGNAL = 1.5; EXPRESSED IN BRAIN, SIGNAL = 0.85; EXPRESSED IN HELA, SIGNAL = 1.2; SWISSPROT HIT: P54120, EVALUE 5.00e-20; NT HIT: gi15299314, EVALUE 0.00e+00; EST_HUMAN HIT: AL557446.1, EVALUE 0.00e+00
gaaaaacaaaaatctcataatgcaaaagcatcaagtgtttgactctgaggagcgccttgtatgcccagttactctcgttctccctcagctcttgcttgtgcttctccacctgccattccactttggcctggtactgcctgtagtcttcctggcaggccccagctccagttctttggagcagctgggcatccaagaagaggtcattgctgtggaaggagccctctcgctccctccccagcctctcaatcacagccaggagctctgcctgctgctgcctctgctcctccacagagccccagttgttgaaggcacagtaccttctctcacactcccgcaccaggtctttcaggctgcagttgtccgtgtttgctacatagtcatccagggcctggccccctaagtcctctttgtgggtgaagaggatgaccacatgtctcatggcccctgtcccaaagacctctttcaccttcctgatggccactgtgtcctgagcagtgaaacgccccagctggatcaccagaagcaggacgtggggccccggggcagagagcaggtagcagtccccgatgttcttgtacagctcttgggtatcggcctgtgactcaaagatggagggcgtgtcaaccaccaggactttcctcccgttccatgttcctgttttcacctggcacgtcctggtcactgactgggccctcagcttggactcaaacacgggctggccaaggatgctgttccctgtggcacttttcccgcagcctgttttgcccactaggataatcctcaatgccggtggtgttgcagacaagttatcttctgatctacctgtagaaaacgaagttttgtatcttactaagttaatgattcttaagactgttaggtcattgttcatggttatctca

SEQ ID NO: 24165 - DNA, 504 bp, Homo sapiens
  MAP TO AC006128.1; EXPRESSED IN HELA, SIGNAL = 0.97; EXPRESSED IN BRAIN, SIGNAL = 0.88; NT HIT: AB012266.1, EVALUE 1.00e-118; EST_HUMAN HIT: BG394356.1, EVALUE 0.00e+00; SWISSPROT HIT: Q9Y2N3, EVALUE 1.40e-01
tgaggttcaagggcccctcatcctcagactgaggccactgtgcctttggggaggccggccgggggctcagggacagctgggggctcttgtcctcaggattcttaggggtaggggagcccgccagggccagtggtgtctttttgaggagtggagagctgggcgggtggcccaggcccttggccgagaagccgggaggcgacttgatggctttgttgacagcaggggcatccaagggcttggccaggctgagcaagccgggccggggggccccggcgaccacctccttcagtgagctggacttcttagccaggcctgggggcagcccaaggtgggcgtcaggcagacccttctgcttcacaagctcgtagaggaggtcgatgggtgcgccgctgctttccgactctgccactcccagctgccgcaggtgggagcgcgcgtggctggacaggccctttcgggtctcaaagcaggcaccgcagacctcgcaggtggtcaggctctggg

SEQ ID NO: 24166 - DNA, 454 bp, Homo sapiens
  MAP TO AC007614.2; EXPRESSED IN BRAIN, SIGNAL = 1.8; EXPRESSED IN HELA, SIGNAL = 0.72; SWISSPROT HIT: Q9R171, EVALUE 2.00e-33; NT HIT: gi16164851, EVALUE 0.00e+00; EST_HUMAN HIT: AW163243.1, EVALUE 6.00e-29
acgagacgggaacgaaggggagtgggcaggaatcggtcccggactgtcgtccccgcgcctccgcagagcccttggagaggaccgggcatcggtcttccatccatccctccttcaccagcccaatctgcacgccgcgggaggaaggaacactcacctggtcgaagtagatgatcatggtgcgattactcatctcggacggctcgtggttggtgctcctgatggcagagaaagccaccttggcgctgccagagcgcacagagatgcccagggcagtgcccgtggggtcggacgtggggttggagtcgcacaccaccaggcacttgccctccagcacgatgggctccgtctcattctgcccgcgggccgggcccgccagccacgcagcccccagcagcagcagctccaggacgcccagcatcgcgccgccggcgcccaccccgccccccacccccag

SEQ ID NO: 24167 - DNA, 870 bp, Homo sapiens
  MAP TO AL078614.2; EXPRESSED IN BRAIN, SIGNAL = 1.1; NT HIT: gi4758017, EVALUE 0.00e+00; EST_HUMAN HIT: BI760935.1, EVALUE 0.00e+00; SWISSPROT HIT: Q08093, EVALUE 1.00e-113
aaaaaagacttagccgctggtcctgtcggatccgccctgcgacggcgccctccagccgtaagctccacgcagttcaacaagggcccctcctacaggctcttggcggatgtccagaacaggcttctgcccaaatatgactcccagaaggaggcagagctccgcagctggatcaagggattcactggcctctccatccgccccgacttccagaagggcctgaaggacgggattattttatgcacactcgtgaacaaactgcagccgggctcagtccccaagatcaacggcttccgtgtagaactggcactagctagaaaacctctccaacttcctcaaggcaatggtcagctacggcatgatcccgtggacctatttgaggccaacgacctgtttgagagtgggaacaatatgcaggtgcgggtgtctcttcttgccctggcagggaaggccaagactaaggggctgcggagcggggtggacatccgtgacaagtactcaaagaagcagaacttcgacgacaccaccatgaaggccagccagtgcgtcatccggctgcagattaccaacaaatgtgccagccagtcaggcatgaccgcatatggcacgaggaggcatctctacgaccccaagaaccgcatcctgccccccatggacaattcgaccatcagcctccagatgggtacaaacaagtacgccagccaggtgggcatgacggctcccgggacccagcggcacatctatgacaccaatttgggaatcgacaagtgtgagaactcctccatgtccctgaagatgggctacacgcaggttgccaatcacagcggccaggtctttggcctaggccggcaaatatacgaacccaagtactag

SEQ ID NO: 24168 - DNA, 974 bp, Homo sapiens
  MAP TO AC012313.5; EXPRESSED IN BRAIN, SIGNAL = 0.88; EXPRESSED IN HELA, SIGNAL = 0.62; SWISSPROT HIT: P52740, EVALUE 7.00e-97; NT HIT: U09411.1, EVALUE 2.00e-14; EST_HUMAN HIT: BG323805.1, EVALUE 0.00e+00
ctagcagctaacgaccttcccatgtgccctgtcctcctgacgcctttctggagtatggactttcttgtgctgaaggagggtggaactatgtttgaaggccttcccacactctgtacattcataagacctctcttcagtgtggaactgctggtgccgattgcggtaggatctggtagtgaaggttttcccacacaggctacattcatagggccgttccccagtgtggactttccagtgctgatagaggcctgaacgggtcacgtagcctttcccacattgcttgcattcaaaaggcctttctccagtgtgaactctctggtgaagaatgaagctattattgtatttaaagaacttcccacattctgtacactcatagggcctttctccaatgtgcactttccggtgccgaatgagggtagacagaacactgaaggttttaccacatttgctgcactcgtaaggcctttctccagtgtgaatcctctggtgtagaacaagtgcgtctttgcggttgaaggttttaccacagtcactacacttaaaaggttttatgcctgtgtgaaccttctggtgtttcctcagcttagacgggtaactgaaggccttcccacattcattacacacatgggctgtttctccagtgtgaatttttcgggggttaatatgagctgacttcttgaaagcacttctgcctgttgggcatctgaagggtctctcttcagaatgcgttatcagatggtcaaggagggcaaaggcctttaagaacaccttcccacagtcactgcatttgaacagcttctctgccacatggacttcttgctgttgcccacaactggaaccaggtgggaaagctgccccatgctcagtgtgccttcttggtttcccctcactatgagtgtcctggtgctggatgactctgtagctctttagatgctcaggatgggctctctcatcctccactctacacaaaccat

SEQ ID NO: 24169 - DNA, 581 bp, Homo sapiens
  MAP TO AC004909.2; EXPRESSED IN HELA, SIGNAL = 1.1; EXPRESSED IN BRAIN, SIGNAL = 0.78; EST_HUMAN HIT: BG914045.1, EVALUE 3.20e+00; NT HIT: AL163249.2, EVALUE 9.00e-03; SWISSPROT HIT: O15481, EVALUE 4.30e+00
tgtatcccacctcctggtattcatgtttttgtttaacattcacactttgagtgtgggctgcacctagtgacttgcttctaatgaagaaagtacagcaaaaatcatgagatatccctttcaagattagattacaaaaagcctctacttccaattttgctcatattctcttacttccttgctcaccctctgatggaagccagctgccgtgttgggagctgacctaaggagagggccatagcaaggatgaagagaggcccccatccaacagaaatgaaatctgccaacatcctcgtcagcaatactggaaaaggatcttccacaagtggattcttcacaggagacaacagcctcagtggacaccttgtgagagaccctgagtcagagaaaccagctaagttgcacccaaattcttgacccacaggaactgggatatgtaaatgtttgttgtcttaagctgtaacattttgtagcaagttgttatgcagtcatagatgactaatatatgctacttaagatcttatagttcattttgataactttgcatctctctgaatatgatggaaaaccattggaagattttg

SEQ ID NO: 24170 - DNA, 986 bp, Homo sapiens
  MAP TO AC005924.2; EXPRESSED IN HEART, SIGNAL = 2.2; EXPRESSED IN LUNG, SIGNAL = 1.6; EXPRESSED IN BRAIN, SIGNAL = 4.2; EXPRESSED IN HELA, SIGNAL = 1.9; NT HIT: gi14748522, EVALUE 0.00e+00; SWISSPROT HIT: Q9KU60, EVALUE 2.80e+00; EST_HUMAN HIT: BG259311.1, EVALUE 0.00e+00
agctgcctcataatcctttattagtaccaataactgcaagaaaccaggggctgggccatcctctggcagattaagctctctgcgaattgttttgtggactgccccagcaatgacttggtctaggcgggcctgattcacagcatctctctcaattgctcctctctgtaccagcttctgtaacaaaggctccagccttagtacataagccgacaacttttcctcatccttctggtaagtggttagatatttgacctgcaactccctaggattatctgtaaccccaaatacctcctcaagagcctgcagacattcatcgacagtaattaaaggattgtttatcttgaggacacgaataacatcaagtgctgggcctcgaaggctctctagcaatcgccttctcttctctacatctggcacctgccacgcctttatcatctgagtagtatgaaacatccagcgtccaaattcttcttctcctggttctggagactccctgcccgagaacactctcagctttttatacttcaagcattgcagggcaggctgaagagcctctaatgcctgtgccaacataggggcccacatttccgggatcatgccctgctctgggtctaaggagccattttcatgtccaagagctctgctcaactcacccactgtcatgccctctcccgctaaaaattcatttaatctgcttaaaaatgtattatctgggtcagggggcttaaagatcactctccagatacccccttttcccggtatctccttagggaccagggcgtgactagtctccgcagtaagccctactaaggctactttcctgttctcatccctcctgaacatccttccaagcagtctgtactcccccaagggagctaaaccagcctgcagagcctcctcgatttctgccacactgcagctctgggagatgccggcaatcaatagcgctttccgagggttcatgtccatccccctgcaccagtctt

SEQ ID NO: 24171 - DNA, 926 bp, Homo sapiens
  MAP TO AC010508.5; EXPRESSED IN HELA, SIGNAL = 1.5; EXPRESSED IN BRAIN, SIGNAL = 1.2; EXPRESSED IN LUNG, SIGNAL = 0.96; NT HIT: X92887.1, EVALUE 0.00e+00; SWISSPROT HIT: P10267, EVALUE 1.00e-109; EST_HUMAN HIT: BG433950.1, EVALUE 0.00e+00
cttatgtttgtctaaactttctgttaagtcgctatcaacagctggactcacttgtgcacttggacacgactgagtttgtcctgagcaattgtggtagaattgacctcgaggtgcccaatctataatagttccaaattcattgttttgtaatatcaccgcactattggccacacattcttcccaaactaaaacttctgtattttttgattctttgggaatttccttggggcaaggtttccctttaggtctaaatttaaatgatctttgataagaaaagtcttgtaaataatttacccgtggcctgagtgacatcccgcttaccatgtgataagtgaatctactgatgggactgacagtaggtacttctaccaaccaattttggactgcaggcattaaacatcctggtgctctccctaggcaaataggaggataacgatacccaatggaaatatttatcatcatcccttcttcctcaggtttggcagggcagtgatcatctgtggggccaggtacccatacactatcattaacatatacttctataggattatccatccatgtgactgcccgaattaagggcgggaaaggcacataggcccagtaggtatagttagctgcagctgctcctgcaggcatagggagacttaccaccattgatacaatcatcaaggctgcaagcagcatactctctggggtttgtgtcacctttgtgttctctagatattttgtagctaactgcgtcagcttctttagttgtgcccaagtcggcggctctgctttcttggtggatggcaacttcatctgttcttctgacgtcaccattttgttcatcttgtgagtcaacggtgctcgattgcggtgtctccgtctccgcggaggtgcttttctttgcatctccgatgggttcattgtagaacttcaaatgt

SEQ ID NO: 24172 - DNA, 565 bp, Homo sapiens
  MAP TO AC005736.1; EXPRESSED IN BRAIN, SIGNAL = 0.93; NT HIT: AY028949.1, EVALUE 0.00e+00; EST_HUMAN HIT: BE504143.1, EVALUE 0.00e+00; SWISSPROT HIT: P51830, EVALUE 1.00e-103
atgcagcagatcgaagaagtcagtattttatttgcagatatcgtgggcttcaccaagatgagtgccaacaagtctgcccacgccctggtgggtctcctgaacgatctgttcggtcgcttcgaccgcctgtgtgaggagaccaagtgtgagaaaatcagcaccctgggagactgttactactgcgtggcgggctgtcccgagccccgggccgaccatgcctactgctgcatcgagatgggcctgggcatgatcaaggccatcgagcagttctgccaggagaagaaggagatggtgaacatgagagtcggggtgcacacgggcaccgtcctttgcggcatcctgggcatgaggaggtttaaatttgacgtgtggtccaacgatgtgaacctggccaatctcatggagcagctgggagtggccggcaaagttcacatttctgaggccaccgcaaaatacttagatgaccggtacgaaatggaagatgggaaagttattgaacggctgggccagagcgtggttgctgaccagttgaaaggtatgtgcactgctttacctcggcatcccc

SEQ ID NO: 24173 - DNA, 752 bp, Homo sapiens
  MAP TO AC020763.3; EXPRESSED IN LUNG, SIGNAL =   1; EXPRESSED IN BRAIN, SIGNAL = 3.3; EXPRESSED IN HELA, SIGNAL = 1.3; NT HIT: AF350262.1, EVALUE 4.60e-02; SWISSPROT HIT: O43312, EVALUE 2.00e-25; EST_HUMAN HIT: AL596491.1, EVALUE 0.00e+00
ctgtcgttggtgacggtcctgcggagccggaccccacgccggatggccaccagcatgtcttcggccggggggtcgctggtggcggctgggggtggggtgggcgtctcctccgtgggggtggccgacagagcagtggggaaggggaactggccctcacccagtgcgtgggcacccgccaccagctcccccagcttctccaccaggctgtgccggttggccgccagctgctgctgctcgtcctcggcccctgccccggggtacccgggctccttctggggatgggctgccccaggctgtgttgggcaggctgagcctctttggggaggccttggcgaggtccggtgccaggggtgaggcggtctcgtcggtatagaagacgcactcctcactgcccgcccgtgtgggccccatgtagccgggggagtcaggcaccgtgggcgtcttcacagggacgatgggcggccggatggggatggggccagcgctggacagggcgcggcgcacggtgggcttggtggagggtgtgcggcggatggtggccacgccggggggtgcgcccgagggcaggccagtggccgtgggcagccccgcggtgggcagcccagcagtggaggctgggcgcttggtctggatcaggcggcggtagttctgggcgatgttgctgttgcgcgggatggtggatgacttgtcaaactcgggcgggccctcgctgtccgcatccccattcacggagtagcagtcgtagtcggagc

SEQ ID NO: 24174 - DNA, 545 bp, Homo sapiens
  MAP TO AC002345.1; EXPRESSED IN BRAIN, SIGNAL = 0.88; EXPRESSED IN HELA, SIGNAL = 1.1; SWISSPROT HIT: P36594, EVALUE 4.00e-04; EST_HUMAN HIT: AA169742.1, EVALUE 4.00e-64; NT HIT: AJ278120.1, EVALUE 0.00e+00
  unsure 302
  unsure 319
  unsure 328
gccctgtcctcccacaggaggggggctgaaacggtaagatcctccctgatgagccggggaagtgtgtggtgggctaggcctgtaatgtgagttctgatgagttggagaaagggcaggtgaggtggactgataggtctgtctagtgggagagcctacagaactactggaccggaagtcaaaaacctgatgagagccaagaggtgagctggagatgtaggctgagtcccgatgcgggggagaggagggtgggctctggatgaccgggagcccctggctgggccgggcctctgtctggaggccanatggaaacattttcaancatcctgtntccaggtactcctcctcgaatatatcctgtacagagtatatgtcttcatgctgtggctcaggttctgcttcttccggcaactgctgctgaggctgcggtggcggcggtggctgctgtggctgctgcatctgtctacactcttcttccactctcagcagaagtctctggatctcacggttgttgggacacagcttgatggcctcgttcaggtcctcta

SEQ ID NO: 24175 - DNA, 664 bp, Homo sapiens
  MAP TO AC013620.2; EXPRESSED IN HELA, SIGNAL = 1.3; EXPRESSED IN FETAL LIVER, SIGNAL = 0.99; EXPRESSED IN BRAIN, SIGNAL = 1.2; SWISSPROT HIT: Q99867, EVALUE 1.00e-76; EST_HUMAN HIT: AL540505.1, EVALUE 2.00e-75; NT HIT: gi5174734, EVALUE 2.00e-75
ctaggccacctcctcctcagcacactcctcaaactctacctcctcctcagctgtggcatgctggtagtactgttggtacttggacacaagattgttcatgctgctcttggcctcagtgaactccatctcatccatgccctcactcatatagcagtgcaggaagaccttgcacctgaacatggctgtgaactgctccgagatgtggcctgaacagctcctggctggccgtgttgttgctgataaaggtgtcagacatttttagcccctggggtgggatgtcacagacagctgttttcacatggttggggagccaataagcaaagtagcagctgtttttgttttgaacatcgagcatttgctcatccacttcccatgtggacatgtggcctctgaaaatggcaggaactgttaggtagcagccataatgaggtgaggtgtcacaagcagctgtgatattcttggtgtcaaacatctgctgagtgagttcagccacggtcagggcctggtactgctgactgccctggctggtcagtggggcaaagccaggcatgaagaagtgcaggtaggggaatgggatgatgttcatggtcagcttccacaggtcagcattcagctggcctgggaatcgcaggcaggtggcgaacccatttatggtggcagatac

SEQ ID NO: 24176 - DNA, 3372 bp, Homo sapiens
  MAP TO AL049781.4; EXPRESSED IN BRAIN, SIGNAL = 1.5; EXPRESSED IN HELA, SIGNAL = 0.87; SWISSPROT HIT: Q13023, EVALUE 0.00e+00; EST_HUMAN HIT: AU132170.1, EVALUE 0.00e+00; NT HIT: gi16189608, EVALUE 0.00e+00
gagactttgaatgtgattgatcctggcttgatggacctaaatgggatgagtgaggatgccctggaatgggatgaaatggacataagtaacaagttaattagtttgaatgaggaatcaaatgaccttgatcaagaactccaacctgttatcccttccttgaagcttggagagacaagtaatgaggaccctggttatgacgaggaggctgataaccatgggggatctcagtatgcctcaaatattactgccccctctagtccacacatttaccaggtgtacagcctccacaatgttgaactctatgaggacaaccacatgccatttctgaaaaacaatccaaaggtcactggcatgacacagcctaatgttttaactaagagtctcagtaaagactcttcattttcatctaccaaatctttgccagatcttctaggtggttccaatttggtaaagccctgcgcatgtcatggaggagacatgagccagaattcaggcagtgagagtggaattgtcagtgaaggagacacagaaaccactaccaactctgaaatgtgcttgctcaatgcagtggatgggtccccaagtaaccttgaaactgaacatctggacccacaaatgggagatgcagttaacgtgttaaagcaaaaatttacagatgagggggaaagcattaagcttccaaatagctctcagtcgtccatttcaccagtgggttgtgtaaatggaaaagttggagatttaaacagtattaccaaacatacccctgactgtttgggagaagaattacaaggaaaacatgatgtgtttacattttatgattactcatacctccaaggctcaaaactcaaattaccaatgataatgaaacagtcacaaagcgaaaaagcgcatgtggaggatcccctgcttcgtggtttttattttgataaaaaatcatgcaaatctaaacatcagactacagagttacaaccagatgtacctccccatgaaaggattttggcaagtgcatctcatgaaatggatcgcatttcatataaaagtggcaatatagaaaagacattcactggcatgcagaatgccaaacagctctcccttttatctcatagttcatctattgagtccctttctccagggggtgatttatttggattgggcatctttaaaaatggcagtgacagcctccagcgaagcacttctttagaaagttggttgacttcctataaaagcaatgaagatctctttagctgtcacagctctggggatataagcgtgagcagtggctcagttggtgaactaagtaaaagaacattagatctcctgaatcgtttggagaatatccagagcccctcagagcaaaagataaaacgaagtgtttctgatatcactcttcaaagcagttcccaaaagatgtcctttactggccagatgtcattggacatagcatcttctatcaatgaagactcagcggcatctctaacagaacttagcagcagtgacgagctctctctttgctcagaggatattgtgttacacaagaacaagatcccggaatcgaatgcatcgttcaggaagcgtctgactcgttcagtggctgatgaaagcgatgtcaatgtcagcatgattgttaatgtctcttgcacctctgcttgcactgatgatgaagatgacagcgacctgctctccagctctacccttaccttgactgaagaagagctgtgcatcaaagatgaggatgacgactccagtattgcaacagatgatgaaatttatgaagactgcaccttgatgtcagggctagactacataaagaatgaattacagacctggattaggccaaaattgtctttgacaagagataagaaaaggtgcaatgtcagtgatgagatgaagggcagtaaagatataagtagcagtgagatgaccaatccctctgatactctgaatattgagacccttctaaatggctctgtaaaacgtgtctctgaaaataatggaaatggtaagaattcatctcatacccatgagttagggacaaagcgtgaaaataagaaaactattttcaaagttaataaagatccatatgtggctgacatggaaaatggcaatattgaaggtattccagaaaggcaaaagggaaaaccgaatgtgacttcaaaggtatcagaaaatcttggttcacatgggaaagagatttcagagagtgagcattgtaagtgtaaagcacttatggatagtttagatgattcaaatactgctggcaaggaatttgtttcccaagatgttagacatcttccaaagaaatgtccaaatcaccaccattttgaaaatcaaagcactgcctctactcccactgagaagtctttctcagaactggctttagaaaccaggtttaacaacagacaagactctgatgcactgaaatcatctgatgatgcaccgagtatggctggaaaatctgctggttgttgcctagcacttgaacaaaacggaacagaggaaaatgcttctatcagcaacatttcctgttgcaactgtgagccagatgttttccatcaaaaagatgccgaagattgttcagtacacaactttgttaaggaaatcattgacatggcttcgacagccctaaaaagtaaatctcaacctgaaaacgaggtggctgctcctacttcattaactcaaatcaaggagaaagtgttggagcattctcaccggcccatccagctgagaaaaggggacttttattcgtacttatctctctcatctcatgacagtgattgtggggaggtcaccaattacatagaagagaaaagcagcactccattgccactagacaccactgactcgggcttagatgacaaggaagatattgaatgcttttttgaggcctgtgttgagggtgactctgatggagaggagccttgtttctctagtgctcctccaaatgaatctgcagttcccagcgaagctgcaatgccactacaagcaacagcatgttcttctgagttcagtgatagttctctttcagctgatgatgcagatacagtggctctttcaagtccttcctctcaggaaagagctgaggttggaaaggaagtgaatggtttgccccaaacttccagtggctgtgcagaaaacttagagtttactccttcaaagcttgacagtgaaaaggaaagttccggaaaaccaggtgaatctggaatgccagaagaacataatgctgcttcagccaaatctaaagttcaagacctctccttgaaggcaaatcagccaacagacaaggccgcattgcatcccagccccaaaactttaacctgtgaagaaaatcttctaaaccttcatgaaaaacgacatagaaatatgcataggtag

SEQ ID NO: 24177 - DNA, 634 bp, Homo sapiens
  MAP TO AC022085.4; EXPRESSED IN PLACENTA, SIGNAL = 1.4; EXPRESSED IN BRAIN, SIGNAL = 1.3; EXPRESSED IN LUNG, SIGNAL = 1.1; EST_HUMAN HIT: BG577249.1, EVALUE 0.00e+00; SWISSPROT HIT: P19973, EVALUE 1.40e-01; NT HIT: gi16160730, EVALUE 0.00e+00
tccagtggctcttcgtttctttctaatactttggccatcattttgttcagcaccagaggtacagctactatctgtggctgcatccgctaaactggagatcgcaagggctgaggatgcgcttgatgacagacagtttccctctccattactctcctgggaattctgattctctgacggtggtatagacctctcctggctgttcaagtcttttgccaaatgcatcaaaggtattatatggtcagaggataattgtgcactatgtcgcctttgggtagcaacattttcagccctttcacctgttcggagggaggcagcccgaggtgtcacttcttgtttgaggtgcatggttgctttctggctctgtccagccctcaatgagttactaggtgaaaccatctgctggggctcattttctttgcctgtaccttcctcactgaagaagctatacacagaaggagctctgtccatgatcacgctgctctcagaaaggcttcgctttcttgccaagccaggggacgaggaaatggaaacaccttcccactggaatccttctagactggacagatcaggttccccatccaaatctaaggcttcttgttcattttgaacaaggggtaccatttctatgccaaac

SEQ ID NO: 24178 - DNA, 571 bp, Homo sapiens
  MAP TO AC006342.1; EXPRESSED IN HELA, SIGNAL = 1.3; EXPRESSED IN BRAIN, SIGNAL = 2.8; EXPRESSED IN HEART, SIGNAL = 3.9; EXPRESSED IN FETAL LIVER, SIGNAL = 2.5; SWISSPROT HIT: P49757, EVALUE 1.00e-93; EST_HUMAN HIT: AL541223.1, EVALUE 0.00e+00; NT HIT: gi16190923, EVALUE 0.00e+00
ggaccgagtggggtcaatcttctggtgctgcctctccaggtctcttccaggccggtcatagacgtactccctctgaggccgaccgatggttagaagaggtgtctaagagcgtccgggctcagcagccccaggcctcagctgctcctctgcagccagttctccagcctcctccacccactgccatctcccagccagcatcacctttccaagggaatgcattcctcacctctcagcctgtgccagtgggtgtggtcccagccctgcaaccagcctttgtccctgcccagtcctatcctgtggccaatggaatgccctatccagcccctaatgtgcctgtggtgggcatcactccctcccagatggtggccaacgtatttggcactgcaggccaccctcaggctgcccatccccatcagtcacccagcctggtcaggcagcagacattccctcactacgaggcaagcagtgctaccaccagtcccttctttaagcctcctgctcagcacctcaacggttctgcagctttcaatggtgtagatgatggcaggttggcctcagcagacaggcatac

SEQ ID NO: 24179 - DNA, 930 bp, Homo sapiens
  MAP TO AL121829.12; EXPRESSED IN PLACENTA, SIGNAL = 2.3; EXPRESSED IN HELA, SIGNAL = 1.7; EXPRESSED IN BRAIN, SIGNAL = 1.7; EXPRESSED IN HEART, SIGNAL = 2.8; EXPRESSED IN FETAL LIVER, SIGNAL = 1.3; SWISSPROT HIT: P42694, EVALUE 2.00e-48; EST_HUMAN HIT: BF515946.1, EVALUE 0.00e+00; NT HIT: gi14769949, EVALUE 0.00e+00
ctgggcaccgtgggaaacgacacagatgcacctctgctcgcggccgccccagcagctgggccaggtgttgtaggcctcctgcaccttctcgacgacctgcgcaatctcagccagattcagccaggacgccatggacatgtcccggtctgggctgcccgccacgtggcagaacatgagcgggtagtgccgggggtggggcggaaccttgcccctggcgtggatggggttgcccttggccacgtagaagtgccgcgagatgaagctgacaatggcgtccgtgcagcggtagttctcgtggaagaccaggcggctctgccgcgccacctcgtgagtctcctgctggtagcacaggaagaggcggtgcagcagcgtgtgctcggccgcccgggccctggccacactgaacagccggggtgtgacctgcatgtggtcgcccgccagcacgaggcgggtgccgtgcgaggcataggccagcggggtgagggcctcgcactccagcatctgggccgcctcatcgatgagaatgtgggagaagaagccgaccggcaccctgagctcacgggcctgggaggtggtggtgaccaccacgcggtgccgcgccagctctgcccgtgtgggcgggcggaaagcctggcggtcgtcggtcaggcaacagtactgcagcgtgactgggtccgtctggctcagcggccggtccgtgtacatcacacggagaggagtggcctcggggtggccgccgctgacgtggctgtggaaatactcccggatgtagatgtcggcggcactgcgggagggggaggagctcatgggcttcttgctgggggcctcagtgctgtccgctaaagcacctactgtgtgcccagccgagctgcccctgagcacagcccttgtctggctgtcagaggtgagcagcaaacactggtgtccctc

SEQ ID NO: 24180 - DNA, 771 bp, Homo sapiens
  MAP TO AL031667.17; EXPRESSED IN BRAIN, SIGNAL = 1.3; EXPRESSED IN HELA, SIGNAL = 1.3; EXPRESSED IN LUNG, SIGNAL = 1.1; EST_HUMAN HIT: BF801218.1, EVALUE 1.00e-108; SWISSPROT HIT: P27922, EVALUE 8.00e+00; NT HIT: AB037756.1, EVALUE 0.00e+00
gtcccccagataccaccatctacgttgaacccatcactgaggaacgtgctgcaagaactctgtaccgcattgaactgttacggaaagtccgagagcaagtgctcaagtgccctcagctgcatgaacgcctccagctgtgcaggcccagcctctacctcccagtctggtgggagtgtgggaagcatgatcgagacctgctcatcggcactgccaaacatgggctgaaccgcactgactgttacatcatgaacgacccccagctgtccttcctggatgcctatagaaactatgcccagcataaaagatctggcacccaggcaccaggaaatctctgttgcctttaccagaccaactccaagttatatgaatctcttacatattctcaaatgagtaggacttcagagtcccttgaaaatgaacctgaaaatctagtgagagtagaaagcagagatgatcatctcagcctgcctgatgtgacatgtgaaaactttatttctaaagttcaggatgtcatttccatcaaccatgatgaaagtctgctgcctgagtccttagagagcatgatgtatggtaagaaggtgctcagccaagaaccaagctcttttcaggagagcccaagtaccaatactgaatctagaaaagatgttattaccatctcaataagcaaagatgggaactgccagtctggtggccctgaggcagaaatagcttctggccctacttttatgggtagcttagaagcaggaggagtagctcaagcaaacatcaaaa

SEQ ID NO: 24181 - DNA, 631 bp, Homo sapiens
  MAP TO AL121673.27; EXPRESSED IN LUNG, SIGNAL = 0.98; EXPRESSED IN BRAIN, SIGNAL = 0.77; EXPRESSED IN HELA, SIGNAL = 1.6; SWISSPROT HIT: P08934, EVALUE 2.80e-02
ctatgtcttgtccataacctgtctgtgtccgtgtcctgtccatgtctgtgtcctgtctgtgtcctgtctgtgtccgtgtcctgtccatgtccatgtcctgtccgtgtctatgtcttgtctgtgtccatgtcctgtccatgtctgtgtccgagtcctgtccatgtccatgtccatgtcctgtccgtgtctgtgtccatgtccgtgtcctgtccgtgtctgtgtctgtgtcttgtccatgtccgtgtcctgtccatgtcctgtctgtgtccgtgtcctgtccatgtccgtgtcctgtccgtgtccgtgtccatgtccatgtcctgtccatgtccgtgtcctgtccgtgtctgtgtccatgtccgtgtcctgtccatgtccgtgtcctgtttgtgtcctgtctgtgtccgtgtcctgtttgtgtcctgtctgtgttcgtgtcctgtccatgtccatgtcctgtccgtgtctgtgtccatgtccttgtcctgtccatgtctgtgtcctgtccatgtctgtgtcctgtctgtgttcgtgtcctgtccatgtccgtgtcctgtgttcgtgtcctgtccatgtccgtgtcctgtctgtgttcgtgtcctgtccatgtccgtgtcctgtctgtgtccat

SEQ ID NO: 24182 - DNA, 481 bp, Homo sapiens
  MAP TO U85195.1; EXPRESSED IN BRAIN, SIGNAL = 1.8; EXPRESSED IN HELA, SIGNAL = 0.61; SWISSPROT HIT: P39806, EVALUE 3.00e-21; NT HIT: gi16189783, EVALUE 0.00e+00; EST_HUMAN HIT: BF948172.1, EVALUE 3.00e-80
ttagttgcatgcgagttgccgtgctactttctgccactccactgatggctgagccctcactccctgggggggtgttttcatcagctttattcttgggttccactgctttcatgagcacaaacttattgaaagcagggagtcctggagccgtggctgtgcctgcactggtggagagcagagtcaggctctctgtggcactgagtgctgttgtggaggccaccagaggcttgcgctcaacccctccacctggagtggctgcctcctcctcggccttctctggtggcacggacataccataaggcaagccactgctggtaatgacatagtctaggtgctctggtactgggtgtgggttcatctgcacatgtgggtacttctcacgatgccggtggaaatgcactttgaggttgccacgggtggtaaaacggtttccacagacattgcacttatagggcctctcacccgtgtgggaacgaaggtg

SEQ ID NO: 24183 - DNA, 519 bp, Homo sapiens
  MAP TO AC006354.2; EXPRESSED IN LUNG, SIGNAL = 0.93; EXPRESSED IN BRAIN, SIGNAL = 0.85; EXPRESSED IN HELA, SIGNAL =   1; NT HIT: AL163227.2, EVALUE 1.00e-91; EST_HUMAN HIT: BG705017.1, EVALUE 2.00e-81; SWISSPROT HIT: P36003, EVALUE 6.30e+00
atgtgggaatgtttggaacttcctagagacttgttgaatggctttgaccaaaatgctgatagtgatatggacaatgatgtccaggctgaggtggtctcaaatggagataagaaacttgttgggaactggagtacaggtcactcttgctatgttttagcaaagagactggcagcattttctccctgccctagagacctgtggaactttgaacttgagagagatgattcagggtatctggtggaagaaatttctaagcagcaaagtgttcaagatgtgacttgggtgttattaaaagcattcagttttatatattcacaaaggtatggtttggaatttgaacttatgtttaaaagggaagcagagcataaaagttcagaaaatgtgcagcctgatgatgtaatagaaaagaaaaacccattttctgaggagaaattcaaactggctgcagaaatttacataagtaacaaggggccaaatgttaatcaccaaggcaatgaggaaaatgtctccagggcatgt

SEQ ID NO: 24184 - DNA, 506 bp, Homo sapiens
  MAP TO AC005895.1; EXPRESSED IN BRAIN, SIGNAL = 0.78; SWISSPROT HIT: P47902, EVALUE 5.00e-16; NT HIT: gi11416775, EVALUE 0.00e+00; EST_HUMAN HIT: BF594529.1, EVALUE 1.80e-01
atgtatgtgggctatgtgctggacaaggattcgcccgtgtaccccggcccagccaggccagccagcctcggcctgggcccgcaagcctacggccccccggccccgcccccggcgcccccgcagtaccccgacttctccagctactctcacgtggagccggcccccgcgcccccgacggcctggggggcgcccttccctgcgcccaaggacgactgggccgccgcctacggcccgggccccgcggcccctgccgccagcccagcttcgctggcattcgggccccctccagactttagcccggtgccggcgccccctgggcccggcccgggcctcctggcgcagcccctcgggggcccgggcacaccgtcctcgcccggagcgcagaggccgacgccctacgagtggatgcggcgcagcgtggcggccggaggcggcggtggcagcggtaaggacccttccctcgccctgcgcctctggacctgcaggtgctcgggcgcggcccaggc

SEQ ID NO: 24185 - DNA, 487 bp, Homo sapiens
  MAP TO Z83843.1; EXPRESSED IN LUNG, SIGNAL = 1.1; EXPRESSED IN BRAIN, SIGNAL =   1; EXPRESSED IN HELA, SIGNAL = 0.61; EST_HUMAN HIT: AW873257.1, EVALUE 0.00e+00; NT HIT: gi14722811, EVALUE 0.00e+00; SWISSPROT HIT: O15370, EVALUE 2.60e+00
ctgtgttgagggaggctcttttcattcttttcttgctggggctgttgagcacacactgcaaagaaggggacggcgccaaatatatcgaactcctgtttaggagtctccactccaacatcagaggacaattgggctgaggtgaggagtattgtattaatatcttgggttggtccactgccagatttgtctctgtagacagggctcatatcactgtactttgctttagcctgctcataatcagaatcagagctacgtttctcctcttcttcctcatcttcagaatccatgaggagaggcctgtgacccagattttctggttcggtatcattatcattaaaatctccttgttctccctgaagaacttcttcatccttttgcccttcctcttcactgctcttaggagaaggggcaatcatactagataggaaagccaggaagccagatgggtatctgagtatcaatattaacacagacactgtgactaaaa

SEQ ID NO: 24186 - DNA, 506 bp, Homo sapiens
  MAP TO AP000548.1; EXPRESSED IN HELA, SIGNAL = 0.61; EXPRESSED IN PLACENTA, SIGNAL = 1.7; EXPRESSED IN BRAIN, SIGNAL = 0.88; NT HIT: M60676.1, EVALUE 0.00e+00; EST_HUMAN HIT: BE903681.1, EVALUE 0.00e+00; SWISSPROT HIT: P04275, EVALUE 2.00e-61
aaggcaagtttcaaccaagggcacacagaccagggaagccaggattagaacccgagtcatatcttggcagatgcatgtagcaccaaggccatgccagccctcgcccagccctcccacctgcacacaaggtgccagcataccaggggcaggggagagggtggggatctgcagcccctctccggagcagcacctctgcagcaccaggtcaggagcctctcgggggagcgtctcaaagtcctggatgaggatgggggcattgggccagctgatcctctccagctcctgcacgttggcattagggcccactccaatgggcaccacctggatgtctccaggcaacctcttgatcttatcagaggcaggatttctggtgaccatggagaccaggttgggcacctgctcccggtcaccctggctgaccaagaagctgtggtcggaggggtacagcagggccaccccagtgttggtcctgttgccaccctggtagcggatctctcgcacccgct

SEQ ID NO: 24187 - DNA, 1974 bp, Homo sapiens
  MAP TO AL121929.17; EXPRESSED IN HELA, SIGNAL = 1.6; EXPRESSED IN BRAIN, SIGNAL = 1.7; NT HIT: gi13630945, EVALUE 0.00e+00; EST_HUMAN HIT: AU132171.1, EVALUE 0.00e+00; SWISSPROT HIT: P14598, EVALUE 1.00e-06
ctagttctttttctcaaggtagttggaaggcacccagcctttgaagggcttcacaccatccaggatctggcagtaccaccagccattagggttcctctccagaacctccatggacaccccctcctggaagcctgctgtctcctcatccccctcgtagtctgcgatagagacgtacacatctttgaggttattgtggatgaactgagacttctcgatgggcttggggcgcacaggggacacgggtatgctgttgcgctgggcgggcagtaggggtgagtctgaaccctggctggcagcccgttcggccaggcggcccttggcctcggcggcagcggagcgagcagtgctaaaggaggagttccgtcggacgcctcggaggccatcagtggccgtgagtgactcattcctccgcagggcgcaggacaggttgttgtccttgggtggcggggacacaaacaccgactggggcctgaccgccacctgccgcactccgttcctcatcttcaccgctggagtgcctgaggtcttgccgaagcccccgggaggtttggaggggatggggggcgtggccttcttgctctggttgacggtgttcagtgcttggacgcgcctctcgatcttctccaggctgtctgatttgccttcgttctgcctgcccttggcgggcactgtgtccagctctttgccagaggggtcaggttgctcgttctcatccagcaccaaatagtgggaaggggcccagccctccagctccccaaacctcacataccaccacccgctctcctgcttctccagcacctgcacctccacgcccgcggggaagctgatctccgagtcctggaccttctggtaggcgctgcatgtcatgtacgaggtggctggcccttcccattccttcttggtgggacatgggggagtggtggctgggagggtgatgaggtcggatgagcttctcctagacccctcactgggagcctcggaggccgtctgcgggggcagctccgaatcctcactcttggagcccttgagccctccacggagctggcctgtgggtctcagctggcgccgtaaagtgctgatgtccatcttctcttggctctgcgactctgctcggtttaggaatggcttgggccggaccgatggcttggcccggggacaggaggtcagcccagcgttcgcatcagcatccttctttgccctgaccttgggagtgccgcggatgcctgcgtccgaagcagagcggggcttcaggtcgccactggttttggacaaggaagaggaggaggaggaagaggaggagcagcaagtggtgttgatggtgatggatgaggaaaaggaggctgaggagtggttcttccccatttctgcctgggcattcttctctgccttgagctttaggagtgatgatgacttgggggagcctgatttgggggagtttttcctggtcagggacagcgaggagctgcctggggagtcgctgtccccggaggagcctctggctgacagggtgtcctctgcatatggccggaagccctcattctcatagatggtctcctcttccagggccacatcctctgaagactcacccaccttgaagcgggcccgctgcagagaagaggccggcgagggccggtggggctgggcaggccgcctctcccctgaggctctgtcctccacgggctcctcgctcagctcaggctctgagtcaaagccgaatgcagggatgtcatactcaggctcctcatacttgagcttccgcggggagtcctggctctcactggcccccgtagggccctcctcggcctccttgggcttgctggggggtgctggcgggggcaccttgggccgggtcagcgtgcttgtgcggcggctcaggttgggcttcttgcgcttatcgatgtatgatgcgggggcccagccctccttctcaccgatctgcacgtaccaccagccacctgagttcttatcaatgac

SEQ ID NO: 24188 - DNA, 562 bp, Homo sapiens
  MAP TO AL121716.2; EXPRESSED IN HELA, SIGNAL = 0.81; EXPRESSED IN BRAIN, SIGNAL = 0.81; NT HIT: gi15299941, EVALUE 0.00e+00; EST_HUMAN HIT: BE549033.1, EVALUE 0.00e+00; SWISSPROT HIT: Q9UIY3, EVALUE 1.00e-112
gtgaaaattgatttgcaagtgaccatgcctcacagctacccctatgtagcattgcagctgtttggacggtcatctgaacttgacagacatcagcagctacttctcaacaaaggtctcacttcttacatagggacttttgatccaggtgagctctgtgtatgtgcagcaatccagtggctacaggacaacagtgcatcttatttcctgaacagaaagcttgtatatgaaccatctacacaagcaaagccagtcaagaacacattcctccgaatgtggatctacagtcaccatatatatcagcaggacctaaggaaaaagattttggatgttgggaaaaggttagatgtgactggattttgcatgacaggaaagcctggtataatctgtgtggagggtttcaaagagcactgtgaggagttctggcacacaattaggtaccccaattggaagcacatttcctgtaagcatgctgaaagcgtggagacagaaggaaatggtgaggacctgcgccttttccattcttttgaagagttactccttgaggctcatggtgactatggat

SEQ ID NO: 24189 - DNA, 929 bp, Homo sapiens
  MAP TO AC022882.3; EXPRESSED IN BRAIN, SIGNAL = 0.86; EXPRESSED IN HELA, SIGNAL = 0.94; EST_HUMAN HIT: BF083448.1, EVALUE 1.30e+00; NT HIT: AF282289.1, EVALUE 1.50e-02; SWISSPROT HIT: Q95155, EVALUE 1.00e-83
atttcaacatgaagaatgtcactgaagttaccttatttgtactgaagggcttcacagacaatcttgaactgcagactatcttcttcttcctgtttctagcaatctacctcttcactctcatgggaaatttaggactgattttagtggtcattagggattcccagctccacaaacccatgtactattttctgagtatgttgtcttctgtggatgcctgctattcctcagttattaccccaaatatgttagtagattttacgacaaagaataaagtcatttcattccttggatgtgtagcacaggtgtttcttgcttgtagttttggaaccacagaatgctttctcttggctgcaatggcttatgatcgctatgtagccatctacaaccctctcctgtattcagtgagcatgtcacccagagtctacatgccactcatcaatgcttcctatgttgctggcattttacatgctactatacatacagtggctacatttagcctatccttctgtggagccaatgaaattaggcgtgtcttttgtgatatccctcctctccttgctatttcttattctgacactcacacaaaccagcttctactcttctactttgtgggctctatcgagctggtcactatcctgattgttctgatctcctatggtttgattctgttggccattctgaagatgtattctgctgaagggaggagaaaagtcttctccacatgtggagctcacctaactggagtgtcaatttattatgggacaatcctcttcatgtatgtgagaccaagttccagctatgcttcggaccatgacatgatagtgtcaatattttacaccattgtgattcccttgctgaatcccgtcatctacagtttgaggaacaaagatgtaaaagactcaatgaaaaaaatgtttgggaaaaatcag

SEQ ID NO: 24190 - DNA, 612 bp, Homo sapiens
  MAP TO Z99716.4; EXPRESSED IN BRAIN, SIGNAL = 1.1; EXPRESSED IN HELA, SIGNAL =   1; SWISSPROT HIT: Q92832, EVALUE 8.00e-02; NT HIT: AF210249.1, EVALUE 9.10e+00; EST_HUMAN HIT: AI763350.1, EVALUE 0.00e+00
cttcgagagcggcgggaaggatcagcgggcagggagagcagtccgaggagcaggcgggggtccctgggcggcgcgtgctcacctggtcactgtgcgccgcgcgcgcgggctgtgcgccctctccagtcccaggcgcgccccgatgccggccagcaccagcagcgctgcgacgccgcacacagcgtagacggccgtatggctgcgctcgcggccggggtcccggggcgctgcggtgtcgcgggcgcgggcgggcggccggcctgtctggacccaggccggcgtgtcgtagttggaacagcggctctggtcgaggcgccgcggcccgtcgtggcagcagaagcggtagccgcacgtgccgcagcagaagctgtaggctccggagctgcagttgaagggcgggtcccactggcccatcacgtcgtagtagccgcggcagcggtcgcccccctccggggctgtcgtgccgggcgccgcgggaccctgcgcctcgggggctcccgcgcggcccgacggcggccgcgccagcagcaacgcgagccgaagcgcgagcgcgagccggaggccgggaggacggcggccgccgagcagtccccgcgccccggcccgcgccat

SEQ ID NO: 24191 - DNA, 519 bp, Homo sapiens
  MAP TO AP000538.1; EXPRESSED IN FETAL LIVER, SIGNAL =   1; EXPRESSED IN HELA, SIGNAL = 0.49; EXPRESSED IN BRAIN, SIGNAL = 0.85; EST_HUMAN HIT: BG009093.1, EVALUE 2.00e-44; NT HIT: AL163202.2, EVALUE 1.00e-84; SWISSPROT HIT: P18175, EVALUE 1.00e-04
ggaaaaacaaacagaacccagtagcagtgctctacagtcttttgtgagggaaaaacattcagaccctagtagcagtgttctggaatcctatgtgagggaaaaacattcagaccctcgtagcagtgtcctagaatcctatatgagggacaaacactcagaacccagcagcagtattctgaaatcctttgggagggaaaaacattcacaccatcgtaacagtgttttggaatcctacgtgagagaaaaatattcagactatcgtagcgttgtgctgaaatccagtataaggaataaacactcagaacccagtagcagtgttctggaaccctttgtgatggataaacattctgaccctcgtagtagtgttctggaatcctacgtgagggacaaacactcagaacccagcagcactgttctggaatgctatgtgagggacaaacactcagaacgcagtagcagtgttccagaatcctatgtgagcaacaaactttcagaacttcgtagtagtgttctggaatc

SEQ ID NO: 24192 - DNA, 486 bp, Homo sapiens
  MAP TO AC006249.1; EXPRESSED IN BRAIN, SIGNAL = 1.8; EXPRESSED IN HELA, SIGNAL =   3; EXPRESSED IN HEART, SIGNAL = 2.6; SWISSPROT HIT: P10569, EVALUE 7.00e-05
gctcctccgcggcaggaagcacctgctccagtccgggcgcaggttccctcgccactgcacgctgcgggttcccagcccgggggcagcccaactttccgccgcctccaacccgaggatgcccccaggctcctcccgaccagccagcccaggcctggaggccacttcacacagcctcggccgggaccctctagctgggcgggtgcagtgccctggtcccaagtcggtctccgcctgccgtggggtccctcgaaggttgcgggaaaggggcgtgcccaccctcgccgcggggcaggaaaatccacggagggtccccctgcctgtcgccctcggggcaaggggagaggtgctctactgccagctggcagccccgaaaagtgcggacgcagctcggaagtgcctgctccgggggtggagacaggtggtgtggattaccccgctccgtggtcttcacgggtcagggcctggcgcgctccggcccgccggggg

SEQ ID NO: 24193 - DNA, 977 bp, Homo sapiens
  MAP TO AP000556.2; EXPRESSED IN HELA, SIGNAL = 0.9; EXPRESSED IN BRAIN, SIGNAL = 0.97; NT HIT: gi15805042, EVALUE 3.70e+00; EST_HUMAN HIT: AI684378.1, EVALUE 9.00e-73; SWISSPROT HIT: Q9M291, EVALUE 8.30e-02
ccggactcagtctctcgcaaggaccccggctcccagccgcactccccagacgcacgtggcccaccctccgcccgtcccgcgcccaccccctccctccagtaccggagccctaactggcggcacccgggcacccttctgactcagagccacgctacacgagggggaccgatctgctcacttgccccgtcctgggggtaccagagtagccagcgcgacgccttccgcacctcgcctaggctgcccttgtgcggccgccctcagtccccgccaccttgcggggccccaggcggcactggcatcttcttgtggttcttcctgaccggggctcggtgcgctccgcattctgctgggccgtccggggcgtcgtctgcgggcctggaggcggcgaccagggcgctcacggtgccgagcgtccgcagcagggtcgggccgcggggcgtggcgcgggggacggcgcggggctcgcggcgggcaggcggggacggcggcggcggcggcagcagcgcgcgcagagcgtccagctccgctcgaagctccgcgcgcagcgcctcaatctcggcgcccagctcctcgcgcactgccgcgagtccctcctgcagccgccgctcgctgacctccaggacccccgccgggtaggtggccctgccgcggggctccccgcatactgagcacacggagccgcggctgtgcgcgccggtcctctcgcccgcgcccgccgccccggcccccgcacgctccaccagcttcagcagccgcggcacctcggaccgcgaagccgcttcggcccggagctggccgagcaggcgagccagccggcccggggctcgggcgtcttcctggcccggcccattggattgcggccccgggtcccgccggcggcccgtgacgcgccgcagcacctcgctggctctgtacgcactacgcgcctgggcccacgggcggccgggcgtcgccatccgccctgctgcctccaccgc

SEQ ID NO: 24194 - DNA, 713 bp, Homo sapiens
  MAP TO AL157689.1; EXPRESSED IN BRAIN, SIGNAL = 1.1; EXPRESSED IN HELA, SIGNAL = 0.93; SWISSPROT HIT: O64963, EVALUE 1.90e+00; NT HIT: gi14749793, EVALUE 0.00e+00; EST_HUMAN HIT: AI202029.1, EVALUE 0.00e+00
cggcggcggtgggggtggcggtggcggggggctgcacgtggccattcccgactcggtcctcaccccgcccggcgccgacggcggccgcccgcaagactcagttcggcgcctcggccaccgcggccctggcccccgtcgcctccgacccgctgtcacccccgctctcggcgtccccgcgggacaagcaccccgggaacggcggcgggggcgggggcgggggcggcggcgcggggggcggcggccccagcgcgtccaactccttgctgtacactggggacctggaggcgctgcagaggttgcaggcgggcaacgtcgtgctcccgctggtgcacagggtgaccgggaccctggccgccaccagcacggccgcgcagagggtctacaccacgggcaccatccgctacgcgcccgccgaggtgaccctggccatgcagagcaacctgctgcccaacgcgcacgctgttaacttcgtggacgttaacagccccggctttggcctcgaccccaagacgcccatggagatgctctaccaccacgtgcaccggctcaacatgtcaggaccgttcggcggcgcagtgagcgcagctagcctgacgcagatgcccgccggcaacgtgttcaccacggccgagggactcttctccacgctgcccttccccgtctacagcaacggcatccacgcggcacagactctggagcgcaaggaggactga

SEQ ID NO: 24195 - DNA, 708 bp, Homo sapiens
  MAP TO AC005609.1; EXPRESSED IN BRAIN, SIGNAL = 0.84; EXPRESSED IN HELA, SIGNAL = 0.55; SWISSPROT HIT: Q9UN73, EVALUE 1.00e-123; NT HIT: gi14861872, EVALUE 0.00e+00; EST_HUMAN HIT: BF931752.1, EVALUE 0.00e+00
attctccgccttacccatcataataggacaaggtgaaaggctggggctaaaggccatgagatccatcttgggtgggccctccccggagcacaccctctgccgcctctgctgcgagtacgaccagctccccactgcgctggagcacaccagcgtgggcttgtccgccgtgcacgcgccctcggtgggtggcgccgagcaccgcagcgctgtgtacagcagtagcgtgaggaccagcaggctggataccgcgcagatggcgatgatcaggtacacgttgacatccaccagcgccgcctctgggcccgcggcgcccaccgacgcccgtgatgacgcctttggagcctggccactctccaccagcgacaccagaaccgtggccgtcgctgtcagcgccggctcaccgtggtctttcaccagcaccagcagccggtggcgcggagagtccgcttcgtccaggacacgagtggtgctgatctcgcccgtgtacagccccacgcgaaacgggaagcgagcgctgcttgccgggggctgcagctcatacgaaagccacgcgttgtagcctgagtcggcgtcaactgcgcgcaccttcgccaccacttggcctgcacccagtgaccgcggcaccagctcgctcactgcaccaccagtaccacccacccgaggcgccagcagcgccggcgcgttgtcgttctcgtccagcacgaacac

SEQ ID NO: 24196 - DNA, 800 bp, Homo sapiens
  MAP TO AC004789.1; EXPRESSED IN LUNG, SIGNAL = 1.4; EXPRESSED IN BRAIN, SIGNAL = 1.2; EXPRESSED IN HEART, SIGNAL = 1.5; EST_HUMAN HIT: BI257554.1, EVALUE 0.00e+00; SWISSPROT HIT: P10070, EVALUE 3.00e-20; NT HIT: gi14778168, EVALUE 0.00e+00
tcagttcaccacagccggtttgagcagcaccgagcccggcgggatgaccacccagccaggggccaacgcctctgggctgctggcagctgagttgacgcccgtggacaggtccagcacggtgcctggcagcagggggagtccatcggggcttggccgggagcagctgctctccgtcctttcaaggggcgtcttgtggccctccatgcccagggccctggtgggcaccgacccacgccccttctccccctcggccttgccaccagctgcgccagcaaggagggagaccacaggcaagcccagtccgccagccccaaagggcgagggcagcagcgggttcttggccagattgagaggcaggacggggcctggcagcccagggcccatgccccccccacccccactgcccccaccgttgccacaggccagggcactgaggtcaagggggccgggggccaggggtaggggtaagccgggcaggccagggcctccaaagagggcagctgggttggggatgatgatctgggccccactgacataggggccgccgtcgggggcgggcagtggcggcttggggggtgggcgcagctgcaggagctcttgctgctcgtgggacacaaagtggccatgggccttgatgtgcttgcgcagtgagctggggtccgtgtagcgcttgtggcagccgggcatcttgcagtagtagggcttgtccacgtagtgggtgcgcgtgtgcttaaagcggtcactggagttggaatagcgcttgttgcagccctcgtaggggcagacgtagggcttctcac

SEQ ID NO: 24197 - DNA, 861 bp, Homo sapiens
  MAP TO AL163303.2; EXPRESSED IN BRAIN, SIGNAL = 0.84; EXPRESSED IN HELA, SIGNAL = 0.91; SWISSPROT HIT: P43548, EVALUE 3.70e-01; NT HIT: AL163303.2, EVALUE 0.00e+00; EST_HUMAN HIT: BG674007.1, EVALUE 3.00e-44
cagtgtgagaatggactaataccgaaaattggtaccaagaagtggggcattgctataaagatacatgaaaatgtggaagcagctttgcggaagcagctttggaactgggtaacaggcagaaattggaagagtgtgaagggctcaaaagaagataggaagatgtggcaaaattcggaacttcctagagatttgttaaatttttgtgaccaaaatgctgatagtgatacagacagtgaagtccaggctgagaaggtctcagatggagatgaggaactcgctgggaactggagcaaaggccacttttgctatgctttaacaaagaaactggcagcattgtgcccctgccctagagatctgtggaattttgaacttgagggagatgattttgggtatctggtggaagaaatttctaagcagcaaagcattcaagatgtggcctgggtgcttctaactgtctatgctcagatgtgtgagcaaagaaatgacctaaaacttgaatttatatttaaaagggaagcagaacataaaagtttggaaaatttgcagcctggccctgtggtaggaaagaaaagcctattttcagggctggaatgcaagcaagctgcagaaatttgcataagtaaagagaagccaagtactaatatccaagacagtggggagaaggtctccaaggcatttcagagacctttgcagcagcccctcccatcacaggcctggaggcctaggtgggaagaatggtttcatgggccaagtccaaggccccaacaccatgggacactgctccctgcatccctgccatttcagctccagctgtggctgaaaggggcccagttacagctcaggctgttgcttcagagaatg

SEQ ID NO: 24198 - DNA, 627 bp, Homo sapiens
  MAP TO AC018840.2; EXPRESSED IN HELA, SIGNAL = 1.5; EXPRESSED IN BRAIN, SIGNAL = 0.89; SWISSPROT HIT: Q14831, EVALUE 1.00e-65; NT HIT: gi4504146, EVALUE 0.00e+00; EST_HUMAN HIT: AL110366.2, EVALUE 1.00e-03
ctggaagagcctcaggatgttggctaccatgatggagaccgaactccccgaagccccaatcactccaactactttctccggcttgacgaaaaccggcggttcgccgttggtgcagcgcacgtcggaggtgtccttctggatgagcgcctggacgaaagtaagcgactgttcgagcgcgtaagtgtccctggaacaagtgtccaggatccgcgcgcccagcgtcacgttgggcagtaggttgggatcactgttgatctggtccagggcgtagagcatcgcttccagcctgtggatcccgttttccctcttgatgtcgccgcagggcactccgctgggacccttggcgtgcacggggaacagccccccgagggtgacgtccccctcgatccggattaaatgcggggcgtacatctcctggccgcgcgccgccgccgccagcgcgcacaggagctcctccagcacgcagcaggggaacttcatcaaagtcaggacgcggagcagcttcctcagctggaccatgctgctccggctgctgcggtggcggcggcggcgctggagggaacggtggtgggctcgccgaggtccgggcccttcagggcgagctcctccgggaaagcccaggggctc

SEQ ID NO: 24199 - DNA, 1523 bp, Homo sapiens
  MAP TO AC035150.1; EXPRESSED IN HELA, SIGNAL = 0.42; EXPRESSED IN BRAIN, SIGNAL = 0.97; SWISSPROT HIT: Q9UK13, EVALUE 0.00e+00; NT HIT: gi7019584, EVALUE 0.00e+00; EST_HUMAN HIT: AU122309.1, EVALUE 0.00e+00
gaggcaagatccaaattgagatggagactgttccagaagcaggaccacatgaagagtggtcctgtcagcaaatatgggaacaaattgcaagtgacctaaccaggtctcaaaactccataaggaacagctctcagttcttcaaagaaggtgatgtcccctgccagattgaggcaagactatctataagtcacgtgcaacagaaaccttaccgttgtaatgaatgtaaacagtccatcagtgatgtttctgtctttgatcttcatcaacaatcacactcaggagagaaatctcatacatgtggtgagtgtggaaaaagcttctgttacagcccagcccttcatattcatcagagagtccatatgggagaaaaatgctataagtgtgatgtgtgtggtaaggaatttaatcagagctcacatctgcaaactcatcagagagtccatactggagagaaaccattcaaacgtgggcaatgtgggaaaggcttccatagtagatcagcacttaatgttcattgcaaattgcacacaggagagaaaccttataattgtgaggaatgtgggaaagccttcattcatgattcacagcttcaggaacatcagagaatccatactggggagaagccattcaaatgtgatatatgtggtaagagcttccgtgttagatcaagacttaataggcattccatggttcacacaggagaaaaaccattcagatgtgatacatgtggcaagaactttcgtcagagatcagcacttaatagtcattccatggtccacatagaagagaagccatacaaatgtgagcaatgtggaaaaggcttcatttgtaggcgagatttttgtaagcatcagatggtccacacaggagagaaaccatataattgtaaagaatgtgggaagaccttcagatggtcctcatgtcttttgaaccatcagcaagtccacagtggacaaaaatccttcaaatgtgaagaatgtgggaagggattttatacaaattcacgacgatcttcccatcagagatcccacaatggagaaaagccatataactgtgaggagtgtggtaaggactataaaaggaggttggatcttgagtttcaccagagggtccacacgggtgagagaccctataattgtaaggaatgtggcaagagctttggctgggcctcctgtcttttgaaacatcagagactccacagtggggaaaaacctttcaaatgtgaagagtgtggaaagagatttactcagagtacacaacttcattcccatcagacatgccatactggagaaaagctatacaaatgtgagcagtgtgagaaggggtacaacagtaaatttaatcttgacatgcaccagagggtccacaggggagagcgaccctataattgtaaggaatgtggaaagagctttggctgggcttcatgtcttttgaaacatcagagactccacagtggagaaaagccattgaaatctggagtgtgggaagagatctactcagaattcacagcttcatttacatca

SEQ ID NO: 24200 - DNA, 621 bp, Homo sapiens
  MAP TO AF170801.1; EXPRESSED IN BRAIN, SIGNAL = 1.8; EXPRESSED IN HELA, SIGNAL = 0.5; EST_HUMAN HIT: BE262940.1, EVALUE 8.80e-01; SWISSPROT HIT: O94819, EVALUE 1.00e-100; NT HIT: gi16178297, EVALUE 0.00e+00
aggcccctgcgccaggcgcgctcgcagctgcggctgctggccctggacggtcacctctacgccgtgggcggcgagtgcctgctcagcgtggagcgctacgacccgcgcgccgaccgctgggcccccgtggcgccgctgccccggggcgccttcgccgtggcgcatgaggccaccacctgccacggcgagatctacgtgtccgggggctccctcttctatcgcctgctcaagtatgacccgcggcgcgacgagtggcaggagtgcccgtgcagcagcagccgcgagcgctcggccgacatggtggctctcgacggcttcatctaccgcttcgatctgagcggcagccgcggcgaggcgcaggcggcggggccgagcggggtcagcgtgtcccgataccactgcctggccaagcagtggagcccgtgcgtcgcgcccctgcgcctccccggcggccccacgggcctgcagcccttccgctgcgccgccctggacggcgccatctactgcgtgagccgcgcgggcacctggcgcttccagcctgcccgggaaggcgaggccggcggcgacgcaggccagggcggcggcttcgaggcgctgggcgcccccttggacgtccggggt

SEQ ID NO: 24201 - DNA, 886 bp, Homo sapiens
  MAP TO AC022845.2; EXPRESSED IN BRAIN, SIGNAL = 0.83; SWISSPROT HIT: P18850, EVALUE 1.20e-01; EST_HUMAN HIT: BF063403.1, EVALUE 0.00e+00; NT HIT: gi13639828, EVALUE 0.00e+00
aagagcgaggtggtcagccgcagtcccacgccgctcagccggctcagcaagcgagccagtccagtctcgttggctaagactgcccgtaggtagcgactctcctcctgcagtgcctgtacgcgtttgcccagctcccgattctcggcccgcagctcctggttctcggctgccagaccccggactcgactctccagccccatcacgtactccttcttcttcagtcgattaaggcgggcagcggccgccgccgccttccggggactctttgtcgccgcctggttgttgtcgttaccgctgccgccaccgccgcctcctcctggggactttctccgcctcttttcggcgctgccactgtcactgctgctgctgcagcctccgataccgtttaacagcctttgcagcaggtcagagaagcgctgcatttcagcagccgcggcctcatcgtcatcgtcccctctccacaggccgccgctatccgagcctccgccagacgaggagagaggccccggcgagctaagcccggggtccaggtgccagtccggttgcctggggtccaggagatccgccagttccagcccagacagaaagtccatatcctccgtctcttcccccgggaggctggcgatcgcctcctcctccatctcctcgggggagggcgcgcgcacggccacgccgccgcggctccccctcccggcttccaactctccttcgtcgccaaactgctgcttgcggccgggagatccggccgccgccgtctcctcctcccccgctgcagcccgggtcaggtcagagggcagcgaacaagttgcagccggctccgggctctcactgcgggttggggagttgctgcccgaggctgccagcagcttggtcaggctatgcctca

SEQ ID NO: 24202 - DNA, 1538 bp, Homo sapiens
  MAP TO AC021000.3; EXPRESSED IN BRAIN, SIGNAL =   3; EST_HUMAN HIT: AL537600.1, EVALUE 0.00e+00; SWISSPROT HIT: P07197, EVALUE 7.00e-86; NT HIT: gi11424723, EVALUE 0.00e+00
tctgggtgacttcctttactatggcgtgtgaagtgactttttctacctttttagtagacactagtttctcctcaaaggtctcttcatgctcttcaaccttttgagtgacggttacagatttagtgatgtatttggtagcaccatctcccccctcactggtgattttttctaccgttttggtcaccaccactttctcctcacttttatcaccccccttcttttcatctgctgggctcaagtctaggccattggtgacaacgcctttctcctcttccctcccactgcctttttccttggtctcctgctctacctcctcttttccttctacctccccattgacagctatgtcttccttcctggatcccttggcacctttatcactcccttcctcctcacttcctccctctcctcccgctttctccttctctttctcctgctgcagtggcttcccctcttctttggtctctttctccaagtgcacctttaccgatttggtgatggtgaccacctctgccacagcttcctcctttacaggggactcagctttcttcttctctggcacatccttttgtttctcttcctttttctctaccttctcttccttgggagcttccttgacttccttttcttcttcctctttctgttcacctttccccacttctgcttttgactttgcctcttccactggtgattttggcacaggagatttggctttctcttccactggtgattttgacacaggagacttgcctttctcttccactggtgatttcggcacaggagacttgcctttctcttccactggtgacttgggcacaggagacttgcctttctcttccactggtgacttgggcacaggagacttgcctttctcttccactggtgattttggcacaggagacttggctttttctggcttttccaccttggcatctgccaccagctcctccttggtagccacttcctcactcttttcctccactttcttttcctctttagcttcggcttcctctccttcagcttcagcttctgtttctccttcttcctgctcaccttcctctttttcactagagccttccttctcggatcctccctcttcggcttggtctgacttagctccctcatcttcttcctcctcttcttcctggccttcttcttcctccttttccccttcctcttctttaacttcaggtgcagttgctttcactggagactttttggcagctacttcttcttcttcagcttcgggttcctcttccttttcttctgctgcttctttcttctcttccttcatggaaacggccaattcctctgtaatggctgtcagggcctcttccatttctgacttctcatcctccactttggtttcctctatgatctcctcgacaaatttgtgttggaccttaagcttgggagcttccaccttggttttctgaatcttactggatattgtgattgggggtcggtgtgtatacagtggcccagtgatgcttcctgcaaatgtgctaaatctagtctcttcaccctccaggagtttt

SEQ ID NO: 24203 - DNA, 1002 bp, Homo sapiens
  MAP TO AL122010.2; EXPRESSED IN BRAIN, SIGNAL = 0.91; NT HIT: AF181620.1, EVALUE 0.00e+00; EST_HUMAN HIT: AL550396.1, EVALUE 0.00e+00; SWISSPROT HIT: P35212, EVALUE 0.00e+00
atgggtgactggggcttcctggagaagttgctggaccaggtccaggagcactcgaccgtggtgggtaagatctggctgacggtgctcttcatcttccgcatcctcatcctgggcctggccggcgagtcagtatggggtgacgagcagtcagatttcgagtgtaacacggcccagccaggctgcaccaacgtctgctatgaccaggccttccccatctcccacatccgctactgggtgctgcagttcctcttcgtcagcacacccaccctggtctacctgggccatgtcatttacctgtctcggcgagaagagcggctgcggcagaaggagggggagctgcgggcactgccggccaaggacccacaggtggagcgggcgctggcggccgtagagcgtcagatggccaagatctcggtggcagaagatggtcgcctgcgcatccgcggagcactgatgggcacctatgtcgccagtgtgctctgcaagagtgtgctagaggcaggcttcctctatggccagtggcgcctgtacggctggaccatggagcccgtgtttgtgtgccagcgagcaccctgcccctacctcgtggactgctttgtctctcgccccacggagaagaccatcttcatcatcttcatgttggtggttggactcatctccctggtgcttaacctgctggagttggtgcacctgctgtgtcgctgcctcagccgggggatgagggcacggcaaggccaagacgcacccccgacccagggcacctcctcagacccttacacggaccaggtcttcttctacctccccgtgggccaggggccctcatccccaccatgccccacctacaatgggctctcatccagtgagcagaactgggccaacctgaccacagaggagaggctggcgtcttccaggccccctctcttcctggacccaccccctcagaatggccaaaaatccccaagtcgtcccagcagctctgcttctaagaagcagtatgtatag

SEQ ID NO: 24204 - DNA, 293 bp, Homo sapiens
  MAP TO CHR14.3; EXPRESSED IN FETAL LIVER, SIGNAL =  11; EXPRESSED IN BRAIN, SIGNAL =  17; EXPRESSED IN HEART, SIGNAL =   8; NT HIT: gi13631558, EVALUE 0.00e+00; EST_HUMAN HIT: BI223805.1, EVALUE 0.00e+00; SWISSPROT HIT: P56212, EVALUE 2.00e-28
agtcaccaggttcttgtctggtcctgcacttggcagctgcttattcttcatcttggctttggccatgttgtagtctcctgagtcaaagtacttttgccctttctggagtctcttcatgaggaagtcggagcctccaggcttttgtcctaggcttgggtatttggcctttagctttgcctcttcagctctctcagggagaataccttctttctcctgcgtgtcctgcttctcctcgccggcctcctctgcagggttctcttcttcttgcttctgggacatggcgggaccgggac

SEQ ID NO: 24205 - DNA, 402 bp, Homo sapiens
  MAP TO CHR14.3; EXPRESSED IN PLACENTA, SIGNAL = 0.98; EXPRESSED IN BRAIN, SIGNAL = 1.2; SWISSPROT HIT: O05960, EVALUE 1.10e+00; NT HIT: X16536.1, EVALUE 9.60e-02; EST_HUMAN HIT: AW961287.1, EVALUE 5.60e-01
atgcctctaatccaccaccagctgttgctgtggcttcagcttttcctgcctgcatttattctcatccaaacaaggaatggagtgattggtgactgtgatactatgacacaagtattgacgtatcctacaaatgaaaaattgcacaaaatctacctcactggtgaattctttgtgctgacaatcttaaatggaaaactgatttatagcatcattgtgaaaactactgggacaatgcgctatatatatcaatggataagtccctttgccttctggagcatttacaatgaatcttgtctaagctcaaagacaattgaaagaccaaaatatgtttacacattacagacccaagaagaccacaatgaatgtgaccagaagcaccatgaccacatcaattcagaatga

SEQ ID NO: 24206 - DNA, 131 bp, Homo sapiens
  MAP TO CHR14.3; EXPRESSED IN BRAIN, SIGNAL =   4; EXPRESSED IN HELA, SIGNAL =  55; EXPRESSED IN LUNG, SIGNAL =  35; SWISSPROT HIT: P05787, EVALUE 3.00e-01; NT HIT: gi14730952, EVALUE 2.00e-28; EST_HUMAN HIT: AL582819.1, EVALUE 2.00e-28
cagaggactcggacactagcttcccatcgcgggtctccatcttcacaaccaaggccctggtggagctggtgcagctgaaggagctggagcccagccagagccaaagctggagcccgggcgtagctgaggcc

SEQ ID NO: 24207 - DNA, 154 bp, Homo sapiens
  MAP TO CHR16.3; EXPRESSED IN HEART, SIGNAL = 1.8; EXPRESSED IN HELA, SIGNAL = 1.4; EXPRESSED IN PLACENTA, SIGNAL = 1.6; EXPRESSED IN BRAIN, SIGNAL = 1.5; EST_HUMAN HIT: BF759286.1, EVALUE 8.00e-44; SWISSPROT HIT: Q15032, EVALUE 3.40e+00; NT HIT: gi15316047, EVALUE 6.00e-44
tttaagaaccccctgatcctgctgctgctgggctctgccctggtgagtgtcctcaccaaggagtatgaggacgccgtcagcatcgccacggtgagttccctgacagcgctcggctcccgggcgggcagccacaggtctgctgagtctctgcttg

SEQ ID NO: 24208 - DNA, 318 bp, Homo sapiens
  MAP TO CHR19.3; EXPRESSED IN BONE MARROW, SIGNAL = 1.9; EXPRESSED IN BRAIN, SIGNAL = 1.1; EXPRESSED IN PLACENTA, SIGNAL = 2.1; SWISSPROT HIT: Q04225, EVALUE 7.00e-17; NT HIT: gi13899345, EVALUE 0.00e+00; EST_HUMAN HIT: BE747633.1, EVALUE 0.00e+00
tcagacgctgatggtgcggaagatggtgaagcctgacagcgccgtgctgaccaggagccctgggcactgcgggtgccagtgcagctccttcagctcggtctcgccctggtgcacgaacagcagctgctgcgggaggtcggccagtccggggtcggcctccacgtcgcccgcctcagggtcccgctccactgccaggtcccactgtgtgatctggtggtctgcacccgaggctgcaaagaccccgctgtcctgggggtgccactcgacggaggtcacgggggccacgtgctgcttgaaggtggccactggggaaccaga

SEQ ID NO: 24209 - DNA, 139 bp, Homo sapiens
  MAP TO CHR14.3; EXPRESSED IN HELA, SIGNAL = 1.8; EXPRESSED IN FETAL LIVER, SIGNAL = 1.7; EXPRESSED IN LUNG, SIGNAL = 1.5; EXPRESSED IN BRAIN, SIGNAL =   3; EST_HUMAN HIT: AI985349.1, EVALUE 7.00e-72; SWISSPROT HIT: Q92785, EVALUE 6.00e-13; NT HIT: AF362750.1, EVALUE 5.00e-47
gcctgtggttctcatttctgtggttgggtggggaccgagtctcctggtcttgagcttcatccccctcctcgctggccaggtgagtgtgagcatagtggtagctgagccccggtcggttcttgtagcgcttgccacagac

SEQ ID NO: 24210 - DNA, 330 bp, Homo sapiens
  MAP TO CHR14.3; EXPRESSED IN FETAL LIVER, SIGNAL = 1.1; EXPRESSED IN LUNG, SIGNAL = 1.1; EXPRESSED IN BRAIN, SIGNAL = 1.3; EST_HUMAN HIT: AW450361.1, EVALUE 7.00e+00; SWISSPROT HIT: Q90691, EVALUE 2.10e-01; NT HIT: AB023142.1, EVALUE 1.20e+00
aacagccctctggccgttgaatggactagaggtgaacacctcactgaggcggaacaatcagagcctaggcctgaggagactggggaggtcggggcccagacggtgattgaggctgtcaatgcagggctgggcaagttgcacgttaactcaggatatgttggcagccaggttttcagtggaccaggaagcaatgaaagacacttctgcagaggtgttaatgaggcaggcagggagatgaggaaatgtgagagagcctggtacccagtcatcctagacgtggctgcatccctgccctggagctgcttgaaacaaagctcgcttgttgcttaa

SEQ ID NO: 24211 - DNA, 336 bp, Homo sapiens
  MAP TO CHR14.3; EXPRESSED IN HEART, SIGNAL = 5.3; EXPRESSED IN FETAL LIVER, SIGNAL = 5.8; EXPRESSED IN BRAIN, SIGNAL = 2.9; EXPRESSED IN PLACENTA, SIGNAL = 4.4; EXPRESSED IN HELA, SIGNAL =  10; SWISSPROT HIT: Q61729, EVALUE 7.30e+00; NT HIT: gi7706321, EVALUE 0.00e+00; EST_HUMAN HIT: AI478391.1, EVALUE 0.00e+00
gatgcagttcttaatgaagctgctcaaattctgcgattgctgcacatagaggagctcagagagctacagacaaaaatcaacgaagccatagtagctgttcaggcaattattgctgatccaaagacagaccacagactgggaaaagttggaagatgaacacttgaggacttcagcttctcacctacttagtacagttgggaaccatacacttctggcatgtttggaaatcaaaatgtcacattctcgggggaggaagcccagaaaattgggtatgttctagagatttaccaccattgcttattgcttttttctttaataaagtttaggaaagtagaa

SEQ ID NO: 24212 - DNA, 90 bp, Homo sapiens
  MAP TO CHR14.3; EXPRESSED IN PLACENTA, SIGNAL = 1.4; EXPRESSED IN HEART, SIGNAL = 1.8; EXPRESSED IN BRAIN, SIGNAL = 1.3; NT HIT: AP003105.2, EVALUE 1.10e+00; EST_HUMAN HIT: BE242470.1, EVALUE 1.60e+00
ctgctgccgctggctatccctgtttattaaccgtggatcatctcgtactttcagatccaagaaaatttctatactaaaagtatttccaac

SEQ ID NO: 24213 - DNA, 86 bp, Homo sapiens
  MAP TO CHR18.3; EXPRESSED IN HEART, SIGNAL = 3.8; EXPRESSED IN HELA, SIGNAL = 4.1; EXPRESSED IN LUNG, SIGNAL =   5; EXPRESSED IN BONE MARROW, SIGNAL =   7; EXPRESSED IN BRAIN, SIGNAL = 5.1; EXPRESSED IN PLACENTA, SIGNAL = 5.1; NT HIT: AF252549.1, EVALUE 2.70e-01
aacctgaggacctggccccagtccacactctgccctgagctgctctcctccctctcctcttcccctgtcacagcttcccccaccat

SEQ ID NO: 24214 - DNA, 129 bp, Homo sapiens
  MAP TO CHR16.3; EXPRESSED IN HELA, SIGNAL = 1.7; EXPRESSED IN LUNG, SIGNAL = 1.1; EXPRESSED IN FETAL LIVER, SIGNAL = 1.6; EXPRESSED IN BRAIN, SIGNAL = 1.4; NT HIT: gi14775465, EVALUE 1.00e-66; EST_HUMAN HIT: BG028376.1, EVALUE 1.00e-66
aaaggagaggagactgaagagacaagttcaagtaaattgttggtaaaagcagaagagctagagaaacctaaagaaacagaaaaagttaaaatcaccaaggtgtttgattttgctggtgaagaagtaagg

SEQ ID NO: 24215 - DNA, 189 bp, Homo sapiens
  MAP TO CHR14.3; EXPRESSED IN BONE MARROW, SIGNAL = 3.3; EXPRESSED IN BRAIN, SIGNAL = 2.1; EXPRESSED IN PLACENTA, SIGNAL = 2.7; EXPRESSED IN HELA, SIGNAL = 2.3; EXPRESSED IN LUNG, SIGNAL = 2.9; NT HIT: AF111170.3, EVALUE 1.00e-102; SWISSPROT HIT: P06684, EVALUE 2.50e+00; EST_HUMAN HIT: BF941639.1, EVALUE 1.60e-02
ccctcttgctgacgtccctgccgtcatcaccactgcctctttctgtccccatgtccgccaccaccatcatcacctgaagttgccactgacggacaaacatggcctgtccctcctccttctggacttccttggacagagcttccagggaagtcagcaagagagtgtgggagatgcggaggcagccttccc

SEQ ID NO: 24216 - DNA, 174 bp, Homo sapiens
  MAP TO CHR18.3; EXPRESSED IN BRAIN, SIGNAL = 1.8; EXPRESSED IN PLACENTA, SIGNAL = 0.91; EXPRESSED IN HELA, SIGNAL =   1; EST_HUMAN HIT: BF894524.1, EVALUE 2.30e-01; SWISSPROT HIT: Q03376, EVALUE 3.30e+00; NT HIT: AE003858.1, EVALUE 6.10e-01
caggcagttggcatttgaacgtagacactgttcatctttgggtgcggatgtgctctggttgcccaggcaaagccgtgttcattgatcagacatctatctgtgtactgtttagcactcaacagttgcgggtagaccgttgccagttgttttcgcatcacacgtggctcatctctc

SEQ ID NO: 24217 - DNA, 449 bp, Homo sapiens
  MAP TO CHR18.3; EXPRESSED IN BRAIN, SIGNAL = 4.4; EXPRESSED IN HEART, SIGNAL = 3.1; EXPRESSED IN BONE MARROW, SIGNAL = 0.94; EXPRESSED IN FETAL LIVER, SIGNAL = 1.2; NT HIT: gi9845300, EVALUE 7.00e-03; SWISSPROT HIT: P02452, EVALUE 3.50e-01; EST_HUMAN HIT: BI818938.1, EVALUE 0.00e+00
tgaatcacatgaaggtcacccccatggatgcggccacagcctcactgctcaacgtcttcaacgggaatgagtgcggggccgagggctcctggcaggtgggcatccagcaggatgtgacccacaccaatggctgcgtggccctgggcatcaaactacctcacacggagtacgagatcttcaaaatggaacaggatgcccgggggcgctatctgctgttcaacggtcagaggcccagcgacgggtccagcccagacaggccagagaagagagccacgtcctaccagatgcccttggtccagtgtgcctcctcttcgccgagggcagaggacctcgcagaagacagtggaagcagcctgtatggccgggcccctgggaggcacacctggtccctgctgctggctgcacttgcctgccttgtccctctgctgcattggaacatccgcagatag

SEQ ID NO: 24218 - DNA, 184 bp, Homo sapiens
  MAP TO CHR16.3; EXPRESSED IN BRAIN, SIGNAL = 3.1; EXPRESSED IN HEART, SIGNAL = 1.8; EXPRESSED IN HELA, SIGNAL = 2.1; EXPRESSED IN PLACENTA, SIGNAL = 2.1; EXPRESSED IN LUNG, SIGNAL =   2; EXPRESSED IN FETAL LIVER, SIGNAL =   4; EXPRESSED IN BONE MARROW, SIGNAL = 3.3; EST_HUMAN HIT: BG189851.1, EVALUE 3.80e+00; SWISSPROT HIT: O67453, EVALUE 5.60e+00; NT HIT: L42636.1, EVALUE 1.60e-01
caatcatttgctgattttcaagatgttagagtacataacatgaaatttgagttccgacatctcttgaacaatataaaaatgtggctgttattcccacataggaaaagccgtaacattggagttaaggatttaccacttcagttggtgcctcaccagttcctcttggtcattgttaatgtgcctg

SEQ ID NO: 24219 - DNA, 130 bp, Homo sapiens
  MAP TO CHR18.3; EXPRESSED IN BRAIN, SIGNAL = 3.5; EXPRESSED IN PLACENTA, SIGNAL = 2.4; EXPRESSED IN HEART, SIGNAL = 2.1; EXPRESSED IN FETAL LIVER, SIGNAL = 2.2; EXPRESSED IN LUNG, SIGNAL = 3.4; NT HIT: gi14764186, EVALUE 3.00e-67; EST_HUMAN HIT: BE794816.1, EVALUE 4.00e-67; SWISSPROT HIT: P55200, EVALUE 2.00e-05
agccgagggtgtggagtatgccggggctgtcagacccaagaggattgtggccattgccccatctgccttcgccctccccgccctggtctcaggcgccagtggaaatgtgtccagcgacgttgcctacggg

SEQ ID NO: 24220 - DNA, 87 bp, Homo sapiens
  MAP TO CHR18.3; EXPRESSED IN HELA, SIGNAL = 1.4; EXPRESSED IN PLACENTA, SIGNAL = 1.4; EXPRESSED IN LUNG, SIGNAL = 1.5; EXPRESSED IN BONE MARROW, SIGNAL = 2.2; EXPRESSED IN BRAIN, SIGNAL = 1.6; EST_HUMAN HIT: BE782810.1, EVALUE 1.00e-41; NT HIT: AJ277587.1, EVALUE 7.00e-42
tggatttaaaggaggtctggatctgatgaagtcgaggatgatttcatgagcactcttttttaaccgagggggaatatcaccattcac

SEQ ID NO: 24221 - DNA, 155 bp, Homo sapiens
  MAP TO CHR16.3; EXPRESSED IN HEART, SIGNAL = 5.8; EXPRESSED IN BRAIN, SIGNAL = 8.2; SWISSPROT HIT: P06599, EVALUE 8.80e-01; NT HIT: M28877.1, EVALUE 2.10e+00; EST_HUMAN HIT: BF680669.1, EVALUE 2.00e-01
ttttctgtagtatttcctgggcctgaaatgtctttcccctcacattgaactcctggttgcaagttaaaagcttctccatgacctcaacaacaccctgatggagtgaagcacagccctcctccaagccatctctaggacatgggtatgattccatg

SEQ ID NO: 24222 - DNA, 152 bp, Homo sapiens
  MAP TO CHR16.3; EXPRESSED IN BRAIN, SIGNAL = 1.2; EXPRESSED IN PLACENTA, SIGNAL = 1.6; SWISSPROT HIT: P28704, EVALUE 4.50e-02; NT HIT: AB060553.1, EVALUE 7.00e-28; EST_HUMAN HIT: BE782389.1, EVALUE 3.00e-80
ctgccgtcgcctgggctcggcccctgctccagtatgcccgcggaagaggggacagtcccacccccagagctgctttcagccctagagctctggggagggggctctgggccagcgggcaccacggtgctgccatctgtgggcggaagtggcgg

SEQ ID NO: 24223 - DNA, 185 bp, Homo sapiens
  MAP TO CHR18.3; EXPRESSED IN BRAIN, SIGNAL = 1.2; EXPRESSED IN PLACENTA, SIGNAL =   1; EXPRESSED IN BONE MARROW, SIGNAL = 1.4; SWISSPROT HIT: Q9W5G6, EVALUE 1.90e+00; EST_HUMAN HIT: BI490909.1, EVALUE 2.40e-01
caggagccagcattccacaaaatcaaactccagcttgaattcattgttttcagctaagttgctgccttcaggtttttgtggtttaacccaaggattttctgaatcagccagcccccggactgagtacttgctgtgtatggtgtactcttctaggtctttgggaaatgaagtaatatttccaacag

SEQ ID NO: 24224 - DNA, 97 bp, Homo sapiens
  MAP TO CHR19.3; EXPRESSED IN FETAL LIVER, SIGNAL = 0.81; EXPRESSED IN BRAIN, SIGNAL = 4.9; NT HIT: gi10257436, EVALUE 9.00e-48; EST_HUMAN HIT: BE901775.1, EVALUE 5.00e-47
acgatcaccagccacttgctctgcttcgccaggcccaggagggtgaagaggcagaccagcagctccaggagcagcaggaggacgtaggccagccacc

SEQ ID NO: 24225 - DNA, 137 bp, Homo sapiens
  MAP TO CHR18.3; EXPRESSED IN BRAIN, SIGNAL = 1.7; EXPRESSED IN PLACENTA, SIGNAL = 1.6; EXPRESSED IN HELA, SIGNAL = 1.6; EXPRESSED IN BONE MARROW, SIGNAL = 2.1; SWISSPROT HIT: O95897, EVALUE 2.60e+00; EST_HUMAN HIT: AI990529.1, EVALUE 6.80e-01
cttaaaggctgggctgtagggtagaaacacttggatcaggttctgccctttgatgaattcagctaagagaatgtattttttaatttccaagccagtgcaagcccctagacgcattttgttggtggtctgtataatgc

SEQ ID NO: 24226 - DNA, 169 bp, Homo sapiens
  MAP TO CHR19.3; EXPRESSED IN HELA, SIGNAL = 1.7; EXPRESSED IN LUNG, SIGNAL = 2.3; EXPRESSED IN FETAL LIVER, SIGNAL = 0.91; EXPRESSED IN BRAIN, SIGNAL = 1.1; SWISSPROT HIT: P01233, EVALUE 8.00e-25; NT HIT: X00265.1, EVALUE 4.00e-76; EST_HUMAN HIT: BE733206.1, EVALUE 2.00e-75
ccatggtggggcagtagccggcacagatggtggtgttgacggtgatgcacacggggcagccctccttctccacagccagggtggcattgatggggcggcaccgtggccgaagcggctccttggatgcccatgtcccgcccatgctcagcagcagcaacagcagcagccc

SEQ ID NO: 24227 - DNA, 217 bp, Homo sapiens
  MAP TO CHR19.3; EXPRESSED IN HEART, SIGNAL = 2.6; EXPRESSED IN FETAL LIVER, SIGNAL = 1.2; EXPRESSED IN LUNG, SIGNAL = 2.4; EXPRESSED IN BRAIN, SIGNAL = 8.7; NT HIT: gi4503262, EVALUE 1.00e-119; EST_HUMAN HIT: AL577700.1, EVALUE 1.00e-119; SWISSPROT HIT: Q10586, EVALUE 1.00e-34
tcacagggccccgtgctgggcctggtatcgggacagcacggcgcggtagtgggacagctcctggcgcacggccacaacttcctgccgcagcagggcgttctccttctccaggaaggccgcccgcaccgatatctggttctccttgagccgccgggcgtcacgggaccgcttggctgcctcgttgttcttgtaccgccggctccagtatttctcatcc

SEQ ID NO: 24228 - DNA, 479 bp, Homo sapiens
  MAP TO CHR16.3; EXPRESSED IN HELA, SIGNAL =  47; EXPRESSED IN PLACENTA, SIGNAL = 7.7; EXPRESSED IN HEART, SIGNAL =  16; EXPRESSED IN LUNG, SIGNAL =  31; EXPRESSED IN FETAL LIVER, SIGNAL =  33; EXPRESSED IN BRAIN, SIGNAL =  15; SWISSPROT HIT: P07910, EVALUE 2.00e-32; NT HIT: gi14110427, EVALUE 0.00e+00; EST_HUMAN HIT: BG107688.1, EVALUE 0.00e+00
ctcctcttttgacttggactatgactttcaacgggattatgataggatgtacagttacccagcacgtgtacctcctcctcctcctattgctcgggctgtagtgcccttgaaacatcagcgtgtatcaggaaacacctcacaaaggggcaaaagtggcttcaattctaagagtggacagcggggatcttccaagtctggaaagttgaaaggagatgaccttcaggccattaagcaggagttgacccagataaaacaaaaagtggattctctcctggaagacccggaaaaaatggaaaagaaacagagcaaacaagcagtagagatgaagaatggtaagtcagaagagaagcagagcagcagctcacgtgagactcatgtgaagatagagtctgaaggtggtgcagatgactctgctgaggagagggacctactggatgatgaggataatgaagattgggggatgaccagctggagttgat

SEQ ID NO: 24229 - DNA, 142 bp, Homo sapiens
  MAP TO CHR19.3; EXPRESSED IN PLACENTA, SIGNAL = 1.3; EXPRESSED IN HEART, SIGNAL = 3.7; EXPRESSED IN HELA, SIGNAL = 9.5; EXPRESSED IN LUNG, SIGNAL = 8.5; EXPRESSED IN FETAL LIVER, SIGNAL = 3.8; EXPRESSED IN BRAIN, SIGNAL = 1.4; EST_HUMAN HIT: BG939028.1, EVALUE 3.00e-74; SWISSPROT HIT: P54852, EVALUE 2.00e-12; NT HIT: gi14760325, EVALUE 2.00e-74
gctggctgaaggcggtgcaggtcctcatggtgctctccctcattctctgctgtctctccttcatcctgttcatgttccagctctacaccatgcgacgaggaggtctcttctatgccaccggcctctgccagctttgcaccag

SEQ ID NO: 24230 - DNA, 296 bp, Homo sapiens
  MAP TO CHR14.3; EXPRESSED IN FETAL LIVER, SIGNAL = 0.79; EXPRESSED IN BONE MARROW, SIGNAL = 1.2; EXPRESSED IN BRAIN, SIGNAL = 1.4; NT HIT: gi14749040, EVALUE 2.00e-91; EST_HUMAN HIT: BF979346.1, EVALUE 7.00e-83; SWISSPROT HIT: Q10134, EVALUE 3.10e-01
ctctccggctgccatccatgcttagtcctcttgcagccgccgcagggacacgctgtatccccttcggtccttcccgcggccgggcccagccccggcagtggaggactggaaaagaggagccgacgggggctgcagcagcagggaaaccgttgccaggccgttgctaagggctgggtccagtgagtcgctattgtgacgtcacggcgcaggggacgtgcgttccgcagccccgcctgcgggatacccggtactaggaggacagttgcggacggagagacctggcggggaaggggcat

SEQ ID NO: 24231 - DNA, 304 bp, Homo sapiens
  MAP TO CHR18.3; EXPRESSED IN FETAL LIVER, SIGNAL = 1.4; EXPRESSED IN BRAIN, SIGNAL = 0.99; EST_HUMAN HIT: H42146.1, EVALUE 7.00e-03; SWISSPROT HIT: P54212, EVALUE 5.40e-01; NT HIT: AF009662.1, EVALUE 2.80e-01
aatgagagacttttggtgcactcaacagctgatggcaagtgtgatgagaatgcacctttatatcatggacagtttccagtagaccctgaagaggcatctgtggttgacctcggctgggctgatgcagtgcgaatcccatcccattttcctatctggcttcctctgccgtgggtctggctgggattgccttctctgcaaggcctatgtgtggtgccaggtcccggtgaaccaggctatgtagcagaatcctgcacacacgtactgcaccaagctctcctgtgtattggcgtcctgtcctcctatg

SEQ ID NO: 24232 - DNA, 250 bp, Homo sapiens
  MAP TO CHR16.3; EXPRESSED IN PLACENTA, SIGNAL = 1.7; EXPRESSED IN HELA, SIGNAL = 1.4; EXPRESSED IN FETAL LIVER, SIGNAL = 1.4; EXPRESSED IN LUNG, SIGNAL = 1.8; EXPRESSED IN BONE MARROW, SIGNAL = 2.1; EXPRESSED IN BRAIN, SIGNAL = 1.9; NT HIT: X15332.1, EVALUE 9.00e-01; EST_HUMAN HIT: BI838600.1, EVALUE 8.50e-02; SWISSPROT HIT: Q62799, EVALUE 3.70e-01
tcagctggactggggaaggattttccgagcacccagggacctggccctgcagttgcagtatggagtcccagcctcttgcttccagcaggtcttctggctggagaacctggacccagccagccagtatttgataaggagaccacagtcctgccttagttgcagggaagggataagggagtgtgtgtggggttgctcagcaggcttcctggaggaggaggccctcctggagttcgctggcctgaacttgctc

SEQ ID NO: 24233 - DNA, 115 bp, Homo sapiens
  MAP TO CHR16.3; EXPRESSED IN PLACENTA, SIGNAL = 2.9; EXPRESSED IN LUNG, SIGNAL = 3.7; EXPRESSED IN BRAIN, SIGNAL = 2.5; SWISSPROT HIT: P09373, EVALUE 7.90e+00; EST_HUMAN HIT: AI420647.1, EVALUE 7.00e-56
gacacaaaagaccaacgcaggtggcttggtcaacaatcagttccatgagcaggaaactcttccctcgcatgaaaacgtgggagaaaatattgtggggaagaaaaaagcccaataa

SEQ ID NO: 24234 - DNA, 239 bp, Homo sapiens
  MAP TO CHR19.3; EXPRESSED IN BONE MARROW, SIGNAL = 0.86; EXPRESSED IN BRAIN, SIGNAL = 1.8; EXPRESSED IN PLACENTA, SIGNAL = 0.87; EST_HUMAN HIT: BG761794.1, EVALUE 2.00e-48; SWISSPROT HIT: P53042, EVALUE 1.00e-14; NT HIT: U25174.1, EVALUE 2.00e-48
acagagaagattacagtatgtggggacacccatggccagttctatgacctcctcaacatattcgagctcaacggtttaccctcggagaccaacccctatgtatccttctcagcagagccaccctctccccacctccacccccagccgcagcctcaggtctgcacagagtgggaggagcccttgccaggaaaagacgtgaccttggaaaggagaggcctggccatgctggggcaccaagg

SEQ ID NO: 24235 - DNA, 483 bp, Homo sapiens
  MAP TO CHR18.3; EXPRESSED IN LUNG, SIGNAL = 8.2; EXPRESSED IN BRAIN, SIGNAL = 3.2; NT HIT: gi14765857, EVALUE 0.00e+00; SWISSPROT HIT: P19105, EVALUE 9.00e-28
ggcaccatacaggaagattacttgagagagctgctgacaaccatgggggatcggtttacagatgaggaagtggatgagctgtacagagaagcacctattgataaaaaggggaatttcaattacatcgagttcacacgcatcctgaaacatggagccaaagacaaagatgactgaaataacttcaaattccagccaaacgttccttgttgccactttgggtattctgagattttctcttgcatgcccttagctttacagcttttgcatttcctgttgtatttattctcagccattttgggcatatgtatctttataatcagactggaaacgggactttctattaatatcattttcagaataaaaaatagggtaatttaacctaccagcccttctcccccaataactgtggtctatacagagtcaatatattttttcagagaaagttattcgctcgattttttctgaatcataattaaactttat

SEQ ID NO: 24236 - DNA, 211 bp, Homo sapiens
  MAP TO CHR14.3; EXPRESSED IN PLACENTA, SIGNAL = 1.1; EXPRESSED IN HEART, SIGNAL = 1.9; EXPRESSED IN LUNG, SIGNAL = 2.1; EXPRESSED IN FETAL LIVER, SIGNAL = 1.2; EXPRESSED IN BRAIN, SIGNAL = 1.1; EST_HUMAN HIT: BF370848.1, EVALUE 1.00e-114; SWISSPROT HIT: Q10357, EVALUE 2.20e-01; NT HIT: M26533.1, EVALUE 1.90e-01
acgctggctcttgagttgaagaaactttatttagcgctaagtgacaagaagggtgatcttttgaaagccatgacttggcctggcgagaacaccaacttgctccttgaatgttttgacaaccttcaagtctgcctggagcacactcaggctgcagctgtctgtagaagcaagtccctgaaagctggcctcgattacaaccgcagttaccagg

SEQ ID NO: 24237 - DNA, 196 bp, Homo sapiens
  MAP TO CHR18.3; EXPRESSED IN PLACENTA, SIGNAL =   1; EXPRESSED IN HELA, SIGNAL = 0.9; EXPRESSED IN BONE MARROW, SIGNAL = 0.97; EXPRESSED IN BRAIN, SIGNAL = 1.3; EST_HUMAN HIT: AW135693.1, EVALUE 1.00e+00; SWISSPROT HIT: P49270, EVALUE 3.30e+00
ttccttggtttagtagctgctctgccgtggtcagcatcgttctctctgcagcaattagtggcaataagtgggagctcgcacaattgatggtgtaaaatgcctggacagtgtgcaagcagcagttctgaaatgcttcaccgagcagagctcttgtactcaatgcctccctcccatcagttttccaggtagcagagcc

SEQ ID NO: 24238 - DNA, 87 bp, Homo sapiens
  MAP TO CHR16.3; EXPRESSED IN PLACENTA, SIGNAL = 2.4; EXPRESSED IN HELA, SIGNAL = 2.6; EXPRESSED IN LUNG, SIGNAL = 3.5; EXPRESSED IN BONE MARROW, SIGNAL = 1.7; EXPRESSED IN BRAIN, SIGNAL = 2.6; EST_HUMAN HIT: AA593425.1, EVALUE 7.00e-15; NT HIT: AP003002.2, EVALUE 2.70e-01
ctgggacattgtagggcagctcgaggctctgactagggaggcccagcgcctggggctggcgcttggtccgagctctgcaggctttcc

SEQ ID NO: 24239 - DNA, 147 bp, Homo sapiens
  MAP TO CHR18.3; EXPRESSED IN BRAIN, SIGNAL = 1.1; EXPRESSED IN FETAL LIVER, SIGNAL = 0.95; SWISSPROT HIT: Q9Z2A5, EVALUE 2.60e+00; NT HIT: gi14758983, EVALUE 5.00e-01
tcagtttttccagatgacaagctgccagtctatagcacactgctcaaagtcacagacagactgcatttctttgcagaaccaaagaacatcatttactttatgcacacctttgtacatgatcagctcacagtagttgatgaaatagcc

SEQ ID NO: 24240 - DNA, 289 bp, Homo sapiens
  MAP TO CHR18.3; EXPRESSED IN HELA, SIGNAL = 1.2; EXPRESSED IN BONE MARROW, SIGNAL = 0.8; EXPRESSED IN FETAL LIVER, SIGNAL = 0.92; EXPRESSED IN BRAIN, SIGNAL = 1.1; EST_HUMAN HIT: AI797355.1, EVALUE 1.00e-122; SWISSPROT HIT: P25391, EVALUE 9.00e-39; NT HIT: gi6678655, EVALUE 2.00e-17
gtcttgttccatgtcaacaatggtgctggcaggataacagctgcatatgagcccaaaaccgccactgtgctctgtgatggaaaatggcacactcttcaagctaacaaaagcaaacaccgtatcactctgattgttgacgggaacgcagttggcgctgaaagtccacacacccagtctacctcagtggacaccaacaatcccatttatgttggtggctatcctggtatgtacgggtacctgctcttccactcaaaaggggcactgtccctggaggaagtcttggttcagg

SEQ ID NO: 24241 - DNA, 149 bp, Homo sapiens
  MAP TO CHR18.3; EXPRESSED IN PLACENTA, SIGNAL = 0.98; EXPRESSED IN FETAL LIVER, SIGNAL = 1.7; EXPRESSED IN BRAIN, SIGNAL = 1.3; EST_HUMAN HIT: BG208712.1, EVALUE 7.50e-01; SWISSPROT HIT: O07723, EVALUE 2.00e+00
gcagaaagatacagcgaggccagcttaaactccaccatccccaaacactggatcaggctcccattggcacaggttaattccagccatagcgtcctgcacaggtggctcaggagggagagccacaaagccgaatgtgacaagcgtttcat

SEQ ID NO: 24242 - DNA, 239 bp, Homo sapiens
  MAP TO CHR18.3; EXPRESSED IN HEART, SIGNAL = 4.2; EXPRESSED IN BRAIN, SIGNAL = 1.5; EST_HUMAN HIT: BF116064.1, EVALUE 1.00e-125; SWISSPROT HIT: P50772, EVALUE 6.70e-02; NT HIT: gi14760932, EVALUE 0.00e+00
tggcgctcaggcacgaggatggcgatgagaccacggagccaccccccagtgggtgccgggaccggaggagggccagcgtgtgttccagtggcggaggcgagcaccggggcctggaccgcagaaggagccgcaggcactcggtgcagagcatcaagagcaccctgtcggcccccaccagtccctgctcccagtcagctcccagcttcaagcccaaccaagtgcgagatctgcgtgaaaag

SEQ ID NO: 24243 - DNA, 88 bp, Homo sapiens
  MAP TO CHR14.3; EXPRESSED IN PLACENTA, SIGNAL = 0.82; EXPRESSED IN BONE MARROW, SIGNAL = 1.1; EXPRESSED IN BRAIN, SIGNAL = 1.1; NT HIT: gi9506948, EVALUE 2.70e-01
catacatacatactttccaaaatgtccgcaagtctttctgccttcctcacttccattctctaacatccagtcatcaacagcctcagac

SEQ ID NO: 24244 - DNA, 332 bp, Homo sapiens
  MAP TO CHR16.3; EXPRESSED IN HELA, SIGNAL = 2.1; EXPRESSED IN FETAL LIVER, SIGNAL = 1.8; EXPRESSED IN BONE MARROW, SIGNAL = 0.89; EXPRESSED IN BRAIN, SIGNAL = 1.2; EXPRESSED IN PLACENTA, SIGNAL =   1; SWISSPROT HIT: Q9UHM2, EVALUE 7.00e-40; NT HIT: gi7019320, EVALUE 0.00e+00; EST_HUMAN HIT: AW300405.1, EVALUE 0.00e+00
cctccatcttccaagaagagcgatggttctgggacatatactaagttgcagaatacccaggtgagggtcatgtctgagaagaagcagagaaaaaaggtggaatcagaaagcaagcaagaaaaggctaatcgtataatatcagaggccatagcaaaagcaaaggagcgtggggaacgcaatattccacgagtaatgagccctgaaaactttcctactgcttcagttgaaggaaaagaggaaaagaaaggtagaaggatgaaatccaagccaaaggacaaagacagcaaaaaaacaaaaacatgttctaagttaaaagagaagacaaaaattgg

SEQ ID NO: 24245 - DNA, 125 bp, Homo sapiens
  MAP TO CHR18.3; EXPRESSED IN BRAIN, SIGNAL = 1.3; SWISSPROT HIT: P36896, EVALUE 2.00e+00; EST_HUMAN HIT: BE966252.2, EVALUE 6.10e-01
gtgtgactctcaacagattcaactactttaatttaacctacatgaatattgcctccggggggatcctgttttggggacccatctatgttatgctggatattgtattggggcctttcggaggtttg

SEQ ID NO: 24246 - DNA, 406 bp, Homo sapiens
  MAP TO CHR14.3; EXPRESSED IN BONE MARROW, SIGNAL = 1.2; EXPRESSED IN BRAIN, SIGNAL = 0.99; NT HIT: M31476.1, EVALUE 3.80e-01; SWISSPROT HIT: P21521, EVALUE 8.00e-08; EST_HUMAN HIT: BF987904.1, EVALUE 1.00e-38
gaacaggacaggaccaatttgcaggtgccatccggggtctcagagcccatctcaaagtgtggtgacctagatgtcatctttgaatatagagccgccagccagaagctcacagtgaccattgtgagggcacagggcctcccagataaggaccgaagtggtgtcaactcctggcaagttcatgtagtgctgctgcctggtaagaaacacaggggcaggacgaacatacagagagggcccaaccccgtcttcagggagaaggtcacctttgccaagctggagcccagagatgtggctgcctgtgctgtccgcttccgcctgtacgctgcccggaagatgacccgagagagaatgatgggagagaaactattctatctcagccacctgcacccagaaggggaaatgaaag

SEQ ID NO: 24247 - DNA, 111 bp, Homo sapiens
  MAP TO CHR14.3; EXPRESSED IN BRAIN, SIGNAL = 1.3; EXPRESSED IN PLACENTA, SIGNAL = 1.6; EXPRESSED IN HELA, SIGNAL = 1.8; EXPRESSED IN LUNG, SIGNAL =   2; NT HIT: gi15300945, EVALUE 6.00e-06; EST_HUMAN HIT: BI546123.1, EVALUE 7.00e-56
tctgcagcagctcactggtcaggttcaagatttcctttggtgacacagttgctgtagcaccagtgccagatttctgagtttttactcgactcttcttacccatttttctga

SEQ ID NO: 24248 - DNA, 187 bp, Homo sapiens
  MAP TO CHR18.3; EXPRESSED IN PLACENTA, SIGNAL = 0.95; EXPRESSED IN BRAIN, SIGNAL = 1.4; EST_HUMAN HIT: BI464148.1, EVALUE 1.00e-101; SWISSPROT HIT: P35930, EVALUE 4.30e+00; NT HIT: gi14759604, EVALUE 1.00e-101
gacctgtcttttaatgaggcaacaacatgaagctgcggctttaaatgctgtccagaggttagaatggcagctcaaactccaggaacttgatcctgccacctataaatctatcagcatttacgaaatccaggagttttatgttccccttgttgatgttaacgacgactttgaattgactcctatatag

SEQ ID NO: 24249 - DNA, 433 bp, Homo sapiens
  MAP TO CHR14.3; EXPRESSED IN HELA, SIGNAL = 4.2; EXPRESSED IN HEART, SIGNAL = 3.3; EXPRESSED IN FETAL LIVER, SIGNAL = 2.9; EXPRESSED IN LUNG, SIGNAL = 2.8; EXPRESSED IN BONE MARROW, SIGNAL = 3.2; EXPRESSED IN BRAIN, SIGNAL = 5.2; EST_HUMAN HIT: AL157542.1, EVALUE 0.00e+00; SWISSPROT HIT: Q92843, EVALUE 2.00e-72; NT HIT: gi14751151, EVALUE 0.00e+00
gatggcgaccccagcctcggccccagacacacgggctctggtggcagactttgtaggttataagctgaggcagaagggttatgtctgtggagctggccccggggagggcccagcagctgacccgctgcaccaagccatgcgggcagctggagatgagttcgagacccgcttccggcgcaccttctctgatctggcggctcagctgcatgtgaccccaggctcagcccaacaacgcttcacccaggtctccgatgaactttttcaagggggccccaactggggccgccttgtagccttctttgtctttggggctgcactgtgtgctgagagtgtcaacaaggagatggaaccactggtgggacaagtgcaggagtggatggtggcctacctggagacgcagctggctgactggatccacagcagtgggggctgg

SEQ ID NO: 24250 - DNA, 393 bp, Homo sapiens
  MAP TO CHR16.3; EXPRESSED IN FETAL LIVER, SIGNAL = 1.8; EXPRESSED IN BONE MARROW, SIGNAL = 2.3; EXPRESSED IN BRAIN, SIGNAL = 2.2; EXPRESSED IN HELA, SIGNAL = 2.4; EXPRESSED IN PLACENTA, SIGNAL = 1.5; EXPRESSED IN LUNG, SIGNAL =   2; SWISSPROT HIT: Q9UI17, EVALUE 1.00e-07; NT HIT: gi14778274, EVALUE 0.00e+00; EST_HUMAN HIT: AL539382.1, EVALUE 0.00e+00
gggcatggatttcattggtcgcgacgccctcctgcagcagaagcagaatggagtgtataaacgcctcaccatgttcatcctggacgaccatgattcagacctagacctttggccttggtggggagagcccatttaccggaatgggcagtatgttggcaagaccaccagcagtgcctacagctacagcctggagcgccacgtttgcctgggctttgtgcacaatttttctgaggacacgggggaagagcaagtggtgacagcagatttcatcaaccggggagagtatgagattgacatcgcgggataccgcttccaggccaaggccaagctctaccctgtcgcctccctcttcacccagaagcgccgaaaggatgacatggagctgagtgactt

SEQ ID NO: 24251 - DNA, 220 bp, Homo sapiens
  MAP TO CHR18.3; EXPRESSED IN BONE MARROW, SIGNAL = 0.86; EXPRESSED IN FETAL LIVER, SIGNAL = 1.2; EXPRESSED IN BRAIN, SIGNAL =   1; EXPRESSED IN HEART, SIGNAL = 1.7; EST_HUMAN HIT: BI260563.1, EVALUE 2.90e-01; SWISSPROT HIT: P22566, EVALUE 3.00e+00; NT HIT: Z72785.1, EVALUE 3.10e+00
cattctctgtgatagctgtactggggtgatgacatttcatcttgaatgtctagaggcttgttagcagagaccgtgtcaccaccagggatcacagcatttttgtgctcagtccttagggcactgatcttggctgtacagctggactcagcagcagacgccacatggtctaacatgacaagcagctggatctccagccaacaggccgttattttcctaaaat

SEQ ID NO: 24252 - DNA, 236 bp, Homo sapiens
  MAP TO CHR18.3; EXPRESSED IN LUNG, SIGNAL = 2.4; EXPRESSED IN FETAL LIVER, SIGNAL = 2.6; EXPRESSED IN BONE MARROW, SIGNAL =   2; EXPRESSED IN BRAIN, SIGNAL =   2; EXPRESSED IN HEART, SIGNAL = 2.5; NT HIT: gi15304430, EVALUE 1.00e-130; SWISSPROT HIT: P52374, EVALUE 3.70e+00; EST_HUMAN HIT: BG109224.1, EVALUE 1.00e-130
tccttgggctcctgcactgtaggcactacagatcctccactgctgggctcctgctgttctttgctctcttctatctgttcttggttttcattttcacttttagacacttcatatcgttcttctatataacctccatctgtgtcggctgtgtagattccatagcacatgatactgatgacacccagtggcaggccaaagagaaagcagcccatcagtggtgagctcttgaatataga

SEQ ID NO: 24253 - DNA, 135 bp, Homo sapiens
  MAP TO CHR19.3; EXPRESSED IN BRAIN, SIGNAL =   1; EST_HUMAN HIT: BF691795.1, EVALUE 2.00e-69; NT HIT: X84707.1, EVALUE 3.00e-70; SWISSPROT HIT: Q16674, EVALUE 1.00e-20
gaccctatctccatggctgtggcccttcaggactacatggcccccgactgccgattcctgaccattcaccggggccaagtggtgtatgtcttctccaagctgaagggccgtgggcggctcttctggggaggcagc

SEQ ID NO: 24254 - DNA, 90 bp, Homo sapiens
  MAP TO CHR14.3; EXPRESSED IN BRAIN, SIGNAL = 0.99; EST_HUMAN HIT: BI828418.1, EVALUE 2.00e-43; NT HIT: gi14784700, EVALUE 1.00e-43; SWISSPROT HIT: P38022, EVALUE 2.10e+00
gatccccataccgagtgtgcctacgttccagccgtctacacctgtccctgagcgcctggaagctgtgcagcgctacatcagagagctgca

SEQ ID NO: 24255 - DNA, 156 bp, Homo sapiens
  MAP TO CHR18.3; EXPRESSED IN BONE MARROW, SIGNAL = 0.85; EXPRESSED IN BRAIN, SIGNAL =   1; EST_HUMAN HIT: AA420798.1, EVALUE 7.90e-01; NT HIT: AL603645.1, EVALUE 1.40e-01; SWISSPROT HIT: Q01515, EVALUE 3.40e+00
tcttgcacccagtgggcctgtgccttggcacaagcagggagtggagctagggctctgctgtcctcaaggacagtctcagcatctagggcagcccacctggtgagcatcttgccatcctgaaggtgattttgttgatacaggttcaaatttttcata

SEQ ID NO: 24256 - DNA, 227 bp, Homo sapiens
  MAP TO CHR14.3; EXPRESSED IN BONE MARROW, SIGNAL = 1.8; EXPRESSED IN BRAIN, SIGNAL = 1.4; EXPRESSED IN PLACENTA, SIGNAL = 1.1; SWISSPROT HIT: P32658, EVALUE 5.80e+00; EST_HUMAN HIT: BG289453.1, EVALUE 1.00e-125; NT HIT: AL583925.1, EVALUE 8.10e-01
atttggttcagtgaagacactgagtgattcgatgtccatgactgcatgccaaggttgacccaggcccagggatacctgctcaataaggttatgcactggatctacatcctggtcggccagttcaccttggtcaaaatcaatgctttcttcggtgacttcaagcactttcagatcagagccccgaagacgagcaatggcaatgaggttgtgtgcccacaccgtgtaac

SEQ ID NO: 24257 - DNA, 107 bp, Homo sapiens
  MAP TO CHR18.3; EXPRESSED IN FETAL LIVER, SIGNAL =   7; EXPRESSED IN BONE MARROW, SIGNAL = 7.8; EXPRESSED IN BRAIN, SIGNAL =   7; EXPRESSED IN PLACENTA, SIGNAL = 7.7; EXPRESSED IN HELA, SIGNAL = 5.5; EXPRESSED IN HEART, SIGNAL = 5.2; NT HIT: AF321468.1, EVALUE 1.40e+00
taaaggaccatggcagagtttacgtgatcttcggaggccagaggatcgaaattggagacttgaagaccctcaaacacatgaagagtgttactctaatatttagcaag

SEQ ID NO: 24258 - DNA, 178 bp, Homo sapiens
  MAP TO CHR16.3; EXPRESSED IN BONE MARROW, SIGNAL = 1.3; EXPRESSED IN BRAIN, SIGNAL = 1.1; SWISSPROT HIT: Q15646, EVALUE 3.30e+00; NT HIT: AB051507.1, EVALUE 1.60e-01; EST_HUMAN HIT: AL578948.1, EVALUE 3.60e+00
atgtataaacttcccaggggtacagttggagaagaaatgcctcttctgaaggtgtgaatttcccgggcatttctgtccttccctttcgacagtgaaccggggtttcctgaatgcaggtctgagctccgtttggatctgcacctcctctcccacctctccctgacaccagcttcacatc

SEQ ID NO: 24259 - DNA, 227 bp, Homo sapiens
  MAP TO CHR16.3; EXPRESSED IN BRAIN, SIGNAL = 2.7; EXPRESSED IN PLACENTA, SIGNAL = 1.5; EXPRESSED IN HELA, SIGNAL = 3.1; EXPRESSED IN FETAL LIVER, SIGNAL = 2.3; EXPRESSED IN BONE MARROW, SIGNAL = 2.5; SWISSPROT HIT: O00570, EVALUE 2.30e-01; NT HIT: gi14775217, EVALUE 1.00e-124; EST_HUMAN HIT: AL530225.1, EVALUE 1.00e-52
gctggtctcagagaaccagagcttggcaggccccctcatacacctcttggagaggtagatgctggtcaactatgcaccattacctgtgagcagagcttactcctctgccattctctctccaggccctcagcatcctcatgctccctcacaacatcccgtccagcctgagcctgctcaccagcatggtggatgacatgtggcattacgctggggaccagtccactgat

SEQ ID NO: 24260 - DNA, 219 bp, Homo sapiens
  MAP TO CHR16.3; EXPRESSED IN BRAIN, SIGNAL = 1.5; EXPRESSED IN PLACENTA, SIGNAL = 1.1; EST_HUMAN HIT: AI298205.1, EVALUE 1.00e-119; SWISSPROT HIT: P34233, EVALUE 1.00e+00; NT HIT: gi4505694, EVALUE 1.00e-119
gtatgacaatctcctgagccagtttggctgcatgcaggtgtcttcgtcctcctcctcacactccctgtcagcctccgacacgggcctgccccagaggtcaggcagcaacatagagcagtacattcacgatctggactcgaactcctttgaactggacttacagttttccgaagatgagaagaggttgttgttggagaagcaggctggcggaaacccttg

SEQ ID NO: 24261 - DNA, 123 bp, Homo sapiens
  MAP TO CHR16.3; EXPRESSED IN LUNG, SIGNAL = 6.1; EXPRESSED IN FETAL LIVER, SIGNAL = 5.8; EXPRESSED IN BONE MARROW, SIGNAL = 5.6; EXPRESSED IN BRAIN, SIGNAL = 5.3; EXPRESSED IN HELA, SIGNAL = 5.9; EXPRESSED IN PLACENTA, SIGNAL = 6.3; EST_HUMAN HIT: AI791256.1, EVALUE 1.50e-01; SWISSPROT HIT: Q01643, EVALUE 1.60e+00; NT HIT: gi14774425, EVALUE 4.10e-01
tcatcacccctcagaggcaagccaccaagcactccgggccacaaatcagaagtgccacagaagacagaccccagggaattgtaatgccacagcagggctgtgttggggagcagcagctctaat

SEQ ID NO: 24262 - DNA, 217 bp, Homo sapiens
  MAP TO CHR16.3; EXPRESSED IN FETAL LIVER, SIGNAL = 1.3; EXPRESSED IN BRAIN, SIGNAL =   1; SWISSPROT HIT: Q01148, EVALUE 1.70e+00; NT HIT: AF006055.1, EVALUE 7.70e-01
tactgaaacagacgccttgctttctgctgtgcataatgtcctttttccagcgagaaactgcagcccatcaggatctggttttcattaaaggcactttgggtcacttttttagcagattggtcaaaaggactgaaaggactgggcagggcgatgatgatttggaggtcaatagctttctctatgggccataccccttccccactgaaagattccccca

SEQ ID NO: 24263 - DNA, 223 bp, Homo sapiens
  MAP TO CHR16.3; EXPRESSED IN BONE MARROW, SIGNAL = 1.5; EXPRESSED IN FETAL LIVER, SIGNAL = 1.4; EXPRESSED IN BRAIN, SIGNAL = 1.1; NT HIT: AF226868.4, EVALUE 8.00e-01; EST_HUMAN HIT: BE968956.1, EVALUE 7.50e-02; SWISSPROT HIT: P37319, EVALUE 4.80e-01
cagctgttgttggagtgagaataggttcccactccttgtgttccgaggtggaagtctctgcaatggggcagcattcctattctctctgccttggagagctcttccctgcagttggccccatccatggagctggtgttgagggaggcgcgctttcccaatcctccgtaccacaggtcgtacagggacagacagaggaggctgtggttttgctgctctgctggac

SEQ ID NO: 24264 - DNA, 206 bp, Homo sapiens
  MAP TO CHR18.3; EXPRESSED IN BRAIN, SIGNAL = 1.1; EXPRESSED IN FETAL LIVER, SIGNAL = 1.1; SWISSPROT HIT: P53946, EVALUE 5.50e+00; EST_HUMAN HIT: AI904584.1, EVALUE 1.00e-112
gtgagcagaatggcaacaggaatcctggtggattgcagattggtgacctggtaaatatagatctcgacctcgaaattgtacagtctttgcagcatggtcatggaggatggactgatggaatgtttgagactttaactacaactggaactgtttgtggcattgatgaagatcatgacattgtagtacagtatccaagtggcaatagg

SEQ ID NO: 24265 - DNA, 164 bp, Homo sapiens
  MAP TO CHR19.3; EXPRESSED IN HELA, SIGNAL = 3.4; EXPRESSED IN LUNG, SIGNAL = 3.1; EXPRESSED IN BRAIN, SIGNAL = 2.3; EST_HUMAN HIT: BG832197.1, EVALUE 2.00e-87; SWISSPROT HIT: P77884, EVALUE 4.40e+00; NT HIT: gi14762597, EVALUE 2.00e-87
cttgggaggctccagcaggagctggtggaagcagctgagccgcgggcgtagggcgtgcaaggcgcccacactggacacagtgctttccagggccccctgggccaggagctccagctgcccatccacactgctgaagaagctgttcacggtcacggactcggacc

SEQ ID NO: 24266 - DNA, 444 bp, Homo sapiens
  MAP TO CHR18.3; EXPRESSED IN HELA, SIGNAL =   1; EXPRESSED IN BONE MARROW, SIGNAL = 0.96; EXPRESSED IN BRAIN, SIGNAL = 1.5; EXPRESSED IN PLACENTA, SIGNAL = 0.92; NT HIT: gi13646818, EVALUE 0.00e+00; SWISSPROT HIT: P48743, EVALUE 1.00e+00; EST_HUMAN HIT: BG995842.1, EVALUE 1.00e-122
attgaacggtttttcaggaagatatatcaatttctatttcctttccatgaagataatgaaaaagatctccccatcagtgaaaagctcattgaggaagatgcacaattgacccaaatggaggatgtgttcagccagttgactgtggatgtgaattctctctttaacaggagttttaacgtcttcagacagatgcagcaagagtttgaccagacttttcaatcacatttcatatcagatacagacctaactgagccttacttttttccagctttctctaaagagccgatgacaaaagcagatcttgagcaatgttgggacattcccaacttcttccagctgttttgtaatttcagtgtctctatttatgaaagtgtcagtgaaacaattactaagatgctgaaggcaatagaagatttaccaaaacaagacaaaggcaagtattaa

SEQ ID NO: 24267 - DNA, 401 bp, Homo sapiens
  MAP TO CHR18.3; EXPRESSED IN FETAL LIVER, SIGNAL = 3.7; EXPRESSED IN BRAIN, SIGNAL = 2.4; EXPRESSED IN HEART, SIGNAL =   2; EXPRESSED IN PLACENTA, SIGNAL = 1.5; SWISSPROT HIT: Q01484, EVALUE 2.00e-05; NT HIT: gi4826881, EVALUE 0.00e+00; EST_HUMAN HIT: BE467609.1, EVALUE 0.00e+00
tgttataaaaatgtttattgtttaccaaaaccagtggacctcttatcaaatgctgcttggtaacaaaatctatcacagttttaataaaaagaaaaaaaaaagaagctaactatttgtctcattgtcattagttagactttctgcaaggtcacttaatccagacttattcagtgcattaatcagattctcaggtgttgcatgaactccctcttgatcttgccaggcaaccaggagctgcttagctctcatcttcatgtcttcactgtcacactcaatctgcctaatttctgagtctttcatttccaagtagggagccagaatcttccattgttcacccagcttgttggcaaatacctctatttgttctcctgttacaggtttgtctcgccgaacatcaggac

SEQ ID NO: 24268 - DNA, 208 bp, Homo sapiens
  MAP TO CHR19.3; EXPRESSED IN HELA, SIGNAL =   2; EXPRESSED IN LUNG, SIGNAL = 1.9; EXPRESSED IN BONE MARROW, SIGNAL = 1.5; EXPRESSED IN FETAL LIVER, SIGNAL = 2.2; EXPRESSED IN BRAIN, SIGNAL = 1.5; EXPRESSED IN PLACENTA, SIGNAL = 2.4; SWISSPROT HIT: P10587, EVALUE 3.00e-08; EST_HUMAN HIT: AW081820.1, EVALUE 1.00e-111; NT HIT: gi14774851, EVALUE 3.00e-06
ctggaagaggagcgcgcccgcctggcagagcaattgcgagcagaggcagaactgtgtgcagaggccgaggagacgcgggggaggctggcagcccgcaagcaggagctggagctggtggtgtcagagctggaggctcgcgtgggcgaggaggaggagtgcagccgtcaaatgcaaaccgagaagaagaggctgcagcagcacatacagg

SEQ ID NO: 24269 - DNA, 102 bp, Homo sapiens
  MAP TO CHR16.3; EXPRESSED IN BRAIN, SIGNAL = 1.5; EST_HUMAN HIT: AA962512.1, EVALUE 4.80e-01
tcattcaaaccagcaggaagagaaatgctgaatctgcacaatcagaaccttctgctgacttagcaccatgtctacagagatgctgctcttgtccttcgtcct

SEQ ID NO: 24270 - DNA, 159 bp, Homo sapiens
  MAP TO CHR18.3; EXPRESSED IN BONE MARROW, SIGNAL = 1.2; EXPRESSED IN LUNG, SIGNAL =   1; EXPRESSED IN BRAIN, SIGNAL = 1.1; EXPRESSED IN PLACENTA, SIGNAL = 1.2; SWISSPROT HIT: P48324, EVALUE 8.70e-01; EST_HUMAN HIT: AV726630.1, EVALUE 5.00e-05
gttgaccccttcatgtcggacttagctctgatgtgttcctcaacgcactggctcttcataatcatggcatcatttcaaaattttctaggatgtctaaaagtgcttttattcatattagcccaaatgagaaaggaagttggagagattttattctggtat

SEQ ID NO: 24271 - DNA, 281 bp, Homo sapiens
  MAP TO CHR18.3; EXPRESSED IN BRAIN, SIGNAL = 1.3; EST_HUMAN HIT: AW966930.1, EVALUE 5.90e+00; SWISSPROT HIT: P21725, EVALUE 4.70e-01; NT HIT: U96166.2, EVALUE 2.60e-01
cgatgatttgcttcttcatatttttcatgctcttccatcactgtggccctgaattctatcgtggcctcaatttgcatcttacagtgcctggaaatctccttcccttcaaccttctcagcatctgtatctgcaagcacagctccatcgttatacatgcaaacccactccccaggctgcaggcttccaccgagaacgcacaaaatcactgtgatgtctgacaacaggacagaattgccgagggcactggctactcctgtctcggtgtttttttttaatctgcc

SEQ ID NO: 24272 - DNA, 90 bp, Homo sapiens
  MAP TO CHR16.3; EXPRESSED IN FETAL LIVER, SIGNAL = 1.4; EXPRESSED IN BRAIN, SIGNAL = 1.9; NT HIT: AJ248288.1, EVALUE 1.10e+00; EST_HUMAN HIT: N44027.1, EVALUE 4.10e-01
tttcagcagcctgcgtccactgaaacggcttttggggagctcactggagtcctctccacatccagattccctagcctctttcccggtgtc

SEQ ID NO: 24273 - DNA, 110 bp, Homo sapiens
  MAP TO CHR16.3; EXPRESSED IN PLACENTA, SIGNAL = 1.9; EXPRESSED IN LUNG, SIGNAL = 2.7; EXPRESSED IN BRAIN, SIGNAL =   2; SWISSPROT HIT: Q9X480, EVALUE 3.50e+00; EST_HUMAN HIT: BE902996.1, EVALUE 1.30e-01; NT HIT: gi16162443, EVALUE 9.00e-02
acccacattctggaccacttggctgccatctttgctggtgcccttgctagtttccctgagttggctggggtcaaggttgaagccctgggcctggatgatcctcacttcca

SEQ ID NO: 24274 - DNA, 168 bp, Homo sapiens
  MAP TO CHR18.3; EXPRESSED IN FETAL LIVER, SIGNAL = 1.4; EXPRESSED IN BONE MARROW, SIGNAL = 2.6; EXPRESSED IN BRAIN, SIGNAL = 1.7; EXPRESSED IN PLACENTA, SIGNAL = 1.5; EST_HUMAN HIT: F37069.1, EVALUE 2.20e-01; SWISSPROT HIT: P35568, EVALUE 2.90e-01
tggatggtgcactgaatcttcaggctgcagagagaagcctaggctggcatagtgaactgcaggagcacagcaggctcgaagagctcggcctgcggctgaaccacaagtgctcctctttccagggcatgaaggcgcatatgggggtggctggagatgaggccaacagct

SEQ ID NO: 24275 - DNA, 122 bp, Homo sapiens
  MAP TO CHR16.3; EXPRESSED IN PLACENTA, SIGNAL = 2.1; EXPRESSED IN FETAL LIVER, SIGNAL = 2.2; EXPRESSED IN BRAIN, SIGNAL = 1.5; EST_HUMAN HIT: R14227.1, EVALUE 8.00e-62; NT HIT: gi13195643, EVALUE 5.00e-22
gtgtttggcttctttgctaccatcgtgtttgcaactgatttctacctgatctttaacgacgtggccaaattcctcaaacaaggggactctgcagatgagaccacagcccacaagacagaagg

SEQ ID NO: 24276 - DNA, 122 bp, Homo sapiens
  MAP TO CHR14.3; EXPRESSED IN FETAL LIVER, SIGNAL = 3.1; EXPRESSED IN BRAIN, SIGNAL = 1.2; EXPRESSED IN PLACENTA, SIGNAL = 2.1; EST_HUMAN HIT: AV707682.1, EVALUE 8.00e-62; NT HIT: gi4758301, EVALUE 5.00e-62; SWISSPROT HIT: Q14259, EVALUE 4.00e-18
caccaggcagctgaggtctgccagatcatcgatgaaatcaaacaactgactgatgtcatatgtgatagagggactgttgggattcattcttttcagatgttcttcatacattttacaaacac

SEQ ID NO: 24277 - DNA, 203 bp, Homo sapiens
  MAP TO CHR14.3; EXPRESSED IN BRAIN, SIGNAL = 2.7; EXPRESSED IN HELA, SIGNAL = 1.8; EXPRESSED IN PLACENTA, SIGNAL = 1.8; EXPRESSED IN LUNG, SIGNAL = 1.6; EXPRESSED IN BONE MARROW, SIGNAL = 3.1; NT HIT: AF374267.1, EVALUE 1.80e-01; SWISSPROT HIT: P55144, EVALUE 2.20e-01
cagggatgacagcactccctcagcagaagcagggagccacagggcacacagtctgcttgctcctccattctgcagtaatggcagcagtatccatctttggagtgtgcaaaagtgcccagcccccctgcttcctccctggtatagaggtggcagcaacggtggcagtgcaagggcaggacacaggcttctggggactgggagct

SEQ ID NO: 24278 - DNA, 125 bp, Homo sapiens
  MAP TO CHR19.3; EXPRESSED IN FETAL LIVER, SIGNAL = 1.7; EXPRESSED IN BRAIN, SIGNAL = 1.6; EXPRESSED IN HELA, SIGNAL = 1.4; EXPRESSED IN PLACENTA, SIGNAL = 1.6; NT HIT: AB000885.1, EVALUE 1.60e+00; SWISSPROT HIT: P53094, EVALUE 2.70e+00
ggacactgggagggtatcgcggctaccaggctgcctgtcgcatttatggagggccagtccaccaccaccttgtactcagctgacatctggaagcacatccaggaggacactgaaggctcagaaag

SEQ ID NO: 24279 - DNA, 178 bp, Homo sapiens
  MAP TO CHR16.3; EXPRESSED IN BRAIN, SIGNAL =   1; EXPRESSED IN FETAL LIVER, SIGNAL = 1.1; NT HIT: gi8923644, EVALUE 3.00e-95; SWISSPROT HIT: P11371, EVALUE 5.00e-01; EST_HUMAN HIT: BE926892.1, EVALUE 5.00e-95
aacattgggtgctttctgcttgaagttaccaccaaagatccttcccttgtggtagcaggagaagctttggatgccctctttgatgtttttgcagatggtaaagaagccgaaagagcctcgattcaaattaaattattatctgctctgaaagaattccagccggtctttaaaatgaagg

SEQ ID NO: 24280 - DNA, 429 bp, Homo sapiens
  MAP TO CHR18.3; EXPRESSED IN HEART, SIGNAL =  72; EXPRESSED IN HELA, SIGNAL = 1.5e+02; EXPRESSED IN FETAL LIVER, SIGNAL = 1.2e+02; EXPRESSED IN BRAIN, SIGNAL =  21; NT HIT: gi15304757, EVALUE 0.00e+00; SWISSPROT HIT: P97351, EVALUE 2.00e-74; EST_HUMAN HIT: BE328302.1, EVALUE 0.00e+00
tgtgttccatggtcaaaaaatggcagacaatgattgaagctcatgttgatgtcaagactaccgatggttacttgcttcgtcttttctgtgttggttttactaaaaaacgcagcaatcagatacggaagacctcttatgctcagcaacaacaggtccgccaaatccggaagaagatgatggaaatcatgactcgagaggtgcagacaaatgacgtgaaagaagtggtcaataaattgattccagacagcattggaaaagacatagaaaagacttgccaatctatttatcctctctatgatgtcttcgttagaaaagtaaaaatgttgaagaagcccaagtttgaactgggaaagctcatggagcttcatggtgaaggcagtagttctggaaaagctgctggggacgagacaggtgctaaagttgaatgag

SEQ ID NO: 24281 - DNA, 203 bp, Homo sapiens
  MAP TO CHR16.3; EXPRESSED IN PLACENTA, SIGNAL = 1.7; EXPRESSED IN HEART, SIGNAL = 2.4; EXPRESSED IN LUNG, SIGNAL = 4.2; EXPRESSED IN FETAL LIVER, SIGNAL = 3.5; EXPRESSED IN BRAIN, SIGNAL = 3.6; NT HIT: gi16164484, EVALUE 1.00e-110; SWISSPROT HIT: O76071, EVALUE 4.00e-36; EST_HUMAN HIT: BI856828.1, EVALUE 1.00e-110
ctcttagcttctgccagctatgatgacacagtgaagctgtaccgggaggaagaggatgactgggtatgctgtgccacccttgagggccatgaatccactgtgtggagcttggcctttgacccgagtggccagcgcctggcgtcttgtagtgatgaccgtactgtgcgtatctggcgtcagtatctaccaggcaatgaacaagg

SEQ ID NO: 24282 - DNA, 127 bp, Homo sapiens
  MAP TO CHR19.3; EXPRESSED IN FETAL LIVER, SIGNAL =   3; EXPRESSED IN BONE MARROW, SIGNAL = 2.4; EXPRESSED IN BRAIN, SIGNAL = 2.5; EXPRESSED IN HELA, SIGNAL = 1.6; EXPRESSED IN PLACENTA, SIGNAL = 1.6; NT HIT: gi16163579, EVALUE 5.00e-56; SWISSPROT HIT: O75346, EVALUE 5.00e-18; EST_HUMAN HIT: N80921.1, EVALUE 5.00e-63
aggacattacaattcagagatgtggccatagaattctctctggaggagtggcattgcctggacacagcacagcggaatttatatagggatgtgatgttagagaactacagaaacttggtcttccttg

SEQ ID NO: 24283 - DNA, 175 bp, Homo sapiens
  MAP TO CHR18.3; EXPRESSED IN PLACENTA, SIGNAL = 1.3; EXPRESSED IN HELA, SIGNAL = 0.99; EXPRESSED IN FETAL LIVER, SIGNAL = 0.99; EXPRESSED IN BONE MARROW, SIGNAL = 1.9; EXPRESSED IN BRAIN, SIGNAL = 1.8; NT HIT: AB047548.1, EVALUE 2.40e+00; SWISSPROT HIT: P73720, EVALUE 2.90e-01; EST_HUMAN HIT: AL520014.1, EVALUE 2.30e-01
actttccaccatgaccgccacaaacctggcacagcagcactcggcttcagcgaaggtgctctgaagtccaagtctgctccgcgcatccgggctgctctctgtcccagcctgcgctgcagcggcatcacccccacgctgcggggcaatcccaactttcccggcgattttcagagag

SEQ ID NO: 24284 - DNA, 114 bp, Homo sapiens
  MAP TO CHR14.3; EXPRESSED IN PLACENTA, SIGNAL =   3; EXPRESSED IN HELA, SIGNAL = 3.4; EXPRESSED IN LUNG, SIGNAL = 2.7; EXPRESSED IN BRAIN, SIGNAL = 3.8; NT HIT: AB026724.1, EVALUE 1.50e+00; SWISSPROT HIT: Q00900, EVALUE 2.70e+00
aagggatcactgcctctgccatgatcaggaagccagaaaagaaggaaggtgccaccacaattcttagctctaggtccatactgcctctgccgagatccatgtcagcatagtgtc

SEQ ID NO: 24285 - DNA, 107 bp, Homo sapiens
  MAP TO CHR16.3; EXPRESSED IN LUNG, SIGNAL = 2.4; EXPRESSED IN BRAIN, SIGNAL = 2.2; EXPRESSED IN HELA, SIGNAL = 3.4; EXPRESSED IN PLACENTA, SIGNAL =   2; EST_HUMAN HIT: AI075033.1, EVALUE 2.00e-53; NT HIT: gi16166422, EVALUE 1.00e-53
atgttgagacgttttcagaatttcttgttgaaatgaaaaacatcaagataaaggacgcctttcaggcattagctaaacttccacttcataactttcggcgagacatg

SEQ ID NO: 24286 - DNA, 91 bp, Homo sapiens
  MAP TO CHR19.3; EXPRESSED IN PLACENTA, SIGNAL = 1.2; EXPRESSED IN BRAIN, SIGNAL =   1; NT HIT: gi11424919, EVALUE 3.00e-44; EST_HUMAN HIT: BI756020.1, EVALUE 4.00e-44; SWISSPROT HIT: P97459, EVALUE 2.00e-10
tccctggatggctttgtgttcgccttgaaccaggaaggaaaattcctctacatctcagagacagtctccatctatctgggtctctcacagg

SEQ ID NO: 24287 - DNA, 105 bp, Homo sapiens
  MAP TO CHR19.3; EXPRESSED IN PLACENTA, SIGNAL = 2.7; EXPRESSED IN FETAL LIVER, SIGNAL = 4.1; EXPRESSED IN BRAIN, SIGNAL = 2.3; NT HIT: gi7661741, EVALUE 6.00e-52; EST_HUMAN HIT: BG723156.1, EVALUE 2.00e-52; SWISSPROT HIT: Q05310, EVALUE 4.70e+00
gccggaccatggcgcaggggcagcgcaagtttcaggcgcacaaacccgcaaagagtaagacggcagcggcagcctctgaaaagaatcggggcccaagaaaaggcg

SEQ ID NO: 24288 - DNA, 79 bp, Homo sapiens
  MAP TO CHR19.3; EXPRESSED IN PLACENTA, SIGNAL = 1.7; EXPRESSED IN HELA, SIGNAL =   2; EXPRESSED IN FETAL LIVER, SIGNAL = 2.7; EXPRESSED IN BRAIN, SIGNAL =   2; NT HIT: AB018362.1, EVALUE 6.00e-02; EST_HUMAN HIT: AL562681.1, EVALUE 1.40e+00
ctgcagctgcctcaggtcccaggtcctggggaagaggcgggagcggcacttgcagtccttcagcagaagcgactcttcc

SEQ ID NO: 24289 - DNA, 178 bp, Homo sapiens
  MAP TO CHR14.3; EXPRESSED IN BRAIN, SIGNAL = 1.5; EXPRESSED IN PLACENTA, SIGNAL =   1; EXPRESSED IN HELA, SIGNAL = 1.3; NT HIT: gi14767852, EVALUE 5.00e-57; SWISSPROT HIT: P38994, EVALUE 5.70e+00; EST_HUMAN HIT: N99204.1, EVALUE 3.00e-53
tgcctgccctgcagggctgggacaaggggacttttctcagcaaaagcaccccaacacctgtcactgaaagtctaacgaggctaaaccatggagcagcaggcaccaaactagggctgtgcctaaaaggtgcacatctcccctctttagccataaacgcaagggagataaagagaatcaa

SEQ ID NO: 24290 - DNA, 126 bp, Homo sapiens
  MAP TO CHR18.3; EXPRESSED IN PLACENTA, SIGNAL = 1.3; EXPRESSED IN BRAIN, SIGNAL = 1.4; NT HIT: AF321110.1, EVALUE 1.10e-01; EST_HUMAN HIT: BF925443.1, EVALUE 1.60e-01
atcctgccagagccaacacttggaagcacacagctaatgagaggatttcttccaaggttcttaaccaaatgctctttgatagtggtggttgtgaggcggaggaagatgcttctgctgaagaggggg

SEQ ID NO: 24291 - DNA, 122 bp, Homo sapiens
  MAP TO CHR16.3; EXPRESSED IN BRAIN, SIGNAL = 2.7; EXPRESSED IN HELA, SIGNAL = 2.2; EXPRESSED IN PLACENTA, SIGNAL = 2.6; EXPRESSED IN HEART, SIGNAL = 2.7; EXPRESSED IN LUNG, SIGNAL =   2; EXPRESSED IN BONE MARROW, SIGNAL = 3.2; SWISSPROT HIT: P50222, EVALUE 3.50e+00; NT HIT: AJ303140.1, EVALUE 3.00e-60; EST_HUMAN HIT: BI907876.1, EVALUE 2.00e-62
cacaaacttagagacttttctctcctcgatgcgagctgaagcgatctcaaagagcagtttgacgtgcttccagcggcatttctggttctgccagtactgctgaagctcccgcgtggtcatgc

SEQ ID NO: 24292 - DNA, 111 bp, Homo sapiens
  MAP TO CHR19.3; EXPRESSED IN LUNG, SIGNAL = 1.1; EXPRESSED IN BRAIN, SIGNAL = 4.5; EXPRESSED IN HELA, SIGNAL = 1.1; EXPRESSED IN PLACENTA, SIGNAL = 1.1; NT HIT: gi14756303, EVALUE 5.00e-56; SWISSPROT HIT: Q61626, EVALUE 5.00e-16; EST_HUMAN HIT: AA977136.1, EVALUE 6.00e-53
ggccgcaagcctggctacttctccttcctggaccccttctcccctgctgtgtggctcttcatgcttcttgcctacctggctgtcagctgcgtcctgtttctggctgccagg

SEQ ID NO: 24293 - DNA, 197 bp, Homo sapiens
  MAP TO CHR14.3; EXPRESSED IN BRAIN, SIGNAL = 2.7; EXPRESSED IN PLACENTA, SIGNAL = 0.91; NT HIT: gi15300984, EVALUE 1.00e-106; SWISSPROT HIT: Q9JHU4, EVALUE 3.00e-30; EST_HUMAN HIT: BG760443.1, EVALUE 1.00e-106
ctgtgaagtcgatcaagaagcagcacctggtggaggtgaggtccatggccaaccctcctgctgctgtgaagctggcgctggagtccatctgcctgctgctgggggaaagcaccacagactggaagcagatccgctccatcatcatgcgggagaacttcatccccaccatcgtcaacttctctgcagaggagatcagg

SEQ ID NO: 24294 - DNA, 102 bp, Homo sapiens
  MAP TO CHR14.3; EXPRESSED IN FETAL LIVER, SIGNAL = 1.1; EXPRESSED IN BONE MARROW, SIGNAL = 0.69; EXPRESSED IN BRAIN, SIGNAL = 1.4; EXPRESSED IN PLACENTA, SIGNAL = 0.9; NT HIT: AY000663.1, EVALUE 8.20e-02; SWISSPROT HIT: O69172, EVALUE 4.70e+00
tgatagtccgctgacattagaggacatggatttacggtggtaccacttcacagtatccatggtagaatgatggtacttcaggagctttggtctctgtaagtc

SEQ ID NO: 24295 - DNA, 184 bp, Homo sapiens
  MAP TO CHR14.3; EXPRESSED IN FETAL LIVER, SIGNAL =   1; EXPRESSED IN BRAIN, SIGNAL = 1.1; EXPRESSED IN PLACENTA, SIGNAL =   1; EXPRESSED IN HELA, SIGNAL = 1.4; EST_HUMAN HIT: AW847737.1, EVALUE 3.00e-96; SWISSPROT HIT: P02549, EVALUE 1.70e-01
gagttttcaaaagaagttgatgaaaaatcctccttgaagactgccgttatcagtatcgggaaccagcttcttcacctgaaagaaactgatacagctacactgagagcttctttagcacagtttgaacaaaaatggacaatgctcataactcaacttccagatattcaagaaaaacttcaccagg

SEQ ID NO: 24296 - DNA, 127 bp, Homo sapiens
  MAP TO CHR18.3; EXPRESSED IN BONE MARROW, SIGNAL = 1.3; EXPRESSED IN FETAL LIVER, SIGNAL = 1.1; EXPRESSED IN BRAIN, SIGNAL = 1.1; EXPRESSED IN PLACENTA, SIGNAL = 0.98; NT HIT: M26434.1, EVALUE 1.70e+00; EST_HUMAN HIT: BI198231.1, EVALUE 1.60e-01
cctgaccagatatgcggtaacagcccgagagatgggagtccttgtttccaaactctcttttaacacctattacctggagatgctcatggccttagaaactgataagggaaatctgatcaagactggg

SEQ ID NO: 24297 - DNA, 136 bp, Homo sapiens
  MAP TO CHR19.3; EXPRESSED IN BONE MARROW, SIGNAL =  16; EXPRESSED IN BRAIN, SIGNAL = 1.1; EXPRESSED IN PLACENTA, SIGNAL = 1.5; SWISSPROT HIT: Q16617, EVALUE 7.00e-22; NT HIT: S69115.1, EVALUE 7.00e-71; EST_HUMAN HIT: BI024585.1, EVALUE 1.00e-70
gccatctccatggtggtggccatggcggtgtacaccagcgagcggtgggaccagcctccacacccccagatccagaccttcttctcctggtccttctacctgggctgggtctcagctatcctcttgctctgtacag

SEQ ID NO: 24298 - DNA, 104 bp, Homo sapiens
  MAP TO CHR19.3; EXPRESSED IN FETAL LIVER, SIGNAL = 2.1; EXPRESSED IN BONE MARROW, SIGNAL = 1.8; EXPRESSED IN BRAIN, SIGNAL = 1.4; SWISSPROT HIT: O13269, EVALUE 4.10e-01; EST_HUMAN HIT: AA641841.1, EVALUE 9.00e-52
ttgtgttgtcctggatgctggtctggttgccaaatatgtggaactggccccatatgcgtgtactgttgtccatttcatgagagtaggcttgaggacaccatggg

SEQ ID NO: 24299 - DNA, 119 bp, Homo sapiens
  MAP TO CHR18.3; EXPRESSED IN FETAL LIVER, SIGNAL = 0.92; EXPRESSED IN LUNG, SIGNAL = 1.2; EXPRESSED IN BRAIN, SIGNAL = 1.1; EXPRESSED IN HELA, SIGNAL =   1; SWISSPROT HIT: P29508, EVALUE 2.00e-05; EST_HUMAN HIT: AW381394.1, EVALUE 3.00e-58; NT HIT: D88575.1, EVALUE 8.00e-61
gactacattgagtgtgccgaaaaattatacgatgccaaagtggagcgagttgactttacgaatcatttagaagacactagacgtaatattaataagtgggttgaaaatgaaacacatgg

SEQ ID NO: 24300 - DNA, 164 bp, Homo sapiens
  MAP TO CHR14.3; EXPRESSED IN BONE MARROW, SIGNAL = 1.1; EXPRESSED IN BRAIN, SIGNAL = 1.3; EXPRESSED IN PLACENTA, SIGNAL = 0.87; EST_HUMAN HIT: T07099.1, EVALUE 8.40e-01; SWISSPROT HIT: P31806, EVALUE 5.80e+00
ctacttggatctgggcaggcagccacagaaacagaagaagctacagaggatgcaggcactgggttttggtgtctggacatggaagaattgcaggccaatatccacaaatgtatccgtgaggctctggtcttgaaacaaggatgtgaggaccccaggatggctgg

SEQ ID NO: 24301 - DNA, 162 bp, Homo sapiens
  MAP TO CHR19.3; EXPRESSED IN LUNG, SIGNAL = 2.1; EXPRESSED IN BRAIN, SIGNAL = 1.8; SWISSPROT HIT: P46889, EVALUE 1.10e+00; NT HIT: AF174415.1, EVALUE 8.70e+00
cttttcggtgccccaactctgggtcccagaagtagtgcccgttggggctctgggcatccttggcgaagtggactttgtaatgtttgtgcatggcagccgggcagctgggtgctgggggcctgctcctgaggcaggagggagcacacaggcttggcgtagcct

SEQ ID NO: 24302 - DNA, 326 bp, Homo sapiens
  MAP TO CHR14.3; EXPRESSED IN BRAIN, SIGNAL = 1.1; EXPRESSED IN BONE MARROW, SIGNAL =   1; SWISSPROT HIT: P75095, EVALUE 1.20e-01; NT HIT: AF315385.1, EVALUE 4.70e+00; EST_HUMAN HIT: AA573371.1, EVALUE 7.00e+00
agtgcaccaccatatgtcactctggcctgaagaagtttgccaagtttgtagacaaatacggagacacccacgagaagtgcttagataagatttggcccagagtcttgtctgggggcagagctgagaagaaagcgatgtctaaaacgcgcttcactaacaggaggactttggaaaggagggatggagagaaaggactgaggagagttaggagagaggacgtgagggaacagtcatgctctgatcaaggacactgtgttcagccatggataactccatgccgcaaagagataagtgggagagagtccaggaaagagcaggataaatga

SEQ ID NO: 24303 - DNA, 232 bp, Homo sapiens
  MAP TO CHR16.3; EXPRESSED IN FETAL LIVER, SIGNAL = 6.6; EXPRESSED IN BRAIN, SIGNAL = 1.3; EXPRESSED IN BONE MARROW, SIGNAL = 2.7; SWISSPROT HIT: Q14807, EVALUE 5.00e-37; EST_HUMAN HIT: BE382882.1, EVALUE 1.00e-125; NT HIT: gi6453817, EVALUE 1.00e-125
gtggaccagcgggaacgtttggccccatttcgccagcgagagggaaaactctacctgattgacttggctgggtcagaggacaaccggcgcacaggcaacaagagccttcggctaaaagagagtggagccatcaacacctccctgtttgtcctgggcaaagtggtagatgcgctgaatcagggcctccctcgtgtaccttatcgggacagcaagctcactcgcctattgcagg

SEQ ID NO: 24304 - DNA, 230 bp, Homo sapiens
  MAP TO CHR18.3; EXPRESSED IN BRAIN, SIGNAL = 1.3; EXPRESSED IN FETAL LIVER, SIGNAL = 1.2; NT HIT: gi6680330, EVALUE 8.20e-01; EST_HUMAN HIT: AA507995.1, EVALUE 3.10e-01; SWISSPROT HIT: P46937, EVALUE 3.50e+00
ggtcctgtgtgctgcatctgccccatgtcctgtggggatccccgttgactgaactgagctggctggtggaccccaagctgcttgcagatgtggttcaggaggctcagcttcctaaggcacagagtggaacatggatctcaaaggacacaggaaagacatccaacatcatattcgttaaaaagaacatttcattttgctttgtcaacatctatcactctttcctctcacag

SEQ ID NO: 24305 - DNA, 170 bp, Homo sapiens
  MAP TO CHR16.3; EXPRESSED IN HELA, SIGNAL = 5.5; EXPRESSED IN BONE MARROW, SIGNAL = 7.4; EXPRESSED IN LUNG, SIGNAL = 4.7; EXPRESSED IN BRAIN, SIGNAL = 5.1; EXPRESSED IN PLACENTA, SIGNAL = 7.2; EST_HUMAN HIT: BI546970.1, EVALUE 3.00e-25; NT HIT: U23409.1, EVALUE 2.30e+00
gctttcaaatgtgtgtcagcagcagcagcagcagccacgacgaggcccccgtcctgaacgacaagcacctggacgtgcccgacatcatcatcacgccccccacccccacgggcatgatgctgccgagggacttggggagcacaggtgaggccgtcccctccaccgccaag

SEQ ID NO: 24306 - DNA, 142 bp, Homo sapiens
  MAP TO CHR16.3; EXPRESSED IN PLACENTA, SIGNAL = 3.3; EXPRESSED IN HEART, SIGNAL = 2.6; EXPRESSED IN LUNG, SIGNAL = 4.6; EXPRESSED IN BONE MARROW, SIGNAL = 6.8; EXPRESSED IN BRAIN, SIGNAL = 2.7; SWISSPROT HIT: Q16775, EVALUE 7.00e-14; NT HIT: gi14779973, EVALUE 2.00e-74; EST_HUMAN HIT: BI603475.1, EVALUE 3.00e-74
ccttctggggctgcaccggatccacaatggcagcctccttggtctcatcatcaatgaccaggtacatgtagttgtcggtcagggcaggcagcacctctaccttcatggtgccctcgtccacggtcaggttcttccgcaaatc

SEQ ID NO: 24307 - DNA, 91 bp, Homo sapiens
  MAP TO CHR14.3; EXPRESSED IN BONE MARROW, SIGNAL = 1.8; EXPRESSED IN LUNG, SIGNAL = 1.2; EXPRESSED IN BRAIN, SIGNAL = 3.3; EXPRESSED IN HELA, SIGNAL = 1.6; EST_HUMAN HIT: BG703353.1, EVALUE 2.00e-43; SWISSPROT HIT: P35289, EVALUE 4.00e-11; NT HIT: AJ278658.1, EVALUE 1.10e+00
tacgcaccagaaggcgtccagaagatccttattgggaataaggctgatgaggagcagaaacggcaggtgggaagagagcaagggcagcagg

SEQ ID NO: 24308 - DNA, 252 bp, Homo sapiens
  MAP TO CHR19.3; EXPRESSED IN HELA, SIGNAL = 3.5; EXPRESSED IN PLACENTA, SIGNAL = 3.3; EXPRESSED IN HEART, SIGNAL = 3.4; EXPRESSED IN LUNG, SIGNAL = 2.6; EXPRESSED IN BRAIN, SIGNAL = 4.1; EST_HUMAN HIT: BF155315.1, EVALUE 3.40e-01; SWISSPROT HIT: P51164, EVALUE 1.90e+00
ctggcgtcggcctgggtccgtgccctccactccttcttgggagcccacacaccttgtataacaagtcctcagtgggtgaacggctgggccaacctgacaaaccagcgcgacctgggcgtgggccgggacacggagccagtcgctggctttcaccaccaccagataatgcgggccctggcagggcagggccacctctaccaaggcgggcctgctggatgagatcgggggccggtgtagatagggagtggacat

SEQ ID NO: 24309 - DNA, 132 bp, Homo sapiens
  MAP TO CHR19.3; EXPRESSED IN LUNG, SIGNAL = 2.4; EXPRESSED IN BRAIN, SIGNAL = 1.7; EXPRESSED IN HELA, SIGNAL = 3.7; EXPRESSED IN PLACENTA, SIGNAL = 1.8; SWISSPROT HIT: P38719, EVALUE 6.00e-06; NT HIT: gi14766930, EVALUE 2.00e-68; EST_HUMAN HIT: BI334520.1, EVALUE 2.00e-68
tacaagcggccacaaggatggcaggcttcgcggagctcgggctgtcatcgtggctcgtggaacaatgtcggcagctgggtttgaagcagcccacgcccgtgcagctcggctgcatccccgccatcctggagg

SEQ ID NO: 24310 - DNA, 239 bp, Homo sapiens
  MAP TO CHR16.3; EXPRESSED IN BRAIN, SIGNAL = 3.4; EXPRESSED IN PLACENTA, SIGNAL =   2; EXPRESSED IN HELA, SIGNAL =   5; EXPRESSED IN BONE MARROW, SIGNAL =   3; EXPRESSED IN FETAL LIVER, SIGNAL = 2.7; SWISSPROT HIT: Q9UMR2, EVALUE 7.00e-42; NT HIT: AF353720.1, EVALUE 0.00e+00; EST_HUMAN HIT: BG252214.1, EVALUE 0.00e+00
catggcagaagatcatggcttgagcaatggtgatggccccgtagaggttacacaaggcctggaacttctcgtctctgctgctgcacaggacatagtactgcttgatggtgtccagggtctcttcctcacgcttcagtttgataacgtttgggtctgggaccactttctgggcaaacttccacacagagtcttcaaaggtggcggagaaaagcagcatctggcagttcctgggcagcatc

SEQ ID NO: 24311 - DNA, 137 bp, Homo sapiens
  MAP TO CHR19.3; EXPRESSED IN BRAIN, SIGNAL = 2.5; SWISSPROT HIT: P05129, EVALUE 2.00e-11; NT HIT: gi16162962, EVALUE 8.00e-43; EST_HUMAN HIT: AL133962.1, EVALUE 4.00e-39
gtacaagttactgaaccaggaggagggcgagtattacaatgtgccggtggccgatgctgacaactgcagcctcctccagaagtttgaggtacccagaccctggcttcctcaagggagcccagcccagcctcccacgg

SEQ ID NO: 24312 - DNA, 221 bp, Homo sapiens
  MAP TO CHR19.3; EXPRESSED IN LUNG, SIGNAL = 1.6; EXPRESSED IN BONE MARROW, SIGNAL =   1; EXPRESSED IN BRAIN, SIGNAL = 4.6; EXPRESSED IN HEART, SIGNAL =  25; NT HIT: gi14767618, EVALUE 1.00e-30; EST_HUMAN HIT: BG616121.1, EVALUE 1.00e-28; SWISSPROT HIT: P35789, EVALUE 7.00e-21
accttactcaaaataagatagtttatactgaagacaaactctataaatgtgaagaatgtgacaatgcttttaatcaattctcagactttactagacgtaagaaaattcgtactggagaaaaaccctacaaatgtgaagaaagtgggaacacttttagccagtcctcaactcttactaaacaagataattcaatgggagagaaaccctacaaatgtgaataa

SEQ ID NO: 24313 - DNA, 184 bp, Homo sapiens
  MAP TO CHR16.3; EXPRESSED IN PLACENTA, SIGNAL =   1; EXPRESSED IN HELA, SIGNAL = 1.9; EXPRESSED IN BONE MARROW, SIGNAL = 1.9; EXPRESSED IN BRAIN, SIGNAL = 1.3; SWISSPROT HIT: P48322, EVALUE 1.10e-02; NT HIT: gi14779157, EVALUE 2.00e-99; EST_HUMAN HIT: AW408066.1, EVALUE 3.00e-99
ttctttcaggtttccgctcaaaagctgcttgtgtctaaaaacaaaggtgtagaacacagcttggcaggctgagtaaaatggtccatggagagcaacatcgcagaatgcctttgttcccgaatcctggttattaaggtatatgtgcagccagttaaccaaaagatctaggcatgattttacagta

SEQ ID NO: 24314 - DNA, 115 bp, Homo sapiens
  MAP TO CHR14.3; EXPRESSED IN PLACENTA, SIGNAL = 1.1; EXPRESSED IN HELA, SIGNAL = 0.88; EXPRESSED IN FETAL LIVER, SIGNAL = 0.92; EXPRESSED IN BRAIN, SIGNAL =   1; NT HIT: AE008683.1, EVALUE 5.90e+00; EST_HUMAN HIT: BG679965.1, EVALUE 3.50e-02
ttctctggctgtcttcagcttggttgtttatattcttcctctccctgcttcctattccctttttatccacttgttcctggacgcaggatttctgtaggtgcttctcaggattatc

SEQ ID NO: 24315 - DNA, 402 bp, Homo sapiens
  MAP TO CHR19.3; EXPRESSED IN BRAIN, SIGNAL = 1.2; EXPRESSED IN HELA, SIGNAL = 4.1; EXPRESSED IN HEART, SIGNAL = 3.3; EXPRESSED IN BONE MARROW, SIGNAL = 1.4; SWISSPROT HIT: O15382, EVALUE 5.00e-01; NT HIT: AF268047.1, EVALUE 0.00e+00; EST_HUMAN HIT: AA514608.1, EVALUE 0.00e+00
gtgtgttctttggcattttatttcaaaattgcagcaaagacagagaaaaaaaaatcaacggcagcaccaggggtctggcctgagaacggagagatccggaatcggggccaaggtgtatccttgaccgcacgacaaggagtaatgggcggacctgaacccgcgacgaggggctgggggccaagatgcctgggtcggcccttacggctttgggagtgtcgcaaccacatgggggcgccagagacccagacgccgcccgctggccttttatttcgtattgcacttcaggtgagtcattggtagggaggcgagtgctggcgtgacgagatgctacgggtcggtggatctggagcacagcctgcagcttcacaccgggaacatccactcgtgggctctgattccgta

SEQ ID NO: 24316 - DNA, 97 bp, Homo sapiens
  MAP TO CHR16.3; EXPRESSED IN FETAL LIVER, SIGNAL = 1.3; EXPRESSED IN BONE MARROW, SIGNAL = 0.99; EXPRESSED IN BRAIN, SIGNAL = 1.1; EST_HUMAN HIT: AU140519.1, EVALUE 1.80e+00
cagggtcgcacacctgtgacccagaacacagcgagcctgggaaggtgggtagtgctgaaatctcactcagagagctacaatttacggaaccgctact

SEQ ID NO: 24317 - DNA, 119 bp, Homo sapiens
  MAP TO CHR19.3; EXPRESSED IN FETAL LIVER, SIGNAL = 1.2; EXPRESSED IN BONE MARROW, SIGNAL = 1.4; EXPRESSED IN BRAIN, SIGNAL = 1.6; EXPRESSED IN PLACENTA, SIGNAL = 1.1; EST_HUMAN HIT: AL043054.2, EVALUE 1.00e-60; SWISSPROT HIT: P10180, EVALUE 8.00e-02
cacccagcaggccctgcagtttgccaaggccatggatgaggagctggaggacctgaagactctggccaggagcctggaggaacagaatcgcagccttctggcccaagcccggcaggcgg

SEQ ID NO: 24318 - DNA, 192 bp, Homo sapiens
  MAP TO CHR19.3; EXPRESSED IN FETAL LIVER, SIGNAL = 1.4; EXPRESSED IN BONE MARROW, SIGNAL =   1; EXPRESSED IN BRAIN, SIGNAL = 1.7; NT HIT: gi14756113, EVALUE 1.00e-103; EST_HUMAN HIT: BF699616.1, EVALUE 1.00e-104; SWISSPROT HIT: Q15102, EVALUE 1.00e-09
gggacggtcctttgttgccgcgaggggtaggagtgggcgtggcggagccagctccgttcggaacactcccgggccgacccgactcgctcatcctgcaggagctgcggcgccaagatgagtggagaggagaacccagccagcaagcccacgccggtgcaggacgtacagggcgacgggcgctggatgtccctg

SEQ ID NO: 24319 - DNA, 174 bp, Homo sapiens
  MAP TO CHR18.3; EXPRESSED IN HEART, SIGNAL =  32; EXPRESSED IN FETAL LIVER, SIGNAL = 6.1; EXPRESSED IN BRAIN, SIGNAL = 5.5; SWISSPROT HIT: P18666, EVALUE 9.00e-28; NT HIT: gi14765845, EVALUE 2.00e-93; EST_HUMAN HIT: AU139229.1, EVALUE 3.00e-93
gcaccattcaggaagattacctaagagagctgctgacaaccatgggggatcggtttacagatgaggaagtggatgagctgtacagagaagcacctattgacaaaaaggggaatttcaattacatcgagttcacacgcatcctgaaacatggagccaaagacaaagatgactgaa

SEQ ID NO: 24320 - DNA, 75 bp, Homo sapiens
  MAP TO CHR18.3; EXPRESSED IN FETAL LIVER, SIGNAL = 1.2; EXPRESSED IN BRAIN, SIGNAL =   1; EXPRESSED IN HELA, SIGNAL = 0.89; EST_HUMAN HIT: BI910474.1, EVALUE 1.30e+00
cagaaaattcatcagaggaggctaagtataatatcgagcacaagtggcttgtgttgtagaagcagaaaaaaaaat

SEQ ID NO: 24321 - DNA, 91 bp, Homo sapiens
  MAP TO CHR18.3; EXPRESSED IN FETAL LIVER, SIGNAL = 0.79; EXPRESSED IN BRAIN, SIGNAL =   1; EST_HUMAN HIT: BG564222.1, EVALUE 1.60e+00
taagtgaaaatgattatctggctgagatcataatcattgctgatcggtacttggcctcctgcaaagttccgtgcaagcacagagacttttt

SEQ ID NO: 24322 - DNA, 227 bp, Homo sapiens
  MAP TO CHR14.3; EXPRESSED IN BRAIN, SIGNAL = 2.6; EXPRESSED IN PLACENTA, SIGNAL = 1.9; EXPRESSED IN HEART, SIGNAL = 1.8; EXPRESSED IN LUNG, SIGNAL = 7.5; EXPRESSED IN FETAL LIVER, SIGNAL = 2.9; NT HIT: gi14753597, EVALUE 1.00e-124; EST_HUMAN HIT: BG720187.1, EVALUE 1.00e-101; SWISSPROT HIT: O54747, EVALUE 8.80e-01
ggcggccaccgcttttaagccacgattggcgaaggccgccgtcatttcggagcgactcagcgcctgcccgccctctcgccgcgtcgccggtgcctgcgcctcccgctccacctcgcttcttctctcccggccgaggcccgggggaccagagcgagaagcggggaccatgttccgacgcaagttgacggctctcgactaccacaaccccgccggcttcaactgcaaag

SEQ ID NO: 24323 - DNA, 75 bp, Homo sapiens
  MAP TO CHR16.3; EXPRESSED IN BRAIN, SIGNAL = 1.2; EXPRESSED IN HELA, SIGNAL = 1.3; EXPRESSED IN LUNG, SIGNAL = 1.8; EST_HUMAN HIT: AA250795.1, EVALUE 3.20e-01
gcttctggggaagaggtggtcctggaagcttcccagaggaagcgcattcagggtgggatctccagaggcaagagg

SEQ ID NO: 24324 - DNA, 227 bp, Homo sapiens
  MAP TO CHR18.3; EXPRESSED IN BRAIN, SIGNAL = 1.7; EXPRESSED IN HELA, SIGNAL =  26; EXPRESSED IN HEART, SIGNAL = 6.7; EST_HUMAN HIT: BG684544.1, EVALUE 4.00e-96; SWISSPROT HIT: P46783, EVALUE 4.00e-34; NT HIT: gi14782914, EVALUE 3.00e-96
taccaatagaaatgtctccaggcaaactgttccttcacgtagcctttggacttgagagactgcatggccttcatgacatgaaggttggacacattcttgtctgcgagctctgggtgcctaggcatgtggacatccttcttggtcaccatgactccctccttaaaaaggagttcataaatggcaatctggttcttcttaggcatcaacatctcggtggctgtagggtc

SEQ ID NO: 24325 - DNA, 327 bp, Homo sapiens
  MAP TO CHR14.3; EXPRESSED IN HELA, SIGNAL = 2.2; EXPRESSED IN FETAL LIVER, SIGNAL = 2.6; EXPRESSED IN BONE MARROW, SIGNAL =  86; EXPRESSED IN BRAIN, SIGNAL = 2.5; EXPRESSED IN PLACENTA, SIGNAL = 2.5; EST_HUMAN HIT: BE933942.1, EVALUE 0.00e+00; NT HIT: X70197.1, EVALUE 0.00e+00; SWISSPROT HIT: P01764, EVALUE 2.00e-39
gtgtccagtgtgaggtgcagctggtggagtccgggggaggcttggtccagcctggggggtccctgaaactctcctgtgcagcctctgggttcaccttcagtggctctgctatgcactgggtccgccaggcttccgggaaagggctggagtgggttggccgtattagaagcaaagctaacagttacgcgacagcatatgctgcgtcggtgaaaggcaggttcaccatctccagagatgattcaaagaacacggcgtatctgcaaatgaacagcctgaaaaccgaggacacggccgtgtattactgtactagacacacagtgaggggag

SEQ ID NO: 24326 - DNA, 205 bp, Homo sapiens
  MAP TO CHR19.3; EXPRESSED IN BRAIN, SIGNAL = 1.2; EXPRESSED IN LUNG, SIGNAL = 1.9; EST_HUMAN HIT: AW503735.1, EVALUE 1.00e-108; NT HIT: gi15307190, EVALUE 1.00e-111; SWISSPROT HIT: P41233, EVALUE 1.00e-05
cctcctcgaggctggtgtcggagatcccgtagccagtgagcctcagctccgccagccgcgtgtctagctctcggaagagtgtggcgaagctgccgtcatgggcacccgtgtagggcagcaccagcaccagctcgtgtggcagctcctccaccagccgtgccccgggcacccagtgctgtaccagggccagcagctgaggagtgcc

SEQ ID NO: 24327 - DNA, 272 bp, Homo sapiens
  MAP TO CHR16.3; EXPRESSED IN FETAL LIVER, SIGNAL =  66; EXPRESSED IN BRAIN, SIGNAL =  23; SWISSPROT HIT: Q9CZM2, EVALUE 3.00e-42; EST_HUMAN HIT: BF676788.1, EVALUE 1.00e-105; NT HIT: gi15431292, EVALUE 1.00e-103
cagttaataccatgatggacaggcttgccgtaagttgcacccttaggaactgagcattttcggccatcacggagaatacgaatcccgtagataacataaccttgcttgatcttgtagcccagttggtgcactttatcgggccgggtggggcggggagccctgtggagagcagagagctggcggtactgccagcagcggaccctcagaagaaagctcatgacatcagactgcttcttcctccacagctcgtggatgtacttgtatgcacccat

SEQ ID NO: 24328 - DNA, 218 bp, Homo sapiens
  MAP TO CHR16.3; EXPRESSED IN LUNG, SIGNAL =   6; EXPRESSED IN BRAIN, SIGNAL =  12; EXPRESSED IN PLACENTA, SIGNAL = 5.6; EST_HUMAN HIT: AI991113.1, EVALUE 1.00e-106; NT HIT: U35342.1, EVALUE 1.00e-107; SWISSPROT HIT: P31146, EVALUE 7.00e-12
gtaccagaaaataaagccattttattatgatttttttctctgccatgtggctgggaatgggaggtgagtggatgggtgtgaatggctgaccctgctggaggccctgcggggctctacttggcctggactgtctcctccagcctgtccaagcgcttctggagctcctgcaccgtggcctggagcttccgcatctcctcctccagccgagacacggcatc

SEQ ID NO: 24329 - DNA, 221 bp, Homo sapiens
  MAP TO CHR19.3; EXPRESSED IN FETAL LIVER, SIGNAL = 3.2; EXPRESSED IN LUNG, SIGNAL = 1.9; EXPRESSED IN BRAIN, SIGNAL = 3.4; EXPRESSED IN PLACENTA, SIGNAL = 1.4; EST_HUMAN HIT: BF434923.1, EVALUE 1.00e-121; NT HIT: gi14757743, EVALUE 1.00e-121; SWISSPROT HIT: P35566, EVALUE 4.80e-01
gggacccctcggaggagcattcgctgctggtgaattgattcgacctgactgccgttggaccgtaggccctggactgcagagacccccgcccccgaccccgcttatttatttgtagggtttgcttttaaggatcggctccctgtcgcgcccgaggagggcctggacctttcgtgtcggacccttgggggcggggagactgggtggggagggtgttgaataaa

SEQ ID NO: 24330 - DNA, 125 bp, Homo sapiens
  MAP TO CHR14.3; EXPRESSED IN PLACENTA, SIGNAL = 1.5; EXPRESSED IN HELA, SIGNAL = 2.1; EXPRESSED IN BONE MARROW, SIGNAL = 2.2; EXPRESSED IN BRAIN, SIGNAL = 2.7; EST_HUMAN HIT: H05063.1, EVALUE 3.00e-64; NT HIT: AY051510.1, EVALUE 4.10e-01
actgactgtactatccactgacactggtttggcagttggtactgctgaacatttttatacatgctaccatgaagctatatatgttagtattgaagaagctaacgggtatactatcatttttgatg

SEQ ID NO: 24331 - DNA, 156 bp, Homo sapiens
  MAP TO CHR18.3; EXPRESSED IN LUNG, SIGNAL = 1.2; EXPRESSED IN BONE MARROW, SIGNAL = 1.9; EXPRESSED IN BRAIN, SIGNAL = 1.5; EXPRESSED IN PLACENTA, SIGNAL = 1.5; SWISSPROT HIT: O95294, EVALUE 8.80e-01; NT HIT: U00683.1, EVALUE 2.10e+00; EST_HUMAN HIT: BE671866.1, EVALUE 3.10e+00
atcctggaaagtggatggtgccttttgtcctgcgggagtgtttcctagcacagccgcgaggtgagtattgggcactaatgcaggttttagaaatccagctacaagactgtggcccagctccatggcaaacatgtcgatggatgtgacatttgtttt

SEQ ID NO: 24332 - DNA, 127 bp, Homo sapiens
  MAP TO CHR19.3; EXPRESSED IN BRAIN, SIGNAL = 1.1; EST_HUMAN HIT: BF530154.1, EVALUE 3.00e-46; NT HIT: gi6005975, EVALUE 2.00e-46; SWISSPROT HIT: Q9Y2Q1, EVALUE 2.00e-17
ggaccattgacatttagagatgtgaccatagaattctctctggaggagtggcaatgcctggacacggttcagcagaatttatatagggatgtgatgttagagaactacagaaacctggtcttcctgg

SEQ ID NO: 24333 - DNA, 308 bp, Homo sapiens
  MAP TO CHR19.3; EXPRESSED IN PLACENTA, SIGNAL = 1.1; EXPRESSED IN FETAL LIVER, SIGNAL = 1.5; EXPRESSED IN BRAIN, SIGNAL = 1.1; NT HIT: gi16175480, EVALUE 0.00e+00; EST_HUMAN HIT: AW105491.1, EVALUE 0.00e+00; SWISSPROT HIT: P15498, EVALUE 7.00e-05
tccatcttcatccttttattaaatgtaacccccttgagccccgtctgcttgaggggacccaagaggaaatcggggtgttataaattaaccatgtcagggcacatcccgggagcaccgccagctggacgctggcctcctccagtccatcccaaagtctccacccgccgggagctgtcacagcccctggctccgctgcctgcccacgccgggctcagagcctggagtttctcgtctctctgccaaggcaccagggctcagcagtattcagaataatcttcctccacgtagttggcagggaaccagccaac

SEQ ID NO: 24334 - DNA, 164 bp, Homo sapiens
  MAP TO CHR19.3; EXPRESSED IN PLACENTA, SIGNAL = 1.1; EXPRESSED IN BONE MARROW, SIGNAL = 1.5; EXPRESSED IN BRAIN, SIGNAL = 1.4; NT HIT: AB002459.1, EVALUE 5.00e-35; EST_HUMAN HIT: BG697996.1, EVALUE 1.00e-39; SWISSPROT HIT: P98187, EVALUE 2.00e-05
cattcaatctctttaggctcccagaccttcagaaactcttgcctttcctgcccgcagcgctcctggcattctgggtgcattgcaaggttgtactggacccaggagagaccactggtcctggtgtcatagcctgaggggcagccaggcagtcttgggtctctggg

SEQ ID NO: 24335 - DNA, 165 bp, Homo sapiens
  MAP TO CHR18.3; EXPRESSED IN BRAIN, SIGNAL = 3.1; NT HIT: gi15304446, EVALUE 4.00e-88; EST_HUMAN HIT: BF057291.1, EVALUE 6.00e-88; SWISSPROT HIT: O42224, EVALUE 4.40e+00
gtcatgggtttggttcgtcaaagatgtctcgtgcacagacatttcccagctacgccccagaacagagtgaagaggcccagcagccgttgtcgcggtccagcagctatggattcagctacagctccagcctcatccaatgacacacagagagccgctgttgactag

SEQ ID NO: 24336 - DNA, 263 bp, Homo sapiens
  MAP TO CHR18.3; EXPRESSED IN PLACENTA, SIGNAL = 1.9; EXPRESSED IN HELA, SIGNAL = 1.6; EXPRESSED IN BRAIN, SIGNAL = 2.3; EST_HUMAN HIT: BF106714.1, EVALUE 3.50e-01; SWISSPROT HIT: P07203, EVALUE 1.20e+00; NT HIT: AJ006985.1, EVALUE 2.40e-01
taacggccacgcaatctagccttatccagtggtgctccccagaaggtcctcagctgagagagtggggtggtgttagtggcctcctcttgatggcccagctgattgcaggggatctctgggatgctgctgatggagtacctgggaagatggctccaggactctgaagggctgcgtgtttttgatcttgctccccgagccccagcctctttgaccacatcattgagctgcgcacgttcagggcagacgcctggaactggagaact

SEQ ID NO: 24337 - DNA, 144 bp, Homo sapiens
  MAP TO CHR14.3; EXPRESSED IN HELA, SIGNAL = 1.3; EXPRESSED IN LUNG, SIGNAL = 1.8; EXPRESSED IN BRAIN, SIGNAL = 1.1; EXPRESSED IN PLACENTA, SIGNAL = 1.7; NT HIT: AF230634.1, EVALUE 1.20e-01; SWISSPROT HIT: P36035, EVALUE 5.90e+00
gtacaatgtgaagatgcaagcctttttcacagtcaaacaaaagagcattgcaaacggtaacccggtcaacagtgagctggaggctggtaatgatttctatgacggtagctatgatgacccttccgtgccattgctggggcaagg

SEQ ID NO: 24338 - DNA, 139 bp, Homo sapiens
  MAP TO CHR18.3; EXPRESSED IN BRAIN, SIGNAL = 1.1; EXPRESSED IN PLACENTA, SIGNAL = 0.9; SWISSPROT HIT: P05433, EVALUE 1.20e+00; EST_HUMAN HIT: BF174311.1, EVALUE 2.70e+00
actcagaagccagcagccatcctggaggtgaaggtgtagctcttttgactgccctctcccaaaccaagaaccagtaccttggggccctgcagctctccctgctctgggctgctcttgattccctctgccacatcccagg

SEQ ID NO: 24339 - DNA, 187 bp, Homo sapiens
  MAP TO CHR18.3; EXPRESSED IN BONE MARROW, SIGNAL =   1; EXPRESSED IN BRAIN, SIGNAL = 1.1; EST_HUMAN HIT: BG677045.1, EVALUE 8.00e-26; SWISSPROT HIT: P48594, EVALUE 7.00e-11; NT HIT: gi16163746, EVALUE 8.00e-90
ctcatcaatctgatgtgcactgtcacttctagcacccaagcgtaccataccaagggcagctgagaggctcaggggagagaaaaatatgtttttatgacgatcatctttgcctatctcttgaaaaagatcaaagcaaaatttggtgtttgctgtaacaagagagtccattgtaaaacttataacgatc

SEQ ID NO: 24340 - DNA, 121 bp, Homo sapiens
  MAP TO CHR16.3; EXPRESSED IN HELA, SIGNAL = 2.4; EXPRESSED IN LUNG, SIGNAL = 2.7; EXPRESSED IN FETAL LIVER, SIGNAL = 2.9; EXPRESSED IN BONE MARROW, SIGNAL = 1.7; EXPRESSED IN BRAIN, SIGNAL = 1.5; EST_HUMAN HIT: BG104265.1, EVALUE 3.00e-61; SWISSPROT HIT: P25655, EVALUE 6.90e-01; NT HIT: gi14775074, EVALUE 2.00e-61
cttcatgggctgggctaaaaatcccgtgggctgacttaagtcatttgtaggtaagaagccaggaacattgcgtgcaaactcttcgtaaacagccaactgctttgggtccacaccaccaacc

SEQ ID NO: 24341 - DNA, 117 bp, Homo sapiens
  MAP TO CHR19.3; EXPRESSED IN BRAIN, SIGNAL = 1.8; EXPRESSED IN HELA, SIGNAL = 5.9; NT HIT: gi5729813, EVALUE 1.00e-59; EST_HUMAN HIT: BI522658.1, EVALUE 2.00e-59; SWISSPROT HIT: P50548, EVALUE 3.00e-17
gctattactataacaagcgcattctgcacaagaccaaggggaaacggttcacctacaagttcaatttcaacaaactggtgctggtcaattacccattcattgatgtggggttggctg

SEQ ID NO: 24342 - DNA, 134 bp, Homo sapiens
  MAP TO CHR16.3; EXPRESSED IN FETAL LIVER, SIGNAL = 1.2; EXPRESSED IN LUNG, SIGNAL =   2; EXPRESSED IN BONE MARROW, SIGNAL = 1.3; EXPRESSED IN BRAIN, SIGNAL = 1.1; EST_HUMAN HIT: BF841754.1, EVALUE 6.00e-60; SWISSPROT HIT: P50729, EVALUE 1.20e+00; NT HIT: AK024475.1, EVALUE 4.00e-60
attgaagtgtggctgcagcaggtgggctggccagcactggaggaggctggggagccctcgctggacatgctgctccaggcccaaggctcttttcaggagctgtaccaggttgcccaggtatatgtggtcacttg

SEQ ID NO: 24343 - DNA, 215 bp, Homo sapiens
  MAP TO CHR16.3; EXPRESSED IN FETAL LIVER, SIGNAL = 7.8; EXPRESSED IN BONE MARROW, SIGNAL = 3.2; EXPRESSED IN BRAIN, SIGNAL = 2.8; EXPRESSED IN HEART, SIGNAL = 3.2; EST_HUMAN HIT: BI856845.1, EVALUE 1.00e-117; SWISSPROT HIT: O60356, EVALUE 4.00e-06; NT HIT: AF069074.1, EVALUE 1.00e-118
acagccttataagctgagggagtggagaggcccggggccaggaaagcagagacagacaaagcgttaggagaagaagagaggcagggaagacaagccaggcacgatggccaccttcccaccagcaaccagcgccccccagcagcccccaggcccggaggacgaggactccagcctggatgaatctgacctctatagcctggcccattcctacctcg

SEQ ID NO: 24344 - DNA, 267 bp, Homo sapiens
  MAP TO CHR14.3; EXPRESSED IN BRAIN, SIGNAL = 0.99; EST_HUMAN HIT: AA332819.1, EVALUE 2.00e-95; SWISSPROT HIT: P55526, EVALUE 2.50e-01; NT HIT: gi14753486, EVALUE 0.00e+00
taccgtcgtttagttatatagagttcatcaagaagatgtcgttcttcatagctcatccatcgttcatcaggcaactcttcttccttttgcagcaactgttcatacagccgaactggattccagccagtcattatgtcataagtaattacacatcccaaggaatgtgatactattgagactttaccccctttttcttcaaagtctggattccgagaacagaaaagggaatacaatcgattcagctcttgctgaaggcctttaactagc

SEQ ID NO: 24345 - DNA, 75 bp, Homo sapiens
  MAP TO CHR19.3; EXPRESSED IN BONE MARROW, SIGNAL = 1.8; EXPRESSED IN BRAIN, SIGNAL = 1.2; NT HIT: gi16163043, EVALUE 9.00e-35; EST_HUMAN HIT: BE294757.1, EVALUE 1.00e-34
gagcagctgacagacgaagaaaagtgctggacaggaagggagaattctgacgccaacatgcagcgaagtatcatg

SEQ ID NO: 24346 - DNA, 142 bp, Homo sapiens
  MAP TO CHR18.3; EXPRESSED IN BRAIN, SIGNAL =   1; EXPRESSED IN PLACENTA, SIGNAL = 0.84; EXPRESSED IN BONE MARROW, SIGNAL =   1; EST_HUMAN HIT: BF887923.1, EVALUE 4.50e-02; SWISSPROT HIT: O43903, EVALUE 2.00e+00; NT HIT: AL391737.1, EVALUE 7.50e+00
caaatggcttctgagaattttagatccgtagtattgtctctggctttgaacgctgttgagggaggggaatgtttgcactcatcccgcatccttttttggctgctatctttgcggggattgttcaaggagaaatccatcctga

SEQ ID NO: 24347 - DNA, 90 bp, Homo sapiens
  MAP TO CHR19.3; EXPRESSED IN BONE MARROW, SIGNAL = 1.5; EXPRESSED IN BRAIN, SIGNAL = 1.3; EXPRESSED IN PLACENTA, SIGNAL = 0.99; EST_HUMAN HIT: AW015224.1, EVALUE 2.00e-43; SWISSPROT HIT: P47929, EVALUE 2.00e-11; NT HIT: gi16163130, EVALUE 1.00e-43
cctgctggcattgggaggaaccaagccgcgaattctcagcaccgtgccagggcggatgccctcgggcagtgaggacttgtgggggacgtt

SEQ ID NO: 24348 - DNA, 147 bp, Homo sapiens
  MAP TO CHR16.3; EXPRESSED IN HELA, SIGNAL = 3.5; EXPRESSED IN LUNG, SIGNAL =   3; EXPRESSED IN FETAL LIVER, SIGNAL = 2.3; EXPRESSED IN BRAIN, SIGNAL =   2; EXPRESSED IN PLACENTA, SIGNAL = 2.6; NT HIT: gi14775331, EVALUE 2.00e-77; EST_HUMAN HIT: BE827235.1, EVALUE 3.00e-77
cctgtttttgaaggactacttcccaaaaggtatcagttgtcacttcagtgattaaatgctgagacgggaactgggcagagccacttccaatgagatgccttttcaagggactatagagaacgctgaagttttgaataaaagactcta

SEQ ID NO: 24349 - DNA, 151 bp, Homo sapiens
  MAP TO CHR16.3; EXPRESSED IN PLACENTA, SIGNAL = 0.97; EXPRESSED IN HELA, SIGNAL =  24; EXPRESSED IN FETAL LIVER, SIGNAL = 1.8; EXPRESSED IN LUNG, SIGNAL =  21; EXPRESSED IN BRAIN, SIGNAL = 1.3; EST_HUMAN HIT: BE560594.1, EVALUE 1.00e-79; NT HIT: AB018542.1, EVALUE 9.00e-80; SWISSPROT HIT: Q01650, EVALUE 4.00e-16
gtgtgtgatgacgctgctctacgccttctccaaggacatcttctccgtcatcaacttcttcagcttcttcaactggctctgcgtggccctggccatcatcggcatgatctggctgcgccacagaaagcctgagcttgagcggcccatcaag

SEQ ID NO: 24350 - DNA, 180 bp, Homo sapiens
  MAP TO CHR16.3; EXPRESSED IN BONE MARROW, SIGNAL = 0.99; EXPRESSED IN BRAIN, SIGNAL = 1.1; SWISSPROT HIT: P98161, EVALUE 3.00e-06; NT HIT: gi16164462, EVALUE 5.00e-97
gtgactgtcaccctgtatggcctggatggagagagagagccccaccacctggctgatcccgacactccggtttttgagcgaggagcagtggatgccttcctcctctccaccctgttccccctgggagaactgcggagcctccggctgtggcatgacaactcaggggaccggccatcgtgg

SEQ ID NO: 24351 - DNA, 224 bp, Homo sapiens
  MAP TO CHR14.3; EXPRESSED IN BRAIN, SIGNAL = 1.3; EXPRESSED IN LUNG, SIGNAL = 1.3; NT HIT: AY049072.1, EVALUE 2.00e-01; SWISSPROT HIT: O00746, EVALUE 1.00e+00; EST_HUMAN HIT: BF924825.1, EVALUE 1.20e+00
agcttttccacattcattctctccaagcctgcctctctcggagccgggttttcacttaggccaacctcacccactcttggggaggacagctgcaaggtaaacgactctgcaaccggtaccgccgtcctcctcactccgaccgaggaggctgggcccgggctccttccacacctcggcttcgggaccgcatcccacacctctgcaggcctagctgcccccggcct

SEQ ID NO: 24352 - DNA, 216 bp, Homo sapiens
  MAP TO CHR18.3; EXPRESSED IN BRAIN, SIGNAL = 6.3; EXPRESSED IN HELA, SIGNAL = 8.3; EXPRESSED IN HEART, SIGNAL =  35; EXPRESSED IN FETAL LIVER, SIGNAL =  12; NT HIT: D28126.1, EVALUE 1.00e-118; EST_HUMAN HIT: AU160725.1, EVALUE 1.00e-118; SWISSPROT HIT: P25705, EVALUE 7.00e-08
atgcattatggaacctttatttttcatgtgatttctgtacataaggagtatgagagtaacccttttacaaatggaactaatttactagaacaatgacaaaactgaactggtatttgatgtgaatccacaggagtttaagcttcaaatccagccaagaaatttgttacaatctctttcagctttgcatctgattgttctgagatctttccatcagcc

SEQ ID NO: 24353 - DNA, 118 bp, Homo sapiens
  MAP TO CHR16.3; EXPRESSED IN BONE MARROW, SIGNAL = 1.1; EXPRESSED IN LUNG, SIGNAL = 1.3; EXPRESSED IN BRAIN, SIGNAL = 1.1; EXPRESSED IN HELA, SIGNAL = 1.7; SWISSPROT HIT: Q08024, EVALUE 6.00e-17; NT HIT: gi13124880, EVALUE 1.00e-59; EST_HUMAN HIT: BE840778.1, EVALUE 2.00e-59
ggcttttgtggccacaggaaccaatctgtctctccagttttttccggccagctggcagggagaacagcgacaaacacctagccgagagtatgtcgacttagaaagagaagcaggcaag

SEQ ID NO: 24354 - DNA, 99 bp, Homo sapiens
  MAP TO CHR19.3; EXPRESSED IN FETAL LIVER, SIGNAL = 1.9; EXPRESSED IN BRAIN, SIGNAL = 1.3; EXPRESSED IN PLACENTA, SIGNAL = 1.5; NT HIT: AF361486.1, EVALUE 6.00e-49; EST_HUMAN HIT: AI923224.1, EVALUE 8.00e-49
cattgcagatcctccaggtctaggtgtgactggtagtagcctgggcactgttgctggacgttgtattctccttccttcttccgccggcgggtggtcacc

SEQ ID NO: 24355 - DNA, 124 bp, Homo sapiens
  MAP TO CHR16.3; EXPRESSED IN BRAIN, SIGNAL = 1.6; NT HIT: gi13648926, EVALUE 1.00e-59; SWISSPROT HIT: P57737, EVALUE 4.00e-16; EST_HUMAN HIT: BG253963.1, EVALUE 2.00e-59
ggcctcgtcctcctgcctaagacggagtgcgacgtgcgggaagtggagctgatgcggtgcctgcggctgcgtcagtcctccctggagcctgtggccttccggctgccccgagtccgggtgaggg

SEQ ID NO: 24356 - DNA, 159 bp, Homo sapiens
  MAP TO CHR18.3; EXPRESSED IN FETAL LIVER, SIGNAL = 1.7; EXPRESSED IN BONE MARROW, SIGNAL = 1.6; EXPRESSED IN BRAIN, SIGNAL = 1.4; EXPRESSED IN PLACENTA, SIGNAL = 1.1; SWISSPROT HIT: P09208, EVALUE 9.90e+00; NT HIT: gi14765948, EVALUE 2.00e-84
cttggagctgctgcttgcactgggcgggctgcagggaggaggagagctgctgcaggttctcgctctccacctggtgcatgaggtagaagagcttccacagcatttgcacagacagagtcccaaagggcatctcggacataaacagccaaatgccaagtc

SEQ ID NO: 24357 - DNA, 95 bp, Homo sapiens
  MAP TO CHR18.3; EXPRESSED IN FETAL LIVER, SIGNAL = 1.1; EXPRESSED IN BRAIN, SIGNAL = 1.2; EXPRESSED IN PLACENTA, SIGNAL =   1; SWISSPROT HIT: P70496, EVALUE 4.70e+00; NT HIT: AE006899.1, EVALUE 4.60e+00
aagggatgggcagatgggtgttgaggggataagaaagcacattaatcttttaaggccttcctccatatcatcgagaaagatgagtccgcacagag

SEQ ID NO: 24358 - DNA, 80 bp, Homo sapiens
  MAP TO CHR16.3; EXPRESSED IN BRAIN, SIGNAL = 2.2; EXPRESSED IN HELA, SIGNAL = 1.6; SWISSPROT HIT: Q62179, EVALUE 6.20e+00; NT HIT: AB067517.1, EVALUE 1.00e-37; EST_HUMAN HIT: BE260864.1, EVALUE 1.00e-37
ggcctacttggaagtgcaccagcaggagcaagagaaactccaggggcagataagggagtccaagaggaattcccgcttgg

SEQ ID NO: 24359 - DNA, 115 bp, Homo sapiens
  MAP TO CHR18.3; EXPRESSED IN BRAIN, SIGNAL = 1.2; EXPRESSED IN PLACENTA, SIGNAL = 0.94; EXPRESSED IN BONE MARROW, SIGNAL = 1.4; NT HIT: U19394.1, EVALUE 9.50e-02; EST_HUMAN HIT: AA169175.1, EVALUE 2.20e+00
cttctatgaccacattttaagtcacatgactatagaagagaattatggagagaatattagtgatggagagaagaccagactcagagttatgcagagggatatagcacgtggatag

SEQ ID NO: 24360 - DNA, 220 bp, Homo sapiens
  MAP TO CHR14.3; EXPRESSED IN LUNG, SIGNAL = 1.2; EXPRESSED IN FETAL LIVER, SIGNAL = 2.2; EXPRESSED IN BRAIN, SIGNAL = 1.1; SWISSPROT HIT: P15365, EVALUE 5.20e+00; NT HIT: gi14753011, EVALUE 1.00e-121; EST_HUMAN HIT: AA490571.1, EVALUE 1.00e-120
gaactgctatgatcttctggtcagaaagaaaagacttattgttctcttcagccactggttacttcatgcctatggaataatctccatttccagagtggataaacttgagcaagatttgccccttttggctttggtacctacaccagcccttttttacttgttcactgcaaaatttaccgaaccttcaaggatactctcagaaggagccaatggacactga

SEQ ID NO: 24361 - DNA, 189 bp, Homo sapiens
  MAP TO CHR19.3; EXPRESSED IN FETAL LIVER, SIGNAL = 2.5; EXPRESSED IN BRAIN, SIGNAL = 1.7; SWISSPROT HIT: P20853, EVALUE 1.00e-31; NT HIT: gi16159455, EVALUE 1.00e-102; EST_HUMAN HIT: AW577399.1, EVALUE 5.00e-95
cttagggaggaaaaaatcccgaaacttggtgtcctttttaaccctgcgggccaaactcatggggatcacgtctccaaatctttggatctcgtggatcactgcctccatgtagggcatcttggtccggtcctcaaacttgggctgccggttcttgccgatcactctgtcaatctcctcatggaccttggc

SEQ ID NO: 24362 - DNA, 126 bp, Homo sapiens
  MAP TO CHR16.3; EXPRESSED IN BRAIN, SIGNAL = 1.9; EXPRESSED IN HEART, SIGNAL = 1.7; EXPRESSED IN BONE MARROW, SIGNAL = 1.7; EXPRESSED IN FETAL LIVER, SIGNAL = 1.4; NT HIT: AL161556.2, EVALUE 1.10e-01; EST_HUMAN HIT: BI518478.1, EVALUE 6.20e-01; SWISSPROT HIT: P43233, EVALUE 6.00e+00
tatgcctctggctcaagatcctcagcaaacccatcctgataactgtcctgacagtgctttagacagctttcaagcttcttacggtcatgtctacaaggcctctccaagatatttgcgtagtatttc

SEQ ID NO: 24363 - DNA, 126 bp, Homo sapiens
  MAP TO CHR18.3; EXPRESSED IN HELA, SIGNAL = 1.1; EXPRESSED IN BRAIN, SIGNAL = 1.3; SWISSPROT HIT: P40747, EVALUE 2.70e+00; EST_HUMAN HIT: AI393038.1, EVALUE 6.20e-01
ctttaaggcttttcgtttctcaaacagatgggggagtaagtcccagtgaatgttggtggtggctgctctttcccgtctccagctagcatcatgaaaaagcttttccaagagccttcctgatatttc

SEQ ID NO: 24364 - DNA, 182 bp, Homo sapiens
  MAP TO CHR18.3; EXPRESSED IN BRAIN, SIGNAL = 3.3; EXPRESSED IN HELA, SIGNAL = 4.9; EXPRESSED IN PLACENTA, SIGNAL = 2.2; EXPRESSED IN HEART, SIGNAL = 3.7; EXPRESSED IN LUNG, SIGNAL = 3.4; SWISSPROT HIT: P09132, EVALUE 5.00e-11; NT HIT: gi4507212, EVALUE 4.00e-39; EST_HUMAN HIT: BF845223.1, EVALUE 6.00e-39
atgtatgttcagaagttggacttaacgtatttcttgagaaaaattaaatgtactctagagaatggaatcgtgatgtccaatacagaggcagctcaaacaggtccagctcaaacaggaccagctcaaacggctccagctcaaacaggaagatggcggcctctgccttgtacagttcccatcat

SEQ ID NO: 24365 - DNA, 75 bp, Homo sapiens
  MAP TO CHR18.3; EXPRESSED IN LUNG, SIGNAL = 1.7; EXPRESSED IN BONE MARROW, SIGNAL = 1.5; EXPRESSED IN BRAIN, SIGNAL = 1.1; EXPRESSED IN PLACENTA, SIGNAL = 1.1; EXPRESSED IN HELA, SIGNAL = 0.94; NT HIT: AF025308.1, EVALUE 1.40e-02; EST_HUMAN HIT: BG623441.1, EVALUE 5.00e+00
ctgcacctgcttgaggcagtcaacagtggttccgaaaaccaaagagtgtgctgagggaaccagctctttcatcca

SEQ ID NO: 24366 - DNA, 190 bp, Homo sapiens
  MAP TO CHR16.3; EXPRESSED IN BONE MARROW, SIGNAL = 1.6; EXPRESSED IN FETAL LIVER, SIGNAL = 1.6; EXPRESSED IN BRAIN, SIGNAL = 1.1; EXPRESSED IN LUNG, SIGNAL = 1.8; SWISSPROT HIT: P08125, EVALUE 4.30e+00; EST_HUMAN HIT: BE297745.1, EVALUE 1.60e-02
aatgtgcctttggcccagcgatctggccttcccagtcttctgggtgctgctgggcactgctggaggaataggaagaggacttgggcaggcgccagccccatgcagtatgcgcgaatgtgactctaaggcacacagcatgtgcccccgacagcccagacgggtgtgggcagccccgggccacacgggccat

SEQ ID NO: 24367 - DNA, 138 bp, Homo sapiens
  MAP TO CHR14.3; EXPRESSED IN FETAL LIVER, SIGNAL = 7.9; EXPRESSED IN LUNG, SIGNAL = 3.3; EXPRESSED IN BRAIN, SIGNAL =   4; EXPRESSED IN HELA, SIGNAL = 5.2; EXPRESSED IN PLACENTA, SIGNAL =   3; EXPRESSED IN HEART, SIGNAL = 3.4; NT HIT: gi16166605, EVALUE 1.00e-32; EST_HUMAN HIT: AI917769.1, EVALUE 2.00e-32; SWISSPROT HIT: Q09749, EVALUE 7.90e-02
tagacatatggttccagtctcagcagattttccatgtcctcatggtgacggtggcctttgtccacttctgtggggtctccaaccttcaggaattccattacagccgagaaggtgactgcactgatgactcccttctct

SEQ ID NO: 24368 - DNA, 126 bp, Homo sapiens
  MAP TO CHR18.3; EXPRESSED IN HELA, SIGNAL =   1; EXPRESSED IN BRAIN, SIGNAL = 1.2; SWISSPROT HIT: P33349, EVALUE 6.00e+00; NT HIT: D63358.1, EVALUE 1.70e+00; EST_HUMAN HIT: AV712696.1, EVALUE 1.60e-01
tgagtaaacgggggagggcacacagtgtgaatgagggcagcgagagtcctaacctgagtgacttttataacatcaagatgacgttccaactgtgtaatgtgaagcacaaaggaagcagaagctctg

SEQ ID NO: 24369 - DNA, 174 bp, Homo sapiens
  MAP TO CHR14.3; EXPRESSED IN BRAIN, SIGNAL =   1; EXPRESSED IN LUNG, SIGNAL = 1.1; SWISSPROT HIT: Q99372, EVALUE 6.60e-01; EST_HUMAN HIT: BI255232.1, EVALUE 5.70e-02
ctcagcagactttcttccagcagcctcaaggcccgccacgactctgccagctccctgagctcctcctgcaccacggcagcaccctccggagaagacttctccatcaccagccagccctgcgcttccaccagggacagctgggcctccttctccgggaattctgccaccagcctc

SEQ ID NO: 24370 - DNA, 114 bp, Homo sapiens
  MAP TO CHR18.3; EXPRESSED IN BRAIN, SIGNAL = 1.7; EXPRESSED IN HELA, SIGNAL = 1.4; EXPRESSED IN BONE MARROW, SIGNAL = 1.8; NT HIT: gi14775040, EVALUE 1.50e+00; EST_HUMAN HIT: AW629864.1, EVALUE 5.50e-01
ctctgaattcctccagtcctcatctttcccttcccctgtcactgtcactataccagggcaggttatctttatatctatatcgatatcaatatcaatatctatatcttctatatc

SEQ ID NO: 24371 - DNA, 147 bp, Homo sapiens
  MAP TO CHR19.3; EXPRESSED IN FETAL LIVER, SIGNAL = 3.1; EXPRESSED IN BRAIN, SIGNAL = 1.8; EXPRESSED IN PLACENTA, SIGNAL = 1.4; EXPRESSED IN LUNG, SIGNAL = 1.4; EXPRESSED IN HELA, SIGNAL = 1.4; EST_HUMAN HIT: BG488791.1, EVALUE 5.00e-45; SWISSPROT HIT: P78329, EVALUE 6.00e-06; NT HIT: gi10863992, EVALUE 6.00e-47
atgccgcagctgagcctgtcctggctgggcctcgggcaggtggcagcattcccgtggctgctcctgctgctggctggggcctcccggctcctggccggcttcctggcctggacctatgccttctatgacaactgccgccgccttcag

SEQ ID NO: 24372 - DNA, 121 bp, Homo sapiens
  MAP TO CHR16.3; EXPRESSED IN PLACENTA, SIGNAL = 3.1; EXPRESSED IN HELA, SIGNAL = 2.4; EXPRESSED IN LUNG, SIGNAL = 2.1; EXPRESSED IN BRAIN, SIGNAL = 4.4; EST_HUMAN HIT: BG709519.1, EVALUE 8.00e-62; SWISSPROT HIT: Q9R171, EVALUE 2.00e-17; NT HIT: gi4757921, EVALUE 5.00e-62
cctgtatggtttgtctgttgtagacttttaccacgtggaagttaaaactgtagatccctttgcgcggggcgatgaaagtgctgcgttctgaatcaaagttgttcccaatgttcactagtac

SEQ ID NO: 24373 - DNA, 206 bp, Homo sapiens
  MAP TO CHR18.3; EXPRESSED IN BONE MARROW, SIGNAL = 1.4; EXPRESSED IN BRAIN, SIGNAL = 1.1; EXPRESSED IN HELA, SIGNAL = 0.88; EST_HUMAN HIT: N85715.1, EVALUE 2.70e-01; SWISSPROT HIT: Q01167, EVALUE 1.90e+00
tgggagtttggcctgacttgtttctggagccagttcccacaggcagctagtactccctagccccccaaccacactggagtcgtgtctgccatcagtgctgtctgggccccagcgttccttgaaacaactgctggggctgatgttcctagaattacagccctcttttctccttccaggtaacgttggccttgagctgggcttgagtc

SEQ ID NO: 24374 - DNA, 135 bp, Homo sapiens
  MAP TO CHR14.3; EXPRESSED IN BRAIN, SIGNAL = 1.1; EXPRESSED IN FETAL LIVER, SIGNAL = 0.82; EXPRESSED IN BONE MARROW, SIGNAL = 0.89; SWISSPROT HIT: P94694, EVALUE 3.50e+00; NT HIT: U41066.1, EVALUE 1.80e+00; EST_HUMAN HIT: T19615.1, EVALUE 7.00e-07
agttaatcatggtgcccattgcaacatggcacccaatgccactttccagagtagtgtgacgtccaattccaagacctggaggataaaaggtattaaagctcctgggaccacagaagagacagggcagaaagctgg

SEQ ID NO: 24375 - DNA, 235 bp, Homo sapiens
  MAP TO CHR14.3; EXPRESSED IN BONE MARROW, SIGNAL = 1.4; EXPRESSED IN BRAIN, SIGNAL =   1; EST_HUMAN HIT: BG940659.1, EVALUE 7.90e-02; SWISSPROT HIT: P18439, EVALUE 8.20e+00; NT HIT: U60902.1, EVALUE 8.40e-01
tttccacagccctttacataattctctttcataaattccacgtggctcatcatgcacacttgaaatggcccatttttatttggaagtttaaacttaccttttccagggagctgatcttcccctaggtcagcatggttgtgaccctgttttcccagtggattctgcctaataaagaagaaagctactgtggagtagcccgtgaaatacccactatgacacttttgcaaagatatgc

SEQ ID NO: 24376 - DNA, 79 bp, Homo sapiens
  MAP TO CHR14.3; EXPRESSED IN FETAL LIVER, SIGNAL = 1.4; EXPRESSED IN BRAIN, SIGNAL = 1.7; EXPRESSED IN PLACENTA, SIGNAL = 1.4; EXPRESSED IN HELA, SIGNAL = 1.3; EST_HUMAN HIT: BF980968.1, EVALUE 1.40e+00; NT HIT: AE002339.2, EVALUE 3.70e+00
atacaattcagattgagagagtacagcgagatgtaatgctcggagccttgatgtatgcctatctagcaaagcttcccgg

SEQ ID NO: 24377 - DNA, 215 bp, Homo sapiens
  MAP TO CHR18.3; EXPRESSED IN FETAL LIVER, SIGNAL =   2; EXPRESSED IN LUNG, SIGNAL = 2.1; EXPRESSED IN BRAIN, SIGNAL = 2.6; EXPRESSED IN PLACENTA, SIGNAL =   3; EXPRESSED IN HELA, SIGNAL = 2.8; SWISSPROT HIT: P31152, EVALUE 7.00e-38; EST_HUMAN HIT: H50096.1, EVALUE 1.00e-101; NT HIT: gi6715608, EVALUE 1.00e-118
gccatcgactttctggagaagatcctgacctttaaccccatggatcgcctaacagctgagatggggctgcaacacccctacatgagcccatactcgtgccctgaggacgagcccacctcacaacaccccttccgcattgaggatgagatcgacgacatcgtgctgatggccgctaaccagagccagctgtccaactgggacacgtgcagttccag

SEQ ID NO: 24378 - DNA, 259 bp, Homo sapiens
  MAP TO CHR14.3; EXPRESSED IN HELA, SIGNAL =   2; EXPRESSED IN FETAL LIVER, SIGNAL = 6.5; EXPRESSED IN BRAIN, SIGNAL = 1.5; EXPRESSED IN PLACENTA, SIGNAL = 0.93; SWISSPROT HIT: Q13509, EVALUE 6.00e-17; EST_HUMAN HIT: BG491877.1, EVALUE 1.00e-37; NT HIT: X02344.1, EVALUE 2.00e-42
aaatgtctgacacctttatcagcaacaacacggccagccaggagctgttcaggccacatctcggagcagttcacagccatgttcaggtgcaaggtcttcctgcactgctatatgagtgagggcatggatgagatggagttcactgaggccaagagcagcatgaacaatcttgtgtccaagtaccaacagtactaccagcatgccacagctgaggaggaggtagagtttgaggagtgtgctgaggaggaggtggcctaga

SEQ ID NO: 24379 - DNA, 186 bp, Homo sapiens
  MAP TO CHR18.3; EXPRESSED IN BONE MARROW, SIGNAL = 0.89; EXPRESSED IN BRAIN, SIGNAL =   1; SWISSPROT HIT: P50078, EVALUE 2.50e+00; EST_HUMAN HIT: H55064.1, EVALUE 2.00e-11; NT HIT: AL163203.2, EVALUE 1.00e-100
cagtccagccgagctgccgtctctgccgccagcgcccaccacagcgaggcgagccgtggtgccacacgctccagcctccagctgtggcaagtgactaccccttctcctggtcctccaagcctggcacggagcagctgcgcaagcagccacacacgagtctggaatggcctgacgccccttctgcat

SEQ ID NO: 24380 - DNA, 88 bp, Homo sapiens
  MAP TO CHR14.3; EXPRESSED IN LUNG, SIGNAL = 1.7; EXPRESSED IN FETAL LIVER, SIGNAL = 2.3; EXPRESSED IN BONE MARROW, SIGNAL = 1.4; EXPRESSED IN BRAIN, SIGNAL = 1.2; EXPRESSED IN PLACENTA, SIGNAL = 1.2; EXPRESSED IN HELA, SIGNAL = 1.4; EST_HUMAN HIT: AI436722.1, EVALUE 3.00e-42; NT HIT: AB009372.1, EVALUE 4.00e-03; SWISSPROT HIT: P49657, EVALUE 2.10e+00
gcatccgggtgtcattgggttgctgcgggaagccggggcctccctgtccacccaggagctggaggaagcagggacggagctgtgcagg

SEQ ID NO: 24381 - DNA, 115 bp, Homo sapiens
  MAP TO CHR14.3; EXPRESSED IN BRAIN, SIGNAL = 1.3; EXPRESSED IN PLACENTA, SIGNAL =   2; EXPRESSED IN LUNG, SIGNAL = 1.4; EXPRESSED IN BONE MARROW, SIGNAL = 1.9; SWISSPROT HIT: O08374, EVALUE 6.00e+00; EST_HUMAN HIT: R56687.1, EVALUE 5.50e-01; NT HIT: L36341.1, EVALUE 5.90e+00
tcctccttctcctgggaagttaagcttggggtggaggaggtgcagtggtattcctggactagcacgcccatgctgttgcctgcgtttgtggaaacagagacctttatgggacact

SEQ ID NO: 24382 - DNA, 137 bp, Homo sapiens
  MAP TO CHR14.3; EXPRESSED IN FETAL LIVER, SIGNAL = 2.6; EXPRESSED IN BRAIN, SIGNAL =  23; EXPRESSED IN HEART, SIGNAL = 7.6; SWISSPROT HIT: P21251, EVALUE 2.00e-20; EST_HUMAN HIT: BI598834.1, EVALUE 3.00e-71; NT HIT: gi14748883, EVALUE 2.00e-71
ggatggcaatggttatatcagtgcagcagaactacgtcacgtcatgacaaacttaggagaaaaactaacagatgaagaagtagatgaaatgatcagagaagcagatattgatggagacggacaagtcaactatgaag

SEQ ID NO: 24383 - DNA, 216 bp, Homo sapiens
  MAP TO CHR18.3; EXPRESSED IN HELA, SIGNAL = 3.7; EXPRESSED IN BONE MARROW, SIGNAL = 8.2; EXPRESSED IN FETAL LIVER, SIGNAL = 4.9; EXPRESSED IN LUNG, SIGNAL =   3; EXPRESSED IN BRAIN, SIGNAL = 4.6; EXPRESSED IN PLACENTA, SIGNAL = 3.4; NT HIT: gi15150808, EVALUE 3.00e-80; SWISSPROT HIT: P13679, EVALUE 7.00e-25; EST_HUMAN HIT: AW665241.1, EVALUE 5.00e-80
tgtctattctgatcgccttttggacacagggtaatgctgatactgactttgtgcttctttccagtggcagtatggagccggcctttcacagaggagacctcctgttcctcacaaatttccgggaagacccaatcagagctggtgaaatagttgtttttaaagttgaaggacgagacattccaatagttcacagagtaatcaaagttcatgaaaagt

SEQ ID NO: 24384 - DNA, 150 bp, Homo sapiens
  MAP TO CHR14.3; EXPRESSED IN BRAIN, SIGNAL = 0.99; SWISSPROT HIT: P48363, EVALUE 3.40e+00; NT HIT: Z75234.1, EVALUE 5.10e-01
caagattgtcttgaccatttactggtcaacttaagaatggaagcgctctttgtgaaggagaattttaatattcgatgggctgcccaaacaggatttgtggaaaatatcaacactatcctcaaggagtacaagcaaagcagaggattgatg

SEQ ID NO: 24385 - DNA, 152 bp, Homo sapiens
  MAP TO CHR19.3; EXPRESSED IN FETAL LIVER, SIGNAL = 2.4; EXPRESSED IN BRAIN, SIGNAL = 2.7; EXPRESSED IN PLACENTA, SIGNAL = 2.5; EXPRESSED IN HELA, SIGNAL = 8.5; EXPRESSED IN BONE MARROW, SIGNAL = 2.7; EST_HUMAN HIT: BG032634.1, EVALUE 3.00e-80; SWISSPROT HIT: O75376, EVALUE 1.50e+00; NT HIT: gi15302078, EVALUE 2.00e-80
gtctcccggagcccgtgctgcgcaaagtcgagctcccggtacccactcatcgacgcccagtgcaggcctgggtcgagtccttgcggggcttcgagcaggagcgcgtgggcctggccgacctgcaccccgatgttttcgccaccgcgcccagg

SEQ ID NO: 24386 - DNA, 175 bp, Homo sapiens
  MAP TO CHR16.3; EXPRESSED IN BRAIN, SIGNAL = 1.4; EXPRESSED IN PLACENTA, SIGNAL =   1; EXPRESSED IN HELA, SIGNAL =   1; EXPRESSED IN LUNG, SIGNAL = 1.2; SWISSPROT HIT: P16139, EVALUE 2.50e+00; NT HIT: X76730.1, EVALUE 9.50e+00; EST_HUMAN HIT: BG777667.1, EVALUE 4.00e-03
atgggaactttggaaggaggaggaaacaggaagtccaagcgagctccacgaagcctccgggcaggaacgcaaacaggaaagcggttctcagccagtggtggcctctcgctagctaggtctggtgtccccaaggcccccctggtgcgtgttatttttggaccatgccacgtggtga

SEQ ID NO: 24387 - DNA, 224 bp, Homo sapiens
  MAP TO CHR16.3; EXPRESSED IN FETAL LIVER, SIGNAL = 2.4; EXPRESSED IN BRAIN, SIGNAL = 3.6; EXPRESSED IN HELA, SIGNAL = 2.6; EXPRESSED IN PLACENTA, SIGNAL = 2.1; EST_HUMAN HIT: BE621282.1, EVALUE 1.00e-123; SWISSPROT HIT: P35289, EVALUE 3.00e-08; NT HIT: gi5803162, EVALUE 2.00e-23
ctcggttgggcctccagatcttctccatgccgtgccgcatgagcacgatgcgggatagctccgtgaaggactcgatgacgttgaagttgcacagggggctgacctcaaagaaggtcatgcagttcttctctgcgtacgcgcgggcctgctccgtcgggacctgccgcttgaaggccaggtgcagccggtttccaaccaagatccgggggactccgggtgcatgc

SEQ ID NO: 24388 - DNA, 100 bp, Homo sapiens
  MAP TO CHR19.3; EXPRESSED IN HELA, SIGNAL = 7.1; EXPRESSED IN BONE MARROW, SIGNAL = 6.8; EXPRESSED IN HEART, SIGNAL =  10; EXPRESSED IN FETAL LIVER, SIGNAL = 5.1; EXPRESSED IN LUNG, SIGNAL = 6.3; EXPRESSED IN BRAIN, SIGNAL =  12; EXPRESSED IN PLACENTA, SIGNAL = 7.7; NT HIT: gi4506886, EVALUE 1.00e-49; EST_HUMAN HIT: BG394096.1, EVALUE 2.00e-49
gaaaggcgatggctacgtggacacagaaagcaagtttctgaagttggtggccgccatcaaagccgccttggctcagggctaatgcgccctgaaggcagag

SEQ ID NO: 24389 - DNA, 155 bp, Homo sapiens
  MAP TO CHR19.3; EXPRESSED IN BRAIN, SIGNAL = 1.8; EXPRESSED IN PLACENTA, SIGNAL = 1.4; EST_HUMAN HIT: AL561447.1, EVALUE 5.00e-82; SWISSPROT HIT: P22579, EVALUE 3.00e-08; NT HIT: gi15302718, EVALUE 4.00e-82
ctggcttgtcagaggcgactgtatgtttaacttgccattcttgggaatgtctattctatatccgaggggaagaaaagcgttgaatccaacaatgaggtcagggtgctcgtggaagagctgcgagacacgtctgatgactccaggagtatcgatgc

SEQ ID NO: 24390 - DNA, 231 bp, Homo sapiens
  MAP TO CHR19.3; EXPRESSED IN BRAIN, SIGNAL = 2.4; EXPRESSED IN PLACENTA, SIGNAL =   2; EXPRESSED IN HELA, SIGNAL = 1.6; EXPRESSED IN LUNG, SIGNAL = 2.1; EXPRESSED IN FETAL LIVER, SIGNAL = 4.6; EST_HUMAN HIT: AI909504.1, EVALUE 9.00e-48; SWISSPROT HIT: O76100, EVALUE 1.00e-32; NT HIT: AF127896.1, EVALUE 1.00e-110
cagaaccagcaatccacagagttgagggttcatgatgaccgtgtagtacagggggtgacagatggccacaaaccggtcataggccatcacagtcaggaggaagctgtccaatcctacaaaatgtatgaaaaagtacatctgggtgatgcagcctgcagaggtgatgactttgctctgtgcctggatattcaccagcatctttgggaccctggtggaggcaaaacagatgtc

SEQ ID NO: 24391 - DNA, 182 bp, Homo sapiens
  MAP TO CHR18.3; EXPRESSED IN HELA, SIGNAL = 1.2; EXPRESSED IN BONE MARROW, SIGNAL = 1.6; EXPRESSED IN BRAIN, SIGNAL = 1.2; EXPRESSED IN PLACENTA, SIGNAL = 1.2; SWISSPROT HIT: P46326, EVALUE 4.30e+00; NT HIT: AB037749.1, EVALUE 3.00e-98; EST_HUMAN HIT: AI015609.1, EVALUE 3.00e-81
ctctttggggtctacatgtatctttcttttgacatgaccactgggcatcatctttcatatgcgaatgaaacccaactgtcttcctctccttcctattctctccactgtttggggggtcttggtgctttttaatagatgatgatgttccaagcagccagccatcacagtttgacttcaataaa

SEQ ID NO: 24392 - DNA, 107 bp, Homo sapiens
  MAP TO CHR19.3; EXPRESSED IN FETAL LIVER, SIGNAL = 1.8; EXPRESSED IN BRAIN, SIGNAL = 1.3; EXPRESSED IN PLACENTA, SIGNAL = 1.6; EXPRESSED IN BONE MARROW, SIGNAL = 1.6; EST_HUMAN HIT: BF970480.1, EVALUE 2.00e-53; SWISSPROT HIT: P46526, EVALUE 6.10e+00
cttccaggcagccccggcgactggagaagccaccctgaaactggatctgcagctgggagacacggatgagctggggaaactccagcgtcacccactgggaggggccc

SEQ ID NO: 24393 - DNA, 155 bp, Homo sapiens
  MAP TO CHR18.3; EXPRESSED IN BONE MARROW, SIGNAL = 2.2; EXPRESSED IN BRAIN, SIGNAL = 2.2; SWISSPROT HIT: P48999, EVALUE 5.90e-02; NT HIT: L08970.1, EVALUE 2.10e+00; EST_HUMAN HIT: BI026844.1, EVALUE 5.00e-33
attgcccttttcaaacaggtctgtgttattcctgcagttgtagagcagccgttcccccgtgtcccccacatcaccaaaaaggcagagatagacgttggcatcggtcccagcaccttcaagttcacctgtgcacacagtcacatggtaccgggcca

SEQ ID NO: 24394 - DNA, 135 bp, Homo sapiens
  MAP TO CHR18.3; EXPRESSED IN BRAIN, SIGNAL =   1; EXPRESSED IN PLACENTA, SIGNAL = 1.2; EXPRESSED IN LUNG, SIGNAL = 1.7; EXPRESSED IN BONE MARROW, SIGNAL = 1.1
atgactccagttaccttagaggaaggtaacttatctcctattatggatacgacttggctgtcaaaccctgaatctaataaacacaaattgataatgatggaagctttaagcagatttcgactgcaggctccagtg

SEQ ID NO: 24395 - DNA, 131 bp, Homo sapiens
  MAP TO CHR19.3; EXPRESSED IN HEART, SIGNAL =  13; EXPRESSED IN FETAL LIVER, SIGNAL =  15; EXPRESSED IN BRAIN, SIGNAL =   8; EXPRESSED IN HELA, SIGNAL =  33; EST_HUMAN HIT: AV715401.1, EVALUE 9.00e-68; SWISSPROT HIT: P41115, EVALUE 4.00e-20; NT HIT: X06617.1, EVALUE 6.00e-68
gcgtggtgaccaagatgaagatgcagaggaccattgtcatccgccgagactatctgcactacatccgcaagtacaaccgcttcgagaagcgccacaagaacatgtctgtacacctgtccccctgcttcagg

SEQ ID NO: 24396 - DNA, 154 bp, Homo sapiens
  MAP TO CHR18.3; EXPRESSED IN LUNG, SIGNAL = 1.7; EXPRESSED IN BONE MARROW, SIGNAL = 1.5; EXPRESSED IN BRAIN, SIGNAL = 1.4; EXPRESSED IN PLACENTA, SIGNAL = 1.5; EXPRESSED IN HELA, SIGNAL = 1.4; SWISSPROT HIT: P45527, EVALUE 2.60e+00; NT HIT: U36756.1, EVALUE 2.10e+00; EST_HUMAN HIT: BG777033.1, EVALUE 2.00e-01
ctgcaggctttgagcatctgccattttgtggatgggatattgctgccatgcagccaacttagcaggagctgaagcagagataatgttaacagttccagtcagcagagctgataatgcactaggtatgagaaaatgaataaagattccctcagaa

SEQ ID NO: 24397 - DNA, 98 bp, Homo sapiens
  MAP TO CHR14.3; EXPRESSED IN HEART, SIGNAL = 1.7; EXPRESSED IN HELA, SIGNAL = 1.8; EXPRESSED IN BRAIN, SIGNAL = 1.3; SWISSPROT HIT: O67622, EVALUE 3.60e+00; NT HIT: gi4826813, EVALUE 8.00e-45; EST_HUMAN HIT: AV749451.1, EVALUE 1.00e-44
gattgcagaaaaggataagcagataaaacagactgaagattctttagcaagtgaacgtgatcgtttaacaagtaaagaagaggaacttaaggtatagt

SEQ ID NO: 24398 - DNA, 239 bp, Homo sapiens
  MAP TO CHR16.3; EXPRESSED IN BONE MARROW, SIGNAL = 1e+03; EXPRESSED IN FETAL LIVER, SIGNAL = 1e+03; EXPRESSED IN BRAIN, SIGNAL = 6.8; EXPRESSED IN HEART, SIGNAL =  75; EXPRESSED IN HELA, SIGNAL = 2.7; EXPRESSED IN LUNG, SIGNAL = 3.2; EST_HUMAN HIT: F26048.1, EVALUE 1.00e-129; SWISSPROT HIT: P01925, EVALUE 2.00e-17; NT HIT: gi14523048, EVALUE 0.00e+00
tgctgcccactcagactttattcaaagaccaggaagggccggtgcaaggaggggaggagggcccgttgggaggcccagcgggcaggaggaacggctaccgaggctccagcttaacggtatttggaggtcagcacggtgctcacagaagccaggaacttgtccagggaggcgtgcaccgcaggggtgaactcggcggggaggtgggcggccagggtcaccagcaggcagtggcttaggag

SEQ ID NO: 24399 - DNA, 160 bp, Homo sapiens
  MAP TO CHR16.3; EXPRESSED IN BONE MARROW, SIGNAL = 1.2; EXPRESSED IN FETAL LIVER, SIGNAL = 0.84; EXPRESSED IN BRAIN, SIGNAL = 1.2; NT HIT: U90653.2, EVALUE 4.00e-85; EST_HUMAN HIT: BE707825.1, EVALUE 6.00e-85
tgagataaatgtggaagcagagcaggtgccccaggagggctgtggacaggaggcccagaaggatgagcagggcggccagggccaggatggcaggggcctgggtctccacgggggcggcaggcaggaacacgaaccacacatccgtgtgattcttcaggac

SEQ ID NO: 24400 - DNA, 152 bp, Homo sapiens
  MAP TO CHR18.3; EXPRESSED IN BRAIN, SIGNAL = 1.1; SWISSPROT HIT: P44439, EVALUE 1.00e+01; NT HIT: M74718.1, EVALUE 2.00e-80; EST_HUMAN HIT: BE795051.1, EVALUE 3.00e-80
cctagtaattgatttgatatccttcttgtcgtcatctaatttcttgtcctccgaagatttcgtgtcttgcaggttctcatcaccctcgtcatcggatttgatctcagagctgccagaggagacactctgcccctgtagtcctggtggcatgc

SEQ ID NO: 24401 - DNA, 233 bp, Homo sapiens
  MAP TO CHR18.3; EXPRESSED IN FETAL LIVER, SIGNAL = 0.78; EXPRESSED IN BRAIN, SIGNAL =   1; SWISSPROT HIT: P96142, EVALUE 2.80e+00; NT HIT: U20608.1, EVALUE 5.40e-02
ccacctcctctacagccagaggaaaggacacagcaggccatgggtttataataagatttggaggggctgagcttggctgatttaccaggaggtaggttgatgcccaagacggtgcccactgggaagctgcaagttgtgagtagggggataacagcttgagaagtaccattaaatgtcttcccatacatttgcccacagtagaatttttcttccacagaaaacactttgacatt

SEQ ID NO: 24402 - DNA, 88 bp, Homo sapiens
  MAP TO CHR14.3; EXPRESSED IN FETAL LIVER, SIGNAL = 1.1; EXPRESSED IN BRAIN, SIGNAL = 1.2; NT HIT: AF007217.1, EVALUE 2.00e-42; EST_HUMAN HIT: BG567202.1, EVALUE 3.00e-42
cttttcttgactcagtaatgacttctctttttctaaaacttcgatacgcattttaagtttcagattgtcttcagcaagactgttatcc

SEQ ID NO: 24403 - DNA, 137 bp, Homo sapiens
  MAP TO CHR18.3; EXPRESSED IN LUNG, SIGNAL = 1.3; EXPRESSED IN BRAIN, SIGNAL = 0.99; EXPRESSED IN PLACENTA, SIGNAL = 0.88; EXPRESSED IN HELA, SIGNAL = 2.7; SWISSPROT HIT: P25391, EVALUE 4.00e-26; NT HIT: X58531.1, EVALUE 2.00e-71; EST_HUMAN HIT: AA318972.1, EVALUE 1.70e-01
ctggcaccccacctccgcatcgtagccccagtgcccatcctcacattcttcacacttcacaccctgtgtgtgaggggggcagacacactctccagtttctgggtcgcaggtattctgagtgtgtgggcagtcacagg

SEQ ID NO: 24404 - DNA, 263 bp, Homo sapiens
  MAP TO CHR14.3; EXPRESSED IN BRAIN, SIGNAL = 1.7; EXPRESSED IN HELA, SIGNAL = 1.9; SWISSPROT HIT: Q13114, EVALUE 6.00e-45; NT HIT: U19260.1, EVALUE 0.00e+00; EST_HUMAN HIT: BF111902.1, EVALUE 0.00e+00
gaactcctctttcctaaaatggagtcgagtaaaaagatggactctcctggcgcgctgcagactaacccgccgctaaagctgcacactgaccgcagtgctgggacgccagtttttgtccctgaacaaggaggttacaaggaaaagtttgtgaagaccgtggaggacaagtacaagtgtgagaagtgccacctggtgctgtgcagcccgaagcagaccgagtgtgggcaccgcttctgcgagagctgcatggcggccctgctgag

SEQ ID NO: 24405 - DNA, 172 bp, Homo sapiens
  MAP TO CHR18.3; EXPRESSED IN BRAIN, SIGNAL = 1.1; NT HIT: gi15307409, EVALUE 3.00e-92; EST_HUMAN HIT: AU157071.1, EVALUE 2.20e-01; SWISSPROT HIT: P35710, EVALUE 3.30e+00
gggatgccaagtccccacttaaaagtggaccagacagcagtgcatagtaagaacgaaggctcagtgcccaccatgatgaccaggaagaagccagccgcagttgacagtgttacaattccaccagccccagtgttatctctccttgctgcatctgcagcaacgtcggatgcag

SEQ ID NO: 24406 - DNA, 155 bp, Homo sapiens
  MAP TO CHR16.3; EXPRESSED IN BONE MARROW, SIGNAL = 0.62; EXPRESSED IN BRAIN, SIGNAL = 3.4; EXPRESSED IN LUNG, SIGNAL = 1.3; NT HIT: gi16164706, EVALUE 1.00e-81; EST_HUMAN HIT: BG706531.1, EVALUE 2.00e-81; SWISSPROT HIT: Q27957, EVALUE 8.00e-10
cagtgacgcccacattggctggctctttgcctgccaccagctggcagatggcatcgaaggcctcctccttgctcttccccttgaatctcttggtcgccagctcttccagggccttcttgaactcctcatagttgatgacccgagcagacttcccc

SEQ ID NO: 24407 - DNA, 335 bp, Homo sapiens
  MAP TO CHR14.3; EXPRESSED IN BRAIN, SIGNAL = 1.4; EXPRESSED IN HELA, SIGNAL = 2.3; EXPRESSED IN FETAL LIVER, SIGNAL = 1.9; EXPRESSED IN BONE MARROW, SIGNAL = 1.4; EST_HUMAN HIT: BF971451.1, EVALUE 0.00e+00; NT HIT: gi10863978, EVALUE 0.00e+00; SWISSPROT HIT: P51950, EVALUE 5.60e+00
cctgatatgtccagaaggccagcgctcgggagctaatgtccaacacgatctctggtcgcagtcctgccaataccatagctttatattcctctgatggactgagttctgtgcggacaatatctagctttccagaaagggtactgttgcaggcaggacagatagctggtgagcgactaaactcaccactgccatgctgatcacagaagatgtgagagcaggcagtgacccatgcatagccagagagtttgatgcgacactttcgataattacaaagcagcatgtcttcacacaaagacataataggatagtgaggtctccagaagctgaagagagtc

SEQ ID NO: 24408 - DNA, 132 bp, Homo sapiens
  MAP TO CHR19.3; EXPRESSED IN PLACENTA, SIGNAL = 5.4; EXPRESSED IN HELA, SIGNAL = 2.5; EXPRESSED IN HEART, SIGNAL = 3.9; EXPRESSED IN LUNG, SIGNAL = 3.5; EXPRESSED IN FETAL LIVER, SIGNAL = 6.9; EXPRESSED IN BRAIN, SIGNAL = 2.4; SWISSPROT HIT: Q13625, EVALUE 5.00e-07; NT HIT: gi14762629, EVALUE 2.00e-68; EST_HUMAN HIT: BG774361.1, EVALUE 2.00e-68
ctggcgatatctaggtagccacaggaggcggccacgtgcagtggcgtccagccctcgttgtctgcctggttcacagtggcgccctgctccaccaagaagcgcaccacctccaggttctcatcaatgcaggcc

SEQ ID NO: 24409 - DNA, 226 bp, Homo sapiens
  MAP TO CHR19.3; EXPRESSED IN HELA, SIGNAL = 4.5; EXPRESSED IN LUNG, SIGNAL = 2.2; EXPRESSED IN BONE MARROW, SIGNAL = 1.6; EXPRESSED IN BRAIN, SIGNAL =  12; SWISSPROT HIT: Q03923, EVALUE 1.00e-31; NT HIT: gi16163579, EVALUE 2.00e-60; EST_HUMAN HIT: AI566486.1, EVALUE 1.00e-46
ttattcacatctgtagggtttctctccagtatgaaatctcttatgtgtagtaagtttagaggagtgcttaaaggctttgccacattcttcacatctgtagggtttttttccagtatgaattttcttatgtgtagtaaggttagagaaatgcttaaaagctttgtcacattcttcacatttgtagaatttctctccagtatgaattatcttatgtgtagtaaggtgt

SEQ ID NO: 24410 - DNA, 467 bp, Homo sapiens
  MAP TO CHR19.3; EXPRESSED IN BRAIN, SIGNAL = 1.6; EXPRESSED IN LUNG, SIGNAL = 1.7; EXPRESSED IN HEART, SIGNAL =   2; NT HIT: AP000006.1, EVALUE 4.40e-01; EST_HUMAN HIT: BG748038.1, EVALUE 1.00e-33; SWISSPROT HIT: O13725, EVALUE 1.00e-03
ctgctgggagccacagtggcttaactccactgtctgtggggacttggaggtcatggcaagcacagcagtgaaattcctgcaccaggagggggcccgggccatggatgaggagttgtttcatgagtaccagcatggcccaacttacagaactggctggactcagctgttccactgtcattgccaaggcatatcctcccatatccatgtcccgatcatccatggcccagggaataatggagaaggtagcctgctctgtgcttgacacctcaaacattttggtcaccagccaatcatctttgaccccaaaagacccaacaagccactctacactatgcttggtgacccactgtcaggaaaggggcattcttttgcttggtgaagtgcccccagagcccacgctgatcaatgagctgtatgggctgggggtggatgccatctttggcttcagcttcaagggcaatgtttga

SEQ ID NO: 24411 - DNA, 100 bp, Homo sapiens
  MAP TO CHR19.3; EXPRESSED IN HEART, SIGNAL =   2; EXPRESSED IN BONE MARROW, SIGNAL = 1.6; EXPRESSED IN BRAIN, SIGNAL = 2.1; EXPRESSED IN PLACENTA, SIGNAL = 1.7; EXPRESSED IN HELA, SIGNAL = 1.8; NT HIT: U40932.1, EVALUE 3.20e-01; EST_HUMAN HIT: AA568628.1, EVALUE 3.00e-02; SWISSPROT HIT: P72051, EVALUE 6.10e+00
cataaatacccaacttctgccacaaagacaaaaagacaagagtgtgattttacatcgcacactcttgggaatacacacagttcttgtcttgatgaaagtt

SEQ ID NO: 24412 - DNA, 368 bp, Homo sapiens
  MAP TO CHR14.3; EXPRESSED IN HEART, SIGNAL = 1.4e+02; EXPRESSED IN FETAL LIVER, SIGNAL = 4.8e+02; EXPRESSED IN BONE MARROW, SIGNAL = 3.3e+02; EXPRESSED IN BRAIN, SIGNAL =  69; NT HIT: gi16173304, EVALUE 1.00e-108; EST_HUMAN HIT: AA351406.1, EVALUE 1.00e-109; SWISSPROT HIT: P04720, EVALUE 5.00e-53
ggcatatcttaggctggctgtgctgtcctgattgttgctgctggcattggtgaatttgaagccagcatctctaagaatgggcagatccaggagcatgctctcctggcttacacactgggtgtgaaacaacaaatccttggtgttagcaaaatagattccactgagccactctacagtcagaagagatacaaggaaatagttaaggaaatcagtactttccttaagaaaattggctacaaccttgacacagtagcatttgtgtccatttctggttggaatggtggcagcatgctgaagccaagtgctcacaggccttggttcaagggatggaaagtcgtccgtaaagatggcaatgccagtgggaccac

SEQ ID NO: 24413 - DNA, 94 bp, Homo sapiens
  MAP TO CHR16.3; EXPRESSED IN BONE MARROW, SIGNAL = 1.7; EXPRESSED IN FETAL LIVER, SIGNAL = 1.2; EXPRESSED IN BRAIN, SIGNAL = 1.3; EXPRESSED IN PLACENTA, SIGNAL = 1.1; EST_HUMAN HIT: AI001089.1, EVALUE 1.70e+00
cagtggcagtgagggcttggtgcttgcccttgaaagtggagttctcatctggaatttctataatagacccagagtcaacagccaggttcatgcc

SEQ ID NO: 24414 - DNA, 175 bp, Homo sapiens
  MAP TO CHR18.3; EXPRESSED IN PLACENTA, SIGNAL = 1.4; EXPRESSED IN HEART, SIGNAL = 1.7; EXPRESSED IN LUNG, SIGNAL = 1.2; EXPRESSED IN BRAIN, SIGNAL = 1.2; SWISSPROT HIT: P28493, EVALUE 7.50e+00; NT HIT: M27262.1, EVALUE 1.50e-01
tagttagcctgtggtgtcctatatagagttaacttcagactgggcagcatttgggtaatgccttctaaagggtacccctccagacagtgtttggactctagtttctcatggaaaagaggagtgaaaggagaagctgaagaactagtggaacttatgtctgtgtcttcaatatttc

SEQ ID NO: 24415 - DNA, 223 bp, Homo sapiens
  MAP TO CHR14.3; EXPRESSED IN PLACENTA, SIGNAL = 6.3; EXPRESSED IN HEART, SIGNAL =  42; EXPRESSED IN LUNG, SIGNAL = 4.9; EXPRESSED IN BONE MARROW, SIGNAL = 3.1; EXPRESSED IN FETAL LIVER, SIGNAL =  61; EXPRESSED IN BRAIN, SIGNAL =  13; NT HIT: X89401.1, EVALUE 1.00e-82; EST_HUMAN HIT: BG564590.1, EVALUE 8.00e-85; SWISSPROT HIT: P46778, EVALUE 2.00e-26
tcaaaaaggaagccccgcaagtgtcaccatggcaaagctggaagagtctacagtgttccccagcatgctgttggcattgctgtagacaaacaagttaagggcaagattcctgccaagagaattaatgagcgtattgagcacattaagccctctatgagccgagatagcttcctgaaacgcgtgaaggaaaatgatcagaaagagacagaagccacagagaaag

SEQ ID NO: 24416 - DNA, 127 bp, Homo sapiens
  MAP TO CHR14.3; EXPRESSED IN PLACENTA, SIGNAL = 0.86; EXPRESSED IN BRAIN, SIGNAL = 1.2; NT HIT: U31909.1, EVALUE 1.70e+00
aaaacctgttacgtctctgcatggcacctctactactactactactactactactactactactactactactactatcactatagtgataaccagatgggagaagaattaatatcttgcaaatgat

SEQ ID NO: 24417 - DNA, 150 bp, Homo sapiens
  MAP TO CHR14.3; EXPRESSED IN PLACENTA, SIGNAL =   1; EXPRESSED IN HELA, SIGNAL = 1.3; EXPRESSED IN BRAIN, SIGNAL = 1.2; SWISSPROT HIT: Q38477, EVALUE 7.70e+00; NT HIT: AL445565.1, EVALUE 3.30e-02; EST_HUMAN HIT: BF701174.1, EVALUE 3.00e+00
ctttgcagcagcacaacgaacagccatggatctatctgtcaagcaggatctagcagctttataaacatccctgtgacaaggtgcagcggcagctcctagtccattcaatatattttgcagacttagcataatctcatatcggccttgaga

SEQ ID NO: 24418 - DNA, 137 bp, Homo sapiens
  MAP TO CHR16.3; EXPRESSED IN HELA, SIGNAL = 1.4; EXPRESSED IN BRAIN, SIGNAL = 1.2; NT HIT: gi8923484, EVALUE 4.00e-32; SWISSPROT HIT: P35732, EVALUE 4.50e+00; EST_HUMAN HIT: BF218658.1, EVALUE 6.00e-32
taactgttctctttggaggtacgggactctgcttcctgactcttcatcaggttcagccccttcaacatcttgtctctctggagagattggaggcgggaatggaggaaaagtttcatcttctacatgctcataatcag

SEQ ID NO: 24419 - DNA, 223 bp, Homo sapiens
  MAP TO CHR18.3; EXPRESSED IN BONE MARROW, SIGNAL = 0.65; EXPRESSED IN BRAIN, SIGNAL = 1.1; EXPRESSED IN PLACENTA, SIGNAL = 0.83; EXPRESSED IN HELA, SIGNAL = 1.1; NT HIT: gi16159012, EVALUE 1.00e-113; SWISSPROT HIT: O00222, EVALUE 4.80e-01; EST_HUMAN HIT: BI090118.1, EVALUE 1.00e-113
ctatatttgaacgccttcgaaacattctgcatgagtctgaaattgacaaaagagttcaatatatgattgaagtgatgtttgctgtacggaaagatggattcaaggaccaccccattatcctagaaggtcttgatttggtggaagaagatgatcaattcactcatatgctccctctggaggatgactataatccagaagatgttcttagtaagtccggggcatg

SEQ ID NO: 24420 - DNA, 99 bp, Homo sapiens
  MAP TO CHR19.3; EXPRESSED IN BRAIN, SIGNAL = 1.4; EXPRESSED IN PLACENTA, SIGNAL = 1.1; EXPRESSED IN HELA, SIGNAL = 1.1; SWISSPROT HIT: P05373, EVALUE 8.00e+00; NT HIT: gi14767583, EVALUE 6.00e-49; EST_HUMAN HIT: AA444162.1, EVALUE 8.00e-49
cttctgttttattcatgtctacttcaagatctttagctccttcttgagtctttggggttccagtcattccaggtgtgcagaaaccatgctccacagcac

SEQ ID NO: 24421 - DNA, 98 bp, Homo sapiens
  MAP TO CHR18.3; EXPRESSED IN HELA, SIGNAL = 1.2; EXPRESSED IN LUNG, SIGNAL = 1.7; EXPRESSED IN BONE MARROW, SIGNAL =   2; EXPRESSED IN BRAIN, SIGNAL = 1.3; SWISSPROT HIT: P39882, EVALUE 3.60e+00; NT HIT: AF108008.1, EVALUE 1.20e+00; EST_HUMAN HIT: BG469187.1, EVALUE 4.60e-01
aaatttcccacacgattgtctgtggctttgtatgcagaatgcgataatgaaggaaagcagctataatgtgcttgtagtggtggtggaccaccaggagg

SEQ ID NO: 24422 - DNA, 156 bp, Homo sapiens
  MAP TO CHR16.3; EXPRESSED IN BONE MARROW, SIGNAL = 2.7; EXPRESSED IN BRAIN, SIGNAL = 3.6; NT HIT: gi14775896, EVALUE 4.00e-82; EST_HUMAN HIT: AA699469.1, EVALUE 2.00e-69; SWISSPROT HIT: P35218, EVALUE 9.00e-26
gacgcgcgggcggccatgcgccccttcgacccctccgctctgctgcccacctgctgggattactggacctatgtgggctcgctcaccaccccgccgctgaccgagtcggtcacctggatcatccagaaggagcccgttgaagtggccccaagccaa

SEQ ID NO: 24423 - DNA, 254 bp, Homo sapiens
  MAP TO CHR18.3; EXPRESSED IN FETAL LIVER, SIGNAL =   1; EXPRESSED IN BONE MARROW, SIGNAL = 1.4; EXPRESSED IN BRAIN, SIGNAL = 1.1; SWISSPROT HIT: Q09448, EVALUE 1.50e+00; NT HIT: X92430.1, EVALUE 9.20e-01; EST_HUMAN HIT: BF895352.1, EVALUE 1.30e+00
ctctttgggatctgtttgaagaaaagctggatctctgggatggctcggagctgctgccggagcgcttcctccggacagctgtctgctgctccgggaaggtcacatgcactgactccacagacgcggccaggttgatggacttgagagaatcggaggagtccctcctgccatgaccgagggagagctcatcatctgattcctccctggccatgccactttcagtcatgtcatcttcatcccataagccatggcac

SEQ ID NO: 24424 - DNA, 95 bp, Homo sapiens
  MAP TO CHR18.3; EXPRESSED IN BRAIN, SIGNAL = 1.5; EXPRESSED IN PLACENTA, SIGNAL =   1; EXPRESSED IN LUNG, SIGNAL = 1.1; EXPRESSED IN BONE MARROW, SIGNAL = 1.6; SWISSPROT HIT: P78329, EVALUE 6.20e+00; NT HIT: AL583924.1, EVALUE 7.50e-02
gcattgtcctggttggtaattgtgtggcctattgtttgcagcacatggataattattatgctgtgaacatcaatttgttgtacagtggcgaatgg

SEQ ID NO: 24425 - DNA, 189 bp, Homo sapiens
  MAP TO CHR14.3; EXPRESSED IN BRAIN, SIGNAL = 1.1; EST_HUMAN HIT: BI917222.1, EVALUE 3.00e-99; NT HIT: AB014566.1, EVALUE 1.00e-102
agcacaatgagctacaacagaaactggaaaagaaagaacgagaatgtgatgctaagactcaagagaaggaagagatgatgcagaccttaaataaaatgaaagagaaacttgaaaaggagactactgagcataagcaagtcaagcagcaggtggcggacctcacagcacagctccatgagctcagcaggg

SEQ ID NO: 24426 - DNA, 441 bp, Homo sapiens
  MAP TO CHR18.3; EXPRESSED IN PLACENTA, SIGNAL = 0.87; EXPRESSED IN HELA, SIGNAL = 1.9; EXPRESSED IN LUNG, SIGNAL = 1.9; EXPRESSED IN BRAIN, SIGNAL = 1.7; NT HIT: gi14762412, EVALUE 0.00e+00; EST_HUMAN HIT: BG392744.1, EVALUE 1.00e-129; SWISSPROT HIT: Q80953, EVALUE 5.10e-02
ggcggtgtccgtgtcctccatgtctgagttccagcgtctaatggacatctcccccttcctgcctgagaagggcctgccgtccaccagcagcaaggaggatgtcaccccacccctgtctccagacgacctcaagtacatcgaggagttcaacaagagctgggactacacacccaacaggggccacaatggtggggggccggacctttgggccgacaggaccgaggtggggcgggcagggcacgaggacagcacagagcctttccccgactcctcctggtacctaaccacaagtgtcaccatgaccacggacaccatgaccagcccagagcactgccagaagcagccactgcggagccacgtcctcaccgagcagtcggggttgcgcgtgttacacagcccgcctgccgtgcgcagggtcgacagcatcacggcggcaggtgg

SEQ ID NO: 24427 - DNA, 113 bp, Homo sapiens
  MAP TO CHR19.3; EXPRESSED IN BRAIN, SIGNAL = 1.4; EXPRESSED IN BONE MARROW, SIGNAL = 0.97; SWISSPROT HIT: P37970, EVALUE 2.40e-01; NT HIT: gi14765000, EVALUE 1.00e-56; EST_HUMAN HIT: AI553729.1, EVALUE 2.00e-09
gccatggagctgctggtggagaaggctgtgagcagtgcggctgggcccctgggccccggggatgcagtcaggcgagtcctggagtgcgtggccacagggacgctcctgacagg

SEQ ID NO: 24428 - DNA, 117 bp, Homo sapiens
  MAP TO CHR19.3; EXPRESSED IN PLACENTA, SIGNAL = 2.4; EXPRESSED IN BONE MARROW, SIGNAL = 3.7; EXPRESSED IN BRAIN, SIGNAL = 2.5; EST_HUMAN HIT: AA297632.1, EVALUE 1.00e-51; SWISSPROT HIT: P70318, EVALUE 2.00e+00; NT HIT: U32576.1, EVALUE 1.00e-59
agagttgagcacagagggacagaggcacggaacccccagaaatgtccctcctcagaaacaggctccaggccctgcctgccctgtgcctctgcgtgctggtcctggcctgcattgggg

SEQ ID NO: 24429 - DNA, 275 bp, Homo sapiens
  MAP TO CHR19.3; EXPRESSED IN FETAL LIVER, SIGNAL =   4; EXPRESSED IN BRAIN, SIGNAL = 2.8; EXPRESSED IN PLACENTA, SIGNAL = 2.5; SWISSPROT HIT: O95613, EVALUE 3.50e+00; NT HIT: gi15308521, EVALUE 0.00e+00; EST_HUMAN HIT: BF108720.1, EVALUE 0.00e+00
ttcagaatgaccgaagaagcatgccgaacacggagtcagaaacgagcgcttgaacgggacccaacagaggacgatgtggagagcaagaaaataaaaatggagagaggattgttggcttcagatttaaacactgacggagacatgagggtgacacctgagccgggagcaggtccaacccaaggattgctgagggcaacagaggccacggccatggccatgggcagaggcgaagggctggtgggcgatgggcccgtggacatgcgcacctcacacag

SEQ ID NO: 24430 - DNA, 142 bp, Homo sapiens
  MAP TO CHR18.3; EXPRESSED IN BRAIN, SIGNAL = 1.1; EST_HUMAN HIT: AA573427.1, EVALUE 7.10e-01; SWISSPROT HIT: P51798, EVALUE 5.90e+00; NT HIT: U37196.1, EVALUE 4.80e-01
cttcagtctctgctttgttcacactacatttctgtttggaaacagaatttggagaagtctgaatataaactttccccaagacagccaggtttggggcctttaatttatggaaatatgcatacactgtgtcctcaaatgctag

SEQ ID NO: 24431 - DNA, 213 bp, Homo sapiens
  MAP TO CHR14.3; EXPRESSED IN BONE MARROW, SIGNAL = 2.6; EXPRESSED IN BRAIN, SIGNAL = 2.8; EXPRESSED IN HELA, SIGNAL = 3.4; EXPRESSED IN PLACENTA, SIGNAL = 2.5; SWISSPROT HIT: Q24472, EVALUE 2.10e+00; EST_HUMAN HIT: AI240606.1, EVALUE 4.40e+00; NT HIT: AY052369.1, EVALUE 7.60e-01
gcacacattagcctgcctttgaagaggcagtttgtatgcaacgtaattcctggtagggggagaatcagtggtagaacacttaagcctcatgggaagacgaggacgcaatgggctaagagacatggggcagctgtgtgtggccctcaaatcgaagagacagctctgtctactgatgataccgcatttcaacgttatagtaataccactgagtag

SEQ ID NO: 24432 - DNA, 184 bp, Homo sapiens
  MAP TO CHR14.3; EXPRESSED IN FETAL LIVER, SIGNAL = 1.8; EXPRESSED IN BONE MARROW, SIGNAL = 2.8; EXPRESSED IN BRAIN, SIGNAL = 2.8; EXPRESSED IN PLACENTA, SIGNAL =   2; EXPRESSED IN HELA, SIGNAL = 2.2; SWISSPROT HIT: P13983, EVALUE 1.30e-01
acggaagcccatggatctggccatcagtggccagaggcagaggaacactcgggccggcgtggcctgcatgtggaaactcctccattcggccaacttccgagccctcccgccagcctccttcgcactccttctccctgctcggtcggggagcaaccacaagggtgtctggggacccactcccctc

SEQ ID NO: 24433 - DNA, 130 bp, Homo sapiens
  MAP TO CHR14.3; EXPRESSED IN HELA, SIGNAL = 2.2; EXPRESSED IN PLACENTA, SIGNAL = 0.92; EXPRESSED IN FETAL LIVER, SIGNAL = 1.2; EXPRESSED IN BRAIN, SIGNAL = 1.3; SWISSPROT HIT: Q61789, EVALUE 7.80e+00; EST_HUMAN HIT: BG702371.1, EVALUE 3.00e-06; NT HIT: AL591791.1, EVALUE 1.10e-01
tcccgctccggtaccgatcggatgtgggtcgcgggtggatgggcgggtcttctatgacatcatcactgttcgccgcgaagagggcgcgcgtcatcagatcaagtcgactcgctcctctccttccaggccc

SEQ ID NO: 24434 - DNA, 449 bp, Homo sapiens
  MAP TO CHR14.3; EXPRESSED IN HELA, SIGNAL =  24; EXPRESSED IN LUNG, SIGNAL =  15; EXPRESSED IN FETAL LIVER, SIGNAL =  17; EXPRESSED IN BRAIN, SIGNAL =  16; NT HIT: M34599.1, EVALUE 0.00e+00; SWISSPROT HIT: P00423, EVALUE 1.00e-65; EST_HUMAN HIT: BF037147.1, EVALUE 0.00e+00
cacctcatgtccagcatcctcttggtctgcatgggcacccactctttgtcaaaggtgtgcgggatggggccgtacacacagcgcttctcccagatgataatgaacgccgtgaagccaaggaagaacatggcagcgcccacaaccgtcttccactcgttcacgcccctgttcatctcagcaaagctctccttgaactgaatgtgatacaactcgactttcccatccgtggagcggttgctccaggaggccttctccttcttcttcacggctttctgtctggcagacaggtgcttgacatgggccacatcgggtacgggatagtcacgtcgatccacataagctgggagcgcatagtcatcgctcttcacaacatttccgtgtgctcgtacagacaccaaggtggaaattgctcgcttgccaactaggctaactaccctggtagccaacat

SEQ ID NO: 24435 - DNA, 164 bp, Homo sapiens
  MAP TO CHR16.3; EXPRESSED IN BONE MARROW, SIGNAL = 1.8; EXPRESSED IN FETAL LIVER, SIGNAL = 1.1; EXPRESSED IN BRAIN, SIGNAL = 1.1; NT HIT: AF144387.1, EVALUE 3.60e-02; SWISSPROT HIT: O28578, EVALUE 4.40e+00
ctattcagtctcatctccctgctccccaacattgagctttcttgagggccagtgcgtcccctcactttgtgacttggtttgctgcttccaaactcctgtccccttcttgtatggattatcttcccttgatccaaagtccatccaccgctcatctaacacatgcc

SEQ ID NO: 24436 - DNA, 109 bp, Homo sapiens
  MAP TO CHR18.3; EXPRESSED IN HELA, SIGNAL = 1.3; EXPRESSED IN FETAL LIVER, SIGNAL = 0.96; EXPRESSED IN BRAIN, SIGNAL = 1.1; NT HIT: AF129855.1, EVALUE 3.50e-01; SWISSPROT HIT: P11100, EVALUE 2.70e+00
tgaacacggctggcccccgtggcagccctccttctccaacctccacaccacttggcaatccagaactctgccacaggcatcctcagaaaggccagtcttggcccaggct

SEQ ID NO: 24437 - DNA, 109 bp, Homo sapiens
  MAP TO CHR18.3; EXPRESSED IN FETAL LIVER, SIGNAL = 1.1; EXPRESSED IN BRAIN, SIGNAL = 1.2; SWISSPROT HIT: P49454, EVALUE 7.00e-01; NT HIT: gi14763118, EVALUE 7.00e-55; EST_HUMAN HIT: AA436734.1, EVALUE 1.00e-54
aatgcgcacagctttggaaaaagaaatagagagactggagtcggctttgtctctgtggaagtggaagtatgaagaactgaaagaatcaaagccaaaaaatgtgaaagag

SEQ ID NO: 24438 - DNA, 157 bp, Homo sapiens
  MAP TO CHR18.3; EXPRESSED IN BONE MARROW, SIGNAL = 0.8; EXPRESSED IN BRAIN, SIGNAL = 1.2; SWISSPROT HIT: P02438, EVALUE 7.60e+00; EST_HUMAN HIT: AI417347.1, EVALUE 8.00e-01; NT HIT: U10869.2, EVALUE 2.10e+00
attcagtgcaaaaaccttagatcatgccaaacatgatcatgccaaaaacctgagcctgttcaccctccagtctgacctcctgctgcaagcccacgtccagccttgtgtccctgccatcatatgtgggagcctctctcattcagacgggggctccagg

SEQ ID NO: 24439 - DNA, 208 bp, Homo sapiens
  MAP TO CHR16.3; EXPRESSED IN BRAIN, SIGNAL = 2.1; EXPRESSED IN HEART, SIGNAL =   2; EXPRESSED IN FETAL LIVER, SIGNAL = 1.8; NT HIT: gi15317852, EVALUE 1.00e-113; SWISSPROT HIT: Q04307, EVALUE 6.00e-10; EST_HUMAN HIT: AW167513.1, EVALUE 1.00e-113
gagtcgtgtcccaaatgcgaacatcctcgtgcttacttcatgcagcttcagacccgctctgcagatgagccgatgaccaccttctacaagtgctgcaatgctcagtgtggacaccgctggagggattagggccaggatggcccagctgccctagtgtgtgcttgccttgtccctcggggtagatgcttagctggcagtatgagttgtg

SEQ ID NO: 24440 - DNA, 233 bp, Homo sapiens
  MAP TO CHR14.3; EXPRESSED IN FETAL LIVER, SIGNAL = 6.4; EXPRESSED IN BRAIN, SIGNAL =  13; EXPRESSED IN PLACENTA, SIGNAL =  10; EXPRESSED IN HEART, SIGNAL =  14; EXPRESSED IN HELA, SIGNAL =  14; NT HIT: gi14754024, EVALUE 1.00e-128; SWISSPROT HIT: P55010, EVALUE 2.80e-02; EST_HUMAN HIT: AI332715.1, EVALUE 1.00e-128
ggtggtgtattcgaaggctgccagtgtaccgaaagttgagactgtaaagtcagacaacaaggatgacgacatcgatattgatgccatttaaagggatggatgcaacctagcttaacagtataatgctgcaaattttcctccattatcagccagaagtgcaacatgtatgtgcaaaagctaaaatggcttaacatcatgctacactttacactaaaaatctattactgtgagtg

SEQ ID NO: 24441 - DNA, 184 bp, Homo sapiens
  MAP TO CHR19.3; EXPRESSED IN BRAIN, SIGNAL = 1.2; EXPRESSED IN PLACENTA, SIGNAL = 0.86; NT HIT: gi14670376, EVALUE 9.00e-99; SWISSPROT HIT: P97433, EVALUE 2.00e-03; EST_HUMAN HIT: BF206770.1, EVALUE 1.00e-40
agcggttgagcatgaaagaccagctgatcgcacagagcctcctagagaaacagcagatctacctggagatggccgagatgggcggcctcgaagacctgccccagccccgaggcctattccgtggaggggacccatccgagaccctgcagggggagctaattctcaagtcggccatgagcgagag

SEQ ID NO: 24442 - DNA, 81 bp, Homo sapiens
  MAP TO CHR14.3; EXPRESSED IN HELA, SIGNAL = 5.2; EXPRESSED IN LUNG, SIGNAL = 2.8; EXPRESSED IN BRAIN, SIGNAL = 2.6; NT HIT: X88798.1, EVALUE 1.60e-02; SWISSPROT HIT: P09605, EVALUE 8.20e+00; EST_HUMAN HIT: BG333193.1, EVALUE 4.00e-38
ctctcccgttgctccgccgccagccgtcgccagcgggtgttcagtcgtctgcgggtcagcacggccgcaaactggcggatc

SEQ ID NO: 24443 - DNA, 341 bp, Homo sapiens
  MAP TO CHR19.3; EXPRESSED IN BRAIN, SIGNAL = 1.2; EXPRESSED IN PLACENTA, SIGNAL = 1.1; EXPRESSED IN BONE MARROW, SIGNAL =   1; SWISSPROT HIT: O14581, EVALUE 5.00e-33; NT HIT: AF127821.1, EVALUE 7.00e-61; EST_HUMAN HIT: AI909504.1, EVALUE 5.00e-50
acaaaatgtggaatttggaaatctgtgcagaagggcagtgacagcaccatcaagctatgtaatgaggaatccagatcactgataatccagaatgccagaaccagcagtccacagagccaggggctcatgatgatccaggatgccagaaccagcagtccacagaaccaggggctcatgatgaccatgtagtgcagggggtgacagatggccacaaactggtcataggccatcacggtcaggagtaagctgtccagtgcttctaagagtacaaaaaagcacatctgggtgatgcagcctgcataagtgatgactctgctctgtgtctggatgtttacgagcat

SEQ ID NO: 24444 - DNA, 184 bp, Homo sapiens
  MAP TO CHR16.3; EXPRESSED IN BRAIN, SIGNAL = 0.99; EXPRESSED IN PLACENTA, SIGNAL = 1.1; SWISSPROT HIT: P95235, EVALUE 8.50e-01
gttatcgctgtaataacatttgcccggcatccccgcaagctgggtgccgtgcatctggtggccacattgtctgcaccagaagcctgcagagtcgccggctttgacaaggagggggtgctctgtggggcgagtgggtgcggtcagggaagaccggcggcttctgtcccgagggatggattccatt

SEQ ID NO: 24445 - DNA, 112 bp, Homo sapiens
  MAP TO CHR14.3; EXPRESSED IN LUNG, SIGNAL = 1.3; EXPRESSED IN BONE MARROW, SIGNAL = 0.98; EXPRESSED IN FETAL LIVER, SIGNAL = 0.9; EXPRESSED IN BRAIN, SIGNAL = 1.2; EXPRESSED IN PLACENTA, SIGNAL =   1; NT HIT: AJ250404.1, EVALUE 3.60e-01; SWISSPROT HIT: Q10801, EVALUE 3.50e+00; EST_HUMAN HIT: AA489895.1, EVALUE 9.00e-03
taagaccctcgaggttccaggaaagactccactggccaccaagcccaacagagaagaggccctggggagacggcagaataagttgccatgtggtgagagctgcattgcaaag

SEQ ID NO: 24446 - DNA, 232 bp, Homo sapiens
  MAP TO CHR16.3; EXPRESSED IN HEART, SIGNAL = 2.4; EXPRESSED IN BRAIN, SIGNAL = 1.3; EXPRESSED IN PLACENTA, SIGNAL = 0.82; EST_HUMAN HIT: AL042254.1, EVALUE 1.00e-127; NT HIT: AF023459.1, EVALUE 2.00e-04
tggcacatctttcttaaagctgactccagttggcctggtgaccgtaaccgttttagcaacagtggtagttgttgaggtggttaccatagtgctaacttgaccagcaagaggagcttttgctggaacctgggcctgagcctgggcctgagccagtgcaatacttccaggggttgtgatagagccttgcattttcacaggaggatctctagactgctgtccatactcaatatac

SEQ ID NO: 24447 - DNA, 180 bp, Homo sapiens
  MAP TO CHR19.3; EXPRESSED IN LUNG, SIGNAL = 1.1; EXPRESSED IN BRAIN, SIGNAL = 1.4; EXPRESSED IN HELA, SIGNAL = 1.3; EST_HUMAN HIT: BF206770.1, EVALUE 3.00e-96; SWISSPROT HIT: P97433, EVALUE 1.00e-19; NT HIT: gi14670376, EVALUE 2.00e-96
gactcaaagccacccgtcatctcgttacaaaagctcatcgtgagggaagtggccaacgaggagaaagcgatgtttctgatcagcgcctccttgcaagggccggagatgtatgaaatctacacgagctccaaagaggacaggaacgcctggatggcccacatccaaagggctgtggagagg

SEQ ID NO: 24448 - DNA, 141 bp, Homo sapiens
  MAP TO CHR19.3; EXPRESSED IN LUNG, SIGNAL = 1.5; EXPRESSED IN BONE MARROW, SIGNAL = 1.3; EXPRESSED IN BRAIN, SIGNAL =   1; EST_HUMAN HIT: BF994970.1, EVALUE 1.00e-14
atggggacgaagtttatctactcagatgtgaatcccaagactttaagctgtcctctggtttccttcctggctgaagatctatgcagatgttcctatgtgcctgatctgaagagcaaaacttcaatagaggagtcatctatg

SEQ ID NO: 24449 - DNA, 134 bp, Homo sapiens
  MAP TO CHR14.3; EXPRESSED IN BRAIN, SIGNAL = 1.1; EXPRESSED IN HELA, SIGNAL = 0.99; EXPRESSED IN BONE MARROW, SIGNAL = 1.5; SWISSPROT HIT: Q12236, EVALUE 7.80e+00; NT HIT: AF406555.1, EVALUE 4.50e-01; EST_HUMAN HIT: BF515702.1, EVALUE 2.60e+00
tctcaaaagtttcttaatgctctgggaccttaaccctaagaaaagctatgaaactattgctacctctgcgcatgatcatcttcatgatactcatgctctaattgatcatgacactgtgtcccagatttgtcctt

SEQ ID NO: 24450 - DNA, 92 bp, Homo sapiens
  MAP TO CHR19.3; EXPRESSED IN HEART, SIGNAL = 2.6; EXPRESSED IN LUNG, SIGNAL = 4.9; EXPRESSED IN BRAIN, SIGNAL = 3.7; EXPRESSED IN PLACENTA, SIGNAL = 3.2; EXPRESSED IN HELA, SIGNAL = 6.5; SWISSPROT HIT: P78314, EVALUE 4.70e+00; NT HIT: gi14765802, EVALUE 3.00e-44; EST_HUMAN HIT: BE899275.1, EVALUE 1.00e-44
cctggcccgacgcagagcctccatccactcctgacactgctcctcgctgctgcactcaaagtgatacttcctctcagggtcctcaatgaagc

SEQ ID NO: 24451 - DNA, 137 bp, Homo sapiens
  MAP TO CHR16.3; EXPRESSED IN PLACENTA, SIGNAL = 1.1; EXPRESSED IN HELA, SIGNAL = 2.6; EXPRESSED IN BRAIN, SIGNAL = 1.5; SWISSPROT HIT: P53923, EVALUE 1.00e-01; NT HIT: gi16156991, EVALUE 1.80e+00; EST_HUMAN HIT: BG112797.1, EVALUE 3.00e-71
gacccacctgatcctccacatggcccgagcccacggctactccaaggtcatgactggggacagctgcacacgcttggctatcaagctcatgaccaacctggcgctgggtcgaggggccttcctggcctgggatacgg

SEQ ID NO: 24452 - DNA, 151 bp, Homo sapiens
  MAP TO CHR19.3; EXPRESSED IN HELA, SIGNAL = 1.7; EXPRESSED IN HEART, SIGNAL =   2; EXPRESSED IN BONE MARROW, SIGNAL = 2.1; EXPRESSED IN BRAIN, SIGNAL = 3.3; EST_HUMAN HIT: AA421672.1, EVALUE 1.00e-79; SWISSPROT HIT: P38187, EVALUE 3.40e+00; NT HIT: gi11424606, EVALUE 9.00e-80
cctttggatctctcagaggaactcagagtatcttcagactcagaactgtcaccatctgagaagagggataatcggggagaggtgacggtgctggaccatttcactttcttaggagaggtttcaaaactggagttcagccctctctttgagc

SEQ ID NO: 24453 - DNA, 96 bp, Homo sapiens
  MAP TO CHR16.3; EXPRESSED IN PLACENTA, SIGNAL = 0.92; EXPRESSED IN BONE MARROW, SIGNAL =   1; EXPRESSED IN BRAIN, SIGNAL = 1.4; SWISSPROT HIT: Q99547, EVALUE 9.30e-01; NT HIT: gi14779532, EVALUE 1.00e-46; EST_HUMAN HIT: BF184048.1, EVALUE 2.00e-46
ccttctagccatctcttcatctgacacatcaagctctactgtttcatcttcaacttcttccgctttgtgcttagcattcatctgaagcatcaattt

SEQ ID NO: 24454 - DNA, 79 bp, Homo sapiens
  MAP TO CHR14.3; EXPRESSED IN FETAL LIVER, SIGNAL = 1.2; EXPRESSED IN BRAIN, SIGNAL = 6.2; SWISSPROT HIT: Q28738, EVALUE 8.20e+00; NT HIT: AJ243122.1, EVALUE 4.00e-37; EST_HUMAN HIT: R16294.1, EVALUE 5.00e-37
cgcatcaggtagacacccaggtcaacaccggcaagcagaaagcccaagaggaatcggagggccatgacgcctgtggagg

SEQ ID NO: 24455 - DNA, 92 bp, Homo sapiens
  MAP TO CHR18.3; EXPRESSED IN LUNG, SIGNAL = 1.2; EXPRESSED IN BRAIN, SIGNAL = 1.5; NT HIT: gi15305351, EVALUE 8.00e-45; EST_HUMAN HIT: BF512143.1, EVALUE 1.00e-44
cttttaagtcttctgatttgctccatcaatgaccatttctcactatttaacaaactaattttatcttctaatttctgtactaacatggagtt

SEQ ID NO: 24456 - DNA, 163 bp, Homo sapiens
  MAP TO CHR14.3; EXPRESSED IN BRAIN, SIGNAL = 1.7; NT HIT: gi11434794, EVALUE 2.00e-03; SWISSPROT HIT: P42951, EVALUE 4.40e+00; EST_HUMAN HIT: AL556339.1, EVALUE 1.00e-86
tgaagcacctttctgtgacagatactttgctagaatagctaatgacttctagatctgcagctgaagaagtttcgatgaaccttccgtctccattacttgggtgaaagtggacctggaatcctccagctgcttccattatactttcatttctgctatccctgat

SEQ ID NO: 24457 - DNA, 142 bp, Homo sapiens
  MAP TO CHR18.3; EXPRESSED IN BRAIN, SIGNAL =   1; NT HIT: gi10092585, EVALUE 1.00e-69; SWISSPROT HIT: Q9UL36, EVALUE 2.00e-09; EST_HUMAN HIT: AL530583.1, EVALUE 2.80e+00
gtctcatccagcccattccaaaaaaccagtttttccaaagctatttcaataataattttgtcaatgaagcagatagaccatacaagtgtttttactgtcatcgtgcatataaaaatcttgccaccttaaacaacacatcagg

SEQ ID NO: 24458 - DNA, 203 bp, Homo sapiens
  MAP TO CHR19.3; EXPRESSED IN HELA, SIGNAL = 6.2; EXPRESSED IN PLACENTA, SIGNAL = 7.3; EXPRESSED IN HEART, SIGNAL = 3.6; EXPRESSED IN LUNG, SIGNAL = 6.3; EXPRESSED IN BONE MARROW, SIGNAL = 7.1; EXPRESSED IN FETAL LIVER, SIGNAL = 3.1; EXPRESSED IN BRAIN, SIGNAL = 5.1; SWISSPROT HIT: P06870, EVALUE 5.00e-26; EST_HUMAN HIT: BE045886.1, EVALUE 1.00e-110; NT HIT: gi14786995, EVALUE 1.00e-110
gggtgattcagggggcccgctgatgtgtgatggtgtgctccaaggtgtcacatcatggggctacgtcccttgtggcacccccaataagccttctgtcgccgtcagagtgctgtcttatgtgaagtggatcgaggacaccatagcggagaactcctgaacgcccagccctgtcccctacccccagtaaaatcaaatgtgcatcc

SEQ ID NO: 24459 - DNA, 186 bp, Homo sapiens
  MAP TO CHR19.3; EXPRESSED IN LUNG, SIGNAL = 1.8; EXPRESSED IN BRAIN, SIGNAL = 2.5; NT HIT: AF011497.1, EVALUE 1.00e-100; EST_HUMAN HIT: AA993888.1, EVALUE 1.00e-100
ccttgttctgctcgtacttgtagaggatcttgagcgtctccatggcccggatcatggcctgcatggcggtgaagatgttctggtagacgagcttggtgaagccgcgcttgtcctcctccgagtagccggcgccgtggatgatgcgcatctgcttgatgaacgtgctcttcccgctctcgcccgtgc

SEQ ID NO: 24460 - DNA, 196 bp, Homo sapiens
  MAP TO CHR18.3; EXPRESSED IN HELA, SIGNAL = 1.7; EXPRESSED IN LUNG, SIGNAL = 2.6; EXPRESSED IN BRAIN, SIGNAL = 1.6; EXPRESSED IN PLACENTA, SIGNAL = 1.8; NT HIT: X56007.1, EVALUE 4.40e-02; SWISSPROT HIT: P54924, EVALUE 3.70e-01; EST_HUMAN HIT: BE165091.1, EVALUE 1.00e+00
tagatctctttactcctcatgctaaatttggctgagagtgctgcggccattttgatatagctgtttaatgtaaaaggccagcccccttttcgtggccgtatttgtttgaagtagttcttgatgggccctgcctcttgcatttcttctgtctcctcagttgtgggacattcgcgtgcactctgatccagctgagtgc

SEQ ID NO: 24461 - DNA, 243 bp, Homo sapiens
  MAP TO CHR16.3; EXPRESSED IN BRAIN, SIGNAL = 1.3; EXPRESSED IN PLACENTA, SIGNAL = 0.89; EST_HUMAN HIT: AI471656.1, EVALUE 8.20e-02; SWISSPROT HIT: Q13107, EVALUE 7.00e-10; NT HIT: gi14779377, EVALUE 4.00e-86
tgagccaaagagatggtgtctgtgggtcgcatgaagtggctggtgcagcctcccctggtgctgatggcgggctctctttggcagcgtactgtaagaactctgtggacggcctctggtactgcttcgatgacagcgatgtgcagcagctgtcagaagatgaggtctgcacgcagacagcatacatcctcttctaccagaggcggacagccatcccgtcatggtcagccaacagctcggtggcag

SEQ ID NO: 24462 - DNA, 206 bp, Homo sapiens
  MAP TO CHR16.3; EXPRESSED IN BONE MARROW, SIGNAL = 1.1; EXPRESSED IN BRAIN, SIGNAL = 1.2; EXPRESSED IN HELA, SIGNAL = 1.1; EXPRESSED IN PLACENTA, SIGNAL = 1.3; SWISSPROT HIT: Q99102, EVALUE 4.00e-04
atggtgactagagctgagaatgcaagcagcgcctcacctctgcccatgattgaaactgataatgtgagcagcacctcacccctgcccgtgactggagctaatgccagtagctcctcacccctgcctgtgattgaaactgagaatgtgagcagcttctcacccctgcctgtgattggagctaatgccagtggctcctcacccctgcc

SEQ ID NO: 24463 - DNA, 76 bp, Homo sapiens
  MAP TO CHR16.3; EXPRESSED IN FETAL LIVER, SIGNAL = 5.6; EXPRESSED IN BRAIN, SIGNAL = 1.9; EST_HUMAN HIT: BE902005.1, EVALUE 3.00e-35; SWISSPROT HIT: P13498, EVALUE 4.00e-09; NT HIT: M61107.1, EVALUE 2.00e-35
tgtggcgggcgtgtttgtgtgcctgctggagtacccccgggggaagaggaagaagggctccaccatggagcgctgg

SEQ ID NO: 24464 - DNA, 111 bp, Homo sapiens
  MAP TO CHR16.3; EXPRESSED IN FETAL LIVER, SIGNAL = 1.7; EXPRESSED IN BRAIN, SIGNAL = 1.9; EXPRESSED IN PLACENTA, SIGNAL = 1.6; SWISSPROT HIT: P52344, EVALUE 7.90e+00; NT HIT: gi14752008, EVALUE 9.10e-02; EST_HUMAN HIT: BE616431.1, EVALUE 3.40e-02
aaccattacaacgaaagggtggtgtatggtggagaagatccccaaagtaagacaaacaggaaaatccggcctttctgtacagtggattttggaaaggagaagggaacagag

SEQ ID NO: 24465 - DNA, 119 bp, Homo sapiens
  MAP TO CHR18.3; EXPRESSED IN BONE MARROW, SIGNAL = 0.74; EXPRESSED IN BRAIN, SIGNAL = 1.1; NT HIT: gi7656998, EVALUE 9.90e-02; EST_HUMAN HIT: BI597455.1, EVALUE 1.50e-01
acccaagagtttgacagaagagttgttggctgctgtagacaggtagtagctcatgaagaagagaatgctaaggctgggctcagaggcatcagagaggttcatgccattggtgtgctccc

SEQ ID NO: 24466 - DNA, 180 bp, Homo sapiens
  MAP TO CHR14.3; EXPRESSED IN LUNG, SIGNAL = 2.2; EXPRESSED IN FETAL LIVER, SIGNAL = 1.2; EXPRESSED IN BONE MARROW, SIGNAL = 2.9; EXPRESSED IN BRAIN, SIGNAL = 1.6; SWISSPROT HIT: P01869, EVALUE 4.00e-10; NT HIT: D78345.1, EVALUE 1.00e-94; EST_HUMAN HIT: BI016023.1, EVALUE 8.00e-97
agctgcaactggaggagagctgtgcggaggcgcaggacggggagctggacgggctgtggacgaccatcaccatcttcatcacactcttcctgttaagcgtgtgctacagtgccaccgtcaccttcttcaaggtcggccgcacgttgtccccagctgtccttgacattgtcccccatgctg

SEQ ID NO: 24467 - DNA, 144 bp, Homo sapiens
  MAP TO CHR14.3; EXPRESSED IN BRAIN, SIGNAL = 3.2; EXPRESSED IN HELA, SIGNAL = 3.1; EXPRESSED IN PLACENTA, SIGNAL = 2.6; EXPRESSED IN LUNG, SIGNAL = 2.9; EXPRESSED IN FETAL LIVER, SIGNAL = 1.9; EXPRESSED IN BONE MARROW, SIGNAL = 2.5; NT HIT: gi6753021, EVALUE 7.60e+00
acattcttctccatttgataacacttgagtccttttgtttcgctcgtctgaattttagactctttatctggttcatgtctgagatccaggaagcctgaaatctgaaaccctacccggttcactctgtccttttcctttctttga

SEQ ID NO: 24468 - DNA, 152 bp, Homo sapiens
  MAP TO CHR16.3; EXPRESSED IN BONE MARROW, SIGNAL = 1.1; EXPRESSED IN BRAIN, SIGNAL = 1.7; EXPRESSED IN PLACENTA, SIGNAL = 1.2; SWISSPROT HIT: P42306, EVALUE 1.00e+01; NT HIT: AJ131690.1, EVALUE 1.30e-01; EST_HUMAN HIT: BF370361.1, EVALUE 2.00e-66
ctgaacaggagaaatggcatctaagctgctagcactaggaggacgtccttttggcataactccaggtggtggttgtctggccttattcataacattactgcaattggctaccatggtgaggatagtttctgatagctcctgagaaacactcc

SEQ ID NO: 24469 - DNA, 313 bp, Homo sapiens
  MAP TO CHR14.3; EXPRESSED IN BRAIN, SIGNAL = 1.2; NT HIT: gi15300602, EVALUE 0.00e+00; EST_HUMAN HIT: BF992319.1, EVALUE 5.00e-16; SWISSPROT HIT: P47003, EVALUE 7.40e-01
tcactgaaaagcatccctgctgaccacaaacccaagccgggcccttcctacctcctcacctgtctcagctgtttcctgatgaggtggagatgtgctggcccagggtgtgtcatcttcaaactgaacccagttgctgatggccgaggccaggtcaggtgggggctgctcagggctcccaggtggggaagctgcttcagagatgaggcccatcttttcagaggagtcatcctgctccgagtgggaatggtcttgagagcctccatccaccacatggttctccccggaggagctctcggactggtctggggaagat

SEQ ID NO: 24470 - DNA, 165 bp, Homo sapiens
  MAP TO CHR19.3; EXPRESSED IN PLACENTA, SIGNAL = 3.2; EXPRESSED IN HEART, SIGNAL = 6.9; EXPRESSED IN LUNG, SIGNAL =   9; EXPRESSED IN BRAIN, SIGNAL = 5.1; SWISSPROT HIT: P27040, EVALUE 8.70e-01; NT HIT: X96607.1, EVALUE 2.30e+00; EST_HUMAN HIT: H57398.1, EVALUE 9.00e-07
ccgtgtccacagtgctggccatccggagaaagtggggtgttcctttatcaggaatacatgtagggtggggaggcccaggagaacagctccaggactggggccaggaggctgccatgcacagcgagcagccgactcgtggcatctctctccatccagacactggca

SEQ ID NO: 24471 - DNA, 173 bp, Homo sapiens
  MAP TO CHR18.3; EXPRESSED IN HELA, SIGNAL = 3.2; EXPRESSED IN PLACENTA, SIGNAL = 2.7; EXPRESSED IN LUNG, SIGNAL = 2.9; EXPRESSED IN BRAIN, SIGNAL = 1.8; SWISSPROT HIT: P53031, EVALUE 6.60e-01; NT HIT: gi16161833, EVALUE 2.40e+00
acgaccgccctagtcgctggggtttttgagctgagtttttggcagctcccagtggtagtctgggaatgtcaccatcctcttggaaagtccgtggtgagttctttacagctggcaggacctctgaggtgtcaccctgaggcttagcagtcttctcatcatcttcactccctaac

SEQ ID NO: 24472 - DNA, 196 bp, Homo sapiens
  MAP TO CHR18.3; EXPRESSED IN BRAIN, SIGNAL = 1.1; SWISSPROT HIT: P14814, EVALUE 9.60e+00; NT HIT: AF037263.1, EVALUE 1.70e-01
agaattttgaagatatccggaaggaatattgggaatggtctcacttcaaatatgagctttgtggagtacatgaaattcccttggaggagcttcaaaggagccctcagaaaacccagcagtcatcttccagcccatgtgaaagtcaggtgccaggtgctggccattcgcctgctaatggcgaaggcagcagagacat

SEQ ID NO: 24473 - DNA, 87 bp, Homo sapiens
  MAP TO CHR19.3; EXPRESSED IN PLACENTA, SIGNAL = 0.97; EXPRESSED IN BRAIN, SIGNAL =   1; EST_HUMAN HIT: BE778168.1, EVALUE 1.00e-41; NT HIT: gi14763088, EVALUE 7.00e-42
ctcttcatccataaaatcttcaggaccaagaacagatttgtctgctctgttctgtcgtgaagacacaaaggtagagggtgtccatcc

SEQ ID NO: 24474 - DNA, 91 bp, Homo sapiens
  MAP TO CHR19.3; EXPRESSED IN HEART, SIGNAL = 6.1; EXPRESSED IN FETAL LIVER, SIGNAL =  84; EXPRESSED IN BRAIN, SIGNAL = 3.9; EXPRESSED IN PLACENTA, SIGNAL = 0.99; SWISSPROT HIT: P01024, EVALUE 6.00e-11; EST_HUMAN HIT: BE068883.1, EVALUE 4.00e-44; NT HIT: J04763.1, EVALUE 3.00e-44
cttgtccaggtagatgatgagggtgttcctatcggagaaggctttgtccagctcatacttggagatgtatctgtcaacaccattggccagc

SEQ ID NO: 24475 - DNA, 133 bp, Homo sapiens
  MAP TO CHR14.3; EXPRESSED IN HELA, SIGNAL = 2.3; EXPRESSED IN LUNG, SIGNAL = 3.7; EXPRESSED IN BONE MARROW, SIGNAL = 2.9; EXPRESSED IN BRAIN, SIGNAL = 1.9; EST_HUMAN HIT: BF877665.1, EVALUE 7.00e-04; NT HIT: AL139074.2, EVALUE 7.00e+00; SWISSPROT HIT: P10998, EVALUE 4.00e-01
taccaattaattttaaattcaatgcctgctttgtcgttgagcttaatcttaattatagcagatctcttcgcatttcttttctttgtgcagattgcacaggcaggggttttaagtgtatcaaagagcgtctgca

SEQ ID NO: 24476 - DNA, 237 bp, Homo sapiens
  MAP TO CHR19.3; EXPRESSED IN FETAL LIVER, SIGNAL = 4.4; EXPRESSED IN BRAIN, SIGNAL = 2.9; EXPRESSED IN PLACENTA, SIGNAL = 2.2; EXPRESSED IN HELA, SIGNAL =   3; EXPRESSED IN LUNG, SIGNAL = 2.6; SWISSPROT HIT: Q95157, EVALUE 9.00e-21; EST_HUMAN HIT: AA909905.1, EVALUE 3.00e-57; NT HIT: gi16163994, EVALUE 4.00e-43
tagacacaacagctacatggaagcagaaaaccttacagaattatcagaattcctcctcttaggactctcagatgatcctgaactgcagcccgtcctctttgggctgttcctgtccatgtacctggtcatggtgctggggaacctactcatcatcctggccgtcagctctgactcccacctccacagccccatgtaattcttcctctccaacttgtcctttgtggacacctgtttcat

SEQ ID NO: 24477 - DNA, 170 bp, Homo sapiens
  MAP TO CHR16.3; EXPRESSED IN LUNG, SIGNAL = 2.8; EXPRESSED IN FETAL LIVER, SIGNAL = 2.2; EXPRESSED IN BRAIN, SIGNAL = 3.4; NT HIT: gi14777228, EVALUE 5.00e-91; SWISSPROT HIT: P13887, EVALUE 6.60e-01; EST_HUMAN HIT: AL521879.1, EVALUE 7.00e-91
gtcacgctcccgggatcggcgtcggaggcggtcaagatctacctcccgagagcgacggaaattgtcccggtcccggtcccgagatagacatcggcgccaccgcagccgttcccggagccacagccggggacatcgtcgggcttcccgggaccgaagtgcgaaatacaagt

SEQ ID NO: 24478 - DNA, 157 bp, Homo sapiens
  MAP TO CHR14.3; EXPRESSED IN PLACENTA, SIGNAL = 2.2; EXPRESSED IN LUNG, SIGNAL = 1.7; EXPRESSED IN BONE MARROW, SIGNAL = 2.8; EXPRESSED IN FETAL LIVER, SIGNAL = 1.6; EXPRESSED IN BRAIN, SIGNAL = 4.3; NT HIT: D63479.2, EVALUE 5.40e-01; SWISSPROT HIT: Q27433, EVALUE 3.00e-01; EST_HUMAN HIT: BI488427.1, EVALUE 4.00e-83
gcatggggagtggagcaacagacggagagtggcatgaagacacaaaggaggaagcacaccattgccaagaccccaaggaagaaggatggaaagcgctggcagtcctgcctggcccccagccagttccctgctgaagatggccagatccccttgtctg

SEQ ID NO: 24479 - DNA, 308 bp, Homo sapiens
  MAP TO CHR19.3; EXPRESSED IN FETAL LIVER, SIGNAL = 1.3; EXPRESSED IN BRAIN, SIGNAL =   1; EST_HUMAN HIT: BI770337.1, EVALUE 0.00e+00; NT HIT: gi14756693, EVALUE 0.00e+00; SWISSPROT HIT: P32942, EVALUE 1.00e-54
ccaaaggttcggagctggcggggggctgaggtgttcacgaacagtcccagcccctggggctgcatgtccagttctgtgcggcatgagaaaggggctccgtggtcgtctctgctggccagcacagtggcagtgacctccgctggctcctccactgcgggctgccggctcagctcctcctcccagcgaagcagcaccaccgtgaggctggtccggggcgacccatcctccacttggcagcgcagggtgaagttctggcccaccggctgccaaggaggcaggggtgccagctccacacgctccgggagccc

SEQ ID NO: 24480 - DNA, 247 bp, Homo sapiens
  MAP TO CHR16.3; EXPRESSED IN BONE MARROW, SIGNAL = 2.2; EXPRESSED IN BRAIN, SIGNAL = 3.4; EXPRESSED IN PLACENTA, SIGNAL = 2.8; EXPRESSED IN LUNG, SIGNAL = 2.9; NT HIT: U90289.1, EVALUE 0.00e+00; SWISSPROT HIT: P33897, EVALUE 1.00e-31; EST_HUMAN HIT: BG769229.1, EVALUE 1.00e-108
gaagtaccacacacacttgctacagttcgatggggagggcggctggaagtttgagaagctgggctcggcttcccgcctgagcctgacagaggagaagcagcggctggagcagcagctggcgggcattcccaagatgcagcagcacctccaggagctctgccaaatcctgggcgaggccgcggccccagcgcacgtgccggcacctagcccacaaggccctggtggcctccagggtgcctccacctga

SEQ ID NO: 24481 - DNA, 171 bp, Homo sapiens
  MAP TO CHR14.3; EXPRESSED IN BRAIN, SIGNAL = 1.2; EXPRESSED IN BONE MARROW, SIGNAL = 0.91; EST_HUMAN HIT: AW466870.1, EVALUE 2.20e-01; SWISSPROT HIT: Q09394, EVALUE 4.40e+00
attgaaaggacaaatggacagtgttgagaactctgtggaagaggagaccagagagacgttgatcatcatggctccttgggatttgcaaagaggaatgactagaacggggtccttcactacagccaggtcaaaggtcaggtcaggaatgtggacaatgctggtgactccagg

SEQ ID NO: 24482 - DNA, 137 bp, Homo sapiens
  MAP TO CHR18.3; EXPRESSED IN BRAIN, SIGNAL = 1.1; EXPRESSED IN BONE MARROW, SIGNAL = 0.96; EST_HUMAN HIT: BI030292.1, EVALUE 1.70e-01; SWISSPROT HIT: P23341, EVALUE 4.50e+00
atagctcatgtgaactgggatgaagtagctttgatcacgtggagtgatgtgcatttcctgcctaaaggaatttttgtcacagtcatgagaatgctgccaatttgggcttcttcggagcctaaagtccaggctgaagt

SEQ ID NO: 24483 - DNA, 334 bp, Homo sapiens
  MAP TO CHR18.3; EXPRESSED IN BRAIN, SIGNAL = 9.5; NT HIT: gi13645149, EVALUE 0.00e+00; EST_HUMAN HIT: AW161107.1, EVALUE 0.00e+00; SWISSPROT HIT: P09896, EVALUE 7.00e-55
tagaacgggatcacttggccctttctcttcttatctcctcccagttcaaaatgcttgcatcttttaatagccagcattctcttggatctgcagttgggctcaacgcactcaagccttagcacagtattctttgtagttttagcctttttctggaaaatcggcttagtctgcccaccatagccactctgcttcctgttataacgccactttccctgggcatacagagaatccttgcccttcttgtactgtgtcactttgtggggttggtgcttgccacacttcttacagaaagtctggtgggttttagggacgttaaccatgcttgcgtgagcgc

SEQ ID NO: 24484 - DNA, 82 bp, Homo sapiens
  MAP TO CHR16.3; EXPRESSED IN BRAIN, SIGNAL = 1.4; EXPRESSED IN HELA, SIGNAL = 1.3; EXPRESSED IN FETAL LIVER, SIGNAL = 1.3; EXPRESSED IN LUNG, SIGNAL = 1.4; SWISSPROT HIT: P12755, EVALUE 2.80e+00; NT HIT: gi15317467, EVALUE 6.00e-39; EST_HUMAN HIT: BE885160.1, EVALUE 9.00e-39
ccagtctgtgtgacccaggctgtccagctctgcccgaggcgtctccagatgcggctcgtcctcccgaagcttctgcagcatc

SEQ ID NO: 24485 - DNA, 174 bp, Homo sapiens
  MAP TO CHR14.3; EXPRESSED IN FETAL LIVER, SIGNAL = 3.6; EXPRESSED IN BRAIN, SIGNAL =   4; EXPRESSED IN BONE MARROW, SIGNAL = 5.3; NT HIT: X51590.1, EVALUE 2.40e+00; EST_HUMAN HIT: BI831280.1, EVALUE 3.50e+00
cttctggcaggcatctgcaaagtccacctggctactgtcattttcagcatgcagtccacaacttttggtcaaaaacctcctttctatcacagtggacctgaggcccacatttcagtaaagcaagaggcaactacaaggtctgcagtgtttggttgggttgaaggctctgtcaag

SEQ ID NO: 24486 - DNA, 123 bp, Homo sapiens
  MAP TO CHR18.3; EXPRESSED IN BRAIN, SIGNAL = 1.5; EXPRESSED IN PLACENTA, SIGNAL = 2.1; EXPRESSED IN HELA, SIGNAL = 1.7; EXPRESSED IN HEART, SIGNAL = 2.7; SWISSPROT HIT: Q91998, EVALUE 2.00e+00
catctgtccgtcatcggcatctgtctgtcacgggtcatctgccgcaccacactgagaacccatgagtgccaaatgtcccccgtcagctggcccacccgcatttcatcttcctggcttaagaag

SEQ ID NO: 24487 - DNA, 266 bp, Homo sapiens
  MAP TO CHR14.3; EXPRESSED IN LUNG, SIGNAL = 1.5; EXPRESSED IN BONE MARROW, SIGNAL = 1.4; EXPRESSED IN BRAIN, SIGNAL = 1.8; EXPRESSED IN PLACENTA, SIGNAL = 1.4; SWISSPROT HIT: Q21446, EVALUE 1.20e+00
cagtggcttcacacgcagtctggctggccatcacgcttagcctgttagattcctgccaggcttcatcttgcagcaaatactggctgttggctgaaacagaagctgagagagcggttcctgttacccatccgccagtctctctctgcaggagtggggaaatagtaggagcaacactgactcagtcacaaaatgtgttcagtcatcaatccaactgcatgatcttcctgaatggttttgccagttgccaattttatgatgatctgtga

SEQ ID NO: 24488 - DNA, 222 bp, Homo sapiens
  MAP TO CHR16.3; EXPRESSED IN HELA, SIGNAL = 1.8; EXPRESSED IN BONE MARROW, SIGNAL = 1.4; EXPRESSED IN FETAL LIVER, SIGNAL = 1.8; EXPRESSED IN LUNG, SIGNAL = 2.5; EXPRESSED IN BRAIN, SIGNAL = 1.5; EXPRESSED IN PLACENTA, SIGNAL = 1.4; NT HIT: gi14776209, EVALUE 1.00e-121; EST_HUMAN HIT: BF770994.1, EVALUE 1.90e-02; SWISSPROT HIT: Q14940, EVALUE 5.00e-37
gggtgaccatgtgtggcctgggctgtaagaagtacgtggaggccaacatctcccataagtcacgcacaactgtcaaatatacaatgaagactctagccagctgtgctgagaccgtgatcttcatgctgcttggcatctcagccgtggactcttctaagtgggcctgggattctgggctggtgctgggcaccctcatcttcatcctgttcttccgagccctcg

SEQ ID NO: 24489 - DNA, 199 bp, Homo sapiens
  MAP TO CHR14.3; EXPRESSED IN BRAIN, SIGNAL = 1.2; EXPRESSED IN PLACENTA, SIGNAL = 1.4; SWISSPROT HIT: Q13671, EVALUE 2.50e-02; NT HIT: gi14748633, EVALUE 1.00e-27; EST_HUMAN HIT: BI029254.1, EVALUE 2.00e-45
atggagaccctggcagccagcagagattgccagggctcttcctttgtggaggctgggaatggacacggtggacccagacatgacttctgcccctcgtgtcttcacagagacttactgcccttcacactgcggctaccccaggccatccttgaggccagcagcttcacggaccttgagaccatcgccaacctgggtctgg

SEQ ID NO: 24490 - DNA, 205 bp, Homo sapiens
  MAP TO CHR14.3; EXPRESSED IN BRAIN, SIGNAL = 1.1; EXPRESSED IN HEART, SIGNAL =   5; SWISSPROT HIT: P40900, EVALUE 2.20e-01; EST_HUMAN HIT: Z28861.1, EVALUE 2.00e-66
tggtccatgggtagaaatgggcaggttggcggttggtacatgcagacgcggtggcctcagcagtggttgggccccttgtcttgtccgctaggctctgctcgatggccatctgcaccagttcatcctcgctcaggctgctgtacaggctgtactcctcctgcccaatggtacactggctgccccgagtgctgatctgcgtggccat

SEQ ID NO: 24491 - DNA, 101 bp, Homo sapiens
  MAP TO CHR18.3; EXPRESSED IN HELA, SIGNAL = 1.2; EXPRESSED IN LUNG, SIGNAL = 1.1; EXPRESSED IN BRAIN, SIGNAL = 1.1; EST_HUMAN HIT: BG033625.1, EVALUE 4.70e-01
tagatgaaattgccaaatgacagcagagcccggaacagtggccagtccgggacagaggaagacaacaggtcaaagcgagagatgagggccgtcagcaaggc

SEQ ID NO: 24492 - DNA, 164 bp, Homo sapiens
  MAP TO CHR16.3; EXPRESSED IN BONE MARROW, SIGNAL = 1.7; EXPRESSED IN FETAL LIVER, SIGNAL = 1.4; EXPRESSED IN BRAIN, SIGNAL = 1.1; EXPRESSED IN LUNG, SIGNAL = 1.3; NT HIT: AB044567.1, EVALUE 1.40e-01; SWISSPROT HIT: Q92544, EVALUE 5.80e+00
caatagaacatggcatggagaagaataaaaaagctggtcgatttgctcagaaatctataactgtcgcaacagcatatttgagaatttggaaccccaatgaaaagcccagtgaagaagagaaagttcattccaaaaatgagaacagaataggaaatgtgaactga

SEQ ID NO: 24493 - DNA, 352 bp, Homo sapiens
  MAP TO CHR19.3; EXPRESSED IN PLACENTA, SIGNAL =   1; EXPRESSED IN LUNG, SIGNAL = 1.5; EXPRESSED IN BRAIN, SIGNAL = 1.1; NT HIT: gi13651118, EVALUE 0.00e+00; EST_HUMAN HIT: BI829530.1, EVALUE 0.00e+00; SWISSPROT HIT: Q9YB55, EVALUE 5.30e-01
gtgccgggagagtgaggccgcgggggctgggaagggaccggtgtatgggggacagcaggcgaaggtcactcgggaaccagcccagctctgaggctgcgggcaggtcggaaagggagcaggacggcgacccccgtggcctccagagctctgtgtacgagagccggcgggtcacagaccccgaacgccaggacctggacaatgcagagctgggaccagaagacccagaagaggagcttccccccgaggaggtggccggggaggagttcccggagaccctggatcccaaagaggcactttctgagttggagagagtcctggacaaggacttggaagaggacattcctgaaatcag

SEQ ID NO: 24494 - DNA, 151 bp, Homo sapiens
  MAP TO CHR19.3; EXPRESSED IN HELA, SIGNAL = 1.5; EXPRESSED IN LUNG, SIGNAL = 1.3; EXPRESSED IN BONE MARROW, SIGNAL = 2.7; EXPRESSED IN BRAIN, SIGNAL = 1.5; SWISSPROT HIT: P20813, EVALUE 5.00e-23; NT HIT: gi14550410, EVALUE 9.00e-80; EST_HUMAN HIT: H19081.1, EVALUE 3.00e-68
ccttggatttccgaagctcctctatcagacactgagcctcctcctgaatccgctcctccacactccgctttcccatcccgaagtccctcatagtggtcacagagaatcgccgaagcaccttccagcggtttccattggcaaagatcacacc

SEQ ID NO: 24495 - DNA, 268 bp, Homo sapiens
  MAP TO CHR19.3; EXPRESSED IN PLACENTA, SIGNAL = 7.2; EXPRESSED IN HEART, SIGNAL = 6.1; EXPRESSED IN FETAL LIVER, SIGNAL =  11; EXPRESSED IN BRAIN, SIGNAL = 7.6; NT HIT: gi14761177, EVALUE 0.00e+00; EST_HUMAN HIT: BG164334.1, EVALUE 0.00e+00; SWISSPROT HIT: P43330, EVALUE 9.00e-18
tagaaaaaaacacagagctttattattctcaacaccaatggcagcggtcttcataggacagaggagtgagttctgtcaacagacaggcggcccctacttgccggcgatgagcgggttccgcaggaccacgatgactgagtccccgcgcaggaacatcttggagatgtagcggtctttgttgactggcttggacttcttcttgcccttgccactcttgggtacctcagtccacatctccttcacgttctccagcaccatgttgcagtgc

SEQ ID NO: 24496 - DNA, 282 bp, Homo sapiens
  MAP TO CHR19.3; EXPRESSED IN BONE MARROW, SIGNAL = 1.2; EXPRESSED IN BRAIN, SIGNAL = 1.2; EST_HUMAN HIT: BF356535.1, EVALUE 2.40e-02; SWISSPROT HIT: P07722, EVALUE 2.80e-01
ttgacatcagtaggatgctcaaagcatgggttccgttttggttcttcccctcacagagaagtctcatgcccatttctggctcttcagttaggctgatggtgctgttagcccaggggccaagcatggtggaagtcacttggaggctgccatccatgccatccacacccacggggactcctcccatccaccactgcacagagggtgtgggaatcccatggaaggaacagctgcactgcagtgtcttctccaaggagcaagaggagttgagcagcttagcaggta

SEQ ID NO: 24497 - DNA, 283 bp, Homo sapiens
  MAP TO CHR19.3; EXPRESSED IN FETAL LIVER, SIGNAL = 1.7; EXPRESSED IN BRAIN, SIGNAL = 1.8; NT HIT: AF151898.1, EVALUE 0.00e+00; EST_HUMAN HIT: H50206.1, EVALUE 0.00e+00; SWISSPROT HIT: Q9Y284, EVALUE 1.10e-02
gggttggaactattgaagcccgctttcaggttcttttccccattttccctttgaaaggaagacttctggcttctcctaaatctccgttctctgggtaaggggagtccaagcctctgtcatgaggaacggaaatgcgagggcctcgggtgttactctaaaatccgccctcagcttgcacgccggaagctgcgattcctgcagcggaagaggcgtgatctggccttcgactcgctatgtccactaacaatatgtcggacccacggaggccgaacaaagtgctgag

SEQ ID NO: 24498 - DNA, 183 bp, Homo sapiens
  MAP TO CHR16.3; EXPRESSED IN HELA, SIGNAL = 2.9; EXPRESSED IN LUNG, SIGNAL = 2.7; EXPRESSED IN FETAL LIVER, SIGNAL = 2.2; EXPRESSED IN BRAIN, SIGNAL = 6.2; EXPRESSED IN PLACENTA, SIGNAL = 2.6; SWISSPROT HIT: Q13087, EVALUE 2.00e-32; NT HIT: gi5803118, EVALUE 3.00e-98; EST_HUMAN HIT: AW964661.1, EVALUE 5.00e-98
cttccgacctggccctgctgggaagtacttgagagtagggaagccgtgcacagcgaaggcatccagctcgttggccgtggcatccagctcagcaatgatgatgtcctcgtggtcttggtacttctcagccaatgcctcccaggcaggggccatctccttgcagtgggtgcaccacggggcatc

SEQ ID NO: 24499 - DNA, 110 bp, Homo sapiens
  MAP TO CHR18.3; EXPRESSED IN HELA, SIGNAL = 1.2; EXPRESSED IN FETAL LIVER, SIGNAL = 1.1; EXPRESSED IN BRAIN, SIGNAL = 1.4; EXPRESSED IN PLACENTA, SIGNAL = 1.3; SWISSPROT HIT: P13983, EVALUE 5.30e-01; NT HIT: D00817.1, EVALUE 9.00e-02; EST_HUMAN HIT: AV711928.1, EVALUE 1.30e-01
ccggaaagctgcggctgctcctttttatcttcctccttcacctcttcaccctcagagcaccaacaatccaccagtaatttcttgggagccacttcccggaacagaagccc

SEQ ID NO: 24500 - DNA, 138 bp, Homo sapiens
  MAP TO CHR18.3; EXPRESSED IN BRAIN, SIGNAL = 1.7; SWISSPROT HIT: P23977, EVALUE 2.00e+00; NT HIT: gi15304446, EVALUE 5.00e-72; EST_HUMAN HIT: AW173080.1, EVALUE 7.00e-72
atgtgtgacacaggagaaggactattcacttttcaaacaagggaaggagaaatgatctatcagaaggttcattctgcgacactggccatagctgagcaacatgaaagattaatgctagaaatggaacagaaggcccgg

SEQ ID NO: 24501 - DNA, 157 bp, Homo sapiens
  MAP TO CHR16.3; EXPRESSED IN PLACENTA, SIGNAL =   1; EXPRESSED IN BRAIN, SIGNAL = 1.3; NT HIT: gi11421866, EVALUE 5.40e-01; EST_HUMAN HIT: BF337569.1, EVALUE 8.00e-01; SWISSPROT HIT: Q9NSI6, EVALUE 2.00e+00
acaaaggccgctgcagcaccacggacagctccttgtgcccagtcatgttggagacggtcttccttcctacagctgacggttgcttcaccaggctgccctgctctatggagaaggactctgcggttctaaaaggaaccttgaccacctcttccttttc

SEQ ID NO: 24502 - DNA, 127 bp, Homo sapiens
  MAP TO CHR16.3; EXPRESSED IN BRAIN, SIGNAL = 2.6; EXPRESSED IN PLACENTA, SIGNAL =   2; EXPRESSED IN HEART, SIGNAL = 1.9; EXPRESSED IN FETAL LIVER, SIGNAL = 2.7; SWISSPROT HIT: P08921, EVALUE 9.00e-01
cttcttctggaccacaagcttcagaggccaggccagcacctggaaggctcctgagggcccccatgtgcaggccgggcttccccgaccacctctgctctcagctccatgggccacggctagggccctc

SEQ ID NO: 24503 - DNA, 139 bp, Homo sapiens
  MAP TO CHR18.3; EXPRESSED IN BRAIN, SIGNAL = 1.3; EST_HUMAN HIT: R83776.1, EVALUE 4.40e-02; NT HIT: gi14768282, EVALUE 3.00e-02
gtaccagcacagagataagctgagccaatcagggtcttgcttgggtgaatagaaatgaagaaacacaaaagaaagctgccaattggatatgggtattgtagctgaaacgtcttgcgagctgagtcagggtcggggaagc

SEQ ID NO: 24504 - DNA, 81 bp, Homo sapiens
  MAP TO CHR18.3; EXPRESSED IN BRAIN, SIGNAL = 1.1; EST_HUMAN HIT: AW905636.1, EVALUE 9.00e-02
acgaaagaccaatgaatccaatgtgtgtcttctcttttgtggataagacaccaccccagggtctgtgtaatgtccaaacag

SEQ ID NO: 24505 - DNA, 273 bp, Homo sapiens
  MAP TO CHR16.3; EXPRESSED IN FETAL LIVER, SIGNAL = 2.6; EXPRESSED IN LUNG, SIGNAL = 3.8; EXPRESSED IN BRAIN, SIGNAL = 2.2; EXPRESSED IN HELA, SIGNAL = 2.9; NT HIT: gi14779472, EVALUE 0.00e+00; SWISSPROT HIT: Q16651, EVALUE 2.00e-49; EST_HUMAN HIT: BI763558.1, EVALUE 0.00e+00
cctgagggggccacatgaccccagccagtgacagtgcagtggaggccgttggggaaggaggcgttggctgcagggaggcagatgggccggatgtagcgggagaaggtgatgggtctgctgagttggaggagtgcaatgtcgccctgggagccctcctggaggtagctggggtgggggatgatgtccttcagggtgctgaccttggcgtcctcggagtaggagtctagctggtgggcccccagcttgacctcataggcttccttgtggtgctcg

SEQ ID NO: 24506 - DNA, 85 bp, Homo sapiens
  MAP TO CHR14.3; EXPRESSED IN BRAIN, SIGNAL =   1; EST_HUMAN HIT: AI023319.1, EVALUE 6.00e-03; NT HIT: gi16157016, EVALUE 1.00e+00
aggcacacttcttctctgtgtgtctttgtatccccttatacaccaggaatccatggagcccatcataccaggtgcccatagcatg

SEQ ID NO: 24507 - DNA, 250 bp, Homo sapiens
  MAP TO CHR14.3; EXPRESSED IN BRAIN, SIGNAL = 2.8; EST_HUMAN HIT: AW162515.1, EVALUE 0.00e+00; NT HIT: gi5174412, EVALUE 0.00e+00; SWISSPROT HIT: P54265, EVALUE 8.00e-16
ccgtgtttctcagcacgtcgtcatccacgtcgaagttggatgtgtcagagggactgctcacatcaggaatataaggtgcttctaggtttcgtatattttcccaatttagaccttcaaaaaacgcatgctttttgaaatcctctattccattctgccccagccggcgttctctactgcagatcagtctctggatgaggtccttcgcttcttcagatacatccgtgacatgggatgggaactggaatcgctc

SEQ ID NO: 24508 - DNA, 142 bp, Homo sapiens
  MAP TO CHR19.3; EXPRESSED IN FETAL LIVER, SIGNAL = 0.93; EXPRESSED IN BRAIN, SIGNAL = 1.1; NT HIT: gi14785847, EVALUE 2.00e-74; EST_HUMAN HIT: BE973623.1, EVALUE 7.10e-01; SWISSPROT HIT: P23508, EVALUE 2.00e-04
ctgtactgcaaggccagatgcaatgctgtggcctcagcctcccgctggcctagctgcatgctgaggccttcacagcggcccttgtatccctgtagcacagctgatagcagacgattaaagcatttgagcttctcaatgctcc

SEQ ID NO: 24509 - DNA, 121 bp, Homo sapiens
  MAP TO CHR18.3; EXPRESSED IN FETAL LIVER, SIGNAL = 1.4; EXPRESSED IN BRAIN, SIGNAL =   1; EXPRESSED IN PLACENTA, SIGNAL =   1; NT HIT: AL445564.1, EVALUE 6.20e+00; EST_HUMAN HIT: AW177145.1, EVALUE 1.50e-01
ctctgaaaaattctcgaaggaataggtgatcattgggttgaagacgaacagaagatgataaacttggaagataataaacttaaaagttatgcctttcttatatggtaaaaggactttctcc

SEQ ID NO: 24510 - DNA, 489 bp, Homo sapiens
  MAP TO CHR14.3; EXPRESSED IN PLACENTA, SIGNAL =  25; EXPRESSED IN FETAL LIVER, SIGNAL = 1.1e+02; EXPRESSED IN BRAIN, SIGNAL =  19; SWISSPROT HIT: P12970, EVALUE 1.00e-65; NT HIT: gi4506660, EVALUE 0.00e+00; EST_HUMAN HIT: BI438637.1, EVALUE 0.00e+00
ctggcccagagacaaagcaagagaagcagcagaggctgttggccctggctgagaagaaagctctgggcaaagggggcatccccactaagagaccaccggtccttcgagcaggagttaacaccgtcaccaccttggtggagaacaagaaggctcagcccgtggtgactgcacaggatgtcgagcccatcaagctggttgtcttcctgcctgccctgtgccataaaatggaggtcccttactgcgttatcaaaaggaaggcaaggctgggatgtctagtccacaggaagacctgcaccaatgctgctttcacacaggttaactcggaaaacaaaggggctttggctaagctggtggaagctatcaggaccaattacaatgacagatctgatgagatctgccgtcactggggaggcaaggccctgggtcccaagtctgtggctcacattgcccatatggaaaaggcaaaggctaaagaacttgccaccaaag

SEQ ID NO: 24511 - DNA, 97 bp, Homo sapiens
  MAP TO CHR16.3; EXPRESSED IN PLACENTA, SIGNAL = 1.6; EXPRESSED IN LUNG, SIGNAL = 1.7; EXPRESSED IN FETAL LIVER, SIGNAL = 1.3; EXPRESSED IN BRAIN, SIGNAL = 1.4; SWISSPROT HIT: Q9UH03, EVALUE 4.80e-02; EST_HUMAN HIT: BI832349.1, EVALUE 1.00e-47
atccagcagaacctgaggacccactgcatcgacgtctacccccagatgtgctttgacgaggacatcaatgacaaaatcctcaacagcaagttacggg

SEQ ID NO: 24512 - DNA, 185 bp, Homo sapiens
  MAP TO CHR14.3; EXPRESSED IN FETAL LIVER, SIGNAL = 0.84; EXPRESSED IN BRAIN, SIGNAL = 1.2; SWISSPROT HIT: P28233, EVALUE 3.30e+00; NT HIT: AF019139.1, EVALUE 2.00e-04; EST_HUMAN HIT: AA347855.1, EVALUE 9.60e-01
taatactgatgaagataatcctcaagacctttacactctgggtcagttccaagatggctgagaagctgtttaaaataatcaaaaaacaacttgataggattgacaatttcatgttttttaatgtgttgaatgagattgctaactacaatcagcagatatacatacgtggtatcacagatgttagg

SEQ ID NO: 24513 - DNA, 248 bp, Homo sapiens
  MAP TO CHR16.3; EXPRESSED IN PLACENTA, SIGNAL = 1.7; EXPRESSED IN BRAIN, SIGNAL = 1.6; EST_HUMAN HIT: AI141460.1, EVALUE 0.00e+00; SWISSPROT HIT: P25992, EVALUE 8.30e-01; NT HIT: gi14779883, EVALUE 0.00e+00
ttatctccaggctgaaggccttttaccttccctcggatattcttcaccagctctgggtagaagaactctgggcagcgtttgtgatctggttcaaagagggtgagtgtaatccgaacagctgctgcagccggctcacagtcctgatgctgttctcctgccccagcctcctccttccgggacttcttcaaaaacgcaggattcagggaacctgggagagaggtgaactggaccctgtggggctccgacat

SEQ ID NO: 24514 - DNA, 242 bp, Homo sapiens
  MAP TO CHR18.3; EXPRESSED IN FETAL LIVER, SIGNAL = 0.89; EXPRESSED IN BRAIN, SIGNAL = 1.3; SWISSPROT HIT: P06609, EVALUE 4.00e+00
tggtcagggagaccagcaggagtgctaacagaaaggagcccagcaatggaggatgctctgagacaggccccagctgctctcagtgccctggcatcctagctttccaagaccacatcagctttaccttgagggctcgacgaggacatgtaagtgtcctcgtggtgccagccagggccctggtaagatccaaaggcacagcccaatttggtgatgtggggagagcctgaggaagggatgatttc

SEQ ID NO: 24515 - DNA, 154 bp, Homo sapiens
  MAP TO CHR14.3; EXPRESSED IN BRAIN, SIGNAL = 1.4; EXPRESSED IN PLACENTA, SIGNAL = 1.1; SWISSPROT HIT: Q38394, EVALUE 2.00e+00; NT HIT: gi14751741, EVALUE 1.00e-81; EST_HUMAN HIT: AW250322.1, EVALUE 2.00e-81
gcgctcgccgccttagtacccggagtgacccaggtagataacaagtccggtttcctgcagaagaggcctcatcgccagcaccctggcatcctaaagctgccgcacgtgcggctgccacaggcactggctaacggtgcccagttattgctacttg

SEQ ID NO: 24516 - DNA, 490 bp, Homo sapiens
  MAP TO CHR18.3; EXPRESSED IN HEART, SIGNAL = 2.4; EXPRESSED IN BRAIN, SIGNAL = 1.2; EXPRESSED IN PLACENTA, SIGNAL = 1.2; SWISSPROT HIT: Q9Y6N8, EVALUE 9.00e-22; NT HIT: gi16164020, EVALUE 0.00e+00; EST_HUMAN HIT: BF819993.1, EVALUE 0.00e+00
taattatttgactgcactgcagaaccaaacatgcatgctaatcttttaaagcgaggtcccaactcattaaggtaatcatagctttcatcctgatcagagactgctgattctaaggagctcagggatccagctaatgaccctgttccctcaaaagcgtaggtctggagggaatcaaaaggaggggcacacggatcagtattagcttcttcgagcttttccagaatgaatttcctgaatatggcactgtcggggccaacttgcaaagactgcctgtataggctcctgatctcagcgcttgtggttttccgagtcttgcgttcccgcattatggtactactcctcagctctgctatatcaaaggcctctgtatcttcttctccacccccttcatcatcatattggaatatattctctctgaaatcttcacttttctcaggaaatagaatctgttttctccgttgttttaaacccaaagtcaaaaaaataaacc

SEQ ID NO: 24517 - DNA, 150 bp, Homo sapiens
  MAP TO CHR14.3; EXPRESSED IN BRAIN, SIGNAL = 1.3; EST_HUMAN HIT: AA682958.1, EVALUE 3.00e+00; NT HIT: AF348120.1, EVALUE 2.00e+00
catcaactattgtatccacaatgaagcctagtaatgccacatcattggcacaggggcattttgtcactttgagatctaccacatgtggatataatttactgatttcactttctggaatcacatccccaggagtccactgaagaatcggtt

SEQ ID NO: 24518 - DNA, 77 bp, Homo sapiens
  MAP TO CHR14.3; EXPRESSED IN BRAIN, SIGNAL =   1; NT HIT: AJ229041.1, EVALUE 1.00e-03; EST_HUMAN HIT: AA553981.1, EVALUE 5.00e-03
ctaagtttcttttcttgttttttattggtcgttgggttggggcttttggtactttcttcagggtcttcttgctgcat

SEQ ID NO: 24519 - DNA, 327 bp, Homo sapiens
  MAP TO CHR16.3; EXPRESSED IN BRAIN, SIGNAL = 3.4; EXPRESSED IN PLACENTA, SIGNAL = 4.2; SWISSPROT HIT: P01764, EVALUE 3.00e-45; EST_HUMAN HIT: BG771903.1, EVALUE 0.00e+00; NT HIT: Z29610.1, EVALUE 0.00e+00
ttgacttcccctcactgtgtctctagtacagtaatacacagccatgtcctcagctctcagactgttcatttgcagatacagcgtgttcttagcattgtctctggagatggtgaattggcccttcatggagtctgcgtagcttgtgctactcccatcactattaatacgtgagacccacaccagccccttccctggagcttggcggacccagtgcatccagtagctactgaaggtgaatccagaggctgcacaggagagtctcagggaccctccaggctgtactaagcctcccccagactccaccagctgcacctcacactggacacc

SEQ ID NO: 24520 - DNA, 244 bp, Homo sapiens
  MAP TO CHR18.3; EXPRESSED IN BRAIN, SIGNAL =   1; SWISSPROT HIT: P25391, EVALUE 1.00e-44; NT HIT: X58531.1, EVALUE 0.00e+00; EST_HUMAN HIT: AL041786.1, EVALUE 2.10e-02
gtctttcaagttgcatatgtcatcattaaagctgccaatgcccctcgacctggaaactggattttggagcgttctctggatggcaccacgttcagcccctggcagtattatgcagtcagcgactcagagtgtttgtctcgttacaatataactccaagacgagggccacccacctacagggctgatgatgaagtgatctgcacctcctattattccagattggtgccacttgagcatggagagg

SEQ ID NO: 24521 - DNA, 157 bp, Homo sapiens
  MAP TO CHR16.3; EXPRESSED IN BRAIN, SIGNAL = 1.2; NT HIT: Z49597.1, EVALUE 3.50e-02; EST_HUMAN HIT: BF955512.1, EVALUE 5.00e-79; SWISSPROT HIT: P93527, EVALUE 7.60e+00
gcgttgggaaggaggactatccccacactcagggcgatttctcatttgatgaagacagcagtgacgctttgtctccggaccagcctgcgagtcaggagtcacaggggtcagccgcgtccccaagtgagccaaaagttagtgaatcgccatctcctgt

SEQ ID NO: 24522 - DNA, 150 bp, Homo sapiens
  MAP TO CHR19.3; EXPRESSED IN BRAIN, SIGNAL = 4.6; EXPRESSED IN PLACENTA, SIGNAL = 2.4; EXPRESSED IN LUNG, SIGNAL = 1.9; EXPRESSED IN FETAL LIVER, SIGNAL = 2.7; NT HIT: gi15303543, EVALUE 3.00e-79; EST_HUMAN HIT: BI755020.1, EVALUE 1.20e-02; SWISSPROT HIT: Q14324, EVALUE 2.00e-23
ggaaggacgcagtggtcgtggccaaggtgaacgggaaggagctcccagacaaaccgaccatcaagtggttcaaggggaagtggctggagctgggcagcaagagtggcgcccgcttctccttcaaggagtcccacaactccgccagcaatg

SEQ ID NO: 24523 - DNA, 112 bp, Homo sapiens
  MAP TO CHR14.3; EXPRESSED IN BRAIN, SIGNAL = 1.1; EXPRESSED IN PLACENTA, SIGNAL = 0.82; NT HIT: AJ249461.1, EVALUE 1.40e+00; EST_HUMAN HIT: BF309884.1, EVALUE 5.40e-01
cttcatcccactttgcaaagattttcagcataagctgttctctttcaacatactctatgctcttgccctctggcttatctaatctaaacatgtttctgttaaactctaccat

SEQ ID NO: 24524 - DNA, 161 bp, Homo sapiens
  MAP TO CHR14.3; EXPRESSED IN BRAIN, SIGNAL = 1.4; NT HIT: gi16162223, EVALUE 1.00e-85; SWISSPROT HIT: P78540, EVALUE 1.00e-26; EST_HUMAN HIT: BF220324.1, EVALUE 1.00e-85
gcctggcaatcggtaccattagtggccatgcccgacactgcccagacctttgtgttgtctgggttgatgcccatgctgacatcaacacaccccttaccacttcatcaggaaatctccatggacagccagtttcatttctcctcagagaactacaggataag

SEQ ID NO: 24525 - DNA, 236 bp, Homo sapiens
  MAP TO CHR14.3; EXPRESSED IN BRAIN, SIGNAL =   1; NT HIT: AF185637.1, EVALUE 3.00e-90; SWISSPROT HIT: Q02280, EVALUE 2.00e-33; EST_HUMAN HIT: U69185.1, EVALUE 1.00e-130
tcatcatcctggatgacttccaaggatcctgacaccacaaagcagagggcatccacactttctccagcatggtaaatgaggtccccgggagcacagtgaatggtttggaactctaccgccaaggcgcgcagacacccatcgctggccaatcgaaaagcaggatgttcattaaaaaccttccggtttagatgaacacagatatcagctctcatgtccttgggacagatggagaggac

SEQ ID NO: 24526 - DNA, 296 bp, Homo sapiens
  MAP TO CHR19.3; EXPRESSED IN HEART, SIGNAL = 3.2; EXPRESSED IN BRAIN, SIGNAL = 2.8; EXPRESSED IN PLACENTA, SIGNAL = 1.3; NT HIT: gi8923937, EVALUE 0.00e+00; SWISSPROT HIT: Q13224, EVALUE 6.90e-01; EST_HUMAN HIT: AI191094.1, EVALUE 0.00e+00
cgaaagttagggtcctttattgggggatgtcagcagagaacgtgggacatgaaaacaagtcttaggagtttgagaaggggctcccaggacaggctcctctgctttaaggagcctgtcctgggagaataagcagggccccagtatgtgcagaagttgtcagggggtgcccaggggtatggtgaaggagaggtagtccccaagggcaccccagcggggccggtagatctggaagatggtgatccaggaggtgagcactatcacccagaagaggaagcccacagctgagcgccagacat

SEQ ID NO: 24527 - DNA, 161 bp, Homo sapiens
  MAP TO CHR14.3; EXPRESSED IN PLACENTA, SIGNAL = 0.95; EXPRESSED IN BRAIN, SIGNAL = 1.2; NT HIT: gi15616630, EVALUE 9.00e-03; SWISSPROT HIT: O83183, EVALUE 2.00e+00; EST_HUMAN HIT: BF997207.1, EVALUE 3.20e+00
tccatttgtaaagatgtaaaacagaaataccctcaataacaactcatcttccacagagtctttgtcaggattaatgactttggtgtgtatcgtaagaaaaatattcaaatagaatccacagctgtatttttctgctgttccaactatagccatggtaaagc

SEQ ID NO: 24528 - DNA, 124 bp, Homo sapiens
  MAP TO CHR14.3; EXPRESSED IN BRAIN, SIGNAL = 1.1; NT HIT: AY035139.1, EVALUE 1.60e+00; SWISSPROT HIT: P35637, EVALUE 7.90e+00
gaatcatgctgaaggtgatgcagaagtgatgaatgtggggctggtggtagtggtcgtaaaggtttcccattgggtggatgtaggttctgagctagagaaggtggtgacactttgtcaactaaga

SEQ ID NO: 24529 - DNA, 103 bp, Homo sapiens
  MAP TO CHR18.3; EXPRESSED IN BRAIN, SIGNAL = 1.5; EST_HUMAN HIT: AI140038.1, EVALUE 4.80e-01; SWISSPROT HIT: P95937, EVALUE 2.70e+00
gacactgtcaaaggactgactctgggcaaaagtgttcacagatacaatgttgggatccagaagccaaaaaggaaggatgaagaaatgactgtgagcaaaacag

SEQ ID NO: 24530 - DNA, 179 bp, Homo sapiens
  MAP TO CHR19.3; EXPRESSED IN HEART, SIGNAL = 4.8; EXPRESSED IN BRAIN, SIGNAL =   6; EXPRESSED IN PLACENTA, SIGNAL = 3.1; NT HIT: gi15826865, EVALUE 4.00e-02; SWISSPROT HIT: P53235, EVALUE 1.90e+00; EST_HUMAN HIT: BF796178.1, EVALUE 1.00e-83
ctggggtatctgcaggcctgtctgctgacacacgtactggctgaactggtacatggcgggggggaccacctccccagccttctgtagggctgcctggctcttgtcgctgggccccagcagctcctggtcgtacaccaggtagacggcgcccccagccacacttcccttgatgaggaacc

SEQ ID NO: 24531 - DNA, 63 bp, Homo sapiens
  MAP TO CHR16.3; EXPRESSED IN PLACENTA, SIGNAL = 0.93; EXPRESSED IN BRAIN, SIGNAL = 1.7; NT HIT: AF064253.1, EVALUE 2.70e+00
ttaatcctcaggacgcatttcgtacaggatctctgggttcttcctgtggtggacttcggaatt

SEQ ID NO: 24532 - DNA, 142 bp, Homo sapiens
  MAP TO CHR14.3; EXPRESSED IN BRAIN, SIGNAL = 1.5; SWISSPROT HIT: Q99102, EVALUE 2.00e+00; NT HIT: gi13653275, EVALUE 2.00e-19; EST_HUMAN HIT: F05199.1, EVALUE 6.00e-20
cccctgggagaagtagaaggcagcaatgcccagtggccagaagcagcagagcatggagaagagagtaagtcccaggtggtccctgggaggcagcgtgaggaagttgtcttcactttcactctccgttgaagtggcatcgctc

SEQ ID NO: 24533 - DNA, 108 bp, Homo sapiens
  MAP TO CHR14.3; EXPRESSED IN PLACENTA, SIGNAL = 0.83; EXPRESSED IN BRAIN, SIGNAL = 1.1; SWISSPROT HIT: P33390, EVALUE 8.00e+00
aaagtctggctgactctcatagtgatgaatcagattcagatctgtctgatgttccagaactggattctgaaattgaacaagagacacagctcacctaccgtcgacagg

SEQ ID NO: 24534 - DNA, 188 bp, Homo sapiens
  MAP TO CHR14.3; EXPRESSED IN BRAIN, SIGNAL =   1; NT HIT: AF151533.1, EVALUE 6.60e-01; EST_HUMAN HIT: BE560439.1, EVALUE 4.00e-03; SWISSPROT HIT: Q05870, EVALUE 5.60e+00
cttccttttttcctccccttcaccatctctgcgcttcaagagaaaacaaatgaaggtgctgatgttgccttcctgtgagattccaggtgaaaactggttaatctgattaatcattcttgctgcttttattgcagcaaccactttgaactgttgtgctaaaatataaccgttttccatctcataaatgt

SEQ ID NO: 24535 - DNA, 190 bp, Homo sapiens
  MAP TO CHR14.3; EXPRESSED IN PLACENTA, SIGNAL =   1; EXPRESSED IN BRAIN, SIGNAL = 1.3; SWISSPROT HIT: Q15542, EVALUE 1.00e-05; NT HIT: AP000006.1, EVALUE 2.60e+00; EST_HUMAN HIT: AU185858.1, EVALUE 1.00e-98
ggcaagatccttgttgggacaaggaatgctgaaataatcgaagttggagagaaaaatgcagcttgtaatattttagttaacggtcatgtggatgggccaatctggggactagcaacacatccttccagggattttttcctttctgctgcagaagatgggacagtgagactttgggatattgctgataaag

SEQ ID NO: 24536 - DNA, 239 bp, Homo sapiens
  MAP TO CHR16.3; EXPRESSED IN BRAIN, SIGNAL = 2.6; EXPRESSED IN PLACENTA, SIGNAL = 1.8; NT HIT: gi16164484, EVALUE 0.00e+00; EST_HUMAN HIT: AW005688.1, EVALUE 0.00e+00; SWISSPROT HIT: O76071, EVALUE 2.00e-44
gtgtcagctgacaggggctctggccacagcttgtggggatgacgcgatccgcgtgtttcaggaggatcccaactcggatccacagcagcccaccttctccctgacagcccacttgcatcaggcccattcccaggatgtcaactgtgtggcctggaaccccaaggagccagggctactggcctcctgcagtgatgatggggaggtggccttctggaagtatcagcggcctgaaggcctct

SEQ ID NO: 24537 - DNA, 365 bp, Homo sapiens
  MAP TO CHR16.3; EXPRESSED IN PLACENTA, SIGNAL =   1; EXPRESSED IN BRAIN, SIGNAL = 1.8; NT HIT: AF069709.1, EVALUE 8.60e-02; EST_HUMAN HIT: BF314558.1, EVALUE 1.30e-01; SWISSPROT HIT: Q03385, EVALUE 5.00e-04
cgagtcgcttcatggtcccaaaccaggacccaaagtgctgcttgggcttaaggttgtaattatttgcagccaactggagcagcggacctccttgcttactttgaattcctgggtccagagggaaaaactgggtggtgacagggactggacagggatgccacaggggccctgtgggggtgttaggtggggtggtggccagtctttgctcataggggaccccctcctcctctccagtcctgtccccacctgttctcagagctggctcaagcagcagctcctccaggaaggtgtccttggtttcaacctggtactcccacctgcaggtcttcctggagtgtctcctctttgtctgtctccccataaat

SEQ ID NO: 24538 - DNA, 186 bp, Homo sapiens
  MAP TO CHR14.3; EXPRESSED IN PLACENTA, SIGNAL = 1.3; EXPRESSED IN BRAIN, SIGNAL = 1.7; SWISSPROT HIT: Q04724, EVALUE 9.70e+00; EST_HUMAN HIT: BG106555.1, EVALUE 2.00e-60; NT HIT: U19755.1, EVALUE 4.20e-02
agctcctgcctgacgcgccgcagcctggccttggtgtcggccagctctacggccaggtgctgcttgtcttcgctagagaggctgctggtggggctgggagtggagtcggcgctggaggacttgatggggctgggtggatgctgtgcctgcaggtagtcccgttcctgagtgaggtccacgatcagc

SEQ ID NO: 24539 - DNA, 87 bp, Homo sapiens
  MAP TO CHR16.3; EXPRESSED IN BRAIN, SIGNAL = 1.3; NT HIT: AF147081.1, EVALUE 1.10e+00; EST_HUMAN HIT: F34456.1, EVALUE 3.90e-01
tgaaagacatcaaagagcctgagtgtgaaagcaagatgacaagatacagcattcttttcacaagaaatgcagagaaacagcccggag

SEQ ID NO: 24540 - DNA, 107 bp, Homo sapiens
  MAP TO CHR16.3; EXPRESSED IN PLACENTA, SIGNAL = 0.91; EXPRESSED IN BRAIN, SIGNAL = 1.3; NT HIT: X75923.1, EVALUE 5.40e+00; EST_HUMAN HIT: BF977823.1, EVALUE 5.10e-01
tgaagggcaaattcagcagccaggaacctgctgctggggccgggaatcaggaagcggacacccacaaactaggatgggtcttggctgctggctccaactctggttgg

SEQ ID NO: 24541 - DNA, 169 bp, Homo sapiens
  MAP TO CHR19.3; EXPRESSED IN BRAIN, SIGNAL = 1.6; SWISSPROT HIT: P01229, EVALUE 1.00e-25; NT HIT: gi15431286, EVALUE 1.00e-75; EST_HUMAN HIT: AA371346.1, EVALUE 2.00e-75
ccatggtggggcagtagccggcacagatggtggtgttgacggtgatgcacactgggcagccctccttctcgacagccaggatggcattgatggggtggcaccatggccgaagcggctccctggatgcccatgccccgcccatgctcagcagcagcaacagcagcagccc

SEQ ID NO: 24542 - DNA, 251 bp, Homo sapiens
  MAP TO CHR14.3; EXPRESSED IN BRAIN, SIGNAL = 1.2; EST_HUMAN HIT: AW294986.1, EVALUE 8.50e-02; SWISSPROT HIT: Q61555, EVALUE 1.40e-01
agctccattgcttcttctacaatgagatactggtgctcagcagataacccatcagagggtgctgaggatgagagcagcggtggagtccatggagcctgcagcacctggtggagcactacaagttctccacccccatcctgtggcagacacggcatccagcagtgcagtactactacctgccagggaccacagtgctcagagtctcacagcaccacctgtcaaagtggatggggctggactgcaaccacgtg

SEQ ID NO: 24543 - DNA, 282 bp, Homo sapiens
  MAP TO CHR18.3; EXPRESSED IN BRAIN, SIGNAL = 1.3; NT HIT: gi4885660, EVALUE 0.00e+00; SWISSPROT HIT: P07947, EVALUE 2.00e-36; EST_HUMAN HIT: BI861691.1, EVALUE 0.00e+00
tagatttgataatgggctgcattaaaagtaaagaaaacaaaagtccagccattaaatacagacctgaaaatactccagagcctgtcagtacaagtgtgagccattatggagcagaacccactacagtgtcaccatgtccgtcatcttcagcaaagggaacagcagttaatttcagcagtctttccatgacaccatttggaggatcctcaggggtaacgccttttggaggtgcatcttcctcattttcagtggtgccaagttcatatcctgctggtttaacag

SEQ ID NO: 24544 - DNA, 482 bp, Homo sapiens
  MAP TO AC002400.1; EXPRESSED IN FETAL LIVER, SIGNAL =   2; EXPRESSED IN HELA, SIGNAL = 0.58; NT HIT: X64557.1, EVALUE 1.00e-09; EST_HUMAN HIT: BG337213.1, EVALUE 0.00e+00; SWISSPROT HIT: O51345, EVALUE 6.00e-37; EST_HUMAN HIT: BE794758.1, EVALUE 0.00e+00
ccccatcaggtatgacaatcggtgcaggaacatgagccaggagcaggtggcccagaagctggccaaggaccccaagcctgcgatccgcttccgcctggagcaggtggtgccagccttccaggacctggtctatggctggaataggcatgaagtggccagcgtggagggagacccagtcatcatgaagagcgacggcttccccacataccacctggcctgcgtggtggacgaccaccacatgggcatcagccacgtgctgcgaggctctgagtggctcgtctccactgccaagcacctgctcctctaccaggccctgggctggcagccaccccacttcgcccacctgcccctgctcctcaacagggatggcagcaagctctccaagaggcaaggggacgttttcctggagcactttgctgctgatggcttcctgcccgattccttgttggacatcatcaccaactgtggctcaggttttgcag

SEQ ID NO: 24545 - DNA, 595 bp, Homo sapiens
  MAP TO AP000111.1; EXPRESSED IN HELA, SIGNAL = 1.3; EXPRESSED IN FETAL LIVER, SIGNAL =   1; NT HIT: U00690.1, EVALUE 2.40e-02; SWISSPROT HIT: P35168, EVALUE 4.00e+00; EST_HUMAN HIT: AW301637.1, EVALUE 2.00e-09
caaatgttaaaagaaaatgggcattttataatttgtgaaatattagtgagttagagcagagcttgacggcactggccctgagggtccttcttcttcctttggaagaatgaaactgggggctatgcaattcagggaagaataaaggaaaaacaggtaattggcagaggaggttggctgacttagaggtatggaaaagacaaaacaaaggagggaaaaagagaggtatgtatgatggggaggagttcagagccactgaaaattttctctggccctaacaggaaaacgagttaccccacaagccagggttttatcatctggtacgtggagatatccatcagcattgtcattggttttcatttgtttgtttttaattctcaagtttaaaaaaaaatttaaaatttaaatgtgtctcaaccaccagaaactatagtgagatttctctgtaataaataggaaagaaggagactgatccagtccttgttaaaaaaaaaaaaaagaggaaactgaatcacaacatactttgcttttttcttttctcacaaaggaacagtgggccctttatgctgggtgaaggtgagtgagatgggggaaggtt

SEQ ID NO: 24546 - DNA, 598 bp, Homo sapiens
  MAP TO AC007106.6; EXPRESSED IN FETAL LIVER, SIGNAL = 0.96; NT HIT: AL163246.2, EVALUE 0.00e+00; EST_HUMAN HIT: AW991957.1, EVALUE 0.00e+00; SWISSPROT HIT: P14077, EVALUE 3.00e-07
ccaaatataaaaacccagcccagttcatggcccatttggcgcaacccttagattctttacagctatagaccctgaagggtcagaaggccgtctcattctaaatatgcattttatcacccagtcagctcctgacattagaaataaagctccaaaaatcaaattccggccctcaaaccccacaacaggacttaattaacctcaccttcaaggtgtacaataatagagtagaggcagccaagtagcgatgtatttctgagttgcaattccttgcctccactgtgagacaaaccccagacacatctccagcataaaagagcttctgaacccctgaaatgcagcggccaggcattcctccaggaccgcctaccccaggatcttgcttcaagtgctggaaatctggccactgggccaaggaatgcccgcagcccgggattcctcctaagccgtgtcgcatctgtgggggacctcactgaaaatcggactgttcaactcacctggcagccacttccagagcccctggaactctggcccaaggctctctgactgactccttcccagattttctcggcttagccactgaagactgatgctgcccaat

SEQ ID NO: 24547 - DNA, 522 bp, Homo sapiens
  MAP TO AC004493.1; EXPRESSED IN FETAL LIVER, SIGNAL =   5; EXPRESSED IN PLACENTA, SIGNAL = 5.3; NT HIT: gi14777912, EVALUE 0.00e+00; SWISSPROT HIT: P26371, EVALUE 6.00e-05; EST_HUMAN HIT: BF984399.1, EVALUE 0.00e+00
aggttctgccactgacacgctcgtaggcagaaaggggcaccctggggctggtgaggtttgcaccagacaatgctggagccatcctagcactggtgaggctcgcgggggccaaggctgcggcggttctggagccggcaatattcacaggagctgtggcatgtgcagaccgaggacccaccaggtttgcagaggctggagcctgtggtgttctggagctggagggatagtttgcagcagttggtggtgtgccagagcctgtgagactcagagctgccaaggcagctggggttctggcccctgctaggttcacagctggggctgtgggagtgcgagggtcagccaggttcacagccgaaggtgccaccgctgttctggggctggccaagttcatggccgctgctgcagctggcgttcgagagtcagccaggttcactgctgttggaatggcaggtgtcctggcgctggctaggttcatggctgccgcagaggctgcaggaatcctgctggcaaggttggctgctg

SEQ ID NO: 24548 - DNA, 226 bp, Homo sapiens
  MAP TO AC000072.2; EXPRESSED IN FETAL LIVER, SIGNAL = 0.35; EXPRESSED IN PLACENTA, SIGNAL = 0.59; SWISSPROT HIT: P53675, EVALUE 1.00e-39; NT HIT: L77569.1, EVALUE 1.00e-124; EST_HUMAN HIT: BE745822.1, EVALUE 1.00e-123
ctaccttgctcaggtactccctcatcacctggatgaagtagggcatggccaagtccacgaggttgtgcctccaggccagctcaagcaccatgtctgggcgaagcaggtcatagcaggtgaagagacaagctgcgaagcactccctcttgccttcctccaggaaccactgcagcaacttctgggccagctcagcatcccgcgactctgcagcatgctgcatggcatc

SEQ ID NO: 24549 - DNA, 270 bp, Homo sapiens
  MAP TO AC008554.6; EXPRESSED IN FETAL LIVER, SIGNAL = 1.2; EXPRESSED IN LUNG, SIGNAL = 0.64; EXPRESSED IN HELA, SIGNAL = 0.65; EST_HUMAN HIT: BI825292.1, EVALUE 3.00e-51; NT HIT: AJ271736.1, EVALUE 3.00e-96; SWISSPROT HIT: P26808, EVALUE 2.00e-11
cttcactgagttctagagctcgagttaaagcagtgagctcagccttctgggctgaagtgccctgtggcaatggtttggtttcaatgacagcatccaaagttaccaccgcatattctgcacatctttctccttgtgggttgatgaagctactcccgtccaaatataactccaagtctactgatgcccatggctggtccctaaggtcaggtctgctagaataaactgagtccaacacctctacacagttatgctcgactgggctctctgata

SEQ ID NO: 24550 - DNA, 80 bp, Homo sapiens
  MAP TO AC022143.6; EXPRESSED IN PLACENTA, SIGNAL = 1.7; EXPRESSED IN HEART, SIGNAL = 2.7; EXPRESSED IN FETAL LIVER, SIGNAL = 2.1; NT HIT: M32788.1, EVALUE 1.00e-06; EST_HUMAN HIT: AA805982.1, EVALUE 1.40e+00
ctcctcctgccatggccacaatcaggaggcaatagatggggacgccacaggagatgtagttgaggaggcaaggggagatt

SEQ ID NO: 24551 - DNA, 135 bp, Homo sapiens
  MAP TO AC024568.2; EXPRESSED IN LUNG, SIGNAL = 1.4; EXPRESSED IN PLACENTA, SIGNAL = 0.61; EXPRESSED IN FETAL LIVER, SIGNAL = 0.46; EST_HUMAN HIT: R22782.1, EVALUE 6.70e-01; NT HIT: gi15920163, EVALUE 4.50e-01; SWISSPROT HIT: P18616, EVALUE 4.50e+00
ggatttttccgaaggggcaataaaataaaatgggtgaaacaaagccataagccagttaagtctgaaagacatgtcatctcatctaaaaggaagaaacggaccatttccatgcctagggctgacagcaacgcctga

SEQ ID NO: 24552 - DNA, 348 bp, Homo sapiens
  MAP TO AC016629.5; EXPRESSED IN PLACENTA, SIGNAL = 2.1; EXPRESSED IN HEART, SIGNAL = 1.8; EXPRESSED IN LUNG, SIGNAL = 2.8; EXPRESSED IN FETAL LIVER, SIGNAL = 1.9; NT HIT: gi14755652, EVALUE 0.00e+00; EST_HUMAN HIT: AL526562.1, EVALUE 0.00e+00; SWISSPROT HIT: Q05999, EVALUE 6.90e-01
ctaggcgccctcgccctgctcctgcttgcggttctcgaacgggctgtgggctttctcccgaatgagcaccacactgaggggcatgttgcgctggctctggtcctccatccgcatgctcagcagctgctccatgttctccatcaccaggctgcggccacgcgtcaacttggtggccgcctgcagtgtggcctcctgggaactcgcccagatcttttccttgttgtcacgaatggtggccaaggtggagttggacagccccagcgccttcccgattctactgagcttctctccggcttcaaagcgccacagcgcctcgagcttcacctgtaggttgatggccttgcgatc

SEQ ID NO: 24553 - DNA, 176 bp, Homo sapiens
  MAP TO AC004792.1; EXPRESSED IN PLACENTA, SIGNAL = 5.1; EXPRESSED IN HEART, SIGNAL = 1.7; EXPRESSED IN FETAL LIVER, SIGNAL = 5.5; NT HIT: AL163227.2, EVALUE 3.00e-43; EST_HUMAN HIT: AA099964.1, EVALUE 6.00e-45; SWISSPROT HIT: O14901, EVALUE 1.70e-01
ctgctctagccatgactaaaaagggccaagacacagcttggcccatggcttcagagagtacaagtcccaagccttggcagcttccacgtagtgttgagcctgcgggtgcacagaagtcaagaattgaggtttgggaacctccacctagatttcagaggatgtacggaaacacctga

SEQ ID NO: 24554 - DNA, 183 bp, Homo sapiens
  MAP TO AC011904.3; EXPRESSED IN LUNG, SIGNAL = 1.3; EXPRESSED IN FETAL LIVER, SIGNAL = 1.1; EXPRESSED IN PLACENTA, SIGNAL = 1.4; SWISSPROT HIT: P12577, EVALUE 5.00e-01; NT HIT: gi13937343, EVALUE 9.00e-99; EST_HUMAN HIT: AI807476.1, EVALUE 1.00e-98
atccaagatgctcaacaaaccctgagtatgagaaatatgaagaaaaatatgccaaggctcatcataacttgctggaaaccagtgttaaaaagaaaatcttaaatgcaaccaggggagaggatagttacttgcagtggaacaaagacgaagttgacattacacttctcattggaaacaatgcca

SEQ ID NO: 24555 - DNA, 448 bp, Homo sapiens
  MAP TO AF274858.1; EXPRESSED IN FETAL LIVER, SIGNAL =   7; EXPRESSED IN LUNG, SIGNAL = 4.9; NT HIT: gi16160081, EVALUE 1.00e-122; EST_HUMAN HIT: BG389320.1, EVALUE 1.00e-124
ttccgaggcagcaggaagagatgcggcccctggatgtcgccgagctgtcagaaccggaggaagtggaggtgctggagctggaggggggttttgagcagtttctgctcccggtcatccatgagatgccagaggacatcgcgtcgctgacaagcactggcgggcgtacctgtggaagcggagcacgctgtgggagatggacaatatgctcttccagatcaaaacccaggtggaggcttcggaggagcatcctcaaccgcctccacaacccgggcgacgcagtggagggcagggtgaccaagaggtgccagaaggccgaggagaaggccaaggaaatggtgaagatggcagagatgctggtggagctggcccagaggatagagacgaacgagtcgagagcacggtcggtggtttacagccaatggattctggtaaactggtggagattggc

SEQ ID NO: 24556 - DNA, 386 bp, Homo sapiens
  MAP TO AC004197.1; EXPRESSED IN HELA, SIGNAL = 1.8; EXPRESSED IN FETAL LIVER, SIGNAL = 2.1; EXPRESSED IN PLACENTA, SIGNAL = 2.6; EXPRESSED IN HEART, SIGNAL = 1.5; SWISSPROT HIT: P04929, EVALUE 8.00e-03; NT HIT: AF183424.1, EVALUE 3.60e-01; EST_HUMAN HIT: BF910372.1, EVALUE 5.30e-01
cagacaaaaactcagtcctactgacaatccaacagcagccacaactgcagccagggaaatgaggatgatagcccagggctgtaaatatccacttggtttgatcacgtttgtgggtgtgtggctcatgctaactgtgtttgtgcccatggacaccgggcctgtttcctggaaggtgctgctggttggctcacgggtggatcctgtggtggtcctgacgccgtgggctgaggtggtagatgatgctcccatagtggatgtacccaggccagaggtgtttaagactattcctggcacagtatggctggcagcagaggccgtgaagtccattccaggggccatggtgacagagctggaggcagtgagtctggttccagtggttctggtgc

SEQ ID NO: 24557 - DNA, 359 bp, Homo sapiens
  MAP TO AC004206.1; EXPRESSED IN FETAL LIVER, SIGNAL = 1.3; EXPRESSED IN PLACENTA, SIGNAL = 1.5; NT HIT: gi13645239, EVALUE 0.00e+00; SWISSPROT HIT: P42558, EVALUE 3.00e-56; EST_HUMAN HIT: AV655821.1, EVALUE 0.00e+00
cagatctctatgccagttaggcacattcttgtaagtaactctcgatgttacatcaaacactatgatggtactctgggcttggatataatagccatctctcagtccactgaatttctccaggccggctgtgtcccatacattgaacttaacaggtcctctgttggtatggaacactaggggatgaacctcaacacccaaggtggctacatacttcttctcaaattcaccagtcaaatgatgtttcacgaaagtcgtttttccagtaccaccatcaccaaccaatacaagtttgaactggacctggggctgtccctgcgcagccattgcggtgttccttccagaagcgtctccatgcccgt

SEQ ID NO: 24558 - DNA, 235 bp, Homo sapiens
  MAP TO AC004211.1; EXPRESSED IN PLACENTA, SIGNAL = 1.8; EXPRESSED IN HEART, SIGNAL = 1.6; EXPRESSED IN HELA, SIGNAL = 2.1; EXPRESSED IN FETAL LIVER, SIGNAL = 2.1; NT HIT: gi14782099, EVALUE 1.00e-129; EST_HUMAN HIT: BF345815.1, EVALUE 1.00e-129; SWISSPROT HIT: Q08345, EVALUE 1.00e-41
catgaggatgcactcccaggccatccagcggatgggcagcactgcccggccctgcacacggtaatagtccccagcatagaggttccggctcatgccaaagtctgcgattttgatggtgaaattttccccaactaggcagttccgcgtggccaggtcccgatgtacaaagttgagtgtggccagatagcgcatgccggaggcgatctgggctgccacatgcagcagcattgggtag

SEQ ID NO: 24559 - DNA, 105 bp, Homo sapiens
  MAP TO AC008886.4; EXPRESSED IN LUNG, SIGNAL = 0.54; EXPRESSED IN HELA, SIGNAL = 0.62; EXPRESSED IN HEART, SIGNAL = 1.3; EXPRESSED IN FETAL LIVER, SIGNAL = 0.6; EST_HUMAN HIT: BF945993.1, EVALUE 5.00e-01; NT HIT: AF217796.1, EVALUE 5.20e+00
tcacagcagcagcagcagcagcagtcttggctgttgccacagccacagggggactgtggaggagcggccctcggcaatgtatggcttggtgtccttactcagcat

SEQ ID NO: 24560 - DNA, 97 bp, Homo sapiens
  MAP TO AC004517.1; EXPRESSED IN HELA, SIGNAL = 2.2; EXPRESSED IN FETAL LIVER, SIGNAL = 3.5; NT HIT: AF261020.1, EVALUE 3.00e-01; EST_HUMAN HIT: H14014.1, EVALUE 7.00e-31
ttggaagccacgaccaattcgaaaagtccagatgtggagttggacgcaacccttggaccgtgcggtctggggaggccagtggcccgtcatccaacag

SEQ ID NO: 24561 - DNA, 267 bp, Homo sapiens
  MAP TO AC004530.1; EXPRESSED IN FETAL LIVER, SIGNAL =   4; SWISSPROT HIT: O15260, EVALUE 2.00e-35; NT HIT: AF078866.1, EVALUE 0.00e+00; EST_HUMAN HIT: AL550311.1, EVALUE 0.00e+00
ttaccactccttcttcttctcatccatggagacacccccagggcccagggccaccaccaggagcaagcccccaatcaccgacatggtctggaagaagtcgtatttcaggaagtcatgcatgggcttgtagactggaatggtccagaaggcgttgaaatatacgttgatggcaaagagccacacaacaagagtcaaagcagccagcttggttttaaaaccaatggccactaaaatcatcagagctgtgcccacgatgttctggacaat

SEQ ID NO: 24562 - DNA, 215 bp, Homo sapiens
  MAP TO AF241734.1; EXPRESSED IN FETAL LIVER, SIGNAL = 1.3; EXPRESSED IN PLACENTA, SIGNAL = 1.7; EXPRESSED IN HEART, SIGNAL = 2.3; SWISSPROT HIT: Q50925, EVALUE 6.70e-02; EST_HUMAN HIT: BE728890.1, EVALUE 4.40e+00; NT HIT: gi14736238, EVALUE 1.90e-01
gacattctctgaaggaggatggggccagcttcatgttccccagctcaggaaccttcagcagtgatgagtcgagggtccctctgcctcccttttgcagtctaggcatgtgggaaggtgtcgagagccacctgctgctctcaacacagccaaagctggccatgaccaaaccctggaaaggggtgtggaagctgcttcagattcaccaaagcacctag

SEQ ID NO: 24563 - DNA, 255 bp, Homo sapiens
  MAP TO AB000878.1; EXPRESSED IN FETAL LIVER, SIGNAL = 1.3; EXPRESSED IN HELA, SIGNAL = 0.85; SWISSPROT HIT: P14430, EVALUE 2.00e-03; NT HIT: AB003602.1, EVALUE 0.00e+00; EST_HUMAN HIT: BE910286.1, EVALUE 0.00e+00
ctcctttctggtccttgatatgagtcagggtcctcctgaggtcttgcccattctctgtcaagtcctcggtctctgtgtcccaggtctcagctcccaggacatcttctgcccactgtccctggggctttgccctgcgtttctgcctgtcatagcgcaggaagggctgaccatccagatgtccctcagcgagaaaccctgactgcacagatccatcctgggacagcaccatgaggttgtaacgaagactgtggggct

SEQ ID NO: 24564 - DNA, 117 bp, Homo sapiens
  MAP TO AL109910.27; EXPRESSED IN LUNG, SIGNAL = 0.46; EXPRESSED IN PLACENTA, SIGNAL = 0.67; EXPRESSED IN HELA, SIGNAL = 0.56; EXPRESSED IN FETAL LIVER, SIGNAL = 0.81; SWISSPROT HIT: Q9WVS8, EVALUE 2.40e-01; NT HIT: gi16163979, EVALUE 6.00e+00
ggccagggccgcacgcagggctgtgttgtccgcttcctgggacggtcccctgcgtccagcacactcacggccagggccgcacgcagggctgtgttgtccgcttcctgggacggtccc

SEQ ID NO: 24565 - DNA, 104 bp, Homo sapiens
  MAP TO AC016027.15; EXPRESSED IN FETAL LIVER, SIGNAL = 0.43; SWISSPROT HIT: P10589, EVALUE 6.10e+00; NT HIT: gi8923624, EVALUE 6.00e-52; EST_HUMAN HIT: BG910944.1, EVALUE 9.00e-52
cttccccttcctccctgcacttcctctacaagctggcccagctcttccgctggatccggaaggctgcattttctcgcctctaccagctccgcatccgtgactga

SEQ ID NO: 24566 - DNA, 329 bp, Homo sapiens
  MAP TO AC025457.3; EXPRESSED IN PLACENTA, SIGNAL = 1.4; EXPRESSED IN LUNG, SIGNAL = 1.1; EXPRESSED IN HELA, SIGNAL = 2.3; EXPRESSED IN FETAL LIVER, SIGNAL = 1.7; EST_HUMAN HIT: AL523444.1, EVALUE 0.00e+00; SWISSPROT HIT: P03888, EVALUE 2.10e-01; NT HIT: gi11968034, EVALUE 0.00e+00
tcaatacgaactccatgttttgaagacatcatttgtctggttcctgttaaatacataacgaatgaacagatgtgaggtaaagatgatgtgattattacataaagccagaatggcaaaggagaagtttttccaaatgggcatatccacaaaccatgacgaatcccatctcggatatgatgtgaagtccaggatataaataacatccagggaagaaagcaccatgagtctttgagcttgaaaaggtgcatagtaaatttcagggtcagaaccacaacgggaatcacagtagaacagtgaaggaaaggtcttcgcgggagagtcaaagcagc

SEQ ID NO: 24567 - DNA, 116 bp, Homo sapiens
  MAP TO AC000034.2; EXPRESSED IN HELA, SIGNAL = 0.78; EXPRESSED IN FETAL LIVER, SIGNAL = 1.6; EST_HUMAN HIT: AA487212.1, EVALUE 3.00e-21; NT HIT: AJ289880.1, EVALUE 3.00e-05
gctgtacaggaagcagagcggcatcagcttctggggagccctcagggaacttccaattgtggcagaaggaaaaggggaagcgggcttgtcttacgtggctggagcaggaggagggg

SEQ ID NO: 24568 - DNA, 414 bp, Homo sapiens
  MAP TO AL121886.22; EXPRESSED IN LUNG, SIGNAL = 1.5; EXPRESSED IN FETAL LIVER, SIGNAL = 3.2; EST_HUMAN HIT: BF237737.1, EVALUE 0.00e+00; SWISSPROT HIT: P10244, EVALUE 2.00e-75; NT HIT: gi14770912, EVALUE 0.00e+00
gaccctgatgcttggtgtgacctgagtaaatttgacctccctgaggaaccatctgcagaggacagtatcaacaacagcctagtgcagctgcaagcgtcacatcagcagcaagtcctgccaccccgccagccttccgccctggtgcccagtgtgaccgagtaccgcctggatggccacaccatctcagacctgagccggagcagccggggcgagctgatccccatctcccccagcactgaagtcgggggctctggcattggcacaccgccctctgtgctcaagcggcagaggaagaggcgtgtggctctgtcccctgtcactgagaatagcaccagtctgtccttcctggattcctgtaacagcctcacgcccaagagcacacctgttaagaccctgcccttctcgccctcccag

SEQ ID NO: 24569 - DNA, 204 bp, Homo sapiens
  MAP TO AC020945.6; EXPRESSED IN PLACENTA, SIGNAL = 0.69; EXPRESSED IN FETAL LIVER, SIGNAL = 0.71; EST_HUMAN HIT: BG673948.1, EVALUE 1.00e-108; SWISSPROT HIT: P17105, EVALUE 7.00e-22; NT HIT: D38169.1, EVALUE 1.00e-111
tcagctctgtgccagcccctgcaggaggcagatcatgttgtccaggccccagaggtagccgtcctcacggttgccctcagcccagggcagcctgtggctgagcgtctggtggtcgggcaaggccaccgtcttgccgaagtctatcatccagaccttggccaggccggtgtggtcgtgcacgaagaggagggagctgcctaccac

SEQ ID NO: 24570 - DNA, 380 bp, Homo sapiens
  MAP TO AL078642.12; EXPRESSED IN LUNG, SIGNAL = 2.9; EXPRESSED IN FETAL LIVER, SIGNAL =   3; SWISSPROT HIT: Q9JL04, EVALUE 4.70e-01; EST_HUMAN HIT: BE174107.1, EVALUE 1.30e-01; NT HIT: AF003530.2, EVALUE 1.40e+00
ttaatcccgccgtagcctcagtttccctaccagtaaaatcaaggaattggtccaggtggttgccaaggtctggaaatctttgttctgtgtgtagttgggagtcccagaaggttttgggcagggattggaatgatcagagctgtgctttggggaggttaatcgggcttctggtgctttgtgattatcctgctgtagggctggaagtgacgtgggggtgacactttgaaattcagcagcaggtgaattagctgtgctctgagctgtggctgtttggaactccctcatgccgtttctgggtctggtggcagcttctgctcccctgccgctgcctcctcctgcctgctcgttccctggcaccagcgctggcttctctgcacccc

SEQ ID NO: 24571 - DNA, 393 bp, Homo sapiens
  MAP TO AL096791.12; EXPRESSED IN FETAL LIVER, SIGNAL = 1.6; EXPRESSED IN PLACENTA, SIGNAL = 1.5; NT HIT: gi14150083, EVALUE 0.00e+00; SWISSPROT HIT: P17053, EVALUE 6.30e-01; EST_HUMAN HIT: BI552553.1, EVALUE 0.00e+00
tcaagtgtaggagagtaagttcaggtcataacagccatctacatcaaagtggcctatcctcgcggaggtgtgactggcccggatcatctctgtcagtgcccacatctgctgcacctcagaggataccctgctggggtctgggagaccctcatggaggagtgcaggttgctcacagggcactgggtgggagagccacttggggaagatcatggaggggctctttggtccctgctgatagatctgcagctcctccactgtgaaagacagccacagtggtgatggctgctgcagaatcaggtgtagctccgatattctggccatgtcacacagtatctgttgcttgaacagcgacacatactcctgggctccctcctcactgtgtgggtcgggcat

SEQ ID NO: 24572 - DNA, 212 bp, Homo sapiens
  MAP TO AC008537.4; EXPRESSED IN PLACENTA, SIGNAL = 0.81; EXPRESSED IN HEART, SIGNAL = 1.1; EXPRESSED IN HELA, SIGNAL = 0.77; EXPRESSED IN FETAL LIVER, SIGNAL = 0.99; SWISSPROT HIT: P20853, EVALUE 5.00e-19; EST_HUMAN HIT: AV650322.1, EVALUE 3.00e-69; NT HIT: gi14277708, EVALUE 1.00e-116
cctgtgccacccatcttcctgccttgggacaccttcatgatggagtcacatatgtgctctgtgttcagctggaggtagtttccaatgaagggcagtggggtgggtcccggaggcagcttccccctgctcttcctctgctgccagacagacatcaagaccatcacagtcaggcaggccagcaaggccaccagaagcagccctgaggccagcat

SEQ ID NO: 24573 - DNA, 281 bp, Homo sapiens
  MAP TO AF196971.1; EXPRESSED IN HEART, SIGNAL = 2.5; EXPRESSED IN FETAL LIVER, SIGNAL = 3.7; EXPRESSED IN HELA, SIGNAL = 2.8; EST_HUMAN HIT: BI223868.1, EVALUE 6.00e-77; SWISSPROT HIT: O14525, EVALUE 7.00e+00; NT HIT: AJ271736.1, EVALUE 1.00e-100
atgatcaagggcgagtagttgaagacatagttagaaatatgacaaaattggcacatgtgcccgtgcaaatgtggcatggatttgatcctggggccatgtttggaaaatggttcccagcactggaaagatttaaaactcttataatgggagttataatagtaatagaaacctgcttactgctcccttgtttactatctgtacttcttcaaacgataaggagcttcatcgctaccttagttcaccaaaatgcttcagcacaggtatgctatatgaatcactat

SEQ ID NO: 24574 - DNA, 248 bp, Homo sapiens
  MAP TO AF176815.1; EXPRESSED IN FETAL LIVER, SIGNAL = 2.4; EXPRESSED IN PLACENTA, SIGNAL = 1.7; EXPRESSED IN HEART, SIGNAL = 1.9; SWISSPROT HIT: O15527, EVALUE 1.00e-45; EST_HUMAN HIT: AL544748.1, EVALUE 0.00e+00; NT HIT: gi13643851, EVALUE 0.00e+00
gtggagggagcaaagtcctgcacactggagtggtgtactagcggatcaagtatggacactgactcagactgaggagcagctccactgcactgtgtaccgaggagacaagagccaggctagcaggcccacaccagacgagctggaggccgtgcgcaagtacttccagctagatgttaccctggctcaactgtatcaccactggggttccgtggactcccacttccaagaggtggctcagaaattccaag

SEQ ID NO: 24575 - DNA, 273 bp, Homo sapiens
  MAP TO AL109981.1; EXPRESSED IN FETAL LIVER, SIGNAL = 0.95; EXPRESSED IN PLACENTA, SIGNAL = 0.85; EXPRESSED IN HEART, SIGNAL = 7.2; EST_HUMAN HIT: AA897360.1, EVALUE 2.40e-02; NT HIT: M26061.1, EVALUE 1.60e-02; SWISSPROT HIT: P81274, EVALUE 5.00e-05
actccctcgagcccacttatcagcagcttcagaaaatgaaactggacaagagtccctttgtggtcgtgtctgtggttgggcaggaactcctgacagctggccatcatggggcctctgtggttgtcttagaagccgcactgaagattggcacctgcagcctcaaactgagaggttctgttttctctgccctgagcagtgcttactggtctcttggaaatacagagaagagcaccggatatatgcagcaggacttggatgtagccaagaccttag

SEQ ID NO: 24576 - DNA, 155 bp, Homo sapiens
  MAP TO AL121902.13; EXPRESSED IN FETAL LIVER, SIGNAL = 0.7; EXPRESSED IN HELA, SIGNAL = 0.68; EST_HUMAN HIT: AV721065.1, EVALUE 1.30e-02; NT HIT: AF207550.1, EVALUE 1.00e-07
atgaaatacctgaccattaccgctgacaactctcaaggcaaccaaaaacaagaaaaatctgagaaacagtcacagccaggaggagcctatggagacatgatgactcagtgtaatgtgggaaccaggatgggagcctggaacagaaaaaaaatcag

SEQ ID NO: 24577 - DNA, 237 bp, Homo sapiens
  MAP TO AL109827.8; EXPRESSED IN LUNG, SIGNAL = 2.5; EXPRESSED IN FETAL LIVER, SIGNAL =   2; EXPRESSED IN PLACENTA, SIGNAL = 2.4; NT HIT: AF314092.1, EVALUE 0.00e+00; SWISSPROT HIT: Q99829, EVALUE 3.00e-39; EST_HUMAN HIT: BG032844.1, EVALUE 1.00e-130
attctggaaccggcggtagggtacaaactgcacaatgtcgcgggcagcagcctgcccagaacgtgtatgcaggggtccaccatcagcgtccagctgctccatggcctcaaagtcagcaccacccacacccacaatgatcactgacatgggcaggttcgaggcacgcaccacagcctcacgtgtggcttccacatccgtcacagcaccatcagtcagcagcaacagcatgaagtattg

SEQ ID NO: 24578 - DNA, 435 bp, Homo sapiens
  MAP TO AC004798.1; EXPRESSED IN PLACENTA, SIGNAL = 2.1; EXPRESSED IN HEART, SIGNAL = 1.4; EXPRESSED IN FETAL LIVER, SIGNAL = 2.2; NT HIT: gi13633366, EVALUE 0.00e+00; SWISSPROT HIT: O60885, EVALUE 1.00e-41; EST_HUMAN HIT: AW268959.1, EVALUE 0.00e+00
cttgattgtgctcatgtccatggggtgcttgatgatgtcacagtagtcgtgtaggcccagtgcctccacgtccacaggcttgtagaagggccaggcgtaggcggcgtgcttcttggcaaacatctccttgaggatgccgctgcagcacttgagctgctccgagaccttgctgctcttctctggtgctgggtgctgctgagagtcgggcacgtccttctttggaggtttcacaggccggctgctctcccgccgctggcccagcttggtggtcttgggctccgggggcagcgagggtggctcgtgaatggggtcaatggtggtgggggtggtggtgtctgctttcctcttcactcccttctttgtctgccaagaacacggacgccaacaggcacagtcagaagtggcagccggcacagctgccctcagggtcacccc

SEQ ID NO: 24579 - DNA, 284 bp, Homo sapiens
  MAP TO AC011604.10; EXPRESSED IN PLACENTA, SIGNAL =   3; EXPRESSED IN HEART, SIGNAL = 3.3; EXPRESSED IN FETAL LIVER, SIGNAL = 5.9; EST_HUMAN HIT: BF815912.1, EVALUE 1.00e-127; SWISSPROT HIT: P03356, EVALUE 4.80e-01; NT HIT: AL163213.2, EVALUE 1.00e-117
atttctacgatggaaaggaaatgaaaggttctaagaggcgggctagtggcttgtactatagcatagcctgcctttgctggtgtgtggtgattaggcctggtggaactgccatcaataaatcaagcgtgatcagggtgagaaacagggacgaaggaaatgtggggaaatgggatgaacatcaggtggatcagagagatgcagtcatgagggtcaggtgtggtgtctggaataatgtgggaggctggattgaagtccgggccaggaacaatggtaattgtgggact

SEQ ID NO: 24580 - DNA, 399 bp, Homo sapiens
  MAP TO AC026722.3; EXPRESSED IN PLACENTA, SIGNAL = 1.1; EXPRESSED IN LUNG, SIGNAL = 1.1; EXPRESSED IN FETAL LIVER, SIGNAL = 1.5; NT HIT: AL163209.2, EVALUE 2.00e-92; EST_HUMAN HIT: BG008447.1, EVALUE 3.00e-64; SWISSPROT HIT: P26810, EVALUE 6.00e-10
aagacagatggatcttggaaaatgacagcagattatcgtaagcttaaccaagtggtgactccagttgcagttgctgtagatgtggtttcattctttgagcaaataaacacatctcctggtacctggtatgtagccattgacttggcaaatgccttattttccattcttaaccataaggcccaccagaagcaatttgtcttcagctggaaaggccagcaatatagctttactgtcctacctcatgggtatatcaactctccggctttgtgtcataatcttatttggagacaccttgatcacttttcgctcccacaagatatcacactggtccattacattgatgacattttgctgattggatccagtgagcaacaagtagcaaacacactggacttagtg

SEQ ID NO: 24581 - DNA, 94 bp, Homo sapiens
  MAP TO AF235093.1; EXPRESSED IN HELA, SIGNAL = 0.8; EXPRESSED IN PLACENTA, SIGNAL = 1.8; EXPRESSED IN FETAL LIVER, SIGNAL = 1.4; EST_HUMAN HIT: AW892013.1, EVALUE 4.30e-01; NT HIT: AL163210.2, EVALUE 5.00e-46
ttatagattatttgctgtatctaggatgatcatgatagtgaatattatgatgatgataaggaatatgacagtgatgatgaagatggtttttgct

SEQ ID NO: 24582 - DNA, 263 bp, Homo sapiens
  MAP TO AL121928.13; EXPRESSED IN HELA, SIGNAL = 0.73; EXPRESSED IN FETAL LIVER, SIGNAL = 0.92; EXPRESSED IN PLACENTA, SIGNAL = 0.85; EST_HUMAN HIT: BG290690.1, EVALUE 0.00e+00; NT HIT: gi14746319, EVALUE 0.00e+00; SWISSPROT HIT: P51531, EVALUE 1.20e+00
gtcatgacctcttccagcagtccctcataacccctgtggggagtgcccatccctggccagagcccccagctccagcccctgcacaggccccgacgctccgccagggctgcttctacctgctggtgctggtgcccatcacctgtgctctgctgcagctcttcacctggtcccagttcacgctgcatgggagacgcctgcacatggtcaaggcccagcgccagaacctgtcacaggcccaaaccctggatgttaagatggtgtga

SEQ ID NO: 24583 - DNA, 240 bp, Homo sapiens
  MAP TO AC008857.4; EXPRESSED IN FETAL LIVER, SIGNAL = 1.4; EXPRESSED IN LUNG, SIGNAL = 1.4; EXPRESSED IN HEART, SIGNAL = 1.8; SWISSPROT HIT: P10637, EVALUE 1.70e+00; EST_HUMAN HIT: BF571312.1, EVALUE 3.20e-01
aatgttctccagtccccagtccctgttaagctgggaaattcttactggttcaccaaaaatcaactcaaatagataccctcttgagggaaatcttccattcttctctctccttccccctgagttaagggccttctatatcctggcacctactgctgggcctctggagagagggccccagctcagtcctctcctggcccagcatagtgctcggtgtttggcagagcttgcttatatgaacag

SEQ ID NO: 24584 - DNA, 437 bp, Homo sapiens
  MAP TO AC003966.1; EXPRESSED IN FETAL LIVER, SIGNAL = 0.4; EXPRESSED IN PLACENTA, SIGNAL = 0.43; EST_HUMAN HIT: BE892768.1, EVALUE 0.00e+00; SWISSPROT HIT: O14978, EVALUE 1.00e-27; NT HIT: gi15296967, EVALUE 1.00e-10
atgatgatggtagatctgaaagtggctgcgtacttggaccctcagatcagggctttgtgggagaccaaggggcctgcaagagagagctccggtcagagtaaaaaatctcctcaaatggactgtctcgatcctaagagctcttgctggcacttccggaatttcacctatgatgaagcaggtggaccccgtgaggctgtcagcaaacttcaagaattatgtcatctatggctgaagccagagatccactcaaaagagcagatactggaactgctggtgctggagcagttcctgactattctgcccagggagacacagacccagatgcagaagcaccatccacagagcattgaggaggctgtggctctggtagaacacttgcagagggaatctggtcaaacatggaatggggtgagaagaaagattcctgacatgtacag

SEQ ID NO: 24585 - DNA, 221 bp, Homo sapiens
  MAP TO AC000076.2; EXPRESSED IN FETAL LIVER, SIGNAL = 1.4; EST_HUMAN HIT: BE870607.1, EVALUE 1.00e-121; SWISSPROT HIT: Q00269, EVALUE 2.80e-01; NT HIT: gi15317317, EVALUE 1.00e-121
cgccacaagtgccactagctgtgctcttctgctccatggtcgttcgcacacacacggtgtccccacagcagggccgctcaatccagggatccacaaggggggtgtatgccaccccaggagacgccttgtccatctgctgccatggatgtgcgttggcataattggcggctgcccagatgggaatgcgagggccctgctgacggcaccggccacgaggcatg

SEQ ID NO: 24586 - DNA, 115 bp, Homo sapiens
  MAP TO AC008408.5; EXPRESSED IN FETAL LIVER, SIGNAL = 3.7; EXPRESSED IN HELA, SIGNAL = 2.2; EXPRESSED IN HEART, SIGNAL = 2.3; EST_HUMAN HIT: BG166841.1, EVALUE 3.00e-58; NT HIT: AF316896.1, EVALUE 9.50e-02
aattgctgtgtgatgcgttacactactgctggtcagctttggaatataatttccccaagagaatttgttgatttctcctatactgtgggctataaagaagggcttttatcttgtg

SEQ ID NO: 24587 - DNA, 138 bp, Homo sapiens
  MAP TO AC002398.1; EXPRESSED IN FETAL LIVER, SIGNAL = 0.38; SWISSPROT HIT: P08672, EVALUE 1.80e-01; EST_HUMAN HIT: BI524193.1, EVALUE 2.00e-50; NT HIT: gi16177545, EVALUE 2.00e-52
ggccgttcctggccggttctccggagttacgatgactttcgttccctggatgcccacctccaccggtgcatatttgaccggaggttctcctgccttccggagcttcccccgccccccgagggtgccagggctgcccag

SEQ ID NO: 24588 - DNA, 118 bp, Homo sapiens
  MAP TO AL031007.1; EXPRESSED IN FETAL LIVER, SIGNAL = 1.5; NT HIT: AL163300.2, EVALUE 1.00e-10; SWISSPROT HIT: P27951, EVALUE 7.90e+00; EST_HUMAN HIT: AI828179.1, EVALUE 3.00e-15
atgaaaaaagaaggaaatgtgacacctccaaaggaacacgataattttccagcaacagattccaatgaaaaagaaatagttgaaaaagaattcaaaataatgatattaaagaagctcg

SEQ ID NO: 24589 - DNA, 126 bp, Homo sapiens
  MAP TO AB015355.1; EXPRESSED IN FETAL LIVER, SIGNAL =  11; EXPRESSED IN LUNG, SIGNAL = 0.71; SWISSPROT HIT: O54902, EVALUE 2.00e-19; NT HIT: gi10835168, EVALUE 6.00e-65; EST_HUMAN HIT: BE382817.1, EVALUE 9.00e-65
tactcttgttttagctttcgtaaactctgggctttcaccggaccaggttttcttatgagcattgcctacctggatccaggaaatattgaatccgatttgcagtctggagcagtggctggatttaag

SEQ ID NO: 24590 - DNA, 160 bp, Homo sapiens
  MAP TO AC011891.2; EXPRESSED IN PLACENTA, SIGNAL = 0.76; EXPRESSED IN FETAL LIVER, SIGNAL = 1.2; EXPRESSED IN HELA, SIGNAL = 0.73; NT HIT: M27906.1, EVALUE 5.50e-01; EST_HUMAN HIT: AA912714.1, EVALUE 8.10e-01; SWISSPROT HIT: O05190, EVALUE 1.10e+00
ttatatgcaaaatatgcgaaaggctcccaacctgagggctggaaaaaaacagggcaccaggcctataaggaatagttgtgtttcctgttgctcagtaactgtcctgaccatgaagagagatttcactgtgtctaattttttctggtcctctataggatga

SEQ ID NO: 24591 - DNA, 390 bp, Homo sapiens
  MAP TO AL109754.13; EXPRESSED IN PLACENTA, SIGNAL = 0.42; EXPRESSED IN FETAL LIVER, SIGNAL = 0.44; EST_HUMAN HIT: BI825767.1, EVALUE 0.00e+00; SWISSPROT HIT: Q99728, EVALUE 1.00e-05; NT HIT: gi9507136, EVALUE 5.00e-25
ctttagttttggtccagaaagcattttcaaggagctggtcaagcatggctttagcagataagagacttgagaacttacagatctacaaagttcttcaatgtgtgcggaacaaagacaagaagcagatagagaagctgaccaagcttggataccctgaactaatcaattatacagaacccattaatggacttagtgctttgcacttagcctcagtttccaatgatattgatatggtcagctttctccttgaccttggtgctcaccctgatgtgcaagaccgaatgggctgtactcccacaatgagggctgcagaactgggccatgaattgtcaatggaaatattagcaaaggcaaaggctgatatgactatagttgataatgaaggaaaag

SEQ ID NO: 24592 - DNA, 358 bp, Homo sapiens
  MAP TO AC002105.1; EXPRESSED IN HEART, SIGNAL = 0.94; EXPRESSED IN FETAL LIVER, SIGNAL = 0.65; EST_HUMAN HIT: BG108973.1, EVALUE 0.00e+00; NT HIT: gi15299700, EVALUE 0.00e+00; SWISSPROT HIT: Q15059, EVALUE 3.00e-47
acaggaggggcaggccaaggaggggagaggaacttcaagcaccacgctccacgcaggcaacttacagaacggtttcctttgctttttctgtaaacaagacttgacatatctctccagttcccgcaaagtggtgggtttcagagtctcaaagtcaatttctatctcatcggggttggagtccctgagcgagggctcccgagattggatgatgtgcactacccggcccagcttctccccgggcagccggttgatgtccaggctaagctggcgcttttcatcgtagctcatgggcaggccctcctcctcttcctctgagtcgtaggaggcagatgcctgcttgccgcctttcttcagctgt

SEQ ID NO: 24593 - DNA, 182 bp, Homo sapiens
  MAP TO AL109865.36; EXPRESSED IN FETAL LIVER, SIGNAL = 1.3; EXPRESSED IN PLACENTA, SIGNAL = 0.77; EST_HUMAN HIT: T69119.1, EVALUE 3.70e+00; SWISSPROT HIT: P20046, EVALUE 1.50e+00
tttcccaacttcctgcttgcctgtgtattcggttcttgctccagctctgggcatttggccactttggacaaatctcctgcccttttcagccagtcctggggtccctctatgtctgcatgaccctcaccccactctaccctaactgcaatggccagtgttcttgctgtgacctctcgagccat

SEQ ID NO: 24594 - DNA, 171 bp, Homo sapiens
  MAP TO AC022471.8; EXPRESSED IN HEART, SIGNAL = 2.7; EXPRESSED IN FETAL LIVER, SIGNAL = 3.3; EXPRESSED IN HELA, SIGNAL = 1.8; EXPRESSED IN PLACENTA, SIGNAL = 2.9; EXPRESSED IN LUNG, SIGNAL = 2.4; EST_HUMAN HIT: BE908464.1, EVALUE 1.40e-02; NT HIT: gi15925705, EVALUE 5.90e-01; SWISSPROT HIT: P16997, EVALUE 4.40e+00
ttattctacctctggttgatcttctgtgattgtaccaacagcactgagtttatgcactgccagataactgggctgaatcgtcaatgtggtgatcccgtgaacatactgctgttgatacacttctgcctcagctgtcagcttgcttactttagcagcagctctgttttccat

SEQ ID NO: 24595 - DNA, 156 bp, Homo sapiens
  MAP TO AC008050.4; EXPRESSED IN HEART, SIGNAL = 1.2; EXPRESSED IN LUNG, SIGNAL = 0.57; EXPRESSED IN FETAL LIVER, SIGNAL = 0.49; EXPRESSED IN PLACENTA, SIGNAL = 0.92; EST_HUMAN HIT: AU149732.1, EVALUE 7.90e-01; SWISSPROT HIT: Q91018, EVALUE 2.00e+00
ttttatacttttggtatgtttgttgatcacggtgatggtgattgctctcaacacaatgtctacttctcctcgacggtcaaggagggaaatagacagagcccagaggtggccagtcatggttcctcaagacctgccaagaagagtgcaggccaccag

SEQ ID NO: 24596 - DNA, 170 bp, Homo sapiens
  MAP TO AC022424.3; EXPRESSED IN PLACENTA, SIGNAL = 1.2; EXPRESSED IN HEART, SIGNAL = 0.93; EXPRESSED IN FETAL LIVER, SIGNAL =   1; NT HIT: U82671.3, EVALUE 5.90e-01; SWISSPROT HIT: P23081, EVALUE 7.50e+00
ctggtttccttcgcctggcaattgatctgtccctgagcctgtgtgcctctcccttgccctcccctttgccacggtgctggctgtgctcttattatcactctgccatgagctcccactgccatgagctcccacagaaacccttctggagaggaggaggactctttcttcat

SEQ ID NO: 24597 - DNA, 176 bp, Homo sapiens
  MAP TO AC002096.1; EXPRESSED IN FETAL LIVER, SIGNAL = 0.33; EXPRESSED IN PLACENTA, SIGNAL = 0.64; NT HIT: gi14738494, EVALUE 1.00e-94; SWISSPROT HIT: Q92574, EVALUE 2.00e-29; EST_HUMAN HIT: BE731805.1, EVALUE 2.00e-94
catagctattctgtgtgtcagcataagggctggtggtgacatcggctgaacgatgaggaaagcgggctgagatttggtgagacacagaatagccatcttcatatgaggcttctgtgggatccagagagattttggcacactcgatcacaacatcatgagtttctaatctcttccac

SEQ ID NO: 24598 - DNA, 150 bp, Homo sapiens
  MAP TO AC004200.1; EXPRESSED IN PLACENTA, SIGNAL = 1.3; EXPRESSED IN FETAL LIVER, SIGNAL = 0.72; EXPRESSED IN LUNG, SIGNAL = 0.89; SWISSPROT HIT: P30450, EVALUE 4.00e-05; EST_HUMAN HIT: AV709600.1, EVALUE 5.00e-05; NT HIT: AF055066.1, EVALUE 3.00e-67
ctgggcagtgcagcgtctccttcccattcttaaggactttgctgagccactccgcccaccttccctgcaggtaggtttcgagcagctctgcatgttcctccgccagggcatctgagccgccttgtccgctgcagtccaggagcgcagttc

SEQ ID NO: 24599 - DNA, 279 bp, Homo sapiens
  MAP TO AL109797.18; EXPRESSED IN FETAL LIVER, SIGNAL = 0.96; EXPRESSED IN LUNG, SIGNAL = 0.73; EXPRESSED IN PLACENTA, SIGNAL = 1.2; SWISSPROT HIT: Q93008, EVALUE 8.00e-39; EST_HUMAN HIT: BF846728.1, EVALUE 0.00e+00; NT HIT: gi14764088, EVALUE 0.00e+00
gtagtctatgccttgttaatgcctgctggtgcacctctggctgatgattcctctgattttcagtttcacttcttgaaaagtggtggcctaccccttgtactgagtatgctaaccagaaataacttcctaccgaatgcagatatggaaactcgaaggggtgcctacctcaatgctcttaaaatagccaagcttttgctaactgccattggctatggtcatgttcgagctgtggcagaagcttgtcagccaggtgtagaaggtgtgaatcccatgacacag

SEQ ID NO: 24600 - DNA, 190 bp, Homo sapiens
  MAP TO AC000028.1; EXPRESSED IN FETAL LIVER, SIGNAL = 3.5; EXPRESSED IN LUNG, SIGNAL = 1.9; SWISSPROT HIT: Q13438, EVALUE 2.00e-15; NT HIT: gi14758322, EVALUE 1.00e-103; EST_HUMAN HIT: AL556169.1, EVALUE 1.00e-103
acagagaaagagctggacccagatgggctgaagaaggagtcagagcgggatcgggcaatgctggctctcacatccactctcaacaaactcatcaaaagactggaggaaaaacagagtccagagctggtgaagaagcacaagaaaaagagggttgtccccaaaaagcctcccccatcaccccaacctacag

SEQ ID NO: 24601 - DNA, 402 bp, Homo sapiens
  MAP TO AC010328.4; EXPRESSED IN PLACENTA, SIGNAL = 1.1; EXPRESSED IN HEART, SIGNAL = 1.5; EXPRESSED IN FETAL LIVER, SIGNAL = 0.73; EST_HUMAN HIT: BE161730.1, EVALUE 0.00e+00; SWISSPROT HIT: P51522, EVALUE 2.00e-49; NT HIT: gi13649241, EVALUE 0.00e+00
atgaatgtggcaaggtttttaatcacaaatcaaaccttgcatgtcatcatagacttcatactggagagaaaccttacaagtgtaatgaatgtggcaaggtttttaattgaaaatcaaaccttgaacatcatcatagagttcatatcggagaaaaaccttacaaatgtgaagaatgtgacaaagttttcaatttcaattcacgccttgaaatacataggagagttcatactggagagaaaccatagaaatgtaaggtttgtgacaaggcattcgggtgtgattcacacctggcacaacatactagaattcacactggagagaaaccgtgcaagtgtgatgagtgtgacagagccttcagtggtcagtcaacacttattcaccatcaagcaatccatgtcatag

SEQ ID NO: 24602 - DNA, 259 bp, Homo sapiens
  MAP TO AL121896.10; EXPRESSED IN FETAL LIVER, SIGNAL = 0.58; EXPRESSED IN LUNG, SIGNAL = 0.85; EST_HUMAN HIT: BF772358.1, EVALUE 3.00e-85; SWISSPROT HIT: P21339, EVALUE 2.00e+00; NT HIT: X95508.1, EVALUE 9.40e-01
actggacctcatgtttcctatgcagaggtctcaagagaatgctggtgtggctggctgttgcatcactctcatctctcatctccaatctgtggccaaccgaaatcctcagacattgttcacaatgactgctatgaaaccacatcactctcaccctgtactcaggcagctgattatccaaagcccagtacataacgttacattttgccctcttaaacctcatcttgctggcttgggcctggaagtctctcatctgttgaga

SEQ ID NO: 24603 - DNA, 258 bp, Homo sapiens
  MAP TO AC000404.1; EXPRESSED IN FETAL LIVER, SIGNAL = 0.63; EXPRESSED IN HELA, SIGNAL = 1.1; EXPRESSED IN PLACENTA, SIGNAL = 1.2; SWISSPROT HIT: P09172, EVALUE 9.00e-47; NT HIT: X13256.1, EVALUE 0.00e+00; EST_HUMAN HIT: AL514764.1, EVALUE 0.00e+00
cttgataatgtggtgccgagagaagccctttggaagctccttaatgtagcaccagtacgtggtctcctggctggggatctggatattgggagcttggacctccatggtgcacgcgtctgagggcaactccggttcggggatattgggcttcaggagctgcaccctctgcagccccatctgcaggcccgagccgttgatggcctccagtgaccggaacggctcctccaggatcccgtagaccaagtggacagtgccgtc

SEQ ID NO: 24604 - DNA, 138 bp, Homo sapiens
  MAP TO AC008699.4; EXPRESSED IN FETAL LIVER, SIGNAL = 0.4; EXPRESSED IN HELA, SIGNAL = 0.6; NT HIT: gi9629378, EVALUE 7.30e+00
atgtttggtgtgacagtattttggggggaagctagtgatgcagctgggtttgtgctggaattggtaggggatgaagcagcctgggaggacgaggagtcagcagccacctgggaggacgaggaacagtgccaaacaggg

SEQ ID NO: 24605 - DNA, 175 bp, Homo sapiens
  MAP TO AC011471.5; EXPRESSED IN FETAL LIVER, SIGNAL = 1.6; EXPRESSED IN LUNG, SIGNAL = 0.99; EXPRESSED IN PLACENTA, SIGNAL = 1.4; NT HIT: gi14767599, EVALUE 5.00e-94; EST_HUMAN HIT: BG328174.1, EVALUE 9.00e-01; SWISSPROT HIT: P46277, EVALUE 3.30e+00
cagctggggcctccaggggtctcagagacactccggcaaaagataccaccagcagccccagcagacgcagccccgccagccccagggagggcacctctccaaccaagaagtcctttctacgcagggttttaggtggcttgaagtgacccgtacagaagaaatcttgttgtggtag

SEQ ID NO: 24606 - DNA, 206 bp, Homo sapiens
  MAP TO AC010444.4; EXPRESSED IN PLACENTA, SIGNAL = 0.97; EXPRESSED IN FETAL LIVER, SIGNAL = 0.63; SWISSPROT HIT: P75242, EVALUE 3.20e+00; NT HIT: AF288742.1, EVALUE 1.00e-58; EST_HUMAN HIT: AL521707.1, EVALUE 2.00e-67
agattgtagcaattcagtcacatcttcaggctccacttctaattctagttgttttgctatttccaccacatctgcagttacttcctccactgaagtcctgaacccctcaaagtcatccatgagggttggaatcaacttattccaatatcttgttaatgttgatattttgacctcctcccatgaatcacaaatgttcttactggtat

SEQ ID NO: 24607 - DNA, 183 bp, Homo sapiens
  MAP TO AC010507.4; EXPRESSED IN FETAL LIVER, SIGNAL = 1.3; EXPRESSED IN PLACENTA, SIGNAL = 1.2; SWISSPROT HIT: Q24270, EVALUE 1.50e+00; NT HIT: AF109718.1, EVALUE 9.00e-99; EST_HUMAN HIT: BF796079.1, EVALUE 1.00e-98
ctattgcttcttacgatgtttgtctttctttgtatcggtgctcagctgagtctgcagtgcttcagaggcagctttcattttataaaaatctatgatttctccttccagttgttttttctcttcctcgagcttccttatctcctcctgttgaatcattttaagatgctcgaacttgtcctgcag

SEQ ID NO: 24608 - DNA, 90 bp, Homo sapiens
  MAP TO AC004409.1; EXPRESSED IN FETAL LIVER, SIGNAL = 0.34; NT HIT: AF089725.1, EVALUE 2.80e-01; EST_HUMAN HIT: BG201712.1, EVALUE 2.60e-02
ttcttcttgagcatcttcattcctttctccacaatcactttcctcatttatgttgatgagtttttcttctttaggttcatctggttgcat

SEQ ID NO: 24609 - DNA, 346 bp, Homo sapiens
  MAP TO AC010328.4; EXPRESSED IN FETAL LIVER, SIGNAL = 1.5; EXPRESSED IN LUNG, SIGNAL = 1.5; EXPRESSED IN PLACENTA, SIGNAL = 1.8; EXPRESSED IN HEART, SIGNAL =   3; NT HIT: gi13643735, EVALUE 0.00e+00; EST_HUMAN HIT: BI761009.1, EVALUE 0.00e+00; SWISSPROT HIT: Q92747, EVALUE 3.00e-57
ttcccacagcaaatttgttctctagcggggaccacttcacaaaagtagctgcacgattaattctaaggatcaccagggttggcttccagacaccatctttctgactccagacataggcattgcagtctaccccgcaagtgacgatgcggtcgctcttgggagcccagtgaatgcctgtgatatgtccattgtgctcactgagttcacgagctttcactcgctggctcccatgcttcttatagatgtgcgcttcctgattatcaggactgagggcaatctgggtacgatccctgttccaggcacgacaggtgattggctctagtaaaaactgatgcagtgatgtcat

SEQ ID NO: 24610 - DNA, 198 bp, Homo sapiens
  MAP TO AC010336.5; EXPRESSED IN LUNG, SIGNAL = 1.1; EXPRESSED IN PLACENTA, SIGNAL = 0.89; EXPRESSED IN FETAL LIVER, SIGNAL = 1.1; EST_HUMAN HIT: AI247261.1, EVALUE 8.00e-54; SWISSPROT HIT: O14733, EVALUE 7.00e-15; NT HIT: gi4826945, EVALUE 5.00e-54
cgccactgtcatcttgcccagtgcacgccccgcctggtcactcaccgcctctgtcatcctgcccagtgcaagccccgcctggtcactcaccgccactgtcatcttgcccagaatgcgctcggggatggggccctgcatccgcttcttgagcttctcagcgcaggtgcccatgagctccatggcgatgaagacgtccgt

SEQ ID NO: 24611 - DNA, 280 bp, Homo sapiens
  MAP TO AC004475.1; EXPRESSED IN PLACENTA, SIGNAL = 2.9; EXPRESSED IN FETAL LIVER, SIGNAL = 5.7; NT HIT: AB047978.1, EVALUE 1.00e+00; EST_HUMAN HIT: AL544632.1, EVALUE 1.00e-125; SWISSPROT HIT: P10238, EVALUE 2.70e-01
ctgctagagcacgggcactggtggtgggggagcagcagctcccacaacttacctttgatctccagccactgctcatagtcctcctcctcgtcctcgtcaggggactggaagacactcgggcggtgcgccacgggcagctgcttggcgtgggagtagctcttcacagggcccggcaggctggccagccccaggcctgtccgcctgctgatgagcagggacctcttcccagcgctgggggtgggtgtgctgggaggggcgctgggcgcactggtcggggcgt

SEQ ID NO: 24612 - DNA, 271 bp, Homo sapiens
  MAP TO AL110118.3; EXPRESSED IN PLACENTA, SIGNAL = 1.8; EXPRESSED IN FETAL LIVER, SIGNAL = 2.2; NT HIT: AB067468.1, EVALUE 7.00e-05; EST_HUMAN HIT: BI820081.1, EVALUE 1.00e-04; SWISSPROT HIT: Q62751, EVALUE 1.70e+00
aactttctggttatggcaggactttaggaacttgcttcttggggaatcgaggttgttggtgcctttgctctgcacgagtttcccagtgaaaaatgagccccgacaggttgttttattttcccgagaggctgtggtggtgcatgtgggattccaccaccagaggggatgcagttttccgctgccacctcctggtccttccattgcactgaggccctggaggctggagaccaggccttccagcttggtgccacccttgcccacggtggtgcac

SEQ ID NO: 24613 - DNA, 178 bp, Homo sapiens
  MAP TO AC016656.5; EXPRESSED IN FETAL LIVER, SIGNAL = 0.33; EXPRESSED IN HEART, SIGNAL = 1.1; NT HIT: gi16160471, EVALUE 6.20e-01; EST_HUMAN HIT: BG685076.1, EVALUE 5.90e-02; SWISSPROT HIT: Q9P2Q2, EVALUE 4.30e+00
ctccctggcccttgttttcttccccatgcgtttccgctctgcacaatatgtccacagtgctggcttcaagcacagctgcaccaccaggattgagtctctcaggttccatgcacaaagatactcctgttcagaggaagttttctccggtttctttaccccatagataatacctcctgct

SEQ ID NO: 24614 - DNA, 132 bp, Homo sapiens
  MAP TO AC016831.1; EXPRESSED IN FETAL LIVER, SIGNAL = 1.5; EXPRESSED IN PLACENTA, SIGNAL = 1.8; SWISSPROT HIT: P33641, EVALUE 5.90e+00; EST_HUMAN HIT: AA373654.1, EVALUE 2.00e-47; NT HIT: AJ277557.1, EVALUE 2.80e-02
tgcggaccagggacattcaatgccagacagcggtagggctggtctggggcggcaagccagatcctgggcaaagcagcctttctgctaagggttccctggcagaccacgacgatggcctcttgcaaatgtgac

SEQ ID NO: 24615 - DNA, 163 bp, Homo sapiens
  MAP TO AJ132410.1; EXPRESSED IN FETAL LIVER, SIGNAL = 0.88; SWISSPROT HIT: P12977, EVALUE 6.70e-01; NT HIT: L10347.1, EVALUE 8.80e+00
atcctgtgtcctttcccttgctttgagcctcagagccagttttagattcagggttgttggctgggagaagactcttggctctgagggtgacagtggtttagggagaacttgcttcggacaccttgtgtgtatgggcgggggcatcgcaggcatgtacattggt

SEQ ID NO: 24616 - DNA, 210 bp, Homo sapiens
  MAP TO AC009533.9; EXPRESSED IN LUNG, SIGNAL = 0.7; EXPRESSED IN FETAL LIVER, SIGNAL = 0.45; NT HIT: gi12963834, EVALUE 1.20e-02; EST_HUMAN HIT: N29699.1, EVALUE 4.30e+00; SWISSPROT HIT: P23389, EVALUE 3.50e-01
tcaggtgagagttgaagcagaggtggggaggaaggagggttggttggtgtctgcagcagtgatggaagatgctggggccttgctcctctcctgccttccaacgtgggagtaaccggtgaaggagcagagagagtcaggggctccctgtctctttctcatggtggaggcatcttcagagctggggtgaggacagaatctcttagcccctct

SEQ ID NO: 24617 - DNA, 234 bp, Homo sapiens
  MAP TO AC008565.5; EXPRESSED IN FETAL LIVER, SIGNAL = 0.41; EXPRESSED IN PLACENTA, SIGNAL = 0.64; SWISSPROT HIT: O94166, EVALUE 1.60e+00; NT HIT: AF017178.2, EVALUE 8.40e-01
ccaggtcagggtaagatggaaagcaaggtagctgaagccctcaatgaccccatgctccacatgcttctgaaggatggggaagacccgggagcaggccatgcatctgaagccactgtccagagctaccaacaagtcagtcgtcctcggcctggaactctcctccagagctgggggctctactgggttgtcagcctctcaggctttgctggccaagctggactcactgtcagttag

SEQ ID NO: 24618 - DNA, 246 bp, Homo sapiens
  MAP TO AC005175.1; EXPRESSED IN FETAL LIVER, SIGNAL = 0.84; EXPRESSED IN LUNG, SIGNAL = 0.53; EXPRESSED IN PLACENTA, SIGNAL =   1; SWISSPROT HIT: P56486, EVALUE 2.00e-39; NT HIT: gi14765084, EVALUE 0.00e+00; EST_HUMAN HIT: AA039960.1, EVALUE 6.00e-83
ctactgcagcccggagcgctgcgtgagctggggctggagggacagcgacctgggccgggtgctgaggcgaggctggagacgccggagcacggcgcggcggaacaggatatacacccaggggtccaggatctggttccaggtggccacgcgcaagtagatgagcagctccttctccgtggtgcgggacagctgcccggcggggctcatggcaggcgggtttcgcagcactgtctgggcgatgaagac

SEQ ID NO: 24619 - DNA, 76 bp, Homo sapiens
  MAP TO AL117190.3; EXPRESSED IN FETAL LIVER, SIGNAL = 3.6; EXPRESSED IN PLACENTA, SIGNAL =   3; EST_HUMAN HIT: AA508758.1, EVALUE 8.30e-02
agtgccaaatgggccattttcctcttccccagcaagcagggcctggaaggggtggaactaaggcaaggctgtgcag

SEQ ID NO: 24620 - DNA, 199 bp, Homo sapiens
  MAP TO AC007031.2; EXPRESSED IN FETAL LIVER, SIGNAL = 0.83; EXPRESSED IN LUNG, SIGNAL = 1.3; SWISSPROT HIT: P51010, EVALUE 4.20e+00
aggctctttgtctccttcgacttttgtttcacatttgccaggaggtaaggccttcatacctgcagctgggtcaagtatctggaaacacgtgggctgccagcagagccacttcatgtcagcatcagagtacaaagtgagtgtgagactgagtgagaatgtgaactgccagggtattcctacccgtgtggcccaggcctgg

SEQ ID NO: 24621 - DNA, 243 bp, Homo sapiens
  MAP TO AB012723.1; EXPRESSED IN FETAL LIVER, SIGNAL = 0.89; EXPRESSED IN PLACENTA, SIGNAL = 0.68; SWISSPROT HIT: P03191, EVALUE 3.50e-01; NT HIT: AB012723.1, EVALUE 0.00e+00
ctacaccacaaactcctgtggtggagcctctccgaacaggtccagggcgagacagttgctggacctcttgctggggagagtggccctggtctcgcaggggcctgccagcctgcagtccagggcgcggtggaaggtatggctgagtgaggtgggcgctgggtgcagggccagctggtgcagctgcatgtcgtccaggccatggctgtgctgctcctcactgaccccggctgtcatttcctggat

SEQ ID NO: 24622 - DNA, 142 bp, Homo sapiens
  MAP TO AL035068.3; EXPRESSED IN FETAL LIVER, SIGNAL =   3; EXPRESSED IN PLACENTA, SIGNAL =   2; EXPRESSED IN HEART, SIGNAL = 1.7; EST_HUMAN HIT: BE251660.1, EVALUE 3.00e-74; SWISSPROT HIT: Q9Y3I1, EVALUE 2.00e-22; NT HIT: gi14778462, EVALUE 2.00e-74
ggcaccgaagccaaagcactgtccatgccggagaagtggaagttgagcggggtgtataagctgcagtacatgcatcctctctgcgagggcagctccgctactctcacctgtgtgcctttgggaaacctgattgttgtaaatg

SEQ ID NO: 24623 - DNA, 139 bp, Homo sapiens
  MAP TO AC009024.6; EXPRESSED IN HEART, SIGNAL = 1.3; EXPRESSED IN FETAL LIVER, SIGNAL = 1.1; EXPRESSED IN HELA, SIGNAL = 1.2; EXPRESSED IN PLACENTA, SIGNAL = 1.2; EST_HUMAN HIT: BG986804.1, EVALUE 1.10e-02; NT HIT: U82695.2, EVALUE 1.20e-01
gatctgcttctgaagtctatctcaaggagccctctaaggtgaaggacgaggtcatggagagacatggggaaccaagttatggggaagcaggagtggcagaggcagaggaaggggtgagggagtcaaaggcccagagtgg

SEQ ID NO: 24624 - DNA, 116 bp, Homo sapiens
  MAP TO AC000127.1; EXPRESSED IN FETAL LIVER, SIGNAL = 0.38; EXPRESSED IN PLACENTA, SIGNAL = 0.41; NT HIT: X71970.1, EVALUE 3.80e-01; SWISSPROT HIT: P01267, EVALUE 4.60e+00; EST_HUMAN HIT: AA743245.1, EVALUE 5.60e-01
caaaactgaatttatcttctcaccaaacctgttcttcctcttccagattttggtaacagtgttgctatcgattcgggcacccaaggtagaagccttggagttatagagaggagcat

SEQ ID NO: 24625 - DNA, 257 bp, Homo sapiens
  MAP TO AL121768.2; EXPRESSED IN FETAL LIVER, SIGNAL = 0.87; EXPRESSED IN PLACENTA, SIGNAL = 0.61; NT HIT: AB012922.1, EVALUE 9.30e-01; SWISSPROT HIT: P25569, EVALUE 3.00e-04; EST_HUMAN HIT: AW468746.1, EVALUE 3.50e-01
ctggcattctataaaaaagtcttttcccatttccatcatttgtctgcaaatatctactgtctgaagaccagtccagatgagtgatgaaactaagggatcccaaacactcgccaacttttttataacgctgagcaactccataaatatcaaccgagctgtcattgcatccaacagcaaggtaagttccatctggtgaatattttaactcatgaattgcctccttcctatctttaatatgtacaacttccgtcatatct

SEQ ID NO: 24626 - DNA, 231 bp, Homo sapiens
  MAP TO AC008859.4; EXPRESSED IN LUNG, SIGNAL = 1.5; EXPRESSED IN FETAL LIVER, SIGNAL = 0.94; NT HIT: AF095703.1, EVALUE 3.00e-71; EST_HUMAN HIT: BG654971.1, EVALUE 4.00e-96
ctttctcagcattccacaagttacttcctccttccttttttctcctctagctttgcctcttttaataagttctaagttgctagccaatcgggacaaatacagaatgtgaggtcctgttccagccaatggaaaccggacacagcagaagggtggacgcgtcaggttataaatgaccctgtctcctttgttcggggtactctcgtggcaaaactgctgccaagtgtacccttt

SEQ ID NO: 24627 - DNA, 248 bp, Homo sapiens
  MAP TO AC010507.4; EXPRESSED IN PLACENTA, SIGNAL = 1.7; EXPRESSED IN HEART, SIGNAL = 1.2; EXPRESSED IN FETAL LIVER, SIGNAL = 1.8; EXPRESSED IN HELA, SIGNAL = 1.5; EST_HUMAN HIT: BG015076.1, EVALUE 9.00e-79; SWISSPROT HIT: Q15427, EVALUE 5.60e-02; NT HIT: AF109718.1, EVALUE 0.00e+00
tcagtgccctgcgcaaggaacaggactcatcttctgagaaggatggacgcagccccaacaaatcagacaaggaccacatccggtggcccatgagtggcgctcatgatcttcagcaggcggcaccaggccctggcggggcgcaccagggtcatcccaaccaggataaccggaccgtcagccagatgctgagcgagcggtggtacaccctggggcccaatgagatgcagaaatacaacctggccttccag

SEQ ID NO: 24628 - DNA, 220 bp, Homo sapiens
  MAP TO AC010077.1; EXPRESSED IN LUNG, SIGNAL = 1.7; EXPRESSED IN FETAL LIVER, SIGNAL = 1.3; EXPRESSED IN HELA, SIGNAL = 2.4; NT HIT: gi4503350, EVALUE 1.00e-108; EST_HUMAN HIT: BE902068.1, EVALUE 1.00e-108; SWISSPROT HIT: P26358, EVALUE 8.00e-37
gcttagcctctccatcggacttgctcctcctgggcgtgcgaggtttggaaaggggtttgggggggctgttggcatctgccattcccactctacgggcttcacttcttgcttggttcccgttttctagacgtccattcacttcccggttgtaagcatgagcaccgttctccaaggacaaatctttatttaaaagggatttgactttagccaggtagccctc

SEQ ID NO: 24629 - DNA, 186 bp, Homo sapiens
  MAP TO AC006334.3; EXPRESSED IN PLACENTA, SIGNAL = 1.2; EXPRESSED IN HEART, SIGNAL = 2.5; EXPRESSED IN HELA, SIGNAL = 0.59; EXPRESSED IN FETAL LIVER, SIGNAL = 0.94; NT HIT: gi11141878, EVALUE 2.00e-04; SWISSPROT HIT: P34678, EVALUE 8.00e-12; EST_HUMAN HIT: BI008017.1, EVALUE 1.00e-95
ctccagcggcaggttccacgctatgtacacatgagacttgtaatcgtccatccagacctcagcaacgcgaagagcattcctcttggtgtagaagccaatgttgctattatatggcttcttcttccgctcaatgtgggccacccgtgagcaaggaaggacctccatgctgcccccacagagccatac

SEQ ID NO: 24630 - DNA, 279 bp, Homo sapiens
  MAP TO AC008716.6; EXPRESSED IN PLACENTA, SIGNAL = 0.44; EXPRESSED IN FETAL LIVER, SIGNAL = 0.55; SWISSPROT HIT: P19836, EVALUE 2.30e+00; NT HIT: AB037738.1, EVALUE 0.00e+00
actgttggatcagctggacagggcccttcttgatgggacggtccagagtctggatgttggtctggcgtgtcacgggaccacagatgaccgtctcctggggagagctggcctcagactggctgtcgcagctagatgtggagaggtcattgcaagacgtgccgctctccccttctttgtcacctttgccattcttgcagcagcaatcgcagtgtgagggtgaccatctggaaggctcacctgaaaagaaagcaaaggacccaaaggattaatgccagccag

SEQ ID NO: 24631 - DNA, 133 bp, Homo sapiens
  MAP TO AC016630.5; EXPRESSED IN PLACENTA, SIGNAL = 3.5; EXPRESSED IN HEART, SIGNAL = 1.9; EXPRESSED IN LUNG, SIGNAL = 5.7; EXPRESSED IN FETAL LIVER, SIGNAL = 3.5; EXPRESSED IN HELA, SIGNAL = 5.6; SWISSPROT HIT: Q62318, EVALUE 8.00e-23; NT HIT: gi16162701, EVALUE 4.00e-69; EST_HUMAN HIT: BG754691.1, EVALUE 6.00e-69
cagtagagcgcacagtatggtccttggtgtacttcacccgctggtgcgcctctacacaggtctcacacagaggctccgagcactccacacagtagctggtggctggggcattatcctcacagctagtgcagca

SEQ ID NO: 24632 - DNA, 180 bp, Homo sapiens
  MAP TO AC016572.4; EXPRESSED IN FETAL LIVER, SIGNAL = 0.53; EXPRESSED IN PLACENTA, SIGNAL = 0.53; NT HIT: AL163213.2, EVALUE 1.00e-08; EST_HUMAN HIT: BF676658.1, EVALUE 3.00e-10; SWISSPROT HIT: P08547, EVALUE 9.00e-11
atgaacagaatgaaggacaaaaaccatatgatcatctcaatagactcagaagtagcattttacatgattcaacgtgccttcatgatgaaactggatatacaaagaaaatacctcaacacaataaagaccatgtatgacaaatccacagctaacatcatacttattaggagaaaaacctga

SEQ ID NO: 24633 - DNA, 144 bp, Homo sapiens
  MAP TO AC002991.1; EXPRESSED IN HELA, SIGNAL = 1.1; EXPRESSED IN FETAL LIVER, SIGNAL = 0.58; EST_HUMAN HIT: BI457040.1, EVALUE 2.00e-75; SWISSPROT HIT: P53814, EVALUE 3.00e-01; NT HIT: gi14778127, EVALUE 1.00e-75
cacatccttgccacccctgctcttcaggtcttggatctcagccatcagcctctgtagctcctggcaggtgtacttgtataactcatagtctctgccagggtcccgcagatccacctcggcctcctcactgtagtatttaccttc

SEQ ID NO: 24634 - DNA, 383 bp, Homo sapiens
  MAP TO AC000051.2; EXPRESSED IN FETAL LIVER, SIGNAL = 1.3; EXPRESSED IN PLACENTA, SIGNAL =   1; NT HIT: gi16167547, EVALUE 0.00e+00; SWISSPROT HIT: Q9Y2N3, EVALUE 4.00e-07; EST_HUMAN HIT: AL042278.1, EVALUE 0.00e+00
tgtctttgaggaactgagggtcagctggcagtgggatgaggctggccccctcctccgctttagccccggcaagcctcccgtggagctgtaggagctggagatggcatttcggttggtgcaggagctcgtccaggaggtctgggatgtctggttatatctgatttctgacctctgggcatggaggtctgtctgcagaggcccgggcccgggcacaaagggagagaggcctccattgtcccgcaggggccgaaatgcagacggtgcatccccggtgacctccgggacccttctctgatcaccaggattctcttggactctagggtccttgtcctgctcaggcatccctgccccgctctccttgagggccctcaacactatcttcc

SEQ ID NO: 24635 - DNA, 483 bp, Homo sapiens
  MAP TO AC009086.5; EXPRESSED IN LUNG, SIGNAL = 2.5; EXPRESSED IN PLACENTA, SIGNAL = 3.8; EXPRESSED IN FETAL LIVER, SIGNAL = 4.1; SWISSPROT HIT: O35625, EVALUE 3.00e-03; NT HIT: AF042836.1, EVALUE 7.10e+00; EST_HUMAN HIT: BI008490.1, EVALUE 0.00e+00
ttagatttgagaacagctatgttgctgctgaccagctgtgtgaccctgggctggtttccttccacacaatgggagtgccaatggctgcatgcatgcaaagaccgtctgaggataggaggaagcaatctgttgagcacccgtgtacctgagtgtcatcacctcccaagggcatccttcgttccagagctggcgccttggaaggcccttggtcactgaaggcagtgatgatggtaacagcagtaaatcatcatttacggctgatgagggaaggccaggggtagggctcctaggtcctggataagaatgagggtctgggcactcctggggacagctgagtggtaggactcctgggtccccagggggaaggtccatcttcagtggcattgggcctaggctgggatgctgagttatccactggagcatcagcagtacaggcaggcacagaggcagtggatccatcggaggtggcaggtgtaggatcgt

SEQ ID NO: 24636 - DNA, 144 bp, Homo sapiens
  MAP TO AC005790.1; EXPRESSED IN FETAL LIVER, SIGNAL = 0.48; SWISSPROT HIT: P23468, EVALUE 4.00e-18; NT HIT: gi14765215, EVALUE 1.00e-75; EST_HUMAN HIT: BI461316.1, EVALUE 2.00e-75
ctcaaagcgctgagagttgaccttcttgcccttcttgttccaggtcactcgtggcttggggtcacccgtggcctgacacacgaaagaggccacaccccccgacacgccgatctggtccttgggttctttgataaacctgggggg

SEQ ID NO: 24637 - DNA, 193 bp, Homo sapiens
  MAP TO AC019183.3; EXPRESSED IN LUNG, SIGNAL = 1.5; EXPRESSED IN PLACENTA, SIGNAL = 3.7; EXPRESSED IN HEART, SIGNAL = 1.5; EXPRESSED IN FETAL LIVER, SIGNAL = 1.9; EST_HUMAN HIT: R27411.1, EVALUE 8.00e-57; SWISSPROT HIT: Q16781, EVALUE 1.50e+00; NT HIT: AB026898.1, EVALUE 9.00e-62
ctaactgcctcctgctgaactggggcgtagtaggggttgtgcagttgagatttccttgggagggttgcctttgatgtcatcaacatcggagcatgggctagcaggctggctcaggggtccgtggtagatcttagtcatggactgtatctggggctccatttgaagaactatttgtagttttccagctttgatt

SEQ ID NO: 24638 - DNA, 116 bp, Homo sapiens
  MAP TO AC002077.1; EXPRESSED IN PLACENTA, SIGNAL = 0.7; EXPRESSED IN FETAL LIVER, SIGNAL = 1.6; NT HIT: AF244548.1, EVALUE 5.00e-59; EST_HUMAN HIT: BI818629.1, EVALUE 7.00e-59; SWISSPROT HIT: P39981, EVALUE 4.70e-02
aggaaaaggataatgcccgtattggccatggcataggcgagtcccaggatgccgctgcccatgatggcattgctgaggttgaacactgacatcccgaatgatgtcttcccctcgaa

SEQ ID NO: 24639 - DNA, 209 bp, Homo sapiens
  MAP TO AC008518.3; EXPRESSED IN FETAL LIVER, SIGNAL = 1.2; EXPRESSED IN HELA, SIGNAL = 0.66; SWISSPROT HIT: Q9Z0Y8, EVALUE 2.40e+00; NT HIT: gi8393336, EVALUE 7.40e-01
gaaaggtcaacaggtgccccaggaccacatccacctggttagaagctctgctgggtttggtctgggagagacccgctgcctcaagagaatttgctacagggaaagccccctgggtaaccatgaagatgtgatatgttatgtcagcatgaagatagacgatattgtagaagaccttatggggtttgtaatggggaaagtgggcaggggag

SEQ ID NO: 24640 - DNA, 395 bp, Homo sapiens
  MAP TO AL121594.3; EXPRESSED IN LUNG, SIGNAL =  10; EXPRESSED IN FETAL LIVER, SIGNAL =  13; SWISSPROT HIT: P12970, EVALUE 2.00e-61; EST_HUMAN HIT: AA575920.1, EVALUE 0.00e+00; NT HIT: AF055066.1, EVALUE 0.00e+00
cttcccaagagaagaagcagaggctgtttgtccaggccaagaagaaagctgctggcaaaggggacgtccccactaaaagaccacctgtccttcgagcaggagttaacaccatcaccaccttggaggagaacaagaaggctcagctggtggtgactgcacatgaagtggatcccatcaagctagttgtcttcctgcttgccttgtgtcataaaatgggggtcccttactgcattatcaaggggaaggcaagactgggacatctagtccacaggaagacctgcaccactgtcaactttacacaggttaactcggaagacaaagacactttggctaagctggtggaagctatcaggaccaattacaatgacagatatgatgaaatccgccatcactag

SEQ ID NO: 24641 - DNA, 487 bp, Homo sapiens
  MAP TO AC007559.3; EXPRESSED IN FETAL LIVER, SIGNAL = 0.56; SWISSPROT HIT: P03545, EVALUE 8.70e-01; EST_HUMAN HIT: AW970864.1, EVALUE 3.00e-15
gtaatacaatgaaaccactacatttaccattactccaatgtataaatgcaatattgtgatgaaaccacttaaatatcttctgcttaaggagatttgcactgtcctttttctgaaaactgttaatgatcactgttttttccttgaggagatccctaaaagtctcagattcttaaggacgttgctaaaaagtacacgtaaatttcaagttgaatgccacctgaaggttgatggaagtggagcaacacagaattctgaagataaactggctgtcctgagcgaaaactggaagaaagttaaagacaactggataatgtgtatcaaatgtgccattaaaatatacaaaccctttgatccagtaaattccatatctgggaatttaacccaaataaatcatccgagaagacacaaagatgtggttataccaacatttgaaattctgcccaaagaagcagaaaaaaggaagaaagaaaggaaggaacgaattgtg

SEQ ID NO: 24642 - DNA, 394 bp, Homo sapiens
  MAP TO AL121846.6; EXPRESSED IN FETAL LIVER, SIGNAL = 0.83; SWISSPROT HIT: Q16531, EVALUE 8.30e-01; NT HIT: AF039526.1, EVALUE 9.40e-02; EST_HUMAN HIT: AW900159.1, EVALUE 6.00e-04
gatttgtagtaagcagcataatggctccccaaagaagttcaaacctaaatccttggaacctgtgaatatatcaccttacgggcaagagggagtttgcagatgtgactcagttaaggattttgatgggaagattatcctggattatttggtgggtgctaaatgtaatcacagtgtccttacaagtgaaaaaggaaagcaggagagggagagaaagagatttgatgatggaagcaaagttcagagtgatgagatttctggctgcgagcaaagaaataccaagcagcctctagaaatggaaaaggcaaggaaaggattctcacctggaacctccaaaaagatccagttctgccaacatcttgattttaaccttgcaagaccgatttcagacttctga

SEQ ID NO: 24643 - DNA, 169 bp, Homo sapiens
  MAP TO AC004789.1; EXPRESSED IN FETAL LIVER, SIGNAL = 1.1; SWISSPROT HIT: P57737, EVALUE 8.00e-27; NT HIT: gi13648926, EVALUE 2.00e-90; EST_HUMAN HIT: N39489.1, EVALUE 2.00e-75
ttccaagttccgccatgctcagggcactgtcctgcaccgagacagccacatcaccaacctcaaggggctcaacctcaccacacctggtgagagtgacggcttctgtgccaacaagctgcgtgtggccgtgccgctgctcagcagcgggggacaggtggctgtgcttgag

SEQ ID NO: 24644 - DNA, 163 bp, Homo sapiens
  MAP TO AC027663.12; EXPRESSED IN PLACENTA, SIGNAL = 0.88; EXPRESSED IN FETAL LIVER, SIGNAL = 0.89; EXPRESSED IN HEART, SIGNAL = 1.1; EXPRESSED IN LUNG, SIGNAL = 0.63; NT HIT: U53930.1, EVALUE 3.60e-02; EST_HUMAN HIT: AI242199.1, EVALUE 3.30e+00; SWISSPROT HIT: P40598, EVALUE 3.40e+00
agctgaaggctgtctgccgagtacactcccaggaactggggcaatatgtcgtcttcaaaggagaatctggatggtgcatcattgtgtccaccacagatctcaagatcaccaaatccggactggcaatgcataagaggcatgaagttctggtaagactggatag

SEQ ID NO: 24645 - DNA, 184 bp, Homo sapiens
  MAP TO AC019209.3; EXPRESSED IN PLACENTA, SIGNAL = 1.3; EXPRESSED IN FETAL LIVER, SIGNAL = 1.3; SWISSPROT HIT: Q9P7X8, EVALUE 7.40e+00; EST_HUMAN HIT: BF528382.1, EVALUE 2.40e-01
gagagttgtaaaggaaacagcagaagcagtccctccccagaaaaatgcacagtctaatggaggtgaaattaacttcagcaataaacttaagattcatattgaagaggcacttgcactgactcagaaactttctgcagagaatctgaagaagagcaggagcagcaagacagaaagcactcaagag

SEQ ID NO: 24646 - DNA, 208 bp, Homo sapiens
  MAP TO AB014077.1; EXPRESSED IN FETAL LIVER, SIGNAL = 5.5; SWISSPROT HIT: P36915, EVALUE 4.00e-35; EST_HUMAN HIT: AL538485.1, EVALUE 1.00e-113; NT HIT: gi15304504, EVALUE 1.00e-113
gttgtgaatttcccgccagcactttatgagtatgtgactggagaacttggactggccctggtgctggttttgaacaaggtggatctggccccgccagctcttgtggttgcctggaagcattatttccatcaacactatccccagctccacgtcgtccttttcacctcttttcctcgggacccccgcaccccacaggatcctagtagtg

SEQ ID NO: 24647 - DNA, 181 bp, Homo sapiens
  MAP TO AC004510.1; EXPRESSED IN HEART, SIGNAL = 2.2; EXPRESSED IN FETAL LIVER, SIGNAL = 0.71; NT HIT: M86524.1, EVALUE 1.00e-02; EST_HUMAN HIT: AI343958.1, EVALUE 1.50e-02; SWISSPROT HIT: P50646, EVALUE 1.50e+00
ttaaaacaccacagcatgcgtctgagctttattcctgtttatggctgaacgattttccattttatgaatatgcgtcatcttttcatggacatgagggttgtgccccacctgttggccttcgtgaacaatgctgcaatgaaaatgcttgtagcatttggaacctatcagtggtttccagggg

SEQ ID NO: 24648 - DNA, 201 bp, Homo sapiens
  MAP TO AB023053.1; EXPRESSED IN PLACENTA, SIGNAL =   1; EXPRESSED IN FETAL LIVER, SIGNAL = 3.8; SWISSPROT HIT: P08547, EVALUE 3.00e-06; NT HIT: U78045.1, EVALUE 2.00e-22; EST_HUMAN HIT: AW014570.1, EVALUE 1.00e-18
gaacacgtaccaatagccaccccattatccaagccattacagacaacagtaaggaggcttctcaaaaaattaaaagtagaactactatatcatccatcaatctcactaatggatatatatccaaaggaaatgaaattggtacgtcaaagagatacatgcactcccatgttcactgcagcgctattcacaatagccaagata

SEQ ID NO: 24649 - DNA, 93 bp, Homo sapiens
  MAP TO AC020894.3; EXPRESSED IN PLACENTA, SIGNAL = 2.2; EXPRESSED IN FETAL LIVER, SIGNAL = 1.5; EXPRESSED IN HELA, SIGNAL = 1.4; EST_HUMAN HIT: R67211.1, EVALUE 1.10e-01; NT HIT: AJ005577.1, EVALUE 1.00e-03
atatttgagttttatttcctgttcctgttctcttaaatcagggatggcatcttgggcagggtaattctttgttttagggcctatcctgtgcat

SEQ ID NO: 24650 - DNA, 179 bp, Homo sapiens
  MAP TO AC024578.2; EXPRESSED IN PLACENTA, SIGNAL = 0.69; EXPRESSED IN FETAL LIVER, SIGNAL = 0.72; SWISSPROT HIT: P18089, EVALUE 7.40e+00
cccacccctttgtgctttccatccctgagagtggccactgctgggagagtgaaaagatttgcagaccaatagctttggaattcctttcaaagtggttgaaaaatctgtcttcaaaataggtgggcagtggtggaagggtcagaagcacagctgcaggccgaggcagcactggcacaggc

SEQ ID NO: 24651 - DNA, 214 bp, Homo sapiens
  MAP TO AC010641.5; EXPRESSED IN FETAL LIVER, SIGNAL = 0.41; EST_HUMAN HIT: AV725230.1, EVALUE 3.00e-53; SWISSPROT HIT: P03365, EVALUE 7.00e-16; NT HIT: gi9627210, EVALUE 7.60e-01
tcgtatgtttcacctgcctcacagccaggctcgaactatggcgcaagcctgtcccacttgtcagcatgtccctggtgttatacctgtggaaggatgcaatccacaaggcttggctccaaatgaaatttggcagatggatgttacacatatagcagcctttggcaagcttagctatgttcatgtaactatagacacttaatctcatatgctgcat

SEQ ID NO: 24652 - DNA, 149 bp, Homo sapiens
  MAP TO AC016656.5; EXPRESSED IN FETAL LIVER, SIGNAL = 0.51; EST_HUMAN HIT: BF740956.1, EVALUE 2.00e-78; SWISSPROT HIT: O75962, EVALUE 5.00e-09; NT HIT: gi16170978, EVALUE 1.00e-78
tgtcttctctttaaagagctggatttcctttcttccatctcatcaatgggcgaggaggaagagagaagggaattatccgaagggttgaaggaagggctgctactatctccctggtcaacaaggagtgagctggggcgatcctccagtgc

SEQ ID NO: 24653 - DNA, 272 bp, Homo sapiens
  MAP TO AC000393.1; EXPRESSED IN FETAL LIVER, SIGNAL = 2.2; EST_HUMAN HIT: BI769257.1, EVALUE 0.00e+00; SWISSPROT HIT: Q02817, EVALUE 1.00e-02; NT HIT: gi11427526, EVALUE 0.00e+00
cttgttgcacttcacacagtggtacgcatccatgcctggggagtagcggaggctgaagtccaaggcgggctcagtgctgggcacaagaggactgccgtacaggctgacggagtgctccaggaaggctgactgcatggtggagggggcctgccggtagctgtggccataggttgtggccaaggtgtcccaggagaagctaggcttgtagaatgggggtgagtcggacagtggagagtccccatcctggggtcgggacagcacaatggggccct

SEQ ID NO: 24654 - DNA, 555 bp, Homo sapiens
  MAP TO AC004179.1; EXPRESSED IN FETAL LIVER, SIGNAL = 0.49; SWISSPROT HIT: P35410, EVALUE 6.00e-26; NT HIT: Y19213.1, EVALUE 2.00e-03; EST_HUMAN HIT: N79066.1, EVALUE 5.00e-02
ttactcacaaacctggctaaccacatgcaaagaaagggccagggcccagctcaggatgctcatcacagcagaggtgtgctttgggcggtggcagcaccaggtgggacagaggacacacagaaagctctcaatattcatggccaccaggagacagagactcactgtgtcagagaaataggacacaggctccagaaacatggccacctgcaatgtcacctggtgatacagcatgaggattttctccaacaggatcacagttacacaggagaggttgaccatatcagcagcggccaggttaaggacataggtcatgtaggggctgctcctgacctggaagcagaaaagccagcacaccacaccattgcccaccagcccacagaaggccaccagcactgtcaggatgaaaaccacctgtttgcccaccaaccactcgcctcccgtatgactcatgttcacttgtcctggggtctctgtcctgttgtcccaatccagcttcccagagaacactgagagaaactgggccatggtgggctgccttggctgcctgggcacacc

SEQ ID NO: 24655 - DNA, 284 bp, Homo sapiens
  MAP TO AC002984.1; EXPRESSED IN FETAL LIVER, SIGNAL = 7.3; EST_HUMAN HIT: BF815912.1, EVALUE 0.00e+00; SWISSPROT HIT: P03356, EVALUE 4.30e-02; NT HIT: AL163246.2, EVALUE 1.00e-122
atttctacaatggaaaggaaatgaaaggttctaagaggcgggctagtggcttgtactatagcatagcctgcctttgctggtgtgtggcgattaggcctggtggaactgccatcaataaatcaagcgtgatcagggtgaggaacagggaagaaggaaatgtggggaaatgggatgaacatcaggtggatcacagagatgcagtcatgggggtcaggtgtggtatccggaataatgtgggaggctggattgaagtccgggccaggaacaatggtaattgtgggact

SEQ ID NO: 24656 - DNA, 276 bp, Homo sapiens
  MAP TO AC004172.1; EXPRESSED IN FETAL LIVER, SIGNAL =  18; EXPRESSED IN HEART, SIGNAL =  43; EST_HUMAN HIT: BG677318.1, EVALUE 3.00e-63; SWISSPROT HIT: P30467, EVALUE 5.00e-39; NT HIT: AF055066.1, EVALUE 0.00e+00
cccatcttagtgtgaggggctcaggcaacccctcgtgctgcacatggcatgtgtacctctgcttctctccagaagacaccactgcagctgcccacttctggaaggttctgtaccctgcaagtctggtctccacaaactctgcatcctgaatttggtcctccccatcccgctcctgggtcagtgtgatctccagagggtagaagcccagggcccagcacctcagcgtggcctcatagttggagatggggtggagggttacctgtgccttcaggggat

SEQ ID NO: 24657 - DNA, 116 bp, Homo sapiens
  MAP TO AC003955.1; EXPRESSED IN FETAL LIVER, SIGNAL = 0.43; NT HIT: AF325161.1, EVALUE 4.00e-07; EST_HUMAN HIT: BI765545.1, EVALUE 6.00e-04
gagttgcagatcaaaccttttaaatgtattcaaattgtcatggatttggttgtgcctttaacttcgcaggctcagggagtaaatggtgatgataatgatgataatgttgatgatag

SEQ ID NO: 24658 - DNA, 431 bp, Homo sapiens
  MAP TO AC004196.1; EXPRESSED IN FETAL LIVER, SIGNAL = 0.53; EST_HUMAN HIT: AI804667.1, EVALUE 4.00e-33; SWISSPROT HIT: O55196, EVALUE 8.00e-08
atgaagcccaatccaacaaagagcacaacagtgactgtggttgcagccagggatatgaggataattcccatgggtgtcaggagcctggtgggtttcactgctgtgactgaagtagttcacagaaggtgagtgtcaccatgtttagtggtttcatcttctgtggtccctgggtctgcagtgacggagtcctcggtggtccctgggtctgcagtgatggagtgtttggtggtccctgggtctgcagtgacagagtcctcagtggtccctgggtctacagtgatggagtgtttggtggtccctgggtctgcagtgacaaagttctcagtggtccttgggtctgcagtgatggagtccttggtggtccctgggtctgcagtgacaaagttctcagtggtccctgggtctgcagtgacagaatccttggtggtccc

SEQ ID NO: 24659 - DNA, 646 bp, Homo sapiens
  MAP TO AL117376.2; EXPRESSED IN PLACENTA, SIGNAL = 2.9; EXPRESSED IN LUNG, SIGNAL = 2.2; EXPRESSED IN FETAL LIVER, SIGNAL = 1.8; SWISSPROT HIT: P05143, EVALUE 1.00e-21
atgtggcccctgctggccctaatgcaccaggtcaccttcactctcctgcagcctcaccacgtggtccctgatggccccagcatatcaggtcacccctcacctctcccgcagcctcgccacgtggtccctgctggccccaatgcaccaggtcacccctcacccctcccgcagcctcgccacgtggtccctgctggccccaatgcaccaggtcacccctcacctctcccgcagcctcgccacgtggtccctgctggccccaatgcaccaggtcacccctcacccctcccgcagcctcgccacgtggtccctgctggccccaatgcaccaggtcacccctcacccctcccgcagcctcgccacgtggtccctgctggccccaatgcaccaggtcacccctcacccctcccgcagcctcgccacgtggtccctgctggccccaatgcaccaggtcacccctcacccctcccgcagcctcgccacgtggtccctgctggccccagcatatcaggtcacccctcacccctcccgcagcctcgccacgtggcccctgctggccctctcgcacccaggtggccttcaccttccactcctgcctggagagcccctcctctgttactttctggcgaattcctccttgcattctcag

SEQ ID NO: 24660 - DNA, 1704 bp, Homo sapiens
  MAP TO AC008753.5; EXPRESSED IN HELA, SIGNAL = 0.37; EXPRESSED IN FETAL LIVER, SIGNAL = 1.1; EST_HUMAN HIT: AW673661.1, EVALUE 0.00e+00; SWISSPROT HIT: P33076, EVALUE 4.00e-13; NT HIT: gi14731965, EVALUE 1.00e-07
agctgcaccaacagcgtgtgcgctcctgcggagcacctcgcgcggtcttccccgtccgcgctgtaggtggcgccagtacaagtgcagcagcctgggcgctcctgcagcgcttcagacagaacgaggagaccatgtgctccatcttggaggcaatgttgctgaccacgatcacctggaagtggctcagggcctgctggataaactcctcctcctggatctcgtacaagcagctgaagaactccaaggagccctgctgcagggtggagccgtcgctctgagctttgctttggatccactgcaacaggtccatcttgatgtgcggcgagaccttccagcagagactcttctccaggtggctcctggtctcctcgttcaggagtccaaacaggaagcggctggtgagtgccaggaagctcctttcagaaaacgcgtactcggtcaacagcctggtcacgtcctggtctgggcctgccccgccctccccctcgtccaggatatagtacatagctgcaaagaattcctggaaactcaagtggatgaagctgtagtacctctcacagttgatgtccttctggaagatgttcatgttgaggaaggcagagacgtcttccccgtctaggccgtgcttccggaggtcctgctcctcaaataggattttctgattccagagcccatctgccgccaaggagcacaaccctctctggttgggtgggggctggaggcgcggggcccccggcttgggttgcatcagactcagcaggtagagcatgtacactgcagtggtggtcctggacgtctgtctcaacagccccccaccctccagctgctgctggaggcaggtacacaccacccagcacaccagggggacgaagcacatggtgaagagaggctcgttgtccctcacgtaattgaagacttggcccgcctgctctgcattgtggaaatacttgtagaagtattccttcctttctgcctcagagaagcccaggatctccacatgcctggggtgctccagcagacggtggagcttctccaaagccgtgggccgtgtggtgatgagcaaagatagctcagggagcagcttcttccgaattaagctgttaagaagcagctccgtgggccgtttctcctcccagcagaggcaccagggtccctgaggatcgtggaaagaaggcttgagctcatcgaagccgtcgatgatgaaaaggaggcgctcgggaactcggatgagctcctggagaggcgcgctgggctcaggccagcagctgaagatgaggtcttgcatgctgcattccgtggcactctggttcatctccctgcagttgatgtagaagagataatcaaatctgccttggaagagcttcccgtccgcccagtccagcatcaccttgtgtgccagcatggacttgcctatccctgccgcgccttgcatgaccacggtgcgcggtggctcggggcgctcctcgtctggctcaaagagggtctctatcttgatggggctagcctggtgtcccacggtcctcgcgtgtccccggcctgtgtccagaagctgctgctggacctgcatggggtttgagtgctccttcaccagcaggagccgggtgtaccggtggctgaggttgacacattcccctaggcgcgcattgcggtcttccatgagccggaatttcctgcggacatagtccctgtaggtttcctggggat

SEQ ID NO: 24661 - DNA, 536 bp, Homo sapiens
  MAP TO AL022313.1; EXPRESSED IN LUNG, SIGNAL = 1.6; EXPRESSED IN FETAL LIVER, SIGNAL = 1.9; EXPRESSED IN HELA, SIGNAL =   3; SWISSPROT HIT: Q9Y698, EVALUE 3.00e-80; NT HIT: gi11418049, EVALUE 0.00e+00; EST_HUMAN HIT: BF205359.1, EVALUE 0.00e+00
ttatacgggggtggtccggcggttggctgtgttggagtggagagagtccttgttctccttctggatacagttgtgaacctggaggaagctgttatccctgtcggagttgtaggtggcggtgggcgtggtggcggccttcagggggtccctgctgagcgtgtacatggagatctccgtggacggcagggtgttgaagcccttgatgcccacgggggaggcgtccctggagtgtgagggctccgtggagcgcgagctggagcggctgcggcgctggtagcggtagcggtagctggggatgcgggtgatggcagaggcctggaggtagtccgtggcgcgggccgtggcccgcagctgtttgtgccggtcgataaacatgtgcaccgccagcaccccgaccatctcggcgatgatgaaggacagggccccgaagtagaaggaccagccgtatgagtaactattctttttggagtcgctcttggaggggtctccggcattggcagatatgtacactatgatgccaatgatgttactcagac

SEQ ID NO: 24662 - DNA, 458 bp, Homo sapiens
  MAP TO Z83844.5; EXPRESSED IN HEART, SIGNAL = 2.6; EXPRESSED IN FETAL LIVER, SIGNAL = 2.5; EXPRESSED IN PLACENTA, SIGNAL = 2.2; SWISSPROT HIT: Q49537, EVALUE 4.00e-13; EST_HUMAN HIT: AW408957.1, EVALUE 3.00e-83
tgcacgagacaaccccacaacatcctgtgcccagcgggacaatcccagagcctccagaacctcctctcccaatagagccacacgagacaaccccagaacatcctgtgcccagcgggacaatcccagagcctcctctcccaatagagctacacgagacaaccccacaacatcctgtgcccagcgggacaatcccagagcctccagaacctcctctcccaatagagccacacgagataaccccagaacatcctgtgcccagcgggacaatcccagagcctcctctcccaacagaaccacccaacaagacagccccagaacatcctgtgcccgacgggacgatcccagagcctcctctcctaacagaaccatccaacaagagaaccccagaacatcctgtgccctacgggacaatcccagagcctcctctcccagcagaaccatccaacaagagaacccca

SEQ ID NO: 24663 - DNA, 679 bp, Homo sapiens
  MAP TO AL136163.3; EXPRESSED IN HELA, SIGNAL = 1.7; EXPRESSED IN LUNG, SIGNAL = 1.9; EXPRESSED IN HEART, SIGNAL = 1.9; EXPRESSED IN FETAL LIVER, SIGNAL = 1.8; SWISSPROT HIT: P38859, EVALUE 2.00e-03; NT HIT: L05024.1, EVALUE 6.50e-01; EST_HUMAN HIT: BE294357.1, EVALUE 0.00e+00
atattcaatgagtttaactttatctaaatcttcatgtatgttcagtgtgttttctactcggctttctggcgaaccagactgcttgtccacttctggcattatatcttgcttctcacaggtttctaaatctagcgcccccttcagttcaacatcattctctgttcccaaaaaggctagggctgactgcacctgcatttccacggcagaattgtttatttgtgactcagctttctttcgttcctctgggtcaagagaaaggcactccttcaaggtgtcttttttgtgcattccaccaccagtttgagaagaaagttcttccaagtcaacaaaatcatcatcttcccctagaaagttttctttggctgtagattcaaatgcagaagaagtgtcggaaggttccttgctgagcttagtcactgtgggagaaccatgggatgtctccctagaggagtccagtttctttaatttctctgacacagagctgcctgagggctttgtaggtgtatgtcctgtggacttctccaaaggtactattggtctggaatccgaagtcataattttctctccattctgctgtcgtttttccttgttgatagatttgaacttactgaatgggttgatatccttttctgaagccaggtcttcccattctccaggcctgtacagaggacaaagatcc

SEQ ID NO: 24664 - DNA, 556 bp, Homo sapiens
  MAP TO AP001760.1; EXPRESSED IN LUNG, SIGNAL = 1.2; EXPRESSED IN FETAL LIVER, SIGNAL = 1.2; EXPRESSED IN HELA, SIGNAL = 1.2; NT HIT: gi16166512, EVALUE 0.00e+00; SWISSPROT HIT: O95613, EVALUE 2.00e-83; EST_HUMAN HIT: BF828592.1, EVALUE 0.00e+00
gtttttagaggaacgtaaagagatcaccgagaaattcagtgcggaacaagatgccttcctgcaggaggcccaggagcagcatgcccgtgagctgcagctcctccaggagagacaccagcagcagctcctgtcagtgacggcggagctcgaggccagacaccaggccgcgttgggcgagctgacagcctccttagagagcaagcagggggctctgctggctgcacgtgtggccgaactgcagacaaaacacgctgccgacctcggcgctctggagaccagacatctgtccagccttgattctttggaatcctgttacctctctgaatttcagaccatccgtgaggagcacaggcaggccctagagctcttacgagcagactttgaggaacaactgtggaaaaaggactctcttcaccaaacgattttgactcaagagttggagaaactgaagcggaaacacgaaggggagctacagtctgtgcgggaccacctgcgaaccgaagtgagcacagagctcgccggaaccgtggctcacgagctgcagggagtgcaccag

SEQ ID NO: 24665 - DNA, 455 bp, Homo sapiens
  MAP TO AL136295.2; EXPRESSED IN LUNG, SIGNAL = 1.7; EXPRESSED IN FETAL LIVER, SIGNAL = 2.1; EXPRESSED IN PLACENTA, SIGNAL = 2.9; EXPRESSED IN HELA, SIGNAL = 1.4; SWISSPROT HIT: Q16822, EVALUE 1.00e-79; EST_HUMAN HIT: AL583025.1, EVALUE 0.00e+00; NT HIT: gi14750964, EVALUE 0.00e+00
tcacattttgtgcacacgtctctccagggcctcaagctcagccaacacctctttgggcagatcctggttgacctgctctgtcaggtagctccgaatgtcacgaacctcctgttcccagaagtccttggggagggagaacagctgagtggtgtctatagctctgaggccgctgagatccaaggctccttcctttggcaccagcccaatgggtgtctctcgggcactgtcctccccctctaaccgccggcagatccagtctagcacccgagcattctccccaaagcctggccacaggaagtgccctgcctcgtcacgccggaaccagttgacatggaagatacggggcagctgggcccccttgcgcccttccatgctcagccagtgttccaggtagtgcccgaagttgtagccaaaaaagggccgcatggcaaatgggtcgtgcatgatgatcttcc

SEQ ID NO: 24666 - DNA, 583 bp, Homo sapiens
  MAP TO AL035701.13; EXPRESSED IN PLACENTA, SIGNAL = 1.5; EXPRESSED IN HEART, SIGNAL = 1.3; EXPRESSED IN FETAL LIVER, SIGNAL = 1.6; EXPRESSED IN HELA, SIGNAL = 1.3; SWISSPROT HIT: O75031, EVALUE 5.60e+00; EST_HUMAN HIT: BG991876.1, EVALUE 2.10e-01; NT HIT: AB067525.1, EVALUE 5.60e-01
agactttgcctgtgtcatggtaatattctgggatttaatcctcagactctgaaaagacaaaatctcttttttcaaagcctaatttttttttcctttttcctagaatactgaaattgatgtgctctatgtatgtatggcagtaggttttaaccattttggatccatagaatattatgaaagctatagcctcccttctcagaaaaattgagatggaaagatacatacaaaacttgaatgcatgtacagttatttcatagaagccccaaagccttttataggttcctaatttggacctgcttaacaaggaagctgtggaagataagaaggagaaagagctttggtcaatctgaggtttattttccttataaatgtggaaagtaataacaataccttaaactttttacaaacctctcctggaatccttataccaaacctgtcacctcagtattgtctccattttaaagagaagtaaatgacaggtaagtgacctcaaaaggtttaacatcctgaggtcacaaaataagtgacaacatgactcagacatgctctttgacatattttatcactttgcagggttggtctt

SEQ ID NO: 24667 - DNA, 640 bp, Homo sapiens
  MAP TO Z83844.5; EXPRESSED IN PLACENTA, SIGNAL = 1.5; EXPRESSED IN HELA, SIGNAL = 0.84; EXPRESSED IN HEART, SIGNAL = 1.8; EXPRESSED IN FETAL LIVER, SIGNAL = 1.6; SWISSPROT HIT: P19881, EVALUE 9.00e-10; NT HIT: gi14778744, EVALUE 0.00e+00; EST_HUMAN HIT: BG778207.1, EVALUE 0.00e+00
atggcgcgctgcgagaggctgcgcggagcggccctgcgcgacgtgctgggccgggcgcagggggtcctgttcgactgtgacggggtgctgtggaacggcgagcgcgccgtgccgggcgccccggagctgctggagcggctggcgcgggccggcaaggcggctctgtttgtgagcaacaacagccggcgcgcgcggcccgagctggccctgcgcttcgcgcgcctcggcttcggggggctgcgcgccgagcagctcttcagctccgcgctgtgcgccgcgcgcctgctgcgccagcgcctgcccgggcctccggacgcgccgggcgccgtgttcgtgctgggcggcgaggggctgcgcgccgagctgcgcgccgcggggctgcgcctggccggggacccgagcgcgggggacggcgcggccccgcgcgtgcgcgccgtgcttgtgggctacgacgagcacttctccttcgccaagctgagggaggcgtgcgcgcacctgcgcgaccccgagtgcctactcgtggccaccgaccgtgacccatggcacccgctgagcgacggcagccggacccctggtgagcgcgggaatggcggggaaactgagatgggggcgacctgcgcattcgcctccacgcctaagg

SEQ ID NO: 24668 - DNA, 604 bp, Homo sapiens
  MAP TO AC002097.1; EXPRESSED IN LUNG, SIGNAL =   1; EXPRESSED IN FETAL LIVER, SIGNAL = 1.1; EXPRESSED IN HELA, SIGNAL = 0.56; EST_HUMAN HIT: BI224412.1, EVALUE 0.00e+00; NT HIT: M94579.1, EVALUE 0.00e+00; SWISSPROT HIT: P19835, EVALUE 6.00e-97
ggaccccaacatgggcgactcggctgtgcccacacactgggaaccctacactacggaaaacagcggctacctggagatcaccaagaagatgggcagcagctccatgaagcggagcctgagaaccaacttcctgcgctactggaccctcacctatctggcgctgcccacagtgaccgaccaggaggccacccctgtgccccccacaggggactccgaggccactcctgtgccccccacgggtgactccgagaccgcccccgtgccgcccacgggtgactccggggccccccccgtgccgcccacgggtgactccggggccccccccgtgccgcccacgggtgactccggggccccccccgtgccgcccacgggtgactccggggccccccccgtgccgcccacgggtgactccggggccccccccgtgccgcccacgggtgactccggggccccccccgtgccgcccacgggtgactccggcgccccccccgtgccgcccacgggtgattcggggccccccccgtgccgcccacgggtgacgccgggcccccccccgtgccgcccacgggtgatcgggcgccccccccgtgccgcccacgggtga

SEQ ID NO: 24669 - DNA, 455 bp, Homo sapiens
  MAP TO AC012615.1; EXPRESSED IN FETAL LIVER, SIGNAL =   2; EXPRESSED IN HELA, SIGNAL = 0.36; SWISSPROT HIT: P39881, EVALUE 1.60e-01; EST_HUMAN HIT: BE275058.1, EVALUE 0.00e+00; NT HIT: gi15306752, EVALUE 0.00e+00
atgacggcgtgcaggagggggttgtccgcgcagctgcagtcgtggccggtggccagcacgcggtccgaggccgggtccactaccacggcccccacggcccgcaagccccgcgctgctgcccgccgggccgcccacaccgcccgctccatgtggctctgcatggcggcgcgctcctgcgtggagaagagccgcccagccagggcgctggtcacctgcttgtcctcgtggaaggacgtgggccagtgggcccgggcctcctcgaactggcccctggtcagaggcggccgggcgggcacgggcaccaggaagggttgccccaggccgcgggggtccacagccggccgtggcaggagctcagccagcgagcgcgggcccgaggccggcccagccaggcaaagcagcatctccagggcgtgggggctgccggcatcgcggctgggccgcacccgcttgag

SEQ ID NO: 24670 - DNA, 508 bp, Homo sapiens
  MAP TO AC004923.2; EXPRESSED IN HELA, SIGNAL =   1; EXPRESSED IN PLACENTA, SIGNAL = 1.6; EXPRESSED IN FETAL LIVER, SIGNAL =   1; EST_HUMAN HIT: BG117417.1, EVALUE 0.00e+00; NT HIT: gi16163994, EVALUE 0.00e+00; SWISSPROT HIT: O14581, EVALUE 5.00e-36
gccacggaatctcacaggtgtctgagaattcctcctcctgggactctcagaggacccagaactgcagcctatcctcgctttgctgtccctgtccctgtccatgtatctggtcacggtgctgaggaacctgctcagcatcctggctgtctgctctgactcccccctccacacccccaggtacttcttcctctccaacctgtgctgggctgacatcggtttcacctccgccacggttcccaagatgattgtggacatgcagtcgcatagcagagtcacgtctcatgcgggctgtctgacgcagatgtctttcttggtcctttttgcatgtatagaaggcatgctcctgactgtgatggcctatgactgctttgtagccatctgtcgccctctgcactacccagtcatcgtgaatcctcacctctgtgtcttcgttttggtgtcctttttccttagcctgttggattcccagctgcacagttggattgtgttacaattcaccatcgtctag

SEQ ID NO: 24671 - DNA, 3144 bp, Homo sapiens
  MAP TO AP001717.1; EXPRESSED IN FETAL LIVER, SIGNAL = 1.7; EXPRESSED IN LUNG, SIGNAL = 2.5; EXPRESSED IN HEART, SIGNAL = 1.9; NT HIT: gi16166227, EVALUE 0.00e+00; SWISSPROT HIT: P18583, EVALUE 0.00e+00; EST_HUMAN HIT: AL540688.1, EVALUE 0.00e+00
aacgttccatgatgtcatcttacgaacgctctatgatgtcttatgagcggtctatgatgtcccctatggctgaacgctctatgatgtcagcctacgagcgctctatgatgtcagcctacgagcgctctatgatgtcccctatggctgagcgctctatgatgtcagcttatgaacgctccatgatgtcagcttatgaacgctccatgatgtccccaatggctgatcgatctatgatgtccatgggtgctgaccggtctatgatgtcgtcatactctgctgctgaccggtctatgatgtcatcgtactctgcagctgaccgatctatgatgtcatcttatactgctgatcgttcaatgatgtctatggctgctgattcttacaccgattcttacactgacacatatacagaggcatatatggtgccacctttgcctcctgaagagcccccaacaatgccaccgttgccacctgaggagccaccaatgacaccaccattgcctcctgaggaaccaccagagggtccagcattgcccactgagcagtcagcattaacagctgaaaatacttggcctacagaggtgccatcatcaccatctgaagagtctgtatcgcagcctgagcctcctgtgagtcaaagtgagatttcggagccttcagcagtgcctactgattattcagtgtcagcatcagatccctcagttttagtatcagaggctgctgtgactgttccagaaccaccaccagagccagaatcttcaattacgttaacacctgtagagtctgcagtagtagcagaagaacatgaagttgttccagagagaccagtgacttgtatggtatctgaaactcccgccatgtcagctgaaccaactgtgttagcatcagagcctcctgttatgtcagagacagcagaaacatttgattccatgagagcctcaggacatgttgcctcagaagtatctacatccttgttggttccagcagtaactactccagtgctggcagagagcattctggagccgccagccatggctgccccagagtcttcagctatggctgtcctggagtcttcggctgtgaccgtcctggagtcttcgactgtgactgtcctggagtcttcgactgtaactgtcctggagccttcggttgtgactgtcccggagcctcctgttgtggctgagccagactatgttaccattcctgtgccagttgtttctgcgctggagccttctgtgcctgttctggaaccagcggtgtcagtccttcaaccttctatgattgtttcagaaccatctgtttctgtccaggaatcgactgtgacagtttcagagcctgctgtcacagtctcagagcagactcaagtaataccaactgaggtggctatagagtccacaccaatgatactggaatctagtatcatgtcatcacatgttatgaaaggaattaatctatcctctggtgatcaaaatcttgctccagagattggcatgcaggagattgcattgcattcaggtgaagaaccacatgctgaggaacacctgaaaggtgacttttacgaaagtgaacatggtataaatatagaccttaatataaataatcatttaattgctaaagagatggaacataatacagtgtgtgctgctggtactagtcctgttggggaaattggtgaagagaaaattttgcccaccagtgagactaaacagcgcacagtattggatacctaccctggtgttagtgaagctgatgcaggagaaactctatcttctactggtccttttgctctggaacctgatgcaacaggaactagtaagggtattgaatttaccacagcatctactctcagtttagttaataaatatgatgttgatttatctttaactactcaagatactgaacatgacatggtaatttccaccagtcctagtggtggtagtgaagctgacattgaagggcctttgcctgctaaagatattcatcttgatttaccatctaataataaccttgttagtaaggatacagaagaaccattacctgtaaaagagagtgaccagacattagcagctctgctcagccctaaagaaagtagtggaggagaaaaagaagtacctccccctcctaaagagacactgcctgattcaggattttctgccaatattgaggatattaatgaagcagatttagtgagaccgttacttcctaaggacatggaacgtcttacaagccttagagctggcattgaaggacctttacttgcaagtgatgttggacgtgacagatctgctgccagcccggttgtaagtagtatgccagaaagagcttcagagtcttcttcagaggaaaaagatgattatgaaatttttgtaaaagttaaggacactcacgaaaaaagcaagaaaaataagaaccgtgataagggggagaaagagaagaaaagagactcttcattaagatctcgaagtaagcgttccaaatcttctgaacacaaatcacgcaagcgtaccagtgaatctcgttctagggcaagaaagagatcatctaagtccaagtctcatcgctctcagacacgttcacggtcacgttcaagacgcaggaggagaagcagcagatcaagatcaaagtctagaggaagaagatctgtatcaaaagagaagcgcaaaagatctccaaagcacagatccaagtctagggaaagaaaaagaaaaagatcaagctccagggataaccgaaagacagttagagctcgaagtcgaaccccaagtcgtcggagtcggagtcatactccaagtcgtcgacgaaggtctagatctgtgggtagaagaaggagctttagcatttccccaagccgccgcagccgcacccccagccgccgcagccgcacccccagccgccgcagccgcacccccagccgccgcagccgcacccccagccgccggagccgcacccctagccgtcggagccgcaccccaagccgccggagaagatcaaggtctgtggtaagaagacgaagcttcagtatctcaccagtcagattaaggcgatcaagaacacccttaagaagaaggtttagcagatctcccatccgtcgtaaaagatccaggtcttctgaacgaggcagatcacccaaacgtctgacagatttgg

SEQ ID NO: 24672 - DNA, 599 bp, Homo sapiens
  MAP TO AL080317.11; EXPRESSED IN HELA, SIGNAL = 0.92; EXPRESSED IN FETAL LIVER, SIGNAL = 0.98; SWISSPROT HIT: O60673, EVALUE 1.00e-79; NT HIT: gi14756840, EVALUE 0.00e+00; EST_HUMAN HIT: BF763868.1, EVALUE 8.40e-01
ccagaagttttctctgtatgattggtgtactatgaaagcaaagtgattcacatttcccagttcttgccctagtattaattggagatatcactagaggctcttgaggctcactgcaggggcttttttgtataccatcttttattggctttaagaagttctcaaaagccaatgaaggcagctcctctactggtgatgagggtctatcatctccatttaatgctttggaatctggggatattggttgttgccaagggggaattactggagaatcaggggagctataactaatgtaatagttatcatcatcatcttcatctttttcgggatcacttgcagaggcaactggtggcagcatctgactttcacttgcagtttgactacatcccgtggttggtgcttgtaaagcaatctgagaattatcaacatcctccttggtatgtgctgtagtggggagtatacatggacttacatccatttttggaggcactacaggtttgtcatctgggttaactgaagagctaaagttctcagcagattttacaactccagttggcttggttttaggcagtttcttggaacgttcgtattcttctttggct

SEQ ID NO: 24673 - DNA, 819 bp, Homo sapiens
  MAP TO AJ239319.2; EXPRESSED IN HELA, SIGNAL = 0.39; EXPRESSED IN FETAL LIVER, SIGNAL = 1.1; NT HIT: gi14759106, EVALUE 0.00e+00; SWISSPROT HIT: P08034, EVALUE 0.00e+00; EST_HUMAN HIT: BG574173.1, EVALUE 0.00e+00
aggcaggatgaactggacaggtttgtacaccttgctcagtggcgtgaaccggcattctactgccattggccgagtatggctctcggtcatcttcatcttcagaatcatggtgctggtggtggctgcagagagtgtgtggggtgatgagaaatcttccttcatctgcaacacactccagcctggctgcaacagcgtttgctatgaccaattcttccccatctcccatgtgcggctgtggtccctgcagctcatcctagtttccaccccagctctcctcgtggccatgcacgtggctcaccagcaacacatagagaagaaaatgctacggcttgagggccatggggaccccctacacctggaggaggtgaagaggcacaaggtccacatctcagggacactgtggtggacctatgtcatcagcgtggtgttccggctgttgtttgaggccgtcttcatgtatgtcttttatctgctctaccctggctatgccatggtgcggctggtcaagtgcgacgtctacccctgccccaacacagtggactgcttcgtgtcccgccccaccgagaaaaccgtcttcaccgtcttcatgctagctgcctctggcatctgcatcatcctcaatgtggccgaggtggtgtacctcatcatccgggcctgtgcccgccgagcccagcgccgctccaatccaccttcccgcaagggctcgggcttcggccaccgcctctcacctgaatacaagcagaatgagatcaacaagctgctgagtgagcaggatggctccctgaaagacatactgcgccgcagccctggcaccggggc

SEQ ID NO: 24674 - DNA, 566 bp, Homo sapiens
  MAP TO AC007463.3; EXPRESSED IN HELA, SIGNAL = 2.3; EXPRESSED IN FETAL LIVER, SIGNAL = 0.98; EXPRESSED IN LUNG, SIGNAL = 1.1; NT HIT: gi15896971, EVALUE 8.40e+00; SWISSPROT HIT: Q9MZE2, EVALUE 9.30e+00; EST_HUMAN HIT: BI463059.1, EVALUE 1.30e-02
ggcctagttcaatacctcggtgaatgaataaaattcattaagagagcatttataatatctaatgtttgaatgaatgttggagatacaaagttcttagagaccatctaacccaacttcaaaattaatttctgcatcacaggtgcaagaatgttcagtgactctgcgaactatgtttgcactttggcatcaattccacctcctggagtcttctctaccactttgtctcagagacaaagcctaggacggcatttcttagaatcccttccccataggcttccatgaaaaggaaggaggccatgttaggaggccacgttctccagcagctgtggcgggaagaagcacaggtgactcatagaccagtgtggggaggaagcagatgggatggtctcagcagctcccaggcaagctcctccacagctcctgctgtagtgttgcaagctgaaaactttagcaataacttcactgtcctttgttccctggcttttccaaaattttgctaggttttatttccttgcattaaaatcttcccatgacgaaagagtcatctttttaatgcatggtgctgg

SEQ ID NO: 24675 - DNA, 625 bp, Homo sapiens
  MAP TO AP001754.1; EXPRESSED IN PLACENTA, SIGNAL = 3.2; EXPRESSED IN FETAL LIVER, SIGNAL = 1.9; EXPRESSED IN LUNG, SIGNAL = 1.5; EXPRESSED IN HEART, SIGNAL = 1.8; EST_HUMAN HIT: BI015471.1, EVALUE 1.00e-03; NT HIT: AE000415.1, EVALUE 9.30e+00
aatacagtggggtcctgactgtaaagaattgagcacatatgctggaactataaccagggatctgctaacgtggctggtgcttttatcatcacccttacttatgagtagtgggggcggtggtggtgatggtgatgatggtggctgcgatggtgatggtggtggtggtgatggtagtggtggtagtggtgatgttggtgatgatggtgatgtggtggtgattgtgatggtggtggtgttggtgatggtggtagtgatggtgatgatgatggtgattctgatggctgtaatggaagtggtggtgatggtggtggtgatggtagtggtggtgatgttgatggtgatgatggcagtggtggtggtggtggtggtgatggtagtggtggtgatgttgatggtgatgttggcagtggtggtggtggtgatggtggtgatggtgcttctgatggtggtaatggtggtagcggtgatggtggtggtggtggatggtaatggtgatggtgacagtggtggtagtgatggtagtggtggtgctggtgctggtggtggtgacgatggtggatgtggtggtggtgatgatagtgatgatggtgattatgatggcaatagtaatgacgatggtgacaat

SEQ ID NO: 24676 - DNA, 540 bp, Homo sapiens
  MAP TO AC011899.2; EXPRESSED IN LUNG, SIGNAL = 2.1; EXPRESSED IN HEART, SIGNAL = 2.3; EXPRESSED IN FETAL LIVER, SIGNAL = 2.1; EXPRESSED IN PLACENTA, SIGNAL = 1.9; EXPRESSED IN HELA, SIGNAL =   3; EST_HUMAN HIT: BF208332.1, EVALUE 7.60e-01; SWISSPROT HIT: P08399, EVALUE 1.00e-11
cagctgtgcagaacggtgtacgtgtgtgattctgcgcccgttcctacggcgtacgtgcgtgatcctggacccgttcccacggcgtacatgcgtgatcctggacccgtccccacggcgtacgtgcgtgatccggcgtacgtgcctgatcctggacccgttcccacggcgtacgtgcgtgatcctggacccgtccccacggcgtacgtgcgtgatccggcgtacgtgcctgatcctggacccgttcccacggcgtacgtgcgtgatcctggacccgtccccacggcgtacgtgcgtgatccggcgtacgtgcgtggtcctgcacccgttcccacggtgtacgtgcgtgatcctgcgcccgttcccacggtgtacgtgcgtgatcctgcacgcattcccacggcgtacatgcgtgatcctgcacccgtgctcatggctggcagccggtattggaagagaatcatgagactgcaaatcaggaatcctcagatatccttttatcgttggctctttagttcaaaactagaactgtgggtgtggaag

SEQ ID NO: 24677 - DNA, 538 bp, Homo sapiens
  MAP TO AL078593.9; EXPRESSED IN PLACENTA, SIGNAL = 1.9; EXPRESSED IN HELA, SIGNAL = 0.91; EXPRESSED IN FETAL LIVER, SIGNAL = 1.1; EXPRESSED IN HEART, SIGNAL = 1.3; EXPRESSED IN LUNG, SIGNAL = 1.5; EST_HUMAN HIT: AW959285.1, EVALUE 0.00e+00; NT HIT: gi7662247, EVALUE 0.00e+00
ctggctcctctcattcaaaaaaaacaactggctctaaagcatcagcttcgccatccacttcatccacctcatctcgtcccaaagcttcaaaggagacagtttctagcaaagcagggacagtggggaccaccaagggcaagagaaaaactgacaagcagccaataacttctcacctgtcctcagacacaacaacttctggcacatccgacctgaaaggagagcctgcagagaccagagtggagagtttcaaactcgaacagactgtccctggagctgaggagcagaacacaggcaaattcaagtccatggtccctccaccccctgtggctccagcaccttctcctctggccccccctctccctcttgaggatcagtgcattactgcctcagacactccagttgtcctcgtcagcgttggagctgacctgcccgtctctgccttagacccaagtcagcttctttgggctgaagagccgacgaacagaaccactctctactcaggcactggcttaagtgttaacagagaaaatgcaaaatg

SEQ ID NO: 24678 - DNA, 754 bp, Homo sapiens
  MAP TO AL109797.18; EXPRESSED IN FETAL LIVER, SIGNAL = 1.1; EXPRESSED IN LUNG, SIGNAL = 1.3; EXPRESSED IN HELA, SIGNAL = 2.3; EST_HUMAN HIT: AU132252.1, EVALUE 0.00e+00; SWISSPROT HIT: Q93008, EVALUE 0.00e+00; NT HIT: gi14764091, EVALUE 0.00e+00
gttgataccgtaaagcgcttgctgattaaaaaattacctcctgttcttgctatacaactaaagcgatttgactatgactgggaaagagaatgtgcaatcaagttcaatgattattttgaatttcctcgagagctggacatggaaccttacacagttgcaggtgtcgcaaagctggaaggggataatgtaaacccagagagtcagttgatacaacagagtgagcagtctgaaagtgagacagcaggaagcacaaaatacagacttgtgggtgtgctcgtacacagtggtcaagcgagtggggggcattattattcttacatcatccaaaggaatggtggagatggtgagagaaatcgctggtataaatttgatgatggtgatgtaacagaatgtaaaatggatgatgacgaagaaatgaaaaaccagtgttttggtggagagtacatgggagaagtgtttgatcacatgatgaagcgtatgtcatacaggcgccagaaaaggtggtggaatgcttatatacttttttatgaacgaatggacacaatagaccaagatgatgagttgataagatatatatcagagcttgctatcaccaccagacctcatcagattattatgccatcagccattgagagaagtgtacggaaacagaacgtacaattcatgcataaccgaatgcagtacagtatggagtattttcagtttatgaaaaaactgcttacatgtaatggcgtttacttaaaccctcctcccg

SEQ ID NO: 24679 - DNA, 614 bp, Homo sapiens
  MAP TO AC010789.7; EXPRESSED IN HEART, SIGNAL = 2.1; EXPRESSED IN HELA, SIGNAL = 2.7; EXPRESSED IN FETAL LIVER, SIGNAL = 2.2; EST_HUMAN HIT: AU138338.1, EVALUE 0.00e+00; SWISSPROT HIT: P24724, EVALUE 3.10e-01; NT HIT: gi14746094, EVALUE 0.00e+00
tttttcagagtcttttcctttgcaattgacactgacaacactactatttgctcgaagccattgaaattcccgtaacatctgtgctcctttgggtccatgctcgtaaggaaggtagaatagatcagcaagtaactgcaaatcctccagggtcactggttccgcagtgtacaaaggcttttcatttggacctggcacaaactgctccttgtttgtctgttcatcagtttgcatgggggcaatgtcactaatacaatcttcttgcatggacatctctggggattttgattcagctatgctctctttatcagtgtccattggtttcaattcctctgccattttcgcttcaacaatttcactcagtatttgattgtcattcttgtggtccgtttcttcttgtttttccaccaccatgtccatgggttcttcatcaggctgtttcttttcttcttccttggtcagagtagtaggctcaccactcaaggctgctccctggctcataatgggctcctgataaactgttgttactacggttgtggcatttaaagagggtgctgcaactaaaggagtcccatcaactacacttgctttagctccactgtgtgcaacttgcctac

SEQ ID NO: 24680 - DNA, 587 bp, Homo sapiens
  MAP TO AL049636.21; EXPRESSED IN HELA, SIGNAL = 0.47; EXPRESSED IN LUNG, SIGNAL = 0.97; EXPRESSED IN FETAL LIVER, SIGNAL =   1; NT HIT: gi14724591, EVALUE 0.00e+00; SWISSPROT HIT: Q9UJU5, EVALUE 8.00e-24; EST_HUMAN HIT: AI867445.1, EVALUE 6.00e-51
atgcagagcttcggcgcttacagcctggcggcggcggccggcgccgcgggaccctacggccgcccctacggcctgcaccctgcggcggcggccggtgcctattcgcacccggcagcggcggcggccgcggctgctgcggcggcgctccagtacccgtacgcgctgccgccggtggcaccggtgctgcctcccgctgtgccgctgctgccctcgggcgagctgggccgcaaagcggccgccttcggctcacagctcggcccgggcctgcagctgcagctcaatagcctgggcgccgccgcggccgctgcgggcacagcgggcgccgcgggcaccaccgcgtcgctcatcaagtccgagccaagcgcgcggccgtcgttcagcatcgagaacatcataggtgggggccccgcggctcctgggggctcggcggtgggcgctggggtcgccggcggcactgggggttcagggggcggcagcacggcgcagtcgtttctgcggccacccgggaccgtgcagtcggcagcgctcatggccacccaccaaccgctgtcgctgagccggacgactgccaccatcgcgcccattct

SEQ ID NO: 24681 - DNA, 1055 bp, Homo sapiens
  MAP TO AL035445.4; EXPRESSED IN HELA, SIGNAL = 0.95; EXPRESSED IN LUNG, SIGNAL = 1.4; EXPRESSED IN FETAL LIVER, SIGNAL = 1.1; NT HIT: gi14782532, EVALUE 0.00e+00; EST_HUMAN HIT: AI935027.1, EVALUE 1.00e-53; SWISSPROT HIT: P07197, EVALUE 8.00e-07
ttatattaacaggttacatggatgaagaacttgcaaaaaaaccttgttccaaaatccagattctaaaatgtggaggcactgcaaggtctcagaatagccgagaagaaaacaaggaagcactaaagaatgacatcatatttacgaattctgtagaatccttgaaatcagcacacataaaggagccagaaagagaaggaaaaggcactgatttagagaaagacaaaataggaatggaggtcaaggtagacagtgacgctggaataccaaaaagacaggaaacccaactaaaaatcagtgagatgagtataccacaaggacagggagcccaaataaagaaaagtgtgtcagatgtaccaagaggacaggagtcccaagtaaagaagagtgagtcaggtgtcccaaaaggacaagaagcccaagtaacgaagagtgggttggttgtactgaaaggacaggaagcccaggtagagaagagtgagatgggtgtgccaagaagacaggaatcccaagtaaagaagagtcagtctggtgtctcaaagggacaggaagcccaggtaaagaagagggagtcagttgtactgaaaggacaggaagcccaggtagagaagagtgagttgaaggtaccaaaaggacaagaaggccaagtagagaagactgaggcagatgtgccaaaggaacaagaggtccaagaaaagaagagtgaggcaggtgtactgaaaggaccagaatcccaagtaaagaacactgaggtgagtgtaccagaaacactggaatcccaagtaaagaagagtgagtcaggtgtactaaaaggacaggaagcccaagaaaagaaggagagttttgaggataaaggaaataatgataaagaaaaggagagagatgcagagaaagatccaaataaaaaagaaaaaggtgacaaaaacacaaaaggtgacaaaggaaaggacaaagttaaaggaaagagagaatcagaaatcaatggtgaaaaatcaaaaggctcgaaaagggcgaaggcaaatacaggaaggaagtacaacaaaaaagtggaagagtaa

SEQ ID NO: 24682 - DNA, 1254 bp, Homo sapiens
  MAP TO AC018836.2; EXPRESSED IN HELA, SIGNAL = 0.4; EXPRESSED IN FETAL LIVER, SIGNAL = 1.4; NT HIT: gi15296509, EVALUE 0.00e+00; SWISSPROT HIT: Q03164, EVALUE 4.30e-01; EST_HUMAN HIT: BE783075.1, EVALUE 0.00e+00
tcacttgttgaagaggttcaggccgatgcggtagtgcctcttgcggatgacatcgttgctaaaggcaggcgagtcccagctgttgcgggcctccttgtggtaggtctgcttgctgagcgtctgctcccgcaggctgtcacgggacgatgactcggagctgcagttgatggtatcgttggagttggacgtgctgttgatgctgtcattgtcaccgtctgagtagtccgactcagacttgctctgccggttggctgagccattgatggccaagtggctgtccaggggcctggggggccggggccgcaactcaggctcctcccgggggaggctcttgggggcgccgctgtggggaccatgcttgggactgccctgctgcccgccaaggctgcgctcgtaagcactctgcctcttgagtgacccccgctccgagcggtcactaaggtccacagagctgtcgctgggtggctcgatggtgagcagcggcagatgctccacccgcagccgctgctcctgccgctccagcgacggcgtgctccggcagctcgtgtccgtgtcagccttgtcctctttgtgggccagggcccagtagtctggggctgcgcccccagcccgtagccgcaggtccgactcggtgctggacggccggtcccctgcctgcgagaggggcagagggggcgacagctcctcctcatcgatgtacagggtgacatcactgtacgaggccgtcatctcgtccagtttgcggtggtccatgccgtgcagggctgtctggggttcggtgtcccgggcccgcgccgcatccagggccggtgcctcctcagtgtgcaggctgcggcagttgagggcatcgtcgatggactcggccagtgatttcacttgcctagagaaggcgtcctccagctcggtgatggcgtccgcaaagtcactggagggggccggagacttgagggtggtgggctcgctgaggtcaccacactcaggggacaccagggctcccagctgggagccgtcgttagtcactgagacctgcttcccctcgaagtaggagctgtgcactttctcaggcccctcaaaggagaactgcatcctcatgttggacagcacaatccggcgtgacatgcggttctctgacatggagctgcgcaagcgctcgaagttcttgttcatctggtactggcgaaacgccgtctggatggtgcgggccgcatggcgggttaccaggcgccccccatactttcgttctagcatctccac

SEQ ID NO: 24683 - DNA, 776 bp, Homo sapiens
  MAP TO AJ239319.2; EXPRESSED IN FETAL LIVER, SIGNAL = 1.2; EXPRESSED IN HELA, SIGNAL = 1.2; EST_HUMAN HIT: BF197762.1, EVALUE 0.00e+00; NT HIT: gi16162728, EVALUE 0.00e+00; SWISSPROT HIT: P04929, EVALUE 1.00e-18
gaacctccaatagttattagtgatgatgacaatgacgatgacaacggtaatgatttggaagttcccgacgacaacagtgatgattcagaagctcccgacgacaacagtgatgattcggaagctcctgacgacaacagtgatgattcggaagctcccgacgacaacagtgatgattcggaagctcccgacgacaatagtgatgattcggatgttcccgacgacaacagtgatgattcatccgacgacaacagtgatgattcatccgacgacaacagtgatgattcggatgttcccgacgacaagagtgatgattcggatgttcccgacgacagcagtgatgattcggatgttcccgacgacagcagtgatgattcggaagctcccgacgacagcagtgatgattcggaagctcccgacgacagcagtgatgattcggaagctcccgacgacagcagtgatgattcggaagctcccgacgacagcagtgatgattcggaagcttccgacgacagcagtgatgattcggaagcttccgacgacagcagtgatgattcggaagctcccgacgacaagagtgatgattcggatgttcccgaagacaagagtgatgattcggatgttcccgatgacaatagtgatgatttggaagttcctgtgccagcagaagatttgtgtaatgaaggccaaattgcttcagatgaagaagagctggttgaggctgctgctgctgtctcccagcatgattcatctgatgatgctggtgagcaggatcttgg

SEQ ID NO: 24684 - DNA, 1276 bp, Homo sapiens
  MAP TO AC004943.1; EXPRESSED IN PLACENTA, SIGNAL = 2.1; EXPRESSED IN HEART, SIGNAL = 2.1; EXPRESSED IN FETAL LIVER, SIGNAL = 1.5; EXPRESSED IN LUNG, SIGNAL = 1.5; NT HIT: gi14777633, EVALUE 0.00e+00; SWISSPROT HIT: P28167, EVALUE 3.00e-34; EST_HUMAN HIT: BF876037.1, EVALUE 0.00e+00
gggacaccagctgggggagcttctgctggggagtgttggtcttctgctcgggctgctcttgctgctgcagctctggctttggttgtccttgcttttcttgggtttggtttggctgtgcactgggagcttccgccagctttggtttctcatcgcctgcctctgtttttgaattgaaggtggccagttcctcagcctccgctgtaagctgcaagaaagcggaggaagctgtattattggctgatggtgctggggcgctgtaagcctgtgagggcatcggggtactgcaggatgagctggtaggcgtcaggatttccatggcatccatggaatcctcattttggctgtcgtcctgcccctcctcatcctcatccttgtaacacagcttcttctggtgcttgatgagatcaaagatgcgctgaaacaccaggctacattttttgcactggtagttcaagttgcttgttcgaatgtatctatcatttgtaagctcacgccgctctccatctttgccctctccctgattctcataattcttcctggccttctgtcgggcattctgaaaccacaccactatcactcgggttggaaggttcagtaaattagagagttgctcaaattcatcatcctttgggtaagcattggcatcgaagaagtcctgtaagaccctcagctggtagtccgtaaaccttgttcttgaagacctcttgcttccccagtactcctgctttggaggttccggcgaagggggccgggagtcaatcttgagctcctccaggctggtgataggaggattactgaagttgtaaggggagtccttgttacgctgcctctctttgaagagagtgttcctgaaccagtgcttgatcactttctggggcaacccggacttgtctgccatctcttttatttgctcttcactgggggagttgttaatgtcaaaatattgccgcaagactcggagctgatcatctgtgatcctggtgcgaggcctcttgttctgctgctggagcagggttggattgagctgatgctggtagagttgggccaggtccgcaggcagaggctccacaggtcccagctgcgggggtagctgagccggcaaggtctgcagcggcatcgtctgcatcatcagcggcgagaagatgggcagctccatcggcatggagagctgggtgagcggcactgatggctgggccggtgcaattgtaggtgaggtgatgggtggggctgatgcggggatggctggtgtggacgccggctgaggcggcgctgccgg

SEQ ID NO: 24685 - DNA, 535 bp, Homo sapiens
  MAP TO AL160313.1; EXPRESSED IN HELA, SIGNAL = 0.5; EXPRESSED IN FETAL LIVER, SIGNAL = 1.2; NT HIT: gi15300951, EVALUE 0.00e+00; SWISSPROT HIT: P56730, EVALUE 3.00e-25; EST_HUMAN HIT: BG682948.1, EVALUE 4.80e-02
ctacaggtcggggttctggtggctgcacacgacgcccgcatcctcgtcgtgctcgcagttgtgggtgcccacgccgttgtgctggcactccagcaggttccgctcccagcccgcgcagcgcacatcgtccagcagaatgggcagcgagccgccctggccgaactcggctctcttgacggcgcgcacggcgtaggcaaaccccagctggcgacacacgacggcggcgccgctgatgttccaggagtcgtcgcacacggtgccccagcgtccgcccacgaacacctccacgcgcccgctgccagagctcaggcccgcgggccgcaccaggcgcacctcgccatcccggaacgcccggctcgccgagttcagccgcccccgccgccgcccgccgcccctccggctccctggctgctgggtgggccgcgctggccgcggggttggcgcggggggagcggccgtggggcgccctcggcgggcgcccgcgtgggcgcccgcgctgtaggccgcggggtgctccgtgtcttcgggatgaact

SEQ ID NO: 24686 - DNA, 1080 bp, Homo sapiens
  MAP TO AC010219.4; EXPRESSED IN HELA, SIGNAL = 2.2; EXPRESSED IN LUNG, SIGNAL = 1.2; EXPRESSED IN FETAL LIVER, SIGNAL = 1.1; NT HIT: gi13642400, EVALUE 0.00e+00; SWISSPROT HIT: P25021, EVALUE 0.00e+00; EST_HUMAN HIT: BG248700.1, EVALUE 6.10e+00
ttacctgtctgtggctccctggggggccgtgacttctgtcccactccacacctggagcttcaggggtttctcttcctgttgcctgggttctcggctttgggtcctggacagctgagaggcgttggacctcagagaagttttgtgggagttgcggttggccagcctgcagcagaagagctgttggtacccggtgcggaagtctctgttcagcgcagcatacaggatggggttcagggctgagttggcatagcccagccacagaacgatggcttctaacacctcattgatggcatcatcccctctcagcccacggtacacaaacgcggtgaagtagggaaaccagcagatgatgaaggcccccatgacggcggccagtgtcactgtggctttgtgctccctgatggtggctgccttccaggagctaatgtgattgatcctcttggcctgatcccgggcgaccttgaagatgcggtagtaggtgatgcacatgatcagtagcgggaggtagaaggtgaccagcccatccaccagcccgtacacttcattgacctggactttgcacttagaggtggtatgattgcccttgctggtctcgttcctgctgttccaccccaggtggatagacagaaaggacagggtaatggagatgacccaaattaagaccagagagatggcgacccgaactggggtgaccagcacagggtaccgcagtgggtccatgacagcgcagtaccggtcgaggctgatcatgaagaggttaagaatggaggctgtgcagagcatcacatccaggctggtgtagatattgcagaagaccttgccaaagctccacttgcaggacagctggtagatggcagagaagggcagcaccaggaggccgaggagcaggtcagtgatagccaaggacacgatgaaacaattggtcaggttgcggagccggcggttcaagcccacggccagacagacgaccacattgccagcaacggtgatgaggatgaggaccgcaaggaccacggtgatggtgatcttgcatgcggtagagtccaggcaaaaggaagaggctgtgccattgggtgccat

SEQ ID NO: 24687 - DNA, 557 bp, Homo sapiens
  MAP TO AC005544.1; EXPRESSED IN HELA, SIGNAL = 0.4; EXPRESSED IN FETAL LIVER, SIGNAL = 0.97; EXPRESSED IN LUNG, SIGNAL = 0.93; NT HIT: AF142625.1, EVALUE 0.00e+00; SWISSPROT HIT: Q9UBN1, EVALUE 2.00e-73; EST_HUMAN HIT: BI914516.1, EVALUE 0.00e+00
tcacacaggggtcgtccgtcggttcagcatgctgacgtggaaaccttccttcaggtcctgctggaaaaagtcatgcacctgcaggaagctggcctcctggtcggggctgtagctggctgcggtggtcaccttgaggggctccctggacagcgtgtacatggacagctcccccatggggatggcccctgtgatcttcaggcccatgggcgacacgtccctggagggcgaggcctcggtggaccttgagctggacctcgagcgccgtcgccggtacctgtagctcggcatcctggcataaggagaagaggaagacgccttaaggaattcccgtttggtcttaaacctcaactctttatttttctcaatgtaaatgtttacagccaggacgcccacggtctcagccacaatgaaagacagagctccaaagtaaaaagaccagccgtagttgtaatggttctttttgtcttcgtcccgcttgtcactcgggtcacctgtgttgctggaaatgtagacgatgataccgatgatgttactgaggcctgaaagggaagcgggga

SEQ ID NO: 24688 - DNA, 512 bp, Homo sapiens
  MAP TO AL096710.8; EXPRESSED IN HELA, SIGNAL = 1.8; EXPRESSED IN PLACENTA, SIGNAL = 4.4; EXPRESSED IN FETAL LIVER, SIGNAL = 2.8; EST_HUMAN HIT: BF330731.1, EVALUE 0.00e+00; SWISSPROT HIT: Q9UPN3, EVALUE 6.00e-32; NT HIT: AF396879.1, EVALUE 6.00e-53
tctctgtgggttgcagaagtatcaaccttgccaccgtctctcttgctgcaagatttggcagcttccaacactctgtttccagaaattgtgatgtatctcaagtcacctttgtgagaaataacgtcttctgagaaactcttctgcctcttcaatttggtcattaaaccattgatgtcatctgcacctgcctccaggttttcaagttcttgttctgactgctgtagccagtgctcaaactcggtatagtcagcatcaaacttttctaattcttcctgcagagagtgagttaacttcattttcttctctgactcagccagtgcagtttcataatgcactttcagttccttcatgttcttttgcagtttctctttttcttcaggagagagatactgaccctgtttctcaagcaacacttgtgcagactgagtggctatgatcactgcttggtgctgagagatgatcttctcgtgttgggcctatgtgaaaacaaattgatcataatcttcaagcag

SEQ ID NO: 24689 - DNA, 781 bp, Homo sapiens
  MAP TO AC009336.2; EXPRESSED IN HELA, SIGNAL = 2.6; EXPRESSED IN FETAL LIVER, SIGNAL = 3.2; EST_HUMAN HIT: AI858239.1, EVALUE 0.00e+00; SWISSPROT HIT: P70217, EVALUE 1.00e-100; NT HIT: gi11430007, EVALUE 0.00e+00
ctggaaaggaagatttccaaaagtgggacccctgtggctggtccttggtgcagtacacctggctgttccacccgttagccagcgtccaggactggtacccctccatggagatgtaggcctcgtgccgaggctccccggagccgaaagtggacaccatgtcgatatagccgggcacgtgctggtaagggctcgtatagccctggtagaaggatacctccttggctcgcgctggcacctcgttggccggtacgctgctgctcgccaggcctgacacgtccatgtacttctccacgggaaagcctcccagcgaggcgtgcggcgatgacttgagcgcattctgctgtaagcccacgccgtgcgacatacggcagctgtagtagccgttgccgaagtggtagccgtagcccagcgctggagcgctcgggggcgctgcagcggccgctgcaggcgtgggtgctgggcactctttggctgggggagcctccgggcgcgccgctacaacggcagaagaggacgacgacgaggaagagcccgtgcgctcagaggtcccggggtacgcaaagccggaggctgccgccgccgccgccgcagccgccgctgccgccgccgccgcccgccccgaatgcgtcccggcgaacacaggcgcggagagaaagccgcggcactggcctgacgccgccgccgccgccaccgatgaggaggaggaagaggccggggcgccaccggcgcccccgccgtctgcccgcagcccgtccatgtcccagctcccggcgcggctcat

SEQ ID NO: 24690 - DNA, 532 bp, Homo sapiens
  MAP TO Z69710.1; EXPRESSED IN LUNG, SIGNAL =   2; EXPRESSED IN FETAL LIVER, SIGNAL = 1.7; EXPRESSED IN HELA, SIGNAL = 1.4; SWISSPROT HIT: Q06084, EVALUE 1.10e-01; NT HIT: L20156.1, EVALUE 5.10e-01; EST_HUMAN HIT: L34969.1, EVALUE 1.00e-115
atctcaacagtcaagccaagatccagctgcagtcaaaacacaatacgcctggtggagcctcttccaggttcaaacacgggaaccacgctcggagctggacccggacccgagcctcttccaggctcagacacgggaaccacgcccagagccggacccgagcctcttccaggctcagacacgggaagggaaccacgcccagagccggacccgagcctcttccaggctcagacacgggaagggaaccacgctcggagccggacccgagcctcttccaggctcagacacgggaagggaaccacgctcggagccggacccgagcctcttccagactcagacacgggaagggaaccacgctcggagccggacccgagcctcttccaggctcagacacgggaagggaaccacgcccggagccagacccgagcctcttccaggctcagacacaggaacattctcggagccggacctgagcaaccgccagtccatcagctatggtcagaggaaggcctccgtggctgtctctcccccatga

SEQ ID NO: 24691 - DNA, 801 bp, Homo sapiens
  MAP TO AC010332.6; EXPRESSED IN HELA, SIGNAL = 0.51; EXPRESSED IN FETAL LIVER, SIGNAL = 0.98; EST_HUMAN HIT: AA774749.1, EVALUE 0.00e+00; SWISSPROT HIT: P51522, EVALUE 2.00e-72; NT HIT: gi14754695, EVALUE 4.00e-18
ggaggagctgtgtattgggaagcaatgcagaaaacaagcctattaaaaatcaacttggattaacccttgagtcacatctgtctgaattgcagctgtttcaagccggaaggaaaatttacagaagtaatcaagttgaaaagtttacaaaccatcgttcctcagtttcaccacttcaaaaaatttcttctagtttcacaacacacatttttaataaatatagaaatgatcttattgatttcccattactcccacaagaagagaaagcatacattagaggaaaatcttatgaatatgaatgtagtgaagatggtgaagtttttagagtccctgcaagccttactaaccatcaagtaatccatactgcagagaaaccttacaaatgtactgaatgtggcaaggtcttcagtcgcaattcacaccttgtagaacattggagaattcatactggacagaagccttacaaatgtagtgaatgtgacaaggtgtttaatcgcaattcaaaccttgcacgacatcaaagaattcatactggagagaagcctcacaaatgtaacgaatgtggcaaagcttttagagagtgttcgggacttactacccatcttgtaatccatactggagagaaaccttacaaatgtaatgagtgtggcaagaacttcaggcacaaattttctctaaccaatcatcagagaagtcacacggcggaaaaaccttacaaatgtaatgaatgtggcaaggtctttagtctgctttcataccttgcacggcatcaaataattcatagtacagagaagccctacaaat

SEQ ID NO: 24692 - DNA, 528 bp, Homo sapiens
  MAP TO AC005837.1; EXPRESSED IN HELA, SIGNAL = 1.1; EXPRESSED IN HEART, SIGNAL =   2; EXPRESSED IN LUNG, SIGNAL = 1.6; EXPRESSED IN FETAL LIVER, SIGNAL = 1.5; SWISSPROT HIT: P16951, EVALUE 6.00e-03; NT HIT: gi14769267, EVALUE 0.00e+00; EST_HUMAN HIT: AL556596.1, EVALUE 0.00e+00
cattaaagaaaggtctctacagtccctggcaaagcctaagtcccaggcacccacaagggcaaggaggacaaccatctatgcagagccagtgccagagaacaatgccctcaacacacaaacccagcccaaggcccacaccaccggagacagaggaaaggaggccaaccaggcaccgccggaggagcaggacaaggtgccccacacagcacagagggcagcatggaagagcccagaaaaagagaaaaccatggtgaacacactgtcacccagagggcaagatgcagggatggcctctggcaggacagaggcacaatcatggaagagccaggacacaaagacgacccaaggaaatgggggccagaccaggaagctgacggcctccaggacggtgtcagagaagcaccagggcaaagcggcaaccacagccaagacgctcattcccaaaagtcagcacagaatgctggctcccacaggagcagtgtcaacaaggacgagacagaaaggagtgaccacagcagtcatcccacc

SEQ ID NO: 24693 - DNA, 792 bp, Homo sapiens
  MAP TO AP000512.1; EXPRESSED IN FETAL LIVER, SIGNAL = 1.4; EXPRESSED IN HELA, SIGNAL = 1.3; NT HIT: gi15304463, EVALUE 0.00e+00; EST_HUMAN HIT: BE177118.1, EVALUE 0.00e+00; SWISSPROT HIT: P24711, EVALUE 1.00e-04
gtaccctagatgaaccatgggaggtcctggctacacagccattctgtctgagagagtctgaggactctgagacccagccttttgacacgcaccttgaggcctatggaccttgcctgtctccacctagggcaataccaggagaccaacatccagagagcccagttcacacagagccaatggggattcaaggcagagggaggcagactgtggataaagtcatgggtataccaaaagaaacagcagagagggtgggccctgagagagggccattggagagagaaactgagaaactgctaccagaaagacagacagatgtgacaggagaggaagaattaaccaaggggaaacaggacagagaacaaaaacagttgttagctagagacacccagagacaagaatctgacaaaaatggggaaagtgcaagtcctgaaagagatagggagagtttgaaggtagaaattgagacatctgaggaaatacaagagaaacaagtacagaagcagacccttccaagcaaagcatttgagagagaagtagagagaccagtagcaaacagagagtgcgatccagccgagttagaagagaaggtgcccaaagtgatcctggagagagatacacagagaggggagccagagggagggagccaggaccagaaagggcaggcctccagcccaacaccagagcctggggtgggggcgggggaccttccgggacctacctcagcccccgtaccttctgggagccagtcaggtggaaggggatccccagtgagccccaggaggcatcagaaag

SEQ ID NO: 24694 - DNA, 1317 bp, Homo sapiens
  MAP TO AC005020.1; EXPRESSED IN PLACENTA, SIGNAL = 2.5; EXPRESSED IN FETAL LIVER, SIGNAL = 2.3; NT HIT: gi13937343, EVALUE 0.00e+00; EST_HUMAN HIT: BI254522.1, EVALUE 0.00e+00; SWISSPROT HIT: P52742, EVALUE 6.00e-81
tgctctgatgttgaactagatgtgctctctgactggagttcttttcccatacatcacaatcaaaggctttctgtctggtgaggacttcttgttgcaggataagatctgagctatgactgaaactgccctcatactcattacattcatacgatttctctttcctatgcattttgtgatgctgaataaggcatgaggtttgactgaaagcttttccacattcattacattcatgtgctttctctcctgtgtgaattctttgatgctgaataagatgtgaattcaatctgaagtcttttccacattcactacacgtatagggcttttctctgaaatgaattccttgttgtttaatataggccaacccatattcatcatactcataggctttctcttcatgatggaccctctgatgttcaagtaggtatgaagtatggcagaagtcactgccacatacagtacacttacagggcatctctttgtgaattttctgatgttgagtaaggtggacactacgactgaagactctttcacaactgctacatttgtaagatttggctctggtgtgaattttcttatgctgaattatgcctgagcttggactacaggatttatcagacgcttcacaggatttatcagatgcttcacatttgtaaggtttttctctagtgtgtattcttttatgtcgactaagacttgagctctgactgaaagacttttcacattctttacatttgtagggcttctctctagtatggattctctgatgtctagtaagggctgagctctgatggaaaattttcccacatacatcacatttataggatttctcagtgttagggatgctctcccatttattaaggtgggagagatccattaagctttccttacattcactactctgaaaatcctctgttagatttaagtgttcatgtttaccagaggctgaattctggttgaagctcatgtcatacttatcattgtcatcggtattctgtattctaagaactctctgatctgcatcaatagtagagtccagactgaagcttttttcgggttcatgacattcattgttcttctcactggtgaaggtttccttgctgattgttatttgcctaaactctctctccaggtacagaaatttccttagaatttcctgaagtctttctaatctgtcctcagacttatacacttctctagtctcaggaacttgggtaatatcgtgtttgagtcttcctactctcactttgtatgaatgcacttcttccgaaattttctgcttaggaatcaacagcttgttctcttctctggtctctccat

SEQ ID NO: 24695 - DNA, 584 bp, Homo sapiens
  MAP TO AC008174.2; EXPRESSED IN FETAL LIVER, SIGNAL = 1.4; EXPRESSED IN HELA, SIGNAL = 0.8; SWISSPROT HIT: P37116, EVALUE 1.90e+00; EST_HUMAN HIT: T20045.1, EVALUE 8.20e-01
agaagctaccggaagaaggctatgatgcggatacacttgaaagtggcatggagaccctgactatagctggattatagataaggagaaggagaaaggaaaggacaatgattcactttgtctacaatttaagcttagtgctgaaagtctgcaaaagactaagtttcactaaatccaagtagaactataaaaatggaggattccatggaatcatttgcttatgagcagcactcttatgtaatcattaaaattagttatgattatatataattccttaggtacttacatatttgtgtaaacaggagaagaaaatatacccgggtctgtagcatgagcctgaggtcctatttatcagaaaaataaaattacatagtttgtatccatcctcagcaacttgctaaatggtaatcctccagtaggtatttattttctgttatcactgcctcgtttacaggctttcagggactctccacagtgaagtccaaagtccttagcaaggacctgtactgtaagatctgatgtccttatctacctctccagtgtcttctctgactagtctttcatacttatgctatggtccagagaca

SEQ ID NO: 24696 - DNA, 587 bp, Homo sapiens
  MAP TO AC020667.3; EXPRESSED IN PLACENTA, SIGNAL = 1.9; EXPRESSED IN HELA, SIGNAL =   2; EXPRESSED IN LUNG, SIGNAL =   2; EXPRESSED IN FETAL LIVER, SIGNAL = 2.3; NT HIT: gi16161709, EVALUE 0.00e+00; EST_HUMAN HIT: AA460595.1, EVALUE 0.00e+00; SWISSPROT HIT: Q92545, EVALUE 2.50e+00
atgggcaagcatctgttgtgccccacgcttcagagaatttggtttctcaagtgccccagggccatctccagagcatgcctactgggaacatgcgggcttcccaggagctacatgacctcatggcagccagaaggagcaaactggtgcaagaggagcccagaaacccaaactgtcaaggctcatgcaagagccaaaggccaatgtttccccctattcacaagagtgagaagtctaggaagcccaacttagaaaaacatgaagaaaggcttgaaggattgaggactcctcaacttaccccagtcaggaaaacagaagacacccatcaggatgaaggcgtccagctactgccatcaaagaaacagcctccttcagtaagccactttggagaaaacatcaagcaattttttcagtggattttttcaaagaaaaaaagcaagccagcaccagtcactgctgagagccaaaaaacagtaaaaaacagatcatgtgtgtacagcagcagtgctgaagctcagggtctcatgacggcagttggacaaatgctggacaagaaaatgtcactttgccatgcgcaccatgcctcgaag

SEQ ID NO: 24697 - DNA, 792 bp, Homo sapiens
  MAP TO AC012085.4; EXPRESSED IN FETAL LIVER, SIGNAL = 1.4; EXPRESSED IN LUNG, SIGNAL = 1.2; EXPRESSED IN HELA, SIGNAL =   1; SWISSPROT HIT: P18669, EVALUE 0.00e+00; EST_HUMAN HIT: BI769315.1, EVALUE 0.00e+00; NT HIT: gi14763462, EVALUE 0.00e+00
tcacttcttggccttgccctgggcagccacagcttccatggctttgcgcaccgtctcttcatcccccagaaactgcatgggcttgataggcttcaagttcttgtccaattcatagacaatgggaataccagtcggcaggttcagctccatgatagcctcttcagagagaccctccagatgcttgacaatgccccggaggctgttgccatgggctgcaatcagtacacgtttcccctccttgatctggggaactatttcttcattccagaagggcagagctctggcaatagtatccttcagactctcacaggagggtagctgatcttctgtgaggtctgcatacctacgatccttactgatgttgctgtagaaaggatggtcgggctccatcggaggtggtgggacatcataggagcgcctccagatcttcacctgggcctcaccatgctttgcagcagtttctgctttattgagaccggttagacccccatagtgccgctcattgaggcgccaagtcctcaccactggcagccacatctgatcaatggcatctagcactgtccagagggtccggatcgctctcttctgcactgaggtgaagcagatgtcaaactcatagccagcatctcgtagcgcctgcccgccgcgcttcgcctcctcgtggcccgccgggctcaggtcggcgtcgtaccagccgctgaagcggttctccaggttccatgcgctctcgccgtgccggatcagcaccagtttgtaggcggccatggcggcgggctggggatgcggcaccga

SEQ ID NO: 24698 - DNA, 732 bp, Homo sapiens
  MAP TO AC005151.1; EXPRESSED IN LUNG, SIGNAL = 1.2; EXPRESSED IN FETAL LIVER, SIGNAL = 1.3; EXPRESSED IN HELA, SIGNAL = 1.9; NT HIT: gi7305360, EVALUE 2.00e-16; SWISSPROT HIT: P28968, EVALUE 7.00e-03
aacacaggtggtggatgtattggcctcagtggtagttgccaaagcctccgccaaaccctctacgatgctcagggctggggctgagcgcccagatggttctgtggtggcctcgtccaccggctctgctgccaggtgaggccctgccgaggttccatgggcctcagccagctgaggcaacagaaccagcatgctgtcttggggggccgtcctggctgagacacggctcagggcataggatgtgggcactggcagagctgtgcctgcctgggctccctcgggctcagccaccaagggcgtgagagggtggctcgtagcaggcgtgagctctgtgggcccaccctctgcagaaccatacatggaagtgggcagagacacttgcttggataggatggccaccttccctgtggtgctctttcgtgggacaacagataccatggaggccgtgccctcagccacaggcaggactccagaggttggcaatgtggctcccagcagcaggcctggagctgtgcctgctgctgggggtgctatgtgagtgggtgggtgcgcctgggtcattgctgctggagtgaaaggcagtactgggctaagtgtctgagcaggcagagtcgtggcctgtggctggagtggagtggtgatgacagaggctttggggccgggtgtggccactggggcagatgtgcccaccttggccaggggcaggctggtgtcgggaggcaggccagagaggag

SEQ ID NO: 24699 - DNA, 674 bp, Homo sapiens
  MAP TO AC005664.2; EXPRESSED IN FETAL LIVER, SIGNAL = 1.9; EXPRESSED IN HEART, SIGNAL = 2.7; EXPRESSED IN HELA, SIGNAL = 1.4; SWISSPROT HIT: P53735, EVALUE 1.00e+00; NT HIT: gi13647481, EVALUE 0.00e+00; EST_HUMAN HIT: AW964989.1, EVALUE 0.00e+00
gagaagcggtgatggagagccgagctcgccccttccaagcgctgccccgtgagcagtctccaccacctcccctgcaaacgtccagtggtgcagaggtaatggacgttggctctggtggtgatggacagtccgaactccctgctgaggaccccttcaacttctacggagcttctcttctctccaaaggatccttctctaagggccgcctcctcatagacccgaactgtagtggccacagcccgcgcaccgcccggcacgcacctgcggtccggaagttctcccctgaccttaagttgcttaaggatgtaaagattagcgtgagctttaccgagagctgcaggagtaaggacaggaaggtgctgtacacaggagcagagcgcgacgtgcgggcggagtgcggtctgctccttagccctgtcagtggggacgtgcatgcttgtccctttggcgggagtgttggtgacggggtaggcatagggggtgagagtgctgataagaaggatgaggagaatgagctggatcaggaaaagagagtggagtatgcagtgctcgatgagttagaagattttactgacaatttggagctagatgaagaaggagcaggcgggttcacggctaaagcaatcgttcagagagacagagtggatgaagaggccttgaatttcccctacgag

SEQ ID NO: 24700 - DNA, 782 bp, Homo sapiens
  MAP TO AC011406.1; EXPRESSED IN HEART, SIGNAL = 1.4; EXPRESSED IN LUNG, SIGNAL = 1.9; EXPRESSED IN FETAL LIVER, SIGNAL = 1.9; EXPRESSED IN PLACENTA, SIGNAL = 1.5; EXPRESSED IN HELA, SIGNAL = 5.2; NT HIT: gi14726708, EVALUE 0.00e+00; EST_HUMAN HIT: BG824417.1, EVALUE 0.00e+00; SWISSPROT HIT: P49777, EVALUE 3.00e-10
aataagggtttgtgtcactcttttcattaaatattcatctatgccatttaattgtccaaaaatggcatcaggaatgtctacacaagtggaaaggaactgtctaagtttctgtacacttgatatggcttctgtgatggtgacttttggttgctctggtaaagatacctccccttcatcttcacttcctgcttcactggtattttcgccagccaccatgtcctggatgatgtctgtgtcctgagagataatgagatcatcatctgcagtaacaaagtcctggaaatttacttcatttgggacacaggtggcaatagccactgtgtgccacaacttttcaatggcaatgtctggttcactggctgctgattctgtgtcacattctgcaaattccatagggacgatgcctgccttctgccaacatttcaccactgtggatggcttgactgaccaccacgctgcagcaatcatgtcgatggcctgcttgatgtccacctcttcttgatcctcactgctgttgagcttgaggaggatctgttttagaaggtggctctggtacagtactttcatggtgtgaattatgccaagattcagtggctgcaggacagcagtacagttggagggcagatacccaacctgaatcctttccaagtgtggaagcatgttatgagcagagcagttgtctatgagcaagaggatccggcgttccgccctcttcatcctggcatccacttgcatcagccactcattaaacagatcccttgtcatccaagcccactggttgg

SEQ ID NO: 24701 - DNA, 1103 bp, Homo sapiens
  MAP TO AC018432.4; EXPRESSED IN LUNG, SIGNAL = 0.95; EXPRESSED IN FETAL LIVER, SIGNAL = 1.1; EXPRESSED IN HELA, SIGNAL = 1.5; SWISSPROT HIT: P10587, EVALUE 3.10e-02; EST_HUMAN HIT: AW992129.1, EVALUE 1.60e+00
aaaaatagaagaaaaacaccagacagtaaaagcaaactcagtcttaatgttccatctctaaaagccaaaaaaacaccaacttcacaagtatttcaaatcacagtatgtcacactttaaaaaataggaatgagttaggatgcaagaataacactgagaagaaagaattacatgaaaggaaagatatatcagatatagctttgcatcttatttctgtttccaagcttattctgccttatgttaaaaattattccagaaaacaactagtgaaagtcatgccgggtttaataaaatgtggacattttctgcagaagcaaaataagtcaccagatacagagaaaatcaattatgcaggtcctcttgaggagacaggaatctcagatattactaaaaaggaaaaggagtatgacaaagaaaacaaaagactaaaaaacatttcaccaaaaatgttacctcagctagaacaatccttcatggtcaacactgttcaactaaaagcaccttgtttactagtagaaacaaatgggaagagtaaagaatctcttaaagactcaattacacaagcaaagggaattggtattacagaatttcatgttctaaatagtaaaaaaccatttgatctccatattccaaagcacaagacatctttagaagaagctatatcaaaacctatgcagaaacttgtttcctctcctgaaatggaatcgaacaatagaatgaaaatacaggaggacctacaaagttcagaaaattcccatcttcaactttcaaatggagaggagttaccaaccagtacaccaaaaacgcaaaggtgctttccaagggaaaatacacagaaacaaaaagattttttggaacttgttctggagttgtcaaatgtcggtttgctcatttccccaggaagcaaaatgcataaaagcagtgaagaattagaagccataaaaattcaagtgaatacagaaagtgtaaatctgaaggaaagtaaaccattgatacttaatgttacagaagacagtgacctacgtgaaagtgaggaactggaatgcaacactggaagtaacataacaaatatgcatcaagataaagaaacgtctgatgcatttca

SEQ ID NO: 24702 - DNA, 1841 bp, Homo sapiens
  MAP TO AC005789.1; EXPRESSED IN HELA, SIGNAL = 1.5; EXPRESSED IN LUNG, SIGNAL = 0.99; EXPRESSED IN FETAL LIVER, SIGNAL =   1; SWISSPROT HIT: Q9UKN7, EVALUE 4.40e-02; NT HIT: AF010496.1, EVALUE 7.10e+00; EST_HUMAN HIT: BI461547.1, EVALUE 0.00e+00
caggcagagacgttgcgtggcaggcggcgatggcgtggctggtggtggcagtaacacttgcagggacaggagttaagcacctggaagggcagccagtggcgcgcagcgcgggtgttagctgccccagtctgagaggccccgctgccaccaccccctccaccactgctgtcaggcacggtagctgtagctcgttcgcgaggaccatctccatgcaagccatccttacgggtcgcgccccgggctgcacgggaacccttgttcctgcgcgtgcgggtcttgatgggcgcagccgcgggtgcgggcgcggacacaggcggcgagggctcagccacggtgggagctggagccggggatggggccggggcctggtcggcggctaaggctgggggcagagcaggggctgcggtgggagccagggctgactccttgtggcccagacccggggtgagcgggggagccaccggcagcggcgttggctggagcgctggtggctgcagtgtgggcggcggtgtgggcggtggcagcggtggtaactcctgcaggcctggaggccccgggcgcatgggctcgccattggtgggtgctgggaagatgaacgtaggcggcgccagcagggcaggtgcgggcctccggggcccgggagctgagtgtatctgctctggtggtggcggaggggagccccaaggcccagagagtgcggccgcacgccgtcgcggcgccccgatgcctccgccagccccgttgaagcggaagtggcgttcagggccgtcgggagcgctaacccagtcgaatttgggcttcgagcctgggaaggtggtgtagggtggcggcggtagggcccgggcttgggacgcaggcgccgagggaggaccagagcacccttcgccgtctccatcacctccctcggcttcctgtgcccctcgagaaacctctcccaaggggcgagcggctccaggaggcaggggcccttgcttcaggacctcggcgtaagagatggcacctgaggcagcaaagaggccgccgcctccgccgccccccagcgaagctttggctgctaaggaactcgaggctgccggaggggccaaagagggcctcgacttgaaggtgattttacacagcaggctcagaccggactcggaatccgcaggctgggccatttcgccttcgcccgcatggggaggcgcccctccgcgagccctgccggccgtctggccctggttgcggggcccagcctggctttctgtcgggggtgaggcgggtgtggccagagcaggagtgattctgcggtccgccggctgccgttcagaaggtaatggtggtggcggcttccaagtctccaggggcggcggaaattgggatggggccctcgggacagtgtccttcacggatagttgccggggcggcggcggcggcttcagcgggcggaggctcggagggtcgccctggccgcgatggctcgcctccagcaggcggcggatccggggaactggagtgcccgcgggcttttgccatttagacgggccgggcagcagagtccccgcgggggccgggggtggtgcagagaccgcggccgcctcttcaggagggggcatcactggagagggccgttctaaggtgaggggcagggtcgagggtgaggcctggggctcccggggtaccatgagtcccgggggtgtggcgctgccagggaaccagacacccagcccacgagtcaggcgcatggcctgggaggtcatctcgggctccaccagggacgtccggcgggagtcgggggcgcggtccgagggctgcacttttcgggagcccccgcccgcggatggctccgactgcaagttccccat

SEQ ID NO: 24703 - DNA, 594 bp, Homo sapiens
  MAP TO AF207550.1; EXPRESSED IN FETAL LIVER, SIGNAL = 6.1; EXPRESSED IN PLACENTA, SIGNAL =  23; EXPRESSED IN HELA, SIGNAL = 3.6; SWISSPROT HIT: Q14119, EVALUE 2.00e+00; NT HIT: gi15309354, EVALUE 0.00e+00; EST_HUMAN HIT: BG761564.1, EVALUE 1.00e-101
ctgctcgacagtggcagggtccatagcctcgatgcgtgctgcagccgcctcatactcgtcctcactgttgtagcctgcgccgacctcctcacgctcgggactgcccccgccaaccgcgccaaccccgggagcttgacgtcgccgcttgctgtgcccaggcccggagcagcagccgcccacgcctacggcaccacccacacccaccaccacgcccgcggcacccacacccgccgccgctgcgcccagcgcgtcgccgggaccgccgccgggaccacctgggcccccgcaaggaggtggagaagcctgttgtggccggggacccgccactgcaccaggcggcacggccagcgcccagcgatgaagagcgcccggcggtcctggtagcgggccttgaggcggtggcgaagctcgcggacgggcccccacgacgccggagtcacggtcgcgatcgccgccgcccacgcccgtgccgccgccgcccacgcccacacctccgccgcgccgcggcgccgggggcatcggcccgggcggcggcggctcgttggcggggtcggcgtcgggaggcggcggcttctttttggggagtatagtcat

SEQ ID NO: 24704 - DNA, 1602 bp, Homo sapiens
  MAP TO AL136311.2; EXPRESSED IN HELA, SIGNAL = 4.2; EXPRESSED IN FETAL LIVER, SIGNAL =   2; EXPRESSED IN PLACENTA, SIGNAL = 1.8; SWISSPROT HIT: P17012, EVALUE 1.00e-12; NT HIT: gi14783257, EVALUE 0.00e+00; EST_HUMAN HIT: AU118128.1, EVALUE 0.00e+00
ttcattgtcgaaatgctggacctgtagctgtagctgagaagagcattacccaggttgcagagaaattcatattaagaggttattgtccagattgcaatcaagtctttgtggatgaaaccagcacccaaaatcataagcagaattcaggacacaaagtccgagtcattaactcagtggaagaatcagtcttactctattgccacagcagcgaagggaacaaggatccttcttctgacttgcatttattgttggatcaatcaaaattttcatcacttaaaagaaccatgtctattaaagaatctagctcactggagtgcattgccattccaaaaaagaagatgaatttaaaagataaaagccatgaaggtgttgcttgtgtccagaaagaaaaatcagtagttaaaacctggttctgtgaatgcaatcagcgattcccaagtgaagatgcagtagaaaagcatgttttctcagcaaacacaatgggttataaatgtgtggtctgtggaaaggtatgtgatgattcaggggtcattcgtttacacatgagccggattcacggaggggcacatttaaataactttcttttctggtgtcggacatgcaaaaaggagttaacaaggaaagatactatcatggcacatgtgactgaatttcataatggacacagatatttttatgagatggatgaggtagaaggtgaaactttgccatcatcctctacaacattggataatttgactgctaacaagccttcatcagctattactgttattgatcattccccggcaaatagttctccgaggggtaaatggcaatgccggatttgtgaagatatgtttgattcccaggaatatgtaaaacagcactgcatgtctttggcaagccacaagtttcatagatacagctgtgctcactgcagaaagccttttcataagatagaaacattgtaccgacattgccaagatgagcatgacaatgagataaagattaaatacttctgtgggctttgtgatcttatctttaatgtggaagaagcatttctgagtcattatgaggagcaccacagcatagattatgtatttgtgtcagaaaaaactgaaacttcaattaaaaccgaagatgattttccagtaatagagaccagtaaccagttaacttgtggttgccgtgagagttacatctgtaaagtcaacagaaaagaagattatagcagatgtctccaaatcatgctggataaaggaaaactgtggtttcgctgcagtttatgttcggcaacagcacagaatttaaccgacatgaacactcatatccatcaagtgcacaaagaaaagagtgatgaggaggagcagcagtatgtaatcaagtgtggcacctgcaccaaagcatttcatgatcctgagagtgcacagcagcatttccatagaaaacattgcttcttacagaaacccagtgtggctcattttggatctgaaaaatcaaacctgtacaagtttactgctagtgcctcacatacagagagaaaactgaaacaggcaataaactattcaaaaagtttagacatggagaaaggagttgagaatgacctaagctatcagaatatag

SEQ ID NO: 24705 - DNA, 477 bp, Homo sapiens
  MAP TO AC004586.1; EXPRESSED IN HELA, SIGNAL = 3.4; EXPRESSED IN FETAL LIVER, SIGNAL = 1.3; SWISSPROT HIT: P21827, EVALUE 1.70e-01; NT HIT: gi15809005, EVALUE 0.00e+00; EST_HUMAN HIT: BE258003.1, EVALUE 0.00e+00
gaacaccccgctccccccacccccgccgcctccattctggccaccctgctccaatccgccccgcaggtggaggccgcttggagctgtcgggctcagccagcggcgcggcgggccgctgcaaggacgcgtgggcctcggaggggctcctcgcggtgctgcgcgccgggccggggccggaggcgttactgcaggtctgggcggccgaatcggcgctgcgtggggagccattgtgggcccagaatgtggtgcccgaggccgaaggggaagacgatccggccggtgaggcccaggctgggaggctacccctgctgccctgcgcccgtgcctacgtgagcccgcgggcgcccttctaccggcctctggctccggagctgcgggcacgccagctggagctgggcgccgagcacgcgttgctgctggacgctgctggccaggtgttctcctggggcgggggcaggtgagcggaggcgggggcag

SEQ ID NO: 24706 - DNA, 1199 bp, Homo sapiens
  MAP TO AC008524.5; EXPRESSED IN HEART, SIGNAL = 1.7; EXPRESSED IN FETAL LIVER, SIGNAL = 1.1; NT HIT: gi14728537, EVALUE 0.00e+00; SWISSPROT HIT: O35464, EVALUE 1.00e-125; EST_HUMAN HIT: AW954605.1, EVALUE 0.00e+00
ttatgtacacgcatcattgggcttcatggatgtggaaaggggagcaaaggatggtttggggggtacgtccggctttagcgagggcgtacgcttcagccccgaccttgtcagtgagttgtaggcgttgaggctgggctgcctcgagacagtcacggcctggccagatggctgggagctgtgcacctggatggagtccaccctctgcggggcgggcggcgggttgtctcccctgccaaagctctggtttctggagaggtgagaggaattggaggagttagtgttgtttcttttgagagtggtggcctggtggcttctcgtgagcgagttcgtggggtagctcctcttatagtcaaccccgtaggaagaggagtggtgcatttccagccgcttgcttagaccggtctgagacagggaggctcccgggggacccagggaggcctcccgctgtggaactttggggggcaggctgtccaggttctccacaaggttcaccccatggttgggactcttgctgctgagatgttccttgatggtcttatactccagtgtggcggcctggtcctccagcgccatctgggccacctcgctcattttgggctggtccacgtactcatgctggtagccctgctgcgtgatgggcaggaccaccacgctggggatgtggctgggggaggcccgcaggggcaggtccgtgggaatcacaggggagcccatggggggcatgtcctttgtgcaggcattgatgaggttctggttcctctcccactcgcggctgccgcggctgggcttccgcttctgctgcagcgttggggttgactctggggtggggagggccgtcaggtccaggtggtgctggtctgctttaatgagcatcttggccgtgttgccgggagtggcgagcttgccgttgtgcatgagtggcgtgaggatggcctccggctttgggtctttggattgagtgtccccaaagaggccgctgagcttggtgacgctgctcatggagccccggcgcgagtgggtgagctccttctccttgcgctgcaccacagccacgtctttgcgccgatgatcacagacgcagtagacggtgatgcccgagaagacggcccccatgacgaaagccaggatgactgcaatggccaagagggtgacgggaaccagctggtcgtggcctttgaggtaactttcccgaatcactc

SEQ ID NO: 24707 - DNA, 676 bp, Homo sapiens
  MAP TO AL136980.2; EXPRESSED IN HELA, SIGNAL =   4; EXPRESSED IN FETAL LIVER, SIGNAL = 1.5; SWISSPROT HIT: Q09417, EVALUE 6.00e-44; EST_HUMAN HIT: AW502347.1, EVALUE 0.00e+00; NT HIT: gi15298799, EVALUE 0.00e+00
ctgccattctgtcctcctgttgtactagcccagtctgttgaaaatgtctggacaacgtgtcgagcaaataaacagaaacgtcaccttctggaggccctctggctgagctgtggtggtgcagggatgaaagtttggctccctctcttccctagggatcaccgcaagccccattccttcttgtcccagcggatcatgctgcctttccacatcaacatttacccgctagctgttctgtttgaagatgctttagtccttggtgctgtcaatgacactttgctctatgattctttatatactcggaacaatgctagagaacagctggaggtgctcttccctttctgtgttgtggagagaacctctcagatctacctccaccacattctacgtcaacttctggtcagaaaccttggggagcaagccttgctcttggcccagtcctgtgccacattaccttacttccctcatgtgctggagctcatgctccatgaagtactggaagaagaagctacctcacgggagcccattcccgaccctctgcttcccactgtggcaaaatttatcactgagttccccctcttcctgcagacagttgtccattgtgccaggaagaccgaatatgccctgtggaattacctttttgcagctgttggaaaccctaaggacttgtttgaggagt

SEQ ID NO: 24708 - DNA, 573 bp, Homo sapiens
  MAP TO AC011307.1; EXPRESSED IN FETAL LIVER, SIGNAL =   1; NT HIT: AF245505.1, EVALUE 0.00e+00; SWISSPROT HIT: O67213, EVALUE 1.10e+00; EST_HUMAN HIT: BF875993.1, EVALUE 0.00e+00
gaattctgaagtgtaaaaaggacaaagcttatgaaggcggtcagttgtgtgcaatgtgcttcagtccaaagaagttgtacaaacatgagattcacaagctgaaggacctgacttgtctgaagccttccatagagtctcctctgagacagaacaggagcaggagtattgaggaggagcaaaaacaagaagagaatggtgacagccagctcatcctggagaaaatccaacttccccagtggagcatctctttgaatatgactgatgagcacgggaacctggtgaacttggtgtgtgacatcaagaaaccaatggatgtgtacaaaattcacttgaaccaaacagatcctccagatattgacataaatgcaatggttgccttggactttgagtatccaatgacccaggaaaactatgaaaatctatggaaattgatagcatactacagtgaagttcccatgaagctacacagagagctcatgctcagcaaacaccccagagtcagctaccagtacaggcaagatgccgatgaagaagctctttactacacaggtgtgagagcccagattcttgcag

SEQ ID NO: 24709 - DNA, 475 bp, Homo sapiens
  MAP TO AP000346.1; EXPRESSED IN HELA, SIGNAL = 1.4; EXPRESSED IN LUNG, SIGNAL = 1.2; EXPRESSED IN FETAL LIVER, SIGNAL = 0.98; EST_HUMAN HIT: AW375965.1, EVALUE 1.10e-02; NT HIT: X92684.1, EVALUE 2.00e-06; SWISSPROT HIT: Q27969, EVALUE 1.90e+00
ctggggctgggctaggttgatcccgctttgcctgggacatcaggagctgagggtctatataggtcaggccccaggaggtgtcagagggtttgtggaaggatgggtgtgtgtgtgtacggacagatatatggatggacagactgatggaaaaacggataagtaactgtccagtctgaagtcctgtccatgaaggagggaccctgggaggcctcttgggggcagctgtgcttccaggtactttgtcactacccaagaccttagggtcccagggcagcaattgaaagggtccccatttccctttccctccctgtaactggccaagccccctgaaatgtctgaggtttggaagcagcaggtgggttgtgaccttcagggacccacttccagcttcagccaatcctgcccaccctgggtccctctgagctctgagtgtctggctgtgccctacagttggccatagctctgcacctagcat

SEQ ID NO: 24710 - DNA, 669 bp, Homo sapiens
  MAP TO AC008752.3; EXPRESSED IN HELA, SIGNAL =   2; EXPRESSED IN HEART, SIGNAL = 1.5; EXPRESSED IN FETAL LIVER, SIGNAL = 1.3; EXPRESSED IN LUNG, SIGNAL = 1.4; NT HIT: gi15302126, EVALUE 0.00e+00; SWISSPROT HIT: O95897, EVALUE 0.00e+00; EST_HUMAN HIT: BF341903.1, EVALUE 0.00e+00
atggatggctattacaaaggccgccgggtcctggagttccgtaccctgggagacttcatcaaaggccagaactttatccagcacctgctgccccagccgtgggcgggcacgggccacgtggtgtacaacggctccctgttctataacaagtaccagagcaacgtggtggtcaaataccacttccgctcgcgctctgtgctggtgcagaggagcctcccgggcgccggttacaacaacaccttcccctactcctggggcggcttctccgacatggacttcatggtggacgagagcgggctctgggctgtgtacaccaccaaccagaacgcgggcaacatcgtggtcagccggctggacccgcacaccctcgaggtcatgcggtcctgggacaccggctaccccaagcgcagcgctggcgaggccttcatgatctgcggtgtgctctacgtgaccaactcccacctggctggggccaaggtctacttcgcctattttaccaacacgtccagttacgagtacacggacgtgcccttccacaaccagtattcccacatctcgatgctggattacaacccccgggagcgcgccctctatacctggaacaacggccaccaggtgctctacaatgtcaccctgtttcacgtcatcagcacctctggggacccctga

SEQ ID NO: 24711 - DNA, 513 bp, Homo sapiens
  MAP TO AL157971.2; EXPRESSED IN HELA, SIGNAL = 0.48; EXPRESSED IN FETAL LIVER, SIGNAL = 0.92; SWISSPROT HIT: P10645, EVALUE 4.20e-01; EST_HUMAN HIT: AW470753.1, EVALUE 0.00e+00; NT HIT: gi14250967, EVALUE 7.60e+00
tcagcgggagttgatcccggcggccccgcgcacccgcccgggccccgcatgccggccctcccgccttacctccgccaggtagaggttgaggagacagagcgtggagaactggagacaggaggggaagcagtagagcagccagtgggggaagaagtgcaggtgagcgggcggccggagcaagggcagggagccgctgagcgagaaggcggcggagaagagggtggtcctgagcgctgcccacaggagacagaggaagaggcagaggctctggtaactcagccgccgctcgcggtacaggagcagccgccacagctgcaggtaggcaaaggcgaacagcgcggcgtagagcagggcgtgcaggacgctcagcgccaactgcacggagcccggcaccgcggcgcctgaggctgcagcgacggcgcctccgcctccgctgcccccgccgggcgtggagggctcgcggccggctgcgggggcggcagcggccgccggacccggcacggacaccctcat

SEQ ID NO: 24712 - DNA, 525 bp, Homo sapiens
  MAP TO AP001717.1; EXPRESSED IN PLACENTA, SIGNAL =   2; EXPRESSED IN HEART, SIGNAL = 1.9; EXPRESSED IN FETAL LIVER, SIGNAL = 1.1; EST_HUMAN HIT: BG254098.1, EVALUE 0.00e+00; SWISSPROT HIT: Q28343, EVALUE 4.00e-12; NT HIT: gi16166227, EVALUE 0.00e+00
ctataatacggtagcacaggagctgcctactacattagtgggggagacttctgtaacagtaggagtggatcccttgatggccccagaatcccatatattagcttctaacaccatggagacccatatattagcatccaacaccatggactcccaaatgctagcgtccaacaccatggactcccagatgctagcatccaacaccatggactcccagatgttagcgtctagcaccatggactcccagatgttagcaactagctccatggactcccagatgttagcaactagctccatggactcccagatgttagcaactagcactatggactcccagatgttagcaaccagttccatggactcccagatgttagcaaccagctccatggactcccagatgttagcaaccagctccatggactcccagatgttagcaaccagctccatggactcccagatgttagcaaccagcaccatggattctcagatgttagcaaccagcaccatggactcccagatgttagcaac

SEQ ID NO: 24713 - DNA, 633 bp, Homo sapiens
  MAP TO AC009470.2; EXPRESSED IN FETAL LIVER, SIGNAL = 1.9; EXPRESSED IN PLACENTA, SIGNAL = 1.9; EST_HUMAN HIT: BI670295.1, EVALUE 0.00e+00; SWISSPROT HIT: P16735, EVALUE 8.20e+00; NT HIT: gi14784033, EVALUE 0.00e+00
atggaggccgaggcaggcggcctggaggagctgacggacgaggagatggcggcgctaggcaaggaagagctagtgcggcgcctgcggcgggaggaggcggcgcgcctggcggcactggtgcagcgcggccgcctcatgcaggaggtgaatcggcagctgcagggccacctgggcgagatccgcgagctcaagcagctcaaccggcgtctgcaggcagagaaccgtgagctgcgcgacctctgctgcttcctggactcggagcgccagcgcgggcggcgcgccgcacgccagtggcagctcttcgggacccaagcatcccgggccgtgcgcgaggacctgggcggctgttggcagaagctggccgagctggagggccgccaggaggagctgctgcgggagaacctagcgcttaaggagctctgcctggcgctgggcgaagaatggggcccccgcggcggccccagcggcgccgggggatcaggagccgggccagcacccgagcttgccttgcccccgtgcgggccccgcgacctaggcgatggaagctccagcactggcagcgtgggcagtccggatcagttgcccctggcctgttcccccgatgattgaaggcactgcttcctccacgccgac

SEQ ID NO: 24714 - DNA, 687 bp, Homo sapiens
  MAP TO AL050329.9; EXPRESSED IN HELA, SIGNAL = 1.8; EXPRESSED IN LUNG, SIGNAL = 1.1; EXPRESSED IN FETAL LIVER, SIGNAL = 0.98; SWISSPROT HIT: Q03254, EVALUE 2.70e-01; EST_HUMAN HIT: BE969900.1, EVALUE 0.00e+00; NT HIT: gi14759408, EVALUE 0.00e+00
ggcttgaactgcatagacctaatctattgttgggcttaattattcgtcagaaactgaagcgacagcacagtgcctgtgctagtactagtcatatagctgagactcctgaaagtgcaccaccaatagcattgccacctgataaaaaaagtaaaatagaagtttctacagaagaagcaccagaggaagaaaatgacttttttaattcttttacaactgtattacacaagcagagaaataaacctcagcagaatcttcaggaagaccttccaacagcagttgaacctttaatggaagtcaccaaacaggagccaccaaaacctttaagatttcttcctggcgtgttgattggctgggagaatcaacctactactctggaattagcaaataaacctcttcctgtggatgatatacttcaaagccttttgggcaccactggtcaagtatatgaccaggcccagtcagtgatggaacaaaacactgttaaagaaattccatttttaaatgagcagaccaactcaaaaatagagaaaacagataatgtggaagtaactgatggtgaaaacaaggagataaaagttaaagtagataatatttcagaatctacagataagtcagcagaaatagaaacatcagtagtagggtcctcttccatttctgcagggtctttgacgagtcttagtctcagag

SEQ ID NO: 24715 - DNA, 564 bp, Homo sapiens
  MAP TO AL049698.3; EXPRESSED IN HELA, SIGNAL = 0.8; EXPRESSED IN LUNG, SIGNAL = 4.1; EXPRESSED IN FETAL LIVER, SIGNAL = 1.1; SWISSPROT HIT: P55196, EVALUE 8.00e-71; EST_HUMAN HIT: T05759.1, EVALUE 0.00e+00; NT HIT: gi14761892, EVALUE 0.00e+00
tgtaatgtactgcaagtctctgcgctcgatcgtgcggggctgctgctgaggctgcagctcccgaatgactgtttcctgtggccgctggagtgtggaaggcttttcgggcttcatctgctgtgcagtcaggggagaaaacggagcagggtttaaggactgagtgcgcatctggcccaacttcctctcctgctctctccgcttcctctcccgctcctcctccaggcgggccttctccttctcataccaacgctgatgttcttctctctttctccgttcagcagcagccacctgcgcagacggcagccctatctggttggcggaagggggtggtgggagaggcaaatccatggacattccatcgaaatcaccggcatagtggactggaggtggcgggggtggcggaggcaggtctgttcggattggctgggagacggccacaggggtggccggtatggctgctggtgttttccaacggccagggccacttttggtcagtgtggaagcaggggtgaccgacttagaggaatggttcagatgctcctggctagaggtactggagtccag

SEQ ID NO: 24716 - DNA, 551 bp, Homo sapiens
  MAP TO AL021395.14; EXPRESSED IN PLACENTA, SIGNAL = 3.5; EXPRESSED IN FETAL LIVER, SIGNAL = 5.8; EXPRESSED IN HEART, SIGNAL = 2.5; NT HIT: gi14780058, EVALUE 0.00e+00; SWISSPROT HIT: P04374, EVALUE 2.00e-79; EST_HUMAN HIT: BG106406.1, EVALUE 0.00e+00
aaatggaagtcaaacttatcgaagttgtctgcagtcagcaatgattatcttcttgctggtcttgccattcctggacccagagtactccatggcctccacaatcttcatgccttctttcaccttgccgaagaccacatgcttgccatccaaccactcagtcttggcagtgcagatgaaaaactgggaatcgtttgtgttgggtccagcatttgtcatggacaagatgccaggacctgtatgctttaggatgaagttcttatcatcaaatttctccctgcagatgggcttgccaccagtgccaatttggcgtgtgaagtcaccaccctggcacataaaccctggaataattctgtgaaagcaggaacccttataaccaaatcctttctctccagtgctcagagcatgaaaattttctgccgtctttggaatcttgtttgcaaacagctcaaaggagacacagcccaaggactcggtgttgatagcaatgtcgaaggacacagtggggttgaccatggctgatagtacaggactcctggtggcagcagcgtttt

SEQ ID NO: 24717 - DNA, 633 bp, Homo sapiens
  MAP TO AL078639.5; EXPRESSED IN HEART, SIGNAL = 2.2; EXPRESSED IN LUNG, SIGNAL = 1.3; EXPRESSED IN FETAL LIVER, SIGNAL = 2.1; NT HIT: M31423.1, EVALUE 0.00e+00; EST_HUMAN HIT: BF961058.1, EVALUE 0.00e+00; SWISSPROT HIT: P51861, EVALUE 2.00e-27
cttccaaaaaatccgggtcttccaggaaatccgtgtcttccagcaagtccacgtcttccaacaaagccatgtcttccagactatccatgtcttccagaaaatccttgtcttccctcaaatccatagcttccgaaaaatccaggtcttccaggaaatccgtgtcttccagcaaatccacgtcttccaacaaagccatgtcttccatcaaattaatgtcttccagcctacttgtgtcttccaacaaaggtacgtcttccaacaaaggtacgtcttccaacaaaggtatgtcttccaacaaaggtacgtcttccagaaaatccacgtcttccaaccaagccatgtcttccagaaaatccacgtcttccagaaaatatatgtcttccaactaagctacgtcttccaacaaatccatgtcttcctatatctccaggtcttccagcatctccagggcttccagcatctgctcgtcttccaacatctccacgtcttccagcatctctgtgtcttccagcatcttcatgtcttccaacaactacccagtcttccatcaactggctcaatatccatgtcttccaacgtctccagtgtgctgatcttctgacattcaggtcttccagtgtctgcaatatccag

SEQ ID NO: 24718 - DNA, 2652 bp, Homo sapiens
  MAP TO AL031346.8; EXPRESSED IN LUNG, SIGNAL = 1.1; EXPRESSED IN FETAL LIVER, SIGNAL = 1.1; EXPRESSED IN HELA, SIGNAL = 1.9; SWISSPROT HIT: P53958, EVALUE 2.90e-02; NT HIT: gi14779283, EVALUE 0.00e+00; EST_HUMAN HIT: AU130652.1, EVALUE 0.00e+00
ttaatttggaggaataatcatgtgacatgtaagaacaaaaacatgcaagaaaaggaaccaaatgaaataaaaatcccaagctggtaagagatttctcatactcaccatctctctggctatttccagcgcttcctgcaggccatagagcctgccacaaaccaggtagattccattggcccagagaatacaaccctcatggacccaaaattcattgctgtcaagaggtagttcagggatttgtaactccagctcagggccaccttctgaagtggtgggcacggagggcttcgagtccaaaacagtcttttcactgctgccctcagtggctgcttttttacaagggagccccctggacagggaccgagggcctccaccacagtcttccgagcggtggcgccgcttaaacctggggtgtgcggccaggcttctctgctccttctgctgctgctgctgctcttcctcctcctcagtgtccgtcttggagccattagaagcacttttgtgccgtaccttaactttgctctgcatttctgtggccctcttaggaggtggattcttcgggagagtggctgcataatcttggggataaaaaggtccaaagaggtcacccatgttccggtaactggcccacttgccacacagacagcaaaccaggtgccccataaccgaagactctgtcacaacaggtccctgcagcataaaggacgaggccgggagcgccttgctttcagtgctgctaggtggaggggtcagtgacctctgacccttcctgcccctcactaatttggtctgttcttcttcctcagcattgatgattgtacaaacggctccaagttcacacttatttactacatggatgtaagggtaaaaagacttgttcttggcatcagttttatccagtggctgggtggcatattttagtttgatctcaggttcttggggttccacaatgggaactgcttgtttggtttttcgcttcctcggctgggccccaggcttccttctctccctcctttgcctctgtttttttggctttggctctccatctgcagaaccttctggtatctgtgggggctgagggggtggaggcggtggctgctgctgtttcttttgcttattcacactaccaatgggtctccccttcttctttcctgatgggaaatatccctttggagggaaaccctcttgcttcggtgaaatcgtcactgtatcgttctccttctcttcagccttggggtttgcctcaggggccaatatgcccactggaggtacattctttgagtctggaaagattaaaggtgctgttccacccagggaaccatctggtctcccttggttactaccaggcttctgtgaggttgtggatgtcatggcaccagggggttcctttccggcagtaactgtttctgcatgtgtctctgtcttcactttgtcatccacgctgccacgccactcttctgaagaccttggaagaggtttctctacgtgcaactcctggtttgctggactgactaggtccgaagccacctcaccttttctcttctctatgtcagcatcctgaacagcaacactcccaccttcaggaggaccactcttcaaagacagtatatcatcaagcgtaaccgtgtctcccccagcctccgcactgttcgaagatgcgctcctcctaatatttggggatgtaatcttctgaactatagcttccaatttcaatccccgtcctttccgtgggggcagtattttggtcttagcagggcttgtgagggtaacagcagggcagtttctactatctggacttggaaggtccttggaggaatctctcttagggatagacttgatatcctgactgtgagaaagatgggcataggaattgaatgctttatcagcgccttcttttgatgagtgaaggaggcgacctttatcttcagtgctactgttctttacatcttgtgactgtctcttactgggaatgggagagataaaagaacgaacacgcctcctcatgattaaggggttttgagaagaatgatcctcctggcctggaagtctcagcataacactaccaggtttggatgactgtgtagcctcagctagtccatgtccatcagtctcatggggcggcccataccttttttgactggacattcctggaggaccgctgcttttggctggagaagtttgccgagaaagatcccaacaggattcttgtaacttctgggagccatgctttaattccatgcccttgttaggcagaccatcactagacattaggcagcgcccagcctcctgggcactggggtcatggtaagtccccactggtgggccatacatcataccatctttgtcatttttcagagggctccgtactctgtcaagaaactgctgctgccttggactcttccgtggcccctcctgcctgtgctgtgctgcagcaattactccctgagcagaaccgctgctccagtctttatactcctctggttgctgttggtacatctgtctcttataatgcagctgagaattcaaacctgcgttagggtccccataagcatgagcccgagtatttgcatgataagcagaggccagggtttctgagttgggagaaaagggagtgtgtaaagaactccggttagccctctctgaaaaggtcat

SEQ ID NO: 24719 - DNA, 646 bp, Homo sapiens
  MAP TO AC007956.5; EXPRESSED IN PLACENTA, SIGNAL = 2.1; EXPRESSED IN FETAL LIVER, SIGNAL = 2.7; EXPRESSED IN LUNG, SIGNAL = 2.5; EXPRESSED IN HELA, SIGNAL = 3.9; EST_HUMAN HIT: BG988661.1, EVALUE 1.00e-100; SWISSPROT HIT: P41809, EVALUE 2.00e-07; NT HIT: AB033168.1, EVALUE 0.00e+00
accatgtctgtagatatgcagctgcggcattatgagatgcagcagcaacagtttcaacatctttaccaagaatgggagcgagagtttcagctatgggaggaacaactccattcctatcctcataaagatcagcttcaggagtatgagaagcagtggaaaacatggcagggacatatgaaagccactcagagctatctccaggagaaagtcaattcatttcagaacatgaagaaccagtatatggggaacatgtcaatgccacctccttttgttccatattctcagatgcctccacctctacctacaatgccccctccagtgttgcctccttcattgccaccaccagtgatgccccctgccctccctgctacagtgccaccacctggcatgcccccacctgttatgccaccttctctaccaacctctgttcccccaccagggatgcctccttctctctcttctgcagggccaccaccagttctccccccaccttccctgtcttctgcagggccaccaccagttcttcccccaccatctctctcttcaacagcacctccacctgtcatgcccctcccaccattgtcttcagctacacctcctccaggaatacctccccctggagttccacaagggatacctcctcagt

SEQ ID NO: 24720 - DNA, 555 bp, Homo sapiens
  MAP TO AP001067.1; EXPRESSED IN FETAL LIVER, SIGNAL = 0.95; EXPRESSED IN HELA, SIGNAL = 0.46; SWISSPROT HIT: O75690, EVALUE 9.70e-02; EST_HUMAN HIT: BF058205.1, EVALUE 4.00e-86; NT HIT: AL163300.2, EVALUE 0.00e+00
gaggtgcagcaagccggctggcagctagactgctggcagcatgaagaggatgactcagagcaggtgggcacgcagcacacagctttgcagcagacaggcacacggcaggactgctggcaggaggaagaggcacagcaagctggctggcagctagactgctggcagcatgaagaagccccacagcagacgggcacacagcacacaggcttgcagcagacgggcacgcagcaggcctgctggcagggggaggaggtgcagcaagccggctggcagctagactgctggcagcacgagggcgtgcaggagctggtgcagcctgattggcaggcgctgggctcacaggccgcctggcagcaggggctggacacacagctcactggggtgcagaccagggtcaggcagggggctggggcacagcagctgggggtgccgcaggggagctcacagcagctctctgggcagtcgtccacctgccaggagttggtgcaggcgctggagcagatggacatggtggaggcggccatgctggagtggggaggaggtgagctgggggag

SEQ ID NO: 24721 - DNA, 663 bp, Homo sapiens
  MAP TO AF002993.1; EXPRESSED IN HELA, SIGNAL = 0.92; EXPRESSED IN FETAL LIVER, SIGNAL = 1.6; SWISSPROT HIT: P06798, EVALUE 8.90e-02; EST_HUMAN HIT: BI666650.1, EVALUE 0.00e+00; NT HIT: AF312032.1, EVALUE 0.00e+00
ctgttgggagctaaggctggtcaagcacaggttgtagaaggagttggggtcaaaggctgcactcacctcttgccagcccacccacccagcagcctgtagttcactggggctttttggagtgccccagtagtgagggtccaataccaggacataggcttccgtgcctgaccctacgcagactcccagcaaggccttggacctggcatctgcgtcccccccaaccatgactgggcccccaccccctgcgaagtgcgagtaaagcctctccagctccccgtgcagccccactccccggggtacgtggcagaggcgtccctggggccctccgaagtgagcgaggcagaggctggcctccacgcagccgatccagtcccgggagccccggaagccggggggcttgtcgcccatgtcctccagggccgcctgtacggcggccagtccaggtacgcccgcgggctggccctctggccacgagcacagcgtctgcagagtgcggtagccgcagccccagccgcggtcgtccaggccgtcgcagccgtagtggtagtagaggtagtggcccgagagcagcgccaggcggacagggccgcggctcggcggggacaggcccacgtggacgtccctcagcggctccagggcggtgggcgggaacggatgtcccat

SEQ ID NO: 24722 - DNA, 1411 bp, Homo sapiens
  MAP TO AF001549.1; EXPRESSED IN LUNG, SIGNAL =  19; EXPRESSED IN FETAL LIVER, SIGNAL =  14; EXPRESSED IN PLACENTA, SIGNAL =  18; EXPRESSED IN HELA, SIGNAL = 3.5; SWISSPROT HIT: Q9UKF5, EVALUE 2.80e-01; EST_HUMAN HIT: AU132808.1, EVALUE 0.00e+00; NT HIT: D86974.1, EVALUE 0.00e+00
gtcagaatggcggcagcggagcatcgtcattcttcaggattgccctactggccctacctcacagctgaaactttaaaaaacaggatgggccaccagccacctcctccaactcaacaacattctataactgataactccctgagcctcaagacacctcccgagtgtctgctcactccccttccaccctcagcggatgataatctcaagacacctcccgagtgtgtgctcactccccttccaccctcagcggatgataatctcaagacacctcccgagtgtgtgctcactccccttccaccctcagcggatgataatctcaagacacctcctgagtgtctcctcactccccttccaccctcagcggatgataaactcaagacacctcccgagtgtctgctcactccccttccaccctcagctctaccctcagctccaccctcagcggatgataatctcaagacacgtgccgagtgtctgctccatccccttccaccctcagcggatgataatctcaagacaccttccgagcgtcagctcactccccttccaccctcagctccaccctcagcagatgataatatcaagacacctgccgagcgtctgcgggggccgcttccaccctcagcggatgataatctcaagacaccttccgagcgtcagctcactccccttccaccctcagctccaccctcagcagatgataatatcaagacacctgccgagcgtctgcgggggccgcttccaccctcagcggatgataatctcaagacaccttccgagcgtcagctcactccccttccaccctcagctccaccctcagcagatgataacatcaagacacctgccttccaccctcagcggatgataatctcaagacaccttccgagcgtcagctcactccccttccaccctcagctccaccctcagcagatgataatatcaagatacctgctgagcgtctgcggattccgcttccaccatcagccgatgataatctcaagacaccttccgagcgtcagctcactccccttccaccctcagctccaccctcagcagatgataatatcaagacacctgccgagcgtctgcgggggccgcttccaccctcagcggatgataatctcaagacaccttccgagcgtcagctcactccccttccaccctcagctccaccctcagcagatgataatatcaagacacctgccgagcgtctgcgggggccgcttccaccctcagcggatgataatctcaagacaccttccgagcgtcagctcactccccttccaccctcagctccaccctcagcagatgataatatcaagacacctgccgagcgtctgcgggggccgcttccaccctcagcggatgataatctcaagacaccttccgagcgtcagctcactgcccttcc

SEQ ID NO: 24723 - DNA, 673 bp, Homo sapiens
  MAP TO AC008015.5; EXPRESSED IN HELA, SIGNAL = 1.3; EXPRESSED IN FETAL LIVER, SIGNAL = 0.98; NT HIT: gi14784688, EVALUE 0.00e+00; SWISSPROT HIT: P03161, EVALUE 8.90e+00; EST_HUMAN HIT: BI829769.1, EVALUE 0.00e+00
atgtggcctcatggatgagctggtacacgacttagcctcagccttggagcagacatctgagcagaataagcttggtgaactgtgggaggagatggcgctgagcccccgacagcagaggcggcagcttcggaaacgccgaggtcggaagcgtcgttctgacttcactcacctggcagagcatacctgctgctacagcgaggcctctgagtcaagtctggatgaggccactaaggactgtcgagaagtggctccggtgaccaattttagtgactctgatgacacaatggtagccaaacgacacccagctctcaatgccattgtcaagagtaagcaacattcttggcatgaatctgactcctttactgaaaatgcaccttgtcgaccactcaggcgcaggcggaaggtgaagcgagtgacatcagaggtggctgctagccttcagcagaagctgaaggtgtcagattggagctatgagagaggctgcaggttcaagtctgctaagaagcagcgtctgtcccgctggaaggagaatactccctggacctcatcaggccacggattgtgtgaatcagcagaaaataggactttcctaagcaaaacaggaaggaaagaaaggatggagtgtgaaacagatgaacaaaaacagggctctgatgagaacatgtcagaatgg

SEQ ID NO: 24724 - DNA, 521 bp, Homo sapiens
  MAP TO AF165146.1; EXPRESSED IN LUNG, SIGNAL = 2.1; EXPRESSED IN HEART, SIGNAL = 2.8; EXPRESSED IN FETAL LIVER, SIGNAL = 1.7; EST_HUMAN HIT: BF795491.1, EVALUE 0.00e+00; NT HIT: gi14746669, EVALUE 0.00e+00; SWISSPROT HIT: Q92524, EVALUE 3.00e-83
aaggtgcttgagcacaaggagatcgatggccgtcttaaggagttaagggaacaattaaaagaacttaccaagcagtatgaaaagtctgaaaatgatctgaaggccctacgaagtgttgggcagattgtgggtgaagtgtttaaacagttaactgaagaaaaattcattgttaaagctaccaatggaccaagatatgttgtgggttgtcgtcgacagcttgacaaaagtaagctgaagccaggaacaagagttgctttggatatgactacactaactatcatgagatatttgccaagagaggtggatccactgatttataacatgtctcatgaggaccctgagaatgtttcttattctgagattggagggctatcagaacagatccgggaattaagagaggtgatagaattacctcttacaaacccagagttatttcagcgtgtaggaataatacctccaaaaggctgtttgttatatggaccaccaggtacgggaaaaacactcttggcacgagccattgc

SEQ ID NO: 24725 - DNA, 452 bp, Homo sapiens
  MAP TO AC005618.1; EXPRESSED IN FETAL LIVER, SIGNAL = 0.98; EXPRESSED IN HELA, SIGNAL = 0.75; NT HIT: gi16158981, EVALUE 0.00e+00; EST_HUMAN HIT: AW070271.1, EVALUE 1.00e-121; SWISSPROT HIT: Q9Y5E1, EVALUE 8.00e-24
acagatgggaccctggattgggagcggatcccggagtacaacgtcaccatcactgccactgacaagggcaagcctccgctctcatccagcacaagcctcaccctacgcattggtgaagtcaacgacaatgctccggttttccaccaagtctcctacgtggtccacgtggccgaaaacaaccttcccggagcctccatcccacaagtcagcgcctctgacctggacctagggctgaatggccaagtctcctactccatcgttaccactgacttggagctgcgggcactgtcgtcctacgtgtccgtgagcgcacagagcggggtggtggtcgcgcagcgtgccttcgaccacgagcagctgtgcgccttcgagctcacgatgcaggcccacgaccagggctcgcccgcgctcagcgccaacatgagccggcgcatgttggtgggcgacctcaa

SEQ ID NO: 24726 - DNA, 794 bp, Homo sapiens
  MAP TO AL132777.2; EXPRESSED IN HELA, SIGNAL = 0.78; EXPRESSED IN FETAL LIVER, SIGNAL =   1; NT HIT: gi14752867, EVALUE 0.00e+00; EST_HUMAN HIT: BG977380.1, EVALUE 0.00e+00; SWISSPROT HIT: Q9UIU6, EVALUE 1.00e-121
gtaatatctcagtaagctcaagcacttcagatggaagcacatttacaagtgagtctaccacagtccagcaaggaaaggttttcttgagctctcttgctcccagtgcagtggtatacacggttcctaatacaggccagactataggatctgtgaaacaggaaggcttggaaaggagcctggtattttctcagttgatgcctgtcaatcagaatgcacaagtaaatgcaaacctgtcttctgaaaacatctcggggagtggcctgcatccactggcctcctcattagttaatgtatctccaactcacaatttttctctcagtccctctacactactaaatcccactgagctaaaccgcgacattgccgatagccaaccaatgtctgcaccggtggcaagcaaatctactgtgacatctgtcagcaacactaactatgcaactcttcagaactgctcccttattactggtcaagacctattgtcagtccctatgactcaggctgcccttggggaaatagttcctacagctgaagatcaggtaggtcacccctccccagcagtacatcaggattttgtccaagaacatcgtttggttctgcaatcggtagctaacatgaaagagaatttcttatcaaattctgagagcaaagcaacaagtagcttaatgatgctggactctaaatccaagtatgtcttagatggcatggttgatactgtctgtgaagacctggaaacagacaaaaaagagcttgccaagctccagactgtccagctggatgaagatatgcaagactta

SEQ ID NO: 24727 - DNA, 691 bp, Homo sapiens
  MAP TO AL356460.1; EXPRESSED IN FETAL LIVER, SIGNAL =  20; NT HIT: gi14776482, EVALUE 0.00e+00; EST_HUMAN HIT: BG825191.1, EVALUE 0.00e+00; SWISSPROT HIT: P02248, EVALUE 6.00e-37
gtcaaaatgcagatcttcgtgaaaacccttaccggcaagaccatcacccttgaggtggagcccagtgacaccatcgaaaatgtgaaggccaagatccaggataaggaaggcattccccccgaccagcagaggctcatctttgcaggcaagcagctggaagatggccgtactctttctgactacaacatccagaaggagtcgaccctgcacctggtcctgcgtctgagaggtggtatgcagatcttcgtgaagaccctgaccggcaagaccatcaccctggaagtggagcccagtgacaccatcgaaaatgtgaaggccaagatccaggataaagaaggcatccctcccgaccagcagaggctcatctttgcaggcaagcagctggaagatggccgcactctttctgactacaacatccagaaggagtcgaccctgcacctggtcctgcgtctgagaggtggtatgcagatcttcgtgaagaccctgaccggcaagaccatcactctggaggtggagcccagtgacaccatcgaaaatgtgaaggccaagatccaagataaagaaggcatcccccccgaccagcagaggctcatctttgcaggcaagcagctggaagatggccgcactctttctgactacaacatccagaaagagtcgaccctgcacctggtcctgcgcctgaggggtggct

SEQ ID NO: 24728 - DNA, 807 bp, Homo sapiens
  MAP TO U52111.1; EXPRESSED IN FETAL LIVER, SIGNAL = 0.97; EXPRESSED IN HELA, SIGNAL = 0.82; NT HIT: U52111.2, EVALUE 0.00e+00; EST_HUMAN HIT: BG769692.1, EVALUE 0.00e+00; SWISSPROT HIT: P33897, EVALUE 5.00e-95
cgcgggcttttggctggcagctgctgcagtggctcctcatcgccctccctgctaccttcgtcaacagtgccatccgttacctggagggccaactggccctgtcgttccgcagccgtctggtggcccacgcctaccgcctctacttctcccagcagacctactaccgggtcagcaacatggacgggcggcttcgcaaccctgaccagtctctgacggaggacgtggtggcctttgcggcctctgtggcccacctctactccaacctgaccaagccactcctggacgtggctgtgacttcctacaccctgcttcgggcggcccgctcccgtggagccggcacagcctggccctcggccatcgccggcctcgtggtgttcctcacggccaacgtgctgcgggccttctcgcccaagttcggggagctggtggcagaggaggcgcggcggaagggggagctgcgctacatgcactcgcgtgtggtggccaactcggaggagatcgccttctatgggggccatgaggtggggcaggttggggtgccgggcacggagggaagcgtgtggcagggaggcccgggggcaggcagccgtgagcggtggggacagtctggggcgggccggggctgatgccaaaggtgtgggcaggccatgggagagccgggctggggtgggcagggcctttgggcagccgtggactcaggcgcggcagtggagaggcaggaaggctgggtggggactgtcctgtgctggttgcctgcacgctcgaggccacttctgcttcctctcctcctcaaggaggttgtcctgg

SEQ ID NO: 24729 - DNA, 1039 bp, Homo sapiens
  MAP TO AC013533.3; EXPRESSED IN PLACENTA, SIGNAL = 1.7; EXPRESSED IN FETAL LIVER, SIGNAL = 1.1; NT HIT: gi13646857, EVALUE 0.00e+00; SWISSPROT HIT: P27214, EVALUE 4.00e-02; EST_HUMAN HIT: AI085212.1, EVALUE 3.70e-01
atgccagttcccagcaggcatataaatattggtcgttctcagagctgggatgctgctgggtggtacgagggcccctgggagaacgccgagtccctgcggcctctggggaggagaagctccctgacgtatggcacagcagaggggacttggtttgagccaaaccaccgaccacaggacgctgccctgcccgtggccgccgagccctacctgtaccgggaggccgtttataactcagtggctgcaagaaaggggtctactcctgacttcaccttctacgacagcagacaggcagtgatgtctggtcgcagccccctgctgccacgggagtactacagtgatccgtctggagctgctagggtacccaaagagcctcccctctatcgggacccaggagtcagccggccggtccccagctacggagtgcttggcagcagaacgtcatgggatccaatgcaaggccggtcacctgccctgcaggacgccggtcacctgtaccgggatcctggaggtaaaatgatccctcaggggcggcagacacagagcagggctgcatctcccgggcggtatggacgggagcagcccgacaccaggtatggggcggaggtgcctgcctaccccctcagccaggtcttcagcgacatcagcgaaagacccattgaccctgcccctgccagacaggtggccccgacgtgcctggttgtggaccccagttcagctgctgcccccgaaggcagcacaggggtggccccaggggccctgaatcgtggctacgggcctgcccgggaaagcatcccatccaagatggcttacgagacttacgaagctgacctgtccaccttccagggtcctggtggcaagaggaccgtgctccctgagttcctggcctttctgcgggcggaggggctggcagaggccacgctgggagccctactgcagcagggctttgactccccggccgtcctggctaccctggaggacgcggatatcaagtctgtcgcacccaacctgggccaggcccgtgttctgagccgcctggcca

SEQ ID NO: 24730 - DNA, 875 bp, Homo sapiens
  MAP TO AL162171.1; EXPRESSED IN HEART, SIGNAL = 1.6; EXPRESSED IN FETAL LIVER, SIGNAL = 1.5; EXPRESSED IN PLACENTA, SIGNAL = 1.7; NT HIT: gi13632491, EVALUE 0.00e+00; EST_HUMAN HIT: BG323630.1, EVALUE 0.00e+00; SWISSPROT HIT: Q16825, EVALUE 0.00e+00
ataacctctttgtgcccaaccagaacggatactactgtcactctcagacaagcttggatagagcccagattgacctcaacggtcggatccgtaatggcagtgtctacagtgcacacagcaccaactccttaaataatcctcagccctacttgcagccctcgccgatgtcgtccaaccctagcatcaccgggagtgacgtcatgaggcctgactacctcccgtcccatcggcacagcgccgtgatacccccgtcctaccgccccaccccagactatgagactgtgatgaagcagctcaacaggggcctggtgcatgcggaacggcagagccactcgctgcgaaacctcaacatcggcagctcgtacgcctacagcaggcccgcggcgctggtctacagccagcccgagatccgcgagcacgcacagctcccctcgccagcggccgcacactgcccgttcagcctgagctacagcttccacagcccgtctccctacccctaccctgccgagcggcggcccgtggtgggcgcggtcagcgtgccggagctgaccaatgcgcagctgcaggcgcaggactacccgtctcccaacatcatgcggacgcaggtgtaccggccacccccaccctacccgccccccaggcccgccaacagcacgccagacctgtcccgccacctttacatcagcagcagcaaccccgacctcatcacgcggcgcgtgcaccactcggtgcaaacgttccaggaggacagcctgcccgtggcgcactcgctgcaggaggtcagcgagcccctcaccgcgcgcgcgcaacgcgcagctgcacaaacggaacagcatcgaggtggccgggctcagccacggcctggagggcctgcc

SEQ ID NO: 24731 - DNA, 994 bp, Homo sapiens
  MAP TO AC017111.2; EXPRESSED IN PLACENTA, SIGNAL = 1.8; EXPRESSED IN HEART, SIGNAL = 1.3; EXPRESSED IN FETAL LIVER, SIGNAL = 1.3; SWISSPROT HIT: Q00657, EVALUE 1.00e-09; NT HIT: AF287478.1, EVALUE 1.00e-03; EST_HUMAN HIT: BG461086.1, EVALUE 3.60e-01
cttgtgtgaactgagtgatgctgtggttgcctttgtccaggttgagaagatatccatgttgaggggcctctgtcacgataaatctaagagaaatgtgtaagctgtctctgtcctccactttcaatattttgcttgtgatcatgaaccccaagtggccagtggctagagtgcgaagtgtagaggcccccttattcactgcgatttgggggacactgttgtcaacagccaagacctggatcttcatcacttggggtctccttgtttcaaacaccgtatcaggaaaaacatagaagtctgtatgggtgccatcagtcactgtgaaggagaagctatcttcacttgactcagtgccatcatgtttgtagctgattaagttttcattcaagtcttgcttggtaaaaaccatgacaggtctggtattgttgaataggagatggccatgaataggcacctgggtgatagtgaatttcaggagcttgtcaggagtatctctgtcttcgacagtgagctcaaaaggagtaatcagcttgttttcactttcactgacaaccagcttgtggatggtgaccactggctttttattgtccacatcgctaatggagatacggaatgtccgaaagacagggttacgtccatcggtgacttgaaactcaaaactgtccattttcacttcatcatcagctgtgtggatgtagtagattttgtttccagccagttgcagctgagtgaaagacgtgatggacacaccaggctgatccgtgcattccaggtgacctcgcatgggagccctggtgatggtaaaaaccaagttttcatcaggactgttcaagtcactagtgcttagtaggtctgttgtaagagtgactttgccaccttctttcaaggacactcccttacttatcacatcagggaagacaatgtcaatgctcccgatggacacataaaagtaacgatctatgaggggatttattccatcagtcacatcaaatttaat

SEQ ID NO: 24732 - DNA, 571 bp, Homo sapiens
  MAP TO AL157879.2; EXPRESSED IN FETAL LIVER, SIGNAL = 3.1; NT HIT: gi15306521, EVALUE 1.00e-112; EST_HUMAN HIT: BI061609.1, EVALUE 0.00e+00; SWISSPROT HIT: gi115305, EVALUE 2.80e-01
aagcacccactatggatgcacagcaggacagacccaagtcccaagactgcctgggcctagtggcccccctagcatctgctgcagaggtctcctctacagctcccgtgtctgggaagaagcagagaccaccaggacccctgttctcctcctcagatccccttcctgccacctcttcccactcccgggactcagcccaggtcacctcgatgattcctgcccccttcacagctgcaagcagggatgccggcatgagaagaacaaggtcggcccctgcagctgccgcagcagcccctcccccctccacattgaaccccacgtcggggtcactactcaatgcagtggatggaggcccctcacatttcttggcctcagccacagctgcagcacgtgcccagaggtcagaagtgagatacaaccagagatcccagatctcccggaccagatcctgcctcaaacgaaatgccagctccagctcccacagctctacggaaggcctcccggaactaaagcggaggagggggccagcctcatcccactgccagctggcccacagttcctcaaagacagtgag

SEQ ID NO: 24733 - DNA, 905 bp, Homo sapiens
  MAP TO AP001725.1; EXPRESSED IN HELA, SIGNAL = 8.6; EXPRESSED IN FETAL LIVER, SIGNAL =   3; EST_HUMAN HIT: BG503885.1, EVALUE 0.00e+00; SWISSPROT HIT: Q9Y316, EVALUE 0.00e+00; NT HIT: gi14780334, EVALUE 0.00e+00
gcggcacaggcaccaagatgtccaaccgagtggtctgccgagaagccagtcacgccgggagctggtacacagcctcaggaccgcagctgaatgcacagctagaaggttggctttcacaagtacagtctacaaaaagacctgctagagccattattgccccccatgcaggatatacgtactgtgggtcttgtgctgcccatgcttataaacaagtggatccgtctattacccggagaattttcatccttgggccttctcatcatgtgcccctctctcgatgtgcactttccagtgtggatatatataggacacccctgtatgaccttcgtattgaccaaaagatttacggagaactatggaagacaggaatgtttgaacgcatgtctctgcagacagatgaagatgaacgcagtattgaaatgcatttgccttatacagctaaagccatggaaagccataaggatgagtttaccattattcctttactggttggagctctgagtcaaaagaacaggaattcggaacttttcagtaaatatctagcggatcctagtaatctctttgtggtttcttctgatttctgccattggggtcaaaggttccgtcacagttactatgatgaatcccagggggagatttgtagatccattgaacatctagataaaatgggtatgagtattatagaacaattagaccctgtatcttttagcaattacttgaagaaataccataatactatatgtggaagacatcccattggggtgttattaaatgctatcacagagctccagaagaatggaatgaatatgagtttttcgtttttgaattatgcccagtcgagccagtgtagaaactggcaagacagttcagtgagttatgcagctggagcactcacggtccactga

SEQ ID NO: 24734 - DNA, 756 bp, Homo sapiens
  MAP TO AC004079.1; EXPRESSED IN HELA, SIGNAL = 1.2; EXPRESSED IN FETAL LIVER, SIGNAL = 0.97; SWISSPROT HIT: O43364, EVALUE 1.00e-122; NT HIT: gi14751286, EVALUE 0.00e+00; EST_HUMAN HIT: BE265850.1, EVALUE 0.00e+00
ttagtaattcagatgctgcaagtcgattgtggtgagtgtgtctgtaaaaaagtctaagctgtcagctgaaatatctacgggactgtcgagggaacctggcaaactgggtgaaactgcatctgaaagctgcaggcaggaatctgtggagaaaacgctaaagtcctgcaaagaggggacctcaagggcctcaggactgtcattgtttaggccagctccacagttctggcccattgttgacaagcagttgggaacagtgggtgactggtgctgaaaatgtttcagatttttctcattgctggttaaaggcgagactgggaaactttgggagtcgccattgtgtccattgggagcctgctgctgagagagggcattttgctgaaaagtgtagccttccctctccagaagggccccagagacgctaagggcttgctcaaagagcgtcttctcttcctcgtcctcctctactttctcggagtcctcaaggcttttacatttcccttcgctgttttggttttccttgcactgggtctgcctcttgtgcttcatcctccggttctgaaaccacactttcacttgtctctcagtcaaatccagcagcgctgcaatctccacccttcggggtctgcaaaggtacttgttgaaatgaaattctttttccagctctagaagctgtgtgttggtgtaagcagttctcaggcgccgcgatcccccgccgctgccatcggcgatttccagggattctgcggaaagggaaac

SEQ ID NO: 24735 - DNA, 791 bp, Homo sapiens
  MAP TO AL096712.14; EXPRESSED IN HELA, SIGNAL = 0.92; EXPRESSED IN FETAL LIVER, SIGNAL = 0.93; NT HIT: gi14783109, EVALUE 0.00e+00; EST_HUMAN HIT: BG397333.1, EVALUE 0.00e+00; SWISSPROT HIT: P46821, EVALUE 1.00e-03
agtctaaatggtgtttggctgaacagagcgcgtctggaacctttaagggtctattccattcatcagggagactacatccaacttggagtgcctctggaaaataaggagaatgcggagtatgaatatgaagttactgaagaagactgggagacaatatatccttgtctttccccaaagaatgaccaaatgatagaaaaaaataaggaattgagaactaaaaggaaattcagtttggatgaattagcaggtcctggagctgaaggcccctcaaatttgaaatccaaaataaataaagtgtcttgtgaatctggtcagccagtgaaatcacaggggaaaggtgaagtggccagtacaccctctgacaatttggatcctaagttgactgcccttgagccaagtaagaccacaggggctcccatttaccctggcttccccaaagtcacagaggttcatcatgagcagaaagcctcaaactcttcagcatctcagagaagcttacagatgtttaaggtgaccatgtccaggattctgaggctcaaaatacagatgcaggaaaaacatgaagccgttatgaatgtgaaaaagcagacccaaaaggggaactcaaagaaagttgtgcaaatggagcaggaacttcaggacttacagtcccagctgtgtgcagagcaggctcagcagcaggcaagagtggagcaactagagaagactttccaggaagaggaacagcatcttcaggtaccacacagaagggaagggcaagagtggtcttcaggggtggggcaggcacttca

SEQ ID NO: 24736 - DNA, 1031 bp, Homo sapiens
  MAP TO AL035665.29; EXPRESSED IN FETAL LIVER, SIGNAL = 1.6; SWISSPROT HIT: P54842, EVALUE 1.00e-129; NT HIT: gi14770835, EVALUE 0.00e+00; EST_HUMAN HIT: BI916207.1, EVALUE 0.00e+00
atggccgcggagctgagcatggggccagagctgcccaccagcccgctggccatggagtatgtcaacgacttcgacctgctcaagttcgacgtgaagaaggagccactggggcgcgcggagcgtccgggcaggccctgcacacgcctgcagccagccggctcggtgtcctccacaccgctcagcactccgtgtagctccgtgccctcgtcgcccagcttcagcccgaccgaacagaagacacacctcgaggatctgtactggatggcgagcaactaccagcagatgaaccccgaggcgctcaacctgacgcccgaggacgcggtggaagcgctcatcggctcgcacccagtgccacagccgctgcaaagcttcgacagctttcgcggcgctcaccaccaccaccatcaccaccaccctcacccgcaccacgcgtacccgggcgccggcgtggcccacgacgagctgggcccgcacgctcacccgcaccatcaccatcatcaccaagcgtcgccgccgccgtccagcgccgctagcccggcgcaacagctgcccactagccaccccgggcccgggccgcacgcgacggcctcggcgacggcggcgggcggcaacggcagcgtggaggaccgcttctccgacgaccagctcgtgtccatgtccgtgcgcgagctgaaccgccacctgcggggcttcaccaaggacgaggtgatccgcctgaagcagaagcggcggaccctgaagaaccggggctacgcccagtcttgcaggtataaacgcgtccagcagaagcaccacctggagaatgagaagacgcagctcattcagcaggtggagcagcttaagcaggaggtgtcccggctggcccgcgagagagacgcctacaaggtcaagtgcgagaaactcgccaactccggcttcagggaggcgggctccaccagcgacagcccctcctctcccgagttctttctgtgagtcgtggccggtcctggcccccgcccttgccccggcccggactccctgtcccacgtccc

SEQ ID NO: 24737 - DNA, 455 bp, Homo sapiens
  MAP TO AL024497.5; EXPRESSED IN PLACENTA, SIGNAL = 1.5; EXPRESSED IN FETAL LIVER, SIGNAL = 1.1; SWISSPROT HIT: P21750, EVALUE 1.80e+00; EST_HUMAN HIT: AI523664.1, EVALUE 4.10e-02; NT HIT: AF177765.1, EVALUE 7.00e-03
gatgctctggaatttgtggcctcactgaatgggaagagactatactcccagagctagccaattcttagtgcaaagggctggtctgggatcatgcccttcatatgcagctaaccaatccagagaccacaccctcaactatcccctttatcaacttctcatcagtaagtcaatactccccttccctaaatctcccagggccaggtaccagacaaccaggtatcacccctacaacccacagcccactgaaattactcaaactagccagtcctaaactgtttcctctgcccttccctttcccacagaaaccccactaaaggatatggcccaggctttcccttcctccttctgcatcctgaccaaacccagtgcttccccatgcgccccatcgtgggaaatgtaagtaataaaattacttacatttaatgtaagtgccccccctcctcttgggaaatgta

SEQ ID NO: 24738 - DNA, 493 bp, Homo sapiens
  MAP TO AC010485.4; EXPRESSED IN FETAL LIVER, SIGNAL = 4.5; NT HIT: gi14763015, EVALUE 0.00e+00; SWISSPROT HIT: P46778, EVALUE 6.00e-68; EST_HUMAN HIT: BI497066.1, EVALUE 0.00e+00
atttgccaaaatgacgaagacaaagggaaagaggagaggcacccgatatacgttctctaggccttttagaaaacatggagttgttcctttggccacgtatatgcgaatctataagaaaggtgttattgtagacatcaagggaatgggcactgttcaaaaaggaatgcctcacaagtgtcaccatggtaaaactggaagagtctacaatgttacccagcatgctgttggcattgttgtaaacaaacaagttaagagcaagattcttgccaagagaattaatgtgcgtattgagcacattaagcactctgagagctgggatagcttcctgaaatacatgaaggaaaatgatcagaaaaagaaagaagccaaagagaaaggtacctgggttcaactgaagtgccagcctgctccacccagagaagcacactttgtgagaaccaatgagaaggagcctgagctgctggaacctattccgtatgaactcatggcataa

SEQ ID NO: 24739 - DNA, 225 bp, Homo sapiens
  MAP TO CHR17.1; EXPRESSED IN ADULT LIVER, SIGNAL = 1.1; EXPRESSED IN FETAL LIVER, SIGNAL = 0.74; EXPRESSED IN HEART, SIGNAL = 0.48; SWISSPROT HIT: P43620, EVALUE 1.10e+00; NT HIT: U34879.1, EVALUE 1.00e-124; EST_HUMAN HIT: BE178052.1, EVALUE 1.00e-110
tgcatgcttttaggaactatgagcagattgtgaaggcacaccgggacaacccccatgaaggggaggaccaggtctctgaccaggtcaagttcaacgtgtttcaaggcatcatggattccctgttccagtccttcaatgcctccatctcagtggccagcttccaggagctgtcagcgtgtgtcttcagctggatcgaggagcactgtaagcctcaggtatggggca

SEQ ID NO: 24740 - DNA, 325 bp, Homo sapiens
  MAP TO CHR12.1; EXPRESSED IN ADULT LIVER, SIGNAL = 0.88; EXPRESSED IN FETAL LIVER, SIGNAL = 0.87; EXPRESSED IN LUNG, SIGNAL = 0.98; NT HIT: gi14768676, EVALUE 0.00e+00; EST_HUMAN HIT: BG574240.1, EVALUE 0.00e+00; SWISSPROT HIT: P34926, EVALUE 9.10e-02
gactgacctggcatttaatcccagcctggctgcaggcacacgcttctgggtcacaatacagtcggcagtcacaaccacattcttcccgtgacaggcggatggctcgaagttcttgcttctcttcagcatcaatacggtggaccccagaagccctcagcagggcccgtcgccgtttggtgggcagaggctgcaggaagaagtaatcatccacctccacattttccacatcaatatcttcatctgacacatcatccagcgtcaggccatcagcctccaccgactccactgtcccattcttggtcagctgccaagagacaggaaaggt

SEQ ID NO: 24741 - DNA, 197 bp, Homo sapiens
  MAP TO CHR7.1; EXPRESSED IN FETAL LIVER, SIGNAL = 0.42; NT HIT: gi14751777, EVALUE 1.00e-107; SWISSPROT HIT: O60443, EVALUE 7.00e-32; EST_HUMAN HIT: BI820934.1, EVALUE 1.00e-107
cttctatgagtacatcgccaagggtgagggataaaaactggtacttgggtctctgccagcaccagaatctcttcttttttgtcaccagacttagaagctgtaacttatcagagtcattcagatttgatactgcaatcaggtcaccatcagcatcaacttctctaagaaaattcctggttgctttggcaaacattttg

SEQ ID NO: 24742 - DNA, 101 bp, Homo sapiens
  MAP TO CHR19.1; EXPRESSED IN FETAL LIVER, SIGNAL = 0.39; EXPRESSED IN LUNG, SIGNAL = 0.78; SWISSPROT HIT: P97459, EVALUE 6.00e-11; NT HIT: gi11424919, EVALUE 6.00e-46; EST_HUMAN HIT: AI916513.1, EVALUE 6.00e-50
cttacctgtgagagacccagatagatggagactgtctctgagatgtagaggaattttccttcctggttcaaggcgaacacaaagccatccagggactagag

SEQ ID NO: 24743 - DNA, 211 bp, Homo sapiens
  MAP TO CHR9.1; EXPRESSED IN FETAL LIVER, SIGNAL = 1.1; EXPRESSED IN HEART, SIGNAL = 0.59; EXPRESSED IN ADULT LIVER, SIGNAL = 0.79; EST_HUMAN HIT: BE731805.1, EVALUE 4.00e-96; NT HIT: gi14738494, EVALUE 2.00e-96; SWISSPROT HIT: Q92574, EVALUE 1.00e-30
tttcttgactttcattgcattttacaggtggaagagattagaaactcatgatgttgtgatcgagtgtgccaaaatctctctggatcccacagaagcctcatatgaagatggctattctgtgtctcaccaaatctcagcccgctttcctcatcgttcagccgatgtcaccaccagcccttatgctgacacacagaatagctatggtaaaaag

SEQ ID NO: 24744 - DNA, 164 bp, Homo sapiens
  MAP TO CHR6.1; EXPRESSED IN LUNG, SIGNAL =  38; EXPRESSED IN ADULT LIVER, SIGNAL = 5.6; EXPRESSED IN FETAL LIVER, SIGNAL = 5.9; SWISSPROT HIT: P13747, EVALUE 2.00e-25; EST_HUMAN HIT: AV730970.1, EVALUE 2.00e-87; NT HIT: M21533.1, EVALUE 2.00e-87
acccaggacacggagctcgtggagaccaggcctgcaggggatggaaccttccagaagtgggcagctgtggtggtgccttctggagaggagcagagatacacgtgccatgtgcagcatgaggggctacccgagcccgtcaccctgagatggagtaaggaggggga

SEQ ID NO: 24745 - DNA, 128 bp, Homo sapiens
  MAP TO CHR7.1; EXPRESSED IN FETAL LIVER, SIGNAL = 0.93; EXPRESSED IN LUNG, SIGNAL = 1.7; EXPRESSED IN HEART, SIGNAL = 1.1; EXPRESSED IN ADULT LIVER, SIGNAL = 0.69; EST_HUMAN HIT: AV693726.1, EVALUE 3.00e-64; SWISSPROT HIT: P17024, EVALUE 2.00e-13; NT HIT: gi15304226, EVALUE 2.00e-64
ttacctatagaggtcaggttcctgaaagtttccagcatcacttccctgaagagattcttctgggaaatatccagcaatgtccactcttcctgggtgaagttcacagccacatcctcaaaggccactgg

SEQ ID NO: 24746 - DNA, 173 bp, Homo sapiens
  MAP TO CHR2.1; EXPRESSED IN FETAL LIVER, SIGNAL = 0.42; EXPRESSED IN LUNG, SIGNAL = 0.62; NT HIT: Z99566.1, EVALUE 8.00e-93; SWISSPROT HIT: Q06278, EVALUE 7.00e-28; EST_HUMAN HIT: AA948015.1, EVALUE 2.00e-91
agggtctgggagagtcgggggtgttcctggggtgttccgtgtttttcgctatccatgacgcagtgagtgcagcacgacaggagagaggcctgcatggacccttgacccttaatagtccactgaccccggagaagattaggatggcctgtgaagacaagttcacaaaaatggta

SEQ ID NO: 24747 - DNA, 245 bp, Homo sapiens
  MAP TO CHR7.1; EXPRESSED IN LUNG, SIGNAL = 1.3; EXPRESSED IN FETAL LIVER, SIGNAL = 1.2; EXPRESSED IN HEART, SIGNAL = 1.3; EXPRESSED IN ADULT LIVER, SIGNAL =   2; NT HIT: U92287.1, EVALUE 2.20e-01; EST_HUMAN HIT: BG959507.1, EVALUE 1.00e-111
ctttgtcctctgctatactggccgactttgggaatttgcacacagcacactttatcttgctaaatataatagtctgtctggcattcttcctttgtgagaaatccttattcacttgcataaattatgtgtaaagatctgaagcatactttcctttcttcaatacagactattcccagaagtagcctgacacatgccaaacatctgctcccacatgcagctcaatacatgatattgatatgtattat

SEQ ID NO: 24748 - DNA, 238 bp, Homo sapiens
  MAP TO CHR1.1; EXPRESSED IN LUNG, SIGNAL = 1.3; EXPRESSED IN HEART, SIGNAL = 1.8; EXPRESSED IN FETAL LIVER, SIGNAL = 1.7; EST_HUMAN HIT: BG822263.1, EVALUE 0.00e+00; SWISSPROT HIT: Q61116, EVALUE 4.00e-42; NT HIT: gi15301654, EVALUE 0.00e+00
gtgaggcctgactgaagcccttcccacactgctgacacgtatagggtttctctcctgtgtggaccctctgatgggcactgagaccagcactccaactgaattctttcccacattcctcacatttaaatggtttctctccagtgtgaattatctgatggacttgaagatttgacctctggctgaaggccttaccacaagtgtcacatttatatggtttctctccggtgtggactctctg

SEQ ID NO: 24749 - DNA, 351 bp, Homo sapiens
  MAP TO CHR11.1; EXPRESSED IN FETAL LIVER, SIGNAL = 0.55; EXPRESSED IN LUNG, SIGNAL = 0.86; EXPRESSED IN HEART, SIGNAL = 0.85; SWISSPROT HIT: Q13702, EVALUE 1.00e-60; EST_HUMAN HIT: BE299731.1, EVALUE 0.00e+00; NT HIT: gi16182267, EVALUE 0.00e+00
cagttcgctgtggtccagatcgacacggcccgggagctggaggatgccgacttcctcctggagagctacctgaacctggcacgcagcaacgagaagctgtgcgagtttcacaagaccatctcctactgcaagacctgccttgggctgcctggtaccagggcaggtgcccagctcggaggccaggtcagcctgagcatgggcaatgccttcctgggcctcagcgtcttccagaaggccctggagagcttcgagaaggccctgcgctatgcccacaacaatgatgacgccatgctcgagtgccgcgtgtgctgcagcctgggcagcttctatgcccaggtcaaggtgggcctg

SEQ ID NO: 24750 - DNA, 228 bp, Homo sapiens
  MAP TO CHR17.1; EXPRESSED IN FETAL LIVER, SIGNAL = 1.2; EXPRESSED IN ADULT LIVER, SIGNAL = 0.9; EST_HUMAN HIT: BG437992.1, EVALUE 1.00e-120; SWISSPROT HIT: P28929, EVALUE 6.20e-01
aggtctgccctggccgtgaaggccccatcttcttcggagatgagcagcacggctttgtgttcagccacaccttcttcatcaaggacagcctggccaggggcttccagcgctggtacagcatcatcaccatcatgatggaccggatctacctcatcaactcctggcccttcctgctggggaaggtccggggaatcatcgatgagctccagggcaaggcgctcaaggtga

SEQ ID NO: 24751 - DNA, 194 bp, Homo sapiens
  MAP TO CHR6.1; EXPRESSED IN FETAL LIVER, SIGNAL = 0.97; EXPRESSED IN HEART, SIGNAL = 0.83; EXPRESSED IN ADULT LIVER, SIGNAL = 1.5; EST_HUMAN HIT: AL561574.1, EVALUE 9.00e-69; NT HIT: gi14782101, EVALUE 6.00e-69; SWISSPROT HIT: Q9AJ80, EVALUE 3.30e+00
ctctgcttctgttccagggctcaggaggaaagtacagggctgctgagcggcctccggatctggcacacacagctgctcccaggcgggctccagggcctcatcctcaaccccattttccgccagaacctccgcattgcccttctgggtgggtatgtcacttctctctcttcctaagctagggcaggggaactgct

SEQ ID NO: 24752 - DNA, 155 bp, Homo sapiens
  MAP TO CHR17.1; EXPRESSED IN ADULT LIVER, SIGNAL = 0.88; EXPRESSED IN FETAL LIVER, SIGNAL = 0.99; EXPRESSED IN HEART, SIGNAL = 0.79; EST_HUMAN HIT: AA306203.1, EVALUE 5.00e-76; SWISSPROT HIT: Q10351, EVALUE 3.90e-01; NT HIT: X05196.1, EVALUE 4.00e-82
tctcacctgaagggcattcaggccactgatctgggagtaaggcaacgaggcccggtaggtctccgtggtcttccaccagagcggtagccccagcacgatggccaccgcagcgaagaagagggcggcgcgcttgccccgggccacctctgagggca

SEQ ID NO: 24753 - DNA, 223 bp, Homo sapiens
  MAP TO CHR7.1; EXPRESSED IN HEART, SIGNAL = 1.2; EXPRESSED IN FETAL LIVER, SIGNAL = 1.5; EXPRESSED IN LUNG, SIGNAL = 1.1; NT HIT: gi15300548, EVALUE 1.00e-115; EST_HUMAN HIT: BF981793.1, EVALUE 1.00e-115; SWISSPROT HIT: P47755, EVALUE 3.00e-38
aaggtattgataacagaacatggcgacttgggaaatggaaagtttttggatccaaagaacagaatctgttttaaatttgatcacttaaggaaggaggcaactgatccaagaccctgtgaagtagaaaatgcagttgaatcatggagaacttcagtagaaactgctctgagagcttacgtaaaagaacattacccgaatggagtctgcactgtaagtcatcagt

SEQ ID NO: 24754 - DNA, 113 bp, Homo sapiens
  MAP TO CHRX.1; EXPRESSED IN ADULT LIVER, SIGNAL = 0.99; EXPRESSED IN HEART, SIGNAL = 0.79; EXPRESSED IN FETAL LIVER, SIGNAL = 0.94; EST_HUMAN HIT: AA804794.1, EVALUE 1.00e-48; NT HIT: gi14758860, EVALUE 6.00e-46; SWISSPROT HIT: Q10161, EVALUE 7.90e+00
atacttacactaatgtcactaagaacattagatgcctgttcatgctttagatttcctttaattacatgatatgacaactcatagagagcttgctggaaatctgttgaacataa

SEQ ID NO: 24755 - DNA, 222 bp, Homo sapiens
  MAP TO CHRX.1; EXPRESSED IN FETAL LIVER, SIGNAL = 0.61; EXPRESSED IN HEART, SIGNAL = 0.71; EST_HUMAN HIT: AL554003.1, EVALUE 1.00e-119; NT HIT: AF046145.1, EVALUE 1.00e-122; SWISSPROT HIT: P03296, EVALUE 1.80e+00
cttacctagtggaggttgaagtaagtctccttccttttcacatgtcccaacaggttgtatgtctggggaatcgacaagcctccaaaaatcatttctgttgtcactaccatccagtcgtaaccgtaacctggccccagtaattccaataaccgtagcaatacatactgaagtggcattgcgagggtcacgggcttccaatttcataccaactttgaaatcatt

SEQ ID NO: 24756 - DNA, 133 bp, Homo sapiens
  MAP TO CHR18.1; EXPRESSED IN FETAL LIVER, SIGNAL = 6.1; EXPRESSED IN LUNG, SIGNAL =  13; EXPRESSED IN ADULT LIVER, SIGNAL = 8.5; SWISSPROT HIT: P09896, EVALUE 4.00e-20; NT HIT: gi13645149, EVALUE 4.00e-69; EST_HUMAN HIT: AA650377.1, EVALUE 5.00e-57
ctttctgtaagaagtgtggcaagcaccaaccccacaaagtgacacagtacaagaagggcaaggattctctgtatgcccagggaaagtggcgttataacaggaagcagagtggctatggtgggcagactaagcc

SEQ ID NO: 24757 - DNA, 200 bp, Homo sapiens
  MAP TO CHR19.1; EXPRESSED IN ADULT LIVER, SIGNAL = 1.3; EXPRESSED IN FETAL LIVER, SIGNAL = 1.3; EXPRESSED IN LUNG, SIGNAL = 1.2; EXPRESSED IN HEART, SIGNAL = 1.9; EST_HUMAN HIT: AA948217.1, EVALUE 2.60e-01; SWISSPROT HIT: P38250, EVALUE 3.00e-03; NT HIT: gi14785864, EVALUE 1.00e-105
cccacctgccactggccgatgctttccacgcgctggccgaagggccgctgcagcccggtgcacagcttgaaggcgtcgctgcggatctcaatgaggttgttgaccagggcgcacagcgccgccagggggaaggcggacgagaagagcacaacgtagccgaactgcacgaacatctcctggtagtcctggaacgtgtcctg

SEQ ID NO: 24758 - DNA, 244 bp, Homo sapiens
  MAP TO CHR20.1; EXPRESSED IN FETAL LIVER, SIGNAL =   1; EXPRESSED IN ADULT LIVER, SIGNAL = 0.67; EXPRESSED IN LUNG, SIGNAL = 0.59; EST_HUMAN HIT: BE512849.1, EVALUE 0.00e+00; SWISSPROT HIT: P14635, EVALUE 5.00e-42; NT HIT: gi16160100, EVALUE 0.00e+00
acctctccaatcttagatgctctccgaaggaagtgcaaaggtagaggccgacccagaccaaagtttaaagctcttagaatcttcatttccatctgtctgatttggtgcttagtataagtgttgtcagtcacaaaagcaaagtcaccaatttctggagggtacatttcttcatatttgcttgcaataaacatggcagtgacaccaaccagctgcagcatcttcttgggcacacaattattctgca

SEQ ID NO: 24759 - DNA, 401 bp, Homo sapiens
  MAP TO CHR2.1; EXPRESSED IN FETAL LIVER, SIGNAL = 0.93; EXPRESSED IN LUNG, SIGNAL = 0.59; NT HIT: gi4507720, EVALUE 0.00e+00; SWISSPROT HIT: Q14896, EVALUE 1.00e-03; EST_HUMAN HIT: T19674.1, EVALUE 8.00e-68
agatgcccccaaagtcattctgagaacaagcctagaagtgaaacgaggtgatgaaatagcacttgatgcaagtatttctggatcaccttacccaactattacatggataaaggatgaaaatgttattgtaccagaggaaattaagaagcgtgcagcacccttggttaggagaaggaagggtgaagttcaagaagaagaaccatttgtcctgcctctgacacagcgtttgagtattgacaacagcaaaaagggagaatctcagctacgcgtccgagattctctccgacctgaccatggtctgtatatgatcaaagttgaaaatgaccacggtattgcaaaagctccttgtactgtcagtgtgttaggtgagtcattaaaactacactttccaatggaaaaag

SEQ ID NO: 24760 - DNA, 137 bp, Homo sapiens
  MAP TO CHR19.1; EXPRESSED IN HEART, SIGNAL = 4.2; EXPRESSED IN FETAL LIVER, SIGNAL =  58; EXPRESSED IN LUNG, SIGNAL =  31; NT HIT: X03743.1, EVALUE 2.00e-71; SWISSPROT HIT: P02792, EVALUE 8.00e-12; EST_HUMAN HIT: BE834278.1, EVALUE 3.00e-71
agaagccagctgaagatgagtggggtaaaaccccagacgccatgaaagctgccatggccctggagaaaaagctgaaccaggcccttttggatcttcatgccctgggttctgcccgcacggacccccatgtacgtacc

SEQ ID NO: 24761 - DNA, 183 bp, Homo sapiens
  MAP TO CHR7.1; EXPRESSED IN HEART, SIGNAL = 0.87; EXPRESSED IN LUNG, SIGNAL = 1.3; EXPRESSED IN FETAL LIVER, SIGNAL = 0.95; SWISSPROT HIT: P08243, EVALUE 5.00e-33; EST_HUMAN HIT: BE882357.1, EVALUE 1.00e-98; NT HIT: gi14749174, EVALUE 9.00e-99
cccagaaatttcccttcaatactcctaaaaccaaagaaggatattactaccgtcaagtctttgaacgccattacccaggccgggctgactggctgagccattactggatgcccaagtggatcaatgccactgacccttctgcccgcacgctgacccactacaagtcagctgtcaaagcttagg

SEQ ID NO: 24762 - DNA, 150 bp, Homo sapiens
  MAP TO CHR17.1; EXPRESSED IN FETAL LIVER, SIGNAL = 0.43; EXPRESSED IN HEART, SIGNAL = 0.73; SWISSPROT HIT: P38675, EVALUE 5.10e-01; EST_HUMAN HIT: AV714155.1, EVALUE 1.90e-01
ggaaaccactcacgtgctctgggaggacagagctgagcctggagcaaggggggaggggaaagaagataatgaatgggcacatccaccctgatctgtgatctgtagctaggattgagcaaacctcagctaaattcttcagaggcagaaaga

SEQ ID NO: 24763 - DNA, 161 bp, Homo sapiens
  MAP TO CHR7.1; EXPRESSED IN HEART, SIGNAL = 0.52; EXPRESSED IN ADULT LIVER, SIGNAL = 0.53; EXPRESSED IN FETAL LIVER, SIGNAL = 0.55; SWISSPROT HIT: P14210, EVALUE 1.00e-26; EST_HUMAN HIT: AL571866.1, EVALUE 1.00e-82; NT HIT: D90334.1, EVALUE 1.00e-85
tatgttaaaataattttgtgtatccattttgcataatatgctactcggacaaaaataccaggacgatttggaatggcacatccacgaccaggaacaatgacaccaagaaccattctcattttatgttgctcacaaacaagtgggccaccataatcccccta

SEQ ID NO: 24764 - DNA, 207 bp, Homo sapiens
  MAP TO CHR4.1; EXPRESSED IN ADULT LIVER, SIGNAL = 0.78; EXPRESSED IN FETAL LIVER, SIGNAL =   1; SWISSPROT HIT: Q14103, EVALUE 2.00e-28; EST_HUMAN HIT: AW838288.1, EVALUE 5.00e-92; NT HIT: AF026126.1, EVALUE 1.00e-113
acacactaccttatctacactctccgattctttaaatagcacaaagccaaaaccccttgatcgccctgtgataggatctaacttcagagtgcagtctacaacttcaccaaatttggaaaagtagtccttcagatctttctttgtagtgtcccagctaaggcctcctataaacattttcctgtaaagacaaaaagcagtattaaaatg

SEQ ID NO: 24765 - DNA, 260 bp, Homo sapiens
  MAP TO CHRX.1; EXPRESSED IN FETAL LIVER, SIGNAL = 0.43; EXPRESSED IN HEART, SIGNAL = 0.48; SWISSPROT HIT: P22105, EVALUE 1.00e-13; NT HIT: gi13649009, EVALUE 1.00e-103; EST_HUMAN HIT: BE088973.1, EVALUE 2.00e-52
tgactcactagactgctcttaacttcaactaatccaacttactttggttaaagtatggtggtacttaccaattgtgcagtggtcgccctcccatccagggctacactcacattttccatctttgcattggccatgctcagtacaatgagaatgacaggagcgttcctcacatgttggtcctacccagccttcttcacactggcaaattcctcttgagcagactccatggctaccacactccatggtacacagctctgtgg

SEQ ID NO: 24766 - DNA, 118 bp, Homo sapiens
  MAP TO CHR3.1; EXPRESSED IN FETAL LIVER, SIGNAL = 1.7; EXPRESSED IN LUNG, SIGNAL = 3.7; EXPRESSED IN HEART, SIGNAL = 1.3; NT HIT: gi13626149, EVALUE 3.00e-60; EST_HUMAN HIT: AI809879.1, EVALUE 5.00e-60
agctaatatggaaaccacatgtaacttagccagactatattgtgtagcttcaagaacttgcagtacattaccagctgtgattctcctgataattcaagggagctcaaagtcacaagaa

SEQ ID NO: 24767 - DNA, 184 bp, Homo sapiens
  MAP TO CHR19.1; EXPRESSED IN FETAL LIVER, SIGNAL = 0.84; EXPRESSED IN LUNG, SIGNAL = 1.5; EXPRESSED IN HEART, SIGNAL = 1.1; EXPRESSED IN ADULT LIVER, SIGNAL = 0.59; SWISSPROT HIT: P35448, EVALUE 9.70e+00; NT HIT: gi16163471, EVALUE 1.00e-94; EST_HUMAN HIT: BG675930.1, EVALUE 2.00e-94
cagagcgagagctcgccaaggctgagaagctgtctctggaggaaggcgggaaggatgcccggggcttgctatccggcctgcggcggcggaagcggcccctgagctggcgggctcacggggacgggccccagcacccagatcctgacccctgtgcccgggccggcattcacacctcgggtacgtt

SEQ ID NO: 24768 - DNA, 175 bp, Homo sapiens
  MAP TO CHR7.1; EXPRESSED IN FETAL LIVER, SIGNAL = 0.47; SWISSPROT HIT: Q14168, EVALUE 4.00e-20; NT HIT: gi14751802, EVALUE 2.00e-87; EST_HUMAN HIT: AW946743.1, EVALUE 3.00e-87
catttagaatttgatcgtcatgaaatccagatatatgaggaggtagccaaaatgcctcccttccagagaaaaacattagtattgataggagctcaaggtgtaggccgaagaagcttgaaaaacaggttcatagtattgaatcccactagatttggaactacggtgccatgtaagt

SEQ ID NO: 24769 - DNA, 104 bp, Homo sapiens
  MAP TO CHR7.1; EXPRESSED IN ADULT LIVER, SIGNAL = 1.5; EXPRESSED IN FETAL LIVER, SIGNAL = 1.7; EXPRESSED IN LUNG, SIGNAL = 1.2; EXPRESSED IN HEART, SIGNAL = 1.8; NT HIT: gi15603881, EVALUE 8.40e-02; EST_HUMAN HIT: AI197978.1, EVALUE 4.90e-01
caaatgcttatgtagaaattgcaaatgttttcagaccaactgtgccttcattaaatttatagagaacattatcattttattaataactgtgatatctatttgaa

SEQ ID NO: 24770 - DNA, 169 bp, Homo sapiens
  MAP TO CHR7.1; EXPRESSED IN FETAL LIVER, SIGNAL =   1; EXPRESSED IN HEART, SIGNAL = 1.1; EST_HUMAN HIT: BF128196.1, EVALUE 5.50e-02; SWISSPROT HIT: P98109, EVALUE 1.90e+00
caggcagttgttaaatgatgcagttgaagtaaccatggactagtgccaaattcaaaccaatgacctagtggtgagcaatccagtgagccatgtatccaccaatgcatattttaaataaatcaaccagaatgtgggctgtcaaaattcccaaagataaatcaaagagaca

SEQ ID NO: 24771 - DNA, 178 bp, Homo sapiens
  MAP TO CHR5.1; EXPRESSED IN FETAL LIVER, SIGNAL = 0.58; NT HIT: U07766.1, EVALUE 9.70e+00
gaattaatccaattgcatttaaaacaaagtgcaggagcaagaaacaaccttgaaccttccttactcaaatagcagctctgttggtaatttaatcactaactgagttgtgtaacttgcctatgacaaatggtaaaatacctacaatgtggaaatctgccagagtaattccttcacagga

SEQ ID NO: 24772 - DNA, 166 bp, Homo sapiens
  MAP TO CHR14.1; EXPRESSED IN FETAL LIVER, SIGNAL = 0.4; EXPRESSED IN LUNG, SIGNAL = 1.7; EST_HUMAN HIT: AW408270.1, EVALUE 1.00e-82; SWISSPROT HIT: P23083, EVALUE 2.00e-26; NT HIT: U84172.1, EVALUE 1.00e-88
atccactcaagcccttgtccaggggcctgtcgcacccagtgcatatagtagccggtgaaggtgtatccagaagccttgcaggagaccttcactgaggccccaggcttcttcacctcagccccagactgcaccagctgcacctgggagtgggctcctgtggagagaa

SEQ ID NO: 24773 - DNA, 352 bp, Homo sapiens
  MAP TO CHR16.1; EXPRESSED IN FETAL LIVER, SIGNAL = 7.1; EXPRESSED IN LUNG, SIGNAL = 9.8; EST_HUMAN HIT: BE895166.1, EVALUE 0.00e+00; SWISSPROT HIT: P02248, EVALUE 2.00e-24; NT HIT: gi14775945, EVALUE 0.00e+00
accatcaccctcgaggttgaaccctcggatacgatagaaaatgtaaaggccaagatccagggtaaggaaggaattcctcctgatcagcagagactgatctttgctggcaagcagctggaagatggacgtactttgtctgactacaatattcaaaaggagtctactcttcatcttgtgttgagacttctggtggtgctaagaaaaggaagaagaagtcttacaccactcccaagaagaataagcacaagagaaagaaggttaagctggctgtcctgaaatactataaggtggatgagaatggcaaaattagtcgccttcgtcgagagtgcccttctgatgaatgtggtgctgg

SEQ ID NO: 24774 - DNA, 178 bp, Homo sapiens
  MAP TO CHR7.1; EXPRESSED IN ADULT LIVER, SIGNAL = 0.59; EXPRESSED IN FETAL LIVER, SIGNAL = 0.34; EST_HUMAN HIT: AI638285.1, EVALUE 5.00e-58; NT HIT: AJ251880.1, EVALUE 9.70e+00; SWISSPROT HIT: Q9GZL8, EVALUE 8.60e-01
gtctaggaaattcattataggcctttctaagagagaaggctttgtgataaaagccagctgcccagacatttccaaaccctcctcacccatcccccagcatgctacagaagcagcaggctggcagaggtccagatttcctaagtgatgggattgttcccccggccaggaatgagaggaa

SEQ ID NO: 24775 - DNA, 136 bp, Homo sapiens
  MAP TO CHR19.1; EXPRESSED IN FETAL LIVER, SIGNAL = 0.63; NT HIT: D26480.1, EVALUE 6.00e-19; SWISSPROT HIT: P51869, EVALUE 1.00e-12; EST_HUMAN HIT: BI763623.1, EVALUE 8.00e-19
actcttggcagttgctgttgtagctgaagacacatttctgaagactgtccagggtcatgaggctgatatgctcaaacatatcaagggagaccgctgagccctctgccagatgccgccatttagcctggaagagaga

SEQ ID NO: 24776 - DNA, 243 bp, Homo sapiens
  MAP TO CHR22.1; EXPRESSED IN FETAL LIVER, SIGNAL = 0.35; SWISSPROT HIT: Q00587, EVALUE 2.00e-42; NT HIT: gi14778715, EVALUE 0.00e+00; EST_HUMAN HIT: AL047808.1, EVALUE 0.00e+00
ggggggcagaggcgccgccaccatgagcctgggcaagctctcgcctgtgggctgggtgtccagttcacagggaaagaggcggctgactgcagacatgatcagccacccactcggggacttccgccacaccatgcatgtgggccgtggcggggatgtcttcggggacacgtccttcctcagcaaccacggtggcagctccgggagcacccatcgctcaccccgcagcttcctggccaagaagct

SEQ ID NO: 24777 - DNA, 1121 bp, Homo sapiens
  MAP TO AF207550.1; EXPRESSED IN HELA, SIGNAL =   1; EXPRESSED IN PLACENTA, SIGNAL = 1.6; EXPRESSED IN LUNG, SIGNAL = 1.3; EXPRESSED IN HEART, SIGNAL = 1.9; SWISSPROT HIT: P17971, EVALUE 0.00e+00; NT HIT: gi14760095, EVALUE 0.00e+00; EST_HUMAN HIT: AL120075.1, EVALUE 0.00e+00
ccaagcgtggtcatggtgacaatggtataccagaaggccgcagggatgcttgtaaagttggtcttgtttgtgcccttctcagcataaaacatgacagtggcaaagatgatgatggccatggttagggaaaagaggagaaagcccagctcagaggcacagctcttgagtgtgtagcccagaatcctcaagccctgtgagtgcctggagaacttgaagatgcgaaacacccggaacacacgcagggtgacaaaggcgccagagacatcgtcgttcttgggcaccaaaagcccaatgtagtagggcaggatggccaccacgtcgatgaggctcatgacactccgcaggaagcggcaacggctgggggcggcaaacagccgcaggaggtattcacctgtgaatatgagtacacaggctgtgtccatgcagaaaaaggcctgtgggaagcgttcgccacagggctgctcccttgaggacctgcgtgcagagccgcggcatgggatggtctccaccacattggcgatgaccgacacggcgatgaagaagccggtcacatagtagaaaacgagggctgcggtgctcgtgtgtggattctcgaaggcccgccagagccgctgccgcagggagctgcctgctggcagggctgggccgtccccggcctgctctgcctcctcatcctctgccaggcgctcggcattctccttctttcggtcccgatactcttcaaggcagcagtcaccgactagctcgggaaccaggccgtagaaagccagctcttcgtcgaaggcctggatgcactcctgccgtgggcaatgcagccgccccgttcggtagaagttcagcacatggcggaacatgtcagggtcgcgatcgaagaagtactcgcctgagtcagcatcgtagaagaattccttctccgagctgcccagcaaggtgtctgggtagcggtccagcgtattcttccaagtctcaaagcgccgtccgctcacgttcaccaccagaacctcatctcctcgagatgccttcacccccggtgccgggggcaggggttgctgggccaggggcagccagcccactgctgctgcccgagcaaaaggcagccacgtggccaggcctgccgccat

SEQ ID NO: 24778 - DNA, 452 bp, Homo sapiens
  MAP TO AL031121.5; EXPRESSED IN HELA, SIGNAL = 1.7; EXPRESSED IN LUNG, SIGNAL = 1.2; EXPRESSED IN HEART, SIGNAL = 1.2; EST_HUMAN HIT: BE072147.1, EVALUE 1.60e-01; SWISSPROT HIT: P40552, EVALUE 1.00e-08; NT HIT: X73480.1, EVALUE 1.70e+00
cttcccatgagtttagcagggccacatccactgcttcccatgagtttagtagggccacatccactgcttcccgtgagtttagtagggccacgtccgctgcttcccgtgagtttagtagggccacgtccgctgcttcccgtgagtttagtagggccacgtcagctgctgcccgtgagtttagtagggccacgtccgctgcttcccgtgagtttagtagggccacgtctgctgcttcccgtgagtttagtagggccacatccgctgcttcctgttggcttatcagggctgcatgtctcacagtcagccagcagtctagggaatgggccagtcatgagctgtgctcctaaatttggaaaaatcaggaccttgtggagacaaaaaggaagtaaacagagctaccatccttcagatgaccacgtctgggtgccatttgcagaagaagagccagtctt

SEQ ID NO: 24779 - DNA, 623 bp, Homo sapiens
  MAP TO AL121757.2; EXPRESSED IN HELA, SIGNAL = 3.8; EXPRESSED IN LUNG, SIGNAL = 2.1; EXPRESSED IN HEART, SIGNAL = 1.6; SWISSPROT HIT: P70178, EVALUE 1.70e+00; NT HIT: gi13562117, EVALUE 3.80e-02
atgcaccaggcactggactgggcagcaggaatttggtttacaggaagattaggactcagagagcataaatcactggcccagggtgactcagtctgtccatgtgaaagtgaacttggtgatttccaagtctatggcttggtcagtacagaaggagtggtgtcctgctttggagagaagaccccgcagcatcctggccctcctgcttcattgtccctggccaacaggtgccacaacgttgtgacagctgtaggagcctggccagctcatgggagcatccttggaaatgttccagaagcccctgtgggagctgatgtgttgggggctggaggatgtgactgggcagacaaagaggccctggcccctgggcaaagggcaaaggtgcacattcttcttgagagttctggacagtctgatccatcctatgctgtccttcctgacagctgggcagccacggagggtttcccaacttacagatctcaggtctcctctccccgcatcccgggtagttccatctggttaggcagtgggtctggttggcctatacttggggaactcagggaatgtgaccagatgttctcctgcatgttgcccactggttgtgcctccttccaggatccaggacg

SEQ ID NO: 24780 - DNA, 711 bp, Homo sapiens
  MAP TO AC000076.2; EXPRESSED IN LUNG, SIGNAL = 1.4; EXPRESSED IN PLACENTA, SIGNAL = 2.4; EXPRESSED IN HEART, SIGNAL = 1.2; SWISSPROT HIT: P40602, EVALUE 1.00e-04; EST_HUMAN HIT: BF684822.1, EVALUE 0.00e+00; NT HIT: gi15317317, EVALUE 0.00e+00
tcctcctctgttttctggggttttggacctcctggatgagctgggtctggtctctgggcaggaggattagctgactccgacagtctagggacaggtgtgggggctgcctcctctggctgggaagaggctggttccacaggaccaggcttggagctacatgtagaactgggcaggactgggggctccttgggcccaggggtgctctccttggtcagctgctgctcgaacagagcacttctagatacagagttggacccagacacagcaggggtggccatggcggctggtaaagacctgggggcagtacccatgtcgagtgccaggccctctaagaacctagctaagtattgcctcaccacaggcagctgaggggccactggcagctggctggaggccaggggcaggggacaggtaaccacagcatggtactcagcaaaactgttcgggtcttgaacaacttccttgagatcctggcagaagagctcgtaatcgtcaggcaggggcaggtccccatcaaggtagggggctgcccaggcctgggctcggcctgttaggcgcctgaggatctcgcagacacggctgatgttgtcctgatagtgctcaaagtggaaggacatgtaatcgcccagctgggccaagaagcggtccagtagccacggggagccatcaaaggtgcctgggtctgagcctggtacccagcagaagtccacc

SEQ ID NO: 24781 - DNA, 746 bp, Homo sapiens
  MAP TO AC005736.1; EXPRESSED IN HEART, SIGNAL = 1.5; SWISSPROT HIT: O60503, EVALUE 0.00e+00; NT HIT: gi14778092, EVALUE 0.00e+00; EST_HUMAN HIT: AU141090.1, EVALUE 0.00e+00
ggagtgctaccgggtcctcaacgagctcatcggggactttgacgagctcctaagcaagccggactacagcagcatcgagaagatcaagaccatcggagccacgtacatggcggcgtcagggctgaacaccgcgcaggcccaggacggcagccacccgcaggagcacctgcagatcctgttcgagttcgccaaggagatgatgcgcgtggtggacgacttcaacaacaacatgctgtggttcaacttcaagctccgcgtcggcttcaaccatgggcccctcacggccggggtcatcggcaccaccaagctgctgtacgacatctggggagacaccgtcaacatcgccagcaggatggacaccaccggcgtggagtgccgcatccaggtgagcgaagagagctaccgcgtcttgagcaagatgggctatgacttcgactacagagggaccgtgaatgtcaaggggaaaggccagatgaagacctacctgtacccaaagtgcacggatcacagggtcatcccacagcaccagctgtccatctccccagacatccgcgtccaggtggatggcagcatcggacggtctcccacagacgagattgccaacctggtgccttctgtccagtatgtggacaagacatctctgggttctgacagcagcacgcaggccaaggatgcccacctgtcccccaagagaccgtggaaggagcccgtcaaagccgaagaaaggggtcgatttggcaaagcca

SEQ ID NO: 24782 - DNA, 573 bp, Homo sapiens
  MAP TO AL133476.4; EXPRESSED IN HELA, SIGNAL = 0.74; EXPRESSED IN LUNG, SIGNAL = 1.1; EXPRESSED IN HEART, SIGNAL = 2.2; SWISSPROT HIT: P08572, EVALUE 5.50e+00; EST_HUMAN HIT: BF339690.1, EVALUE 0.00e+00; NT HIT: AB002373.2, EVALUE 0.00e+00
acatcatccagacccactaccagccctggggcttcctgagtgcagctcataccgtgtgtcccggcctctttgaagagctgctgctgctgctacagcccctggccctgctgcccttcagcctcgacttgctgttccagcaccggctgctgcaaagtgggcagcagcagcggcagcacaaggaactgctgcgggtgtcccaggacctgctgctgtctgcccactccacgctgcagctggcccgggcccggggccaggagggccctggagacgtggacagggcagcccaaggggagcgggtgaagggtgtgggtgcctcagaaggtggagaagaggaagaggaagaagaggagacagaagaggtggcagaggcagccgggggctcagggcgtgccaggtgggcccgaggtgggcaggccggctggtggtaccagctcatgcagagctcccaggtctacatcgatggctccattgagggttccaggttccctcgtggtagcagcaacagcagcagcgagaaaaagaaaggggcaggaggtgggggacctccccaggctccaccaccccgagagggag

SEQ ID NO: 24783 - DNA, 650 bp, Homo sapiens
  MAP TO AC005746.1; EXPRESSED IN LUNG, SIGNAL = 2.3; EXPRESSED IN HEART, SIGNAL = 1.6; EXPRESSED IN HELA, SIGNAL = 0.54; SWISSPROT HIT: Q13207, EVALUE 2.00e-75; EST_HUMAN HIT: AI243233.1, EVALUE 0.00e+00; NT HIT: gi14772624, EVALUE 0.00e+00
agatgccagcatgtgctgggagaggtggaacgggaagggcgcggcggtgcttgctgcgctggccgcgggacccagcccgcctgcgtccagccccgcggcggtcccaggcccgccacctccgccgttgccgccgcctgccaccgaggccagtaggtgacccatgcccatggcggagaaggcgccagggcccatggtgaactgtccagggtgcaggaagagcggctggccggctcccagcggcccaaagaactgctgcccgtgcaagtggctggaaaaggccaggccgggcaggtgtccggcgcccaggggggacgcactgtctgtctgcaccaccagcggcgccaggccctgctccttgccctcggccgcctccttgcgcccctcgtccttcctccgagcttcggcgcgctccttctccaggctcctcaggccgaacgggccgtccccgccgctctcggccggctccttgcccctctcgggactacgccgctcccgggcgcgctcgggttcggtcaagcgagtggggctggcgctgtctggagccgggctgcggcctagcggcgcccccgcacgctcctcgctcaaccgctcaggctccgggtcgctgtccgcggcgcacgacttctcctcagctgcggggagagggcgcg

SEQ ID NO: 24784 - DNA, 611 bp, Homo sapiens
  MAP TO AC000093.3; EXPRESSED IN HELA, SIGNAL = 0.55; EXPRESSED IN HEART, SIGNAL = 2.2; NT HIT: J03259.1, EVALUE 0.00e+00; SWISSPROT HIT: P13224, EVALUE 7.00e-60; EST_HUMAN HIT: BI599152.1, EVALUE 0.00e+00
ggccgcgcggggcgctgagcttactgctcctgctgctggccccgccgagccgcccggccgcaggttgcccggcgccctgtagctgcgcggggacgctcgtggactgcgggcgccgcgggctgacttgggcctcgctgccgaccgccttccctgtcgacacaaccgagctggtgctgaccggcaacaacctgacggcgctgccgccggggctgctggacgcgctgcccgcgctgcgcaccgcacacctgggcgccaacccctggcgctgcgactgccgccttgtgccgctgcgcgcctggctggccggccgccccgagcgtgcgccctaccgcgacctgcgttgcgtggcgcccccagcgctgcgcggccgcctgctgccctatctggccgaggacgagctgcgcgccgcttgcgctcccggcccgctctgctggggggcgctggcggcgcagcttgcgctgctgggccttgggctgctgcacgcgttgctgctggtgctgctgctgtgccgcctgcggaggctgcgggcccgggcccgcgctcgcgccgcagcccggctgtcgctgaccgacccgctggtggccgagcgagccggaaccgacgagtcctga

SEQ ID NO: 24785 - DNA, 908 bp, Homo sapiens
  MAP TO AC010320.7; EXPRESSED IN HELA, SIGNAL = 1.6; EXPRESSED IN HEART, SIGNAL = 1.9; EXPRESSED IN LUNG, SIGNAL = 1.4; SWISSPROT HIT: Q05481, EVALUE 7.00e-54; EST_HUMAN HIT: AW862303.1, EVALUE 0.00e+00; NT HIT: gi14754622, EVALUE 1.00e-109
gtatccttcctaaatgtatgaccaaggaattaccaccaatagggaacagtaatacaggagaaaaatgccaaacagtgacgctggaaagacatgaatgttatgatgttgaaaatttttacttaagggaaatccagaaaaatctacaggaccttgagtttcaatggaaagatggtgaaataaattataaagaagtgccaatgacctataaaaacaatcttaatggtaaaagaggtcaacatagtcaagaggatgtagaaaacaaatgtattgaaaatcagcttacattaagctttcagtcacgtctgactgaactgcagaaatttcaaactgaagggaaaatttatgagtgtaaccaatctgagaagacagttaataacagttccctagtttcaccacttcaaagaattcttcctagtgtccaaaccaacatttctaaaaaatatgagaatgagtttttgcagctgtcattacccacccaacttgagaaaacacacattagggaaaaaccttatatatgtaaagggtgtggcaaagcctttagagtgtcttcaagtcttattaaccatcagatggtacatactacagagaaaccttacaaatgcaatgaatgtggcaaagcctttcatcggggctcactactaactatacatcagatagtccatacaagggggaagccatatcaatgtggtgtatgtggcaagatcttcagacaaaattcagatcttgtaaatcaccggagaagtcacactggagagaaaccgtacaaatgtaatgaatgtggcaagtcctttagtcaaagttacaaccttgcaatacatcagagaattcacactggagagaaaccttacaaatgtaatgagtgtgggaaaaccttcaaacaggctcatgcctcactacacatcagataa

SEQ ID NO: 24786 - DNA, 1920 bp, Homo sapiens
  MAP TO AL049869.5; EXPRESSED IN PLACENTA, SIGNAL = 1.4; EXPRESSED IN LUNG, SIGNAL = 2.3; EXPRESSED IN HEART, SIGNAL = 1.4; NT HIT: gi14752230, EVALUE 0.00e+00; EST_HUMAN HIT: BI199691.1, EVALUE 0.00e+00; SWISSPROT HIT: P54652, EVALUE 0.00e+00
ttagtccacttcttcgatggtgggtcccccggaggctcctgaaccgccgccgccgctgccgccgccaggaccaccttggtaaagtttgctgatgatggggttgcaaactctttcgagctctttctgcttgtgttcatactcatctttctctgccatctggtttcggtcgagccagttgatcacctcctgacacttgtcgaggatcttgtttttgtcctgctcgctaatcttgcccctcagtttctcgtcttccaccgtctgcttgatgttgtaggtataggactccagggcgtttttggccgcgactcggtcgcgattcgcctcatcttccgatttgtaccgctccgcctcctgcaccatccggtcaatgtcgtccttgctcagacgacctttgtcattggtgatggtgattttgttttccttaccggtgctcttgtcggcggcggtaacgttaaggatgccattggcgtcaatgtcgaaggtaacctcgatttgggggaccccgcgaggcgcagggggaatcccggtcaggtcgaacttgcccagcaggttattgtccttggtcatggcccgttcgccctcgtatacctgcaccagtacgctgctctggttgtccgagtaggtggtgaaggtctgcgtctgcttggtggggatcgtggtgttcctcttgatgagtggggtcatgacaccgccagctgtctcgatgcccagcgacaacggggtcacgtcgagtagcagcaggtcctgcacattctctgatttgtcgccgatgaggatggccgcctgcaccgcggcgccataggccaccgcctcgtcggggttgatgctcttgttcagctccttgccgttgaagaaatcctgcagcagcttctggatcttggggatacgagtggagccgcccaccagcacgatctcctggatctggcccttgtccagcttggcgtcgcgcagcgccttctccaccggctccagggtcccgcgaaagaggtcggcattgagctcctcgaagcgggcgcgcgtgatggacgtatagaagtccacgccctcgtagagcgagtcgatctcgatgctcgcctgcgtggacgagctcagggtgcgcttggcgcgctcgcaagcggtgcgcagccgcctcacggcgcgcttgttgggcccaatgtccttcttgtgcttgcgcttgaactcctccgccaggtggctcaccatgcggttgtcgaagtcctcaccgcccaggtgggtgtcgccggccgtggacttcacctcgaagatgccatcctcgatggtcaggatggacacgtcgaaagtgccaccgcccaggtcaaagatgagcacgttcttctcgccgcccgcgcagcccttcttgtccaggccgtaggcgatggccgccgccgtgggctcgttgatgatgcgcagcacattgagccccgtgatggtgcctgcgtccttggtggcctggcgctgcgagtcgttgaaataggccgggaccgttatgaccgcgctgtgcaccttgccccccaggtaggcttccgcgatctccttcatcttcgtgaggaccatggaggatatctcctctgggaagaaggtcttggtctcccccttgtactctacttgcactttgggcttgcctccctcgctcaccacccggaacggccagtgtttcatatccgactgcactgtggcatcctcgaatttccgtccaatcagcctcttggcgtcgaagatggtgttggtggggttcatggccacctggttcttggcggcgtcgccgatgaggcgctcggtgtccgtgaaggccacgtagctgggggtggtgcgattgccctggtcgttggcgatgatctccaccttgccatgttggaagaccccgacgcacgaataggtggtgcccaggtcgatgccgatagccgggccacgggcagacat

SEQ ID NO: 24787 - DNA, 555 bp, Homo sapiens
  MAP TO Z79999.2; EXPRESSED IN HEART, SIGNAL = 1.7; EXPRESSED IN HELA, SIGNAL = 0.5; SWISSPROT HIT: P09695, EVALUE 4.60e-01; NT HIT: L38524.1, EVALUE 1.30e-01; EST_HUMAN HIT: BE313880.1, EVALUE 2.00e-01
ctagcattgattcagtgcctgcagtgtactgggcactgttctcagctctttatctgtatcattgtgctgacttttcataacagccccatcaactgcataaatgggccccatccccgtactcagagtcctgcctatcactgatctcagcttccccgcaggctggatgatctccaggttgcttccagcgctgcccatcctgggttggtgcacaggagagagccctcccagttcctccctacctacttgggcagccttggggtgtcctgtgggctcaggggacttgcctgtctctgctccagggtttccttgggagccgcagcctgcagctgtgcctgtggtcgggccctctacctccactccccgcgcttcctcctgggactcctgaccagcatcttgtgccttatggtgccccgcccacctcatgaccctgagaactgggagattagaaggtcgaatgtgcccttttgaagtgaggagtggtcgttgcttcttttttggcttcgaccacatgcctacattttcatcccgatgttccccataaccaatgcccagttt

SEQ ID NO: 24788 - DNA, 1137 bp, Homo sapiens
  MAP TO AL121790.2; EXPRESSED IN LUNG, SIGNAL = 3.4; EXPRESSED IN HEART, SIGNAL = 3.3; EXPRESSED IN PLACENTA, SIGNAL = 2.2; NT HIT: gi13631739, EVALUE 0.00e+00; SWISSPROT HIT: P55317, EVALUE 0.00e+00; EST_HUMAN HIT: BI819070.1, EVALUE 0.00e+00
ctggtggtcaccgaggcgctgcctagaggcaggctggcgggcaacgtagagccgtaaggcgagtattgcagtgcctgttcgtatgccttgaagtccagcttatgctgctgctccgaggaggacatgaggttgttgatggagaacgggtggttgaaggagtagtgggggtcccctttcaggtgcagctgggactcgtggggtgccaagccgtgtgccgggtgagaggcgggcacagaggccagcgccccgggcccggagcttatggggggcgcagttgaggaggctggagtcttcaactccgaggcgccccctgtcgccgtcgccccactgtggtccagagtctgggggctggcggcgggcccgggggccggcgcgccctctagctggccggtcttcccgtgcacaccccgatggaggggcgagtcggcgctggggttagaggcgccagaggggtccttgcggctctcagggccgcccttggcgccgctgcccccgcttccgctcccgcccccgccgccggcccccggctgcttctcgcacttgaagcgcttctggcggcgcaagtagcagccgttctcgaacatgttgccggagtccgggtgcagcgtccagtaggagcccttgcccggcttgtccggggagcgtgccaccttgacgaagcagtcattgaaggacagcgagtggcggatggagttctgccagcgctgctggttctgccggtaataggggaagaggtccatgatccactggtagatctcgctcagcgtgagcatcttgctgggcgcctgctggatggccatggtgatgagcgagatgtacgagtagggcggcttggcgtgcgggtagctgcgcttgaacgtcttggcgtcgccgccgccgcccgcgcggctgcggcccaggttggacggcgcgtacgccatggggctcatgcacgggttcatggcggccgcgtaggggcccaggccattcatggaggccgcctgctgcgcacccatggcgcccatgccgctcgggctcagcgccgtacccatggccgtcacgccggccgcagtcatgctgttcatggcgcccgccgagccccccggcatgccggctactgcgccgggactcaggccggcccctaggcccgggttggca

SEQ ID NO: 24789 - DNA, 1476 bp, Homo sapiens
  MAP TO Z84479.1; EXPRESSED IN HELA, SIGNAL = 0.2; EXPRESSED IN HEART, SIGNAL = 1.7; SWISSPROT HIT: Q62577, EVALUE 3.00e-17; EST_HUMAN HIT: AW182905.1, EVALUE 0.00e+00; NT HIT: gi15595198, EVALUE 1.40e+00
gactgtgcggctgctgagaagtgctgcatcaacgtgtgtggactgcacagctgcgtggcagcacgcttccccggcagcccagctgcgccgacgacagcggcctcctgcgagggctttgtgtgcccacagcagggctcggactgcgacatctgggacgggcagcccgtgtgccgctgccgcgaccgctgtgagaaggagcccagcttcacctgcgcctcggacggcctcacctactacaaccgctgctatatggacgccgaggcctgcctgcggggcctgcacctccacatcgtgccctgcaagcacgtgctcagctggccgcccagcagcccggggccgccggagaccactgcccgccccacacctggggccgcgcccgtgcctcctgccctgtacagcagcccctccccacaggcggtgcaggttgggggtacggccagcctccactgcgacgtcagcggccgcccgccgcctgctgtgacctgggagaagcagagtcaccagcgagagaacctgatcatgcgccctgatcagatgtatggcaacgtggtggtcaccagcatcgggcagctggtgctctacaacgcgcggcccgaagacgccggcctgtacacctgcaccgcgcgcaacgctgctgggctgctgcgggctgacttcccactctctgtggtccagcgagagccggccagggacgcagcccccagcatcccagccccggccgagtgcctgccggatgtgcaggcctgcacgggccccacttccccacaccttgtcctctggcactacgacccgcagcggggcggctgcatgaccttcccggcccgtggctgtgatggggcggcccgcggctttgagacctacgaggcatgccagcaggcctgtgcccgcggccccggcgacgcctgcgtgctgcctgccgtgcagggcccctgccggggctgggagccgcgctgggcctacagcccgctgctgcagcagtgccatcccttcgtgtacggtggctgcgagggcaacggcaacaacttccacagccgcgagagctgcgaggatgcctgccccgtgccgcgcacaccgccctgccgcgcctgccgcctccggagcaagctggcgctgagcctgtgccgcagcgacttcgccatcgtggggcggctcacggaggtgctggaggagcccgaggccgccggcggcatcgcccgcgtggcgctcgaggacgtgctcaaggatgacaagatgggcctcaagttcttgggcaccaagtacctggaggtgacgctgagtggcatggactgggcctgcccctgccccaacatgacggcgggcgacgggccgctggtcatcatgggtgaggtgcgcgatggcgtggccgtgctggacgccggcagctacgtccgcgccgccagcgagaagcgcgtcaagaagatcttggagctgctggagaagcaggcctgcgagctgctcaaccgcttccaggactag

SEQ ID NO: 24790 - DNA, 660 bp, Homo sapiens
  MAP TO AC022149.3; EXPRESSED IN HELA, SIGNAL = 4.6; EXPRESSED IN HEART, SIGNAL = 1.5; EST_HUMAN HIT: BG770882.1, EVALUE 0.00e+00; NT HIT: gi4504766, EVALUE 0.00e+00; SWISSPROT HIT: P05556, EVALUE 1.00e-106
tcattttccctcatacttcggattgaccacagttgttacggcactcttataaataggattttcacccgtgtcccatttggcattcattttctccttttcaaatttagcaaactcccttctgtcatgaattatcattaaaagcttccatatcagcagtaatgcaaggccaataagaacaattccagcaaccacaccagctacaattggaatgatgtctggaccagtgggacactctggattctccacaacatgaaccatgacctcgttgttcccattcactgaatacgtaaaatagaaccaacagtcgtcaacatccttctccttacaatgggacacaggatcaggttggaccggctggggtaatttgtcccgactttctaccttggtaatgttaaaataggaacattcctgtgtgcatgtgtctttcttttctcctttattgaaggctctgcactgaacacattctttatgctcagcacagacaccaaggcaggtctgacacatctcacacgtttgcccttgaaacttcggatctgtacacttacagacaccacactcgcagatgccccggccattgcagatctgtccgttgctggcttcacaagtactagtataatttttaaaatgttttattattttgaaaataatgttgtaattcat

SEQ ID NO: 24791 - DNA, 1845 bp, Homo sapiens
  MAP TO AC008891.4; EXPRESSED IN HEART, SIGNAL =  19; SWISSPROT HIT: P23327, EVALUE 0.00e+00; EST_HUMAN HIT: AA778986.1, EVALUE 0.00e+00; NT HIT: gi11424080, EVALUE 0.00e+00
agccctcccacagcaccaccccagggcccctgggacagattctggggacaccttggtgggtggatctgggctggggacatacattgcagaaggagcagtagccacacagggaccctggctggtagttcccatactcctgagcatcctgtggacctgcggggacaggagggcagcagtgacccaggctgactcggttccttcccacccacaccagcccaggccacttacctgtgtcctcaccgctttcctcctcgctggaggcacctccagcctcctctctcctgtccagtgggttggggatgatggtgaagcggggctcatcttcctccagcccctcctcctcctcctcttcctcctcgctgtggtctgggctcagtggggccccaacctcagccctctcttccctcctctcctcgtcttcttcctcctcctcctcctccttgtcttcctcttcttcctcctcctggttcaggctgaggccatgaccttcctcctcatcctcctcatcttcctggtcccggctgccatgatgggtgcctttctctccctgctctgaactttcatcgtcttcctcatgggagccggggtcctcttccttctccttttcctcctcagaatcatccttcctcaaatggcttctatccttgaccactgtgtgtcctggggggtgatggctcatctctttgatggaccctctttgaccatggccagtttcttcatcttggtggctttgcctgtggctgggggcctggtggccaagctcagcagagacctcctcatcttcctccctggggactctgtggtggtgatggtgagggacttctgttttatactcatcttggaagtcctcttcatcactcttgtggcctcgaggttggtggcttgcaacatagtggccgaactggactgtgatctcctcttcttcctcttcctcatctacaaggccatggtggacatgttggggaccctggtgccaacgttcagtggacacatcctcatcttcttcctcgtctctgtggccttggtgcctgtggtcagggacatgatggtggtgttcacctgagacagcctcaacctcttcctttctgtggtcttggtgcctgtgggcctggtgtccatactcagtggagacatcatcatcatcattgtcatcttcttcatggcttcggtgcctgtggctggggtcgcgatgatggtgtccatctgagacatcttcatcctcttcaatcccgtggccttggtgcctgtgagcctggtgtctatattcaatggagacatcatcatcatcatcatcatcatcatcatcatcatcatcatcgtcatcttcttcatggccttggtgcctgtggctggggccatgatgatggtgtccatctgagacatcctcatcctcttcactcccatggcctcggtgcctgtgggcctggtgtccatactcagtggaggcctcctcttcctcctcctcctcctcctcctcctcttctccttcatcatcttccccatcatggcctcggtgtccatgcctgaggatatgatggtgatgctcactggacacaacttcatcctcatcctcgtcttgatggctgtggctcctgtggctggggaggtggtgcctgtgctcagctgagtcttccgtgtcttcactcccgtggcctctgtgcccacgggcctgcccaccatgctctgcaaagacctcctcacctgagacaccctcatctccgactttgtggtcttgggacctgtggcctgggagtaggtgcccatattccttggagacatcttcatcctccttttcacggtctgggtggctccagaaatgatgcccattctctgtggaaacatcct

SEQ ID NO: 24792 - DNA, 669 bp, Homo sapiens
  MAP TO AC013648.3; EXPRESSED IN PLACENTA, SIGNAL = 2.5; EXPRESSED IN HEART, SIGNAL = 1.3; EXPRESSED IN LUNG, SIGNAL = 0.98; EXPRESSED IN HELA, SIGNAL = 6.5; SWISSPROT HIT: gi1351900, EVALUE 2.00e-25; EST_HUMAN HIT: BE906852.1, EVALUE 0.00e+00
tgtcgtttggggtgtctgcccctggcaagtccatcgaggcctcagcggatgtgtctgcgttgaaggtggaggccgacgtgagcctcccctccatgcagggggacctcaagaccactgacctcagcgttcagcccccttccgctgacctggaggtccaggctggccaagtggatgtgaaactcccagagggccccgtgccggagggagccggcctcaaagggcacctgcccaagctgcagatgcccagtttcaagatgcccaaagtagatctcaagggcccccagatagatgtcaagggccccaagctggacctgaaaggccccaagacggacgtgatggcccccgacgtggaggtgtctcagcccagcgtggaggtggatgtcgaggccccgggagctaagctggatggtgcgtggctggagggggacctgtctgtggcggacaaggatgtgactaccaaagacagcaggttcaaaattcccaagttcaagatgccgtcgttcggggtgtctgccccaggcaagtccatcgcggcctcggtggatgtgtctgcgccgaaggtggaggccgacgggagcctcccctccatgcagggggacctcaaggccactgacctcagcattcagcccccttccgctgacctggaggtccaggctggccaagtggacg

SEQ ID NO: 24793 - DNA, 490 bp, Homo sapiens
  MAP TO AC003663.1; EXPRESSED IN HEART, SIGNAL = 1.3; EXPRESSED IN LUNG, SIGNAL = 1.4; EXPRESSED IN HELA, SIGNAL = 1.1; EST_HUMAN HIT: BG832096.1, EVALUE 0.00e+00; SWISSPROT HIT: P05680, EVALUE 1.70e-01; NT HIT: gi16164407, EVALUE 0.00e+00
ccagggtctcatgaagctgggcaccgtggagcggcagggggcaatgggcatctggaaggagctcttctgcgagctctccccactggagttccgcctctacctgagcaacgaggagcacacctgtgtggagaactgctccctgcttcgctgtgagtctgtggggccagcccacagtgacgggcgctttgagctggtcttctctggcaagaagctggccctgcgcgcctcctcccaggacgaagctgaggactggctggaccgggtgcgggaggccctgcagaaggtccggcctcagcaggaggatgagtgggtgaacgtgcagtactcagaccagcctgaggaaccccccgaggcgccccagggctgcctctctccctcagacctgctctcggagcccgcggccctccagggcacacagtctgactggtcgtccgcccaggttccagagctagatgccatcaaggagtccctgctgtacttgtacatggac

SEQ ID NO: 24794 - DNA, 684 bp, Homo sapiens
  MAP TO AP000030.1; EXPRESSED IN HELA, SIGNAL = 0.57; EXPRESSED IN HEART, SIGNAL = 3.2; EST_HUMAN HIT: BI226939.1, EVALUE 1.00e-101; SWISSPROT HIT: P33479, EVALUE 1.40e+00; NT HIT: gi4507500, EVALUE 1.00e-20
aggctccgggcatcctcgccgccgtctcccggggcggctccggccggacgcccgcgcaccccaggcccgcggtactcacccgcgacggtcgtccgggatctccgcgacggggccgggcacgatgcggggcagccgtgcccctggggctgcgggcgccaaggcgtccgcggagctgcagagctgcgcgcccgacggcggcggcgctgctctgccggccgcgctcgaacccgctcgtggtctgccaatcggagctgtcagggcccctccgcctgcggcctcgggggccgggccgcgggagcccgtgggaaaccgagctccgattgggccgcctgacaatcgctccgcctccggccagccaatccgaggcggtggatgcaggagcggggcgttcggagttgggctgtagagcgactatgggcgcacgccgggtatccgcgccgcagccaggctcggagcgcgcggctggaggggcgcgggcggcgcgcgctccagagatgccttcctgcgaggctccgtcagcgcggcccggggagatcgcccgcaggcagcggaggcgcggcgggccgggggacgaccagggagcccctaacaaagcagctttgggagggccggaggcctctgcctccctcggcgataggtccgcgaagctgcctgtcatctcgcataggtggaggtggccaatgg

SEQ ID NO: 24795 - DNA, 1108 bp, Homo sapiens
  MAP TO AC008655.3; EXPRESSED IN HELA, SIGNAL = 0.98; EXPRESSED IN HEART, SIGNAL = 1.3; EST_HUMAN HIT: BE797712.1, EVALUE 7.00e-83; NT HIT: gi14786945, EVALUE 0.00e+00; SWISSPROT HIT: Q14003, EVALUE 0.00e+00
tatgtggccttcgcctccctcttcttcatcctcatctccatcaccaccttctgcctggaaacccatgagggcttcatccatattagcaacaagacggtgacccaggcctccccgatccccggggcacctccggagaacatcaccaacgtggaggtggagacggagcccttcctgacctacgtggagggggtgtgcgtggtctggttcaccttcgagttcctcatgcgcatcaccttctgcccagacaaggtggagtttcttaaaagcagcctcaacatcatcgactgtgtggccatcctgcccttctatctcgaggtgggcctctcgggcctcagctccaaggccgccaaagacgtgctgggcttcctgcgggtggtccgcttcgtccgcatcctgcgcatcttcaagctgacccggcacttcgtggggctgcgcgtgctgggacacacgctccgcgccagcaccaacgagttcctgctgctcatcatcttcctggccctgggggtgctcatcttcgccaccatgatttactacgctgagcgcattggcgccgaccccgatgacatcctgggctccaaccacacctacttcaagaacatccccattggcttctggtgggctgtggtcaccatgacgaccctgggctatggagacatgtaccccaagacgtggtcggggatgctggtcggggcgctgtgtgccctggcgggggtgctgaccatcgccatgcctgtgcccgtcattgtcaacaactttggcatgtactattcgctggccatggccaagcagaagctgcccaagaagaagaacaaacacatcccccggcccccgcaaccgggctcgcccaactactgcaagcctgacccacccccgccacccccgccccacccgcaccacggcagcgggggcatcagcccgccgccacccatcaccccaccctccatgggggtgactgtggccggggcctacccagcggggccccacacgcaccccgggctgctcagggggggagcgggtgggctggggatcatggggctgcctcctctgccagcccccggcgagccttgcccgttggctcaggaggaggtgattgagatcaaccgggcag

SEQ ID NO: 24796 - DNA, 1233 bp, Homo sapiens
  MAP TO AC005849.1; EXPRESSED IN HELA, SIGNAL = 0.75; EXPRESSED IN HEART, SIGNAL = 1.4; NT HIT: gi14766264, EVALUE 0.00e+00; EST_HUMAN HIT: BF569922.1, EVALUE 0.00e+00; SWISSPROT HIT: P55641, EVALUE 3.00e-13
ctgcacctcgtggagtcagaccccaaccactttgcatcccagttggtacagaccttcatccactttgacatgacagagcaccggagggatgaggagaacgcacggctgctggcagagttggtgcgggctcgcggcctcaagctagatggctgcttctcctactgggatgactgcctggtgctcacagccctgctctgccaggagctaggtctgccctgcagctccccagctgccatgcgcctggctaagcagaagagcctcacccagctgcacctgttgcaccaccatggcccaccctggcctgcgccctccctccatgctgtgccctgctgcccactggagagtgaggctgatgtggagagggccgtgcaccaggtacccctgccaggtgtcatgaagctggagttcggggcaggtgcagtgggtgtccggctggtagaggatgcgccacagtgccatgagcacttttcccggattacccgagacttgcagggcgaggccgaccacccaggcattgggctgggctggggcaatgccatgctgctgatggagtttgtggagggcaccgagcacgacgtggacctggtgttgtttggtgggcggttgctggctgcctttgtctccgacaatggccctacgaggctgcctggcttcactgagacggcggcctgcatgcccaccgggctggcaccagagcaggaggcacagatggttcaggcagccttccgctgttgcctgggctgcgggttgctcgatggagtcttcaacgtggagctcaagctgaccggggctgggcctcggcttatcgagatcaacccccgcatgggtggcttctacctgcgtgattggatcctggagctctatggtgttgacctgctgctggctgctgttatggtggcctgtggcttgcgtcctgccctgcccacccgcccacgtgctcgtggccatctggtgggcgtcatgtgccttgtgtcccagcacctgcaggccctgagttccaccgccagccgtgagaccctgcaggccctgcacgaccgtggactgctacgcctcaatctgctggaggaggccctggtgcctggcgagtatgaggagccctactgcagtgtggcctgtgccggacccagccccaccgaggcccgtctccgcctgctgggcctctgccagggcctgggcatcgatgggcccagctaccctgttgcccacttcctgtctcacttcaaatagcactgg

SEQ ID NO: 24797 - DNA, 587 bp, Homo sapiens
  MAP TO AC010731.1; EXPRESSED IN HELA, SIGNAL = 0.99; EXPRESSED IN HEART, SIGNAL = 1.3; NT HIT: gi14735680, EVALUE 0.00e+00; EST_HUMAN HIT: AV728088.1, EVALUE 0.00e+00; SWISSPROT HIT: P23615, EVALUE 6.60e-01
caaagtctgcaccaaaatagtgttctgagggattccaagcttcactatggcgtgaagactgaacagtaggtacttatactgcatgatcttggcttctctcatcatatgttcacagagctgattaaatgcagggtggctaaacatcagtcgtttttcaaagcgcttctggtcatcagacagtcttttggcaattgtccacattgctgtgaaatagttgctactaggaaatgtgggcgcttttgaaaatgcatctaacacatcactcagggaattacattcctcagacagttttctactgctgatacggtttggttttgtttccttggtaagaacatcttcattggagacttcatgattaaggtttactttcttcaattcatcatcagatttatcaacagggacaagagactgctttgagtcaaaaaacagtcttttagcataaagtagtctttcaattctaagggctgttagagtgcttatgccctttgtttgaaagccaacatctgatttaaaaatgaatgcatcctgaaagagatatctaatgatatcagttgattgcattctgttatgaaagttatttaaaatgt

SEQ ID NO: 24798 - DNA, 685 bp, Homo sapiens
  MAP TO AC013625.3; EXPRESSED IN HELA, SIGNAL = 2.3; EXPRESSED IN HEART, SIGNAL = 1.2; NT HIT: M84454.1, EVALUE 0.00e+00; EST_HUMAN HIT: AL547253.1, EVALUE 0.00e+00; SWISSPROT HIT: P15121, EVALUE 1.00e-106
atgaggctcatcagcaaggggtggtgcacataccataagaaggtcctggtgaaaggagcctgccagaagacgctcagcaacctgaagctggactacctggacctccaccttattcactggctgaccgactttaagcctggaaaggaatttttcccattggatgagtcagacaacgtggatcccagtgacaccaacattgtgaacacatgggcagccatggaagagctggtggatgaagggctggtgaaagctattggcatctccaactgtaatcatctccaggtggagaggatcttaaagaaacctggcttaaggtataagccggcagttaaccagattgagttccacctgtacctcactcagaagttaatccagtactgccagtccaaaggcatcttggtgaccacctatagcccccttggctctcctgttaaaccctgggccaagcctgaggccccttctatcctggaggatcccaggatcaaggtgatcacagccaagcacaataaaaccacagcccagattctgatccacttcccccaggcagaggaacttggaggtgatccccaagtctgtgacaccagaatgcattgctgagaactttaaggtctttgactttgaactaagcagccaggatatgaccaccttactcagctacaacaggaactggagggtctgtgccttg

SEQ ID NO: 24799 - DNA, 648 bp, Homo sapiens
  MAP TO AL139228.1; EXPRESSED IN HEART, SIGNAL = 1.2; EXPRESSED IN HELA, SIGNAL = 0.62; SWISSPROT HIT: Q9NP90, EVALUE 1.00e-117; NT HIT: gi11421991, EVALUE 0.00e+00; EST_HUMAN HIT: AI634847.1, EVALUE 0.00e+00
ttaacagcacgaagaccctgctttggagccactgttcaagtcaatggtgtgacccaacatgcaatgctccagctgttcctctacagccagcacctgcctgacagcttcttcaaaggccactgtcacattagtatcatctttggcactagtttctaaataagggtaatccccattctccatgcaccaggtttgtgcctcctcagtagtcacttgcctatcctctttgtctaccttgttacccagaactacaaaggggaaatgctcagggtccttcacatccgcatagtaaataaattctttctgccagttaccaagattctcgaagctctgccgatcatccacgctgaaggtcaagaggcagcagtctgctcccctgtagaagggtgtcctaaggctcttgaaacgttcctgccctgcagtgtcccagatctggagggttacaaagcgtccatctacctccagatctcgatttaagaactctacccctatggtgtgaaaagcctgggagtcaaatttgttggttacgtaacggttcataagcgaacttttcccaactccaccatcacccaagagaatgacctttaagagcagggatttcccactcatttttgcagcaccagaagggaaggagtttgtaaccaagagaac

SEQ ID NO: 24800 - DNA, 673 bp, Homo sapiens
  MAP TO Z92544.1; EXPRESSED IN HELA, SIGNAL = 0.79; EXPRESSED IN HEART, SIGNAL = 1.2; SWISSPROT HIT: O14186, EVALUE 3.00e-10; NT HIT: gi16165043, EVALUE 0.00e+00; EST_HUMAN HIT: BI919052.1, EVALUE 0.00e+00
gggctggttggccactggagggcgcgacaagatggtgaaggtctgggacatgaccacgcaccgtgccaaggagatgcactgtgtgcagaccatcgcctcggtggcccgtgtgaagtggcggccagagtgccgccaccacctggccacgtgctccatgatggtggaccacaacatctatgtttgggacgtgcgccggcccttcgtgccagctgccatgtttgaggaacaccgagacgtcaccacgggaattgcctggcgccacccccacgacccctccttcctgctgtctggctccaaggacagctcgctgtgccagcacctgttccgcgacgccagccagcccgtcgagcgcgccaaccctgagggcctctgctacggcctcttcggggacctggccttcgccgccaaggagagcctcgtggctgccgagtcggggcgcaagccctacactggcgaccggcgccaccccatcttctttaagcgcaagctggaccctgccgagcccttcgcaggcctcgcctccagtgccctcagtgtctttgagacggagccaggtggcggcggcatgcgctggtttgtggacacagctgagcgttatgcgctggctggccggccactggccgagctctgtgaccacaacgcaaaggtggctcgagagcttggccgcaaccag

SEQ ID NO: 24801 - DNA, 846 bp, Homo sapiens
  MAP TO AL031715.2; EXPRESSED IN HEART, SIGNAL = 1.8; EST_HUMAN HIT: BI964022.1, EVALUE 0.00e+00; SWISSPROT HIT: O95180, EVALUE 0.00e+00; NT HIT: gi14776519, EVALUE 0.00e+00
gaggctgtgcacaccgattccttggaagggaagattgacagccctagggacaccctggatcctgcagagcctggtgagaaaaccccggtgaggccggtgacccaggggggctccctgcagtccccaccacactccccacggcccgccagcgtccgcactcgtaagcataccttcggacagcgctgcgtctccagccggccggcggccccaggcggaaaggatgccgatgcctcggacccatccgacgaggaggtcagccacatcaccagctccgcctgcccctggcagcccacagccgagccccatggccccgaagcctctccggtggccggcggcgagcgggacctgcgcaggctctacagcgtggacgctcagggcttcctggacaagccgggccgggcagacgagcagtggcggccctcggcggagctgggcagcggggagcctggggaggcgaaggcctggggccctgaggccgagcccgctctgggtgcgcgcagaaagaagaagatgagccccccctgcatctcggtggaaccccctgcggaggacgagggctctgcgcggccctccgcggcagagggcggcagcaccacactgaggcgcaggaccccgtcctgtgaggccacgcctcacagggactccctggagcccacagagggctcaggcgccgggggggaccctgcagccaagggggagcgctggggccaggcctcctgccgggctgagcacctgaccgtccccagctttgcctttgagccgctggacctcggggtccccagtggagaccctttcttggacggtagccacagtgtgaccccagaatccagagcttcctcttcaggg

SEQ ID NO: 24802 - DNA, 570 bp, Homo sapiens
  MAP TO AL035681.13; EXPRESSED IN HEART, SIGNAL =  22; SWISSPROT HIT: P39188, EVALUE 5.00e-03; EST_HUMAN HIT: BE156182.1, EVALUE 1.00e-129; NT HIT: AB026898.1, EVALUE 1.00e-111
taagggcagtgcaagatgtgctttgttaaacagatgcttgaaggcagcatgctccttaagagtcatcaccactccctaatctcaagtacccagggacacaaacactgcggaaggccgcagggtcctctgcctaggaaaaccagagacctttgttcacttgtttatctgctgaccttccctccactattgtcctgtgaccctgccaaatccccctctgcgagaaacacccaagaatgatcaattaaaaaaaaaaaaaaaagaaagaaaaatctacttctggagaaacaaattaccttcccatctcttttgtcaggaaactcttggatgatgtactgaccaaaacagggaataacctaacagagaggaagacagggattttaggaaaccggagatcacacaggaaggaggtaaagggaaatcccaggatgatggcaaagggaagtccccaaacaacagctgtgcaacaagaataaagaacaatcagaggacctcttgagcccagaggtcaaggctgcggtgagccaaggtcgtgccactacactgaagcctgggcaacagagtgagaccctg

SEQ ID NO: 24803 - DNA, 567 bp, Homo sapiens; identical to SEQ ID NO: 22257
  MAP TO AP000346.1; EXPRESSED IN HELA, SIGNAL = 0.29; NT HIT: Y18890.1, EVALUE 4.00e-50; EST_HUMAN HIT: M77994.1, EVALUE 4.00e-91; SWISSPROT HIT: P10264, EVALUE 9.00e-63; EST_HUMAN HIT: BG433460.1, EVALUE 0.00e+00

SEQ ID NO: 24804 - DNA, 544 bp, Homo sapiens
  MAP TO AL079300.11; EXPRESSED IN HELA, SIGNAL = 0.48; NT HIT: AJ310932.1, EVALUE 0.00e+00; NT HIT: X17116.1, EVALUE 8.70e-02; EST_HUMAN HIT: BF349349.1, EVALUE 5.10e-01; SWISSPROT HIT: O69739, EVALUE 3.00e+00; EST_HUMAN HIT: BG613467.1, EVALUE 7.60e-01
agttccatctgagccacaccgacctggtcctgtgaggacagctagaaaaaaaaaaaaaagactcttactggtccccggatgaagtcagacaggatgtgtttgaagtgtccagtgctgggacaggaatggggatgatcatccagcctcactcagcagaacttgggatccttatcccaaagcctacaaaacggcatctgaattcagattaaattcttcagtctctatacagaaagaagtggatgcaaggaactttataccttgagaggtggtgcagacaggaagtagaaaaagcacttgcagagatgtaggtggatttctgcatgggaaagccaggaagaagcacttggccgtgcttcttgccctctcttccttgtctctcctcactcgacccctactgctcctctccagccccctaggagtctacactacgtggcttgtattcctgttttaagctcaccagctgaggtttcaaaggcaccagaccatttcagaaaggtaggactcagctcactccaatctcaagacattagaccccatgacagcc

SEQ ID NO: 24805 - DNA, 588 bp, Homo sapiens
  MAP TO AC006427.13; EXPRESSED IN HELA, SIGNAL = 0.38; NT HIT: AL163303.2, EVALUE 6.00e-44; EST_HUMAN HIT: AL046596.1, EVALUE 2.00e-29; NT HIT: U60822.1, EVALUE 2.00e-52; EST_HUMAN HIT: AW470791.1, EVALUE 1.00e-57; SWISSPROT HIT: P43681, EVALUE 6.80e-02
ggggtctgaaggatagtgaccctcttctcacagttccactaggcaaccccagatttcccctctgcactgccctagtagaggttcttcatgagggctcttcccctgcagcagacttctgccaggacatccaggcttttccatgcatcctctgaaatctaggtggaggttcccaaccttcacttcttgccttttgggcacctgaaggccccacagcatgtggaagtcaacaaggcttggggcttgcaccatctgaaccaatggcctgagctgtaccttggccctttttagccatggctggggctggaatggctggaacacaggatgtcatatccagaggctccacaaagcagcaggtccctgggcttggcccatgaaaccatttttcttctcctaggcttccaggcctgtgatggcaggggctgccagaaaggtctctgaaatgccctggagacattttccccattgtcttggttattaacatttggctactctttacttatgcaaatgtctgcagcaggttgaatttctccccagaaaatgagtttttcttttataccacatggctgggccgcaaattttccaaacttt

SEQ ID NO: 24806 - DNA, 576 bp, Homo sapiens
  MAP TO AC007841.1; EXPRESSED IN HELA, SIGNAL = 2.2; NT HIT: Z46940.2, EVALUE 7.00e-19; EST_HUMAN HIT: AA878730.1, EVALUE 6.00e-11; NT HIT: AF176815.1, EVALUE 2.00e-21; EST_HUMAN HIT: AI679327.1, EVALUE 7.00e-19; SWISSPROT HIT: P39188, EVALUE 1.00e-03
ccacccctccatggtatatggatacagttagagcagtctgaaagacttggaacattttcctatggcaaacgttcttttcctcccctacctggacattccccttccatcctcgctcttttgtgatcaacattccatacagcagccatgaagatctttaaaaaaacaaaaacaaaatcctatttctgcattgcctagaacttctgagggtttcttatcacaattagaatcacatcccaactccttactgtggtctatgaagctccaagtaatctggcccctgccacatcactgactttcctttgcctaacctggtggccacactggcttctccccagttcttcagacccagcagctccatcctgcctcaagacctttgtgcttgctgttccacctgccaggatgtactgaaccgagagcctgcactgctcatttctttctgtcatttagatctcactcagtgccgcctctgtgaggccttctctgaccacctgatttattgatttattgacccaagtttatttttgtagagatgaggtctcactatgttgcccaggctggtctcaaactcatgggctc

SEQ ID NO: 24807 - DNA, 571 bp, Homo sapiens
  MAP TO AC007363.3; EXPRESSED IN HELA, SIGNAL = 0.23; NT HIT: X70287.1, EVALUE 4.00e-07; EST_HUMAN HIT: BE612449.1, EVALUE 5.00e-29; EST_HUMAN HIT: AI750637.1, EVALUE 7.00e-29
tgcctggtctttgtatgtgcattttgagttttcctagtgcaggggaactacatatcctttaccctaaagtcagggctcctatctcaaatactttttggaatgtggtaggggataagacttatcactaattaatctgagtggaaattaattgacatagagataaaaaccaaaccaaaacaaaaattacctaaaacaagtataataaccctccatgtgggagaaacaagcattatgccagcaaggaattgtgattttacttactgaacttgggccttttaatcttctttgccgtttctttgtttgaatgtactccagtcaccagcaaaactacatgaagaaaatttttaaaaatttaatcaattttattttacttaaattctttctcttttgactcatacttgcttcgatcatccacaaagtattctccatggcagaactaattttccctcttacagtcatgcatcacttaatgatggggctactctctgaaaaatgtgtcaacaggtgatttcatcattgtgccgatattgtagagtgtacttacacaaacctagatggtctactacaaacc

SEQ ID NO: 24808 - DNA, 853 bp, Homo sapiens
  MAP TO AL079300.11; EXPRESSED IN HELA, SIGNAL =   1; NT HIT: gi11422560, EVALUE 5.50e-01; EST_HUMAN HIT: BE246780.1, EVALUE 0.00e+00; SWISSPROT HIT: P42329, EVALUE 3.60e+00; NT HIT: gi16167728, EVALUE 0.00e+00; EST_HUMAN HIT: BG615805.1, EVALUE 0.00e+00
ttaccagacgactggggcctccacactaaggaggggcagggctggcagtgacgagggaaacctctcgctgagggttggggcaaagtcacccctggaaatcgaaggggccgctggtggtctcttgaggtccaccagcctcaaatgcatctcttcagacggtgttgggggcacaaccctactccccgaaaagtcgaaaacccaattcagttcctgcgagtccctcttagaatccagaccgagcatggggagaaaactgagctctccgaccacacccagggacatgctgttgtcgcccacactgcgtcctcggaggcggtgtctggagtcctctgtggacgatgcgggctgtccagaccttggaaaggagccgcttgttttccagaaccgccagtttgcccacctgatggaggaacctctaggcagtgacccattcagctggaaactcccaagcctcgactacgaacgcaagaccaaagtggacttcgatgacttcctcccagctatccggaagccccagacacctacctccttggctggatcagccaaaggtgggcaagacggttcacagcgttcaagcatccactttgaaacggaagaggctaaccgttcctttctctcggggatcaagaccattttgaagaagagcccggagcccaaggaggatcccgctcacctgtctgactcgtcctcatcctccggctccatcgtgtccttcaaaagtgctgacagcatcaaaagtcgaccaggaatcccacgacttgcgggtgacggtggcgagcgaacgtcccccgagcggagagagccagggacggggaggaaagacgacgatgttgcgagcataatgaagaaatac

SEQ ID NO: 24809 - DNA, 578 bp, Homo sapiens
  MAP TO AC007841.1; EXPRESSED IN HELA, SIGNAL = 0.41; NT HIT: J04982.1, EVALUE 3.70e-01; EST_HUMAN HIT: AA741158.1, EVALUE 5.50e-01; SWISSPROT HIT: Q50412, EVALUE 6.50e+00
gcaaaagacccaatttatcacagcaaataagaacattaatgttacattaaccataagagaagactggccaaaatcaagataaaatatgaacggggagccacactcccagaaatcacaaaaagccacctactacactgacaacaaagagtcaaatgcagcagacctggaagccaaacacacaaaacagagcacacaggcaactgtggtgagagcacacaggcaggcagcgggaccacagccacccctccatggtatatggatacagttagagcagtctgaaagacttggaacattttcctatggcaaacgttcttttcctcccctacctggacattccccttccatcctcgctcttttgtgatcaacattccatacagcagccatgaagatctttaaaaaaacaaaaacaaaatcctatttctgcattgcctagaacttctgagggtttcttatcacaattagaatcacatcccaactccttactgtggtctatgaagctccaagtaatctggcccctgccacatcactgactttcctttgcctaacctggtggccacactggcttctccccagttctt

SEQ ID NO: 24810 - DNA, 588 bp, Homo sapiens
  MAP TO AC007281.3; EXPRESSED IN HELA, SIGNAL = 1.1; EST_HUMAN HIT: BF514496.1, EVALUE 2.20e+00; NT HIT: AF198036.1, EVALUE 9.40e-02
tggaatcaataataccaaaaatatccatcaatagttttcatccatagtaaaatgaggttggtgtcttcctagttgagcttatcatgataatactctaaattattgtcatgactgactcatgcctttgcaattttagcagctgtggttttgtggacataatattagccagtgaatatagcaggaatttctgaagtcaataacattacctgtgctgtctttgatctatacagtcagtagtgcctcagaagcatgttctagcaaggaaacaatctgaatctctttgctcttaaggtagtgcctccattcccatggtcaagaatctgtttcagttaaaaccgtatgcccactccaaggtagtgttaaatttatggcaatgaatgctataacttgctagttatttccagcttttaatccagtgcctaatataccataaatggttgtaaatatatgattacaaaatagatgtaatatccctctatgtaaaacagcttttgtattctcgggaaggagaagtaacacattcatgaaaactagttatatgtgaggtaagctaagtacacttaatacaccatcagtccatctcaccaa

SEQ ID NO: 24811 - DNA, 583 bp, Homo sapiens
  MAP TO Z86090.10; EXPRESSED IN HELA, SIGNAL = 0.83; NT HIT: X82087.1, EVALUE 3.70e-01; NT HIT: AF368061.1, EVALUE 1.00e-26; SWISSPROT HIT: O24723, EVALUE 3.80e+00; EST_HUMAN HIT: AW408742.1, EVALUE 1.00e-26
aggggtatgtgtgggtgggtacatgtgtaaattcatggttctgttctaggaccaccaaaattttacattggttatgttgtttcttagcattctctacattctaatgagatactagatgtagtccacaacattaaaccacaggacagaccatcaggaggcacgatgagtgagactgaaaaagataatgtttccccaaacaatagtcaaatctgatctattctaggtcagtacaattgaagatactaacgaccacattaggaaaggagggagggaagagtaaataaatctgggacctaccttgcttacaattcccacagacagatgaaattcaattccatgccaaccataccctccgatcactacaacacaaacagaaaaataaaagttcatgcaatataaacagttcttcccattcctaaaaggcgtttggtttcaaaggtaagaagctgtttcttatctcctttcaatcctctccatgcacacaacagtgttaagagttctgtcactggttaaaaaaaaaaaaaaaaaaaaggcccatgtaagtggagttaaataataggtaacactgattgggcacttccta

SEQ ID NO: 24812 - DNA, 607 bp, Homo sapiens
  MAP TO AC004032.7; EXPRESSED IN HELA, SIGNAL = 0.43; NT HIT: AJ412023.1, EVALUE 6.00e-07; EST_HUMAN HIT: AL045046.1, EVALUE 9.00e-07; EST_HUMAN HIT: AW089770.1, EVALUE 6.00e-07; NT HIT: gi11437071, EVALUE 4.00e-07; SWISSPROT HIT: P51461, EVALUE 5.30e+00
ttctcactcctgcagagcaagggggaattgaatccatttgctcaggatgacttcatactgggttctacctgggatacagcagacttgggaaaattgggggcagccctggggtccctgaagggcctccagtggaatttagctccataggcatccggaagcatgtattaagtcccttccttgtgctacttctttctccagtggtggttagtacgtgggagtgctaagagcagtgcctggcacacagtaagcactcaatactcaataagtgtttgctaacatgagcttttccaccttcacagtgactccatgcattcattcatccacctaacatttttgcccatccctgcccttcactaggtcctggaaacgcagcaatgaacaagaaagacagagtggggagtgataaaagacatcaaccttgccctcacagagctcctgctctggaggaagaccaacattacctaggaatggctctaacaggagaaaaactgcacgtggtgtgtgctgctttagaagaaggtgctggagctctagggagagcacctgggggcttgacctggcctgcgtaggggaagggtcagaaagacactctttgtcttgcccttcc

SEQ ID NO: 24813 - DNA, 572 bp, Homo sapiens
  MAP TO AB016897.1; EXPRESSED IN HELA, SIGNAL = 1.1; SWISSPROT HIT: P04016, EVALUE 1.70e+00; NT HIT: gi14761927, EVALUE 3.00e-89; NT HIT: AB012722.2, EVALUE 2.00e-89; EST_HUMAN HIT: BG389875.1, EVALUE 9.00e-10; EST_HUMAN HIT: BE892266.1, EVALUE 6.00e-10
cttctctttatgggggtcggcaaacctttttgggaaagggccagggagttaatattttcgtcgttgaaggccacgtggtctccaactcaatcatccagctttgcccttgaggaagaagcagccatacacagtctgtaaacaaaggacggggctgtgttccaggcaaactttgttgtttacaaaaacaggcggcaggctggggttggtggggcttgtgtttaattaacgcagcacacaaagtcttatgacgtcgttttactcttttctctcaggaaacaattctggtgaaatgtgatcgtcctggccaccctctgattgataagacatatcattttgaaaggtaagtgcttttcaagatgtcctataaagcaaacttccatattaaaaatacaaattttgcattggggtttgagtaatgaaatatgtaatttatcctatcatttgactaattgtgattataaatacagacggtccctgaggtagatttttcaactttaggaaggtgtgaaagagatacacattcagtagacactatgtctcgagtgcccattacaacccttctggtttttgct

SEQ ID NO: 24814 - DNA, 536 bp, Homo sapiens
  MAP TO AC005300.10; EXPRESSED IN HELA, SIGNAL = 0.27; NT HIT: AL163300.2, EVALUE 3.40e-01; SWISSPROT HIT: Q05860, EVALUE 4.00e-04; EST_HUMAN HIT: BF056033.1, EVALUE 3.20e-02; NT HIT: gi6681050, EVALUE 2.00e+00
ccaagggaatggtggctccacacagagtcaagagctgcctgggggcgggggttcaaggagccgaggttgagagctgcagtgggagccaggagctgtcccctcactaagggagaaatgcccttcctcctcccgggagtcggctcttgcctctgtggcatctcaggaaatgggcccttgggagtccacctcctctgctcatttcccaccagccccttgcctcactcctgtctccccagcctaggggcctcccacacccctccaggctgcggccattgtgtgtcctttgtctctgggcagtccctcagatccccgcattcccccaggcctgcagaacagtactgctgctctctcatctccagggtgctgccccgctgcctgggcaggcgcagtgggggagcaggcagtgaggctctccactggtctttgctcttctgtttcctctgctgcccccatgaagcctggcacgtcacacagccccccacaacctgcacctggccaggccactcactctgctcgggcagtttccctgactgcct

SEQ ID NO: 24815 - DNA, 591 bp, Homo sapiens
  MAP TO AC004624.6; EXPRESSED IN HELA, SIGNAL = 0.53; SWISSPROT HIT: P19236, EVALUE 1.70e+00; EST_HUMAN HIT: W27600.1, EVALUE 1.00e-27; NT HIT: gi9628932, EVALUE 1.50e+00; EST_HUMAN HIT: AW157571.1, EVALUE 8.00e-28
ccagtgtggaccagtcaccctggaggcatgtttctgttaattagacggacagaatggagtcattgtgcttttgggaatgtgaacgaagtggagaagggatgccccacaaaccagccgtttctctttttggggtttaaaagtggacagggacaatgagggcacatcacggctgtcattttttatgacctttccatggtcagtttcatagaaagtgacctttctcactaaaagtttgttacttgaccatctgtttgcttccatgaatgtgaccatatttagtacttttccttaggattccaagtgggttgaagagaagcagctgctcatcagaacaaaccaagacttgctggaaaaggtgcgtgaccccacctcagggaagcacacagccgcagggcagttgggaccccgcgggcctgctcagactacacgggtcgtgcccagcgccatttgggcactccagtgaccagggcctcgggtcctgcacacctcccatgaggagagatgtcttcctcacatggaatcaaagccacatctgtggttctatcctctgggaccaggtctgcagagctggtttaggtcatcctccttggg

SEQ ID NO: 24816 - DNA, 576 bp, Homo sapiens
  MAP TO AC004624.6; EXPRESSED IN HELA, SIGNAL = 0.46; NT HIT: AF051654.1, EVALUE 1.40e+00; EST_HUMAN HIT: AV742623.1, EVALUE 5.40e-01; SWISSPROT HIT: Q04047, EVALUE 5.00e-02
gatggtcagcccaggaggaaattccccaagttcctttctgatgatgttcctgttgttattctaggctgggtggggtggaggcatctccagaagaagccacctgctcacaggatgcctctcccaaacttctgcgcgggaagacgtttggaattagaatggatgaagtgaaatagaagactgaatgtgacgaggaggctggctgtgtctgcatgggaagagccggctgaaggccaggccgggccatcctcagctggctgcaggtggacgggctcaggccctgctcatcaggtagaaggaacggttctgtggtctctggtgaggaggacctttggacaaaagggaaaggactgaaatgtaggcagttgagggaactcatggggtgagggcaacagaggagctagaagttctcagaaggccagatccatggatggagaaggacacggtgccctgcacagaaggggccctgccagccagggagggctgctcacaccacatcccaggatccatctctaagcagacatgcaccgggatggcccagtattacccattctcttttgaaatcaaaaccccaaagca

SEQ ID NO: 24817 - DNA, 574 bp, Homo sapiens
  MAP TO AC008022.1; EXPRESSED IN HELA, SIGNAL = 0.71; EST_HUMAN HIT: BE699410.1, EVALUE 6.00e-10; NT HIT: AL161574.2, EVALUE 3.60e-01
  unsure 386
  unsure 408
  unsure 412
tttttgttttactttctgatatggcaaataatatagatattaccccataaacaaaggctctttggggtctgcagtaatttttaagaatgtaaggaggtcctgagaccagagagtttcagaaccgctgctctggtgctttgcagttagcagggtactttcccacaccttatttcattggttcctctcgtccctgtctctttccttgtctctttcagcctccccccaccctccacccctcacaccaacacatgcaacacatgcacactgaaagacacacctgtagtttttagcttggtcttctgtcatatcttggtttccaagttttgcttcatatggttttatcatctggaggaaatggggaagattgcatgaaaacatctagcaantgatccaacgatcttttctaantggntcagcattcatttttaacttgtcgtgaccttaaagctatctgtgtagaactgttttatagaaaaatatctggaactggaaattcccaggaaaatcataaaaaagaaactagttatgaaagactggagaccttacttctaaaccactctcactgaaccagcca

SEQ ID NO: 24818 - DNA, 555 bp, Homo sapiens
  MAP TO Z82188.2; EXPRESSED IN HELA, SIGNAL = 0.49; NT HIT: AF129756.1, EVALUE 9.00e-05; NT HIT: M13792.1, EVALUE 1.00e-04; EST_HUMAN HIT: BF766021.1, EVALUE 2.00e-07; EST_HUMAN HIT: AI685151.1, EVALUE 1.00e-04; SWISSPROT HIT: P03211, EVALUE 4.80e-02
tatatcctgccaccatgacccatttcaagctagcatcgtgatgtctctgaacctgcgatcgggaagacatgcatgcagtcggctctggtgcaagctggctccagccaccattggctgtggggctgagggcacaagcctcctcatagactcctgtaaggagccctgccctgtcttgagaaccaccgaaagagctagagagtgtttcccatcctccagccatcctctgagaagtcatagctcaggtcctggatgagcctcccctctttcccaggaaccatcccttccttctggtgtggcccactggacaagatcgaatatcccaggtcctgcaaaacctggctccttccggcctctgggtctttctttcagttcctgggaggggctgagcagcctcctacctcctggccttgacccatattggcccctccaccagctgtgctatgtctctcatctttgggtctcagctgaaccacctcttcctcagagaggccttccctgaccacttctccctcccaaatttgcttctcccttgccagcacttaccccacgctgaag

SEQ ID NO: 24819 - DNA, 569 bp, Homo sapiens
  MAP TO AB016897.1; EXPRESSED IN HELA, SIGNAL = 0.63; NT HIT: U11077.1, EVALUE 2.30e-02; EST_HUMAN HIT: AV726323.1, EVALUE 1.40e-01; SWISSPROT HIT: P79779, EVALUE 3.70e+00; EST_HUMAN HIT: BI490631.1, EVALUE 1.30e-02
tttggttggcaatattggagactaaactgcttcttataatttatctttctaaataatggaagttgactcctttaaaacttttaaaccattttagatggcctgtaatatatgaaacctttttttacattcttcaacaaatagcaatataatgtgtgtgtgcgattcagtgtgagtgttaagaaagtaaattttggagcaattatatcattgggtccattgaattctagaaggatttttgaacccacattaaatgttctcaggctttaattactttaactttcatatttcttcttatagtttttcttcttctcctcctccttcttcctcttcttcttcacacttcctgctgtattttccgacaaatcttaggataagaaatgggttggctaagtaattagaaaaagttaaaaaaaaatacctttcagaacagagaaaacaataaagaggtgagagaaaatatcaaaagagcgatgacttgttgctgatgttatagaccctccaggctcagagtttttctgaccccaaacgcttgtccttgtccctgtcctgccctttccctctcctctgac

SEQ ID NO: 24820 - DNA, 551 bp, Homo sapiens
  MAP TO AC006548.19; EXPRESSED IN HELA, SIGNAL = 0.53; NT HIT: AB037417.1, EVALUE 1.40e+00; EST_HUMAN HIT: AV718735.1, EVALUE 3.30e-02; SWISSPROT HIT: P81297, EVALUE 6.20e+00
tccttaacccccattattgcaatggtgttaaacattgaaaggtctataatattatttttattcaattatcttttccaatcttggaaaaaaggttattttggtagatttctcagaagatattgaaaccaagctttcttctggaatcttacctagaatttcatgtatttgtgttcttgggcaattaaatataaatttttgttaaattacccaagattacatagcactacaagctagtctttcagttgtagctgaatttttttttcccagaaatgtgactgtctttgtgatagtgtttggtgttggcagaattattcaggagctgttcaattaaatactaagcacaccacgaacaaatcaagaaacatgagattgtttccctttgtaatgatcagctgtgtgaaagactcacacccctgaaccatgtgcatctttacatgaaaccatgaaaatgtcagttacaggtccaggttaccctgagacataaaactgtagatgcagtccttgctcttctcacatagacaatttccttttcaactgcagactcatggctg

SEQ ID NO: 24821 - DNA, 589 bp, Homo sapiens
  MAP TO AC007539.8; EXPRESSED IN HELA, SIGNAL = 1.2; SWISSPROT HIT: O68006, EVALUE 2.30e+00; NT HIT: AJ400878.1, EVALUE 3.70e-01; EST_HUMAN HIT: BF367138.1, EVALUE 3.00e-92
cctaagaatcagaagcctgagctctaaacactccaagatgtttgtcctttcagtaaactctaagccctcagggctctattgacaagtctggactctcagatgggctctttttgtcatctgtttatctaaaacccacaagcttttgttcctctagtcatccaaaaaataatcgctattataatcctgcctcaggaattcaattatctcccttacagccttcccccagcttcttaaatgcaaccacagttttgaggcccttgggctattactgtgggtgatgagatgaatttcttctgtcattcattcacacagtcatgagagcagatcttatttttcttggtcatgagcttatatcctgtcaaaccctcacagaaagggaagtgcatccatgattgcatgtttacttattcattcatttggagtaaaagccagataattattttgaaaggcagagacccccagcctctcctgctctctggaagtgtgcaccaaggcctgtagaaatcaccgtgtcaaggaaatgcatagggcaggttcctctcggagaccagatgttaaagctcttgtggccgctttcaagttgtctcct

SEQ ID NO: 24822 - DNA, 556 bp, Homo sapiens
  MAP TO AL022319.2; EXPRESSED IN HELA, SIGNAL = 1.4; SWISSPROT HIT: Q62203, EVALUE 1.00e-02; EST_HUMAN HIT: BI195145.1, EVALUE 2.00e-01; NT HIT: AL139078.2, EVALUE 8.90e-02; EST_HUMAN HIT: AV751105.1, EVALUE 5.20e-01
ttcctaatgttcctgctgggccctggccctgcttggccccaactccttgtcccctcagctctgctttcgccgtctccaggacatgggatgctaacagaggccgtgggtgaggaggagctcctgagccaggaaggtggctggcttcaccgtcaccggcctggtcctctgcggaacagacctcagaagcggaccctcttgaaggcatgtttggaataggccgattccttttggggtggatgctaattcctcccagttttgctggggagggcctggcaggcaaacttccatgcctcctttgacccagagctgttctccacccactagccagtcaggggaaagatcacctgtaggtctccaccttcctacagcaggcctacatcttcctgcctatttcccaacacctccctgcagaatcacagaaatggcagagttggaagggcccacagagggtctgagcccacccctcacaggccctcatgtacagcagggtcccttcgctcatgccaagccagggccagcgtctaggtctttggactcccagctaaaagacagaggc

SEQ ID NO: 24823 - DNA, 556 bp, Homo sapiens
  MAP TO AP000359.1; EXPRESSED IN HELA, SIGNAL = 0.47; NT HIT: AF297468.1, EVALUE 3.50e-01; SWISSPROT HIT: P12092, EVALUE 4.80e+00
caaagccgaggaaacaagacaacagaaatagaaccataggtgctcaagtcatgtgagttatcaacagtattccaagaggtaaaatttaaatgttgagcaaactgtagaaaagaaccagtttggagattccaaaactgaaaaacataacaaataactcaggatgggtatagcagcatgtttgacaccgcttaaggagagaatgaaacagaaggtaggtcacgggagaggcttcttggcctgggctgtgattatatgggtggttatttggtgattaactgatgcattcacgtattggtacgttcttctgttgtagtgtagcatgcttcacaataactataaacaggaaaactgagctctgtgcctgctttgacacaaatttatgatgtaaactcatttttatgtaaatatgtacctagatatcctggtacacaagagggtggggtagtggcttccaaaagattgttttgatctcagagtgcatttgacaatgtatggacatatttttggttcacaacttgggtggggagatgctagtggtgtctagtgggtagaggcc

SEQ ID NO: 24824 - DNA, 166 bp, Homo sapiens
  MAP TO AL121594.3; EXPRESSED IN HELA, SIGNAL = 0.63; EXPRESSED IN PLACENTA, SIGNAL = 0.53; SWISSPROT HIT: Q11107, EVALUE 2.00e+00
gaagtaagcctttaataaagcagaattgtaaggtctttttattttacattcaagaactgaattttgagagtaaagagttaaagcgtgtaggcaataacatttcagcatgtatctcatgtactgatataaatatatgcatgtgcccagagggctccggcatcgccag

SEQ ID NO: 24825 - DNA, 114 bp, Homo sapiens
  MAP TO AC000040.4; EXPRESSED IN LUNG, SIGNAL = 0.39; EXPRESSED IN HELA, SIGNAL = 0.43; SWISSPROT HIT: P33569, EVALUE 6.00e+00; EST_HUMAN HIT: BF911664.1, EVALUE 2.20e+00; NT HIT: L77078.1, EVALUE 9.40e-02
ctgtccactttcaggggtagcaggagatcatgcagctccatcagtatgttcagctgaagttggttcttcctcagttggtgtaagagacaccttgagaagccgtaggcatggctc

SEQ ID NO: 24826 - DNA, 123 bp, Homo sapiens
  MAP TO AB014084.1; EXPRESSED IN HELA, SIGNAL = 0.98; EST_HUMAN HIT: BI460225.1, EVALUE 7.00e-13; NT HIT: AB031010.1, EVALUE 2.00e-15; SWISSPROT HIT: Q12888, EVALUE 2.70e+00
ggtcctggttggtgagaaaggggagcggggtccggtcctctgtcctcgtccctgtggccacacgggggcgccgccgcgctgctctcgcattctgattgagcgctctcaggcactgggtgaggg

SEQ ID NO: 24827 - DNA, 174 bp, Homo sapiens
  MAP TO AC005547.1; EXPRESSED IN HEART, SIGNAL = 1.1; EXPRESSED IN LUNG, SIGNAL = 0.49; EXPRESSED IN HELA, SIGNAL = 0.82; EXPRESSED IN PLACENTA, SIGNAL = 1.1; NT HIT: gi15300826, EVALUE 6.10e-01; SWISSPROT HIT: Q02360, EVALUE 6.60e-01; EST_HUMAN HIT: AV703634.1, EVALUE 2.30e-01
agcttgtgacatcgagggccctgcctctgggcagatcccccaagcatccgtgcagggctgcctgagaagctggaccagctctgacacagccagtgggatgttccacagcctcccagggcagaagggcttgtgggagattcgcttaaacgtgaccgatttcctctcgctggttat

SEQ ID NO: 24828 - DNA, 137 bp, Homo sapiens
  MAP TO AC003956.1; EXPRESSED IN HELA, SIGNAL = 0.45; SWISSPROT HIT: P40149, EVALUE 1.00e-03; NT HIT: gi14766383, EVALUE 2.00e-71; EST_HUMAN HIT: BF311622.1, EVALUE 3.00e-71
ctgctaggacaatgacatccgccttcttcagggccgcactgcggttctcccggatgtggagggggtggttgcggcctaacagcccccgtgccatccctccaaggaagcagggaacacccaaggtctccacggcagcc

SEQ ID NO: 24829 - DNA, 187 bp, Homo sapiens
  MAP TO AC008831.7; EXPRESSED IN HELA, SIGNAL = 0.6; SWISSPROT HIT: P75334, EVALUE 5.60e+00; EST_HUMAN HIT: AW864715.1, EVALUE 2.50e-01
attgcttgccttttgtctgcaactcctgaggtggtgacaccttgtcaacagtgtcacaacccaatatgggccaaccttttaccttgtcaccttgcagactgatgtttttgaaaatacgtcgacaacacagatgcttgcagggcagttgtggaggtgaggatgtgtgtagacgtgtggttatagtcat

SEQ ID NO: 24830 - DNA, 476 bp, Homo sapiens
  MAP TO AC004205.1; EXPRESSED IN HELA, SIGNAL = 0.61; EXPRESSED IN PLACENTA, SIGNAL = 0.51; EST_HUMAN HIT: BG431393.1, EVALUE 1.00e-08; SWISSPROT HIT: P03340, EVALUE 4.00e-14; NT HIT: AJ000742.1, EVALUE 6.00e-19
gggaagaaaggagcatgacgcacagggctgctatgaccatttgggagtgtgagcatcctcccggtcaaaacgtccctgcagccaaacagaaatttcctactcaagattcccagtgggataataacaacatagctcataggaggaatatgagagacctgcaagaaatgataataaaaggaattagagaatcgttaccctgcacccagaatatgaccaaagcttttaatatacagcaaggaaaagatgaggggcttatggaattttttaacaggcttaaggaacaaatgaggaaatatgctggtttagatggaggagacccacttggacaaggaatgttaaagcttcacttcgtcacaaatagctggccagatgttaccaagaaattacaaaagacagaaaattggaaggactgtcccacagaggaactcttaagggaggcccaaaaggtgtatgtacgaagagatgaagaaaagtaa

SEQ ID NO: 24831 - DNA, 177 bp, Homo sapiens
  MAP TO AC009145.4; EXPRESSED IN PLACENTA, SIGNAL = 1.1; EXPRESSED IN HEART, SIGNAL =   1; EXPRESSED IN HELA, SIGNAL = 0.94; EXPRESSED IN LUNG, SIGNAL = 1.1; EST_HUMAN HIT: BI117558.1, EVALUE 2.30e-01; SWISSPROT HIT: Q12263, EVALUE 1.10e+00; NT HIT: AF325866.1, EVALUE 6.20e-01
atggcgctggtatatcatggggcagggccaggaatcctggataccctacagtgtgcagtacaaagacgtgtacagccccagatgctaatggtgcctgagtcaggtgacacagggcatgacctgaagatgaaaacgaaccaccagaaagaacaagagtccctcccttgccaccgagaa

SEQ ID NO: 24832 - DNA, 252 bp, Homo sapiens
  MAP TO AC018514.6; EXPRESSED IN HELA, SIGNAL = 0.91; EXPRESSED IN PLACENTA, SIGNAL = 0.7; SWISSPROT HIT: Q10350, EVALUE 1.40e+00; EST_HUMAN HIT: BE544293.1, EVALUE 8.50e-02
ggcaagccagtcatcggaagaacaacacagccaccctaaagagaaagatgagctgcgaggcactgatggcatgcccactgatgtgtatcaagtgcacgtcccgctgcggaaagagacacgtgttcctccaaaaggcactctgctttttaactctcaggtctcagacaacaaaccaaagacactcctgagacttcagcaggagtgccccagacagtgcatgagcatgtacgatccattccttattttctctat

SEQ ID NO: 24833 - DNA, 223 bp, Homo sapiens
  MAP TO AC008620.5; EXPRESSED IN HELA, SIGNAL =  22; EXPRESSED IN HEART, SIGNAL =   9; NT HIT: gi14732184, EVALUE 1.00e-92; EST_HUMAN HIT: BF037520.1, EVALUE 1.00e-122; SWISSPROT HIT: O42248, EVALUE 6.00e-29
ataagaccatcatcatgtggaaactgaccagggatgagaccaactatggaattccacagcgtgctctgcggggtcactcccactttgttagtgatgtggttatctcctcagatggccagtttgccctctcaggctcctgggatggaaccctgcgcctctgggatctcacaacgcaagtagctgctcacttagctctggggccttgggaagaatctgggcagaa

SEQ ID NO: 24834 - DNA, 203 bp, Homo sapiens
  MAP TO AC002237.1; EXPRESSED IN HELA, SIGNAL = 0.44; SWISSPROT HIT: Q07889, EVALUE 1.10e+00; EST_HUMAN HIT: BI227310.1, EVALUE 4.20e+00; NT HIT: AF240786.1, EVALUE 1.20e-02
tcctttgagctccatgggtctggccacatgtgtccccatatctcatagcattcctctcaaggtgccgggcctgcacatggcagacccggagccccatgcttctctcctggaggaggaaagtgccagtagggtgacctctgctcatccgtcagagttcaatttagacatcacctcttccaggaggccctccccagctgaaccag

SEQ ID NO: 24835 - DNA, 157 bp, Homo sapiens
  MAP TO AC000373.1; EXPRESSED IN HELA, SIGNAL = 0.8; EXPRESSED IN PLACENTA, SIGNAL = 0.42; SWISSPROT HIT: P18096, EVALUE 7.60e+00; EST_HUMAN HIT: BF923167.1, EVALUE 8.00e-01; NT HIT: L19592.1, EVALUE 5.40e-01
atggcagcaactaaagctcacaaaacactagaaaagtatgttatcagagttgaggagatgctatgtggacatgggggaggagaagaacaatttcaaggtctgaatgagacaaaggccagagcatcagatctgcagttacttgtcaactcactgaatg

SEQ ID NO: 24836 - DNA, 108 bp, Homo sapiens
  MAP TO AF107259.1; EXPRESSED IN LUNG, SIGNAL = 0.74; EXPRESSED IN HELA, SIGNAL = 0.61; EXPRESSED IN PLACENTA, SIGNAL = 1.2; SWISSPROT HIT: P39086, EVALUE 1.00e-15; EST_HUMAN HIT: AI573286.1, EVALUE 5.00e-04; NT HIT: gi14780161, EVALUE 3.00e-54
cttttcagttccttcctctttgagactaataatgtccagatcaaaatccttcctcaagccattggttttattaaaggtgatatgcccagtcaagccatcccaccgggc

SEQ ID NO: 24837 - DNA, 170 bp, Homo sapiens
  MAP TO AC004511.1; EXPRESSED IN PLACENTA, SIGNAL = 0.88; EXPRESSED IN HELA, SIGNAL = 1.3; SWISSPROT HIT: O83848, EVALUE 5.70e+00; EST_HUMAN HIT: AW963672.1, EVALUE 5.60e-02; NT HIT: AJ130763.1, EVALUE 3.80e-02
ttcagtctctcagccacagagtccgcaaaggtggggtgaactccagccccagaggccagatcagaactcaggtccacggtttttatccagcgaaaggacctcagggcatctggctcaactctggggaaactgaggtcagaagggttgacagggagcttctggtacctctt

SEQ ID NO: 24838 - DNA, 210 bp, Homo sapiens
  MAP TO AC068323.6; EXPRESSED IN HELA, SIGNAL = 0.64; SWISSPROT HIT: P76072, EVALUE 4.20e+00; EST_HUMAN HIT: BF362628.1, EVALUE 8.00e-54; NT HIT: gi14729797, EVALUE 1.00e-115
gtgaaaccaaaaagacagtcattttaaccatcttggatgactctgaaccagaggatgacgaaagtatcatagttagtttggtgtacactgaaggtggaagtagaattttgccaagctccgacactgttagagtgaacattttggccaatgacaatgtggcaggaattgttagctttcagacagcttccagatctgtcataggtcatgaag

SEQ ID NO: 24839 - DNA, 380 bp, Homo sapiens
  MAP TO AF131216.1; EXPRESSED IN HELA, SIGNAL =  24; EST_HUMAN HIT: BG705804.1, EVALUE 1.00e-111; NT HIT: gi4506608, EVALUE 1.00e-109; SWISSPROT HIT: P14118, EVALUE 1.00e-41
agaaggtcacttggatgaggagaatgaggattctgcactggttgtttggaagataccatgaatctaagaagactgatcaccacatgtatcacagcctgtacctgaaggtgcaggggaatatgttcacaaacaagcagattctcatggaacacaaccacaagctgaaggcagacaaggcccacaagaagttcctggctgaccaggctgaagcccgcagctctaagaccaataaagcaagcaagctccgtgaagagcgcctccaggccaaaaagaaggagatcatcaagactttgtccaaggaagaagagacaagaaaaaaagcttcccctttttctgcacatcctggccactgtgattacatagatctgccattaaaataa

SEQ ID NO: 24840 - DNA, 209 bp, Homo sapiens
  MAP TO AC008685.6; EXPRESSED IN PLACENTA, SIGNAL = 0.6; EXPRESSED IN HELA, SIGNAL = 0.51; EXPRESSED IN LUNG, SIGNAL = 0.56; SWISSPROT HIT: P53544, EVALUE 2.40e+00
agttatcacctgctttggagctggcggcatccttgggacagaaaactgtcctgccctgcctgctggttacattggatgacaccatctgctacaaagccaactccaaaaatagaacccagaactcgtctggaaaatgtgggctagacagcacaccgtcaaataatgcaattataggaacaaagagatctggtccaattgttggaacttaa

SEQ ID NO: 24841 - DNA, 225 bp, Homo sapiens
  MAP TO AC006290.1; EXPRESSED IN HELA, SIGNAL = 0.49; EXPRESSED IN HEART, SIGNAL = 1.2; SWISSPROT HIT: Q07352, EVALUE 9.70e+00; NT HIT: gi13937343, EVALUE 6.00e-11; EST_HUMAN HIT: AV725081.1, EVALUE 1.00e-03
atattaccaacaatatcacaagcagacgtacacctcctatgaacaatatcacaggaaggagtacaccccctacgatattgagagtgatattatccccttttttttctagatattttgaagaatatcacaggggagtatacaccccctgcgatattggaagtaatatcattccctacccttccggatattacaaacaatatcacagggggtgtacaccccttgtga

SEQ ID NO: 24842 - DNA, 148 bp, Homo sapiens
  MAP TO AC000028.1; EXPRESSED IN PLACENTA, SIGNAL = 0.6; EXPRESSED IN HELA, SIGNAL = 0.56; SWISSPROT HIT: Q99490, EVALUE 1.00e-10; EST_HUMAN HIT: AL560115.1, EVALUE 8.00e-78; NT HIT: gi14758343, EVALUE 5.00e-78
cttgtgtccccaccagtgccaaggccaggcctcctcgtccctccccgcgaagggaactcagctgcccatggagacggctcacagcctggaaactgttctcatcctccaggctgaagacgaagatcacagcatctgcccagcctgagaa

SEQ ID NO: 24843 - DNA, 353 bp, Homo sapiens
  MAP TO AC004496.1; EXPRESSED IN HEART, SIGNAL = 2.4; EXPRESSED IN LUNG, SIGNAL = 0.4; EXPRESSED IN HELA, SIGNAL = 1.9; EST_HUMAN HIT: BI826182.1, EVALUE 0.00e+00; SWISSPROT HIT: Q64739, EVALUE 7.10e-01; NT HIT: Z35166.1, EVALUE 3.30e-01
ggtgaaaaaacatggaatcaaggaagtgtcaggagaaaggaagacacaaaaggctgcctcaaacggcactcagataagaagcaaattgaaaaggaccaaacaaactgctaccaagaccaaaacccttcaaggccctgcagagaagaaacctccgtctggcagccaggcccctaggactaaaaagcaaagggtaaccaaatggcaagcaagtgaaccggcccactctgtgaatggggaggggggtgtgcttgcctctgctccagatccacctgtgctccgggaaacagcacaaaacacccagacgggtaaccagcaagaaccatcgccaaacctttccagagagaaaaccagag

SEQ ID NO: 24844 - DNA, 176 bp, Homo sapiens
  MAP TO AC005953.1; EXPRESSED IN HELA, SIGNAL = 0.63; EXPRESSED IN PLACENTA, SIGNAL = 0.9; EXPRESSED IN HEART, SIGNAL = 1.3; EXPRESSED IN LUNG, SIGNAL = 0.73; SWISSPROT HIT: P55200, EVALUE 5.70e+00; NT HIT: AJ271735.1, EVALUE 2.00e-28; EST_HUMAN HIT: BF035327.1, EVALUE 2.00e-44
atgaagcctcagcgaggtgagaaagctgcagaagaaaagttggaagctagcagagtttggttcatggggcttaaggaaagaagccaactccataacataaaagtgcaaggtgaagcagcacatgctgatggagaagctgcagcaagttatccagaagatctaagactattgagaag

SEQ ID NO: 24845 - DNA, 143 bp, Homo sapiens
  MAP TO AC000396.1; EXPRESSED IN HELA, SIGNAL = 0.47; EXPRESSED IN PLACENTA, SIGNAL = 0.49; SWISSPROT HIT: Q84291, EVALUE 4.50e+00; NT HIT: Z18755.3, EVALUE 1.90e+00
cccctgtgaatgaggtcacgacgccagctcagccagtcctggaagccatcgtgagagctgctctaccgctcaagccaatgtgtgaaatacggcattttggatacatcatcaccagtgagccaagctggacgctagttaaagcg

SEQ ID NO: 24846 - DNA, 173 bp, Homo sapiens
  MAP TO AC016620.5; EXPRESSED IN HELA, SIGNAL = 0.43; EXPRESSED IN LUNG, SIGNAL = 0.85; EXPRESSED IN PLACENTA, SIGNAL = 0.75; EST_HUMAN HIT: BF962431.1, EVALUE 8.90e-01; SWISSPROT HIT: Q9UKP5, EVALUE 1.00e-29; NT HIT: gi14727533, EVALUE 2.00e-90
catggtgttattgctacagaagatgaagagtattttatcgaacctttaaagaataccacagaggattccaagcattttagttatgaaaatggccaccctcatgttatttacaaaaagtctgcccttcaacaacgacatctgtatgatcactctcattgtggggtttcgggtga

SEQ ID NO: 24847 - DNA, 327 bp, Homo sapiens
  MAP TO AC004174.1; EXPRESSED IN PLACENTA, SIGNAL = 0.64; EXPRESSED IN HELA, SIGNAL = 0.67; SWISSPROT HIT: P11369, EVALUE 6.00e-16; NT HIT: U50871.1, EVALUE 7.00e-30; EST_HUMAN HIT: AI949436.1, EVALUE 2.00e-12
atgtggaataaacctaagcatccctcagcagatgaatggatagagaaaatgtggtatatatgcatagtggaatactattcagccttaaagaagaaggaaattctgttgtttgcaacaacatggatgaatctggaggaccttatattaactgaaataagtcaggcacagaaggacaaatacctcatggtctcccttctacatgaaatctacaaagtcaaactcacagaaacagagaatagaatggtggttaccaggggctggaagaaagggagaaaattgagaagatattggtcaaaggttacaaaaattacagttagacaagagaga

SEQ ID NO: 24848 - DNA, 156 bp, Homo sapiens
  MAP TO AC001517.1; EXPRESSED IN HELA, SIGNAL = 0.45; NT HIT: AJ297108.1, EVALUE 2.10e+00; EST_HUMAN HIT: BE818465.1, EVALUE 5.10e-02
atggagaatgtaaagggagagggtttccgagggatattaaaggttatgaaaggaggtaatgtgggttttgggcctgaaatgagcaaggaagaagctgatcatgttgaacatttcataaccacagcaggtttttgtgcagctgtcatcggtgcctga

SEQ ID NO: 24849 - DNA, 162 bp, Homo sapiens
  MAP TO AC004193.1; EXPRESSED IN HELA, SIGNAL = 0.57; EXPRESSED IN PLACENTA, SIGNAL = 0.78; NT HIT: AF055066.1, EVALUE 3.00e-86; EST_HUMAN HIT: BE078293.1, EVALUE 1.00e-05; SWISSPROT HIT: P21293, EVALUE 3.40e+00
tcaaggtgctgcagggttgatctcttctgaggcctctttcctttgcttgtagatggccacttcttctgccttctcaacatagggcttcaacatgtggattttggtggcgtaggaacacaattcctcttgtaacagtctggatcgtctttgacaatggatgtt

SEQ ID NO: 24850 - DNA, 312 bp, Homo sapiens
  MAP TO AC002471.5; EXPRESSED IN HELA, SIGNAL = 0.6; EST_HUMAN HIT: BF885238.1, EVALUE 0.00e+00; SWISSPROT HIT: P21359, EVALUE 6.00e-49; NT HIT: AF232254.1, EVALUE 0.00e+00
atgtcccatgtgagtggaggaggacccatagatttgtctgacacagactccctacaggcatggatcaacatgactagcttcctttgtgcccttgggggagtgtgcctccagcagagaaggaattctggcctggcaacctatagcccacccatgggtccggtcagtgaacataagggttccatgatttcagtgatgtcctcagagggaaacgcagatacacctgtcagcaaatatatggatcagctgttgtcgttaatggtgtgtaagcttgagaaagtgggacttcaaatacggaccaatggtaaggacctg

SEQ ID NO: 24851 - DNA, 225 bp, Homo sapiens
  MAP TO AL023494.12; EXPRESSED IN HELA, SIGNAL = 0.71; EXPRESSED IN PLACENTA, SIGNAL = 1.3; NT HIT: M63600.1, EVALUE 2.00e-01; EST_HUMAN HIT: BG771811.1, EVALUE 1.00e-123; SWISSPROT HIT: P11543, EVALUE 4.30e+00
ttgtccagtaagaaagaaaaggataactgaagcagagctctgtgctggtcctaatgactggattctttgtgcacatcaggatgtagaggggcatggagtaaatcccagtgttagtggcctttccatacctgggatattagatgttatttgtgaagaaatggatcagacaactggagaaccacagtgtgaagttgcccgaaggaagcttcaggagattgaggacag

SEQ ID NO: 24852 - DNA, 200 bp, Homo sapiens
  MAP TO AC004178.1; EXPRESSED IN HELA, SIGNAL = 0.51; NT HIT: S78653.1, EVALUE 1.10e-02; SWISSPROT HIT: P35410, EVALUE 3.00e-07
gtctggagcagcccctatgtgacctacatccttaacctggccactgttgatatggtcaacctctcctgtgtaactgtgatcctgctggagaaaatcctcatgctgtatcaccaggcggcattgcaggtggctgtgtttctggatcctgtctcctatttctccgacacagtgggtctctgtctcctggtggccatgagtat

SEQ ID NO: 24853 - DNA, 130 bp, Homo sapiens
  MAP TO AC018844.2; EXPRESSED IN HELA, SIGNAL = 1.3; EXPRESSED IN PLACENTA, SIGNAL = 0.7; EXPRESSED IN HEART, SIGNAL = 1.5; SWISSPROT HIT: Q65362, EVALUE 6.00e+00; NT HIT: U17896.1, EVALUE 4.30e-01; EST_HUMAN HIT: BG185587.1, EVALUE 8.00e-53
ttgatttattgcaatattcccccccctcctgtgttctccgggaaatttcagccatacgtgaatctctttcttcggggaaaaagagactcttgtcaccagggcattcacgaacacaaactcacttttcact

SEQ ID NO: 24854 - DNA, 391 bp, Homo sapiens
  MAP TO AF031075.1; EXPRESSED IN LUNG, SIGNAL = 2.8; EXPRESSED IN HELA, SIGNAL = 9.1; EXPRESSED IN HEART, SIGNAL = 1.7; EST_HUMAN HIT: BE276817.1, EVALUE 0.00e+00; SWISSPROT HIT: P51617, EVALUE 1.00e-64; NT HIT: gi14768298, EVALUE 0.00e+00
cttccacggctgtgggccgggatcctgggccactcccccagctcgattctcctgccgtgtccccctgaggacagccggcctccctgaggggtgctgggtccagagggcagcttggagtcaagtgccaggagcgcagggcagcagagaggccgcctaggctctcgtcactctccacgggctggttggggcctctctgcagctgctctgctgcctgggcactggctcctgatggcgctgccaggggctgccatggagcagccccactgtgggctctgccagtgctggacacgtaggagttctcctgcggggaaggggggatgcagctggcggcctccgaatgcccgggcacccccgccaccactgcctgcagcttctctagcctctcgtacac

SEQ ID NO: 24855 - DNA, 227 bp, Homo sapiens
  MAP TO AB000381.1; EXPRESSED IN HELA, SIGNAL = 0.59; SWISSPROT HIT: Q99445, EVALUE 2.00e-42; NT HIT: AB000381.1, EVALUE 1.00e-125; EST_HUMAN HIT: BF679031.1, EVALUE 1.20e+00
gcataaattctcgtgaactacttgtttataagaactgtacaaacaactgcacatttgtatatgcagctgaacagcctcctgaagccccaggaaaaatcttcaaaactaatagcttctactgggtttgttgttgtaatagcatggtttgcaatgcaggaggacctactaatcttgaaagggacatgttacccgatgaagtaactgaggaggagcttccagaaggaact

SEQ ID NO: 24856 - DNA, 111 bp, Homo sapiens
  MAP TO AC000355.1; EXPRESSED IN HELA, SIGNAL = 0.49; SWISSPROT HIT: P14273, EVALUE 4.60e+00; NT HIT: L09708.1, EVALUE 3.60e-01; EST_HUMAN HIT: AI283969.1, EVALUE 1.30e-01
tgctccagtctaaattccacaccttcagagctagagtcagagtttccagggtggcaggagtggagtgaaccagggggatcccagcatcctcctcaaatgtagggactaaga

SEQ ID NO: 24857 - DNA, 280 bp, Homo sapiens
  MAP TO AC004471.2; EXPRESSED IN HELA, SIGNAL =   1; SWISSPROT HIT: Q28640, EVALUE 2.40e-02; NT HIT: L77566.1, EVALUE 0.00e+00; EST_HUMAN HIT: AI692666.1, EVALUE 0.00e+00
ctaaaagaagtccgaagctttgcgccgggcagggagctgcagcaggttgtccgtgatggaggccgggtcctgtgtgagaggggtgcgtgtggcagagccaggcgccggtgtgcttgtgggggtctgcagcccactggccggggtcttgaggtgggtggagcgtgctggggatggtgtgtagctggcccgcagggcccggtctgtgtacttgctggccgtcctgctcacaaggcgctgtagggctggcgacatggctgggctcaggcctttgggggtgagg

SEQ ID NO: 24858 - DNA, 276 bp, Homo sapiens
  MAP TO AC008685.6; EXPRESSED IN LUNG, SIGNAL = 1.1; EXPRESSED IN HELA, SIGNAL = 0.42; EXPRESSED IN PLACENTA, SIGNAL = 0.71; NT HIT: U07563.1, EVALUE 1.00e-111; SWISSPROT HIT: O60813, EVALUE 2.30e+00; EST_HUMAN HIT: BG654971.1, EVALUE 1.00e-109
aaagggtacactcaccagcagttttgccatgacagtacaccgaacaaaggagacagggtcatttataacctgatgcgtccaccctactgctgtgtccagtttccattggctggaacgggacctcacattctatgtttgtcccgattggctagcaacttagaactttttaaaacaggcaaaggcagaggagaacaaaagaaggaggaagtaacttgtggaatgctgagaaagggaaaagcacctctaaataaggaagaggaacaagctatgacctaa

SEQ ID NO: 24859 - DNA, 229 bp, Homo sapiens
  MAP TO AC004490.1; EXPRESSED IN HELA, SIGNAL = 0.69; EST_HUMAN HIT: AW967980.1, EVALUE 1.00e-126; SWISSPROT HIT: P03188, EVALUE 4.90e-01; NT HIT: X76012.1, EVALUE 5.30e-02
tggaagggcaccacgcagcccatgaagctgaacacgcggccgtccactggactcctgcgccatatcctgcagcaggtctacaaccactcggtgaccgaccccgagaagctcaacaactacgagcccttctcccccgaggtgtacggggagacctccttcgacctggtggcccagatgattgatgagatcaagatgaccgacgacgacctgtttgtggacttggggagcg

SEQ ID NO: 24860 - DNA, 323 bp, Homo sapiens
  MAP TO AC002309.2; EXPRESSED IN HELA, SIGNAL = 1.1; EST_HUMAN HIT: AU142626.1, EVALUE 0.00e+00; SWISSPROT HIT: P78395, EVALUE 4.00e-40; NT HIT: gi14777657, EVALUE 0.00e+00
ctggggcgaacctcctgggcaaggagcacatcaagtccatcaagcacagctttgaaggtctccaggtgaagatgttgtcccttcatcagcactcccagagggaggcaggtgaagggccaggcctgcaccattgccttcagggtctggctgtgtctcccgtcaaaggctgccatgaagagtggcgggaagagctccctgggcagcaactccagggcggcaatggccagggcctcatccttcagcaggctctgccctgccagctccacaagtctccgtgggcttgtccacacactcatgctgatgtatcggctctgaatggaacc

SEQ ID NO: 24861 - DNA, 131 bp, Homo sapiens
  MAP TO AC004030.1; EXPRESSED IN HELA, SIGNAL = 0.42; NT HIT: AF274063.1, EVALUE 4.40e-01; EST_HUMAN HIT: BF799428.1, EVALUE 9.00e-68
gcatcacgggcagttactcggtgtctgagtctcccttcttcagccccatccacctacactcaaacgtggcgtggacagtggaagatccagtggacagtgctcctcccgggcagagaaagaaggagcaatgg

SEQ ID NO: 24862 - DNA, 384 bp, Homo sapiens
  MAP TO AC007883.3; EXPRESSED IN HELA, SIGNAL = 0.44; EST_HUMAN HIT: BG215688.1, EVALUE 0.00e+00; NT HIT: gi13386023, EVALUE 0.00e+00; SWISSPROT HIT: P32656, EVALUE 6.00e-07
ggatgtgtatggggtgttgcttacagattgccagtaggaaaggaagaagaagtaaaagcataccttgacttcagagaaaaaggaggctacagaaccacaacagtcattttttatccaaaagatcccacaacaaaaccattcagtgtattgctatatattggaacatgtgataatcctgattatcttggtcctgcacctctggaagacattgctgaacaaatttttaatgcagctggtccaagtggaagaaatacagaatatctttttgaacttgcaaattctattaggaaccttgtgccagaagaagcagatgagcatcttttcgctttggaaaaattagtaaaggaacgtttagaagggaaacagaacctcaattgcatataa

SEQ ID NO: 24863 - DNA, 366 bp, Homo sapiens
  MAP TO AC016629.5; EXPRESSED IN HELA, SIGNAL =  36; SWISSPROT HIT: P29316, EVALUE 4.00e-50; NT HIT: gi14755659, EVALUE 0.00e+00; EST_HUMAN HIT: AA595083.1, EVALUE 0.00e+00
ttagccagctggactcagtttaggtgatcccaattttgttacaacatcgaaagcatcataatcaggagcaagtcgaacatatgccttcttctctttatcaggacaaatcagggtggtgaccttggccacatcactgtcatagagcttcttcacagcctgtctgatctggtgcttgttggctttaacatccacagtgaacacaagcgtgttgttttcttctatcttcttcacggccgactcagtggtcagcggaaacttgatgatagcatagtggccaagcttgtttctcctgggggtgctcttccgaggatatctgggctgcctccggagtcgcagtgtcttgggccgcctgaaggtgagtgacat

SEQ ID NO: 24864 - DNA, 409 bp, Homo sapiens
  MAP TO AC009087.4; EXPRESSED IN HELA, SIGNAL = 8.4; EST_HUMAN HIT: AL581516.1, EVALUE 0.00e+00; SWISSPROT HIT: P25705, EVALUE 1.00e-52; NT HIT: gi4757809, EVALUE 0.00e+00
atgaatgatgcttttggtggtggctccttgactgctttgctagtcatagaaacacaggccgatgatgtgtctgcttacattccaacaaatgtcatttccatcactgacagacagatcttggaaacagaattgttctacaaagatatccgctctgccattaacattgggtctgtctgtgtcttgtgttggatctgctgcccaaaccaggactatgaagcaggcggcaggtaccatgaagctggaattggctcaggatcgtgaggttgctgcttttgcccagtttggttctgacctcaatgctcccactcaacaactattgagtcgcggtgtgcgtctaactgagttgctgaagcaaggacagtatcctcccatggttactgaacaacaagtggctgttatctgtgcgggt

SEQ ID NO: 24865 - DNA, 88 bp, Homo sapiens
  MAP TO AC004090.24; EXPRESSED IN HELA, SIGNAL = 0.45
cggtccttatcaatgtcatcaccattgctgaagcctttaccacctccacttccgttcccatcacagcctccttgatttccaaactatg

SEQ ID NO: 24866 - DNA, 219 bp, Homo sapiens
  MAP TO AC004144.1; EXPRESSED IN HELA, SIGNAL = 1.4; SWISSPROT HIT: O87765, EVALUE 2.20e+00; NT HIT: gi14767154, EVALUE 3.00e-77; EST_HUMAN HIT: AL524744.1, EVALUE 1.00e-115
ctaggggacgatgatgtggcagatggcttggccttccacgccaagcgcagctaccagccccacggccgctgggcagagcgggccggccaagagcccctcaagaccatcctggatgcccaggacctggattgctactttacccccatgaagcccgagagtctggagaactccattctggattcactggagccacagagcctggccagcctgctgagtgag

SEQ ID NO: 24867 - DNA, 291 bp, Homo sapiens
  MAP TO AC003045.1; EXPRESSED IN HELA, SIGNAL = 0.76; EXPRESSED IN HEART, SIGNAL = 1.2; NT HIT: L11910.1, EVALUE 8.00e-54; EST_HUMAN HIT: BF670627.1, EVALUE 1.00e-50; SWISSPROT HIT: P08547, EVALUE 9.00e-23
atgatcattagtggctactatgagcaactatgttccaataaattggaaaatctggaagaaatgaataaattcctagacacatacagcctaccaagattgagccatgaagaaatccaaaacctgaacagaccaataacaagtaaagagttggaagccgtaacgagaagtctcccagtgaggaagatcctgggacccaatagcatcactgctgaaatctaccaaacatttaaagaagaactaataccaatcctactcaaactgctccaaaaaatggacaaagagagaatactt

SEQ ID NO: 24868 - DNA, 96 bp, Homo sapiens
  MAP TO AC002497.1; EXPRESSED IN HELA, SIGNAL = 0.42; NT HIT: D84312.1, EVALUE 3.00e-01; EST_HUMAN HIT: BE148366.1, EVALUE 4.40e-01
cctctcctcagtcaccattccagagtgctctgatggcttcacactgctagtacctgcaatctgtagccagaaaatgtcatctggccccaggagcat

SEQ ID NO: 24869 - DNA, 733 bp, Homo sapiens
  MAP TO AC005005.1; EXPRESSED IN HELA, SIGNAL = 0.8; EST_HUMAN HIT: BF842053.1, EVALUE 3.00e-78; SWISSPROT HIT: P13983, EVALUE 8.00e-08; NT HIT: AB032551.1, EVALUE 4.00e-21
ttgggcagaggtgggggcacagtctggcctgagggggccccaggccggaaggtgggggacagaagtccaggggagtgagtgccaggctctgaaggaccctggcccacatccaagggcaaggtctggggtggccgtggcaaaacaggatcctcagggctgctgtggagggcctcaggccgggctcggaaggagggggagagccgagggtctggggaggtttggatgcagggtggggagcctgtaggaccagatgtctgagctggaggctggagatgcccctcagaagcagggagaggtctaggggctggggcatccctctttctagctgatgtctgtcccacagaggctgcgcctgatgccgtggatgctggagccagggcctgttcctgagttggagacagaactggactgggcaccggggaaggggtggaggggagttctgggggctgctcctcagaagccagggccaggctcaggccagaggctgccagtgttggcttgggtcccacggaggcaggtggctcctgcttctggtctctggaggttggggccagattgggccccagggtgactgggggagatcttggccctgctgaggcaggcatcaccagccccagggacgtcggagccagaactgagcctgtggtcgctgggggaggctttggtccagctgaggcagacatcaccagctggcccacagatgttggggccaggctggagctgcggtgggcag

SEQ ID NO: 24870 - DNA, 753 bp, Homo sapiens
  MAP TO AC005587.1; EXPRESSED IN HELA, SIGNAL = 0.37; EST_HUMAN HIT: AI339565.1, EVALUE 0.00e+00; SWISSPROT HIT: O95047, EVALUE 1.00e-126; NT HIT: gi15300431, EVALUE 0.00e+00
atccatcagagagttcctcctactgggatttcccgttggcccaaggattcagatgctcctctttgggctcttctccctgttctacgtcttcaccctgctggggaacgggaccatactggggctcatctcactggactccagactgcacgcccccatgtacttcttcctctcacacctggcggtcgtcgacatcgcctacgcctgcaacacggtgccccggatgctggtgaacctcctgcatccagccaagcccatctcctttgcgggccgcatgatgcagacctttctgttttccacttttgctgtcacagaatgtctcctcctggtggtgatgtcctatgatctgtacgtggccatctgccaccccctccgatatttggccatcatgacctggagagtctgcatcaccctcgcggtgacttcctggaccactggagtccttttatccttgattcatcttgtgttacttctacctttacccttctgtaggccccagaaaatttatcactttttttgtgaaatcttggctgttctcaaacttgcctgtgcagatacccacatcaatgagaacatggtcttggccggagcaatttctgggctggtgggacccttgtccacaattgtagtttcatatatgtgcatcctctgtgctatccttcagatccaatcaagggaagttcagaggaaagccttccgcacctgcttctcccacctctgtgtgattggactcgtttatggcacagccattatcat

SEQ ID NO: 24871 - DNA, 453 bp, Homo sapiens
  MAP TO AP001724.1; EXPRESSED IN HELA, SIGNAL = 0.5; SWISSPROT HIT: P25632, EVALUE 7.80e-01; NT HIT: AJ229041.1, EVALUE 0.00e+00; EST_HUMAN HIT: AI337323.1, EVALUE 2.00e-07
accactccccttgttacaccttctcgggacaaggtaggcggaatgacccccaatgatgtccacgccctgatccttaaaacctatggatatgttactttacatgagataaaggagtgcagatgtgattcagctaagagtcttgagatggggagcatactctgggttatccaggtgggcccagtgtcatcaaaagagtccttaaaagcagagtaccttcctcacctgcaatcagaaggtgatgggaggacagaagacagaggacggatcagagaagtgacattactggctttgcagatggaggaaggggccatgagtcaaggaatgtgggtggctccagaaggggggaatgtcaaggacatggatatccccccagagcctctagaaggaacacagtcatggcaacagcttggtgttagcctggtgagatctatggcggatctgactcacagaaat

SEQ ID NO: 24872 - DNA, 727 bp, Homo sapiens
  MAP TO AL080317.11; EXPRESSED IN HELA, SIGNAL = 0.85; SWISSPROT HIT: O60673, EVALUE 0.00e+00; NT HIT: gi14756840, EVALUE 0.00e+00; EST_HUMAN HIT: AI372971.1, EVALUE 0.00e+00
ctaattttaagtttatttagtccactttcatcagcagtgctattaagagaatgcaccatagttctattctcccctgagcatgacagtaattcacaattttcagtaaatgatgaagggaataaactactcagagctgtgctgtttcctttttcatttccttcagaggatactttattttttgaatgatttaagtcagaaaagttgaaagaatttttgcccaatgtattctcgttagggtgacggtgcatatgtataaaaggggaatccttttcgatttttctaatgtttgtatattttctacttggtacttgtcttgtaacagatggaatatcttcttcataatcaaaaatactactttcacaggaagatactgggaggatctctttcttactattctctttatgagaattttctgaatgaacagtactgcttaaagatccagggtatttcatagaataagtgctttcgtttgtaaaagaagtgactgagttatctagacctttttctgtatttttgtttgtctgtgaaaggtcttcaattaaatcttccttgttcaaaacatgggaagaaagggcacttgtgtgtttacactgaaaggtaatcttagcagaagatgagggttctaatgtagcagcatctttgtgaaagatggagggtttaactgaaagcttgcttgttgcaattacagaagagtgggttctagaattttcattgttcaatggattgt

SEQ ID NO: 24873 - DNA, 967 bp, Homo sapiens
  MAP TO AL355075.2; EXPRESSED IN HELA, SIGNAL = 0.26; EST_HUMAN HIT: AA305556.1, EVALUE 3.50e-01; SWISSPROT HIT: Q9P2J3, EVALUE 9.00e-16; NT HIT: gi15298662, EVALUE 2.40e-01
tgcaccgagccgccctggcctgtggcagtgagttctttggggccatgctcctgagcgggatgagggaatcccagggcacagaggtatctctgcggacgatctccacccaggacctgcgactcctcgtctcttttgcttactccggagttgtgcgggcaaggtggccagggctactgagagctgcccaggctgctctgcagtaccagagctcttcctgcttggatttgtgtcagaaaggcttggcacggggcctcagccctgcccgttgcctggccctgttccccatggcggaagcccctgggttggagaggctctggagcaaagcccgtcactacctcctcacccacctgcctgctgtagccttgtgtcctgctttcccttctttaccagctgcctgcttggctgagctcctggatagtgatgagctccatgtgcaggaggagtttgaggcctttgtggctgcacggtgttggctggctgccaaccccgagacccaggagtcagaggccaaggccctgctgcgatgtgtccgctttggccgcatgtccaccagggagttgcggagggtgcgggcagccgggctacttccacccctgaccccagatctgttgcaccagctgatggtagaggctgatgttccaggccaagagagacggagggagcctgaccgggcactggtagtgattggcggggatgggctcagaccagacatggccctaagacaaccatcccgagcagtgtggtgggcccgggccttccgctgtggcgtgggactggtacgaactgttgagtgggggcagctgcctgccctgcctgcccccggacgcttccggcatggggctgcaagcctggcaggaagtgaactctatgtgtgtgggggacaagatttctacagtcactccaacaccctggcttcaactctcaggtataagcttctaggagtgggcagggtgtggcaggccctaag

SEQ ID NO: 24874 - DNA, 850 bp, Homo sapiens
  MAP TO AC006515.7; EXPRESSED IN PLACENTA, SIGNAL =  17; EXPRESSED IN HELA, SIGNAL = 9.7; EST_HUMAN HIT: AL535222.1, EVALUE 1.00e-117; SWISSPROT HIT: Q50659, EVALUE 6.10e-01; NT HIT: AB028891.1, EVALUE 1.00e-102
cggcggcggcggctgcggtggtccctgcgggcactgcggcgggggtggctgcggtggtgctggcggtggtccggcgctgttccatgccgttgggcaggaagccggcgatgatgggcaccggccagatgagggcggccacgctccacaccacgatgaccagggtcatgaagcaggccaccagcgtggactcaatgggcttacggttcagccgccagcccggctcgccctgcagctcctccaggctgaagtctaggcagcagaaatgcagcggctcgccctgcagccacagcggcccgggcggctcggccgcggggtaggctggcagcgcggtgggcgccccggcggtggcggcggcggcgctgggggcggcggcgggccggaggcggccagtgcggcgaccgcgcacccagccgcagcccacgcagaggcgcaggtcctgctgcgcgccgcccgccgccagccccaggtgctcgatgagcagcggcggcccgacgcggtggaaggcggcggcgaagaaagcgcggccgtgcgcgttggtggagaagagcagtaggtcgcactggaagccccgcgggcggccccagcgcacgagcagcgagctcagcatctgccgctgcacgctgatgttgcacggcgccgctgccgccgccgtctcctccgggcccgggcgctcggggggcccgggggccgccgaggccagcagccgcggggcgatgggctcgtccgcggaggacgcgttgactgaagcattggagggcaccccgaggaggccgggcgcgtccgcggccccgccgcggacgggcggcagcgggcaggcggcggccaggagcgcggcgagcaggggcagcat

SEQ ID NO: 24875 - DNA, 1419 bp, Homo sapiens
  MAP TO AL136096.2; EXPRESSED IN HELA, SIGNAL = 0.22; SWISSPROT HIT: P21554, EVALUE 0.00e+00; NT HIT: gi16173524, EVALUE 0.00e+00; EST_HUMAN HIT: M77952.1, EVALUE 0.00e+00
atgaagtcgatcctagatggccttgcagataccaccttccgcaccatcaccactgacctcctgtacgtgggctcaaatgacattcagtacgaagacatcaaaggtgacatggcatccaaattagggtacttcccacagaaattccctttaacttcctttaggggaagtcccttccaagagaagatgactgcgggagacaacccccagctagtcccagcagaccaggtgaacattacagaattttacaacaagtctctctcgtccttcaaggagaatgaggagaacatccagtgtggggagaacttcatggacatagagtgtttcatggtcctgaaccccagccagcagctggccattgcagtcctgtccctcacgctgggcaccttcacggtcctggagaacctcctggtgctgtgcgtcatcctccactcccgcagcctccgctgcaggccttcctaccacttcatcggcagcctggcggtggcagacctcctggggagtgtcatttttgtctacagcttcattgacttccacgtgttccaccgcaaagatagccgcaacgtgtttctgttcaaactgggtggggtcacggcctccttcactgcctccgtgggcagcctgttcctcacagccatcgacaggtacatatccattcacaggcccctggcctataagaggattgtcaccaggcccaaggccgtggtggcgttttgcctgatgtggaccatagccattgtgatcgccgtgctgcctctcctgggctggaactgcgagaaactgcaatctgtttgctcagacattttcccacacattgatgaaacctacctgatgttctggatcggggtcaccagcgtactgcttctgttcatcgtgtatgcgtacatgtatattctctggaaggctcacagccacgccgtccgcatgattcagcgtggcacccagaagagcatcatcatccacacgtctgaggatgggaaggtacaggtgacccggccagaccaagcccgcatggacattaggttagccaagaccctggtcctgatcctggtggtgttgatcatctgctggggccctctgcttgcaatcatggtgtatgatgtctttgggaagatgaacaagctcattaagacggtgtttgcattctgcagtatgctctgcctgctgaactccaccgtgaaccccatcatctatgctctgaggagtaaggacctgcgacacgctttccggagcatgtttccctcttgtgaaggcactgcgcagcctctggataacagcatgggggactcggactgcctgcacaaacacgcaaacaatgcagccagtgttcacagggccgcagaaagctgcatcaagagcacggtcaagattgccaaggtaaccatgtctgtgtccacagacacgtctgccgaggctctgtga

SEQ ID NO: 24876 - DNA, 579 bp, Homo sapiens
  MAP TO AL022329.9; EXPRESSED IN HELA, SIGNAL = 0.33; SWISSPROT HIT: Q06702, EVALUE 3.20e+00; NT HIT: AF195953.1, EVALUE 2.00e-03; EST_HUMAN HIT: AW183888.1, EVALUE 2.00e-04
ttttagtgcctgccacattgatgatactcaataaatatttgttgcatgaatgaaagtgtgaactactgtgtcacgggttaggcagacatagaagtagaacataacagtgtgggtggaggagttagcagatcatttggcaggcaatggggagctattgaaggtttttgagcaggggcaggagagtgtcagatggattgaaggagggagggtttggaaacaggacaaggagttggcaacctgtgggcaccttccaggtgagaagtcagagagatctggtccagggagaagggaagtgggagggccttcgttttgtacttggctgcttcagaggcctgcaaatcaccctggaccatgagtgatgtgctggtctgcttactgcagctaccctcatctgggtctcttggactgctaccctagctctctctagcgcctcccttaattcaactatccccccctgcctccaactggatctgcatccccagccagaagaatcctataaaatggtccatctgattttgtcactctcctcttggaaaccttccactggctttctggtgccccgaggatagcttcaatttc

SEQ ID NO: 24877 - DNA, 3135 bp, Homo sapiens
  MAP TO AL137853.3; EXPRESSED IN HELA, SIGNAL = 0.84; SWISSPROT HIT: P12027, EVALUE 3.00e-06; NT HIT: gi14745220, EVALUE 0.00e+00; EST_HUMAN HIT: BG945261.1, EVALUE 0.00e+00
aggacttttggccacctatctcttggtcagatttgttgccctgatgacccacagccagccaaggaccagttggctactgttcccaaggatatacccctggattgcgattgtgttcttacaggtgaggatattctcggtgaggtggcaaacagaactgctcaggggttagagggacttgtttcagattcagcatgtactgtgggtactattgatgcagaacagctctctgacacagactcagtgcagatgtttcttgaacttgaaaaggagtgtttatgtgaagaaggagtaactcctctagttgagctacagaatcaaatctcttctgaagggctggctgcatcccaggatgcagaaaatttactcgtaattagtcatttttcaggggctgccttagaaaaggaacagcatttaggccttttacatgtaagggcaaaagattatgatactagattggattgtggatattttaataccctggattcttctcaggtgcctaatgctgtggaacttattgcccacgttgatatcatgagagacacttccactgttagcaaggaggaatgtgaaaaagtgccttttagccccaggactgcagaatttaagtccagacagccagctgatctggattcactggaaaagctggacccaggaggactgctgaactctgatcacagggtttctcatgaagaaaaattatcaggcttcattgcttctgagctggccaaagacaatggcagtttgtcccagggagactgcagtcaaactgaggggaatggtgaggagtgcattgagagggtcaccttcagttttgcttttaatcatgaactaacagatgttacctcaggacctgaagtagaggtgttatatgaatcaaatttactaacagatgaaattcatttggaaagtgggaatgtaactgttaatcaagaaaataacagtctgacatcaatgggaaatgtggtcacttgtgaattgtctgtggagaaagtttgtgatgaggatggtgaggcaaaagagctggattatcaagccacacttttggaggatcaagctccagcacatttccacagaaacttcccagagcaggtcttccaggatctccagaggaagtccccagagtcagagattctgagtctgcacctgctggttgaagaactgagacttaatccagatggagtggaaactgtgaatgatacaaagcctgagctgaatgtggcatcatcagagggaggggagatggaaaggagagattcagattcattcctaaatatttttccagagaaacaagttaccaaggctggtaatactgaaccagttttagaggaatggatacccgtcctccagagaccttcccggactgctgcagtacccactgtcaaagatgccctagatgctgcactgcccagcccagaggagggtacctcaattgctgcagtgcctgccccagagggaactgctgtagttgctgctttagtgccctttccacatgaggacatcctagttgcttcaatagtctccttagaggaggaggatgtcacagctgctgcagtatcagccccagagagggctactgtcccagctgttacagtatctgtccctgaagggactgctgcagttgctgcagtgtcctccccagaggagactgctccagctgttgcagcagccatcacacaggagggtatgtcagctgtcgcagggttctccccagagtgggctgctttagctattacagtacccatcacagaggaggatggtacaccagaagggcctgtcaccccagctaccacagtgcatgctccagaggagcctgatactgcagctgtcagagtgtccaccccagaggagcccgcctccccagctgctgcagtgcccaccccagaggagcccacctccccagctgctgcagtgcccaccccagaggagcccacctccccagctgctgcagtgccccccccagaggagcccacctccccagctgctgcagtgcccaccccagaggagcccacctccccagctgctgcagtgcccaccccagaggagcccacctccccagctgctgcagtgcccaccccagaggagcccacctccccagctgctgcagtgcccaccccagaggagcccacctccccagctgctgcagtgcccaccccagaggagcccacctccccagctgctgcagtgcccaccccagaggagcccgcctccccagctgctgcagtgcccaccccagaggagcccgcctccccagctgctgcagtgcccaccccagaggagcctgccttcccagctcctgcagtgcccaccccagaggaatccgcctccgcagctgttgcagtgcccacccccgaggaatctgcctccccagctgctgcagtgcccaccccagcagaatctgcctcctttgcagctgtggtggccaccctggaggaacccacttccccggcagcttcagtgcccacccctgcagctatggtggccaccctagaggaattcacttccccggcagcttcagtgcccacctctgaggagcctgcctccctagcagctgcagtgtccaacccagaggagcccacctccccagcagcagcagtgcccaccctagaggaacccacctcctcagcagctgcagtgctcaccccagaggaactcagttccccagcagcttcagtgcccacccccgaggagcctgcctccccagcagctgcagtgtccaacctagaggagcccgcctccccagcagcagcagtgcccaccccagaggtggctgccatccctgctgcttcagtgcccaccccagaggtgcctgccatcccagctgctgcagtgcctcctatggaggaagtttcccccattggtgtgcccttcctgggagtttctgcccacactgactcagtgcctatttcagaagaaggaacacctgttctagaggaggcttcctccactggaatgtggatcaaggaggaccttgattccctagtatttggcataaaagaggtgaccagcacagtgctacatgggaaagtgcctctggctgcaaccgctggattaaattcagatgaggtaattgtccattttgattctgggaagggtctaaagagtaaagtgagatttgcagggctgacctggtggtga

SEQ ID NO: 24878 - DNA, 773 bp, Homo sapiens
  MAP TO AC008120.15; EXPRESSED IN HELA, SIGNAL = 0.36; EST_HUMAN HIT: AW673700.1, EVALUE 0.00e+00; SWISSPROT HIT: P10511, EVALUE 4.10e-01; NT HIT: gi13647848, EVALUE 0.00e+00
gagtattgttctgtcctccagtaaatgtattgaatgtgtgtaagggctgaatccctggtatagtgttgggaatcattgtaatggtgttgggtgtcattaagggaacatcatcaggtgacctcctcatagctagtgtgtaatctgggggacaggcggtccgaagaaccacctcatgtggatgaatggactcacattcatgatccaaatcagtgtgcttcatttggagggacatgatttcctcttcttgtgcatgggttagatcattggtagtagtgcgctgagggctgcatctcctgtgaacatcatgtctcctcttatcctttttgtagtacagggctgcaaaggccaagatgttcagaaacagcagtgatgctccaactgcaatagtgacactcagctctgttgagtagtccctttgatccactgaaaatggacttggttgttgtttgggatcatcctgcttggcagtgggaaaggctgacgtgacaggtacagaattttttctcgtaggtctgaaagtgatgtcagttgatggcactttagttgttgtagaggtatactgagaaatgtcattgagattatgcagatgaggtaccaactccaaccagaggttcaccttattggctctgtaatgttctttaactcttggttttaatccaatatggagataaagttggtctttctgggaatatctggtccatgctacttcttcaaaacggttgggtttggtatgaatgaatttcgtgtcttgagggactggttgatttgggtca

SEQ ID NO: 24879 - DNA, 502 bp, Homo sapiens
  MAP TO AC005343.1; EXPRESSED IN HELA, SIGNAL = 0.66; NT HIT: J03263.1, EVALUE 8.00e-46; SWISSPROT HIT: P11279, EVALUE 2.00e-38; EST_HUMAN HIT: BI868403.1, EVALUE 1.00e-45
ctgggcatgacctcagccagcgggagcgcggcgcccacctggagacccgggagcggcgcggcgagggcaccacggtcctgggcttccggttggggatgaatgcaggttctagccggattttcctacgaggaatccagctgaatacgactcttcctgaccccagagaccccacttttaaagctgccaacgactccctgcgagcattgcgggcagccatcggcaattctacagccggagcggagcgtgtccgcggcacgaaggcgttttcaatcaacatattcccagtgtggggccaggctttcaaggtggaaggcaaccagttcggatctgcggaggagcgtctgctgggcgagaacaacacgccgatccccatcgccgtcggcggcgccctggtgggactgggcctcctcgttctcatcgcccaccttgtcggcaggaagaggagtcacccgcacggcagcaggcacagagctgctggggtctctgttcatccccctgggct

SEQ ID NO: 24880 - DNA, 542 bp, Homo sapiens
  MAP TO AP000344.1; EXPRESSED IN HELA, SIGNAL = 0.67; NT HIT: AF207550.1, EVALUE 2.00e+00; SWISSPROT HIT: Q14814, EVALUE 1.80e-02; EST_HUMAN HIT: BG497591.1, EVALUE 1.00e-116
agcactgctcacgtggcagagctggaatgggggccgggcacacactccctggcccacgtgttccacggacgtgctgcagaggtccccggccctccagggcaggccctctctgcttccagaggggcaggtgagccccaggccaggccaggccagccggggtctggactggagtgcagtggccacaatggacgccgcgagtgtcttcattaagagtgagtgtctcagtctcccccagggcacccgccagccacatggccgctatgtgtgcagactagacaggtggcagctcgggccggccagacagagggagaggaagccagagcctgcgcgcaggcagcctcataaatatttccagccacagccaacgtgtcttactgacaatttgctttttaaaaaattgcgctctaattttaagtgagcagcccctaattacagtgatttacgaggtacctggggactgtgtgatatttgaacatggcagagggctgagcagagatggcagagatggatgggcccggtgccactcattcagcaggtcctgc

SEQ ID NO: 24881 - DNA, 527 bp, Homo sapiens
  MAP TO AL121656.1; EXPRESSED IN HELA, SIGNAL = 0.34; SWISSPROT HIT: Q00918, EVALUE 7.00e-14; NT HIT: gi9910585, EVALUE 1.00e-35
atggcgggggcctggctcaggtgggggctcctgctctgggcagggctcctcgcgtcctcggcgcacggccggctgcggaggatcacctacgtggtgcacccgggccccggcctggcagccggcgccttgcccctgagcgggcccccgcgttcgcggacattcaacgtcgcgctcaacgccaggtacagccgcagctcggcggctgccggcgcccccagccgtgcctcccccggggtcccctcggagaggacccggcgcacgagcaagccgggcggcgcggccctgcaggggctcagaccgccgccgccgccgccgccggagcctgcgcgtcccgcggtccccggcgggcagctccaccccaatcccggcggccacccggcagccgccccgttcaccaaacaaggcaggcaagttgtgcgctccaaggtgccgcaggagacccagagcggcggaggctctaggctgcaggttcaccagaagcagcagctgcaggggtaagcccacacccccttccgcccgcccgcccg

SEQ ID NO: 24882 - DNA, 545 bp, Homo sapiens
  MAP TO AC010422.6; EXPRESSED IN HELA, SIGNAL = 6.6; EST_HUMAN HIT: BI856151.1, EVALUE 0.00e+00; SWISSPROT HIT: P00558, EVALUE 1.00e-89; NT HIT: gi14759696, EVALUE 0.00e+00
aggaccattccacacaatctgcttagcctgagtgacagccccagcatacttcttgctgctttcagggccacagtccaagcccagccagccagcaggtatgccagaagccacagtggcttggccagtcttggtattctcatcaaacttgccagcagtgacaaagtcaacaggcaagataatcttcacaccattcttctcagctttggacattaggtctttgacagtcttggctccctcttcatcaaacagagaagtgccaatctccatgttgctgagcaccttaaggaaggtacaagccattccactaccaataatcatctcattgactttgcccagcatgttcttgatcagctggatcttgtctgcaactttagttctgcccaggatggccaggaagggtcgctctgggctctccaaggcctcggcaaagtagttcagctccttcttcatcaaaaaaccaccagccttctgtggcagattgacttctgccatggagctgtgggctctgtgagcagtgccaaaagcatcattgacatagacttccc

SEQ ID NO: 24883 - DNA, 582 bp, Homo sapiens
  MAP TO AP000553.1; EXPRESSED IN HELA, SIGNAL = 0.53; SWISSPROT HIT: Q05904, EVALUE 1.70e-01; EST_HUMAN HIT: BI831230.1, EVALUE 2.00e-26
tcccagagggactccctgctgtgggattcgctgggtagccagaccagctttcagtggacacaggagcagcccttgtcctggttctcagggctgctgggctcaagctctggcgtgcctgaagcatcagagccgaggcctggagaacaggagccaatcttccgcaagcgagagttcaataaggagatcaagtcattactgagccagctggagtccctcgacctgcctggctactgtccgctccgtgagccccatcgcacgctgaacttcctggctgaccaccgcctcttccctgccctgcaaagcgtggtcagccaggctgtggataagctccgtggcgcccactgccgcgacggccgtcctctgttccccaccagcttggagcccacctcagatctgccgcctctgggctctgagccagctaaacccaccaatggcgggcagccctatgcttccccccgccccacagtctccagccccaagatgcttcagagaaaacgcaaggacagaggaggctccccctccatgtctagtgcccaggtggccaccagattcaaactcaaggtgacacccacggagaagccc

SEQ ID NO: 24884 - DNA, 508 bp, Homo sapiens
  MAP TO AL035530.11; EXPRESSED IN HELA, SIGNAL = 0.28; SWISSPROT HIT: P08125, EVALUE 7.10e-01; NT HIT: AF314817.1, EVALUE 0.00e+00; EST_HUMAN HIT: BF928548.1, EVALUE 5.00e-88
atgtgtcgaccctgcagaatgactcagcctacgacagcaacgaccctgatgtggaatccaacagcagcagtggcatcagctctcccagcaggcagccccaggtgcccatggccacagctgctggcttggatagcgcgggcccacaggatgcccgagaggtcagcccagagcccattgtgagcaccgtggccaggctgaaaagctccctcgcacagcccgataggagatactcagagcccagcatgccatcctcccaggagtgcctcgagagccgggtgacaaaccaaacactaacaaagagtgaaggggacttccccgtgccccgggtaggctctcgtttggaaagtgaggaggctgaagacccatttccagaggaggtcttccctgcagtgcaaggcaaaaccaagaggccggtggacctgaagatcaagaacttggccccgggttcggtgctcccgcgggcactggttctcaaagccttctccagcagctcgctggacgcgtcctc

SEQ ID NO: 24885 - DNA, 1324 bp, Homo sapiens
  MAP TO AC010209.13; EXPRESSED IN HELA, SIGNAL = 1.6; EST_HUMAN HIT: BE891602.1, EVALUE 0.00e+00; SWISSPROT HIT: O43903, EVALUE 2.00e-10; NT HIT: gi9945329, EVALUE 2.10e-02
atgcttcatggaaaacatgtcatggttcgcgttggtggaggctgggatactcttcaaggatttttgcttaaatatgacccctgtcgaatattacagtttgccacattagaacaaaaaattttagcatttcaaaaaggagtttctaatgaaagtgtacctgattcgcctgccagaacacctcagcctcctgaaatgaatcctttgtcagcagttaacatgtttcagaaacaaaattcaaaacccagcgtgccagttagtattccaaaaagcaaagaaaaacagggacgtccaccaggtgcattggtgccagcatcttcactgaaaggaggtaatctgggctctatgtcagtccgttctaaattgccaaattctccagcagcatcttctcatcccaagctcaagtcttcaaaaggcataacgaagaaaccgcaggctccttcaaacaatgcatcatcttcacttgcttcattaaatccagtaggtaaaaacacttcttcaccagctttaccaagaactgcaccttgtatatctgagtcaccgagaaaatgtatttcatcccccaatacccccaaggccaaggttattccagcccagaattcagcagatctgcccgagtccacacttttgccaaataagtgttcaggaaaaactcaacctaagtatttgaaacataatcatatttcttccagagataatgcagtatctcacttagctgcacattcaaattcatcctcaaaatgtcccaagctgcctaaagcaaatatacctgtaagacctaaaccttctttccagtcctctgcaaaaatgacaaaaaccagttccaaaaccatagccacgggtctaggaacacagtctcaaccatccgatggagccccacaagcaaagccagtcccagcacagaaacttaaatcggccttgaatttaaatcagccagtttctgtgtcctcagtttctcctgtaaaagccacacagaaatcaaaagataagaatatagtttcagctaccaaaaagcagcctcagaataaaagtgcatttcagaagacaggacccagctccttgaagtctcctggccgtaccccactgtccatcgtgagcctaccccagtcttctaccaaaacacaaactgcaccgaagtcagcacagactgtcgctaagagccagcattcaactaaagggcctcccagaagtggcaaaaccccagcttcaatcaggaaaccaccctcatctgttaaggatgcagatagtggagataaaaaacctactgcaaagaaaaaggaagatgatgaccattattttgtcatgactggaagtaagaaacctagaa

SEQ ID NO: 24886 - DNA, 704 bp, Homo sapiens
  MAP TO AC005390.1; EXPRESSED IN HELA, SIGNAL = 0.54; SWISSPROT HIT: P70402, EVALUE 6.00e-03; EST_HUMAN HIT: BE880092.1, EVALUE 2.50e-01
atggaaaacaaccaatggggaagaaacccacggagccgctcaatccggcagccaatcacagccaccgctcaacctagcagccaatcacagccaccgctcaacccagtagccaatcacagccaccgctcaacccagcagccaatcacagccactcccagagacagctccacaccagctccacgcaaaaaacccacaaccacaagcgctgctgaggacgcggggcagtggcctgggaaccatcctgcagctcctcaaaagaggcgaatggggagtaacaacccagcagctgcactcccacgtgccatcaggaggacccacagctcacaaaagcctgaacctacagctcaggagtggacccacagcccacaggacccacagctcaagggtggactcacagctcacaggacccatagctcatgggtggacccacagctcataggcgcctggacccacagctcatgggtggacccacagcccataggacccacagctcacgggtggactcacagctcacgggtggactcacagctcacgggtggactcacagctcacaggtggacccacagctcacaggacctacagctcacgggtggactcacagctcataggcacctggacccacagctcacgggtggactcacagctcacaggacctacagctcacgggtggacccacagctcccgggtggaccctcagctcccag

SEQ ID NO: 24887 - DNA, 1259 bp, Homo sapiens
  MAP TO AC006162.1; EXPRESSED IN HELA, SIGNAL = 1.7; EXPRESSED IN LUNG, SIGNAL = 1.1; NT HIT: Z48051.1, EVALUE 0.00e+00; SWISSPROT HIT: P18749, EVALUE 2.00e-40; EST_HUMAN HIT: AW440310.1, EVALUE 0.00e+00
aaggcaagaagaaagagcttcgagaacaacatcccagtctgagagatgaggggactagtgatgacaaggtcttccttgcatgcagaggggccggccagtgccccctatctgccccagctgggactatggacaggacccgggtgcttcaagcatcccaggctgggccaccctttttttgctacacctgtggcaaatgtttcagcaggcgctcctacctctatagccaccagtttgttcacaatcccaagctgactaacagctgcagtcagtgtgggaagttgtttcggagccccaagtccctcagctatcacagacgcatgcatcttggggagaggcccttctgttgcacgctctgtgacaagacctactgtgatgcttctggactaagtcgtcaccgccgcgtccatctgggttaccggccccattcatgctctgtgtgtgggaagagcttccgggaccagtctgagctcaaacgccaccagaagatacaccaaaaccaggagccagtggatggaaaccaggagtgtactttgaggattccaggcacccaggctgaattccagacacccatcgccagaagccagaggtccatccaggggcttttggatgtgaaccatgcaccagtggccaggtcccaggaacccatatttagaactgagggtcctatggcccagaaccaggcatctgtacttaagaaccaagcacctgtgaccaggacccaggcacccatcactggaaccctctgtcaggatgccagatccaactctcatccagtgaagccctcaagactcaatgtcttctgttgcccccattgttctttgacttttagcaagaaatcctatctctccagacaccagaaggcccacctcacagagccgcccaactactgcttccattgcagcaagtctttcagctcattttccaggctggtcagacaccagcagacccactggaagcagaagagctacctttgccctatctgtgacctctcctttggggagaaagagggccttatggatcactggaggggctataaaggcaaggacctgtgccagagcagccaccataaatgccgggtgatcctgggccagtggcttggcttctctcatgatgtccccactatggctggggaggaatggaagcatggaggtgatcaatctccccccaggatccatacccccaggagaagaggcctaagagagaaggcctgcaaaggagacaaaacaaaggaggcagtgagcatcttgaaacataaataa

SEQ ID NO: 24888 - DNA, 966 bp, Homo sapiens
  MAP TO AL079302.4; EXPRESSED IN HELA, SIGNAL = 0.25; SWISSPROT HIT: P46804, EVALUE 1.00e-03; EST_HUMAN HIT: BF526096.1, EVALUE 0.00e+00; NT HIT: gi14748454, EVALUE 0.00e+00
gtcagctcggtgcccttccttggagctgccggccaccagcagagcctaccctcttcatggaaagcctcgtgcagtggccccctggtgatggcatccgacagtgatgtgaagatgctgctgaacttcgtgaacctggcgtccagcgacatcaaggcagccctggataagtccgcaccctgccgccgctccgtggaccatcgcaagtacctgcagaagcagctcaagcgcttctcccagaagtattcccggctcccgcggggccttcctggcagagctgctgagccctacctgaaaagggggtctgaggaccggcccaggaggctgctcctggatttgggccctgattccagccccggcgggggtgggggctgcaaggagaaggtgctgaggaacccctacagggaggaatgtcttgctaaggagcagctcccacagaggcagcatccagaagctgcccagcctggccaggtgcccatgaggaaaagacagctgcccgcttccttctgggaagagccaaggcccacccacagctaccatgtggggctggaggggggactgggccccagggagggacctccctatgagggtaagaaaaattgcaagggcttggagcccctgggacctgagactaccctggtgtccatgtctccaagggccctggctgaaaaggagccgctcaagatgcctggggtctccttggtgggccgcgtcaatgcctggagttgctgccccttccagtaccatggacagcccatctatccgggccccctgggggcactgcctcagagtcctgtccccagcctgggcctttggaggaagagcccagcctttcccggggagctggcgcacctctgcaaggatgtggacggcctggggcagaaggtgtgcaggcccgtggtgctgaaacccatccccaccaagccagccgtgcccccacccatcttcaatgtctttggctacctctag

SEQ ID NO: 24889 - DNA, 562 bp, Homo sapiens
  MAP TO AC021287.4; EXPRESSED IN HELA, SIGNAL = 0.68; SWISSPROT HIT: P48997, EVALUE 5.80e-01; EST_HUMAN HIT: AW868740.1, EVALUE 1.00e-108; NT HIT: gi14732352, EVALUE 0.00e+00
atgcctgactcccaaagaggacgcgtggcagaagagctgatcttaagggagaaggtagaagcggtacagcctgggcctgtggttgagctgcaactgtccctttcacaggagagacataagggcgctagtggccctttagtggctctcccgggagctgaaaaatctaagtctcctgacccagaccctaacttgtcacatgacaggattgtccacataaattcgatccctactaatgagaaagcagaccctttcctgaggtccagcaagataatccagatctccagtggcagagagttgagagtgatccaggaaagtgaagcaggagatgcgggactgccccgggtggaagtgatcctcgactgctctgacaggcagaagacagaagggtgcaggcttcaggcaggaaaggagtgtgtggattctccagtggaaggagggcagtcagaagcacctccttctctggtatcctttgccgtctcatcagaaggcacagagcagggagaagatccacgctcggaaaaagatcacagcagacctcacaagcaccgagcgcggcatgcac

SEQ ID NO: 24890 - DNA, 664 bp, Homo sapiens
  MAP TO AL022313.1; EXPRESSED IN HELA, SIGNAL = 0.95; SWISSPROT HIT: O87278, EVALUE 5.00e-03; EST_HUMAN HIT: BG824341.1, EVALUE 0.00e+00; NT HIT: gi13376440, EVALUE 0.00e+00
ctgatgcacctggcccttctggtcagttaggatgaagtagtggccattccaggcctgtcggtccttgtccagagtgacgtgggcgatggtggtgttgtactggacacggagccccagcgtgtccgcgaagtcacccaggtagcgcaccatgtcgcgggcgtcggggaagtaggcacgcgagtagtgtctgaagagcagccgggggtcgtggctgagcagagagttccagtcgtggcggaggttgaactcggcgttagccttgcccgtgtaccgcttgttgatgctgatgagcttgcggtgccgcgggtagcgtgtgaagaagctgccgggccgcggggcccgctcgaacactgcgtagtcgcgtccagcgcgctgcaggaagtaggccatctgcaggcccgcgggcccagcgcccagcacgcagtagtcccggcgcgggggcaccgacagcgctgggtgcagggcgatggccaggagcagccccgggggaccccacaacggggccgcagcggagaggcccatcctgcagcagatcagaggggtaaggcctcgcacccggcccggcggctgggagacacgaggcccagaaagaggcggggcctgcgggaactctcactgcaatctgggtcacggccaggcccagaagccgtcctcagagctcatt

SEQ ID NO: 24891 - DNA, 646 bp, Homo sapiens
  MAP TO AC011298.2; EXPRESSED IN HELA, SIGNAL = 0.83; SWISSPROT HIT: O70441, EVALUE 5.70e-01; EST_HUMAN HIT: BI836869.1, EVALUE 0.00e+00; NT HIT: gi15595198, EVALUE 9.70e+00
gtgtcctgcaggcacagcatctcggggggcccaggccgatggcaggtcttaacgtgtccctctccttcttctttgccaccttcaccctctgtgaggcagccaggcgggcctccaaggccctgctcccagtgggcgcctatgaagtcttcgcccgggaggcggtgggcgcggtgcagctcggggcctgcttcctggagatgaggacgctggtcgagctcgggccctgggctggggactttgggcctgacctgctgctcaccctgctcttcctgctcttcctggcgcacggggtcaccttggacggggcctcggccaaccccaccgtgtccctgcaggagttcctcatggccgaggagtctctgcctggcacgctgctgaagctggcggcacaggggctgggcatgcaggccgcctgcaccctgacgcgcctctgctgggcctgggagctcagtgacctgcacctgctgcagagcctcatggcccagagctgcagctcggccctgcgcacatccgtgccccacggggcgcttgtggaggccgcctgcgccttttgtttccatctgaccctcctgcacctgcggcacagtcctcccgcctacagcgggctccgctgtggctctgttggtcaccgtcacggcctacacgg

SEQ ID NO: 24892 - DNA, 576 bp, Homo sapiens
  MAP TO AL023753.1; EXPRESSED IN HELA, SIGNAL = 0.81; EST_HUMAN HIT: BE409930.1, EVALUE 1.30e-02; SWISSPROT HIT: O95522, EVALUE 1.00e-112; NT HIT: gi15295051, EVALUE 2.00e-09
ctgagcagctggtccaggtggccttcgaggaaagagacagagtgcatgtaaagcttctggaagtagtccagcttgaggaactgagaggtgaactggatgacaaactgctccttcctgtctaggggaatgcaggcagagacatggatgttgaagagaacaagtttgcggagattcctcatctggcccaggtaaggggcgaaccttataagaatggacagctcccacgggcagcacacttccacctcctggatacagtctagctccaccgtgttcaggacctctatgatcctgtggatggctattccaaaaatctgcagctccttgcaacacacgtgcagtaagccttttctctgcttgccccactctaagaagtgggtgaggcattcatccagcatcccattcttgaagcaaaggtctaggatcaccatcaagggctgctgcccacccggccttggacagttccctgctgttcgtctcttactcagggcctctggggagagtgcagaagctccagaccatatgccccagaagttctcatccacattccgcaagtccaacacttgaagtttccaccgc

SEQ ID NO: 24893 - DNA, 765 bp, Homo sapiens
  MAP TO AL022319.2; EXPRESSED IN HELA, SIGNAL = 1.9; SWISSPROT HIT: Q9Z0Y8, EVALUE 7.00e-22; NT HIT: gi10863882, EVALUE 0.00e+00; EST_HUMAN HIT: BF879321.1, EVALUE 7.00e-76
tttccttacctgcaaaatgggaagatggccctaacttgctgtaccttcctcaagggaagtgaggtggcaggaggggatgtaacctccgggtggatgtgcccccatgtccctgtggatgtggatggagtgaggtgggacagggagaggagctctagggtcaagcccattccatcacccgctggccaggtgggtggtcttagagccacagcgggggtgcaggctgcctttgggcacctggtgccccagccgtgggtgtgcctgtggggcgctgacccgaacgggaactccttccagtccagctcccggagctcctactacgggccatggggccgcagcgcggcctgggccagccgtcgctccagctggaacagcctcaagcacaagccgccgtcggcggagcatgagtccctgctctctgcggagcgcggcggcggcgcccgggtctgcgaggttgccgcggacgaggggccgccgcgggccgcacccctgcacaccccacacgcccaccacattcatcacgggccccatctggcgcaccgccaccgccaccaccgccggacgctgtccctcgacaacagggactcggtggacctggccgagctggtgcccgcggtgggcgcccacccccgggccgcctggagggcggcaggcccggcccccgggcatgaggactgcaatggcaggatgcccagcatcgccaaagacgtcttcaccaagatgggcgaccgcggggatcgcggggaggatgaggaggaaatcgactac

SEQ ID NO: 24894 - DNA, 490 bp, Homo sapiens
  MAP TO AL022327.17; EXPRESSED IN HELA, SIGNAL = 0.35; SWISSPROT HIT: P38160, EVALUE 5.00e-04; EST_HUMAN HIT: BE827753.1, EVALUE 3.00e-06; NT HIT: gi14726145, EVALUE 8.00e-09
ctgcctccacaggagctcgaagttgccgatgtcacagctgcggtccacggccaccttgatggtgtcctcctgcacctgtgcacacagctgggccgtgaccggcgtggacgggtgcatggtggggctggaattgatctcgatcagccagggcctgaagtccctcccaaggacgaagtcagccccgtagagctcaaagctgttcttgcgaggctccacgtggtcctgggccaccttcatggcgtgggcgatggccttcttcatggacgggtagatgacgctgccccacacggcgccacggccctggcgctgcaggtactcctggaacctggtgctggtccacatgttgtgtgcgggcagcagggggctgcggcccacatcattcttcaggtacttctggacggcgttgttgcacaggtggatggcgctgcaggggggacgaggggcaggtgctcagcctcccttggcccaggagggcacccaaggccggtcc

SEQ ID NO: 24895 - DNA, 482 bp, Homo sapiens
  MAP TO AL035701.13; EXPRESSED IN HELA, SIGNAL = 1.1; SWISSPROT HIT: P55316, EVALUE 1.50e+00; EST_HUMAN HIT: AI356405.1, EVALUE 1.70e-01; NT HIT: AL163203.2, EVALUE 2.90e-02
gctactaaagtggtcagacaaggaggatttggtcatgatggagtccgcagagaggggatgagaagggaagaaactagacccaccgtgaataaggaaggacttgggccaggtgaaggtcatttctgagagtcaggtgctggggttgggtcccaacctaagtaagatgacagtgccagggcagagcagtaggggcagggagaggatgaagcaggggaagccctgcctcaaagcttgagggtatttagttcatcctatcatattgttttggtgtaatggtggtgtttgggtgctcaatttctttattaagtttatttaaataaacctatcaaacaagatggtttcagtgaagaagattccatctgtctcagttttgcaatatttaatgtccccttttgtgttttccttcctcatctcctctaagtaataaaacaacatagatgaattttacccaagctcctctaggacctcttccagattgtata

SEQ ID NO: 24896 - DNA, 1180 bp, Homo sapiens
  MAP TO Z84483.1; EXPRESSED IN HELA, SIGNAL = 2.2; SWISSPROT HIT: Q01643, EVALUE 1.60e-02; EST_HUMAN HIT: BE275645.1, EVALUE 0.00e+00; NT HIT: AL049801.1, EVALUE 0.00e+00
agccaggttccccaaccaatgtatcatgagtttgcagttcaggcaagacatctttggaccagtcatcgactacctcttggagcccattgacatgctgcagaatgtcatccaagtgagggaaaaggtcatctttctccaagtccaaaagatctcctgtgctggcatacagatgggagccagggacattgtcatagatactgactcggctggctctgtggcaggacgccatgagccggggctccctggcaccagggacctgctctctgcccagggagatgctaccggtcctccaattaaccccattgctactatctgtgggagagaggctttcaatagaaagtgccttggggaatgttcctggtttgtgatccttgggaatatgcaccaccaaattctcttgggagtgaaactcatgcatacggctttggtcccctgcatccggcagtgctgtccccgccagcacatctaggtcctccaagtacatgcccccgcgcttgttggcctcgtggcacttgcgttccttcaggcagggcgtgctcaccccgctgctgctgtgctccgacgggctgctctcgccactcgacttgccagagcatgggagcccttttctgcaggcaggtggcggcgaattctggagatctccatttggtatttggatgcactgcatagccttaaaggactctggctcctgctgcaacatgggcccactgatcaccaggccacctgtccgcccagaccccttatgcctcccgtgggctcccttccctcggagtgtttccatgcgtttcaaaaatgatttggccctagccctcgtgggcttctcattcttggggtggaaggggtggttgaggacatctctggggggctgtgggaggctgctgctgacgagtggggcatccagcatgaccgggttgtctgtacagcactggcccggctggctgcgactgtcgctgcctccactgctttcgctgtgaatggagcagacctcaggctcgctcaggtctgtgaggacgctctcactgctggtcgtgttcctcatccccgtgcctcccggtgacccatttctgtctcctcgagggagcagcgtgtagaggtcgtccacacgagaccacctgcgactggttctttggaaagtccatttgttgctgatacaaagatcttcctcatcggagtcgtcacc

SEQ ID NO: 24897 - DNA, 1156 bp, Homo sapiens
  MAP TO U80017.1; EXPRESSED IN HELA, SIGNAL = 0.91; SWISSPROT HIT: Q13075, EVALUE 0.00e+00; EST_HUMAN HIT: BG393459.1, EVALUE 0.00e+00; NT HIT: gi14728855, EVALUE 0.00e+00
tttaatgatgatgatctcgcagaagcaggggttgatgaagatgaagatctaaccatgtgcttgatgagcaaatttacagcccagagactaagaccattctaccggtttttaagtcctgccttccaagaatttcttgcggggatgaggctgattgaactcctggattcagataggcaggaacatcaagatttgggactgtatcatttgaaacaaatcaactcacccatgatgactgtaagcgcctacaacaattttttgaactatgtctccagcctcccttcaacaaaagcagggcccaaaattgtgtctcatttgctccatttagtggataacaaagagtcattggagaatatatctgaaaatgatgactacttaaagcaccagccagaaatttcactgcagatgcagttacttaggggattgtggcaaatttgtccacaagcttacttttcaatggtttcagaacatttactggttcttgccctgaaaactgcttatcaaagcaacactgttgctgcgtgttctccatttgttttgcaattccttcaagggagaacactgactttgggtgcgcttaacttacagtactttttcgaccacccagaaagcttgtcattgttgaggagcatccacttcccaatacgaggaaataagacatcacccagagcacatttttcagttctggaaacatgttttgacaaatcacaggtgccaactatagatcaggactatgcttctgcctttgaacctatgaatgaatgggagcgaaatttagctgaaaaagaggataatgtaaagagctatatggatatgcagcgcagggcatcaccagaccttagtactggctattggaaactttctccaaagcagtacaagattccctgtctagaagtcgatgtgaatgatattgatgttgtaggccaggatatgcttgagattctaatgacagttttctcagcttcacagcgcatcgaactccatttaaaccacagcagaggctttatagaaagcatccgcccagctcttgagctgtctaaggcctctgtcaccaagtgctccataagcaagttggaactcagcgcagccgaacaggaactgcttctcaccctgccttccctggaatctcttgaagtctcagggacaatccagtcacaag

SEQ ID NO: 24898 - DNA, 598 bp, Homo sapiens
  MAP TO AC010271.5; EXPRESSED IN HELA, SIGNAL = 0.64; EST_HUMAN HIT: BG720189.1, EVALUE 0.00e+00; SWISSPROT HIT: O70622, EVALUE 2.30e-01; NT HIT: gi16178011, EVALUE 0.00e+00
ggcatcatggtgggaggcttgaagaggaaacactctgatttggaagaggaggaggagaggtgggagtggagtccagcaggccttcagagctaccagcaagccctgctccgcatctccctagacaaagtccagcgcagcctgggcccccgagcacccagcctccgcaggcatgtcctcatccataacaccctccaacagctgcaggctgcacttcgcctggctcccgcccctgccctgcccccccgagcccctcttcctgggcgaggaggatttctccctgtcagccaccattggctctatcctcagggagctggacacctccatggatgggactgagccccctcagaatccagtgactccccttggcctccagaatgaagtgccaccccagcctgatccagtcttcttagaagctctgagctcccggtacttgggggactctggcctggatgacttctttctggacattgacacatctgcggtagaaaaggagcctgcacgggccccaccagagcctcctcacaacctcttctgtgccccaggttcttgggagtggaatgaactggatcacatcatggaaatcattctggggtcctaa

SEQ ID NO: 24899 - DNA, 542 bp, Homo sapiens
  MAP TO AL133354.8; EXPRESSED IN HELA, SIGNAL = 0.38; SWISSPROT HIT: O46501, EVALUE 2.00e-05; NT HIT: gi14771753, EVALUE 0.00e+00; EST_HUMAN HIT: BI461403.1, EVALUE 0.00e+00
ttatttcaccgtgagccagatcaaagccagaaggcagaggagcactggctggtgcatggtgacccgaagtcctgcgcccctctccaaccaaaactcgcaatgcttgagggagcagagctcctggaccagccgccagagcacctgctggtggagcttgttgtctggcttctggaactccccctggttcgccgcctgggtggcattgatgcagccggtgacaaatgcctccttggtcacattagcctcagagcagccgttgtagtggatgccatcggggaactgccagtagttggcctcgtagtacctgttgccctcggctccgaagtcaatgtcgagcttgcggccttgcttgatgaaggctcccgggcggttctcagccacctgggcctcagtgatctgggcagtgctgggcagggccttccggttccacttgattctgtgcttgatgcccctcgtctggaccgcagagaggtggctgaagagcagcatgcagacagtggccagccaccaccagctcaggtgcttcctcatcgcgtcagaac

SEQ ID NO: 24900 - DNA, 674 bp, Homo sapiens
  MAP TO AP000517.1; EXPRESSED IN HELA, SIGNAL = 0.96; NT HIT: gi14761275, EVALUE 0.00e+00; SWISSPROT HIT: Q02084, EVALUE 3.00e-14; EST_HUMAN HIT: BE900982.1, EVALUE 0.00e+00
tgagcgtcaccctggacccacagtcggccagtgggtacctgcagctgtcagaggactggaagtgcgtgacctacaccagcctgtacaagagtgcctacctgcacccccagcagtttgactgtgagcctggggtgctgggcagcaagggcttcacctggggcaaggtctactgggaagtggaagtggagagggagggctggtctgaggatgaagaagagggggatgaggaggaagagggagaagaggaggaggaggaagaggaggccggctatggggatggatatgacgactgggaaacggacgaagatgaggaatcgttgggcgatgaagaggaagaagaggaggaggaagaggaggaagttctggaaagctgcatggtgggggtggctagagactctgtgaagaggaagggagacctctccctgcggccagaggatggcgtgtgggcgctgcgcctctcctcctccggcatctgggccaacaccagccccgaggctgagcttttcccagcactgcggccccggagagtgggcatcgccctggattatgaagggggcaccgtgactttcaccaacgcagagtcacaggaactcatctacaccttcactgccaccttcacccggcgcctggtccccttcctgtggctcaagtggccaggaacacgcctcctgcta

SEQ ID NO: 24901 - DNA, 1010 bp, Homo sapiens
  MAP TO AC007663.28; EXPRESSED IN HELA, SIGNAL = 0.46; SWISSPROT HIT: Q28084, EVALUE 6.50e+00; NT HIT: U13008.1, EVALUE 3.90e+00; EST_HUMAN HIT: BE409401.1, EVALUE 5.70e+00
ttaaagatgagaacacttggtgcaggaaacaagagaggaaagggagtgcggtccctccttgcaaacaggatgccctggaccaccctccacggcctcaggcctggatgctcctgcagacccatagccaagattgtgaaggaaaagtaggctgtggaggcattttctgtccttgttatcatcattgtaaacatactcatcatcaccatcaccatcctcatcaccatcaccaccactatcaccaccataatcatcagcagcagcatcatcaccatcatcaccaccactatcatcattaccatcctcattaccatcactatcaccaccatcatcttcatcaccatcctcatcaccatcaccatcctcaacaccatcctcaacaccatcatcaccatcactatcatcatcaccatcaccatcctcaacaccatcatcaccatcactatcaccaccactatcatcctcatcaccatcctcatcaccatcaccagcctcaacaccatcatcaccaacactatcaccatcattatcatcatcaccatcctcatcaccctcaccatcctcatcaccatcatcactatcactatcaccaccatcatcatcaccactatccttatcaccatcatcatccccaggcgaccagagcagcaccatccttatcctcatcactatcaccatcaccatcaccatcatcaccatcctcatcctcatcaccatcatcccatcactatcatcaccatcctcatcacaatcactatcatcaccatcaccatcctcatcatcaccatcgtcctcatcaccatcaccgccatcagcatcctcatcactatcatcatcaccatcctcatccctgtcaccatcatcgtcttcatcatcatcaccgtcatcatcactatcatcacaccagctctgtgcaaggcccttagataaagggcagcctggggctgacctcacacaaggataggaagccccaggtgagcaatgggtcagtactgggtcgacaccagatatcc

SEQ ID NO: 24902 - DNA, 765 bp, Homo sapiens
  MAP TO AP001067.1; EXPRESSED IN HELA, SIGNAL = 0.84; SWISSPROT HIT: O75690, EVALUE 4.00e-05; NT HIT: AL163300.2, EVALUE 0.00e+00; EST_HUMAN HIT: BF057369.1, EVALUE 3.00e-75
atgaaagctcagcattgctggctggaggtgcagtggctatgggcagaggagactcagacagggctcagggctgcaaggattttcggaagtcagagatggccctggaacaactctggagaaacgggacctgcccgtcagcagctggacttctggcctgaggagaggccgcagcacgcggaagagaggcgggagcacgtggggcggcagaggagggacacgcaggaggccgggcggcagcagctgggctggcaggtggaggcaggggcacagcaggaggggatgggcacacagcaggtggacctgcacacggggcggcagaggagggacacggaggaggagggtctgcagcaggaggtggtgcagcaagccggctggcggctagactgctggcagcatgaagaggaagccccagagcagacgggcacacagcagatgggcttgcagcagacaggcttgcagcagacgggcacacagcagactggcttgcagcagacaggcacgcagcaggcctgctggcagggggaggatgtgcagcaagctggctggcagctagactgctggcagcacgagggcgtgcaggagctggtgcagcctgactggcaggggctgggctcacaggccgcctggcagcaggggctggacacacagctcactggggtgcagaccagggtcaggcagggggccggggcgcagcagctggtggcgcagcaggggggctcacagcagctctctgggcaggcgtccacctgccaggagtcagagtaa

SEQ ID NO: 24903 - DNA, 794 bp, Homo sapiens
  MAP TO AL033539.17; EXPRESSED IN HELA, SIGNAL =   1; SWISSPROT HIT: P51858, EVALUE 6.00e-54; NT HIT: AJ237666.1, EVALUE 3.00e-65; EST_HUMAN HIT: BI828668.1, EVALUE 0.00e+00
atgtcggcctacggcatgcccatgtacaagagcggggacctggtgtttgccaagttaaagggctatgcccactggccggcgaggatagagcacatgacccagcccaaccgctaccaggtgtttttcttcgggacccacgagacggccttcctgagtcccaaacgcctgttcccgtacaaggagtgcaaggagaagttcggcaagcccaacaagaggcgcggcttcagcgcggggctgtgggaaatcgagaacaaccccacggtccaggcctccgactgcccattagcctcagagaagggcagcggagacgggccttggccggagcccgaggccgcagagggcgacgaggacaagccgacccacgctggtggcggcggcgacgaattggggaagccggacgacgacaagcccactgaggaggagaaggggccgctgaagaggagcgcgggggacccgccggaggacgcccccaaacgacccaaggaggcagcccccgaccaagaggaggaggcggaggcggagagggcggcggaagcggagagggcggcggcggcggcggcggcgacggccgtcgacgaggagagtccgttcctcgtggcggtggagaacggcagcgcccctagcgagccgggcctggtctgcgagccgcctcagccagaggaggaggagctccgggaggaagaagtcgcggacgaggaggcctcccaggagtggcatgccgaggcaccgggcggcggagatcgcgacagcctgtagttaccagcgtttccagaagagcccctgccccgttcctg

SEQ ID NO: 24904 - DNA, 1241 bp, Homo sapiens
  MAP TO AC005803.1; EXPRESSED IN HELA, SIGNAL = 1.2; NT HIT: L01983.1, EVALUE 0.00e+00; EST_HUMAN HIT: BE298432.1, EVALUE 0.00e+00; SWISSPROT HIT: P35499, EVALUE 0.00e+00
ctagacaagagactccttgacacctgggcgcacagtctgccctgggggaggggcgggaggccaggcagtgtctgaggggctgatgggcatcagccccatagtgggtccggcgtcccctgcctcgcccttctcctccgggcttggcgagctgctgttcccattctcgtggccatacatcttgctcatggtgttggcaagcagcccctccttctcaggggcgtcatccccgctgccgtcgtggctgtggcggtacatgtaggatgcctgcttcatggagcgctgtagcaggtgccggcggtaggccctctggatcttgatggcgcacacctcctcgtgcttcctcttgagggtggtggtgatgggctcgtaggacaccttggaggggttggctgccatgaacttctcctccatggtctgcttgagggcgtccatttccccagagtcacccaggacctctttggtcagggcaaagaggatgtccaggcagtggatcttgtcccctggcaccatgggcaagtccagtgtgatgagcttgatcttgttgggcttggcaatcctcagcggttcctgcagggtgtccacgaagtctgagaggcggctgtaggcgatgaactgggtggcgtcggggtcgaacttctcccatgtctcgtagaacatctcaaagtcatcttcaccaaggggctcgctgctctcctctgtggccacattgaagttctccaggatgatggcgatgtacatgttgaccacgatgaggaaggagatgatgatatagctgcagaagaagcagatgccgatggaggggttgccgcagtcacccttgacactggtgcccgggttctccaggttggggtcacagtctgggggcccgctgttgaggatggggttgaggagcccgtcccagccggccgacgtggtgatctcgaacaggcagatgatgctgttgccgaaggtctcgaagttgaacatatcatcgatgcccgactccttcttgacgtaggcaaagttggacatgccgaagatggagtagatgaacatgaccaggaagaggaggaggccgatgttgaagagggcaggcagcgacatcatgagggcgaacagcagcgtccggatgcccttggccccgcggatcagccgcaggacacgcccaatccgcgccaggcggatcacacggaacagcgtgggtgacacgaagtacttctggatcaggtcagagagggcaaggcctgcggggagaagctagt

SEQ ID NO: 24905 - DNA, 567 bp, Homo sapiens
  MAP TO AC004201.1; EXPRESSED IN HELA, SIGNAL = 1.2; EXPRESSED IN LUNG, SIGNAL =   1; SWISSPROT HIT: P14373, EVALUE 2.00e-10; NT HIT: gi15304583, EVALUE 0.00e+00; EST_HUMAN HIT: BG386787.1, EVALUE 0.00e+00
atgtggtggagagatttgacgagactgagactctggttgaagagagaggcaatcccaggagaggggcggaaagcggcaaaagttaatgcgggagtcggagagaagggcatctacacagcaagcagcaggggcggcccgccatctgcgcgctcgaaggcggtcacggtggtcgcggaaggggcggcgtccagatcctggctttccatggatgcgcccgagctgggcccggggctggtggagcgtctggagcagctggcgacgtgtcctctgtgcgggggctccttcgaggacccggtgcttctggcgtgcgagcacagcttctgccgcgcgtgtctggcccgccgctgggggactccgccggcgaccggcaccgaggcttcccccaccgcctgtccctgctgcggcctgccgtgtccccgccgcagcctgaggtctaatgtgcggctggcggtggaggtgcgaatcagccgcgagctgcgagagaagctggctgagcctggggcccgtgcggggagacgccgaggggggcgcatccccaccatgggctgcctggacctgcccggagag

SEQ ID NO: 24906 - DNA, 2637 bp, Homo sapiens
  MAP TO AP000557.1; EXPRESSED IN HELA, SIGNAL = 0.56; EST_HUMAN HIT: BG723046.1, EVALUE 0.00e+00; NT HIT: gi14777593, EVALUE 0.00e+00; SWISSPROT HIT: P19706, EVALUE 7.00e-03
gttcccgctcgcttgacagcacccggagcctccccaaggcctccaaatccgaggagcggccctcctcaccagacacctccacccctggctcccggaggctctcgccgccaccatcgccactcccgccgccaccaccaccgtcagcccacaggaaactcagcaacccgcggggaggagaaggctctgagagccagccctgcgaagtcctgactccctcacccccgggcctgggccaccacgagctgataaagctgaactggctgctggccaaggcgttgtgggtgctggcgcgccgctgttataccctgcaagaggagaacaagcagctgcggcgtgcaggctgcccctaccaggcagacgagaaggtgaagcggctcaaggtaaagcgcgcggagctgaccgggctcgcgcggcgcctagctgaccgcgcccgcgagctgcaggagaccaacctccgggccgtgagcgcgcctatacccggcgagagttgcgccggcctggagctgtgccaagtctttgcccgccagcgcgctcgggacctgtcggagcaggcgagcgcgccgctggccaaggacaagcagatcgaagagctgcggcaggagtgccacctcctgcaggcgcgtgtcgcctcgggtccctgcagcgacctgcatactggaaggggcggcccctgcacccagtggctcaacgtcagagacttagaccgcctgcagcgcgagtcccagcgggaagtgctgcgcctgcagaggcagttgatgcttcagcagggcaacggtggcgcttggcccgaggcgggcggccagagcgcaacctgcgaggaggtgcgacggcagatgctggcgctggagcgcgagctggaccagcggcggcgcgagtgccaggagctgggcacgcaggcggccccggcgcggcgacgtggcgaggaggccgagacacagctgcaggcggcgctgctcaaaaacgcctggctggcggaggagaatgggcggctgcaggccaagaccgactgggtgcggaaggtggaggctgagaatagcgaagtgcgcggccacctgggccgcgcgtgtcaagagcgcgatgcctccggcttgatcgccgaacagctgctgcagcaggcggcgcgcgggcaggacaggcagcagcagctgcaacgcgacccgcagaaggccctgtgtgacctccatccttcctggaaggagatacaggcgctccagtgtcggcctggtcaccctcctgaacagccctgggagaccagtcaaatgccggagtcccaagttaaaggtagcagaaggcccaagttccacgcacggcctgaagactacgcagtgtcacagcccaacagagacatacaggagaaaagggaagcctccctcgaggagagcccagttgcccttggggagtcagccagtgtcccccaagtttcagagacagtccctgccagccaacctctgtccaagaaaaccagctcccagtcaaactcctcctctgaggggtcgatgtgggccaccgtgccgtcctcccctactctggacagggacacagccagtgaggtggatgacctggagcctgacagcgtgtccctggccctggaaatggggggctcggcggctcctgctgcccccaagctcaagatcttcatggctcagtataactacaacccatttgaggggcccaatgatcaccctgagggtgagctgcccctcacagctggggactacatatatatcttcggggacatggatgaggatggcttctatgagggggagcttgacgatggccggcgggggctggtgccctccaacttcgtggagcagattccggacagctacatcccaggctgcctgcctgccaaatcccctgatcttggccccagtcaactcccagcggggcaggatgaagctctggaggaagacagcttattatctgggaaagcccagggaatggtggacagagggctgtgccagatggtcagggtgggctccaagacagaagtagcaacagagatcctggataccaagacggaagcctgccagctgggcttgctgcagagcatggggaagcagggcctctccagaccccttctggggaccaaaggggtgctccgtatggctcccatgcagctacacctgcagaatgtcacagccacatcagccaacatcacctgggtctacagcagccaccgccacccccatgtggtatatcttgatgaccgagagcatgccctgaccccagcgggcgtgagctgctacaccttccagggcctgtgccccggcacgcactaccgggtgcgggtggaggtgcggctgccatgggacttgctgcaggtgtattggggaactatgtcctccaccgtcaccttcgacacactcttggcaggacctccctacccaccgctggatgtgctggtggagcgccatgcctcgccaggtgtcctggtggtcagctggctccctgtgaccattgactcagctgggtcctccaatggagtccaggtcaccggttatgctgtgtatgcagatgggcttaaggtttgtgaggtcgccgatgccactgctgggagcaccgtattggaattctcccagctacaggtgcccctcacgtggcagaaggtctcagtgagaaccatgtcactctgtg

SEQ ID NO: 24907 - DNA, 608 bp, Homo sapiens
  MAP TO AC004908.1; EXPRESSED IN HELA, SIGNAL =   1; NT HIT: gi16176192, EVALUE 7.00e-10; EST_HUMAN HIT: BF845120.1, EVALUE 0.00e+00; SWISSPROT HIT: P52742, EVALUE 1.00e-75
ggagataaaccatatggatgtctcctatgtgggaaggctttcagtaaatgttcttaccttagacaacatgaaagaactcacaatggagagaaaccatatgaatgtcatctatgtggaaaagccttctctcattgttctcaccttagacaacatgagcgaagtcacaatggagagaaaccacatggatgtcatctatgtgggaaagcattcactgaatcttctgtgcttaaacgacatgagagaattcacactggagagaaaccatatgagtgccatgtatgtgggaaagccttcactgaatcttctgacctcagacgacatgagagaactcacactggagaaaaaccatatgaatgccatctatgcggaaaagccttcaatcactcttctgtccttagacgacatgagagaactcacactggagagaaaccatatgaatgcaatatatgtggtaaagccttcaatagaagttacaactttagacttcatagaagagttcacactggagagaaaccatatgtatgtcctctatgtgggaaagcctttagtaaattttttaaccttagacaacatgagagaactcacactaaaaaagcaatgaatatgta

SEQ ID NO: 24908 - DNA, 663 bp, Homo sapiens
  MAP TO AF196970.1; EXPRESSED IN HELA, SIGNAL = 1.8; EST_HUMAN HIT: BG396919.1, EVALUE 0.00e+00; NT HIT: gi14759669, EVALUE 0.00e+00; SWISSPROT HIT: P45975, EVALUE 3.00e-23
gaacaggaatattacctggtgaaatggcgtggatatccagactcagagagcacctgggagccacggcagaatctcaagtgtgtgcgtatcctcaagcagttccacaaggacttagaaagggagctgctccggcggcaccaccggtcaaagaccccccggcacctggacccaagcttggccaactacctggtgcagaaggccaagcagaggcgggcgctccgtcgctgggagcaggagctcaatgccaagcgcagccatctgggacgcatcactgtagagaatgaggtggacctggacggccctccgcgggccttcgtgtacatcaatgagtaccgtgttggtgagggcatcaccctcaaccaggtggctgtgggctgcgagtgccaggactgtctgtgggcacccactggaggctgctgcccgggggcgtcactgcacaagtttgcctacaatgaccagggccaggtgcggcttcgagccgggctgcccatctacgagtgcaactcccgctgccgctgcggctatgactgcccaaatcgtgtggtacagaagggtatccgatatgacctctgcatcttccgcacggatgatgggcgtggctggggcgtccgcaccctggagaagattcgcaagaacagcttcgtcatggagtacgtgggagag

SEQ ID NO: 24909 - DNA, 469 bp, Homo sapiens
  MAP TO AC003108.1; EXPRESSED IN LUNG, SIGNAL = 1.3; EXPRESSED IN HELA, SIGNAL = 1.3; EST_HUMAN HIT: AL043539.1, EVALUE 0.00e+00; NT HIT: gi11432440, EVALUE 0.00e+00; SWISSPROT HIT: O43303, EVALUE 7.00e-89
ttaacatccgatgagagaggcgcacacataatgaacagtacctgtgctgcgatgccaaagctgcatgaaccatatgccagcagtcagtgtatagcaagtccaaactttggaactgtgagtggactcaagccagccagtatgttagagaaaaactgcagtttgcaaacagaactgaataagtcttatgatgtaaaaaacccttctcctttattgatgcaaaaccagaatacgagacagcagatggacacacctatggtgtcctgtggaaatgaacaatttttggataacagttttgagaaagttaaacggagacttgatttagatattgatggtttgcaaaaagaaaactgcccttatgtcataacaagtggaataactgaacaagaaaggcaacatttgccagaaaaaagataccctaagggatctggcttcgttaacaagaataaaatgttaggaactagttccaaag

SEQ ID NO: 24910 - DNA, 765 bp, Homo sapiens
  MAP TO AC011530.5; EXPRESSED IN HELA, SIGNAL = 0.89; NT HIT: gi15304769, EVALUE 0.00e+00; SWISSPROT HIT: Q01656, EVALUE 1.00e-25
ctgcggcaggatgtgctgtgtgtgatgcacccagttggccatggagtcgaccagctccagcacggggatgccctcgaagtccgggttctcctcgtaggagtcgcgcccagcaccaccttcctcctcctcgtcgccctcctcctcactaaactggtagaagcccagcgggctgacctgcgtggcggccgagatgcgggctatctgggcccgcaggtagttggcctcgttgcccgggaagggtgggtagctgacgactggcgtgtccaggtagcctgtgaagaacttcttgatctttcgggcgttcacgatctgggctggagtgacgtggggcagccgcgtccatggcaggcccggctcgttgcacacaaagtacaggtacttgttggcgcctgagcggctctcctccttggggatcacgggcggcggcttccatacggacttagggacgatgtccacggccttctcctcgtcctcctcgccctcctcctcgccgtgcgcctccatgacctcgccaccttccgtcatctcctccacctcctcctcctctgcctcctcctcgccctcccggaattccacctcggccaccaggtagctgcgtttgattcccaggatcttgccccagaagcgacaggtgtggatgggctgctgctccaccagctgtttcatggccaggaaaatgcggaagctctcgtccgagctcaggccgacgccggcctgctcgaagtagaaggcagtctccatgatgttgggcactggtgtctcccc

SEQ ID NO: 24911 - DNA, 588 bp, Homo sapiens
  MAP TO AP000884.1; EXPRESSED IN LUNG, SIGNAL =   1; EXPRESSED IN PLACENTA, SIGNAL = 1.4; EXPRESSED IN HELA, SIGNAL = 0.73; EST_HUMAN HIT: AU121779.1, EVALUE 8.30e-01; NT HIT: gi12742572, EVALUE 0.00e+00; SWISSPROT HIT: P56750, EVALUE 6.00e-89
ttagacataactggtggaggtcttactaagcattgtcgtatttcttcgcttatctgtgtgtggcacacggtagccaggcactggatatctgtacccttgcttctttctgttgcagcagcaaaatccacaaagcagaccccctccaatgaagaggacagcagcgcttgcccagccaaggaaaagtgctgctcccagctctcgtttctgacctatgtggatggctgggttgtagaaatctctgatgattatattggctgtccagctcaccggaatcagaacgaagatgcccgtcaggatgaagaggactcctgaagttcccagaaggtatgctttggccctctcgttagagcctgtgcactggacctgcttcatgccacagatgccaataagcagggcgatcaaggagagagcaacagccacacacatgagggcccgggctgtttccagggcaggcgggagagccaacaaggagctatagaacttgcattgcaaccggaccctggcttgtcggatgcaattcatccagagcccttcccagagcctctcaaagacaataatgttgctgccaacaaaagctgatactctcca

SEQ ID NO: 24912 - DNA, 562 bp, Homo sapiens
  MAP TO AC008022.1; EXPRESSED IN HELA, SIGNAL = 0.41; NT HIT: AY050403.1, EVALUE 1.40e-01; SWISSPROT HIT: P18302, EVALUE 1.40e+00; EST_HUMAN HIT: BE145351.1, EVALUE 3.00e-03
  unsure 431
  unsure 540
tctaggacctgggaatcatccttgattctgtcgtcttccttctcctaaagtcaatcaccgatttttatctcataaatattcataaatcccacaatactaccacagccctagtccatatctccactgtcttttgacttttaattcccttcgtctttagtgcccttcagatctagtttccacacagctgttgaagtggacacccattacttcagcaagcgttagctctttcttagggtcacatcacactgattttccttcaggaactcactccaagagatatgggcttggggagactgccagtgaagatgatgactttacctggcccaggcctggtgtgcccccaagctggagcactatgacatctttcatttggaatttgaatcctaggtggaataacgctggaggcagttggccctgatacttcctgaccnaaggggacttgcagttgattcctgctatgtagtccctgggaaattccttcagagcctgggttcttcaaatttttattgggttttctgaaggatcccatatctctccaantgcgctcccctgtaggaactta

SEQ ID NO: 24913 - DNA, 599 bp, Homo sapiens
  MAP TO AL121985.13; EXPRESSED IN PLACENTA, SIGNAL = 3.7; EXPRESSED IN HELA, SIGNAL = 3.5; EXPRESSED IN LUNG, SIGNAL = 3.7; EST_HUMAN HIT: BE141783.1, EVALUE 0.00e+00; NT HIT: AF333069.1, EVALUE 0.00e+00; SWISSPROT HIT: P10267, EVALUE 1.00e-86
tgattatgggattaattgcagtcacagctacggctgctgtggcaggagttgcattgcactcttctgttcagtcagtaaactttgttaattattggcaaaagaattctacaagattgtggaattcacaatctagtattgatcaaaaattggcaagtcaaattaatgatcttagacaaactgtcatttggatgggagacaggctcatgaccttagaacatcatttccagttacagtgtgactggaatacgtcagatttttgtattacaccccaaatttataatgagtctgagcatcactgggacatggttagacgccatctacagggaagagaagataatctcactttagacatttccaaattaaaagaacaaattttcgaagcatcaaaagcccatttaaatttggtgccaggaactgaggcaattgcaggagttgctgatggcctcgcaaatcttaaccctgtcacttggattaagaccatcagaagtactatgattataaatctcatattaatcattgtgtgcctgttttgtctgttgttagtctgcaggtgtacccaacagctccgaagagacagtgacatcgagaacgggccatga

SEQ ID NO: 24914 - DNA, 778 bp, Homo sapiens
  MAP TO AC008456.4; EXPRESSED IN HELA, SIGNAL = 0.88; EST_HUMAN HIT: AL596643.1, EVALUE 0.00e+00; NT HIT: gi14722722, EVALUE 0.00e+00; SWISSPROT HIT: O94823, EVALUE 1.00e-101
tgggatgatcaaaagatagtggaaaatgaccattgtcaatgcttagaatttcagggctggaggaaaatatctggcttcacttattgcaaaagtaccttcatattccgcataagacaacttggtattatttccaacattgagagtaatattccactttccttctttggccacaaggtcaccatcaaaccctcaagcaaggctctggggacgtccctggagaagattcagcagctcttccagaagttgaagctattgagcctcagccagtcattctcatccactgcaccctctgacacagacctcggggagagcttaggggccaacgtggccaccacagactcggatgagagagatgatgcatctgtgtgcagtggaggtgactccactgatgacggtggctacaggagcagcatgtgggaccagggcgacatcctggagtctgggtcaggcacttccttggaggaggcattggaggccccagccacagacctggccaggcctgagttctgttacgaggctgagagccctgatgaggccgccctggtgcacgctgcccatgcctacagcttcacactagtgtcccggacacctgagcaggtgactgtgcgcctgccccagggcacctgcctcaccttcagcctcctctgcaccctgggctttgactctgtcaggaagagaatgtctgtggttgtgaggcacccactgactggcgagattgttgtctacaccaagggtgctgactcggtcatcatggacctgctggaagacccagcctgcg

SEQ ID NO: 24915 - DNA, 725 bp, Homo sapiens
  MAP TO AL033532.12; EXPRESSED IN HELA, SIGNAL = 0.23; SWISSPROT HIT: P18130, EVALUE 7.00e-15; EST_HUMAN HIT: BE744017.1, EVALUE 0.00e+00; NT HIT: gi13637712, EVALUE 0.00e+00
ctgtgatcctgttggaaatgctgaagagcctggaagtcctctgtcgttgcacaaatggttcccgataataccggtccccaaagcacatgcccagtagttctttgcgaactgtcttgttccagagtccatagatcagggggtggcagacagcgctggcaaaggacagccatgtggcccaagtctccaggctcggggagacggagcttttcccccagagggcctcagaggcgatgacaaccatgtaggggccccaggtgaccatgaaggcaccgaggaccaccaggatggtgatgagggctttgcactggttggccgagtagaccacaccctgaaaggcattcctcctgctgcctgaagaggaggtggaggtgctggagttcttcctcccggtcctctgagcatcctcctccacgatgacgactgtgccacagtgcaccttgcgtgccttgaccctggccacgcggaagatgaagccatagcacaccagcatgaccagaaaggggaagagggcacaccagatctgccagaaggccgtgtagccaggctcccggtgccaagcagccacacacatccatttgaactcgtcaaactccacggatgaccaaccaaacaggggtggcaggcagccgatgagcgagtgaagccagatgtagacaagtgccatcacagcccggttccctgtgatcttcatggggtacaccatggggtacaggacagcatagtag

SEQ ID NO: 24916 - DNA, 886 bp, Homo sapiens
  MAP TO AL121845.12; EXPRESSED IN HELA, SIGNAL = 0.66; EST_HUMAN HIT: AW629462.1, EVALUE 0.00e+00; SWISSPROT HIT: Q60821, EVALUE 2.00e-25
ctccacagagtctgtagaagaggcgacaccagggcttccaaatgaacaaccgaaaggaagatatggaaatcacgtcccactaccggcacctgctgcgggagctcaacgagcagaggcagcacggcgtcctgtgcgacgtctgcgtggtcgtggagggcaaggtcttcaaggcgcacaagaacgtcctgctgggcagcagccgctacttcaagacgctctactgccaggtgcagaagacgtcggagcaggccacggtcacgcacctggacatcgtcacggcccagggcttcaaggccatcatcgacttcatgtactcagcgcacctggcgctcaccagcaggaacgtcatcgaggtgatgtcagccgccagcttcctgcagatgacggacatcgtgcaagcctgccacgacttcatcaaggcggcgctggacatcagcatcaagtcggacgcctcagatgagcttgcggagttcgagatcggcgcctcgtccagcagcagcacggaagctctcatctcggccgtgatggctgggaggagcatctccccgtggctggcacggcgaacgagtcctgccaattcttccggagactcggccatcgccagctgtcacgacggagggagcagctacgggaaagaggatcaggagcccaaggccgatggccctgatgatgtttcttcacagcctctatggcctggagacgtgggctacgggcctctgcgcatcaaggaagagcaggtttcaccgtctcagtacggagggagcgagctgccttctgccaaggacggtgcagtacagaactctttctcagagcagagtgctggtgatgcctggcagcccacgggccgaaggaagaatcggaaaaacaaagagaccgtccggcacat

SEQ ID NO: 24917 - DNA, 860 bp, Homo sapiens
  MAP TO AL162261.1; EXPRESSED IN HELA, SIGNAL = 2.8; EST_HUMAN HIT: BE878133.1, EVALUE 0.00e+00; NT HIT: AF134858.1, EVALUE 3.00e-28; SWISSPROT HIT: P05143, EVALUE 8.10e-01
gactacctcgacctgcgcaaggagcgcatcgtttacctcttcctggagcactggcgccgctgggccttccgcggaccaggccgccgcgcccaggcgcgcctaggcagactgctccctggcgtgacggccgcccgtgctggccggagctggaggccacggacgccccccggctaccggtgagcaagggcgaggcccacagccccaacgaacggctgcggcagctgctgaggcagcggcaggcagtgggcaagctgctgcaccactggcggagcctgcggcggcacgtgccgccaagcctgggcctggcacacggcgtgtactggccccagcacttcctgtcgcccctagacggcggcgcacccccgcgctatgaaagcctcacgctcgacctcttcatgctcggctacttccagctaccggagatgggcctgagccgcgaggatcgcaagttccgccacctactgtgctacgagatgttccaccggctggacagccacccgtgggagcgcatccgcctcttccaccgcgtggtgctggaggaggtggaggccggccggcgcggctggagcgacggcttcgaggacctcaggcacaggttcttcggaaacggcctggaggctgagccggcccccgaagaacaggcgaagaaaaaggaagagaaggggaaagaacaggagcggaccgaagaggccgctccggttcagaagggggacccgcccgaggggcagcgcgaggccctggcccctgtgccgcagccgccgccaccgcccgcccgcccgcccgcccgccgcgcctccccggatctcagactctccgggttccgaagcccccgccgaagaccctttggagctggtgtctga

SEQ ID NO: 24918 - DNA, 962 bp, Homo sapiens
  MAP TO AF186997.2; EXPRESSED IN HELA, SIGNAL = 1.7; NT HIT: L44140.1, EVALUE 9.30e-01; EST_HUMAN HIT: BE242203.1, EVALUE 0.00e+00; SWISSPROT HIT: P08640, EVALUE 2.80e-02
atggtcggcctgcacaaccttgagccccgcggcgagaggaacattgccttccacccggtgagcttcccggaggagaaggctgtgcacaaagaaaaaccctcatttccttaccaagaccggccctccacccaggagagcttccgccagaaactggctgcctttgctgggaccacatctggctgtcaccagggccctgggcccctgcgggaatccctgccctcggaggatgacagtgatcaaaggtgctcgccctccggggacagcgagggtggagagtactgctccatcctggactgctgccctgggagccctgttgccaaggctgcctcccagactgcaggttcccggggcaggcatggtggcagggactgctcacccacgtgctgggagcaggggaagtgttccgggcccgcagagcaggagaagcggggcccgagcttccccaaggagtgctgtagccagggccccactgcccacccatcctgcctgggccccaagaaactgtccctcacctcggaggctgccatttcttccgacggcctctcttgtggcagcggcagcggcagcggcgccagtagccccttcgtcccccacctcgagagtgattactgctccctcatgaaggaacctgccccagagaagcagcaggaccctggctgcccaggggtgacccctagcagatgccttgggctgacgggggagccccagcccccggcccacccccgggaggctacacagcctgaacccatctatgctgagagcaccaagaggaagaaggcagctccggtgccttccaagtcacaggccaagatagaacatgcagctgctgcccagggccaaggccaggtatgcacaggtaatgcctgggcccagaaagcagcatctggctggggccgggacagcccagacccaactccccaggtgtcagccaccatcacagtcatggcggcccacccggaaga

SEQ ID NO: 24919 - DNA, 1026 bp, Homo sapiens
  MAP TO AC012122.1; EXPRESSED IN HELA, SIGNAL = 1.5; SWISSPROT HIT: O00268, EVALUE 2.00e-04
  unsure 487
ggacctgctggtgtcgaccgtgtaccaggacatcaaggtggcgaccccgggacccgcttccaagcgctcgccatgtgagcgatccgtggcccggcctgctgagcccgcgcctttcaacaagcgccactgccccagcttcgacttcctggaggcgctggaccggccgaccacggagaccctgccggagccaccgcccccggagcccgctgtgccgcgcgcccggacccgcgaggccgagccacgccgccgcgcccgctccaagagcgcgcccccgggcctgacgcccgcgcccgccttgccgcccgtgttgccccgccgagggcgggaggcccagcgtgcggcgcgggccgaggcatcgccgcgcccttgccaactagctgcgtcccatcaagttgcagccgcagctgggtggccaggcccacatcgcgccatgtgcgccgccgcgggccgccgcgcacttcccgagccacccgcgggtccctatccntacgtgcgctccttccggacatcaagccagacgacgcagtgctccagcacgccgcatggggctcacggtcatgcgggcccgccgaggcagcgccatgggcccgcccccgccccgcagttccacggcctcacggtgcccgggccccgccatatggcgctgtcgcacaccccgacgccaagcgactcatactgtgcggatccccgggcgttctactgcgacgggcccctgcatgggccccgggactacgccaagcgccgcagtctgcccttcatcacccctccgggccccacccagttcttctatacagaggagccccaaggcttccggggcagctttgcggccagtcccggtccaaccttcgacgcctactgccccaggccctatccgtcggaggagctcccagggcccagtccaaggtgcatggggggctactacgcgggagaggtgggcaccttcccaatccaggaaccgtcctcccgctcctactatggggaggctccccgagcctacggcctgccctatgggccccgctatgtccc

SEQ ID NO: 24920 - DNA, 664 bp, Homo sapiens
  MAP TO AL031723.37; EXPRESSED IN HELA, SIGNAL = 0.88; SWISSPROT HIT: P52849, EVALUE 6.00e-18; NT HIT: gi5174466, EVALUE 7.00e-47; EST_HUMAN HIT: BF511408.1, EVALUE 0.00e+00
agcatccccagggtgccgctcagccccagccgaagtcctggcccgtcatctggtagaacctgcggttgaagggccggtagaactcctgcaggcgccggaccagggcctggggcacgcgtgggtgtggccggcccttggacttgcccaggcagcggggacggctgccgccctgggccttcttgaggcaggggaagcccttggtggcgttgaagtagaagtgcttgtccgtgacgacccgtttcaggcccaggaagtcctgcacgcggccgacctctccggccgggtcgctgaccagacgctccccgctgacgaacaggaagtgggacagggggaagtagcgcagccagtggtccaggtgctgggcgtacaggccgatgcggacggcgctccaggctgtgtccacggggcccaggccgtggcggaaggccagggcgcggaagctgggcaggcccggggtcttggagagcgtctgggcgtagtcggagatggcccgggtcacggggttccgcaccaccacgatcagcttcgtgtccggggacatggcgtggatgcggcggggggcctctcgcgtcacgaagtagctgggggtcttctccatggtgatctgcccatccagggttcggggcatcagactcctgcgggacgggtgcaaggagagggggcc

SEQ ID NO: 24921 - DNA, 763 bp, Homo sapiens
  MAP TO AC009123.6; EXPRESSED IN HELA, SIGNAL = 0.66; NT HIT: gi14775529, EVALUE 0.00e+00; SWISSPROT HIT: Q63099, EVALUE 2.00e-28; EST_HUMAN HIT: AW409885.1, EVALUE 0.00e+00
tcagaggccgctcacctggtcctcctctgccctgaggtcgggcatggtgctgacacacaggctgacggctgtggtggccacgaagaggatggagaggcaagcgaagaccttcccgggcagcccggactgcgggttttccaccatctcgcgcagccggttcatgcacaggccccagcgcgaggagtgcgaggcggggcggcgggtctccctctgctgcctcagtacgtcctccctgtgcagcttggccagctcctccagctcctccagcttcctcagcagcttccgcaggcagcacctctccaggtgggcctcctcgatgccccagtaggccagctcctcctggaaggacagcgcgcacatctcctgcagaagcaccagcttcccggccgccaggaagctcacgatcaccccgaaggcgctggggctcctgtcgaagaagaactcctggctgtcctcgtcgtaatcatcgcagagctgcacgatctcctcgtagctccgacagagcctgagtttgctcaggcggctcagcgggaaccggtccagtgtgctccaggggaggagatacctcctgccccccacgttgatcaggatctccttcttcaggtccactggggaggcgtccagggcacccaccttccgcaccctccggtagtaaaggcccttgatggacggcgtctccatggggctggacaggagctgactccaagggctgtgggaaccatagtggtggtgtctgggatgcaggcccccgtctctggaaggc

SEQ ID NO: 24922 - DNA, 734 bp, Homo sapiens
  MAP TO AL136450.1; EXPRESSED IN HELA, SIGNAL = 0.8; EXPRESSED IN LUNG, SIGNAL = 0.95; SWISSPROT HIT: P52154, EVALUE 9.90e-02; EST_HUMAN HIT: AI087196.1, EVALUE 0.00e+00
atggactacgctgggaacgtggcagaggctgagggcctcttggtgcccctgagcagcccaggagacgggctcaagcttcccgcatctgacagcgccgaggccagcaacagcagggccgactgctcctggactccactcaacacccaaatgagcaaacaggttgactgctcacccgccggagtaaaggctttggactctcggcaaggtgttggagagaagaatactttcattttggcaactctgggaactggagtccctgtggaggggaccctgcccctggttaccactaacttcagtcctctgccagcccctatctgtccccctgctcccggttcggcctctgtgccccactctgttccagatgcattccaggttcccctctccgtccctgccccagtcccccattcagggcttgttccagtccaagttgccacttcggttccagctccttcccctcccttagcacctgtcccggctctggctccagcgccaccgtcagtgcccacgctcatctctgactcgaaccccctttctgtttcggcctcagtcttggtgcctgtgccagcttctgctcccccttcaggcccggttcccttgtcggctccagctcctgccccgctttcagtcccagtttcagctcctcccttggctctcatccaggctcctgtgcccccttcagctccgaccttggttctcgctcccgtccccactccggttctggctcccatgccagc

SEQ ID NO: 24923 - DNA, 518 bp, Homo sapiens
  MAP TO AC002480.1; EXPRESSED IN HELA, SIGNAL =  11; NT HIT: gi16161354, EVALUE 0.00e+00; SWISSPROT HIT: P10126, EVALUE 9.00e-97; EST_HUMAN HIT: BG822525.1, EVALUE 0.00e+00
agaagctctcaacacacatgggcttgccaggaaccatatcaacaatggcagcatcaccagacttcaagaatttagggccatcttccagctttttaccagaacggcgatcaatcttttccttcagctcagcaaacttgcatgcaatgtgagccgtgtggcaatccaatacaggggcatagccggtgcttatttggcctggatggttcaggataatcacctgagcagtgaagcccgctgcttccattggtgggtcatttttgctgtcaccagcgacgttgccacgacgaacatccttgacagacacattcttgacattgaagcccacattgtccccaggaagagcttcactcaaagcttcatggtgcatttcgacagattttacttccgttgtaacgttgactggagcaaaggtgaccaccataccgggtttgagaacaccagtctccactcggccaacaggaacagtaccaataccaccaattttgtagacatcctggagaggcaggcgcaagggcttg

SEQ ID NO: 24924 - DNA, 567 bp, Homo sapiens
  MAP TO AC007719.1; EXPRESSED IN HELA, SIGNAL =   1; NT HIT: gi15828471, EVALUE 8.40e+00
caaatatgaagaagtcataagagatgctatatgacccagcaagccagttaaatttattttcttcaattttttaaaacttagaaaaaacagatgaattatatctaatggatctcatgaaaatcaaatattttacatgtaaaactcaaacgatagagttcttgacaaaaattatattgtaattattattttaatgttggtttagatatgaagaaactttggctcaggtaagtcaaagggcttgcccaaagttacttgataaagcagagaaagattttggattaatgaattatcatctctttaaacttgtgatgtttttcatccactatagccaggttgactaagcgaaaaatgcaaaaaaaaaaaaaatgaaaaaaaaagaactttatgtctctgttacttagaaggttctatggggacttaaagagggtacattttacgttatgtcatctcttttctccctactttcacactcattcaaacatgttttacaaatgccaatttcctttgtaaatacatcaaatcataggaagctcaaaatgttcaaagcacagttttgttacaagtgca

SEQ ID NO: 24925 - DNA, 550 bp, Homo sapiens
  MAP TO AL138846.2; EXPRESSED IN HELA, SIGNAL = 0.65; SWISSPROT HIT: O35052, EVALUE 4.00e+00; NT HIT: gi13650682, EVALUE 8.20e+00; EST_HUMAN HIT: BF745459.1, EVALUE 1.00e-103
atggcccggcggcggcgccgcgcctgcatcgctctgttcctggtgctgctcttcgccttcggcaccctcatgggtctgcgcacgctcaaggctccggacggactcccggcgctgggcccgggcctggagctggcgccctttgagcgacgcccagagggggcccccgcgcccgctgccagggccccggcagcccctgccgcgccgcccccgccgccgccgccgccccgcaccgcggaccctggcggctcccctgggccggcacccgcggaggccgagcccgcccccgtgcagagcctgcgcgtctactcggacctgcacgccttctactactcgtggtacgggagcccgcggcgcgagggccactacattcactgggaccacgtcatggtgccgcactgggaccccaagatctcggccagctacccccgcggccgccacagccccccagacgacttgggctccagcttctacccggagctggggccctacagctcccgggaccccgaagtgctgcgggagcatatgacccagctcaaggaagccgccatcg

SEQ ID NO: 24926 - DNA, 590 bp, Homo sapiens
  MAP TO AB016897.1; EXPRESSED IN HELA, SIGNAL = 0.65; EST_HUMAN HIT: AW469436.1, EVALUE 2.10e-01; SWISSPROT HIT: P48023, EVALUE 1.10e+00; NT HIT: gi16163092, EVALUE 0.00e+00
gaaaaggagatttgactaaagaaacgaagaatactttagttatgctcttgtgatttaagagtatctgatattaaatattaagcagtagtgtcctggttctgtcacatcttcccatggaagatccttgagataatttcatggggagaagaggactttccacgcaggacatcagttgctttgctcccaaagttctctaaaagcgttcatatgtattgtgcctggaattttattatgtacatttacatgttaagttgttttcaccggcccacgttttccaccatgtgctcgtgataattgagcttccagaaggtaggtctggatagtagattaggagggtggtcccatttcacaggcggtgatgagaggctctgagcctgagccagcatcgtgaggaagtcaacaatagacggaaacacggctcgcgcccagcatcgccccaccgtgcagtgagcggcccttcctacggaaattggtgaaacacttgactttctgtttcttaaatactttaagggcataaaatcacatgtactgctttgaaagtagaaatcccagatgtattgagtcagaacttctgtaagtgagccgaggca

SEQ ID NO: 24927 - DNA, 752 bp, Homo sapiens
  MAP TO AL035587.5; EXPRESSED IN HELA, SIGNAL = 0.41; SWISSPROT HIT: P10266, EVALUE 1.00e-124; NT HIT: AB016195.1, EVALUE 0.00e+00; EST_HUMAN HIT: BE217830.1, EVALUE 0.00e+00
cttcctcatagtacaattaagacttttacattgtacttggatcaaatggctacattaattggtcaggcaagattacgaataataaaattgtgtgaaagtgactcagataaaatcattgttcctttaaacaaggaacaggttagacaagcctttatcaattctggtgcatggcagattggtcttgctgattttgtgggaattattgacaatcattacccaaaaacaaaaatcttccagtttttaaaattgactacttggattttacctaaaattactagacataaacctttagaaaatgctctgacagtgtttactgatggttccagcaatggaaaagcggcttacaccaggccaaaagaacgactcattgaaactcaatatcactgggctcaaagagcagagttggttgctgtcattacagtgttacaagattttaatcagcctattaacattgtatcagattctgcatatgtagtacaggctacaaaggatgttgagacagccctaatcaaatatagtatagatgatcagttaaaccagctgtttaatatgttacaacaaactgtaagaaaaagaaatttcccattttatgttactcatattcgagcacatactaatttaccagagcctttaactaaagcaaatgaacaagttgacttgctagtatcatctgcattcctggaagcacaagaacttcatgccttgactcatgtaaatgcaacaggactaaaaaataaatttgacatcacatg

SEQ ID NO: 24928 - DNA, 921 bp, Homo sapiens
  MAP TO AC007003.1; EXPRESSED IN PLACENTA, SIGNAL = 2.5; EXPRESSED IN HELA, SIGNAL =   4; EST_HUMAN HIT: AL571867.1, EVALUE 0.00e+00; SWISSPROT HIT: P14324, EVALUE 0.00e+00; NT HIT: gi15299191, EVALUE 0.00e+00
ctattcgatgagacccataacgtggctgtaactgtctttctcatactgcaagaacacggctggcagatccagctcctcgtatagtgccttcacccgggccaccttctcggcctccttctgcctgtaattttccttcaggatctggtactgttctggagtggcctgtagcagacactgaaccaccagccagctgcatttgttgtcctggaagtcattgccaactctgccagtcacactggggtccccaaagaagtcaaggtaatcatcctgaatctgaaagaactcttgaatctccagcaggatcttcttggcactggtgtgctccttcttgtcatccattcttgacatgtacatggctgcagctacaggaaggtagaaggagtagaaagctgtcttgtacttgacaacagatttgtgccttttttcggtgcatctgcgaagatccacattgccctggggggttgtgatgaggtcgagggtctgcccaatctcagtctgataagaattctgctggaagagctccatcaggttcaggtaatagggctgctcccggcaatacagcttcagcaggcagtagatacatgcttccagaaggatagcatcattgatggcatccaaacccatgcccagcttctgataccaggagatctgtccctggcaggtaagggatgaatccataatgtcatctgccaccaggaagaaagcttgcagcagttgcgcataccagcccacagtcggtgcccactggagactatcagcatccagtttcctcggctccaccagctcccggaacgctactagcaccatcaaacctcggtgatacttgcctccaatggcattgtactccaggacctccttgagccgggcagtagcatctcctgtctctgggtgccccatctcatcctcagtcagcaccctaac

SEQ ID NO: 24929 - DNA, 782 bp, Homo sapiens
  MAP TO AC011904.3; EXPRESSED IN HELA, SIGNAL = 0.63; SWISSPROT HIT: P51915, EVALUE 2.00e-28; NT HIT: gi13937343, EVALUE 0.00e+00; EST_HUMAN HIT: BI860607.1, EVALUE 0.00e+00
gatgtgtggcaggttcctgcggcggctgctggcggaggagagccggcgctccacccccgtggggcgcctcttgcttcccgtgctcctgggattccgccttgtgctgctggctgccagtgggcctggagtctatggtgatgagcagagtgaattcgtgtgtcacacccagcagccgggctgcaaggctgcctgcttcgatgccttccaccccctctccccgctgcgtttctgggtcttccaggtcatcttggtggctgtacccagcgccctctatatgggtttcactctgtatcacgtgatctggcactgggaattatcaggaaaggggaaggaggaggagaccctgatccagggacgggagggcaacacagatgtcccaggggctggaagcctcaggctgctctgggcttatgtggctcagctgggggctcggcttgtcctggagggggcagccctggggttgcagtaccacctgtatgggttccagatgcccagctcctttgcatgtcgccgagaaccttgccttggtagtataacctgcaatctgtcccgcccctctgagaagaccattttcctaaagaccatgtttggagtcagcggtttctgtctcttgtttacttttttggagcttgtgcttctgggtttggggagatggtggaggacctggaagcacaaatcttcctcttctaaatacttcctaacttcagagagcaccagaagacacaagaaagcaaccgatagcctcccagtggtggaaaccaaagagcaatttcaagaagcag

SEQ ID NO: 24930 - DNA, 595 bp, Homo sapiens
  MAP TO AL109912.4; EXPRESSED IN HELA, SIGNAL = 0.91; NT HIT: gi14756840, EVALUE 0.00e+00; SWISSPROT HIT: O60673, EVALUE 1.00e-111; EST_HUMAN HIT: AI372971.1, EVALUE 0.00e+00
gctgtgctgtttcctttttcatttccttcagaggatactttattttttgaatgatttaagtcagaaaagttgaaagaatttttgcccaatgtattctcgttagggtgacggtgcatatgtataaaaggggaatccttttcgatttttctaatgtttgtatattttctacttggtacttgtcttgtaacagatggaatatcttcttcataatcaaaaatactactttcacaggaagatactgggaggatctctttcttactattctctttatgagaattttctgaatgaacagtactgcttaaagatccagggtatttcatagaataagtgctttcgtttgtaaaagaagtgactgagttatctagacctttttctgtatttttgtttgtctgtgaaaggtcttcaattaaatcttccttgttcaaaacatgggaagaaagggcacttgtgtgtttacactgaaaggtaatcttagcagaagatgagggttctaatgtagcagcatctttgtgaaagatggagggtttaactgaaagcttgcttgttgcaattacagaagagtgggttctagaattttcattgttcaatggattgt

SEQ ID NO: 24931 - DNA, 564 bp, Homo sapiens
  MAP TO AP001254.2; EXPRESSED IN HELA, SIGNAL = 2.8; SWISSPROT HIT: P05783, EVALUE 2.00e-81; EST_HUMAN HIT: BE378641.1, EVALUE 0.00e+00; NT HIT: gi4557887, EVALUE 0.00e+00
atcgtattgggcctggatgtctgccatgatcttggtgaggtcctgcaatttgagggcatctacttccacggtcaacccagagctggcaatctgggcttgtaggccttttacttccacttcgtggttcttcttcatgaagagcagctcctccttgagagcttccatctctgtctccagctgcagttgagtgacattggtgtcatcagcgatcttgtggagcccatggatgttgctctccacagactggtgcatggccagctctgactcatacgtgactctaaagtcattagcagcaatacgggcattgtcgatctgcagaacgatgcaggaactatccacagtatttgcgaagatatgagcactcaggtcctcgatggtcttgaagtaatggtcccagtctctgacctggggtcccttcttctccaggggctcccggattttgctctccagcttccagttctccgtctccaggctcctcactctgtccaggtaggaggccagccagttgttcaggctttgcatcgtctccgcattctggatgcctcccattccagccagaacccc

SEQ ID NO: 24932 - DNA, 494 bp, Homo sapiens
  MAP TO AC010856.2; EXPRESSED IN HELA, SIGNAL = 0.77; NT HIT: gi14743819, EVALUE 0.00e+00; SWISSPROT HIT: Q15822, EVALUE 7.00e-77; EST_HUMAN HIT: BE799894.1, EVALUE 6.00e-32
tccagtgccttctgcatgtggggtgatagcagcagctcaccctcctgcagcagagcctcagccttgggacctgaggccccagagtgcaggtggccgtggctgcagagggtgcccacagagggggccacatgacctgcacatgcccatctgtcctcctcctccaccaccacctccctctcctcggcatccacgttgctctccagccagtgataagaggggctgagcttcaggcgtagggggtggcagagctccacgggtggtgggggccggttcatcagaagccaccggggcacacagcccagaagggccccccgcacccagtggggcatggtgtgggtgctgggggagcggtggtgcacattgagcacgaagacggtgatgacgatggacagggtgacgaagatcatggtgaacagcaggtactcgccgatgagcgggatgaccagcgaggtggacgggatgatctcagtgatgagcagcaggaagacggtgag

SEQ ID NO: 24933 - DNA, 954 bp, Homo sapiens
  MAP TO U58675.1; EXPRESSED IN HELA, SIGNAL = 0.5; NT HIT: X80391.1, EVALUE 0.00e+00; SWISSPROT HIT: P47881, EVALUE 0.00e+00; EST_HUMAN HIT: BG193339.1, EVALUE 4.00e-04
gaactcatgcagccagaatctggggccaatggaacagtcattgctgagttcatcctgctgggcttgctggaggcgccagggctgcagccagttgtctttgtgctcttcctctttgcctacctggtcacggtcaggggcaacctcagcatcctggcagctgtcttggtggagcccaaactccacacccccatgtacttcttcctggggaacctatcagtgctggatgttgggtgcatcagcgtcactgttccatcaatgttgagtcgtctcctgtcccgcaagcgtgcagttccctgtggggcctgccttacccagctcttcttcttccatctgttcgttggagtggactgcttcctgctgaccgccatggcctatgaccaattcctggccatctgccggcccctcacctacagcacccgcatgagtcagacagtccagaggatgttggtggctgcgtcctgggcttgtgctttcaccaacgcactgacccacactgtggccatgtccacgctcaacttctgtggccccaatgtgatcaatcacttctactgtgacctcccacagctcttccagctctcctgctccagcacccaactcaatgagctgctgctttttgctgtgggttttataatggcaggtacccccatggctctcattgtcatctcctatatccacgtggcagctgcagtcctgcgaattcgctctgtagagggcaggaagaaagccttctccacatgtggctcccacctcactgtggttgccatattctatggttcaggtatctttaactatatgcgactgggttcaaccaagctttcagacaaggataaagctgttggaattttcaacactgtcatcaatcccatgctgaacccaatcatctacagcttcagaaaccctgatgtgcagagtgccatctggaggatgctcacagggaggcggtcactggcttga

SEQ ID NO: 24934 - DNA, 560 bp, Homo sapiens
  MAP TO AL121760.1; EXPRESSED IN HELA, SIGNAL = 0.77; EST_HUMAN HIT: AA843788.1, EVALUE 2.00e-01; NT HIT: AB045011.1, EVALUE 5.30e-01; SWISSPROT HIT: P32583, EVALUE 2.00e-12
tcacagtctccttcggaagacaataaatacaggaacaaagcaacagctaagagtgactcggaagacaataaatataggaacaaagcaacagctaagagtgactcggaagacagtaaatacaggaacaaagcaacagcgaagagtgactcggaagacagtaaatacaggaacaaagcaacagcgaagagtgactcggaagacaataaatataggaacaaagcaacagctaagagtgactcggaagatagtaaatacaggaacaaagcaacagcgaagagtgactcggaagacaataaatataggaacaaagcaacagctaagagtgactcggaagacaataaatataggaacaaagcaacagctaagagtgactcggaagacaataaatataggaacaaagcaacagctaagagtgactcggaagacaataaatacaggaacaaagcaacagctaagagtgactcggaagacaataaatataggaacaaagcaacagctaagagtgactcggtggaggaaccggttagggtagtcagggaacacttctctgaggaggtgac

SEQ ID NO: 24935 - DNA, 1941 bp, Homo sapiens
  MAP TO AC019284.4; EXPRESSED IN LUNG, SIGNAL = 1.4; EXPRESSED IN HELA, SIGNAL =   2; SWISSPROT HIT: P07197, EVALUE 6.00e-04; EST_HUMAN HIT: BF878442.1, EVALUE 0.00e+00
aggtttcttcctcagcaacatctgaaaaggaggaggctttatttgctattgttttctcctcggctgtctccgaacctgccaacacctccctctcctctgcggctgtttctgccgtttcaccacctccgtgtagaacttccacagccacaacccttcctcctcccatgccctcattcttttgtgtgtttccttctccttccatgtccccgtccccttccgagttcctgtcctgcatcgcttctgtctccagagtgcactctttgtcctcttcctcctctgggtcctcatccaccgcttcctccctgaacttttctgccattatgggatcttcctcagcaacagcttcctgggtccttagcacgacatccactcctccttgcccttcagctctcccctccagtcctgcgcaggagtcgtgatctttggctgctagctcctctgcctggcctgtggctgggatcagcccctcaggggcctgcacctttcctgctggctcagcttcaggagctgctaaggccccctctccatcttggcggtgcccttccttcagggccctattctccctgctggacagctcttctctgtctttgtgctctgtgtctctggcttcactcagtctttcccctcctccttctttcctcagagctgttatgttttccagcgacttttcaaatccaggcgttgcttcaaatatgggaaccactgtctcttttagtgaatcttctcctagaagccctggattgtcagacaactcagaagcctccacaggtgcttcgttctcagcatcagatcccatttcatttgggggagcttttgtctcttcctcagctcttacttctgtctctgtttccccttcttccgctttaagtttttgctcttctttaaaagcatcttcatccttgagtgcatttgcccttgtcacctcttctctctcagagtcagttttcctcagagatgtttttggcctctcagctttccttcgctctcttgctaaatctaattccttgggtaaaatttctttcctatcatcttccctattagcttctgcctcagtcaccatctcttccccttccacatcttccttgcaaaggaaggcttcctttgcaaggcttccttcctcagggctgccctccgaaacctgcatccggcttgcctctgcctctcctgtgaaggggctcaagcgtgtttctgttctcataacctcttttctctctttggctggttcctctcccccaagaattgcctcttcagaaccgtcctctctctttgatgctgtgtcctccatgggtcctgtgtcctctaggtctatggatgcttcctcttcactttctccgacatcactcacagccaccccaccctcagcctctccctcctccgatgtcgctgcctctctcagggctgctacttcatgaagatgctccaagttcagggctgctgcttcatttgcaagcactgccttctctaaaccctgttccccttcagaagctgctttgtctgtctcaagcactgtgagcatcaaggcttgcttttcaggagcctcatctttactcagacccacagcatcttttgctgctgcttgtcctatggggtctgaccccccttcacccagccttctgaccccttctgcttctgctgctccctctgcccccctttctatgcctggagggatctcccttttttctgtaaactcttctgccaattctggctgctctgctgttggcttccacgccctcaagggagcctcatgaacagctcctgcttctccccacagtgctgcctccccttttccctgtactatgtcagcatctctgtgctggggcgcttcatcttcctccattgcttctttcttctccagtgtatacgttttttgcaccaattgctgggattccttgtttgagttgattgctgctgtttcatccaccatgaaattcattgttggtg

SEQ ID NO: 24936 - DNA, 491 bp, Homo sapiens
  MAP TO AL136307.12; EXPRESSED IN PLACENTA, SIGNAL = 2.5; EXPRESSED IN HELA, SIGNAL =  17; NT HIT: gi14750410, EVALUE 0.00e+00; SWISSPROT HIT: P14618, EVALUE 3.00e-64; EST_HUMAN HIT: BG116346.1, EVALUE 0.00e+00
cgtagcccaagtcggtcagcactggaggacctcagaagccatgttgaagccccatagtgaagccagggctgccttcattcagacccagcagctgcacgcagccatggctgacacattcttggagcacatgtgctgcctggacactgactcgccacccatcacagcctggagcactggcatcatctgtactatgggcccagcttctccattgctagagatgctgaagaaaacgattaagtctggaattaatgtggctcatctgaactctcatggagcccatgagtaccatacagagaccatcaagaacgtgcgcacagccacggaaagctttgcttctgactccatcctctaccagcccattgctgtggctccagacactaaaggacctgagatcccaactgggcccgtcaagggcagcggcactgcagaggtggagctgaagaagggagccactctcaagttcacgctggataatacctacatggaaaagg

SEQ ID NO: 24937 - DNA, 546 bp, Homo sapiens
  MAP TO AL163302.2; EXPRESSED IN HELA, SIGNAL = 1.3; EXPRESSED IN LUNG, SIGNAL =   2; SWISSPROT HIT: P39060, EVALUE 6.00e-86; EST_HUMAN HIT: BF870078.1, EVALUE 0.00e+00; NT HIT: gi14780771, EVALUE 0.00e+00
agcgcatcagcgaggaggtggggctgctgcagctccttggggaccccccgccccagcaggtcacccagacggatgaccccgacgtcgggctggcctacgtctttgggccagatgccaacagtggccaagtggcccggtaccacttccccagcctcttcttccgtgacttctcactgctgttccacatccggccagccacagagggcccaggggtgctgttcgccatcacggactcggcgcaggccatggtcttgctgggcgtgaagctctctggggtgcaggacgggcaccaggacatctccctgctctacacagaaccaggtgcaggccagacccacacagccgccagcttccggctccccgccttcgtcggccagtggacacacttagccctcagtgtggcaggtggctttgtggccctctacgtggactgtgaggagttccagagaatgccgcttgctcggtcctcacggggcctggagctggagcctggcgccgggctcttcgtggctcaggcggggggagcggaccctgacaagttccagg

SEQ ID NO: 24938 - DNA, 1274 bp, Homo sapiens
  MAP TO AC011599.8; EXPRESSED IN LUNG, SIGNAL = 1.1; EXPRESSED IN HELA, SIGNAL = 0.37; NT HIT: gi15296509, EVALUE 0.00e+00; SWISSPROT HIT: Q03164, EVALUE 4.30e-01; EST_HUMAN HIT: BE783075.1, EVALUE 0.00e+00
tcacttgttgaagaggttcaggccgatgcggtagtgcctcttgcggatgacatcgttgctaaaggcaggcgagtcccagctgttgcgggcctccttgtggtaggtctgcttgctgagcgtctgctcccgcaggctgtcacgggacgatgactcggagctgcagttgatggtatcgttggagttggacgtgctgttgatgctgtcattgtcaccgtctgagtagtccgactcagacttgctctgccggttggctgagccattgatggccaagtggctgtccaggggcctggggggccggggccgcaactcaggctcctcccgggggaggctcttgggggcgccgctgtggggaccatgcttgggactgccctgctgcccgccaaggctgcgctcgtaagcactctgcctcttgagtgacccccgctccgagcggtcactaaggtccacagagctgtcgctgggtggctcgatggtgagcagcggcagatgctccacccgcagccgctgctcctgccgctccagcgacggcgtgctccggcagctcgtgtccgtgtcagccttgtcctctttgtgggccagggcccagtagtctggggctgcgcccccagcccgtagccgcaggtccgactcggtgctggacggccggtcccctgcctgcgagaggggcagagggggcgacagctcctcctcatcgatgtacagggtgacatcactgtacgaggccgtcatctcgtccagtttgcggtggtccatgccgtgcagggctgtctggggttcggtgtcccgggcccgcgccgcatccagggccggtgcctcctcagtgtgcaggctgcggcagttgagggcatcgtcgatggactcggccagtgatttcacttgcctagagaaggcgtcctccagctcggtgatggcgtccgcaaagtcactggagggggccggagacttgagggtggtgggctcgctgaggtcaccacactcaggggacaccagggctcccagctgggagccgtcgttagtcactgagacctgcttcccctcgaagtaggagctgtgcactttctcaggcccctcaaaggagaactgcatcctcatgttggacagcacaatccggcgtgacatgcggttctctgacatggagctgcgcaagcgctcgaagttcttgttcatctggtactggcgaaacgccgtctggatggtgcgggccgcatggcgggttaccaggcgccccccatactttcgttctagcatctccacctgcgggtgggagaggagaa

SEQ ID NO: 24939 - DNA, 743 bp, Homo sapiens
  MAP TO AC007111.1; EXPRESSED IN HELA, SIGNAL = 0.27; EST_HUMAN HIT: AW954570.1, EVALUE 0.00e+00; NT HIT: gi16164979, EVALUE 0.00e+00; SWISSPROT HIT: P70315, EVALUE 1.20e-02
tcggtgactgaggcagggagcggggtgacatggggcgctctgtcggcggcagcagctgcggggtgggcttcaccttggccgtagctggggctggaccatgaggtcccccaagggcctggggagagcctggtcgggttttggtgggcgtctgggggggcgtgaagtggctagtgcctggtgggaggacctgccgtggcttgccaggcacggggggcacgctggccctcttgatgctgtggccgtggcggccgggccgggcctccctgggcggggtgccgggggcggggccctcatccaggaggtactcctggcttcgagacatggggctgctgggcccagggggcccatctcccagcagctcctgcgagctgctcatgtgccgtgcccgaccacccaggctggagtcctgccgcgtggtggccctcggggtgggtggcaggtggctggagggcttctcagtggtgggccccacctcagccgggccagtcatggcagcctgcagctcgtcactgagctcgctgtcctggaaggtggtcattttaggggactggcagtcggccggtgtgggctcaggcgggggcggcgactcgatggccatcacttcaagagactggggcgccttccggcgcagggggcccccctcatacttggcgtattcagccttctgcagctctgccagcttcctcacagcgagcatcagcttcttctggtgccctgagtggggcgcagggggcaggtcaggt

SEQ ID NO: 24940 - DNA, 821 bp, Homo sapiens
  MAP TO AL161669.3; EXPRESSED IN HELA, SIGNAL = 1.1; NT HIT: gi14754053, EVALUE 0.00e+00; SWISSPROT HIT: Q03169, EVALUE 1.00e-07; EST_HUMAN HIT: AI355357.1, EVALUE 0.00e+00
ctgccgtagacgttggcggcccagtccagcaggatatagagctgctcgcagccgcgggcgtcgcgcgcgagctcctggaggcgctgggccacggcgctgtggaaggcacgcagatagacctcccacgctgggaagccggccgccgcatacgcgggctgcacctcctgccgcaccttctgcaggtcgcggcgaaccaagccacccagctcggccagaagctgggccaaacccgacgcgccctccgcctccccgaaggcccaccccgcgcccggccgccgcacgcgctcctgagcgcttcgccgcaccgcctcctcccagtgctggcgccagcggcgcggcgtgcgcaggaagtcgccgtcgtcggggggagaagggtgggcttcctcctccgcgctcaccacgcgggccagctcggccagcgcggccgcgtccacaccgtcgctgtccagcgtctcgcgcacgatggcgccgatctcggctgccagcccgtcgtaaagcaggcacacgtccatagcgcgccgcgcgaaggccgtagggtcctgctcaaaggtgcgcgaggccttctcggccaccagcagcgtctccaggcgcagaagctgttcgaaggccgccagcagttgccgttcagtaatgaggtcggccacggatttgccttctgcacaggcgggcgagaagggcggtgagagggaccgccccaagacccgaacctggacgaagacctgcaggccacggctcaatccatcggggctggattgtctgtcctctgccagatgccccagcacagctgaaggcctgctccaggaacaacaggccccagctgc

SEQ ID NO: 24941 - DNA, 897 bp, Homo sapiens
  MAP TO AC002504.1; EXPRESSED IN HELA, SIGNAL = 1.9; NT HIT: AY038071.1, EVALUE 0.00e+00; EST_HUMAN HIT: AI656304.1, EVALUE 2.00e-42; SWISSPROT HIT: O35085, EVALUE 7.00e-64
agcagcagcgccccgttcgaggccgagctgcacctgccgcccaagctgcggcgcctgtacggcccgggcgggggccgcctccttcagggtgcggcagcggcggcggcggcggcggcggcggcggcggcagcggccgccacggccacggcgggtccacgcggggaggcccctccgccgccaccgccaaccgcgcggcccggggaacggccggacggcgcaggggccgccgcggcagccgcggccgcggccgccgcggcctgggacacgctcaagatcagccaggcgccgcaggtgagcatcagccgcagcaagtcgtaccgcgagaacggggcgcccttcgtgccgccgccgcccgcgctggacgagctgggcggcccggggggcgtcacgcacccggaggagcgcctcggcgtggccggcggcccgggcagcgccccggctgcgggtggtggcaccggcaccgaggacgacgaggaggagctgctggaggacgaagaagatgaggacgaggaagaggaactgctggaggacgacgaggaggagctgctggaggacgacgcccgcgcgctgctcaaggagccccggcgctgtcctgtggccgccactggcgccgtggccgcagcagctgccgctgcagtggccacagagggcggggagctgtcacccaaggaggagctgctgctgcacccggaagacgctgagggcaaggacggcgaggacagcgtgtgcctctctgcgggcagcgactcggaggaggggctgctgaaacgcaaacagaggcgctaccgcaccacgttcaccagctaccagctggaggaactggagcgggccttccagaagacgcactacccggacgtcttcaccaggtatgcgcgtagggtggtcgcggtcgcagcg

SEQ ID NO: 24942 - DNA, 1192 bp, Homo sapiens
  MAP TO AC018725.1; EXPRESSED IN HELA, SIGNAL = 0.6; EST_HUMAN HIT: BF218406.1, EVALUE 0.00e+00; SWISSPROT HIT: Q9UIE0, EVALUE 0.00e+00; NT HIT: gi14764525, EVALUE 0.00e+00
gcggcaagactattgcggaagcaggaccacatgaagactgcccttgccagcaaatctgggaacaaactgcaagtgacttaacccagtctcaagactccatcataaataattctcacttctttgaacaaggtgatgtcccctcccaggttgaggcaggactatctataattcatacaggacagaaaccttcacagaatgggaagtgtaaacagtccttcagtgatgttgccatctttgatcctcctcagcagttccactcaggagagaagtctcatacatgcaatgagtgtggaaaaagcttctgttacatctcagctcttcgtattcaccagagagttcacttgagagagaaactctctaagtgtgacatgcgtggtaaggaattcagtcagagctcatgtctgcaaactcgtgagagagtccacactggagagaaaccattcaaatgtgagcaatgtgggaaaggcttcagatgtagagcgatacttcaagttcactgcaaattacacacaggagagaaaccttatatttgtgagaaatgtgggagggccttcattcacgatttccagcttcagaaacatcagataattcatactggggagaagccgttcaaatgtgaaatatgtggtaagagcttctgccttaggtcaagtcttaataggcattgcatggtccacacagcagagaaactgtacaaatctgaggagtgtggaaaaggcttcactgatagcctagatttgcataagcatcagataattcacacaggacagaaaccgtacaattgtaaagaatgtgggaagagcttcagatggtcctcatatcttttgatccatcagcgaatccacagtggagaaaaaccatacagatgtgaggagtgtgggaagggctacattagtaagtcaggtcttaacttgcaccagagggtccatactggagagagaccttataattgtaaggaatgtgggaagagctttagccgggcttcaagtattttgaatcataagaaactccactgccggaaaaaacccttcaaatgtgaggattgtggaaagaggcttgtacaccggtctttctgtaaagaccaacaaggagaccacaatggagaaaactcatccaaatgtgaggactgtgggaagcgctacaagaggcgcttgaatctggatataattttatcattatttttaaatgatat

SEQ ID NO: 24943 - DNA, 495 bp, Homo sapiens
  MAP TO AC005585.1; EXPRESSED IN HELA, SIGNAL = 1.6; EXPRESSED IN PLACENTA, SIGNAL = 2.2; NT HIT: gi14778217, EVALUE 0.00e+00; SWISSPROT HIT: P47241, EVALUE 1.00e-01; EST_HUMAN HIT: BG744906.1, EVALUE 0.00e+00
ttacaagtaggtgtcctcactctcttgggacgtcaagctctcctgggagcggtggtgggctgagacctggggagccaaatcctgaggggctgagtccttgggggctgagtccttcgggggcacatgctgtgggggacatgcatctcctgcagcggccaccaccatggcttgatttggggctgggggcttctccagctgccctctccccttcatctgtttccgctgctccttctgggcctgcttgggtggcttgggcttggctttggagccagggaggggggcatctaggggcaggcggatggatggtgaaggttgtagggcaggccggggaccaggttctgcatccaagatagccttggcaccatgcagcctgggcggggagcggcactgcagctcaccccgggtctcctgccagcgccgcagctgaatgaggtgttcgcgctcaatctggcgctctgtcacgggcaactccaccacctgcaggggcagtgacac

SEQ ID NO: 24944 - DNA, 955 bp, Homo sapiens
  MAP TO AC023066.2; EXPRESSED IN HELA, SIGNAL =  15; EST_HUMAN HIT: AU142518.1, EVALUE 0.00e+00; NT HIT: gi14745486, EVALUE 0.00e+00; SWISSPROT HIT: Q01105, EVALUE 1.00e-112
tacatcctacagtgttctgcctgcttccagacgagcaaggagactcatggtctggttcttggacttccctaacagcatggcccctaaacgccagtctccactcccacttcaaaagaagaaaccaagaccacctcctgctctgggactggaggagacatcggcctctgcaggcttgccgaagaagggagaaaaagaacagcaagaagcaattgaacacattgatgaagtacaaaatgaaatagacagacttaatgaacaagacagtgaggagattttgaaagtagaacagaaatataacaaactccgccaaccattttttcagaagaggtcagaattgatcgccaaaatcccaaattttggggtaacaacatttgtcaaccatccacaagtgtcttcactgcttggggaggaggacgaagaggcactgcattatttgactaaagttgaagtgacagaatttgaagatattaaatcaggttacagaatagatttttattttgatgaaaatccttactttgaaaataaagttttctccaaagaatttcatctgaatgagagtggtgatccatcttcaaagtccaccaaaatcaaatggaaatctggaaaggatgtgacgaaacgttcaagtcaaacgcagaataaagccagcaggaagaggcagcatgaggaaccagagagcttctttacctggtttactgatcattctgatgcaggtgctgatgagttagaagaggtcatcaaagatgatatttggccaaacccattacagtattacttggttcctgatatggatgatgaagaaggaggagaagatgatgatgatgatgatgatgatggtgatgaaggggaggaagaattagaagatattgatgaaggggatgaggatgaaggtgaagaagatgaagatgatgatgaaggggaggaaggagaggaggatgaaggagaagatgactaa

SEQ ID NO: 24945 - DNA, 865 bp, Homo sapiens
  MAP TO AP001067.1; EXPRESSED IN HELA, SIGNAL = 0.25; EST_HUMAN HIT: BF057518.1, EVALUE 4.00e-62; SWISSPROT HIT: O75690, EVALUE 1.00e-04; NT HIT: AL163300.2, EVALUE 0.00e+00
acatggggcagagaagctgggagggaggacaggggacccaacaggcaggtgggcccctgctgggaggcaggagctggggagcttcgaggatggagattcctgggagtatggaggggggggtcacctcagcacatgggggccccgtcccaagcgggggcaacctcctaacccgagtcaggaccagttggccctgggggatgtgcacatcagcaactggactcctggcctgagcagaggcctcagcaggccaggggggagcacgcggggcggcagaggagggacacgcaggaggccgggcggcagcagctggcctggtaggaggaggcaggggcacagcaggaggagatgggcaggcagcaggcgggcctgcatatggggcggcagaggagggacacggaggaggagggtctgcagcaggaggtggtgcagcaagccggctgacagctagactgctggcagcatgaagtggaagccccagagcagacgggcacacagcagatgggtttgcagcagacaggcttgcaacagacaggcacgtagcaggactgctggcagggggaggaggtgcagcaagtcggctggcagctagaatgctggcagcatgaagaggaatcctcagaacaggtgggcacacagcacacgggcttgcagcagacaggcacacagcaggactgctggcaggaggaagaggcacagcaagttggctggcagctagactgctggcagcatgaagaggaatccttagagcaggtgggcaggcagcacacaggcttgcagcagacgggcacgcagcaggcctgctggcagggggaggaggcgcagcaagccggctggcagcacgagggcgtgcaggagctggtgcagc

SEQ ID NO: 24946 - DNA, 616 bp, Homo sapiens
  MAP TO AC008812.4; EXPRESSED IN HELA, SIGNAL = 2.3; EXPRESSED IN PLACENTA, SIGNAL = 1.9; NT HIT: AF209479.1, EVALUE 0.00e+00; EST_HUMAN HIT: AU140165.1, EVALUE 0.00e+00; SWISSPROT HIT: O88520, EVALUE 7.00e-03
acaacgaccatctcaggcccaagaagccctggttccagatactcacccactgcagccttcagctgggtcagctcctggtagatctcctgctgcttagatttctctggaagctcacccactgcagccttcagccgggtcagctcctggtagatctcctgctgcttagatttctctggaagctcacccactgcagccttcagccgggtcagctcctggtagatctcctgctgcttagatttctctggaagctcacccactgcagccttcagccgagtcagctcctggtagatctcctgcatcttagatttctctggaagctcacccactgcagccttcagccaggtcagctcctggtagatctcctgcagcttagatttctctggaagctcacccactgcagccttcagccgggtcagctcctggtagatctcctgcagcttagatttctctggaagctcacccactgcagccttcagctgggtcagctcctggtagatctcctgcagcttggatttctctgagagctcacccactgcagctttaagctgggtcaggttctggtagatcgcgtcttgcctggattgttcctgacttatggagctggggaccttggaca

SEQ ID NO: 24947 - DNA, 1176 bp, Homo sapiens
  MAP TO AC011686.3; EXPRESSED IN HELA, SIGNAL = 0.6; EST_HUMAN HIT: AA643783.1, EVALUE 0.00e+00; SWISSPROT HIT: P50289, EVALUE 3.00e-01
ctacttggccccggccatgttgctggaccgtaggagatactgatccacacttccttttcgccggctcacagtccgcctctcattgtcgaacatgcgctgcaactgcagagccaactgtcggtcttcttcctcttgctgaagcttctgctccatctctcgcaggactgggtctgttggggccagacccacctccccactggtttgtcgcagttttttaagggagccattttgttctaagtgcttggtcttgcagtgtcttttccggcctcgacgcaaagaaggaagtggctcttcacttaggctctcaactagaacaccattagtcagatcaaaatgatttaatgtcttcaattgttgctttgttttgaggactccacccaaaacactgttttggggtagcactgaattaactgtggtgattttcatggctctgcttatacaggttttgtctaacttggcatctggagttgaccctaacccctcaaactgctccctctccaaagaagtcccactgcctccccctttgagttctgaggaacagcaggtttccagtgggatctcagtgctacttttattatcactgtcctgttctgcttttgtttggctaacagaggggaaatgatcaagatcagcagaggtgggtccagtatactcagagaggacctgcccaccagataatcttgtatttacagccacaagtggcttctccttgctagaatggataccttcagagcctagtaactcttcccccatttcaggagccagagaggtaagagtggcttttgaaagggtctttttgatctgccgctcctgaaagatctgttcccactttttgaggatccgtggactggcctcataagaagtctgcttctgcaggcttctgtttaggttgcgtggagttgatttgatgatgagaggacttagcacacggccatcagggagtctcttgggaggagtacatggtgagcagacaatgggcttgaaatggtttagttcttcggagatgctgtcattgctctcagggctgacagaacgctctggcttatgcagggaagccaaggatgaaagggagctgaagggtagacgcttttcgatggttaagtcaggggccgagacgcagcggttgttttgagttgacaagaggacaccaatgatggggttggaggctggagtcat

SEQ ID NO: 24948 - DNA, 901 bp, Homo sapiens
  MAP TO AC004616.1; EXPRESSED IN HELA, SIGNAL = 0.72; SWISSPROT HIT: P22063, EVALUE 2.00e-23; NT HIT: gi14766611, EVALUE 0.00e+00; EST_HUMAN HIT: BG938991.1, EVALUE 0.00e+00
ctgaagagcgcgtcgatcatcctcttggacggcagcctccagaggatgcgcggccaggggtcccccgaggcgctgcagtccagcttgagggttcctccgtacctgacgtccgtcctccgcggggaggtgcccgtgatgcgcgcgttggctgctgcacgctgcacgttcagctgcaccgtcctgcgcgcggagcctaccaggttggcggccacgcactcatagcgcccgctgtccttgggcgcgaggttgcggatgtagagcgtcccgttggggaaaacaaacaagttcccgtggaggaactgcgaggggcggatctgggtaccgtccccgagcacccagcgcacgctgggcaggggcgcagccttggcagtgcagtgaatgtgaatgctgagccccgggggcagcgagatgttctccagcttctcctggtggataacggggggcagtgccgccacgtgcaggcggatggccaggctgtccgccccggctgcattgctggccacgcacttatagacgcctctgtctgagaaggacgcctccttgatggaaagggtccggttttcgtgcagggtgatgcggccctccacgggggacacagtttgccacaccctcctgtcagggaagatccaggaaatttggggggctggggtccctttggccagacactccattgcaatggtgtctcccaggtagacagtgacgtcctggtagtgggaggctaggatttgaggttgctgcacggtgaccgaaagcaagaccaccatcctgtccaggccgtgcaggttgctggcggtgcacatatactggcctcgatcttgtacttgaaccttccgtatcactaaggtaccgttcttgagaacctcaaaccgttgtatcctggtattcggagtcataagagctc

SEQ ID NO: 24949 - DNA, 717 bp, Homo sapiens
  MAP TO AC024584.4; EXPRESSED IN HELA, SIGNAL = 1.3; SWISSPROT HIT: P97435, EVALUE 3.30e+00; NT HIT: AL603643.1, EVALUE 1.70e-01; EST_HUMAN HIT: AL538406.1, EVALUE 4.00e+00
cctttgggaaggaatcgcggcatcctggataatttcgtggattcccgaggcagctcaggtgtccaccagcgggcatactgctgcctcaaagagttgggcaagatgctgttcggggtgaaggacattgcactgttggagcacgggtgcaaggccctggaggtggacagttacaagtccctgatgatcctggggatcccggaggactgcaaccacgaggaattcgaagagattattcggctgcccctcaaacctctaggcaagttcgaagtggctgggaaggcctatctggaagaagataaatccaaggcggccatcattcagctgacggaggacatcaattacgccgtggtccccagggagatcaagggcaagggcggtgtgtggagagtggtctacatgccccggaagcaggacattgaattcctgaccaagctgaacctctttctgcagagcgagggcaggacggtggaggatatggcccgggtcctgaggcaggaactgtgtcccccagccacgggccccagagagctgcctgcaagaaagtgctctgtgcctgggctgggggagaaaccggaggctggggccaccgtccagatggacgtggtgccacctctggactcctccgagaaggagagcaaggctggagttggcaagaggggcaaaaggaagaacaagaaaaaccgccggcggcatcacgcctcagacaagaagctgtga

SEQ ID NO: 24950 - DNA, 599 bp, Homo sapiens
  MAP TO AL035701.13; EXPRESSED IN HELA, SIGNAL = 0.34; EST_HUMAN HIT: AU100384.1, EVALUE 1.00e-33; SWISSPROT HIT: Q08470, EVALUE 7.70e+00; NT HIT: AJ133134.1, EVALUE 8.00e-25
tctggaagaaaagggattaaatatgaatatgcataccaaaaagtacaccagagttgtacttggctacacccagaaaaacaaaggcataggaaaagatgatttctggaagaaaagggattcaatatgagtacacagagttgtacttgactacaccaagactagtcacacaagtccttttctcctattaatcaaaaccttgcaggtgaaaaagaaacagtgctttttaccatttgctccaccagagagagacaaacagaggctgggagcctgatgggtaagaatctcttacccttctgctggcttgtcaggtcctgggttcccttagctgcagcttccagaagagtggagctttggaatcctgctcacagcaacaaaacagtaggagccaaaggaaaacctcccctttgccctctgaagttttgctgaaaaaaatcaactcagatgaattggagaaaaggcatacaaatttgttaatgtgcacatgaaggaaaaccacagagtgactaccccaccctccaatggagttaagaaatgtatgccatcctgaggttgcagaaagaatggcagcttggatcatggcaaaacagattctggtggca

SEQ ID NO: 24951 - DNA, 953 bp, Homo sapiens
  MAP TO AC005052.1; EXPRESSED IN HELA, SIGNAL = 0.5; EST_HUMAN HIT: BG118506.1, EVALUE 1.00e-106; SWISSPROT HIT: P42773, EVALUE 6.00e-05
tcaacggtcctggaatgaggggaacagatggcggaaaaggctatgcatttgcgccacccggctgcccgcggtgtccttcgccttggtccgcgacgctgccactctcctgcttgtctccacagccgtcgcgcccactgcgctcgcggccctccacgcagtggtgccactgctgttgttgttcaggttggtgcacccgctgccgctctccatctcccattcctcggctcccgacagctcccgcaacctccaaggcgcgtcgggccgcaggtagtggcaggcccggtggccgctgtggtcgcggcgcgtagcgtcagcacccagggcgcccaccagcaccttgatgaccatgtcgtggccctgaagggccgccaggtggaggggcgtgaggccgccgctgcctggggcgctcacgtcgagcctcagcccccggcgtagggcgaaatcgtgtaccagaatgagctcctcgtggcgcccgtgcttggccagccagtgcagaaccgagtagccggtgatcgggtcgccccgcagcagcagctccggctcagcctccagcagctcccgcagcacctcatagcggccctcggcggctgccagaatccacgcgtgctcccgcggttccaggcacagcctgctgctgcccggcccactcggcccgcccagctcctcggcgcgctcctccgacagccaccccgcaggagccgcccgctgcagccccagcagttcccgcagcgctccccgccggcgccctgagcccgctgcagagtgcatcagcgtgcctgggaaggggtgctcccgggaggcggcggctgcggctttgccccagtacctgcccaggctaccagtgtccgctctcgaggggcggggctgcggggcgcaccgcaggctctgcgaggtcggcgcgagagaggccgtgggtgcccggttcgcggcccctccgagctgggccatggtct

SEQ ID NO: 24952 - DNA, 1296 bp, Homo sapiens
  MAP TO AC000357.1; EXPRESSED IN HELA, SIGNAL =   3; EXPRESSED IN LUNG, SIGNAL = 1.3; EST_HUMAN HIT: BI834026.1, EVALUE 0.00e+00; SWISSPROT HIT: P16275, EVALUE 1.00e-03; NT HIT: gi16177842, EVALUE 0.00e+00
tcatctcttgccagaaggccaccagctggcactggttgggagtcgcattatcacttgtttctcctctggactgaagtgcaagatagtcagtatggctgtgagagtctgctggcggcccagggagtcaggtaaggtcaggaagcggtagatgatgtttttgaggtactccagattggctccctccctgctctggtccctgatgttcttttcgatgtggctctgcagggctgcaacctcctcacgatgccgttcgccctcctccagcagccgatcctgcagctgatgcacctcgacctccagcctgtgcttctgcttcctcagtgatgtgatctccacctccttgcgggccagttgctcagcgtacagaaagaaagtgggctcattggccgctgcaagttgtaatgcttgggtcaggctatcagaggatgatgtgtcagctgggtccccaggaccgccaccacccacaggacttctgcgtcctggcagcccagaggccaaggccacagaacgcagttgctccagttccaagtccttctcggtgagcacagctagggcacgatcccgctgcttgtgcagctcctcctccagtttcagtgtgcggtccctgaagtccagctggcaccgctccagctcctgccggtggagctgctgcagccgggccagctcctgcttccagtcatcagcctcctgctggtgttggtgctccagctcctcgcaggagagccgcagggaaatatacttctccttcagctctgcaagctgttcctgggctgcctccagctcctttcccaggttaccatctttggtattcttgcttttgaggacaacctgggctctcatcttgtacctctcaaactcttccttcagctgtttcagctcctgttggtaatagagtgcagtagccttctccccatcagcagcctccgagctgggcattatctccaggtcacagagcttctccacatccagggtcacctggcttttcctggccgcaacctgcagcagcctcttcagcttctccatcttatctttcaggacattgacatccagactggactcctctccatggctgtctaaaggggacctgctggaggctgctagagccagtgtcttgttctccaggtccagctgcagaatgcgctccttcagcttctgaatggccagctggtccttctgcttggctttctcgtaggtgcctagcagctcagacacctcggatatttgattctccagggctgccaccctctgttcttctacctgagattgctgacggagttgatcctctgcaagagctgt

SEQ ID NO: 24953 - DNA, 1464 bp, Homo sapiens
  MAP TO AC006208.3; EXPRESSED IN HELA, SIGNAL = 0.87; EXPRESSED IN PLACENTA, SIGNAL = 2.8; EST_HUMAN HIT: AU132507.1, EVALUE 0.00e+00; SWISSPROT HIT: P41951, EVALUE 2.20e-01; NT HIT: gi14735660, EVALUE 0.00e+00
cccagaacatgccgagccggaggtccaggtggtgccggggtctggccagatcatcttcctgcccttcacctgcattggctacacggccaccaatcaggacttcatccagcgcctgagcacactgatccggcaggccatcgagcggcagctgcctgcctggatcgaggctgccaaccagcgggaggagggccagggtgaacagggcgaggaggaggatgaggaggaggaagaagaggaggacgtggctgagaaccgctactttgaaatggggcccccagacgtggaggaggaggagggaggaggccagggggaggaagaggaggaggaagaggaggatgaagaggccgaggaggagcgcctggctctggaatgggccctgggcgcggacgaggacttcctgctggagcacatccgcatcctcaaggtgctgtggtgcttcctgatccatgtgcagggcagtatccgccagttcgccgcctgccttgtgctcaccgacttcggcatcgcagtcttcgagatcccgcaccaggagtctcggggcagcagccagcacatcctctcctccctgcgctttgtcttttgcttcccgcatggcgacctcaccgagtttggcttcctcatgccggagctgtgtctggtgctcaaggtacggcacagtgagaacacgctcttcattatctcggacgccgccaacctgcacgagttccacgcggacctgcgctcatgctttgcaccccagcacatggccatgctgtgtagccccatcctctacggcagccacaccagcctgcaggagttcctgcgccagctgctcaccttctacaaggtggctggcggctgccaggagcgcagccagggctgcttccccgtctacctggtctacagtgacaagcgcatggtgcagacggccgccggggactactcaggcaacatcgagtgggccagctgcacactctgttcagccgtgcggcgctcctgctgcgcgccctctgaggccgtcaagtccgccgccatcccctactggctgttgctcacgccccagcacctcaacgtcatcaaggccgacttcaaccccatgcccaaccgtggcacccacaactgtcgcaaccgcaacagcttcaagctcagccgtgtgccgctctccaccgtgctgctggaccccacacgcagctgtacccagcctcggggcgcctttgctgatggccacgtgctagagctgctcgtggggtaccgctttgtcactgccatcttcgtgctgccccacgagaagttccacttcctgcgcgtctacaaccagctgcgggcctcgctgcaggacctgaagactgtggtcatcgccaagacccccgggacgggaggcagcccccagggctcctttgcggatggccagcctgccgagcgcagggccaggtgagatcaagcacagctctcaggggccccgggggcatgggtctggcatgtgtg

SEQ ID NO: 24954 - DNA, 596 bp, Homo sapiens
  MAP TO AL021997.1; EXPRESSED IN HELA, SIGNAL = 0.63; EST_HUMAN HIT: BI253396.1, EVALUE 0.00e+00; NT HIT: gi14760679, EVALUE 0.00e+00; SWISSPROT HIT: O43309, EVALUE 6.00e-34
ctgttgtcctgtgtctccacttcctgtctctagattctccagcactgtcactgcctcctctccactctccagaggatatgtcttcacacagggctggagctccttgggcaggatggtcaggaactgctccagcaccagcagttccattatctgttccttggtgtgcatctccggtctcagccattgatgacaaagttctcggagttgggccagagcttcctggggtccgtgagcctcctggtagcagaagtgccgaaagcgcaggcggcaaatctcctgagtgtgggagctgccctcctgtgagttgcacacctgctcccaggtgggatcttcctccttcactttcacaaggccatcttcattttcaggagcagggcctggcaaagcttcatacatgttgagcttagaggctaaagcttcacttagcttggggtctatattcagaaatagagatctgaggcataagaatttatcagcaacatgcaaattataagagcttcaaaactgtatgtaacctacttacatttttgtccccactgtaggtaatgctcaaaagctgagcctgcttgcttctattatcagtgaaatgaatcaga

SEQ ID NO: 24955 - DNA, 562 bp, Homo sapiens
  MAP TO Z97183.1; EXPRESSED IN LUNG, SIGNAL = 1.3; EXPRESSED IN HELA, SIGNAL = 0.99; EXPRESSED IN PLACENTA, SIGNAL = 3.3; EST_HUMAN HIT: BG519585.1, EVALUE 0.00e+00; NT HIT: gi15809015, EVALUE 0.00e+00; SWISSPROT HIT: P24032, EVALUE 5.00e-86
tcagtcgtctttgtcttttgctccatgtttcaggatgcatgtgaactcgatgtaattgaaattcccctttttgttaataggcgcttctctgtacagctcatccacttcctcatccgtaaaccgatcccacatggttatcagcagctctctcaggtaatcttcctgaataatgcctgttgcttcttcatcaaagcaagcaaaagcatttccaatgacatcttcaggatctgtgccatttaacttctcaccaaatatggtgaggaacatggtgaaatcgatgggccctggtgcctcattcattatggcatcaaggtatgcatcggtgggattcttccctagggaaacaagcatatcatgcaaatcttctttgttgatgaaaccatctctgttctgatcaatcatgttgaaggcctctttgaactcctgaatctgtgactggtcaaacatggcaaacacgttggatgttgtgcgctgagggagctttttggtggtcttggtcttgcctttttgctccacatggtggttgtttaattccagcgccaaacaccagaagtgggctgcc

SEQ ID NO: 24956 - DNA, 639 bp, Homo sapiens
  MAP TO AC007869.2; EXPRESSED IN HELA, SIGNAL = 0.4; NT HIT: gi14747562, EVALUE 0.00e+00; SWISSPROT HIT: Q9NPC2, EVALUE 3.00e-32; EST_HUMAN HIT: BF970371.1, EVALUE 1.00e-21
atggccctgcgcagtggggcgggctgcttcggccgggtctggcgcagggtgtcggggttcccggacgcctggccccggcgctcgagcagcctcctgtgcctgtccgccttctcggctgagcccgggcccgcgccgcccctgccccgccagccgcctcgcggtggcggtggctgtggcggccccagcggagggggccccccccagcctccccgccccccgcctccccgctgctgctgctgctgctgccgccgccgcttacaacttggaggcggcggcggcggcggcggaggaggaggcggcggcggccgccgggcgctgcagtgggacgcgcgcggctgtgagcctgcgggacatgccccccgcgccggctccttgctggcggccatgaagaggcagaacgtgcggactctgtccctcatcgtctgcaccttcacctacctgctggtgggcgccgccgtgttcgacgccctcgagtcggaccacgagatgcgcgaggaggagaaactcaaagccgaggagatccggatcaaggggaagtacaacatcagcagcgaggactaccggcagctggagctggtgatcctgcagtcggaaccgcaccgcgccggcgtccagtggaaattcgccggctccttctac

SEQ ID NO: 24957 - DNA, 1305 bp, Homo sapiens
  MAP TO AC005754.1; EXPRESSED IN HELA, SIGNAL = 1.1; EXPRESSED IN PLACENTA, SIGNAL = 1.4; EXPRESSED IN LUNG, SIGNAL =   1; NT HIT: gi15295804, EVALUE 0.00e+00; SWISSPROT HIT: Q9Y5E7, EVALUE 0.00e+00; EST_HUMAN HIT: BG722685.1, EVALUE 0.00e+00
ttaagtgaattcaaagctcttcctgaaactgggatttgcctcgctaaccctctctgcaccctgagcaacgaagttggggataattggcttcaggaacttgaactcatttgtcccggagcctccagtcagacacacctcgtactggtagctctgggacagggtcccggtgccgctcacgtccaccatctgccctggaaaggggccctcgggcaccgagcagcgacccaccgaggccgccctgctcctcctgcacagccgcaccgccacgaacaggagcaccgagaagaggaagagcgaagacaccgaggccaacgccaccaccaggtagacggtgagcaagtcggcctgggcctgggccggtgccgcctccgggagcagcaggtagggctgggagaagccgtccaccaggagcacgtgcagcgtggcggtggccgagcgcggaggctcgccattgtccttgaccagcaccaccagcctctgcttggcagcgtcgcgctccctcagcagcctggcggtgcgcacctcgccattgtgcgcccacacgccgaacagcccgggctccgtggccttgagcagctggtacgacagccaggcgttctggcccgagtcgccgtccaccgccaccaccttggtcaccaggtagcccggctcggccgcccggggcaccagctcggtgcagggcgcggagccgttctgcagcgggtacagcacgaagggcgagttgtcgttggcgtccagcaccagcacgcgcaccagcgcctcgctgctcaacgccggggagccgcggtctgcggcgcccacgcggaactcgaacgcctgcagggcctcgtagtccagcgactggagagcgaacaggtggccgttgtccgcgttgatggagaccagggaggcgaggggcaggtgcgggtcctggggcggcagcagcgagtaggtgacctgggcgttggtgcccgagtctctgtctgtggcgctgacgctgccgatgtgcagggcggggctgttgttctcgcggacgaacagggtgtaggaggtttgggtgaaggcgggggcgttgtcattgacgtcggagaccagcacggttatgttgtgctcggttttcagcctgggtgtcccgaagtcggtgacggtgatggtgatgttgtattcggatctggtctcccggtccagggccgtgcttatcaccagagtgtaaaagttctcaacagaaggtttcaagaaaaaaggaagatcatcttggatggagcacaccatccttccgttgtctccggagtcaggatctgaaacgctgaatacagcaatgagggt

SEQ ID NO: 24958 - DNA, 1114 bp, Homo sapiens
  MAP TO AC012467.9; EXPRESSED IN HELA, SIGNAL = 0.38; EST_HUMAN HIT: BG720228.1, EVALUE 0.00e+00; NT HIT: AJ272267.1, EVALUE 0.00e+00; SWISSPROT HIT: P17444, EVALUE 2.00e-46
atgagtacaaatactctgttttctttctcccttggaaagccctttgcccccctgccttccagcaggcagactccagcccagtctccaggttcatacacagggcacagggaagcattttacccctcagttgggggaggggcctttctgctgccccatcccctggcctgtgcctgtccatcctggcacatacaaaacagttctgaaattcctgtgtgtccctcacttcctcctcctagttcctttgagcagccacatcaggctgggcctgctgcaccctgtcccggcaggccgttggtgagcataccctggatatgcggagttaagatttttaaagcccctcttcctgttttagggagaagtgagtcatctcattcccctccgtggatcagaggacttggactagatagaagcatgtggtgtctcctacgaggcctgggccggcctggagccctggcacggggagccctggggcagcagcaatccctgggtgcccgggccctggccagcgcaggctctgagagccgggacgagtacagctatgtggtggtgggcgcgggctcggcgggctgcgtgctggctgggaggctcacggaggaccccgccgagcgcgtgctgctgctggaggccgggcccaaggacgtgctcgcggggagcaagcggctctcgtggaagatccacatgcccgcggccctggtggccaacctgtgcgacgacaggtacaactggtgctaccacacagaggtgcagcggggcctggacggccgcgtgctgtactggccacgcggccgcgtctggggtggctcctcatccctcaatgccatggtctacgtccgtgggcacgccgaggactacgagcgctggcagcgccagggcgcccgcggctgggactacgcgcactgcctgccctacttccgcaaggcgcagggccacgagctgggcgccagccggtaccggggcgccgatggcccgctgcgggtgtcccggggcaagaccaaccacccgctgcactgcgcattcctggaggccacgcagcaggccggctacccgctcaccgaggacatgaatggcttccagcaggagggcttcggctggatggacatgaccatccatgaag

SEQ ID NO: 24959 - DNA, 670 bp, Homo sapiens
  MAP TO AL121901.10; EXPRESSED IN HELA, SIGNAL = 0.64; NT HIT: S71529.1, EVALUE 1.60e-01; SWISSPROT HIT: Q07889, EVALUE 4.30e-01
ctatgtgtctctgtcccaacaggtagtagaaatggaggtctcctgggcagcagtggtctcttgggtacaggacttctcaagaatggccaggtgctcggcaatggtggtgttcttggcacaggccttctcagtgggaataaccatcaggctggggccaacagtggttccccaactacaagagttgctgctcacctctctgagccaaaccaccttgagaatgaccaggaatacatttatctgagttcccctcatgccgaagatgccactgagtacagcatcaagcctgggaaatccagtatgttccagatgcccactctgctgcccacacccccagtgagaatggctgcttctgcccctactccatctgtgagaatccatgtgaccaatcaagacactatgggtaaacttggtcagagtgagatgggcggtccaggctctactgacaaaagtgctgtgatcagtcaaggatccttaggtcacaaaggaatgactacccctggacaattaagtcagaaggttataaagagccttggctactctgaccacaagtggatgacccaatctggccatacaggtgtgggtgatatgagcttctcaggcagtggtcaaccttcagatgcttcttcaggaaatgctgttgtgtctggggtggcttcacctggcagttacg

SEQ ID NO: 24960 - DNA, 693 bp, Homo sapiens
  MAP TO AC002477.1; EXPRESSED IN HELA, SIGNAL = 0.78; EST_HUMAN HIT: AW005200.1, EVALUE 0.00e+00; NT HIT: gi11422612, EVALUE 0.00e+00; SWISSPROT HIT: O15541, EVALUE 0.00e+00
ttgcatcctcatcggggtcttctggcaagtcggaagcaccaccctctcctgtagctcgatgcttctctagtttagcaatcaattctttcgctggattgaagacgccattggtctgctggtcacagacatagcagcgcggggtggtgcggaaatgctgcagtgcacagctctcgcagaaataatgcctgcacttggtgacaactgggttttggaagctctggcgacagatgaaacacttgaatggtatttcctcatcatcgcttcccacttcatagttttcatcctcatagacaccatagcgaccctcatcaagctcacgttcgatctgccacccatgcttgtaatctgaacggtcatggaggaatttgcagctgtctccgaagccgcagaagccagtctctttgtagtccttacagatgtcgggctggtaatcccagcgcacggtggcacgtagatgctcgggcgctcggatggggcccttcctcaccatcccggaagaggcattgcccatagacgtatccttgggcttcatgtatttctgataattgttgattccccgatagatcttgtcatcctccttgcccctcagctcctcctggatcttctggctgcgctcaaagatggcttgtgcatcgcgctctttctctgtgtccagctcatagacagctgtcgctcccatatcctctggtccca

SEQ ID NO: 24961 - DNA, 762 bp, Homo sapiens
  MAP TO AL136231.3; EXPRESSED IN HELA, SIGNAL = 1.5; NT HIT: gi15298469, EVALUE 5.00e-08; SWISSPROT HIT: Q57819, EVALUE 5.00e-03; EST_HUMAN HIT: BI464052.1, EVALUE 0.00e+00
gcccagaaaaaagccaaaagctacgtcggtgacattgtgccgccccagcatgaccctggataggcccaagacgaaggcccacagaaccaccagcaccctcagtggaatggccagcaccaggtggttcaggatgaacctcgacatcagggcggcccttgtggcatggcccgaggggaaggagtacttgtccaccgagagagtgacaaacatgtccatctggttgtgggccgggcggcgcctgcggaccagccctttgatcaaggccaccagcagcaggtccaacagcagggcgaagagcaggttcatcagcacctcgcgcccggcccagctgtcgctcctgcacaggcagtagagggtgcccagcagccaggggatgccgtgtcccgagatctccagcagcttcataaggggtcgcacgctgccccacgacgagctctctcccgcgcacacccccagcttcttggacagccacaggtcgatggccagcagggagcgcagggcgatgcccaggaaggacgggttcaagtccatgcggtcctcctcgggcagcggaggcgcgggcgactgcgaggggcccgccgcggccagggggaaggagccgcggcggtgaactgggctctccgatgcacggagccgggcgcaggtggggtccacggccgtggcgcggctgctgagcagggactggaactcaaacctgctgccgccgccaccgccgccatgggctgggctgccggggctgctgctgctgctcgaagcggagac

SEQ ID NO: 24962 - DNA, 484 bp, Homo sapiens
  MAP TO AC005478.1; EXPRESSED IN HELA, SIGNAL = 0.66; EST_HUMAN HIT: BF794653.1, EVALUE 0.00e+00; SWISSPROT HIT: P41183, EVALUE 6.00e-04; NT HIT: gi15318393, EVALUE 0.00e+00
agtccagcaggttggccttccttgggcgccccggcctcgcttgccagtcaggggaggggcactggatgccacactggggaatggggaagtcagcagttggggggataggggtccagccaccatgggcaagcggtccaccccaggtaacacaggcaaagaggcttggcctgcaatggctgcaccagccgcccgagctgcctcctcctctggctgcatgctgccggcgatgccattgctgttggctgccaaggctgccccgttggtcatgtccaaagggaagcccaagtccgaggtcccaggggggcgaaaaagcattatatcggcgcgggcagggggtaccaggatctgtacgttggactgtttgatgacttcctggcagatctcgataaccgacctcatcagcaggaacttggcggccgtcatgagttcgggaaagctctccaagcgcaccacgatgcgggaagtgtaggcgaagtccagacat

SEQ ID NO: 24963 - DNA, 493 bp, Homo sapiens
  MAP TO AC005663.1; EXPRESSED IN HELA, SIGNAL = 0.76; NT HIT: gi4502246, EVALUE 0.00e+00; SWISSPROT HIT: O00192, EVALUE 9.00e-92; EST_HUMAN HIT: BF513464.1, EVALUE 0.00e+00
ggcctacgaggacacagcagatgatggcggcgagctggcggacgagcggcctgcgttcccaatggtgacggcgcccctggcccagcctgaacggggcagcatgggcagcctggaccggctggtgcggcgctcgccctcagtggatagcgcccgcaaggagccgcgctggcgggaccctgagctgcctgaggtgctggccatgctgcggcaccccgtggaccccgtgaaggccaatgcggccgcctacctgcagcatctgtgctttgagaacgagggtgtcaagcggcgtgtacggcagttgcgggggctgccgctgcttgtggcactgctggaccacccgcgggctgaggtgcggcgccgggcctgtggggcactgcgcaacctctcctatggccgcgacactgacaacaaggccgccatccgggactgcggtggtgtgcctgccctggtgcgcctgctgagggctgcccgggacaacgaggtccgtgagctt

SEQ ID NO: 24964 - DNA, 522 bp, Homo sapiens
  MAP TO AL135749.2; EXPRESSED IN HELA, SIGNAL = 1.2; SWISSPROT HIT: Q99966, EVALUE 1.00e-76; EST_HUMAN HIT: AL544337.1, EVALUE 0.00e+00; NT HIT: gi13629698, EVALUE 0.00e+00
ttagcagctagatggaaagtccgcagtgaagtcaaactcattctgccccagccacagctccggaagctcattggctcggtccaaccccagttccaccaccagcgacatcagcacttcctcatccactgggtccgaatcgatgatagcagggctctgggcaccagcagaaggagagagtgattctgcccctcccgcctgggccccaaagtcccagttttgcaggggtcctgcctccccgggttggcctggagtggcagcagccatcccctgatactggctattaagtttctgcaggtgcatactagccagcaagtgaggggcggggtgcaggttgaaggatgggggtttagtgggaggggtggttgtaggagagcctattggagatcccgaggaactagtgggagccccactggccttggttccatttgaggctaccccagggtagtgcagaatggccactgctttgcgatctttcaccgcaaggttggagtaggccacggagctcatctcttggttggcatc

SEQ ID NO: 24965 - DNA, 797 bp, Homo sapiens
  MAP TO AL031133.1; EXPRESSED IN HELA, SIGNAL = 0.25; SWISSPROT HIT: P04280, EVALUE 2.00e-03; EST_HUMAN HIT: BG397809.1, EVALUE 2.00e-91
gcaagaaatgcacctatggcatcaagtgcaagttctaccacccggagaggccgcaccacgcgcaactggcggtggccgacgagctccgcgccaagacaggggcccggcctggcgcgggcgccgaggagcagcggccaccgagagccccgggcggctccgcaggagcccgggcggccccccgggaaccatttgcgcacagcctcccgccggcgcgggggtccccggacctggccgccctgcgagggagcttctctcggctggccttcagcgacgacctggggcccctggggccgcctctcccggtccccgcctgcagcctcacgccccgactgggcgggcccgactgggtgtccgcgggcggccgggtgccaggcccgctcagcctccctagcccggagagccagttctccccgggcgacctcccgcctccgcccggcctgcagctccagccgcggggcgaacaccgccctagggacctgcacggcgacttgctttccccgcgcaggccacccgacgacccgtgggcccgtccaccccgctccgaccgcttccctgggcgctccgtctgggcggagccggcctggggcgacggcgccactgggggactttcagtgtacgcgaccgaggacgacgagggggacgcgcgcgcccgggctcgcatcgcgctctacagcgtcttcccgcgtgaccaggtggaccgcgtgatggccgcgttcccggagctctcagacctcgccaggctcatcctcctggtacagagatgccagagcgcgggggcgcccctgggcaagccctaa

SEQ ID NO: 24966 - DNA, 769 bp, Homo sapiens
  MAP TO AC015493.4; EXPRESSED IN HELA, SIGNAL = 0.3; NT HIT: U55026.1, EVALUE 2.90e+00; SWISSPROT HIT: Q9UPN9, EVALUE 1.00e-08; EST_HUMAN HIT: BI830098.1, EVALUE 8.00e-85
ttaccccacgccatcttccccatgtgttcctgaactagaagttaggctgaaggagtggaaaaggggaggacctgctttgaacttggcgatggcgctgaagagtgaggcggccctctcggagcaggcgtcgatgaggctaatggtgtcgtggccattgtggaaagagaacttgcagaaggtgcagagcaatttgttgtcattgcggcagtactcgatgatgcggctggatgggtggtggatgcagatcttctcgtcctgttcctcggcgctggtgtccacaaagacgtggtcttgcatggccacatccgagtggaaggccttgaggcagtcgttgcacaggttgaggcggcaggtgatgcagcgcttgtaagcgatgcgcctgttgcggcagacctggcagaggatgggcccggaggagcggtcaaagcgccacttgaggtagccgtgctcctgcatgtagcgcttggtgagacgcccgtgcaggtagttctcgggcagctgcatcttgttgctgtagggcatgcagtgcgagcggtcgcacactgggcagatgaggatgaagaagttctcggtgacctcggcgtgcttctgcagctgccgcaggcacttctcgcacaggctgtggttgcagggcagcatgaatgagtgcaggcgcagccggctgcacatggggcaattgaggtggttcaccaggtgactgttggctggtattgactttacttcatccacctgggtatcgctgctcccagtgcgcagggcagtcttggag

SEQ ID NO: 24967 - DNA, 596 bp, Homo sapiens
  MAP TO AL033527.25; EXPRESSED IN HELA, SIGNAL = 0.44; NT HIT: M19720.1, EVALUE 0.00e+00; SWISSPROT HIT: P12524, EVALUE 3.00e-87; EST_HUMAN HIT: AL580480.1, EVALUE 0.00e+00
gtagccagtgaggtatgcaattcttttctgcaactgctgctgccggcatcggagctgtcttttctctgtagccatcctcttctcagcccccaccagggcttgcaagtattccaaggccttgcttaggatcactactttgggggccttggagcagctggccagggtgggcacctggtccctcagcgccaagaatcgcgaacgcaggtcattccgcctcttgcgctccaggaagttgtgattcttcctcttggtcacatcctcagtatcagaactgacaggtttggggtggcaggactgggcagcctcactttctacaggtgggggactcacaatctcttcatcctcctcatcttccttttcccctgcagcatctctctccagaacctcttcttggggacccctctctgaagcctcttcttgggagcagctttctggaggaaaacgggcagcatagttgtgctgttgctgatggatggagatgtggaaatgcttcatgcagggatccagggggtctgctcgcaccgtgatggtgaccggcttccgaatacccagagactgcctcttctctactgtcacaacatcaatttcttcattct

SEQ ID NO: 24968 - DNA, 1152 bp, Homo sapiens
  MAP TO U65406.1; EXPRESSED IN HELA, SIGNAL = 0.58; SWISSPROT HIT: P48048, EVALUE 0.00e+00; EST_HUMAN HIT: BG433987.1, EVALUE 0.00e+00; NT HIT: U65406.1, EVALUE 0.00e+00
atgtgttttcagatcagggtgttgacagaaagtatgttcaaacatcttcggaaatgggtcgtcactcgcttttttgggcattctcggcaaagagcaaggctagtctccaaagatggaaggtgcaacatagaatttggcaatgtggaggcacagtcaaggtttatattctttgtggacatctggacaacggtacttgacctcaagtggagatacaaaatgaccattttcatcacagccttcttggggagttggtttttctttggtctcctgtggtatgcagtagcgtacattcacaaagacctcccggaattccatccttctgccaatcacactccctgtgtggagaatattaatggcttgacctcagcttttctgttttctctggagactcaagtgaccattggatatggattcaggtgtgtgacagaacagtgtgccactgccatttttctgcttatctttcagtctatacttggagttataatcaattctttcatgtgtggggccatcttagccaagatctccaggcccaaaaaacgtgccaagaccattacgttcagcaagaacgcagtgatcagcaaacggggagggaagctttgcctcctaatccgagtggctaatctcaggaagagccttcttattggcagtcacatttatggaaagcttctgaagaccacagtcactcctgaaggagagaccattattttggaccagatcaatatcaactttgtagttgacgctgggaatgaaaatttattcttcatctccccattgacaatttaccatgtcattgatcacaacagccctttcttccacatggcagcggagacccttctccagcaggactttgaattagtggtgtttttagatggcacagtggagtccaccagtgctacctgccaagtccggacatcctatgtcccagaggaggtgctttggggctaccgttttgctcccatagtatccaagacaaaggaagggaaataccgagtggatttccataactttagcaagacagtggaagtggagacccctcactgtgccatgtgcctttataatgagaaagatgttagagccaggatgaagagaggctatgacaaccccaacttcatcttgtcagaagtcaatgaaacagatgacaccaaaatgtaa

SEQ ID NO: 24969 - DNA, 582 bp, Homo sapiens
  MAP TO AC009516.17; EXPRESSED IN HELA, SIGNAL = 0.38; NT HIT: AF128544.1, EVALUE 8.70e+00; SWISSPROT HIT: Q05904, EVALUE 1.70e-01; EST_HUMAN HIT: BI831230.1, EVALUE 8.00e-32
gtcagtcctgctcccagagggactccctgctgtgggattcgctgggtagccagaccagctttcagtggacacaggagcagcccttgtcctggttctcagggctgctgggctcaagctctggcgtgcctgaagcatcagagccgaggcctggagaacaggagccaatcttccgcaagcgagagttcaataaggagatcaagtcattactgagccagctggagtccctcgacctgcctggctactgtccgctccgtgagccccatcgcacgctgaacttcctggctgaccaccgcctcttccctgccctgcaaagcgtggtcagccaggctgtggataagctccgtggcgcccactgccgcgacggccgtcctctgttccccaccagcttggagcccacctcagatctgccgcctctgggctctgagccagctaaacccaccaatggcgggcagccctatgcttccccccgccccacagtctccagccccaagatgcttcagagaaaacgcaaggacagaggaggctccccctccatgtctagtgcccaggtggccaccagattcaaactcaaggtgacaccca

SEQ ID NO: 24970 - DNA, 1069 bp, Homo sapiens
  MAP TO AC013648.3; EXPRESSED IN HELA, SIGNAL = 5.7; SWISSPROT HIT: gi1351900, EVALUE 2.00e-33; EST_HUMAN HIT: AW996549.1, EVALUE 0.00e+00
atgtggaggtttctctgcccagcgtggaggtggacgtcgaggccccaggagccaagctggatggtgcgcggctggagggggacctgtccctggccgacaaggacatgacggccaaagacagcaagttcaaaatgcccaagttcaagatgccgtcgttcggggtgtctgccccaggcaagtccatggaggcatcagtggatgtgaccgcgccaaaggtggaggccgacgtgagcctcccttccatgcagggggacctcaaggccactgacctcagcgttcagcccccttccgctgacctggaggtccaggctggccaagtggacgtgaaactcccagagggccccgtgcccgagggagccagcctcaaagggcacctgcccaaggtgcagatgcccagtttcaagatgcccaaagtggacctcaagggcccccagatagatgttaagggccccaagctggacctgaaaggccccaaggcggaagtgacagcccctgatgtgaagatgtctctgtccagcatggaggtggacgtccaggccccgagagcaaagctggatggtgtgcagctggagggggacctgtccctggccgacaaggatgtgactgccaaagacagcaagttcaaaatgcccaagttcaagatgccatcattcggggtgtcggccccaggcaagtccatggaggcgtccgtggatgtgtctgagctgaaggcgaaagccgacgtgagcctcccctccatgcagggggacctcaagaccactgacctcagcattcagtccccttccgccgacctggaggtccaggctggccaagtggacgtgaaactcccggagggccccctgcccaagggagccggcctcaaagggcacctccccaaggtgcagatgccctgtttgaagatgcccaaagtggccctcaagggcccccaggtggatgtcaagggccccaagctggacctgaaaggccccaaggcggatgtgatgacccccgtcgtggaggtgtctctgcccagcatggaggtggacgtcgaggccccgggagccaagctggacagtgcgcggctggaggg

SEQ ID NO: 24971 - DNA, 1026 bp, Homo sapiens
  MAP TO AC006313.1; EXPRESSED IN HELA, SIGNAL = 0.51; NT HIT: X94742.1, EVALUE 4.00e-03; EST_HUMAN HIT: BF946493.1, EVALUE 2.40e-02; SWISSPROT HIT: Q95155, EVALUE 9.00e-91
cttatctccctcctgctttgcctcttctcagtctctgtccagtaggatgaactcagagaacctcacccgggccgcggttgcccctgctgaattcgtcctcctgggcatcacaaatcgctgggacctgcgtgtggccctcttcctgacctgcctgcctgtctacctggtgagcctgctgggaaacatgggcatggcgctgctgatccgcatggatgcccggctccacacacctatgtacttcttcctggccaacctctccctgctggatgcctgctattcctccgccatcggccccaagatgctagtggacctgctgctgccccgagccaccatcccttacacagcctgtgccctccagatgtttgtctttgcaggtctggctgatactgagtgttgcttgctggcagccatggcctatgaccgctacgtggccatcagaaacccacttctctatacaacagctatgtcgcagcgtctatgcctggccttgctgggagcatcaggcctgggtggggcagtgagtgcctttgttcacacaaccctcaccttccgcctgagcttctgccgctcccggaagatcaatagcttcttctgcgatatccctccactgctggccatctcgtgcagtgacaccagtctcaatgaactccttctcttcgccatctgtggcttcatccagacagccacggtgttagctatcacggtgtcttatggcttcatcgctggggctgtgatccacatgcgctcggtcgagggcagtcggcgagcagcctccaccggtggttcccacctcacagccgtggccatgatgtacgggacactcattttcatgtacctgcgccccagctccagctatgccctggacactgacaagatggcctctgtgttctataccctggtcatcccgtctctcaacccactcatctacagcctccgcaataaggaggtcaaggaggccctcaggcagacctggagccgattccactgtccagggcaggggtcccagtgattggtccagggaggctg

SEQ ID NO: 24972 - DNA, 837 bp, Homo sapiens
  MAP TO AL136418.1; EXPRESSED IN HELA, SIGNAL = 3.6; SWISSPROT HIT: Q9Y5J3, EVALUE 4.60e-01; NT HIT: gi15300019, EVALUE 0.00e+00; EST_HUMAN HIT: BG258580.1, EVALUE 0.00e+00
gctggattgatgtcacctgggatgctggtggctcaaactcttaccgtatgggcgcagaaggaaaatttgacctcaagcttgcaccagggtacgaccctgatacagtggcatcacccaaacctgtttcatccactgtttcaggcacaacgcaatcatggagcagcttggtgaaaaacaactgtccagacaagacatctgctgctgcaggctcctcaagtagaaaaggaagcagcagttctgtgtgtagcgtggccagtagcagcgacatcagcttgggttcgaccaaaacggaacggagatcagaaattgtaatggaacacagtatagtttcaggagctgatgtccatgaaccaattgttgttctttcatctgctgaaaacgtccctcaaacagaagtagggtcatcttccagtgcaagcaccagcaccttaacagcggaaacgggaagtgaaaatgctgaaaggaagttaggccctgatagttctgttcgtactcctggggagtctagtgcaatatccatgggaattgtcagtgttagttctcctgatgttagttcagtatctgaattaactaataaagaagcagcttcacaacgacctcttagctcttcagcaagtaacagactgtcagtgagttctttgttggctgctggggcccctatgagctctagtgcaagtgtacctaacctgtcctcaagagaaacatctagcttggagagttttgtaaggagagtggcaaacatagcacggactaatgccacgaacaacatgaatctaagccgaagcagcagtgataacaacactaatactttggggaggaatgtgatgagcacagcaa

SEQ ID NO: 24973 - DNA, 505 bp, Homo sapiens
  MAP TO AC004908.1; EXPRESSED IN HELA, SIGNAL = 1.4; EST_HUMAN HIT: BG771504.1, EVALUE 0.00e+00; SWISSPROT HIT: P52742, EVALUE 1.00e-40; NT HIT: gi14759716, EVALUE 3.00e-05
agatctcatactcaagaggatccttttctatgcaatgacttaggagaagatttcactcaacatatagcattgactcaaaatgtgattacctacatgagaacgaaacactttgtaagcaaaaagtttgggaaaatcttcagtgactggttatcctttaatcaacacaaggaaattcacaccaaatgtaaatcatatggaagtcatctatttgattatgcctttatccaaaactctgcccttagaccacacagtgtgactcacactagagagataacattggaatgtcgtgtgtgtgggaaaacctttagcaaaaattctaatcttaggcgacatgagatgattcacactggagagaaaccacacggatgtcatctatgtgggaaagcctttactcattgctctgatcttcgaaaacatgagagaactcacactggagagaagccatatggatgtcatctatgtgggaaagccttcagtaaaagttctaaccttagacgacatgaga

SEQ ID NO: 24974 - DNA, 1619 bp, Homo sapiens
  MAP TO D87009.1; EXPRESSED IN HELA, SIGNAL = 0.38; EST_HUMAN HIT: N39816.1, EVALUE 0.00e+00; SWISSPROT HIT: Q60821, EVALUE 7.00e-10; NT HIT: gi15300639, EVALUE 7.00e-43
tccttgctgcaagggagtctggaatctctagtgttcatagccgtcttctttttagtttttacaggagaagactgagggtcagtgttgctaacaataacggaagccataccacttgatcctggctgaactgaagtttgaataataacttttgtttcacgagggaacccttgcagttgctccggctttttaaatgtttgatggtccttggttttgtgctctatttcctccttcaacgtcaaaaactgtagccggcacttggaacactgaaggaccctccttctgctgtgcctccaacaatgattcatgtatggtattgcagttttgaaaagtttgagacaaaacagacaaagcaaattctttgtgttttcatggcacgttctaaaatgtgtttccacatcagcaaagaccgacgatctgtaatggcaaacctggcacacgtagggcatttcgccaggcttatgatggtccttcatgtgttgtaagaggacctgatctgtttcaaatgacaattcacagattttacagacagcagagggccccatggcgatgtgtacactatcaatgtgacactgtagctggaagggagtgggaaactgccggtggcagtgctggcaggtggtgtggtcttcccagctgtcgttcctctgcttctcaaattccaaatgatgcttcatgtgattcataaacttaatattttttagaactttcacgcagctgaggcatttaaaggtggtgtgagtcttctgttccggctgcccatctcctttatgctgtccatagtaaaagttgctaagtaacacgatgggattttctttcttgggatcaaaggtcttgttttgacttgctagacttgaaatgtctgtcattgccaggccagactcatttgctctctctggatctgtaagattgaaatgtgcctttccattagcatcaggccaaggaaatgttactccattctgaacatggtttgatgagttgcagatcccctgtgagggtgtatttgtgcttattgtagaagacatatctgaagggaccacagctaaagaaggtacccctgggattccatccctgagtttaacccttttggaatctctgctgtttatatctgaagtggaaagtcgctttgaatcaggagaactctcatttctgcctcctccagagaccatagctccaactagacactgagtccctggggggagcgaatctgagtaattgggagaaacaacttgtggtgagctcattttataaccaggttcagatgaagacttcatagtgacaggactatctgtcgatcgcccctcagacagagaaacgggcatgatggcttttgccatagaggtcacatgatttgcaggctgcgacacgtgagcaggatattgacggaagtggcctttctttcttcttgactttgagcctggggtgactctgttcaaaatgtttgaaacgactggttttgaatttgaaatcatcccgacaaagagaacttcagcatctctatgtacatgctccaccccaacatagatcagatctggatcttcatcatcctcctccctttgtttggattctctcaaattcttctttggtgattccactttcttacacaaaaagatatctcccat

SEQ ID NO: 24975 - DNA, 1798 bp, Homo sapiens
  MAP TO AC002425.1; EXPRESSED IN HELA, SIGNAL = 0.33; EST_HUMAN HIT: BE902198.1, EVALUE 0.00e+00; SWISSPROT HIT: P13666, EVALUE 1.00e-05; NT HIT: gi8922078, EVALUE 0.00e+00
tgttggcagcacctcctctggcactgcccatggcctcagccgtctcggcttccccgactgactccggcgcagcttctgcaggggcctggtgtgttggctgctcctcctggcccctgacatgttccaggctttctggctcagtctccttggcctctgccctccggcccccggtcaccatgagaccctctgcatcaaggagccttggtgcctctccctcagggtggtagtccccacaccgcccctcactgtcttccctctgttctctctcctgccatccaacagcctcttcttccaacagcgtccacttttctagaagccccccagcctccaccatggctcccatcccctctgccctcgctgtctgggagcccgcgggatccagcccacagctgtcctctgcgcctgcagattcctcggcctctacccgccctccccaaggtcctccctccctggactcaaaagcctctacttggctgcctctgccagtcacctcttcctctgctgagccctccagaccaaattcttgcccacctgcatgctctcctgctgctgcctcttccttttctttcgagtcccagccttgcccaagcgccccttccaaagcttcaccagcgccagcagcgctgatgtgtgggaccacatcaccccccataatcccagcagccacagagccagtctgtgcatcctcacggtccgggaggcccacagccaccgcttgcagcctccagcctcttctggatgttctgtcagcctccgcctcctcatcctcagtttctctggcataggcctctcccagtgacgggcaaggccctgcgtctgcccctgtgcttccgtccagctcctggttctctgagacagatgcctctccctcctcagttccacatcccgcgtcctgggttgtcagcccctccccgcctgcctctgggacttctgatagttcagactctcggtctccttcagcctcagccgccagggtctggcctcccgcagtctcctcctcctcccgctgctcgccatcggccgcatcctcctgagtatttcctctctccatgtcctttctcgtgcggttttcccaggctcctgggaaggcctcggaggcctcaggctttacagaccccgcgtgcctgggacctgcctccaggctcctctcctgctcctctttgctcagggccagaactcccatgagctccacctcccctgcctccctttcctcgggttgcttagttggggtctgggcgccccccatcagctcaggtccttggcctttggtgacgctgtgtgtgaggccaccccattccacgcccagtaggccacagctagtctgggccgcctcactctcctcccctgtgagctcctcctcaggcctggcctctggagttgcctccaagtcggcagtgccttcagcctctccatctgagggcagctcagccactggatccctgctgctccctctctcctcctgggcctcctctgcctgtaccagctcttccatcctggcccggtcggccctgatccccaagtcctgcctcatctcagcctccttaccacgcaggtctacctggccctcaaagctctcccctgcctcctggcctcccacagcttccctccctgcggtctggctctcagcagcctcttctgttctttcagtgcccaggacctggggctgtttggggaaagggctcacctcagcctctctctcctcatccccctcctcctctaggacccagacttttccagtagcctctaggagcctttctcctgggactgctccatattctgtctgtctgactcccagcag

SEQ ID NO: 24976 - DNA, 783 bp, Homo sapiens
  MAP TO AC007608.2; EXPRESSED IN HELA, SIGNAL = 0.47; SWISSPROT HIT: P33076, EVALUE 1.00e-10; NT HIT: gi13628795, EVALUE 0.00e+00
aggtctcttggagcaggcggatgaggcggtccgccaccccgggctcatgatggcgcttcctcaggtacagctcgatgccctgttcagagaagcccttgaggttgaactcggtgcggatgtacttcctgaggaacgccgacacagcggccggacggctggtcaccaccttgcgggcattcttcagcaggttgccctgcagaaggttgaagagcagggtctggacagaggtggggtcggtcggggagcagtggcgttcacgatccgtgaacctgaacttgaactcgtcaaagccatcaaaggttaacaggacacggtcagggtggtcaaggagtaactggaagatgtcttcttgaccaacatcaggccaacagcagtgctcaaagagtagagtccgcacagagagtggtttggccatgcactgcagctgccggcagctgaatgggaagacaaagagaaattcctggaagtcttgccctgcagcccacagcaagtgcagccgctgcaggagcgtgctcttgccactgcccgcctcacccaccaccagcacagtgtccgcatcgtcattgaggtggccaggggtgctgaagagctcctccaggcccagggtggctgggctcttctgcgggggtccagccatgcccacatctgcccagacctccaggacattctctgtgtatatgtcctccaggcagagcgtctctgctccatcataggtactgaggaagcgagactgagcagacaccgtggtcctcagcttggccatatacttcttgcatgtggcag

SEQ ID NO: 24977 - DNA, 835 bp, Homo sapiens
  MAP TO AC006050.1; EXPRESSED IN HELA, SIGNAL = 0.74; EST_HUMAN HIT: BG720013.1, EVALUE 0.00e+00; SWISSPROT HIT: P15087, EVALUE 4.00e-19; NT HIT: gi14775924, EVALUE 0.00e+00
atggcgagcggccgggacgagcggccgccttggcggctagggcggctcctgttgctcatgtgcctgctgctgctggggagctcggcccgggcggctcacatcaagaaggcggaggcgactaccacaactacgagcgcgggcgccgaggcggccgagggccagttcgaccgctactaccacgaagaggagttggagtcggcgctgagggaggcggcggccgcgggcctccccggcctggcccgcctctttagcatcggccgctcggtggaaggccggccgctgtgggtgcttcgcctcaccgccggcctggggtcgctaatccctgagggcgacgcggggcctgacgctgccgggcccgacgctgcggggccgctgctgcccggccggccccaggtgaagctggtgggcaacatgcatggcgacgagaccgtgtcgcgccaggtgttgatctacttggcccgcgagctggcggccggctaccgccgcggggacccgcgcctggtccgcctgctcaacaccaccgacgtgtacctgctgcccagcctcaaccccgatggcttcgagcgtgcccgcgagggcgactgtggcttcggcgacggcggcccgtccggggccagcggccgcgacaatagtcgcggccgcgacctcaaccgaagctttcccgaccagtttagcaccggcgaaccccccgccctggacgaggtgcccgaggtgcgcgccctcatcgagtggatccgcagaacaagtgagtgttgcctgccccctccccgtccgtgtgagcctccaagggccgaggctggttccggcacccagtaggcgctcagacaatgctggc

SEQ ID NO: 24978 - DNA, 842 bp, Homo sapiens
  MAP TO Z95115.1; EXPRESSED IN LUNG, SIGNAL = 1.4; EXPRESSED IN PLACENTA, SIGNAL = 1.4; EXPRESSED IN HELA, SIGNAL = 0.93; NT HIT: gi15318179, EVALUE 0.00e+00; EST_HUMAN HIT: BI771016.1, EVALUE 0.00e+00; SWISSPROT HIT: O60704, EVALUE 0.00e+00
ttggacagggagacaccaccgggcttgccaatgaggtcttcatggtggaggacagcgtcgctccaggcgatgccgaggaagtcgaggatgagcttgagtgagcgcctggggtgcagcaccagctgctcgtagtacacaggcaggcacttctccttgcctacctccatgcactgggcgtacatcacctcgatggccttgttccacttggtgaggcagtcacggtagctgctgaggtcaaagcccgcaatggtgactttgcgcgtgatcatggagtgcacggaggcccggccgtcccgcaccatcagcaggaacttggagttggggaacaggcgcgacaggtagaccgaggacttgagcgtaaatgggtccttgttgcagagcacgcgggccggctctccgtgcttggcaatcacctccaggatgaaggcctgcatggcggcgtccagcacctcatccgtcacccccgcctcatccagccgcagcttctcacggccagacttggaccaggcctggcgcatggccagcacgcgcgggatgatgcgggtctcctcgccgcagcgcacctcggggtgcgcgtccagcatggcgcgcatcaacgtggtgccactgcgaggcacgccacccacgaagatgagcggcatggccttgccatagcggtattccacgtggttggtgcccaccatcaccagctcctcctgctcaggccgcatggccccccgggggctccgcaggcccgccagcaccgcccggcactctagcacctgctgtcccagctgaaccgccagcaccaggaccagggcgcagccggctgccagcagcaccctccgcaccgacaggcgcat

SEQ ID NO: 24979 - DNA, 1992 bp, Homo sapiens
  MAP TO AC006486.1; EXPRESSED IN HELA, SIGNAL = 0.4; EST_HUMAN HIT: BE903654.1, EVALUE 0.00e+00; SWISSPROT HIT: P51523, EVALUE 1.00e-54; NT HIT: gi16174919, EVALUE 0.00e+00
gtggccgagatgccaacacagatgtcaccaggggcagtggagatgtcaacacctatgtcggcagagatgatggagatgtcaacagaagtgactgagatgacacctggggaggcccttgcctcatccctcttcttccagcatcaccagttcatgtgctctgagtgtggcagcctctataacacactggaggaagtcctctcacaccaggagcagcacatgcttgctgtctcagaggaggaggcactgaccacacagaatgttggcctggagccggagctggtgccgggtgctgaggggcccttccagtgtggtgaatgcagccagctcatcctctcccctggggagctcctggcccaccaggatgcccacctccgagagtctgcaaaccagatccaataccagtgctgggactgccaggagctgttcccctcgcccgagctgtgggtggctcatcgaaaggcccagcacctttctgctacggtagctgagccaccagtgccacctcctttgcctcccccaacaccactgcctccaccttctcccccatccgaagtcaagatggagccctatgagtgtcctgagtgctctaccctctgcgccacccctgaggagttcttggagcatcagggcacccactttgactccctagagaaagaggagcgcaatgggttggaggaggaggaagaggacgatgaggaggatgaagaagatgatgaagagatggaggatgaggaggccatggcagaggtcggtgatgatgctgtgggaggtgacgagtccacagctggctgggctcagggctgcggggactgtccccagcaccagccctcagcaggggctcgccggcaacaccggcggacggctcacagcccggcatctgccacccaccccttccactgcagccagtgtcagcgcagtttcagctccgccaaccggctgcaggctcatgggcgggcccatgttggtggcacacatgagtgtacaacctgctccaaggtcttcaagaaagcagcatcgcttgagcagcacttgcggctgcatcgcggggaagcccgctacctctgtgtagactgtggccgcggctttggcacagaactcacgttggtggctcaccggcgggcccacactgccaacccattgcatcgctgtcgttgcggcaagacgttcagcaacatgaccaagttcctctaccaccggcgcactcacgccggcaaaagcggggcacctcccacaggagcaacagctcccccagctccagcggagcccacccctccaccaccaccccctgccccacctgcccagctgccctgcccacagtgctccaagtcctttgcctcagcttcccggctgtcccggcaccggcgtgcagtacacgggccccctgaacggcgtcaccgctgtggggtttgtggcaagggcttcaagaagctgatccacgtgcgcaaccacctgcggacacacacgggtgagaggcccttccagtgccactcatgtggcaagacctttgcttctttggccaacctcagccgccaccagctgacccatacgggtgcacgtccctaccaatgcctggactgtggcaagcgcttcacacagagctccaacctgcagcagcaccggcggttgcacttgcggccagtcgcctttgcccgcgccccccgcctccccatcactggtctctacaacaagagtccctactactgcgggacttgtggccgctggttccgcgccatggcgggcttgcgactgcatcagcgggtccatgcccgagctcggactttgacgctacagcctcccagatcaccatctcctgccccacccccacctccagagcctcaacagactatcatgtgcacagagctgggggagaccatcgccatcattgagacatcccagccactggcgcttgaggacaccctgcagctgtgccaggctgcactgggggccagtgaagcaggcgggctcttgcagttggacacggccttcgtgtga

SEQ ID NO: 24980 - DNA, 582 bp, Homo sapiens
  MAP TO AP000546.1; EXPRESSED IN HELA, SIGNAL = 1.6; EST_HUMAN HIT: AU123641.1, EVALUE 0.00e+00; SWISSPROT HIT: P32391, EVALUE 1.00e-72; NT HIT: AY026350.1, EVALUE 0.00e+00
atgtttgaattatttaatgtaccaggattctacattgcagttcaggaggtactagccttggaagtatcttggacatctcaacaagtgggtgaatatatgttaatgagtatagtcattgacaaaggagatggagtcacccttgttctcccagttgtagaaggttatgtaattgggagctgcatcaatcacatcctgattgtaggtgatactgtgtatttcattcaacagctgctaagggagagggaggtaggaatccctcttgagcagtcactggagaacacaaaagccattaaggagaaatactgttacatttgccctgatatagtcaaggaatttgctaagtatgatgtggatccctggaagtggatcaaacagtacacaggtatcaatgtgatcaaccaggagaagttcataatagacgttggttacaaaaggttcctgcaacctgaaatatttttttacccagagtttgccaacccagactttatggaatccatcttgaatgttgttgatgaatacaaaactgtcccattgatgcgcattgtccactgtataagaatgttgttctttcaaggggtttga

SEQ ID NO: 24981 - DNA, 511 bp, Homo sapiens
  MAP TO Z97205.1; EXPRESSED IN HELA, SIGNAL = 0.48
atgcagggtcccctcctccacctggaggcccccctcctccacatgcaggtccccctcctccacatgcaggctcccctcctccacctgcaggctcccctcctccacctgcaggcccccctcctccacctgcaggtccccctcctccacctgcaggctcccctcctccacctgcaggctcccctcctccacctgcaggctcccctcctccacctgcaggctcccctcctccacctgcaggtccctcttctccacctgcaggctcccctcctccacctgcaggctcctctcctccacctgcaggctcctctcctccacctgcaggctcttctcctccacctgcaggctcctctcctccacctgcaggctcctctcctccacctgcaggctcttcttctccacctgcaggctcccctcctccacctgcaggctcttctcctccacctgcaggctcccctcctccacctgcaggctcccctcctccacctgcaggctcttctcctccacatgcagg

SEQ ID NO: 24982 - DNA, 591 bp, Homo sapiens
  MAP TO AC005952.1; EXPRESSED IN HELA, SIGNAL = 0.26; SWISSPROT HIT: Q9Y2A9, EVALUE 1.00e-102; NT HIT: gi16177382, EVALUE 0.00e+00; EST_HUMAN HIT: AL555348.1, EVALUE 0.00e+00
atgaagtatctccggcaccggcggcccaatgccaccctcattctggccatcggcgctttcaccctcctcctcttcagtctgctagtgtcaccacccacctgcaaggtccaggagcagccaccggcgatccccgaggccctggcctggcccactccacccacccgcccagccccggccccgtgccatgccaacacctctatggtcacccacccggacttcgccacgcagccgcagcacgttcagaacttcctcctgtacagacactgccgccactttcccctgctgcaggacgtgcccccctctaagtgcgcgcagccggtcttcctgctgctggtgatcaagtcctcccctagcaactatgtgcgccgcgagctgctgcggcgcacgtggggccgcgagcgcaaggtacggggtttgcagctgcgcctcctcttcctggtgggcacagcctccaacccgcacgaggcccgcaaggtcaaccggctgctggagctggaggcacagactcacggagacatcctgcagtgggacttccacgactccttcttcaacctcacgctcaagcaggtgcgctggactggggtcacctga

SEQ ID NO: 24983 - DNA, 547 bp, Homo sapiens
  MAP TO AL133415.12; EXPRESSED IN HELA, SIGNAL = 6.8; EST_HUMAN HIT: BE336689.1, EVALUE 0.00e+00; SWISSPROT HIT: P08670, EVALUE 5.00e-78; NT HIT: X56134.1, EVALUE 0.00e+00
tgatgtcctcggccaggttgtcgcgctccacctcgacgcgggctttgtcgttggttagctggtccacctgccggcgcagctcccgcatctcctcctcgtagaggtcccccaggcgcgacttgccttggcccttgagctgctcgagctcggccagcaggatcttattctgctgctccaggaagcgcaccttgtcgatgtagttggcgaagcggtcattcagctcctgcagctccaccttctcgttggtgcgggtgttcttgaactcggtgttgatggcgtcggccagcgagaagtccaccgagtcctgcaggagccgcaccccgggcacgctgctccgcaggcgcacggcagaggagcgcgtggcatacacgccgcccggggacgaggcgtagaggctgcggctggtgctggggcgcagcgcgctgcccaggctgtaggtgcgggtggacgtagtcacgtagctccggctggagctcggccggctcgcggtgcccgggccgccgaacatcctgcggtaggaggacgaggacacggacctggtggacat

SEQ ID NO: 24984 - DNA, 578 bp, Homo sapiens
  MAP TO AP000344.1; EXPRESSED IN HELA, SIGNAL = 0.94; SWISSPROT HIT: O08856, EVALUE 4.90e-01; NT HIT: gi15594346, EVALUE 8.60e+00; EST_HUMAN HIT: AL040378.1, EVALUE 2.00e-04
ctaatccaacccaaaggctgtgatgtttggcagaggcagaaaagaaaaggccaggtgttccgggaaagatcaccttcaaataacacagcactctcatagcccagagagacagttcttactattatgccaataaacctggaaaagaccaaatccaatttgacacatatttcctgtttcgttttgatttcatgccccctccctcaacctcccaagcagcatggataccccgaaggcccctgggaactctctcccattggctcttacgtggaaagtagttacctacctgcaaaatcctcgtcatcagacatgctctccacaatcaaatctttagaaacacaaacatcaggataagtcattagagagaggcccatccactcctcccaccccagctgaagcccgggtgcttcacacaggatcccctggtgtttcctctgggctcacagatatccctacagcctctctggacatggttttatacttgcaaaatcatttgctctcaccagaccccaaatcctccttcccaaaaggagcccagaatcaggtttctgtaccctagaggcaatgtttttccctcagga

SEQ ID NO: 24985 - DNA, 857 bp, Homo sapiens
  MAP TO AL138479.2; EXPRESSED IN HELA, SIGNAL = 2.5; EXPRESSED IN LUNG, SIGNAL = 0.96; NT HIT: gi14753467, EVALUE 0.00e+00; EST_HUMAN HIT: BE304524.1, EVALUE 0.00e+00; SWISSPROT HIT: P12644, EVALUE 0.00e+00
tcagcggcacccacatccctctactaccatctcctgataatttttcagtaccaccttatcatactcatccaggtacagcatggagatggcactcagttcagtgggcacacaacaggctttggggatactggaattgacagaattgaccagggtctgcacaatggcatggttggttgagttgaggtggtcagccagtggaaaggggcagtccccatggcagtagaaggcctggtagcctggtggggccacaatccagtcattccagcccacatcgctgaagtccacatagagcgagtggcgccggcagttcttattcttcttcctggcccgctgtgagtgatgcttagggctacgcttggccctccggcgtcgggtcaaggcatggccccggccatcatggccaaaggtgaccaggaggggccggagctgggcccaattcccactcccttgaggtaacgatcggctaatcctgacatgctggccctggtgggtccgagtctgatggaggtgagtcacctcaatggctagcccatagtttggctgcttctcccgggtccagcgaaggaccgcagggctcacatcaaaagtttcccaccgtgtcacattgtggtggaccagtctcgtgtccagtagtcgtgtgatgaggtgcccaggcaccacttctgctgggggcttcataacctcataaatgtttatacggtggaagcccctttcccaatcagggccctggtccacctgctcccggaagagccgaagctctgcagaggagatcacctcgttctcagggatgctgctgaggttaaagaggaaacgaaaagcagagttttcactggtccctgggatgttctccagatgtt

SEQ ID NO: 24986 - DNA, 1716 bp, Homo sapiens
  MAP TO AC007676.19; EXPRESSED IN LUNG, SIGNAL = 1.1; EXPRESSED IN HELA, SIGNAL = 2.2; NT HIT: gi14762821, EVALUE 0.00e+00; EST_HUMAN HIT: AW502369.1, EVALUE 0.00e+00; SWISSPROT HIT: O43345, EVALUE 0.00e+00
cagtatgaactctatgatgtatactaagttcatggctactattaaaagctttcccacactcttcacacatatagggatttccatcagcatgaacgctttcatgtctaacaagatatgaggcacagtgaaatgccttcccacatcttttacattcatagggtttatcactggtatgaattctctcatgaataataagatgtgaagcatgactaaaagtttccccacattctttacattcataggacttttcaccagcatgagttcggtcatgatatatgaggcttgtggcatgacgaaaggccttgccacattccttacattcgtagggtttctcagcgctatgaatattctgatgggctttaagtacagaaatgaacctaaaagacttcccgcatttgttgcattcaaagggtttcttaccactgtgaatactcagatgctgagtaagttgtccagatacactaaaggccttcccacattccttacattcataaggtttctcaccagtatgaactctgcgatgtatagtgagtttatggctataactaaaacccttcccacactcttgacatacatagggtttctctcccgtatgaattctctcatgtataacaagatatgaggcacaacgaaaggacttcccacattctttacattcaaagggtttgtaaccagtatgaattctgttatgatgggcaaggtgtgcatgctgactgaaggccttcccacattccttacatttgtagggtttctcaccggtatgaatattttgatgtattttaagggatgaattgagcctaaaggacttcccacatttgttacattcatagggtttcttaccactatgaataccctgatgtcgagtaagtcgtccatgcacactaaaggctttcccacattcctcacacttataaggtttctcaacactttcaaatgtatgaggtgcagtaagttgatggccactactaaaagcctccccattttctttacattcatagtgtttctcccctgaataaattctctgatgcatggtaagttgatacctacatgtaaagcccttcccgcattccttgcattcatagggtttttctccagtatgaattcttttatgacccacaaggtgggaaaactgacgaaaggcctttccacattccttacattcatgtggcttctctccagtatgaatactctgatgtactttaaggcctgctttgagcctaaaggacttcccacatttgttacattcaaagggcttctcaccagtgtgaatactctgatgtcgactaagtcgtccatacacactaaaggccttgccacattccttacattcgtagggtttctcaccataatgaaatctatgatgtacagtaagttgacggctagtcctaaaagcttccccacactctttacattcatagggtttctcaacatgaactttcccatgttgagcaaggtttgcaggataactgaagaccttcccacattcttcacattcataaggtttctcacgagcattaattttctgatgctttctaaggtctgtaagatggctaaatgccttcctaaacttttcacattgatcaggttcctcactagtatgaattgtttgatgtaccatgagttctgtaagatgactaaaggacttctgacattgcttacactcatatggtttctgtccattatgaattctctgatggagagtaacacatgagtgtt

SEQ ID NO: 24987 - DNA, 790 bp, Homo sapiens
  MAP TO AL035362.1; EXPRESSED IN PLACENTA, SIGNAL = 1.5; EXPRESSED IN HELA, SIGNAL = 1.4; SWISSPROT HIT: P12036, EVALUE 2.50e-01; NT HIT: gi16164115, EVALUE 0.00e+00; EST_HUMAN HIT: AW176779.1, EVALUE 4.00e-28
agaacctgctgtcggatctcagcctgcagagcctcacggcgctgacctcacaggtggagaacatctccaacaccgtccagcagctgctgctctccaaggctgctgtgccgcagaagaaaggtgtcaagaacctcgtgtccaggaccccagagcagcataaaagccagcactgcagccccgaagggagcggctactcagccgagcccgcaggcacaccgctgtcagagccgccgagcagcacgccacagtccacgcatgcggagccgcaggaggccgactacctgagcggctccgaggacccactggagcgcagcttcctctactgcaaccaggcccgtggcagccctgccagggtcaacagcaactcgaaggccaagcccgagtccgtgtccacctgttctgtgacctctcctgacgacatgtccaccaaatctgacgactccttccagagcctacacggcagtctgccgctcgacagcttctccaagttcgtggcgggtgagcgggactgtccgcggctgctgctcagcgccctggcacaggaggacctggcctccgagatcctggggctgcaggaagccatcggtgagaaggccgacaaagcttgggctgaagcacccagcctggtcaaggacagcagcaagccacccttctcgctggagaaccacagcgcctgcctggactctgtggccaagagtgcgtggccccggcctggggagccggaggccctgcccgactccttgcagctggacaagggcggcaatgccaaggacttcagcccagggctgtt

SEQ ID NO: 24988 - DNA, 745 bp, Homo sapiens
  MAP TO AC004578.3; EXPRESSED IN HELA, SIGNAL = 0.33; SWISSPROT HIT: Q02817, EVALUE 3.00e-10; NT HIT: gi16165762, EVALUE 2.80e+00
aactgcagccaggggtgtccgcagcggggatacaggtctgaacagcgtcaggggtgtccgcagtggggatacaggtctgaacagcagccaggggtgtccgcagtggggatacaggtctgaacagcgtcaggggtgtccgcagtggggatacaggtctgaacagcgtcaggggtgtccgcggtggggatacaggtctgaacagcgtcaggggtgtccgcggcggggatacaggtctgaacagcgtcaggggtgtccgcagtggggatacaggtctgaacagtagccaggggtgtccgcggtggggatacaggtctgaacggcgtcaggggtgtccgcagtggggatacaggtctgaacagcagccaggggtgtccgcagtggggatacaggtctgaacagcgtcaggggtgtccgcagcggggatacaggtctgaacagcgtcaggggtgtccgcagcggggatacaggtctgaacagcgtcaggggtgtccgcagtggggatacaggtctgaacagcgtcaggggtgtccgcagcggggatacaggtctgaacagcgtcaggggtgtccgcagtggggatacaggtctgaacagtagccaggggtgtccacggtggggatacaggtctgaacggcgtcaggggtgtccgcagtggggatacaggtctgaacaacgtcaggggtgtccgcagtggggatacaggtctgaacagcagccaggggtgtccgcagtggggatacaggtc

SEQ ID NO: 24989 - DNA, 692 bp, Homo sapiens
  MAP TO AJ003147.1; EXPRESSED IN HELA, SIGNAL = 1.2; NT HIT: AF111163.1, EVALUE 0.00e+00; EST_HUMAN HIT: BI024282.1, EVALUE 6.00e-67; SWISSPROT HIT: O15553, EVALUE 1.00e-123
cggtgaccgaatgttctggatttccagggccttccttcaggtccgcagatgcccctccatccggagtgggccttgcccggggttctgttgccgagtccagattcgcagctgtcttttcctctagagtcaggagaatttctggatttgcgggcgccttctcccctgtagaaatggtgacctcaaggcttctaggtcgcatctttcccgagggcaggtacacttcgaagggcctgcactccttctgccccggggcgccccccgccagcccctgcagcctccccgcggagctggcgtttctgcgcagccggacctcggcctggcccccctctagcgccctgcaggggccggggcttctcccgcccggcagggccgggctccgggtccgaggcttgccctgcgcgtccaggccctccgaggccttctctctgcgtttgctcaggggcttcctcgacagccccctcccggcctcgggctggctgcaccgcaggctggcagctccgcccccgtacggccgagggccgttcccctcgttcccctcggggtggtctggagtcttcaggctcctgggcttgttctcccccagggagctggacgctgcggaatcatctgtgccgttttcttgtgtggaatattctggaaggacaaccagatgcaaaatgatgaagctgtcccacgtttagggcccaagattc

SEQ ID NO: 24990 - DNA, 728 bp, Homo sapiens
  MAP TO Z46936.1; EXPRESSED IN HELA, SIGNAL = 0.94; EST_HUMAN HIT: BI825689.1, EVALUE 0.00e+00; SWISSPROT HIT: O15482, EVALUE 5.00e-95; NT HIT: gi15314987, EVALUE 0.00e+00
ctacacttctcctcctgaagggactccagcaacagctgcaggtcagtcagagacctctcctttaggctgtgataggactcctggaggctgatgtggaacctcttggcttcttccagctctgcctttaccttctgcaacagcaggttttgttgctgggccacatcctctgtctctaagcacgtcccctgctgtaagctctggaagcgactctccaagatgaagggcctgctggcatgaggcaggttgaccggcccgtcttccccacctggctcggggggctctgaaagcagggccttctcactgggtggctcgcagttggctgggtcgctttctgccatcagcagtaagccctcgggcctgcagccttcctccagctcctggagctgctggtgacactggtggagcctgtgctcgatctgggcgatggtggcagaggcgcgctggttcaccttctcaaaggcctgctggatgtgcggcacctggtgccggtctgctttggataccagcttgaggtagctcacagtgttgccatcccgactggccttctccactctcagctgctctgagaggtagaggatgcggtgcctgacactatcctgtaagttgtgggctaggcctccatctgcgaggctggaagggccactggggccgtcttcgctggatgacagggaccggcatgaaggcacattggaggggagggttgcgctggggctcctggtgtgttccgc

SEQ ID NO: 24991 - DNA, 615 bp, Homo sapiens
  MAP TO AC005530.1; EXPRESSED IN HELA, SIGNAL = 0.39; SWISSPROT HIT: P04929, EVALUE 8.00e-04
ctagtggttgccattggaattaaaatgtgtgtgatcagagaagacatgggggttagtacctgacacaactgttttggtgatggtctgagtagaaatgtcagtgaccttggtgggcacgaaagtggcagagacagtggtggaggttgcagtggccccagaggctgtggtagaggccaagaagggcgatgaggccaaagcgaaggctgtggaggtcacagatactgctgtggatggcaaggtggcctcagagcctgtggtggaagccatgctgcttccagaccctgaagtgacctcagaggctgtgctcacagccatgttgctcgtggatattgcagtggaggctgtggtggtctcagagtctgtggaggaggcggttgtgggcatagatactattatggaggcactgggggtctcagaatctgtgagggaagccgtggaggtttcagtggctgtagtggtctcagatcttgtagtggaggctgtggtggtctcagagcccatcatggataaaaatcctgcagtgttctcagaggttattttggaggttgttgtgggcacagatactatcgtggaggtagtgggggtctcagaggttgatgtggcctcaaaggccat

SEQ ID NO: 24992 - DNA, 568 bp, Homo sapiens
  MAP TO AC008151.1; EXPRESSED IN LUNG, SIGNAL =   2; EXPRESSED IN HELA, SIGNAL = 3.2; SWISSPROT HIT: Q01361, EVALUE 4.10e+00; NT HIT: AL163249.2, EVALUE 9.00e-03; EST_HUMAN HIT: AI913730.1, EVALUE 1.30e-02
gaattggctcaccctagacggaccagtctctccagggtcaggaagaccccaagatgtcaaataatcaaaaatacagaaaataaaaaggcatgatgaatacactgtcccagctgaggactcagacatgtgagtgagggactccagaccatccagtcccagccaaaccagtgaggaccagaaacaccatccaaccaacctgcagaatggtgagaaataaatcattgatgtttcaagccactgagtttgggagtggtctgttacacagcaaagatggatgcagaagatgacccaaaactggcctctgactggtcccaggcatgttccatctccctcctggtggagtgaggggtgaaagtaggacaattttggggtggcgagaaggtattaccaagtcacagcctattctgtcaggtgacagacagatggggagggaagtctctgcatgcagaatcccagccctctgaaagcttaggggaaacagctgtcccccagcctcaaaatagctgctcattactactggctgatgctatgcatggtgatgacagtggcaatggggttacacagggac

SEQ ID NO: 24993 - DNA, 621 bp, Homo sapiens
  MAP TO AL138846.2; EXPRESSED IN PLACENTA, SIGNAL = 2.7; EXPRESSED IN HELA, SIGNAL =   2; EST_HUMAN HIT: BG744229.1, EVALUE 3.00e-65; SWISSPROT HIT: O43707, EVALUE 3.00e-67; NT HIT: gi14761650, EVALUE 2.00e-65
atggagagtgccgtggaggagctccaggacatgttcctcatctacaatactgagaagattgagggcctgatctcagcccacagccaaaagttgaccctgccagataatgatagggagaaagaggctatcctggccacccacaaggaagcccagaggatcacagatagcaaacataccaagctgtcaggcagcaacccctacaccactgtcacctcccccgaccccacacagttcatccactcccagtgggcaaaggtgcagcagttggtgtcaaagcaggattatgcacttctggaggagcagagcaagcagcagtccaacgagcacctccaccaccagttctccagccaggccaatgtcatggggccctggatccagaccaagatggaggaaagtgggtgcagctccatcaaaatgaaggggaacccagaggaccagctaaacctgaagcaatatgagcaaaacatcatggaccacaagctgaacctggacctgctgacgcagagcaccagctcctccaggaggtcttcatcttcaacaacaagcatatcagctacatggtggaacacatccgcacggctgggagcagctgctcaccaccattggctgcaccatcagtga

SEQ ID NO: 24994 - DNA, 578 bp, Homo sapiens
  MAP TO AC006541.1; EXPRESSED IN HELA, SIGNAL = 0.23; SWISSPROT HIT: P08640, EVALUE 4.00e-10; NT HIT: AF043428.1, EVALUE 1.40e-01
acaccaggacccgtccccacagagctctacatggtggggacgggtcctcatgacacccctgtgtccatggagctctgtgtggtggggatgggccctggtgacatcgtggtccccacagaagctctgtgtggtggggatgggccctgcggacacccctgtatccatggagctctgtgtggtggggacgggtcctggtgacactcctgtgtccatggagctctgtgtggtggggacgggtcctggtgacactcctgtgtccatggagctctgtgtgttggggacgggacctagtgacactcctgtgtccatggaactctgtgtggtggggacaggtcctggtgacaccgctgtgttcattgagctctgtatggtggggacgggtcctggtgacacccctgtgttcatggagctctgtatggtggggatgggtcctcgtgacactcctgcgtccatggagctctgtgttgtggccatggccatgggttctggtcactctgtggtactgggagactcagcagccactgtgccttttggactctggatctccagtcctgtgggacagcaagcccaatgcccag

SEQ ID NO: 24995 - DNA, 1045 bp, Homo sapiens
  MAP TO AC006486.1; EXPRESSED IN HELA, SIGNAL = 0.89; SWISSPROT HIT: Q9UF02, EVALUE 1.30e+00; EST_HUMAN HIT: AA601414.1, EVALUE 0.00e+00
tgcactggcctttcaggtcctggcagtggcagcaagtcccccccagccaccagggccaaggctctgaggcggcgaggggctggggagggtgacaagccagaggaggaggatgacgaggcacagcagccgcaaccacagtccgggcccgaagaggctgaggaaggggaggaggaggaggctgagcggggccctggggctgaaggtcctccactggagctgcaccctggcgacccggctccaggcccagcagaggaccccaaaggggatggggaggcaggccgctgggagccctcactcagccgcaagacagccacgttcaagtctcgagcgcccaagaagaagtatgtggaggagcacggagctggcagcagtggggtggctggggcccctgaagagcgggtgcggacccctgaggaggccagtggcctgggggtgcctccacggccacccacctccactcgttcctcctccactgacacagccagcgagcactcggcggacctggaggatgagccggctgaggcttgtggtccaggcccttggccccctggcagcaccagtggcagctatgacctgcggcagctgcggtcccagcgggtgctggctcggcgtggtgatggccttttcctgccggctgtggtgcgccaggtgcgccgaagccaggacctgggcgtgcagttccctggtgaccgagccctgactttctatgagggggtgccaggcgctggtgtggatgtagttttggatgccacacccccaccaggtgccctggtggtgggcacagctgtctgtacctgtgtggagcccggcgtggctgcctaccgggaaggtgtggtggtggaggtggccaccaagccagctgcctacaaggtccgtctcagccctggccccagctcccagccaggcctaccaggcagcctcccgcagcccccacagccactgcaccgtgagccagaggaggctgtgtgggtggcccgctccagcctacgcctgctgcgccccccctgggaacctgagaccatgctgaggaagccccctacaggcc

SEQ ID NO: 24996 - DNA, 710 bp, Homo sapiens
  MAP TO AL021182.1; EXPRESSED IN HELA, SIGNAL = 0.86; SWISSPROT HIT: P10220, EVALUE 2.00e-05; NT HIT: AF207550.1, EVALUE 6.80e-01; EST_HUMAN HIT: BF345477.1, EVALUE 6.40e-02
atgctagacaagcccccacagattcaggttctagtttccatcccagggccaggccagccccagcaaccctgggctgtagaccacatctgggctggccccagtggtcccaggcctcaggctggtcccagcaacagaacagcccccacagcccttgtcatcaggctagcacctatggacccagcctccaggtcagcctctgtggatataggctccaggccaacccagctccaacccagccccctgcaacccaaggcaccaggcctgccccagggttcagaacagctgagagccaggtcaactcacacagccctaggctccaggcccatctcagcaccaggtgagtactattggcctcagcctcaggtaccatactggtcccaagggaccctggatccaggactgtcctcacagcccaaagcttcgggccagcctctgtgtcaccagtcaccagaccatcactcttgctaccaggctccagaccagtccccacaaacccaggcttcacacttgccacaggaccaggctggccctgggccccagagggtccagagtcacagcctgatccagcagacccagggcccaggcctatcccagtttacccaggctccagaccagacactatggactcaggctttaggccagccaccaaggttacaggctccaagtctgcccatgaggactcaagctcaagcccacctctacaagccaaa

SEQ ID NO: 24997 - DNA, 1003 bp, Homo sapiens
  MAP TO AP000501.1; EXPRESSED IN HELA, SIGNAL = 1.3; EST_HUMAN HIT: AL553958.1, EVALUE 0.00e+00; SWISSPROT HIT: P13945, EVALUE 1.00e-125; NT HIT: gi14750506, EVALUE 0.00e+00
gcctcacgagaacagctctcttgccccatggccggacctccccaccctggcgcccaataccgccaacaccagtgggctgccaggggttccgtgggaggcggccctagccggggccctgctggcgctggcggtgctggccaccgtgggaggcaacctgctggtcatcgtggccatcgcctggactccgagactccagaccatgaccaacgtgttcgtgacttcgctggccgcagccgacctggtgatgggactcctggtggtgccgccggcggccaccttggcgctgactggccactggccgttgggcgccactggctgcgagctgtggacctcggtggacgtgctgtgtgtgaccgccagcatcgaaaccctgtgcgccctggccgtggaccgctacctggctgtgaccaacccgctgcgttacggcgcactggtcaccaagcgctgcgcccggacagctgtggtcctggtgtgggtcgtgtcggccgcggtgtcgtttgcgcccatcatgagccagtggtggcgcgtaggggccgacgccgaggcgcagcgctgccactccaacccgcgctgctgtgccttcgcctccaacatgccctacgtgctgctgtcctcctccgtctccttctaccttcctcttctcgtgatgctcttcgtctacgcgcgggttttcgtggtggctacgcgccagctgcgcttgctgcgcggggagctgggccgctttccgcccgaggagtctccgccggcgccgtcgcgctctctggccccggccccggtggggacgtgcgctccgcccgaaggggtgcccgcctgcggccggcggcccgcgcgcctcctgcctctccgggaacaccgggccctgtgcaccttgggtctcatcatgggcaccttcactctctgctggttgcccttctttctggccaacgtgctgcgcgccctgggggggcccctactctagtcccgggcccggctttccttgccctgaactggctaggttatgcca

SEQ ID NO: 24998 - DNA, 627 bp, Homo sapiens
  MAP TO AL121756.2; EXPRESSED IN HELA, SIGNAL = 0.5; NT HIT: AL139794.3, EVALUE 2.40e+00; SWISSPROT HIT: P39768, EVALUE 2.40e-01
ccatttcaggcatgctgcagcaaagtgatgctctccactcggccctgagagaggtgcccttgggtaaagcccgtggtgatggtggtgggcctctcctgggcggtctgcttggtggaagtggaagtggaggtggtgggggaggtggtctcctggggggcctgcttggtggtgggggtggagggggtggcagtgatctgttgggtggaggcttactgggtggcagtggcagcagtggtggggagttgctgggtggaggaggtggcagtggtggggggttgctgggtggcagtggtggggggctgctgggtggcagtggtggggggttgctgggtggcagtagaggggggctgctgggtggcagtggtggtggtcttttgggtggtggccgacaccattacaatgactacagacgcattgaattcccccgaggtgttggtgatattccctacaatgacttccatgtccgaggaccccccccagtatataccaacggcaaaaaacttgatggtatttaccagtatggtcacattgagaccaacgacaacactgctcagctggggggcaaataccgatatggtgagatccttgagtccgagggaagcatcagggacctccgaaacagtggct

SEQ ID NO: 24999 - DNA, 832 bp, Homo sapiens
  MAP TO Z97183.1; EXPRESSED IN HELA, SIGNAL = 0.4; NT HIT: gi16175092, EVALUE 0.00e+00; EST_HUMAN HIT: BI225237.1, EVALUE 0.00e+00; SWISSPROT HIT: P51451, EVALUE 7.80e-01
ttccttgaactttgtaagatgcagacagcagaccaccctgaggtggtcccattcctctataaccggcagcaacgtgcccactctctgtttttggcctcggcggagttctgcaacatcctctctagggtcctgtctcgggcccggagccggccagccaagctctatgtctacatcaatgagctctgcactgttctcaaggcccactcagccaaaaagaagctgaacttggcccctgccgccaccacctccaatgagccctctgggaataaccctcccacacacctctccttggaccccacaaatgctgaaaacactgcctctcagtctccaaggacccgtggttcccggcggcagatccagcgtttggagcagctgctggcgctctatgtggcagagatccggcggctgcaggaaaaggagttggatctctcagaattggatgacccagactccgcatacctgcaggaggcacggttgaagcgtaagctgatccgcctctttgggcgactatgtgagctgaaagactgctcttcactgaccggccgtgtcatagagcagcgcatcccctaccgtggcacccgctacccagaggttaacaggcgcattgagcggctcatcaacaagccagggcctgataccttccctgactatggggatgtgcttcgggctgtagagaaggcagctgcccgacacagccttggcctcccccgacagcagctccagctcatggctcaggatgccttccgagatgtgggcatcaggttacaggagcgacgtcacctcgatctcatctacaactttggctgccacctcacagatgactataggccag

SEQ ID NO: 25000 - DNA, 573 bp, Homo sapiens
  MAP TO AL353997.2; EXPRESSED IN HELA, SIGNAL = 2.8; EXPRESSED IN LUNG, SIGNAL = 0.98; NT HIT: M21772.1, EVALUE 0.00e+00; EST_HUMAN HIT: BG679474.1, EVALUE 0.00e+00; SWISSPROT HIT: P08779, EVALUE 9.00e-28
ccaactgctcgctcgctcacctccctccttggcacgatgagcacctgcagccaccagttcacctcctccagatccatgaagggctcctgcagcatcgggggcagcatcgggggcggctccagccgcatctcctctgtcctggccggagggtcctgccatgcccccagcacctacgggggggcctgtgtgtctccttctctcgcttctcctttgggggagcctgcgggctggggggcggctatggcggtggcttcggcagcagcagcagctttgctagtggctttgggggaggatatggtggtggccttggtgctggcttcggtggtggcttgggtgctggcttgggtggtggctttgctggtggtgatgggcttctggtgggcagtgagaaggtgaccatgcagcacctcggtgaccgcctggcctcctacctagacaaggtgcgtgctctggaggaggccaacgccgacctggaagtgaagatccgtgactggtaccagaggcagcggcccagtgagatcaaagactatagtccctacttcaagaccatcgaggacctgaggcacaaggtgg

SEQ ID NO: 25001 - DNA, 1242 bp, Homo sapiens
  MAP TO AC010522.3; EXPRESSED IN HELA, SIGNAL = 0.8; NT HIT: U71363.1, EVALUE 0.00e+00; EST_HUMAN HIT: BE693365.1, EVALUE 0.00e+00; SWISSPROT HIT: Q9Y2P7, EVALUE 0.00e+00
aaacattttagcaccaaacatatactcagtcagcaccagagacttctccctcgagaagaatgttatgtgtgctgtgaatgtgggaaatcctttagcaaatatgttagcttcagtaatcatcagagagttcacagtggaaaaagaccttatgaatgtggagaatgtgagaaatcttttagtcaaaagagcagcctcattcaacatcagcaatttcacactggaggaaaaccttatgggtgtgaagaatgtgggaaatattttagcttagaaggatatcttaggcgccatcaaaaagttcacgctggaaaagggccttatgagtgtggagaatgtgggaaatcttttagttcaaacgtgaaccttaagagtcatcagcgcattcacactggagagagaccttacaagtgtggagaatgtgagaaatcttttagtcggaagcccagccttagttaccatcagcgcattcacactgaagtaagaccttacaagtgtggagaatgtgggaaatcttatatttcaaaggggcaccttaggatccatcagcgcatgcacactggagaaagaccttacaagtgtggagactgtgggaaatcttttaatgaaaaaggacaccttaggagtcatcagcgagttcacactacagaaagaccttataagtgtggggaatgtgggaaatgttttagtcacaagggtaacctcattctacaccagcatggccatactagaaaaaggccttatatgtgttgggaatgtggaaaattatttaagaagaagtctcacctccttgtacaccagagaattcacagtggagagaagccatatgcttgtgaggcttgtcagaaattttttaggcacaagtgccacctcactgcacaccagagagttcacactggagaaaggccatatgaatgcagtgattgtgggaagtcatttacccacagctgtgcattcattgttcataagagagttcacactggtcagaagccttatgagtgcagtgaatgtgggaaatcttttgctgcaagctcctatctcactagtcacaggagagttcacactggtcagaagccttatgagtgcagtgaatgtgggaaatcttttgctggaatctccagtctcactaatcacaggagagttcacactggagaaaagccttatgggtgtagtgaatgtgaaaaaaaatttaggaaaagctcttcacttcgttaccatcagagagttcatgaaagaaaggccttatga

SEQ ID NO: 25002 - DNA, 1215 bp, Homo sapiens
  MAP TO AL031708.3; EXPRESSED IN HELA, SIGNAL = 1.1; NT HIT: gi14774697, EVALUE 0.00e+00; EST_HUMAN HIT: BI830269.1, EVALUE 0.00e+00; SWISSPROT HIT: P54258, EVALUE 1.00e-04
atgccagtggggagcgtggctcgtgtctgtacccatgtgcctggtcagcatcccgacctcagtgctagccagtgtgggccttccttgacgggcactcagcggaagacactcgaggagcggcagctgcaggactcatgctccgcaccgatgcaggagaaggtgacactgcacttgttcccaggcgagaactgtacactgacaccgctgccgggcgtggctcgcgtggtgcactccaaggccttctgcacagtgcactggcaggagggcggccggtgcaagcagagtgccaaggacgcccacgtgctgcccccagcccagatcctgggcatccagagtgggcagggcacggcccggggccaggtgaaatgcccgcggagcggagctgagggcaagggtgtggggcggccccctcctgcggctgacgccttgcagagctccggagagagttcccccgaaagcgcccccggggagggggctgccctaagcttgagcagcccggacgctcctgacaggcctcctcccaggcaccaggacactgggccatgtcttgagaagacccctgcagaaggcagggacagtcccacccgggagccaggggccttgccgtgtgcctgtggccagctcccagacctggaggacgagctctcgcttctagaccccttgccccgctacctaaagtcctgtcaggacctcattgtccccgagcagtgccgctgtgcggacacacggcctgggagcgagcagccccctctgggcggggcggcctccccagaggtgctggctcctgtcagcaaggaggctgctgaccttgctcccactggcccatccccgaggcccggccccgggctcctgctggatgtttgcactaaagacttggcagatgcacctgcggaggagctccaggagaaggggagccccgcggggcctccgccgtctcagggacagcctgccgccaggcccccgaaggaggtccccgccagccggctggctcagcagctccgtgaggagggctggaacctgcagacctccgaaagcctcacgctggccgaagtctacctcatgatgggcaagcccagcaagctgcagctggagtacgactggctggggcccggccgccaggacccccgccccggctccctacccaccgccctccacaagcagcgcctcctcagctgcctcctgaagctcatttccaccgaggtcaaccccaagctg

SEQ ID NO: 25003 - DNA, 667 bp, Homo sapiens
  MAP TO AL034384.1; EXPRESSED IN HELA, SIGNAL = 1.5; NT HIT: gi13629957, EVALUE 0.00e+00; EST_HUMAN HIT: BF091051.1, EVALUE 0.00e+00; SWISSPROT HIT: Q13495, EVALUE 5.00e-99
ggaactgttaagaggagacaagaagaagaccacttccagtttccagacatggctgatgggggctaccctaataaaattaagaggccttgccttgaagatgtcacccttgcaatgggcccaggtgctcatcctagtactgcttgtgcagaactgcaggtccctccattgacaataaatcctagccctgcggctatgggagtggctggccagtcattactgctggagaataaccctatgaatggcaacatcatgggctcaccatttgtagtaccacagactacagaagtgggactgaaagggcccactgttccttactatgagaaaatcaacagcgtgccggctgtagaccaggagcttcaagagctgctagaggagctcaccaaaattcaagacccttctccaaatgagctagatcttgagaagatactggggacgaagccagaagagccactggttttagatcatccccaggcaaccctaagcacaactcccaagccttcggttcagatgtcacacttggagagcctggcttccagcaaggagtttgcttctagttgcagccaagttactggcatgtcacttcagatcccatcctcctccacagggatcagctattcgattccttccaccagtaagcagatagtgtcaccgagttcttcaatggcac

SEQ ID NO: 25004 - DNA, 957 bp, Homo sapiens
  MAP TO AL121594.3; EXPRESSED IN HELA, SIGNAL = 0.99; SWISSPROT HIT: O15091, EVALUE 0.00e+00; EST_HUMAN HIT: BE397721.1, EVALUE 0.00e+00; NT HIT: gi13649256, EVALUE 0.00e+00
ctctcaaaccatgtttttatactgtgtgcaaatgactcccctggatacagctgattatttcttagatatgaaagaatatctagtagtttatttgaatagttatcatcctttatgtcttttccaaaatcaaagaaagcttttaaagtttccaacataggaacaatatcatgacctagcaattcctgatataaattccaagctgtgtttacatcttgatgaaggagagctccctggatacagtcattatagttcttttttgaaggagttataacttttttgatgtcctctaacagcaacaatgcttctctccatctgtctgaatggatcaatccccggatgagaagactgtaacctctaggttctaaagtcttatatctggctttcataatttcaaagacatcaataacttcagatgtctgcatatgaaagacacagagatacaaatacttgaccagtaaatcgtaacttacaataccattatttttggctgctacccatgccagcagagatttagccacatctatagagctatgacagccagccatctgtgaaatgatccaactttcgaaactggtctttccggtgttttcttttaaatcttccttaagtttatcccactcctctgaattcaaaggttgtgttgggagttgaatagtgttcctcacaggtgccaaggcatgatcttcagtttgagaattcatctgtgatctctccttagctgctccagctaaaaaaaaatgaggaacagaataaacttgcttattactgccctcatctttcctgagatatctggccttggcaatcagattcgttgctttggtattctgtggagacattgttttaagagaaaacaacctctgctggttcctgatgccacagcggtctgccagaaacagcgagacataagagtgccctgggcctagcccaaggtatgggctcttccaaagcttcggaaag

SEQ ID NO: 25005 - DNA, 493 bp, Homo sapiens
  MAP TO AC008174.2; EXPRESSED IN HELA, SIGNAL = 0.98; NT HIT: AB040830.1, EVALUE 1.80e+00; SWISSPROT HIT: O06942, EVALUE 4.00e-01
ataaccttcaaaatagcacttgataccttctttgcatgcatatataaagcagacagaaatgatgcttcatgtgtgtctctggaaatattggtgctttcatattcccagcctatcttattgcttttcttatttccatcattaatagcacccaaaatttctaaatgtccgttggcaaacccttccagtttagcaaaaaccatattaagaatatctgaagctacagcttttagtttatttggatgcatttcttttgtgcttggtgttttggaagacacaggagcaacaggttttgccttgcttttagtctcttctttattgtcctcctgaacccttctggaaactatgctggagattattttggtggatttggccattttctcaataattgaagcaaatgatgggttgtcaatgtcaagagactctgagatagcttttaatccacaacttgcaaaactggtatccatgtcaacaccacataattttgcaaggatat

SEQ ID NO: 25006 - DNA, 758 bp, Homo sapiens
  MAP TO AL121774.3; EXPRESSED IN HELA, SIGNAL = 1.8; EXPRESSED IN LUNG, SIGNAL = 0.99; EST_HUMAN HIT: AI133449.1, EVALUE 0.00e+00; NT HIT: gi14752248, EVALUE 0.00e+00; SWISSPROT HIT: P11277, EVALUE 1.00e-125
gtggcaggcatttcagaccctggtgtcggagcggcgggaggctgtggactcagccctccgagtgcacaactactgcgtagattgcgaggagaccagcaagtggatcacggacaagacaaaggtagtggagtccacaaaagacctggggcgggacctggcaggtatcatcgccatccagaggaagttgtcagggctggagcgtgacgtggccgccatccaggcccgtgtggatgccctggagcgtgagtcccagcagctgatggactcgcaccctgagcagaaggaggatattggtcagcggcaaaaacacttggaggagctgtggcagggcctgcagcaatccctgcagggccaggaggacttgctgggggaagtcagccagctgcaggccttcctgcaggatctggatgacttccaggcctggctctccatcacccagaaggctgtggcctctgaggacatgcccgaatccctcccagaggctgagcagctcctgcagcagcatgcaggtatcaaggatgagattgacgggcaccaagacagctaccagcgtgttaaggagtctggggagaaagtgatccaaggccagacggacccagagtatctgcttctgggccagcggctggagggcctggatactggctggaatgccctgggcaggatgtgggagagccgcagccacaccctcgctcagtgccttggcttccaggagttccagaaagatgccaagcaggctgaagccatcctcagcaaccagg

SEQ ID NO: 25007 - DNA, 596 bp, Homo sapiens
  MAP TO AL160492.1; EXPRESSED IN HELA, SIGNAL = 0.52; EST_HUMAN HIT: AU137397.1, EVALUE 0.00e+00; NT HIT: gi16164334, EVALUE 0.00e+00; SWISSPROT HIT: P47160, EVALUE 2.00e-37
atgacgacttcgtctatcagacggcagatgaaaaacatcgtgaacaattactcagaggcagaaatcaaagtccgggaagccacctccaatgacccgtggggcccgtccagttctctgatgaccgagattgccgacctgacctacaacgtggtggccttctcggagatcatgagcatggtgtggaagcggctgaatgaccatggcaagaactggcggcatgtgtacaaggcgctgaccctgctggactacctcatcaagacaggctccgaacgtgtggcccagcagtgccgggagaacatcttcgccatccagaccctgaaggacttccagtacattgaccgagatggcaaggaccagggcatcaatgtgcgtgagaagtcaaagcaactggtggctctcctcaaggacgaggaacggttgaaggctgagagggcccaggctctcaaaaccaaagagcgcatggcccaggttgccactggcatgggcagcaaccagatcacctttgggcgaggctccagccagcccaacctctccaccagccactcggagcaggagtatggcaaggccgggggctccccggcctcctaccatggctg

SEQ ID NO: 25008 - DNA, 1047 bp, Homo sapiens
  MAP TO AF236875.1; EXPRESSED IN HELA, SIGNAL = 0.98; SWISSPROT HIT: P08640, EVALUE 3.10e-02; EST_HUMAN HIT: BE242203.1, EVALUE 0.00e+00
atggtcggcctgcacaaccttgagccccgcggcgagaggaacattgccttccacccggtgagcttcccggaggagaaggctgtgcacaaagaaaaaccctcatttccttaccaagaccggccctccacccaggagagcttccgccagaaactggctgcctttgctgggaccacatctggctgtcaccagggccctgggcccctgcgggaatccctgccctcggaggatgacagtgatcaaaggtgctcgccctccggggacagcgagggtggagagtactgctccatcctggactgctgccctgggagccctgttgccaaggctgcctcccagactgcaggttcccggggcaggcatggtggcagggactgctcacccacgtgctgggagcaggggaagtgttccgggcccgcagagcaggagaagcggggcccgagcttccccaaggagtgctgtagccagggccccactgcccacccatcctgcctgggccccaagaaactgtccctcacctcggaggctgccatttcttccgacggcctctcttgtggcagcggcagcggcagcggcgccagtagccccttcgtcccccacctcgagagtgattactgctccctcatgaaggaacctgccccagagaagcagcaggaccctggctgcccaggggtgacccctagcagatgccttgggctgacgggggagccccagcccccggcccacccccgggagggtacacagcctgaacccatctatgctgagagcaccaagaggaagaaggcagctccggtgccttccaagtcacaggccaagatagaacatgcagctgctgcccagggccaaggccaggtatgcacaggtaatgcctgggcccagaaagcagcatctggttggggccgggacagcccagacccaactccccaggtgtcagccaccatcacagtcatggcggcccacccggaagaggaccatcggacgatctacctgagcagccctgactctgcagtgggggtgcagtggccacgagggcctgtgagccagaactccgag

SEQ ID NO: 25009 - DNA, 3381 bp, Homo sapiens
  MAP TO AL359399.1; EXPRESSED IN HELA, SIGNAL = 1.1; NT HIT: gi14746490, EVALUE 0.00e+00; SWISSPROT HIT: P46804, EVALUE 3.00e-04; EST_HUMAN HIT: BI114193.1, EVALUE 0.00e+00
tcaagggcgcccccaccaccaccagggcctcccactttccctgccatgacctgagcagttctgtcccttggggcagccctggcgggggccttccaggcagctcgacactcgccagggaggcacgaggcccgggacccaaacccgagtccagtgccccagcctggcgacctgtgcagggctgcccttgtgctcacccagacacagaccaggatcagccccccagggcagggtggggccagagaagggcaagtacagggggtttataaactgcagagggccgtgcacctccacacacaaaaagccccaggcgagtctgtaaaccgtccacggctgtgtgggtctgggaccttgaaggctgtgcccatctgtccagcatctcctggccctgtaaactgtagagggctgtgcacatctacacacagaaagcccgtaaactgtagagggctgtgcacctctgcacccacctgtggccctcttcttgggggacttgaggctgcgggtgcgggcgcctggggaggcagccccactctcgctcatggagtcaggggcggaggaggcgctgccggtggcctcgctgtcgcgccgcaggctctcatagccactgctgccaccgctgtggtggaaaagggcggtgcggcccatggcgggcggcagctctccactcagcacgctgctgttgtcgctgccatggccgctgctgtagcgctggggccgccgtggggcggtcaccttgctgtagggggagggcagggccgggcccgtgggtggccgctcctcccccacgttcacgccgctgtcatggccgctgtctgagtccgccgagccccacgaggagccacctcggcccggggctccactggctgacagctcatggacgcggctgtgagcagcccggagcgcctgctttgtgcccatgacggtaccccggccagccttcgccccgacactgggcccggcccgtggggctgctctgggaccggccacagggccgccagggctcctgcccgtcacagaggccgtagacagcttcaccgaaggccccagagcccgcgacccaccagccactaggccacggcccttgcctccaccaacagggggcttgggggcccccacagccttggctgcgccgctcctacaggcgggagctggaccgtgtgtggggctggagggtggcacacccagcttgggtacagcccggggaggccgcccaggggcttcccggcccttgctgctgctgtgcgccaggccttcgtaccgctccagagacgcgtgtccggcaagacggtgtgctgcttctaccttgctggcccgggccttcaggctggacgtggccctggggacagagtggtcagcccggctgctgggtctgggctcctcctcccctcgaaggacagcagcagccccgacccgcgccgggttcacagcatgcggaggggccgaggccgggctgctcctctgctccaggctggacttccgcgtgggtggggccgggggggccgccccactgggcctcgggaggaagcccgccttgggagccagacccttcttgctggtgggggaggccttcaggctccccgagcaggccaccacctccgtgggagcatctccccaggacacagctggcgttgtcacacccagcgtggtggcacccctccgcagcggtgggatccgagccacagcctctggcctgcgggccgccctggctgccacctcacacccgtccaccactctctgggcacaggctagcatcacctgggcctcaggcagccggggggagccaagtgtggggctgggggccctgccagcagaagctgcctgggtatcacactcccctacccggagcagccatgggtcctcaaacaggcctccacggccaggtgggctctggcccaggcgagcacagcccacacgggtggtggcagaggcagtcctcggtttccgggggaggctggagtggatggtctgggctgcggatgcccaccgcgagggcccggcctggggctccctgccgggtcgggatggggccactgcagccacttccccagggcacggaccccaggttggcccaggactgtcaggtctgtctggccccaggaacccagagcttccatcccccagggaaccatccagggcaggggggcccccagggtcaagccctgccagcgagtcggggctgaagcggggctgcggcgtggggtcacggctgtcggcagtgcagacgctgacctcgctgagccaggagctgatggaggagccgtgactgctgccggcccaggctgccccctccaggggccccccctcaggggcctgagaggtgtaggcgtcaaactcatcattgatgctgctgatgatgctgactggccgggaccccgaggccagggcccgcagggagcagtcactgtcgaagctagccaggctggtgggccgcccagctccggcaagcgcccccagggacagctcctccaccaccgtgaacaccagctcgtcctcgccgttgagctccactggccgctgcagggtcactgtggtggtgagcaggccccgctccggacagcgactgccagcagccaggcgggggcaggtggccccaggaagcatcggggacccagccacctgcccactcatgcccacgggaggggtccgtgccactccatcagtgccccctcccccaggctcttctggggctctgcaggcttccagcaactgaggaggtgggggagccgggctgggcagtggcctcctgcctccactcactgcagccttttccgggaccagcagctcaggccaagcgctgctgtcctctctctggtcaccccagacaatggccttgcagggctcaggggtaccctggtgggtgtctggaccagaactgcctcgaggggtgctggcagccatcggggtgcccacggccttcctgggggatgcagcctctggtggcgagggcttccggccccctcgggcggggctggcctgagctccgtcggtgccacctggacctcctgagggaccctcgttgccgtccatgcattccagccgctcctgcagctccgcgaaggtgctgcagcggaagtggtctgcgtctcggggacccttggagggccggtggcggctcagggcagggatgatgggcacgaagtcaggcggaccttcgttgtcggtgagctcccggtctgacagcgccgccccaccgggccccacgtagatgaccgtgtcacaggactgctcgctgctggaggagtaatcggggtcaccgggcaggcagggaggcgtgcggtcggggtccagggccacagtgcgtgggtggaagggccgcaggtgcgggggccgacgggcccggccttcctcacaggagctctccccgccagaggagctggaggcgta

SEQ ID NO: 25010 - DNA, 571 bp, Homo sapiens
  MAP TO AC007363.3; EXPRESSED IN HELA, SIGNAL = 0.39; NT HIT: gi15027629, EVALUE 1.40e-01; EST_HUMAN HIT: BE612554.1, EVALUE 1.00e-30; SWISSPROT HIT: P38111, EVALUE 7.10e+00
ggcaaagaggctgcttagtgagggaacctcttgaggagacataaagtaatgacagcccttggatgtcttcgttgacaaagattttctctttgatgcactgagaacagatcaatcaaagagacattttctcgaggttaaaatatcttagcatgctcccaaactctggtgacctgaagttgagctgcagaggccaagaacaagtgtgtggggaggtcctcatgtttgcaaagtgccacagagcaaattcctagggagcagagatggtaagcagtgggcagcttacccaggctgacatccgctccaacaggtttctggaaggcagctcctgaaggatcttgcctttggatacctgaggggattacacagggtcagccgatttacacacaaccagcaggctgctttctttccttattttgcccccggtgaaaattaccttagttcagattttccttggaagtcggccgagctctctgtgcctggttgtacttctgggggttgcagaggaggcaaaaatcttggccaaggggacaggaggaaacagtgctccatggattgggctcctgtagagtcc

SEQ ID NO: 25011 - DNA, 939 bp, Homo sapiens
  MAP TO AC011802.4; EXPRESSED IN HELA, SIGNAL = 0.48; SWISSPROT HIT: Q9XPS9, EVALUE 1.20e-02; EST_HUMAN HIT: Z21361.1, EVALUE 5.00e-68
ataaaccttcaaatccaaagaaagaaaatttgttattatcctccaatggttgtgatgaagtcaaattgacttttcctgatgatgactggaattcttcgacactagagcaaagagctaataataaagaaatcagcaatattgacaaaatggatttattagagccatttttttcagtgagtcaagatactaacacagagagtactcagtttcagtcaagtgaacttgaagacagtactgactatgctttcttgaataaaacatattctataccttattcagagtcaaaactaaagaaggaaagtcttactcctttaagttcagaattagatcctgaagtgcagaaaaaagaggaggttttttttaatattttggaacatcaagataagactgttggcttggaaagaatctacaatatttcagatgctaattatagagaaagtgctgaagatacacaaaagcatgatacagatgaagactcacagcaggaatatcacagtgcagaagaacaagaatacataagtaaccatttatcttttgaccaaacaaaagcattagatatatctaatccagaagttgttgaattaggaaattcgggttatgaagttaaatgtgctagcaatgtagaagataatcgtgttaactcgggaagtggttctatcatctctttcgattcacttgatgtttatggacaagaagagtcacttcatgtctccaaatttcagaattctgttatgttaagagaatatcatgacctaaagcatgaaaagtataaggaacaagagactaattcaatgtaccacactgtatttgatggcagtgtactaagaagcaattctccaggaaaccaggaatctcaatctaagagtggttccttgagccctcaaaaagtattaaaaatgaaaatttatactgaaaacatgaaatctcaaataaatgaag

SEQ ID NO: 25012 - DNA, 549 bp, Homo sapiens
  MAP TO AL132838.1; EXPRESSED IN HELA, SIGNAL = 0.6; NT HIT: AB040958.1, EVALUE 0.00e+00; EST_HUMAN HIT: AU120072.1, EVALUE 0.00e+00; SWISSPROT HIT: Q01295, EVALUE 1.00e+00
cttgtgcaagcatgttaaattccaagaacagtgctatgtggtaaagttccatggcttcttctgccctggtcatgtttggcttccctgcgacgagagcctgaacttcactgagactccccacagaggggctacagtgcaaaacagagaggtccaccacgtcggtatacatacagtgtaatatcactgttgcatatttttttggtataatggactcatctaatataattcttgtgggagtcctcaaagttcggtctgtgatttcttcaccagttcgtatcctcctttgtaataaatttcgaaaaaatggggaccgtgcagaaataacagccttgtgggctttgagctcttcatctaaacagttctgatttccaccaaaagcttcaaccagttcagagtctgaagaaaaactaaggacgacatcataataacacatgtaatcaaagagtccacgcatatctacatcaagggaatttggtgttccaaattcttcactaagctgaacaaggatatcgacattttgaaaccttgagtcctccattccaaactctc

SEQ ID NO: 25013 - DNA, 905 bp, Homo sapiens
  MAP TO AP000556.2; EXPRESSED IN HELA, SIGNAL = 0.3; SWISSPROT HIT: P08122, EVALUE 7.60e-02; NT HIT: gi14777577, EVALUE 0.00e+00; EST_HUMAN HIT: AW958311.1, EVALUE 0.00e+00
aaggctgcccttgagagggtacttcggcaaaagcaagatgcccaagggttcacacctccccagctgggcgccagccaacagtatgcatctgacttccataacgttttgaaggaggagcaggaggcactgtgcttggatctgcggggcacagagaggcgagaggagaggagggagcctgagccccacagcaggcaaggacaagctctgggggtgaagagagggtgccagctccatgagcccagctcggcactgtgtccagctccatccgccaaagtcatcaagatgcccaggggtggcccccaacagctggggacgggggccaacactccagccagggtctttgtggccctctctgattacaaccccctggtgatgtctgccaacctcaaggctgcagaggaggagctggtcttccagaaaaggcagttgctaagagtgtggggctctcaggacacccatgatttctacctcagcgagtgcaacaggcaagtgggcaatatccccgggcgcctagtggctgagatggaggtggggacagagcagactgataggaggtggcgttctccggcccaagggcacctgccttctgtggcccacctcgaggactttcaggggctcaccatcccccagggttcctccctggtgctccaggggaactccaagagactcccactgtggactccaaagatcatgatagcagctctggactatgatcctggggatgggcaaatggggggccaggggaagggcaggctggcgctgagggcaggagacgtggtcatggtttacgggcccatggatgaccaaggattctattatggagagttgggcggccacaggggcctggttcctgcccacctgctggatcacatgtccctccatggacactgagcaagcatccttgc

SEQ ID NO: 25014 - DNA, 748 bp, Homo sapiens
  MAP TO AL023580.1; EXPRESSED IN HELA, SIGNAL = 0.64; NT HIT: AB038698.1, EVALUE 0.00e+00; EST_HUMAN HIT: BI757216.1, EVALUE 2.00e-42; SWISSPROT HIT: Q13516, EVALUE 1.00e-64
gggaccaccaccaccgccaccaccaccaccaggagagccgtctcaactcggtctcgtccacgcagggcgatatgatgcagaagatgcccggggaaagcctctcgcgggctggcgccaaggccgcgggagagagcagcaagtacaaaatcaagaagcagctgtcggagcaggacctacagcagttgaggctgaagatcaacggacgcgaacgcaagcggatgcacgacctgaacctagccatggacgggctgcgcgaagtcatgccctacgcgcatgggccgtcggtgcgcaagctctccaagatcgccacactcctgctcgccagaaactacatcctcatgctcaccagctccctggaggagatgaagaggctggttggcgagatctatgggggccaccactcggcctttcactgcgggaccgtgggccactcggccggccaccccgcgcacgcggccaactccgtgcacccggtgcaccccatcttgggcggcgcgctctcatctggcaacgcctcgtcaccgctgtccgccgcctcacttcccgccatcggcaccatccggcctccccactcgctactcaaggcgccctccacgccgcccgcgctgcagctgggcagcggcttccagcactgggctggtctgccctgcccctgcaccatctgccagatgccgccgccgccgcacctgtccgctctctccacagccaacatggcccggctgtcggccgagtccaaggacttgctcaa

SEQ ID NO: 25015 - DNA, 758 bp, Homo sapiens
  MAP TO AF030453.1; EXPRESSED IN HELA, SIGNAL = 1.7; SWISSPROT HIT: P39880, EVALUE 9.00e-56; EST_HUMAN HIT: BG828685.1, EVALUE 0.00e+00; NT HIT: gi15299631, EVALUE 0.00e+00
gtctcggatccgcagagaactgttcattgaggaaattcaggccgggagtcagggccaggcgggcgccagcgactcaccctcggcccgcagcggccgggcggcgcccagctcggagggcgacagctgcgacggcgtggaggccactgagggcccaggcagcgccgacaccgaggagcccaagtctcagggagaggccgagcgggaggaggtgccgcggccggcggagcagacggagccgccgccctcggggaccccgggcccggacgacgcccgcgacgacgaccacgagggaggccccgtggaaggcccggggcccctgcccagccccgcctccgcgaccgccaccgccgcgcccgcggcccccgaggacgccgctacctcagccgccgccgcgccgggggagggccccgcggccccgagctccgcgccaccgcccagcaacagcagcagcagcagcgccccccgcaggcccagctcgctgcagagccttttcggcctccccgaggccgcgggcgcccgggactcgcgcgacaaccccctgcgcaagaagaaggccgcgaacttgaacagcatcatccaccgcctggagaaggccgccagccgggaggaacctatcgaatgggagttctgaggggctgcggccctggggcgggcagccaggctgggccgcaagggcctggacggggtcggacggggcaggcgctgcgacaccgtggcctgggcttggcccgcggcctgcaccgaccccgggccggacc

SEQ ID NO: 25016 - DNA, 777 bp, Homo sapiens
  MAP TO AF176315.1; EXPRESSED IN HELA, SIGNAL = 0.33; EST_HUMAN HIT: AW293471.1, EVALUE 3.00e-10; SWISSPROT HIT: P30559, EVALUE 1.00e-125; NT HIT: X80282.1, EVALUE 0.00e+00
gataagggcctcccccagccaccaggctccctcctcctgggtctcccagccctggctaccttccttgggcgcgttggcatcccagacgctccacatctgcacgaagaagaaaggcgtccagcacacgatgaaggccagcacgatgatgaaagtcatcttgaccatgcggatcttggccttggagatgagcttgacgctgctgacacgcgccagggccacgcgccccccatcgccagccgccgcgccctctggcgcctcggccgccgccgctgcagcggtcttgagccgcaagttctgccagatcttgaagctgataaggccgtagcaggcagcgagcacgatgaccggcacgatgtagacagctagcgtgatccatgtgatgtaggccttgggtccccagggctggatgaagacggcccagcagtcgaagacgccgtcagccacctcgcgcagagagaagatgtgcacctgcggcgcgctggccaccaggcagccgagccacgtggcgagcactgccaggcggtcggtgcggcggcgcagcgagcgcagcggctggcagatggccaggcagcggtccagggacatgagcagcagcaggtaggtggaggcgaacatgcccaccacctgcaagtacttgaccaggcggcacagcaggtcgggcccgtagaagcggaaggtgatgtcccacagcaactgcggcagcacctgaaacactgccaccaccaggtcggcgatgcttaggtgcttcatgaagaagaagaggcgcgagtgcttctg

SEQ ID NO: 25017 - DNA, 599 bp, Homo sapiens
  MAP TO AL022395.2; EXPRESSED IN LUNG, SIGNAL = 1.8; EXPRESSED IN PLACENTA, SIGNAL = 2.2; EXPRESSED IN HELA, SIGNAL = 3.8; SWISSPROT HIT: P20265, EVALUE 2.00e-80; NT HIT: gi13643518, EVALUE 0.00e+00; EST_HUMAN HIT: AI571395.1, EVALUE 0.00e+00
cttctccagctgtaagctgtccgcgagggaggtgatctcctgggccgagggcttggggcatttgaggaaatggctctccagagcccccttgacgctcacctcgatggaggtccgctttttccgcttgcgcccttgcgctgcgatcttgtctatgctcgtggggctgcccgaggacgagtccgcctcctccaaccacttgttcaacaaaggcttcagcttgcacatgttcttgaagctcagctgcagggcctcaaacctgcagatggtggtctgcgagaacacgttgccatacagggtgcccagagccagccccacgtccgcttgggtaaatcccagtttgatccgccgctgcttgaactgcttggcgaactgctccaggtcgtccgaggtcggcgtgtcctcgtccgagtgcgggtcgtggtgcgcgcctgggtggccaggcggaccctgcgggggcggcgggggcggcggctgctggtgtgggtgcgagtgcgggtgcgggtggtggtcggcatggtgtggctcgtcgtgcgcgtcccgcaggccgtggtggtgcagaccggccggctgcccgccggcgcccagcatgccgttcaccg

SEQ ID NO: 25018 - DNA, 722 bp, Homo sapiens
  MAP TO AL136001.1; EXPRESSED IN HELA, SIGNAL = 0.37; SWISSPROT HIT: Q9UGL9, EVALUE 4.40e-02; NT HIT: U26540.1, EVALUE 4.40e-02; EST_HUMAN HIT: BE003328.1, EVALUE 1.70e-02
atgaagactcacagtgtagggcaacagacgacgcctgagcggctgaagaaggtgggctcccagggcctccctgcccaggcctgctgccacggccagaacccaggggggcaccgtgtacctcgccagtggcctcagcactgcgccttgcctccaggagtcttggcttgtttgtgtggagctggggactgggagagcagagcttgtgacctgaggccccccagcctcagggtggaggtgaccaccctggaccaaggcctgccccagttagtggctgaggacagacaggagtacgtgtggcattcctgcggccccttgctcggcacccaggcacttcctcctgcccctctgcctctggaaggccagccatggcatggccacgggggcctgccacctggcacctccccaacacaatacataaatgagtgggtgtggctgttccaagaaaactgtgtttacacacacaggtgcgccaggcctggccgtcgagccctggtttgccggcctttgttcgagaccagtggttcccaaatgtgcacctgtatcagcatcacccagagcggggtcagagtctggactcctgggccccacgcggagttgttgtcaggggcctgggctttgcatttccacaggttccaggtgctgctgctggagcggaggccacgctctgagcaccctgctctagaagaagagatgcagaaaagacaggcagggctgcagaaaag

SEQ ID NO: 25019 - DNA, 645 bp, Homo sapiens
  MAP TO AC004794.1; EXPRESSED IN HELA, SIGNAL = 0.73; EST_HUMAN HIT: AI751461.1, EVALUE 0.00e+00; SWISSPROT HIT: O05809, EVALUE 5.70e-01; NT HIT: gi13386227, EVALUE 2.40e+00
gtgcagcccccgccagccccccaaccaaagcctcccgcaccaagtccccgggccccgccaggcgcctctccataaagatgaagaagctgccggaactgcggcgccgcctgagcctgcgaggcccccgggctggcagggagcgcgagagggctgcccctgcgggctccgtcatcagccgctaccacctggacagcagcgtggggggccccgggccggcagcagggcctgggggcacccggagcccgagggccggttacctcagcgacggggactcaccggagcgcccagctgggcccccatcacccacctccttccggccctacgaggtgggtcccgcagcccgggcacccccggccgcactctggggccgcctcagcctgcacctgtacggtctcggggggctgcggccagcgccgggggccacccccagggacctctgctgcctactgcaagtggatggggaggccagggcccgaacagggccactgcgaggggggccggacttcctgcggctggaccacaccttccacctggagctggaggccgccaggctcctgcgcgccctggtgcttgcgtgggaccctggcgtgagaaggcaccggccctgtgcccagggcaccgtgctgctgcccacggtcttccgag

SEQ ID NO: 25020 - DNA, 533 bp, Homo sapiens
  MAP TO AL163248.2; EXPRESSED IN HELA, SIGNAL = 1.1; NT HIT: AL163248.2, EVALUE 0.00e+00; EST_HUMAN HIT: AW265529.1, EVALUE 1.00e-58; SWISSPROT HIT: P24345, EVALUE 5.00e+00
gagacgtcatggtcatggaaatcactggtcttaccatgttccccatcatcctgaagcagctgtattgatagaatggtggattagcctttcaaagtcacaattccaatgccaactaggtgacaatactttgcagggctggggcaaagttctccagaaggccatgtatgctgtgaatcagtgtccaatatacggtactgtttctctcacagccaggattcacaggtccaggaatcaaggggtggaagtggaagtggcaccactcaccatcacctttagtaatcagctaccaaattttttgcttcctgttcccgccacattacgttgtgctggcctagaggtcttaattgcagagggaggaatgctgccaccaggagacacaacaattccattaaactggaagttaagattgccacctggacactttgggctcctcctacctttaagtcaacacactaagaagggagttacagtgttggttggggttactgacctggactttcaagatgaaatcagtctactacttcacaaaggag

SEQ ID NO: 25021 - DNA, 625 bp, Homo sapiens
  MAP TO AC011547.3; EXPRESSED IN HELA, SIGNAL = 1.2; EXPRESSED IN PLACENTA, SIGNAL = 1.4; SWISSPROT HIT: P15276, EVALUE 3.00e-09; NT HIT: gi9910551, EVALUE 9.30e+00
aaagttggcctcaggccgcctttgtgggcctcagttttcccttctgtaacgcatcaggctctctgggcctcagtttccccttctgcaacgcatcgggctctctgggcctcagtttccccttctgcaacgcatcgggctctctgggcctcagtttccccttctgcaacgcatcgggctctctgggcctcagtttccccttctgcaacgcctcgggctctctgggcctcagtttccccttctgcaacgcatcgggctctctgggcctcagtttccccttctgcaacgcctcgggctctctgggcctcagtttccccttctgcaacgcctcgggctctctgggcctcagtttccccttctgcaacgcatcgggctctctgggcctcagtttccccttctgcaacgcatcgggctctctgggcctcagtttccccttctgcaacgcatcgggctctctgggcctcagtttccccttctgcaacgcctcgggctctctgggcctcagtttccccttctgcaacgcctcgggctctctgggcctcagtttccccttctgcaacgcatcgggctctctgggcctcagtttccccttctgcaacgcatcgggctctctgggcctcagtttccc

SEQ ID NO: 25022 - DNA, 459 bp, Homo sapiens
  MAP TO AL035685.13; EXPRESSED IN HELA, SIGNAL = 0.26; SWISSPROT HIT: Q14721, EVALUE 7.00e-72; NT HIT: X68302.1, EVALUE 0.00e+00; EST_HUMAN HIT: BG683156.1, EVALUE 0.00e+00
ttcgcatgtcaatgaccccttctgtgcgagtgggcagaggggctacggggctggggatactctccatttcaagttcttcctttggtttgctctgtgctgctgactccttggtattgaggatgggttgggattgggtcttggccatcttattgtacatgtcttccaactgctgaacgttcaggtgctgaggactagaagacgatctggctttttcaggggatccctgttccttggtttcaaaggacttacttgagctggtttcagacagtgtcctctttgtccatttccatttgttaggagacaagtggttatcttgtactttgtctttcttacccatattctccccatttttctcaaccacaatgtccatcatctcaatgctccgggcaaaagcatccttcatgttcatggatacgatgctgccattcctcttggctctctccagagcctctcgccgtt

SEQ ID NO: 25023 - DNA, 562 bp, Homo sapiens
  MAP TO AL139412.2; EXPRESSED IN HELA, SIGNAL = 0.52; SWISSPROT HIT: O88447, EVALUE 9.30e-02; NT HIT: gi16163148, EVALUE 2.10e+00; EST_HUMAN HIT: AI285924.1, EVALUE 5.10e-02
ccagcagtcgcctctcagtgctcctctcggcaagcctccggcttttctccagcacctgcacaacttcccccacccgatgccgcccactcttcagcatacatcctgccgcagcccccagtgccagggctgcggcccgcagctgtctctcttgagcataggcctggcttgcttcctgcaggcagtgggctgctagctcaggctgtcccagagcctggtagcaggctcccatttttgcccaggcttctccctggtcaccctgtggctggtagtggcccagggccctgtggtaccaggccaaagcttgaggcagctcgccgagggcatggtaggccaaagccacattgaaacattggtcgccgtgtcgcctgccctgtgccttctcttcagggtgggctcgcaggagtagctcaaggcctctggctgggtccccagtctccacataggcagcccccaggttgaaggcgcaggcctggagcacaggggtatccctggtttgtggggccttggaggccagaaggaaggccctctggaagttgttcaaggcttcatggttctggccagc

SEQ ID NO: 25024 - DNA, 1125 bp, Homo sapiens
  MAP TO AL022166.1; EXPRESSED IN HELA, SIGNAL = 0.2; SWISSPROT HIT: P50102, EVALUE 3.00e-44; NT HIT: AF229643.1, EVALUE 1.00e-61; EST_HUMAN HIT: BF741256.1, EVALUE 0.00e+00
agtcctcaatggtagccttggtgatgatggcatcatcacagctgaaccactggtccttttgttgccggatgaagctggtatagtggccactttccaaagttccatggtgattaatcactgcaaacaaggaatacttattctcattgggcacacaatctgttggtggctggccttctttcattctgctctctttagtagaggccaaaaacggagtcatgtccagctccaagggaaaggagataaaggtattaatctttcgcctctgtttgcctacatgctcaaaccgcttgagatgaaaacaagccacaatgggtaattttttcattgtgagctgtttagtagactcctggtagctttggcaactattgcatttgattttggcactgcttcctaggtgctctggccttgtaaaccactgtagacagtctgtaagtgaggggattcctggtatgtggtcatccctgctcactgtgctgtcagccctctctgggttctgggaatcgaatgtggcacaagagccaggcaagtccaaactgatgtcccagcatgggtctatggtggtagaaacactatggcaggcttgacatgtgacatctgattgcaggccacctgtaaagatttggtctatgatgcagttacagcagttggggttattggcctcctgcccaccactatcatctttgctgtgtctatgtagcacgtctaatattgcaataaggaactcatgggcatcctgctgcctgtaccctgctaaatgttctgcatggatccatatcagatgcagtaacttatagggaatgtgaggagttcggctcccagagtacatagcatgaaaaagcgaagacatttcacagaccagacacaagctggggcttgtcattatacatttgtgcttgtcagagaggaagaaatctttcagtagaggaatatgggtaagtgcctggacaatacaattcataaaacaagtgttcccaagattgattagccctctcaggcctacagtatagactgacttttttcttctctttttcttgggtttcaccaattttggctcctgttcctttgtctcacaggttgattgcttgtcttcaaaccctgatgtcataaactgttgatgagaaacat

SEQ ID NO: 25025 - DNA, 615 bp, Homo sapiens
  MAP TO AJ239319.2; EXPRESSED IN HELA, SIGNAL = 0.7; EST_HUMAN HIT: BI768435.1, EVALUE 0.00e+00; SWISSPROT HIT: P49682, EVALUE 6.00e-95; NT HIT: gi14759217, EVALUE 0.00e+00
tcacaagcccgagtaggaggcctctgaggtctcagaccaggatgaatcccggcgggaagacgatggctgcctctggagccctctctggttggggcagcccaggcgcaagagcagcatccacatccgctcccggaacttgacccctacaaaggcatagagcagcgggttgaggcagcagtgcatgtagcccaggcctgaggtgaccgacttggccacgtctaccctgctttctcggccacagttgcgggccaaagcgcccaggtccatgaggatgtccaccagcaccaccaggtgatagggggtccagcagagggcaaaggccaccacgaccaccaccaccagccgcatggcccgcaggcgccgctggcccctggaaaccagcagcacggccaggatgtgggcatagcagtaggccatgaccagcaggggcagcagaaagccagccaccagctgcagcacccgcagagccgtgcggcccacctgtgggaagttgtattggcagtgggtggcgttgaggcgctcgtcgtggtgggccgacaggaagatgaagtctgggagggcgaaaagcaggcagagcccccagacagccaggcaggtgagggtcacgcgggccgg

SEQ ID NO: 25026 - DNA, 939 bp, Homo sapiens
  MAP TO AC002455.1; EXPRESSED IN HELA, SIGNAL = 1.8; EXPRESSED IN LUNG, SIGNAL = 1.9; SWISSPROT HIT: P23613, EVALUE 3.00e-60; NT HIT: gi16164948, EVALUE 0.00e+00; EST_HUMAN HIT: AL555416.1, EVALUE 0.00e+00
gttgtcctcgaccagtcccgtgccatggcagcccacctgcttcccatctgcgccctcttcctgaccttactcgatatggcccaaggctttaggggccccttgctacccaaccggcccttcaccaccgtctggaatgcaaacacccagtggtgcctggagaggcacggtgtggacgtggatgtcagtgtcttcgatgtggtagccaacccagggcagaccttccgcggccctgacatgacaattttctatagctcccagctgggcacctacccctactacacgcccactggggagcctgtgtttggtggtctgccccagaatgccagcctgattgcccacctggcccgcacattccaggacatcctggctgccatacctgctcctgacttctcagggctggcagtcatcgactgggaggcatggcgcccacgctgggccttcaactgggacaccaaggacatttaccggcagcgctcacgggcactggtacaggcacagcaccctgattggccagctcctcaggtggaggcagtagcccaggaccagttccagggagctgcacgggcctggatggcaggcaccctccagctggggcgggcactgcgtcctcgcggcctctggggcttctatggcttccctgactgctacaactatgactttctaagccccaactacaccggccagtgcccatcaggcatccgtgcccaaaatgaccagctagggtggctgtggggccagagccgtgccctctatcccagcatctacatgcccgcagtgctggagggcacagggaagtcacagatgtatgtgcaacaccgtgtggccgaggcattccgtgtggctgtggctgctggtgaccccaatctgccggtgctgccctatgtccagatcttctatgacacgacaaaccactttctgcccctggtgagtcttctgtaa

SEQ ID NO: 25027 - DNA, 679 bp, Homo sapiens
  MAP TO AC004790.1; EXPRESSED IN HELA, SIGNAL = 0.62; EST_HUMAN HIT: BI825804.1, EVALUE 0.00e+00; SWISSPROT HIT: P54259, EVALUE 7.00e-02; NT HIT: gi15296404, EVALUE 5.00e-20
acccccaccatgccacccttctcacccttcctcttgccctgtttccaggcctcctcgcagtgttgctgggccacgtcaggaagtgctggaggacgtggcattgcaccaacaccaggcggccagccgtgtggctcatcccgcaaatcaggctcttcctgtgcatggagatggagtccctctggaggcagcccgtggccctgttctcgggcaggtggagcatggagacgactgggaacttcactagacacgcatccagccggttcaagggcttgtcgcgccgtgcaccagcttgcaggagaagtaggtctttatgtccttgaacttgttctactgagtggtgtcgccagcggtgcactgggttctcctgccacttggggccatggggtaggggttttcctgccacttggggccatggggccaagcaccaacagcaccatgcacacagcttgtccctgtctttcacagagcccaacgcctcgccaagcacgaaggcctcccttcccgacttgatgaaggcagagtagcggttgaggttgcggctcacagtgaccgagctcctgcccacgtggggacccagggagccgtcgagctccaggtatgcacctctgcccagtgcacctggatcgttcaccgtcatggagctgccatcccacttgtcgtcccagtcatcatcactgcc

SEQ ID NO: 25028 - DNA, 523 bp, Homo sapiens
  MAP TO AC005609.1; EXPRESSED IN HELA, SIGNAL = 0.34; SWISSPROT HIT: Q9Y5I3, EVALUE 1.00e-95; NT HIT: gi14727865, EVALUE 0.00e+00; EST_HUMAN HIT: BG912030.1, EVALUE 1.00e-122
ctggaactgcagcagctccagctcctcgtggtccaggggctgcagtgcgtacaccttgccgctctccgcgtgcactgacacgtagttcgacagcgcgcgctcgcccacccgccgttccaccagcgaataggacaccagcgcgttctcctgcgcgtccgcgtcccgcgcagacaccgtgaagatgtggcagcccggcgggttgttctccttcacgaatactgtgtactcgggctgcgcgaacgcaggcgcgttgtcattcacgtcggccacctccacggacaccctggccgtggcccacagcgaaggcgagcccccgtcccgcgcggtcaccaccagctcatagaccgacaggctctcgcgatccagggcgctgtccaacaccaacgagtagtaattcttgaaggtggacaccagcttgaaggggacgtggggcattaaggagcaagtcacctgcccgttggcacctgagtcacggtcagacacggtgatgagggcgatgacggtgctgagtggagcgtcctct

SEQ ID NO: 25029 - DNA, 519 bp, Homo sapiens
  MAP TO U66083.1; EXPRESSED IN HELA, SIGNAL = 0.47; NT HIT: gi14753375, EVALUE 1.90e+00; EST_HUMAN HIT: BG192113.1, EVALUE 0.00e+00; SWISSPROT HIT: Q64317, EVALUE 1.40e-01
atctactgcaactccaattttcagagagacaagcccaggctcctggagaatatccagagaaaggatgccctcagaaacaccgctcagcaagcgacccgtgtcccaactccaaagagaaagaatctggtagctacaagacgctccctacgtatctatcacatcaatgccaggaaagaagcaatcaaaatgtgtcagcagggagcccccagtgttcaggggcccagtggcacccagtccttcaggcgctctggcatgtggtccaagaagagtgccactaggcatcccctgggaaatgggccccctcaggaaccaaatggcccaagttgggagggcacctctgggaatgtcacatttacatcttcggctactacctggatggaaggcacagggattcttagtagtctggtttactcagataatggtagtgtaatgtctttgtacaatatctgttactacgctctgttggcctccctctcagtcatgtctccaaatgagccctctgacgatgaggaggagtag

SEQ ID NO: 25030 - DNA, 642 bp, Homo sapiens
  MAP TO AL136365.3; EXPRESSED IN LUNG, SIGNAL = 0.98; EXPRESSED IN HELA, SIGNAL = 2.1; NT HIT: gi14742369, EVALUE 0.00e+00; SWISSPROT HIT: P74430, EVALUE 7.10e-01; EST_HUMAN HIT: AI732189.1, EVALUE 0.00e+00
atgcacaccaggaaaagattaactcagctgttctgttttccagatttgactgaagaacgacttggagacggcaagtcggcagacaatacagaggtcttcagtgacaaagacactgaccagaggagttccccagatgtggcaaagagtaagggctgcttcacccctgagagccctgagatagtgtccgtggaggaagggggatacgctgtccagaaaaacggaggcaaccccgagagccgccctgacagccccaagtgtcacgcggagcagaatcacctcctgattgagggcccctcggggactgtttctctgcccttcagcttgaaagccaacagaccgccgcttgaagtgttaaaaaagatattccccaaccagaagccaacggtgcttgagctcatcctcaagggctgtggcggggacctggtgagcgccgtggaagtccttctgtccagccgatcctcagtcacgggagcagagcgaacttccgcagaacctgagagtctagcgttgccctccaatgggcacatctttgaacacaccttgagctcctaccccatctcgtcttccaaatggtctgtgggatcagcctttcgagtcccagacacgttgaggttttctgccgactctagcaacgttgtcccc

SEQ ID NO: 25031 - DNA, 952 bp, Homo sapiens
  MAP TO AL356019.2; EXPRESSED IN HELA, SIGNAL = 0.94; SWISSPROT HIT: P23270, EVALUE 2.00e-76; NT HIT: AF121972.1, EVALUE 0.00e+00
acttaagacccatgaacaggtcagcaacacacatcgtgacagagtttattctcctgggattccctggttgctggaagattcagattttcctcttctcattgtttttggtgatttatgtcttgaccttgctgggaaatggagccatcatctatgcagtgagatgcaacccactactacacacccccatgtactttctgctgggaaattttgccttccttgagatctggtatgtgtcctccactattcctaacatgctagtcaacattctctccaagaccaaggccatctcattttctgggtgcttcctccagttctatttcttcttttcactgggaacaactgaatgtctctttctggcagtaatggcttatgatcgatacctggccatctgccacccactgcagtaccctgccatcatgactgtaaggttctgtggtaagctggtgtctttctgttggcttattggattccttggatacccaattcccattttctacatctcccaactccccttctgtggtcctaatatcattgatcacttcctgtgtgacatggacccattgatggctctatcctgtgccccagctcccataactgaatgtattttctatactcagagctcccttgtcctctttttcactagtatgtacattcttcgatcctatatcctgttactaacagctgtttttcaggtcccttctgcagctggtcggagaaaagccttctctacctgtggttctcatttggttgtggtatctcttttctatgggacagtcatggtaatgtatgtaagtcctacatatgggatcccaactttattgcagaagatcctcacactggtatattcagtaacgactcctctttttaatcctctgatctatactcttcgtaataaggacatgaaactcgctctgagaaatgtcctgtttggaatgagaattcgtcaaaattc

SEQ ID NO: 25032 - DNA, 499 bp, Homo sapiens
  MAP TO U91328.1; EXPRESSED IN HELA, SIGNAL =   1; EST_HUMAN HIT: BG292093.1, EVALUE 9.00e-22; NT HIT: U91328.1, EVALUE 0.00e+00; SWISSPROT HIT: P22492, EVALUE 6.00e-58
atggagaaacttccaaccaagaagcgagggaggaagccggctggcttgataagtgcaagtcgcaaagtgccgaacctctctgtgtccaagttgatcaccgaggccctttcagtgtcacaggaacgagtaggtatgtctttggttgcgctcaagaaggcattggccgctgctggctacgacgtagagaagaataacagccgcatcaaactgtccctcaagagcttagtgaacaagggaatcctggtgcaaaccaggggtactggtgcttccggttcctttaagcttagtaagaaggtgattcctaaatctaccagaagcaaggctaaaaagtcagtttctgccaagaccaagaagctggttttatccagggactccaagtcaccaaagactgctaaaaccaataagagagccaagaagccgagagcgacaactcctaaaactgttaggagcgggagaaaggctaaaggagccaagggtaagcaacagcagaagagcccag

SEQ ID NO: 25033 - DNA, 929 bp, Homo sapiens
  MAP TO AL133286.5; EXPRESSED IN HELA, SIGNAL = 0.55; NT HIT: gi15298936, EVALUE 0.00e+00; SWISSPROT HIT: Q99698, EVALUE 0.00e+00; EST_HUMAN HIT: BF758357.1, EVALUE 0.00e+00
attttaacctaccgctctcagcagatataatcctgaccaaagaaaagaactcaagttcacaaagatccactcaggaaaaattacatttagaaggaagtgccctgtctagtcaggtttctgcaaaagtaaatgtttttcgaaaaagcagacgacagcgtaaaattacccatcgctattctgtaagagatgcaagaaagacacagctctccacctcagattcagaagccaattcagatgaaaaaggcatagcaatgaataagcatagaaggccccatctgctgcatcattttttaacatcgtttcctaaacaagaccaccccaaagctaaacttgaccgcttagcaaccaaagaacagactcctccagatgctatggctttggaaaattccagagagattattccaagacaggggtcaaacactgacattttaagtgagccagctgccttgtctgttatcagtaacatgaacaattctccatttgacttatgtcatgttttgttatctttattagaaaaagtttgtaagtttgacgttaccttgaatcataattctcctttagcagccagtgtagtgcccacactaactgaattcctagcaggctttggggactgctgcagtctgagcgacaacttggagagtcgagtagtttctgcaggttggaccgaagaaccggtggctttgattcaaaggatgctctttcgaacagtgttgcatcttctgtcagtagatgttagtactgcagagatgatgccagaaaatcttaggaaaaatttaactgaattgcttagagcagctttaaaaattagaatatgcctagaaaagcagcctgacccttttgcaccaagacaaaagaaaacactgcaggaggttcaggaagattttgtgttttcaaagtatcgtcatagagcccttcttttacctgagctt

SEQ ID NO: 25034 - DNA, 626 bp, Homo sapiens
  MAP TO AP001687.1; EXPRESSED IN HELA, SIGNAL =  36; EST_HUMAN HIT: AL565905.1, EVALUE 0.00e+00; NT HIT: gi16173298, EVALUE 0.00e+00; SWISSPROT HIT: P10126, EVALUE 1.00e-92
cccttggtggtattggtacttttcctgttggccaagtggagactggtgttctcaaacctggtatgctggtcacctttgctccggtcagtgttacaactgaagtaaaatctgtcgaaatgcaccatgaagctttgagtgaagctcttcctagggacaatgtgggcctcaatatcaagaaagtgtctgtcaaggatgctcgtcctggcaacgttgctggtgacagaaaaaacgacccaccagtggaagcagctggtttcaccgctcaggtgcttatcctgaaccatccgggccagttcagcactggctatgcccctgtgctggattgccacacagctcacattgcatgcaactttgctgagctgaaggaaaagattgatatctgttctggtaaaaagctggaagatgaccctaaattcttgaagtctggtgatgctgccatcgttgatatggttcttggcgagcacatgtgtgttgagagcttctcagactatccacctctgggtcactttgctgttcatgatatgagacagacagttgccatgggtgtcatcaaagcattggacaagaaggctgctggagctggcaaggtcaccaagtctgcacagaaagctcagaaggataaatga

SEQ ID NO: 25035 - DNA, 609 bp, Homo sapiens
  MAP TO AL022333.1; EXPRESSED IN HELA, SIGNAL = 7.6; NT HIT: gi4557887, EVALUE 0.00e+00; SWISSPROT HIT: P05783, EVALUE 4.00e-83; EST_HUMAN HIT: BE621836.1, EVALUE 0.00e+00
ttgctagctctgggttgaccatggaggtagatccccaaatctcagcacctcgccaagatcatggcagccatccgggcccaatatgacgagctggcttggaagaacggagaggagctggacaagtacttgtctcagcagattgaggagagcaccacagtggtcaccacgcagtctgccaaggctggagctgctgagatgacgctcacagagctgagatgtacagtccagtccttggagatcaacctgaactccatgagaaatctgaaagccagtttggagaacagcgtgagggaggtgaaggcctgctacaccttgcagatggagcagctcaacgggatcctgctgcacctggggtcagagctggcacagacccaggcaaagggacagtgccaggcccaggagtatgaggccctgctgaacatcaaggtcaagctggaggctgagatcgccacctactgccacctgctggaagatggcaaggacttcaatcttggagatgccctggacagcagcaactccatgcaaaccattccaaagaccaccacccaccagagagtggatggcaaagtggtgtctgagaccaacgacaccaaagttctgagacattaa

SEQ ID NO: 25036 - DNA, 467 bp, Homo sapiens
  MAP TO U91321.1; EXPRESSED IN HELA, SIGNAL = 1.5; NT HIT: gi13124760, EVALUE 1.70e+00; SWISSPROT HIT: Q01443, EVALUE 6.00e-06; EST_HUMAN HIT: BG119548.1, EVALUE 6.50e-01
ctactacaggaataactggtctgaggaagacccagattaccctgactattcagggtctcagaaccgtacgcaggggtatttgaaaactcaaggttatccagatgttccaggtcctctgaacaatccagactaccccggcaccaggagcaatccatactctgtagcctccagaacacgtccagactatcctgggtctctggcagaaccaaattatcctagatctctgagtaatccagactattctggcaccagaagcaatgcatactctgcagcctctagaacaagcccagaccatcctacctctctaccagagccagattatagtgaatttcagagtcatccctaccaccgagcatcatccagacaaccagactaccctggatctcaacgaaatcctgattttgcaggctccagcagcagtggaaactatgcaggctccagaacacatccagatcattttggctcct

SEQ ID NO: 25037 - DNA, 841 bp, Homo sapiens
  MAP TO AC005600.1; EXPRESSED IN HELA, SIGNAL = 1.1; NT HIT: L43619.1, EVALUE 0.00e+00; SWISSPROT HIT: P98161, EVALUE 1.00e-113; EST_HUMAN HIT: AU119349.1, EVALUE 0.00e+00
tgttcttggcccgaaggggtgtcctgctggggccagtggccaggtccacaccccgactggcccgggcaaggcggctgggcagtgctggccgcaggcccggggatgggccacgggaagatccggcgggcgcccggctgctcctgcggccttgcaggctgtgcagctgctgctccagctggtagacgtcctctgtggcctggttgagtcggtcaaactgggtgagcagggcctcgaacacggcttggaggcgggagggctcaggctcacaccttgtccccagccggcccaggctcacgctcagcccatccagctggctggaggaggtggaggggtgcgaggcatcggagccagcgctgggtgggggcacatccggggataccttggagcccctggaggagcgagagggcagcggctccatcccttcaaagcggactttgtggcggaactgggggcggcacaggggctcagtcagtccggctgcaccctgggcagagcccagggcgtgtccctctcccccccactgggccgtacccacctccttgaccttgctgaggcccatccagaggcgcagcctgcgcaggaacaactccaccatctcgtagtcctggggctcccaggccggccggtacagctctccacgcaaggcgtggtagcgccagcggagaataacagcccccagccgtagggcgccccacagccgcagtgcccagagccccacacacagcaggggtgacaggtgccaggactcggcaggacacagggtagagagcccagtcccagggcacagcaccaacagggcctgggccacgctccagagggagtccacacaggaagacacgag

SEQ ID NO: 25038 - DNA, 657 bp, Homo sapiens
  MAP TO AF196968.1; EXPRESSED IN HELA, SIGNAL = 0.17; NT HIT: gi16157688, EVALUE 0.00e+00; SWISSPROT HIT: P57772, EVALUE 1.00e-128; EST_HUMAN HIT: AV701607.1, EVALUE 0.00e+00
ccgctccacaaggccatgcttgtgcttcagcttgtacaccttcagcctgggcaggaagctgtcggcgtagttcctgtcctctagcccgtggagcaggatgccatggaaggctagccggcacgtgttggtgtgaatgtccgcatctagcctggagccaatcaccaggcacagccgagggcaggtgacgggcttctcaaactccaccagggcccactgctgccgaggacaatggccctctgtggcctggccggccttcttgtcggcctcatcattgtctgtcactgctggtgtcaaatccttggacaggtactgctcctggaaaaggtattcttgagagaagttgaaagagtccagtataggctcctggtcaaagttatctggagcaggactgaagaacatcaaccggcccatgactgtttcatggcccactgtaatgtggaacttggccttggtttgcaggggcccccggaaatacggtatcttttccacagagatgagggccgcatggacagtgtgcagggactcgggggcacacaccaacccgcgctccagcagcttagggtcaaactgggtgacgcagatgcccagccggtctccttgcatggctgaagtgatgggcatgtggaacatctgcatggacttcaccttcttcaccac

SEQ ID NO: 25039 - DNA, 576 bp, Homo sapiens
  MAP TO AL031295.1; EXPRESSED IN HELA, SIGNAL = 1.7; EST_HUMAN HIT: BG715695.1, EVALUE 0.00e+00; NT HIT: gi14725143, EVALUE 0.00e+00; SWISSPROT HIT: P34624, EVALUE 2.00e-03
agtttactcagcacacctgtttaatctcttggtccttcagtttccacacctaggaagctggaacagcagcagcatccagcgccaggactggagtcatatacgaactctggcacctgggaggcgcgcgtcctacgtcagttccgctcgaccccaccccccccgcccccccgccttctccccacgcgcatgcgccgcgcagcggcgctttttacgacgcggcaggcgcggcgcgcttagttgccggagctgaacggcgcggagctggtctgaggcgagccgagccgagcgagcgcggcggtggggccgagaggacgcgcaggtggcggcgttgccatgtcgcacggtcacagccacggcgggggtggctgccgctgcgccgccgaacgggaggagccgcccgagcagcgcggcctggcctacggcctgtacctgcgcatcgacctggagcggctgcaatgccttaacgagagccgcgagggcagcggccgcggcgtcttcaagccgtgggaggagcggaccgaccgctccaaggtgggccgcctggggcttggggcgggcggggcagggtgcgtgtgg

SEQ ID NO: 25040 - DNA, 999 bp, Homo sapiens
  MAP TO AC007981.31; EXPRESSED IN LUNG, SIGNAL =   1; EXPRESSED IN HELA, SIGNAL = 1.1; SWISSPROT HIT: P23462, EVALUE 3.30e-01; EST_HUMAN HIT: BE531263.1, EVALUE 1.00e-115; NT HIT: gi11427757, EVALUE 0.00e+00
aaagtgggccctgggcagcctgagggcagctctcacctctggccagcaaacttctagactgcaccttgagggccaaaaacgtccagatttcctgctcaatgctgtcgtcgctgtccacggagctactgtcaccatcagagcgggaaggcacgttgggggagtagaagagtgggcttgcggacagggacccatcgctgccctccatagggccggcaggatcgtcttgaaaatgtccaggactgcttctacacacatcagctcagcggaggtgtctgcctggcaagaggaccattccacaaacttgctcctggaagccgggctcgttggaggtggagctttggtttcctttgggatcttgggggaatggtcagcgtccagatcccctggaccagggtccgtggtcttggtgggcactggcttcttcttgctgggtgttttcctgtgggtctctggcaaggcactttttgtggcgctgcttgtgctgtgtgcgggaggggcaggtgctctttcctcttggagctggaccctctggggcgggtccccgtcggcctccttgcgtgttttctgcacctggtacagctggatggcctcctcaatgccgtcgtcgctgctggagtcggacgcctcgggcgcctgtacggcgctcgtgactcgctttcccctccttgcggtgctggcgttccttttaatcccacttttattctgtactgcttctgaagggcggtgggggttgctggctttgtgctgccctccttctcctgcgtggtcgtgaccttggacctgaggcttctgggctgcacgtttgtctttgctaaccgggggaggtctgcagaaggcgaactccttctggacgcccatcaggccctgccggtgcaccacctttgtagccggctcttggtgggatttcgagagtgacttcgccgaattttcatgtgtgtctggtttcttctccactgacccatcacatttttgggtctcatgctgtcttttctcattcag

SEQ ID NO: 25041 - DNA, 1011 bp, Homo sapiens
  MAP TO AL136124.3; EXPRESSED IN HELA, SIGNAL = 0.67; SWISSPROT HIT: P40126, EVALUE 1.30e+00; EST_HUMAN HIT: AW169926.1, EVALUE 0.00e+00; NT HIT: gi5032156, EVALUE 0.00e+00
ctagtttttagaagcaggaagactcccctctggggcagccaagtaggtagcactaggctggggggcaaagaggcaggtaccgtttccttcctggggcccgcaggtgcagtcggcccccagctccgccgacacctccaccgccctctgcagcaggtagcgcgctcgcttgcgcgtcagggcgtccgcctggcccagccccgcctgcaccgtcctccagaagcgccagcagcgccgggcgtccgggcccgcctcgcgcgcgccgcgggcgcggtcgccgccgggctcgggcaacagcttctcggccagggcgctcaggaccagcagcttctcctctacgcggccggaccccagggacgccccaggcgcggccagcccgccccacacggcccgcagcgccgccccgccacattggaccagcactggcagcagtcgcccggccaccagcgccgccgcgtcctcggcaggcccggcctcatccccgtccccgcccccgcccagcgccagggcgacggcggtccccgccacgcgctccagtagcggcccgtcctcgcggggccgcaaacatggcccgacggctgctagcacttccacggcagcctcggcgccaggcgcgcgccacccggcgagcagatcgcgcagcgcctcctcagccagcgcggccgccagctgcggacgcccggccaggcggacgcacgagcgcagggccgcgcccgccgccctcagcacgcgccggcggtggcgaggctgcagactggggtccgggccgcccgcggggcgtccgcgcaggctccgcagcagtggcacgaggtaccctgcagccacctcgcgcgccgcctccgggagcgcgcctgcgcccccgctgccgcgcgcctcctcgtcctcgagccgctgcagaaggaagcgcagcgtctccacgcgctccgcggatgcctccccttggcacagcgccccaagcagggcccgggggtcccggctctgcgagagcagcgcttccgcgagcacccactccat

SEQ ID NO: 25042 - DNA, 742 bp, Homo sapiens
  MAP TO AL050332.15; EXPRESSED IN HELA, SIGNAL = 1.4; SWISSPROT HIT: Q07970, EVALUE 9.00e-41; EST_HUMAN HIT: BF317075.1, EVALUE 0.00e+00; NT HIT: gi16195831, EVALUE 0.00e+00
tgacagtgagctcctcactccctggccctgcacggcgaatctcacactcgcccccttgacccttccgggttccagtggccagcaggtcccggacagtctcattgtagatctctacgtagcttgctacaaagctgtaggtccagccctgaccactcagctcctgagccacagagaagaggtgccgcagggcccgagggatcagcccctccaactgggggtctcccccaggcccaccctccattgtgaaggtcttgccactgcctgtctggccataggcaaagatgcatactggatagccatccagggctgactggacaagcatggcaatctcttcaaacacttcatcctgtccacttcctggtgggaatacccggtcaaaggaaaaatcatggcgagttgggggagctggtgccccactcagggtcccacgccgctcgtcagaccgggagaggctaaggcgggttggaggatcagagggcccaccagggccagagggaaacaggaggaggccagggggtggagtgggctcccccggcaggacagggcggacccggcagaatacacggatgttgcccttgagttcctgcagctggttgtgcagtcgccggcgctccatttctagcccatgaagacgttcttcccgctcagtcagtaaggctgcctgggccacagtctcctgccgcagagatgccacctctgcttggctgcttgacagggctgcttctgatgtctgcagcctcct

SEQ ID NO: 25043 - DNA, 584 bp, Homo sapiens
  MAP TO AC009290.1; EXPRESSED IN HELA, SIGNAL = 1.6; SWISSPROT HIT: Q92337, EVALUE 9.70e+00; EST_HUMAN HIT: AI685151.1, EVALUE 1.00e-05; NT HIT: M21064.1, EVALUE 2.00e-03
  unsure 62
  unsure 70
  unsure 138
aagtctgataggtctttcctccagaatatattaattttttccccacttctttctacctgtanttactgtnggtcatttctcatactcttgcaaaagcctcctaatttaccctgtcttaccccacaataattcactggntgtcacaatagccaaacatattttgaaaatgtaaatcagatcatcagatttcctgctttaaatacaatgatgtcttccccttgttgaaaaaataaaacccaaacttactactgtgtggcctttgcaagatgagactcttgcctacctccttggctgcatgctctcccactctcccttgccctatctcctcaatgacaccagtcttctcactattctgcaaacatgccacacttattcctactccaaggtctttccactaccttctccacagactcccagtattacttctccagtttttacatgtctagctcattctaacctctcttagctcaaatgttacctcctcagagaggcagtgcctgaaaaatgtagctaatatttttattcctcactcccttagtcactttcagtcctttcattctactttatttcattcatgggtctca

SEQ ID NO: 25044 - DNA, 548 bp, Homo sapiens
  MAP TO AC008022.1; EXPRESSED IN HELA, SIGNAL = 0.45; EST_HUMAN HIT: R99517.1, EVALUE 1.00e-08; NT HIT: D79206.1, EVALUE 5.00e-04
  unsure 148
agcctcaggaaaactgaccctacctaacctccagttccacgacctcttggcaccatatactgtccctccttaacatttgtcacagttacaattttacattttttcatacttttatgattaaatgcttatctctccactagactgtgangctccaagaggatgagcaccaagtctcctttttcttcctgtttaaaccctagaatttagcacaagaactggcttattgtaggcactcaatataagaaagaaggaaaaatcactaccatcctaccactattcttaacctctccaaacctcagtctactcatctgcaaaatggggatgctaattcctacctagaagggttcttgggaataatgattattattaacagactaggagaggccccttcctagagaaaggcatgatacttgaaaatccgcaactgtgatacagaatgttcataataagctaatgccatctacacctctttgtggaataagtagagggtaaaaatgcatttaataaataacacaaggatggaaaatacagctctctgaagacccagg

SEQ ID NO: 25045 - DNA, 599 bp, Homo sapiens
  MAP TO AC012360.2; EXPRESSED IN HELA, SIGNAL = 0.23; SWISSPROT HIT: Q64077, EVALUE 2.00e-09; EST_HUMAN HIT: BF893081.1, EVALUE 8.40e-01; NT HIT: gi14729730, EVALUE 0.00e+00
atcatcgcggtctcctgggtgctgtccttctgcatcgcggggccctcgctcacgggctggacgctggtggaggtgccggcgcgggccccacagtgcgtgctgggctacacggagctccccgctgaccgcgcctacgtggtcaccttggtcggtggccgtgttcttcgcgccctttggcgtcatgctgtgcgcctacatgtgcatcctcaacacggtccgcaagaacgccgtggcgtgcacaaccagtcggacagcctggacctgcggcagctcaccagggcgggcctgcggcgcctgcagcggcagcaacaggtcagcgtggacttgagcttcaagaccaaggccttcaccaccatcctgatcctcttcgtgggcttctccctctgctggctgccccactccgtctacagcctcctgtctgtgtttagccagcgcttttactgcggttcctccttctacgccaccagcacctgcgtcctgtggctcagttacctcaagtccgtcttcaaccccatcgtctactgctggagaatcaaaaaattccgcgaggcctgcatagagttgctgccccagaccttccaaatcctccccaaagtgcc

SEQ ID NO: 25046 - DNA, 616 bp, Homo sapiens
  MAP TO AC007098.2; EXPRESSED IN HELA, SIGNAL = 0.61; NT HIT: gi14726631, EVALUE 0.00e+00; SWISSPROT HIT: P05095, EVALUE 1.70e-01; EST_HUMAN HIT: BG478542.1, EVALUE 0.00e+00
acaaaaattaaaaatgtgctctttttaaaatgtgtgaattatatgaactgttcaatatatcttttgtttttccttcctttgaaggcatacgatggatttgccagcataggaatttcccgattattggaaccttctgatatggtattattagcaattcctgataaactgactgttatgacttatctctatcaaataagggcacatttcagtggccaagaactaaatgtcgttcagatagaggaaaacagcagtaaaagcacatataaagttggaaactatgaaacagatacaaacagttctgttgatcaagaaaaattctatgcagagcttagtgatctgaagcgggagcctgaactacaacagcctatcagcggagcagtagacttcttatcacaggatgactctgtatttgtaaatgatagcggggttggagagtcagaaagtgagcatcaaactcctgatgatcaccttagtccaagcacagcctccccttactgtcgcaggactaaaagtgacacagaaccccagaagtctcagcagagctctggaaggacttcaggatctgatgaccctggaatatgttccaatacagattcaacccaagcacaggttttgt

SEQ ID NO: 25047 - DNA, 749 bp, Homo sapiens
  MAP TO AC005414.2; EXPRESSED IN HELA, SIGNAL = 1.4
gacagtcttctcattgaccaatggccgtgtgcttcagaggagggaagccatgacagtcttctcattgaccaatggccgtgtgcttcagaggagggaagccatgacagtcttctcattgcccaatggccgtgtgcttcagaggagggaagccatgacagtcttctcattgcccaatggccgtgtgcttcagaggagggaagccatgacagtcttctcattgcccaatggccgtgtgcttcagaggagggaagccatgacagtcttctcattgcccaatggccgtgtgcttcagaggagggaagccatgacagtcttctcattgcacaatggccgtgtgcttcagaggagggaagccatgacagtcttctcattgcccaatggccgtgtgcttcagaggagggaagccatgacagtcttctcattgcccaatggccgtgtgcttcagaggagggaagccatgacagtcttctcattgcccaatggccgtgtgcttcagaggagggaagccatgacagtcttctcattgaccaatggccgtgtgcttcagaggagggaagccatgacagtcttctcattgaccaatggccgtgtgcttcataggagggaagccatgacagtcttctcattgaccaatggccgtgtgcttcataggagggaagccatgacagtcttctcattgcccaatggccgtgtgcttcagaggagggaagccatgacagtcttctcattgaccaatggccgtgtgcttc

SEQ ID NO: 25048 - DNA, 600 bp, Homo sapiens
  MAP TO AC004531.1; EXPRESSED IN HELA, SIGNAL = 0.34; SWISSPROT HIT: Q12968, EVALUE 2.00e-95; EST_HUMAN HIT: AU131069.1, EVALUE 0.00e+00; NT HIT: gi16164729, EVALUE 0.00e+00
cgaaatataggggtgtggccaggctttggtttgctccaggtaaagggtgaaggaactgaaagaaactgatcaccacatgaatctttctttaaaggatactgagatccaaggccatcatctattgaagtctcccgggctggtgataaactcccttggtcatctgaacacagctctaattttcctggtagtatggcagcttgatcttcagaagttttccttgttttgagagggatgtcagtctctacacagtactgaaatggaaaaactgcagggccaaggcctgacccaccatggacagaagcattgagccacgtatcttctgtcacacttcccctgggggagtgaccaggtgaaggaacaggtgagtgatggggtgaaagggacccagcataacaaacttcagcactggagtgcctccgtttcccacagggggatgtgggccttgatgagggtcctgaggctggcctggggctcagccaattctcatcagtgacactggatctaggagagtggcaaggagattgcctgggtgataatgagtgtccaagtccatactgttgatgccaagtttcttctccagggcagccccctggagagcca

SEQ ID NO: 25049 - DNA, 529 bp, Homo sapiens
  MAP TO AL031291.3; EXPRESSED IN HELA, SIGNAL = 0.93; SWISSPROT HIT: P39582, EVALUE 1.00e-03; EST_HUMAN HIT: AL598659.1, EVALUE 0.00e+00; NT HIT: gi7019550, EVALUE 0.00e+00
atggcggcctctcaggtcctgggggagaagattaacatcctgtcgggagagactgtcaaagctggggacagggacccgctggggaacgactgtcccgagcaagataggctcccccagcgctcctggaggcagaagtgtgcctcctacgtgttggccctgaggccctggagcttcagtgcctcactcacaccggtggccctgggcagtgcccttgcctacagatcccacggtgtcctggatcccaggctcttggtgggttgtgccgtggctgtcctggctgtgcacggggccggtaatttggtcaacacttactatgacttttccaagggcattgaccacaaaaagagtgatgacaggacacttgtggaccgaatcttggagccgcaggatgtcgtccggttcggagtcttcctctacacgttgggctgcgtctgtgccgcttgcctctactacctgtcccctctgaaactggagcacttggctcttatctactttggaggcctgtctggctcctttctctacacaggag

SEQ ID NO: 25050 - DNA, 487 bp, Homo sapiens
  MAP TO AC006070.1; EXPRESSED IN HELA, SIGNAL = 1.4; SWISSPROT HIT: O75690, EVALUE 3.00e-14; EST_HUMAN HIT: AA010570.1, EVALUE 2.70e+00
atggcagacggctgttgtcctggaaacaccacagccattccagctgtgcccaccatcaccacatacccagttaaaggtggatttcgacatgctctctgtttgcctagttcctgccacagcagaatgtggcaactggtcacatgccaagaaagctgtcagccatccattggtgccccaagtggctgtgatcctgcttcgtgtcaacctacccgccttccagcaacgtcttgtgtgggttttgtttgccaacctatgtgctcccacgcagcctgctatcagtctggcactggtcagtctccttgtctggttagctcatgtcagccatcctgctcggaatctacttgttgtcaggaaaagtgctgcgatgccagtccctgccagcaaagctcctgccaggaatctgtctgcatgtctggatcatgtcaggcagcttgtggccaatcagtctgctgtgatgctggatcctgccagccatcctgctctgaag

SEQ ID NO: 25051 - DNA, 629 bp, Homo sapiens
  MAP TO AC016572.4; EXPRESSED IN HELA, SIGNAL = 0.94; SWISSPROT HIT: Q03368, EVALUE 4.20e-01; EST_HUMAN HIT: BI517887.1, EVALUE 8.00e-26; NT HIT: gi9507032, EVALUE 5.00e-26
agagcatgcagtatttgtctttctgtgcctggcttattcgtttagcatgatgttctccagattcatccatgttgtcacaaataagaggaatattttctttttaaaaatcagtagtggctcagtcagtcgctctgtgcgtgccatggcgctcgggagggggcggctcctccggtgcccggcgtcaaacatggtggaggcggtggatctgggcaaagaccccaacgggcccaaccattcctcgattctgttcaccagggaggacggcaactctaggtccttatacctgctgcccagcccagccaagcagctgctgcaccactcggtgcaggaacccaggccacaccgctggcccagcctggggacgcctccagcagctttgttgtctgcgcagtgcgtcccggaccgcgtagaacgctgcagcggctggagctggcggcctatgggctgggccccgcctacgcggcccactcgggcaccggcggtggcggggggggggtccctggcagagcgcgccgtggagcccaagccgtagtcgctggtggggccgccttcagggatgcgggtgacgtggcttttcaggcctacgtgaaggaaaatgcctgctcgccctgttcggtcgcgggcaaagc

SEQ ID NO: 25052 - DNA, 724 bp, Homo sapiens
  MAP TO AC005618.1; EXPRESSED IN HELA, SIGNAL = 0.21; SWISSPROT HIT: Q9Y5I4, EVALUE 7.00e-58; EST_HUMAN HIT: BG822174.1, EVALUE 8.00e-51; NT HIT: gi14861871, EVALUE 0.00e+00
tcagtgcctgaagagacagaaaagggctatattgtgggcaacatctccaaggacctggctctggagccccgggagctggcggagcgccgagtccgcatcgtctctagaggtaggacgcagcttttctctctgaacccgcgcagcggcaccttggtcaccgcgggtaggatagaccgggaggagctctgtgctcagagcccgcggtgtctggtgaactttaaagtcctggttgaagacagagtgaaactgtacggaatagaaatagaagtaactgatattaacgacagcgccccaaagttccaggccgaaagtctggaagtaaaaattaacgaaatcgcggttcctggagcacgttatccacttccagaagctattgatccggatgttggcgtgaactccctccagagctaccagctcagccccaatcaccacttctccctgaacgtgcagactggagacaatggagccataaacccagagctggtgctggagcgcgccctggacagggaggaggcaactgcccaccacctggtcctcacggcctcggatggcggcgagccgcgtcgctccagcacagtgcgcatccatgtgacagtgttggatacaaatgataatgccccggtttttgctcaacggatttaccgagttaaagtccttgagaacgtgcccccaggcacctggctgcttactgcaacagccagcgacctggatgagggaatcaacg

SEQ ID NO: 25053 - DNA, 1164 bp, Homo sapiens
  MAP TO AC005332.1; EXPRESSED IN HELA, SIGNAL = 0.75; SWISSPROT HIT: O60309, EVALUE 2.00e-92; EST_HUMAN HIT: BI829622.1, EVALUE 0.00e+00; NT HIT: gi13633133, EVALUE 0.00e+00
gtggaaccatctctaactcagcaagaggttccagctcagattccagagccctctatggaggcagaaccttctccgacccagcaggaggccacagttcaggctccagagccccctaaggaggtagaatcttcaagccagcagatggtcccagctcagcttccagagccacctaaggaggttgcagctcaacctccagctcattatgaggtgacagttccaacaccaggtcaggatcaagctcagcattggacattgcccagtgtcacagttcaacctttggacctgggacttaccattactccagaacccactaaggaggttgaacattctacagccctgaagaaggctatagttcctccaaagcaccctaaggtgacacttccacatccagaccaggttcagattcagcatttacacctgactcaagccacagttcaacctgtggacctggggcttaccatcactccagaatccactacggaggttgaactttctccaaccacgcaggagaccccaactcagcctcctaagaaagttgtaccccaacttccagtatatcaagaggtaacaattccaacaccaggtcaggatcaagctcagcatcaaatatcacccagtgtcatagttcaacctgtggacctgggacttaccatcactccagaacccactatggaggttgaacattctacacccctgaagaagactatagttctgccaaagcaccctaaggtgacacttccacatccagaccaggttcaggctcagcattcacacctgactcaagccacagttcaacctttggacctgggacttaccatcactccagaatccacgacagagtttgaaccttctacagccctgactacaactcctcctccaaaacactctgaggtgacacttccaccttcagacaagggtcaggttcagcattcaaacctgactcaagtcacagtccaacctctggacctggagcttaccataactacacaacttactacaggggttaaaccatcttcaaccatggaggagacatcaactcagcctccagacctggggcttccatcactccagaacccactacagagactggacatctaccgccctggagaagactacagctcctcatccagaccaggttcagactctgcatcgaagcctgactga

SEQ ID NO: 25054 - DNA, 883 bp, Homo sapiens
  MAP TO AP000365.1; EXPRESSED IN HELA, SIGNAL = 0.65; SWISSPROT HIT: P35748, EVALUE 4.00e-05; EST_HUMAN HIT: BF840427.1, EVALUE 1.00e-25; NT HIT: gi16157884, EVALUE 5.00e-67
ttctcctttttctttctctttttcatattggcattgtctttcttttaaaagagtgcattccttcatcaaccccttattgttctcttctagctttctacactcagcttgaagtttttctacagtatcttcacatttgacttggatattaattattgttttttcctgattgtcagctttcttgtgagcatcattacattgctgttgatacaacagattttggctttgtagttgaaatagtccatcctctatagactgctgctttctcacatatttttccaaaataggttggtcattttggtacatgtgttcaatgtccttcaatggacactgtgttcggcttaggactccttgcatgtgttctatacccaacgtcttttctttgagagcctctctttcataacggagctcagtttccaggccactggatgtactctcagctttagaaagttgctgagaaagaatctgaatgtgagaattagtattttcttgtaaatgacaccattcattcactgtgctctggaaagcaagctgtaggtctcttttcaatgactgacattgatcatgatcacatagggcagcagccagtctacaacggtatgattccatttctgtttccagtcttggggtgctttgtttttccttctctagctcaaaattgagcattgtattctcatccatcagaacattaagctctttactataccaggttattgtttttgttaatgtttcctcattcagctttagagtcttttcaaggtcttcattgttttcctttataatttcaatatctttgaaatatttattttcagtttcccggttctgatgttttattgtgtctatttccagcctgagtctggcaatttcatcccgcatcaagtgattt

SEQ ID NO: 25055 - DNA, 936 bp, Homo sapiens
  MAP TO Z93041.1; EXPRESSED IN HELA, SIGNAL = 0.32; SWISSPROT HIT: P05143, EVALUE 1.00e-06
atgggctccccaccccacagctccgccccgggacccccttcctccgaggcagtcaggctcctgcccccggcaccatccttccggcctcggtcaagactgcccggacaccacctccagggccttgctggacaggacatccacactggccccagcctgtcggcccccagcacaacatctgcaccggccctggcccgtcggcttagcccccaacacgacatccacaatggccccagcctgtcggctcccaacaggacatccacaccagccctggcccgtcagctgggcccccaacaagacattcacactggccctagtccgtcgtcccccaacatgacatccacactggccctggcccgttggctcggcccccgacacgacatccacaccggccccagcccgtcagcccccacagcacgcactgcatgtccacattcccctctctacacaccacaccccaagcgctggctccacacggacgcaggaaagcatcaggaccggaaagcacaggaaaacgtgcttgccaggcaggcgggctggagagctgagcagagacacagagcctcggaggaaggccaggcccactccagagcaagaactaaaatctccagagcacaaatgcccctggctgagctcagcagcagagtgaagaacgaaagaaaaggcagtgaacacgaagacatagcagccacagtgactcattctagagatgagaggcttttagaaaacaccacacagaagcacagggcccaggagctcgtggaaggcagggagaggcctgatgtccatgtccgtggagccacaggagaggagaaagaacatggggcaacccccccaaatattggcaaaaattatccaaatttggtaaaaagtaggcatatcatagtcaagaaactggcaacggaagataaaatccccaaagccatcagagaaacataa

SEQ ID NO: 25056 - DNA, 536 bp, Homo sapiens
  MAP TO AC018843.2; EXPRESSED IN HELA, SIGNAL = 0.2; NT HIT: gi14730805, EVALUE 0.00e+00; SWISSPROT HIT: P28968, EVALUE 5.00e+00; EST_HUMAN HIT: BE256308.1, EVALUE 0.00e+00
cgggccaatgagtggaacacctgcttgtgcaggccaggcccaccatccacagcctgctcataaacaggcgcagtgagcaggctgatgagtttggcatagtccacacacgggggacgggtccctaccagggcctgcaggaagccttcagcagctgccagaaccccggctggcaacaggggcgaacgcagcagccgcagcagctctgagagcacagggccactgacctccaccaaagaggctggctgggcctgggtcactgtggcaaggaagtccacagccagctgggccacatgcatgtcgctctcgttgaccagggcaggcagctcagccagcacggcctgcacggcagacggtgggaggctgaggccctggctctgggccagggcgtccagggctgccagtgtggccagtcgcaaagcccgctggttcttccgcaggaatgaggccagaatgtgcagtgcctcggccaggatgggctgtaggtcaagctgtagtggggatacggccaccagcgtaagcgccttgatggcgggcag

SEQ ID NO: 25057 - DNA, 610 bp, Homo sapiens
  MAP TO AC068323.6; EXPRESSED IN LUNG, SIGNAL =   1; EXPRESSED IN HELA, SIGNAL = 1.8; SWISSPROT HIT: P23685, EVALUE 2.00e-09; EST_HUMAN HIT: BG003773.1, EVALUE 0.00e+00; NT HIT: AF405692.1, EVALUE 7.00e-87
gttataagacatcatggaactctgtctccagtgactttgcattggaacatagactctgatcctgatggtgatctcgccttcacctctggcaacatcacatttgagattgggcagacgagcgccaatatcactgtggagatattgcctgacgaagacccagaactggataaggcattctctgtgtcagtcctcagtgtttccagtggttctttgggagctcatattaatgccacgttaacagttttggctagtgatgatccatatgggatattcattttttctgagaaaaacagacctgttaaagttgaggaagcaacccagaacatcacactatcaataataaggttgaaaggcctcatgggaaaagtccttgtctcatatgcaacactagatgatatggaaaaaccaccttattttccacctaatttagcgagagcaactcaaggaagagactatataccagcttctggatttgctctttttggagctaatcagagtgaggcaacaatagctatttcaattttggatgatgatgagccagaaaggtccgaatctgtctttatcgaactactcaactctactttagtagcgaaagtacagagtcgttcaa

SEQ ID NO: 25058 - DNA, 494 bp, Homo sapiens
  MAP TO AC008022.1; EXPRESSED IN HELA, SIGNAL = 0.47; SWISSPROT HIT: Q9P2Y4, EVALUE 2.00e-02
ctaatcgtagagacggagagacccgggcgccctgcagcagcagcctcccggcccagagccgagatggccggaaggatcttctggaagggaaacctggaccagggccaccccgggcacagggaacgcggctggcaaggcgcatcctcgccgctcagtctccgtctccccgcatctctcagacgtcaacaaacccctgaccacaaagtgaaactttcccggcccccgctgtcgcgccaggtctactgccctctgcctgggagcgcgttgcgtggacaggtgtggggcccgggctgaggaggggccccgctcagggaccggaggttgttgtaatcggcccgggaaggggggccccggacagctccctgcgccggagctgcggaggccagacgggggaccccagctgagggggccggcgccggagaacctgcgacgccggaccgggacggcgagaaacagcttgcaatgccggggtgacggacagcgagcggcagcga

SEQ ID NO: 25059 - DNA, 726 bp, Homo sapiens
  MAP TO AL022315.1; EXPRESSED IN HELA, SIGNAL = 0.7; EST_HUMAN HIT: BG035921.1, EVALUE 0.00e+00; SWISSPROT HIT: P37709, EVALUE 3.00e-04; NT HIT: AY028896.1, EVALUE 0.00e+00
tcataacccagtgtttcttggccccggccctaccgatgttttaggctaggtaattctttgctggggactgtcctgtgccctgcagggcgtttgacagcatccctggcctctacacaccagatgccaataaatccccactaattgtgacaaccagaaatatttcctagacatggccagatgtttctagggggtcagaatcaccccccattgagaaccacagtcataacccaatgaagtaggtacaccgagcactaaaaggacttatccacgtcaaagagccagcaatggtggctctgggacacaggctggctggctactacattgcaaaagctgccccttcccttgcctccccgacccatctccccagggcctaccgccagctgcaggtcacggctgcgaagtacagccgagttcttctcctcactgagctgtgccaggcgcatggcgatcatgtagttctcatccttgagccgcagcagctccaggctgcccgcctcccagtcctcccgcagccgttgacagcgctcctgagcctgctgctggtcccgcagccgctgctccagccctgcccgctcctcctcgagcacccggccccgggcctgcagttgctgctcccgctgcagctggctcttgcgagcttcccgcagccgtcgcacctctgtcatcaagaattgggtcaggccctcaggcccctcctcatctgccaggacagaacaggggacagaa

SEQ ID NO: 25060 - DNA, 479 bp, Homo sapiens
  MAP TO AL117391.1; EXPRESSED IN HELA, SIGNAL = 1.5; NT HIT: gi4506508, EVALUE 0.00e+00; EST_HUMAN HIT: AA489717.1, EVALUE 8.00e-90; SWISSPROT HIT: O14924, EVALUE 2.00e-89
ccatgtctcggtacaggacagagatgaactgcaggacggggagggaggacgccgggaattccagacagccattggtgtctgggtcggccgtgcactcaaacccaaaccgccgagcaatgccttggtggatcttgtgattaaacaagtctgggtccaccatgaacacgtggcaggaagtccgcagggcgccctcctcctcctgggccaggctcccgtcgtcattcgtctgcatggtaaccaacccgaaaaatcgccggtcgtccgggcacacggcgctgaaggccagcttctcggccgggtactcggccacgactccagccttgtcagtgctcagctgcacacagtcgtgcatgatcttcatggtcaccagcgagtggattttctgctctgcccgcaggcgccgcatgcagccgcggatggcttgcaagctgtcggactccaggttggagctcgtggaaggaagctcaatggagcctaag

SEQ ID NO: 25061 - DNA, 745 bp, Homo sapiens
  MAP TO AF121781.1; EXPRESSED IN HELA, SIGNAL = 0.49; SWISSPROT HIT: O95447, EVALUE 0.00e+00; EST_HUMAN HIT: AW303568.1, EVALUE 0.00e+00; NT HIT: AL163279.2, EVALUE 0.00e+00
ttaaataattatttttctttttccttctgtaggtgacgatggcttaatagaatttaccacagttactttagagtctccgaaagcatggctggtggaggcctgactgggaggcaggggatgcgactccttactttgcaaaggctcctctgagccttttgcaacaccaggacttgattggtcagttttcaagacatagcctgatccaaagagttcttccatgagactgcttttcttatctctgaaagttgtatccttcacttttattctggaagacttaccaaatgagggctcatacccactgtcagaatgctctagctccatttcctctctgttactgagatgcttgcctgtactatgactgtacctcatgttgccggcattggctggcccccctgaagcaggaagcccatgatgcaggttttcagttgcttctgtgaatgagtaatgtcttctttgtctgagggggcctttcgtgtagggagcagtgcctttgccaagtgtgtcatccacaccatttctctgcatgcttcttttaaacttttctcttactagaacatcttcttgattgctttctctttcaggatgaataacttcaattatttttggtggtagttcttgctcttctttcacaaaaatgtttttcttttcttggtcttcttttttgtctttttgtcttccagtattctccagcagtatttggacttccaaatgtttctcttcccctgataaatctatattagaaaaa

SEQ ID NO: 25062 - DNA, 804 bp, Homo sapiens
  MAP TO AC009123.6; EXPRESSED IN HELA, SIGNAL = 0.93; EST_HUMAN HIT: BG029104.1, EVALUE 5.00e-43; SWISSPROT HIT: Q92953, EVALUE 1.00e-42; NT HIT: gi12742242, EVALUE 3.00e-43
ttacatgtgcatgataggcaaggctgggccctccaggattaggtcattgacatcgttcatgagctcatgttcactggccacatgggggtccaggagttcacattcactggctggaccggtgttttggaggtggcggaggcgggcctgaagctgctcctgctccttcttgagctccaggtaggagtgggagaaggtgtggaagatagacgtggccgggaaggccatgatgaggatcccgctcaggatgctgctgagggccaccatctggcctggcacactgcggggcaccatgtccccgtagcccaccgttgtcatggagatgatggcccaccaataggaggcggggatgctggtgaactccagcacccgcccggactccttctcggccacgtagaccaaaggggagaagagggtgatggccacggccaggaagagaaggagcaggccgaactcacgtgtgcaacggcgcacggtgagccccagcgtctgcagccccagcgagtggcgagccaggcgcatcacgtagaggatgcgcagcgctcgcagcacacgcaggaccagccccaccttctccaggtaggagctcccgctcggcctctcgccgtcctccgggggctcctcagacaccgccagcgacacgtagtatggggagatggccaggatgtcgatgatgttcaggggcccctggaagaactgacacttgtcttgggcctggacaaaccgcaggcagaactccagggagaaccaggccacgcagatggtctccacgatgaaaatatagtagcacttccgagagcattcgcc

SEQ ID NO: 25063 - DNA, 1737 bp, Homo sapiens
  MAP TO AC006946.18; EXPRESSED IN HELA, SIGNAL = 0.47; SWISSPROT HIT: P91645, EVALUE 9.10e+00; NT HIT: gi14776795, EVALUE 0.00e+00; EST_HUMAN HIT: BG472529.1, EVALUE 2.00e-87
atgcgcccggcgctcggccaccctcgctcggtctcctccgcgtccggttccttcccgccgcccccggcagccgcccggctgcagcccctcttcctccgcgggggctccttccgcggccggagaggctccggcgacagcagcaccagcaccagcaccagccgcgggggaggcggcggcagacgcggcgggggcggcggctccccgagcagcagcacgggcgccgagcgcgaggacgacgacgagagcctcagcgtcagcaagccgctggtgcccaacgccgcgctcctggggccgccggctcaggtgggcgcccccgccggccccgcgcctgtcgccttctcctcctcagcggccacctcctcctccacctccacgcccacctcctcctgcagcatgacagccgcggacttcggcgggggcgccgcggccggggccgtcgggggccccgggagccgctcggcggggggcgcgggcggcaccgggaccggcagcggcgcctcctgctgcccgtgttgctgctgctgcggctgcccagaccgccccggccgcagaggtcggcgccgcggctgcgcccccagtcccaggtgccgctggggctaccaggcgctgtccgtggtgctgctgctggcgcagggcggcctgctggacctgtacctcatcgccgtcaccgacctgtactggtgctcctggatcgccactgacctggtggtggtggtgggctgggccatcttcttcgccaagaacagccggggccgtcggggcggcgcagccagcggcgcgcacaaccaccacctgcaccaccaccacgccgcgccgcccctgcatctgcccgccccctcggccgctaccgctggggccaaggcacgcggagcccgcgggggcgccggcggcgcggggggcggcctgggggcggccgcggcagcgggcgagttcgccttcgcctacctggcctggcttatctactccatcgccttcactcccaaggtggtgctgatcctgggcacgtccatcctagacctcatcgagctacgcgcgcccttcggcaccacgggcttccgtctcaccatggcgctgtcggtgcccctgctctacagcttggtgcgggccatcagcgaggcgggcgcgcccccgggatcggcaggacccctgctgctgcagccccagcggcaccgcgcggccggatgcttcctgggcacgtgcttggacctgctcgacagcttcacgctggtggagctgatgctggagggccgcgtgccgctgcccgcgcacctgcgctacctgcttatcgccgtctacttcctcaccctcgcctcgccggtgctctggctctacgagctcaacgccgcggccgcagcggctgcatcctggggccaggcctccgggcctggcagctgcagccgccttctgcgcctgctgggcggctgcctggtggacgtgcccttgctggcgctgcgctgcctcctggtggtcagctaccagcagcccctctccatcttcatgctcaagaacctcttcttcctcggctgccggggcctggaggccctggagggctgctgggaccggggcaatcgggcctccccgagtcgggccagagggggctacggtgctccgccctccgcccctccaccacctccgccaccacctcagggaggctcccagctgggccactgcatctcggagaacgaggggggtgctcatggctatgtcaacaccctggctgtggcctctcagaattga

SEQ ID NO: 25064 - DNA, 548 bp, Homo sapiens
  MAP TO AC007281.3; EXPRESSED IN HELA, SIGNAL = 1.7; SWISSPROT HIT: P08004, EVALUE 1.30e+00; NT HIT: gi13357558, EVALUE 2.10e+00; EST_HUMAN HIT: BF840220.1, EVALUE 0.00e+00
ttgtgttgtgaaaagttgttttatgaaaactcatgatctcagctaaagctttatcaggcttaaacaaagaacacatgttcctaattttaatatttataatgaaccaagtggactttttaataccaaacttatctatcaaatatttaaccaaattttgtgttcctatacgacgttcaaattaataggaaaaaatcctccagtaagctttttgagtgtatttaggtcttttccagtagagagaacatactgctttttggaggtagtaaaagttattcaagtggtgttcctttcaataaatttcttttcaacatccaagttgcaagccttctcttcagttttcttatgtccttgaaccacaaaggacagttgagtccagaatgatatcagtgtgattggatccaggcttataaaccaaataggtttttactgatcatgatcacaaccaattgacactttctttttcaccatgtatactatgtcagtgaggtacccacagaggttgtcttgtcgacagacagacattcaggtccttcttggggaacaaaaga

SEQ ID NO: 25065 - DNA, 1017 bp, Homo sapiens
  MAP TO AC008639.6; EXPRESSED IN HELA, SIGNAL =   1; EST_HUMAN HIT: BG201938.1, EVALUE 0.00e+00; SWISSPROT HIT: P57529, EVALUE 2.20e+00; NT HIT: gi15305452, EVALUE 0.00e+00
ctagtcagatcctttaaatactgtgctcacgacttgagcattggttctttcatcggaagagtgcctatccttaaagttgggaaatttcagctcctttggagcaccgatcatctgtaaaaagtaattggcatcttcttccaaagtctcaaatttccctacaaaatcatagttgatcaaacacggatagcagagtttgctgaccttttcccagtgaatgtccattcctactggacggtgggaatccagcaagtagtggataaactctttgaacttgactccagatccattaattaatgcttcttcacaggcatttggtcgatatttcttgataattgcctttccgaatactggatggtaataactattggggtgttcaaatttgtccctaaaggctgatactaatctttccatgggatcacgaacaaacacagctttggtgtaagtatttaagcgggtatatatcccttttaggtcaaagctatctagcttcttcaaatgcttcccgtagtggacagcattgtgggagatgttgtatgcagaggaagccaatccatttagtaccatcagaattcttttccaattggaacagccagccttaggtacctcacaatataagattttgtgtttatcttctacatagattctggatactgtatgaaaaagatgtgactgatgatgactcaccccaccgtatttcttgcaaaactcctgaaggaaagaccttcgtttctcttgggtctcctcagttttcttccatttattatctttgactaaacttttgtttaaagggtgaatgtccactggccaattcatgttgctgaacttgttaaaaacagtcttagctccttgacgtttttcaatcaacttctctgttggtgaccctgtggacttacttaaagcttgatcccctccttgtgaatgactggtctttgttaagagcctagtagatctctcagaattgagtagaagattttcctttttttctcgtacatcctcaggcatgtgaaacttggggtt

SEQ ID NO: 25066 - DNA, 585 bp, Homo sapiens
  MAP TO AC004500.1; EXPRESSED IN HELA, SIGNAL = 0.76; SWISSPROT HIT: O60383, EVALUE 1.00e-103; NT HIT: gi11417364, EVALUE 0.00e+00; EST_HUMAN HIT: U69189.1, EVALUE 2.10e-01
gaatccttccatcagtggaactgctatttaacctggatcgcattactaccgttgaacacttactcaagtcagtcttgctgtacaatatcaacaactcagtttctttttcctctgctgtcaaatgtgtgtgcaatctaatgataaaggagccaaagtcttctagcaggactctcggcagagctccatactcatttacctttaactcacagtttgaatttggaaagaaacacaaatggattcagattgatgtgaccagcctccttcaacctttagtggcctccaacaagagaagtattcacatgtctataaattttacttgcatgaaagaccagctggagcatccttcagcacagaatggtttgtttaacatgactctggtgtccccctcactgatcttatatttgaatgacacaagtgctcaggcttatcacagctggtattcccttcactataaaaggaggccttcccagggtcctgaccaggagagaagtctgtctgcctatcctgtgggagaagaggctgctgaggatgggagatcttcccatcaccgtcaccgcagaggtcaggaaactgtcagttctgaat

SEQ ID NO: 25067 - DNA, 1426 bp, Homo sapiens
  MAP TO AC010332.6; EXPRESSED IN HELA, SIGNAL = 0.8; EST_HUMAN HIT: BE179027.1, EVALUE 0.00e+00; SWISSPROT HIT: Q05481, EVALUE 0.00e+00; NT HIT: gi14754652, EVALUE 0.00e+00
tgtcaaatcccaccttttaaataaatatagaaataattttgatcatgctccattacttccacaagaacagaaagcacacattagggaaaaagcttataaatgtaatgagcacggccaagtctttagagcatctgcaagccttactaaccaagtaatccataacgcagataatccttacaaatgcagtgaatgtggcaaggtctttagttgcagttcaaagcttgtgatacatcgaagaatgcatactggagagaagccttacaaatgtcatgaatgtggcaagctcttcagtagcaattcaaacctttcacaacatcaaagaattcatactggagagaagccttacaaatgtcatgaatgtgacaaggtctttcgaagcagttcaaagcttgcacaacatcaaagaattcatactggagagaagccttacaaatgtcatgaatgtgacaaggtcttcaatcaaattgcacaccttgtacgacatcaaaaaattcatactggagagaaaccttacagttgtaataaatgtggcaaggtctttagtcgccattcatatctagcagaacatcaaacggttcatactggtgagaaaccttacaaatgtgaagaatgtggcaaagcattttcagtgcgttccagcctcataacccatcagttaattcacactggaaggaaaccttacaaatgtaaagaatgtgacaaggtctttgggcgcaagtgtttcctgacctctcatcagagaattcatactagagagagaccttatggatgcagtcagtgtggcaagatctttagtcagaaatcagaccttatacgacatcgaaaaactcatactgatgagaagccttacaaatgtaataaatgtggcacagcgtttagagagttttcagaccttactgcccattttctaatccatagtggagagaaaccttatgaatgtaaagaatgtggcaaagtcttcaggtacaagtcttctctaaccagtcatcatagaattcatactggagagaagccttacaaatgtaacagatgtggcaaggtcttcagtcgcagttcaaacctggtatgccatcagaaaattcatacaggagaaaagccttacaaatgtaatcaatgtggcaaggtctttaatcaagcatcataccttacaagacatcaaataattcatactggagagaggccttacagatgtagtaaatgtggcaaagcatttcgagggtgttcaggccttactgcccatcttgcaatccatactgaaaagaaatctcatgagtgtaaagaatgtggcaagatcttcactcagaagtcttccctcaccaatcaccatagaattcacattggagagaaaccttacaaatgcaccctgtgcagtaaggtcttcagtcacaattctgaccttgcacagcatcagagagttcattcatga

SEQ ID NO: 25068 - DNA, 1414 bp, Homo sapiens
  MAP TO AC010582.6; EXPRESSED IN HELA, SIGNAL = 0.2; EST_HUMAN HIT: BE179105.1, EVALUE 0.00e+00; SWISSPROT HIT: P16473, EVALUE 0.00e+00; NT HIT: gi16190702, EVALUE 0.00e+00
aatccttgagtccttgatgtgtaatgagagcagtatgcagagcttgcgccagagaaaatctgtgaatgccttgaatagccccctccaccaggaatatgaagagaatctgggtgacagcattgttgggtacaaggaaaagtccaagttccaggatactcataacaacgctcattattacgtcttctttgaagaacaagaggatgagatcattggttttggccaggagctcaaaaacccccaggaagagactctacaagcttttgacagccattatgactacaccatatgtggggacagtgaagacatggtgtgtacccccaagtccgatgagttcaacccgtgtgaagacataatgggctacaagttcctgagaattgtggtgtggttcgttagtctgctggctctcctgggcaatgtctttgtcctgcttattctcctcaccagccactacaaactgaacgtcccccgctttctcatgtgcaacctggcctttgcggatttctgcatggggatgtacctgctcctcatcgcctctgtagacctctacactcactctgagtactacaaccatgccatcgactggcagacaggccctgggtgcaacacggctggtttcttcactgtctttgcaagcgagttatcggtgtatacgctgacggtcatcaccctggagcgctggtatgccatcaccttcgccatgcgcctggaccggaagatccgcctcaggcacgcatgtgccatcatggttgggggctgggtttgctgcttccttctcgccctgcttcctttggtgggaataagtagctatgccaaagtcagtatctgcctgcccatggacaccgagacccctcttgctctggcatatattgtttttgttctgacgctcaacatagttgccttcgtcatcgtctgctgctgttatgtgaagatctacatcacagtccgaaatccgcagtacaacccaggggacaaagataccaaaattgccaagaggatggctgtgttgatcttcaccgacttcatatgcatggccccaatctcattctatgctctgtcagcaattctgaacaagcctctcatcactgttagcaactccaaaatcttgctggtactcttctatccacttaactcctgtgccaatccattcctctatgctattttcaccaaggccttccagagggatgtgttcatcctactcagcaagtttggcatctgtaaacgccaggctcaggcataccgggggcagagggttcctccaaagaacagcactgatattcaggttcaaaaggttacccacgagatgaggcagggtctccacaacatggaagatgtctatgaactgattgaaaactcccatctaaccccaaagaagcaaggccaaatctcagaagagtatatgcaaacggttttgtaa

SEQ ID NO: 25069 - DNA, 1152 bp, Homo sapiens
  MAP TO AL035362.1; EXPRESSED IN HELA, SIGNAL = 1.4; EST_HUMAN HIT: AL119277.1, EVALUE 0.00e+00; SWISSPROT HIT: O55196, EVALUE 2.60e-02; NT HIT: gi16164115, EVALUE 0.00e+00
tcacggccctgagtgagccccgcacgcccggacccccaggcctgaccaccacccctgcacccccagacaaactggggggcaagcagcgagccgccttcaagtcgggcaagcgggtggggaagccctcacccaaggctgcctccagccccagcaacccggccgccctgcctgtggcctccgacagcagcccgatgggctccaagaccaaggagacagactcacccagcacgcctggcaaggaccagcgctccatgatccttcggtcacgcaccaaaacccaggagatcttccactccaagcggcggaggccctctgagggccggctccccaactgccgtgccaccaagaagctcctcgacaacagccacttgcccgccacattcaaggtctccagcagcccccagaaggagggcagggtgagccagcgggcaagggtccccaaacctggtgcaggcagcaagctctctgaccggcccctccatgcgctcaaaaggaagtcggccttcatggcgccggtccccaccaagaagcggaacctggtcttgcggagccgcagcagcagcagcagcaacgccagtggcaatgggggagatgggaaggaggagaggcctgagggttcccccaccctcttcaagaggatgtcttctcccaagaaagccaagcccaccaagggcaatggcgagcctgccacaaagctcccacccccggagacccccgatgcctgcctcaagctcgcctctcgggcagccttccagggggccatgaagaccaaggtgctgccaccccggaagggccggggcctgaagctggaagccatcgtgcagaagatcacctcgcccagcctcaagaagttcgcatgtaaagcgccaggggcctctcctggtaatcctctgagcccatccctttccgacaaagaccgtgggctcaagggtgctgggggcagcccagtgggggtggaagaaggcctggtaaatgtgggcaccgggcagaagctcccaacttctggggctgatccgttatgcagaaatccaaccaacagatccttaaaaggcaaactcatgaacagtaagaaactgtcttctactgactgtttcaaaaccgaggccttcacatccccggaggccctgcagcctggggggactgccctggcgc

SEQ ID NO: 25070 - DNA, 555 bp, Homo sapiens
  MAP TO AC002056.1; EXPRESSED IN HELA, SIGNAL = 0.38; SWISSPROT HIT: P10323, EVALUE 3.00e-38; NT HIT: gi14779795, EVALUE 0.00e+00; EST_HUMAN HIT: AA429889.1, EVALUE 5.00e-76
ggagacagcggcgggcctctcatgtgcaaagacagcaaggaaagcgcctatgtggtcgtgggaatcacaagctggggggtaggctgtgcccgtgccaagcgccccggaatctacacggccacctggccctatctgaactggatcgcctccaagattggttctaacgctttgcgtatgattcaatcggccacccctccacctcccaccactcgaccgcccccgattcgaccccccttctcccaccctatctctgctcaccttccttggtatttccaaccgccccctcgaccacttccaccccgaccaccggcagcccagccccgacccccaccttcacccccgcccccacccccacctccagcctcacctttacccccacccccacccccacccccacctacaccctcatctaccacaaaacttccccaaggactttcttttgccaagcgcctacagcagctcatagaggtcttgaaggggaagacctattccgacggaaagaaccattatgacatggagaccacagagctcccagaactgacctcgacctcctga

SEQ ID NO: 25071 - DNA, 793 bp, Homo sapiens
  MAP TO AJ251973.1; EXPRESSED IN HELA, SIGNAL = 1.2; SWISSPROT HIT: P52945, EVALUE 1.10e-01; NT HIT: AJ251973.1, EVALUE 0.00e+00
acgcgcggatcgtccatgcgctcctcgcgggcagaatgctgggcagcagcgtcaagagcgtgcagcccgaggtggagctgagcagcggcggcggcgacgagggcgcggacgaaccgcggggcgccggcaggaaggcggcagcggcggacggcagaggcatgctgcccaagcgcgccaaggcgcccggcggcggcggcggcatggccaaggccagcgcggctgagctgaaggtcttcaagtccggcagcgtggacagccgtgtccccggcgggccgcccgcctccaacctgcgcaagcagaagtcactcaccaacctctcttttctcacggactccgagaaaaagctgcagctttatgagcccgaatggagcgacgatatggccaaggcgcccaaaggcttaggcaaggtggggtccaagggccgtgaagctccgctgatgtccaagacgctgtccaagtcggagcactcgctcttccaggccaagggcagcccggcgggcggtgccaagacccccctggctccgctcgcgcccaacctgggaaagccgagccggatccctcgaggaccctatgcggaggtcaagccgctcagcaaggcgcctgaagcggccgtgagcgaagatggcaaatcggacgacgagctgctctccagcaaggccaaggcgcaaaagagctctgggcctgtcccctctgccaagggccaggaggagcgcgccttcctcaaggtggaccccgagctggtggtgaccgtgctgggagacctggagcagctgctcttcagccagatgctggg

SEQ ID NO: 25072 - DNA, 1509 bp, Homo sapiens
  MAP TO AC015599.3; EXPRESSED IN HELA, SIGNAL = 0.29; EST_HUMAN HIT: BF772741.1, EVALUE 0.00e+00; SWISSPROT HIT: P10076, EVALUE 6.00e-28; NT HIT: gi15299762, EVALUE 0.00e+00
tcaaatgcgaggtgaccacagcatgatggttgtggacagggccacgcaccggcgctgcctttccttaccacagtattcacactccaggtctccataaaccttccggatccgctcacacaagctggtgttcatttgcttcttctgtaaactgttcaggaccttcatgaaagcggtgatgcctgaccggtgctcaggggcagctttgcaagagtcaggctgatgtgtgatggtgtccccaccaccagctactggagggaggaggtctgaggcctcagctgggtttgacctgagacacctgctgggatctgggtcaccagctgaaagcacagccatgttctgcccttcccctagggggctctgggcgccatggctttcctgatctgacccagcactctgggccttggacagcagtagtgtgatcacttcaccttgcgtctggactgagcttctgtgctgcatgtctgggggcttctcaggagcagcatgagcctctgcggaggaggtatcatttttcaacaaaaaatcatctgaaaccacctcttgagaatgcaggtctgaggaggagaccacggtggtttccagctcacagggtggcagggctgtgctttcggcctgcggggaggccaggtgcacagctggggcaggcatttccccaggggcctccggctccttccggccctcctccagctgagtgtccccaggacaggcctcttccttgagtgcattcacgccctggagggcaaactcctcttccaccagctgtagctggtcccccagagcttcttgctggatgtccccaccaggttccaggaggcagaagctctggttgatggaactggtgaagaccaaggcctcctgggcagccccgtgcacctctttgatgtgggtgcgcagcctgatggagctgacgaacttcttgcggcagacggcacagacgtacacgaaggggtgcttcctgacatgcagttccagcgcctggtacttggtggccccatggccacagagctcacaggcaaaaggccacttgtctccgtggaccagcatatggcggtcacggtccagctcgttcttgaacttgcgctcacagatgtggcagtcatagagcagctgccgcttgccctccctcgtcatcaggcagagctcgtccaaggcctctttgaccttcttgtcctgtgggtcatgcgcgtctcggatgtgcttgatgaggttcttgacgtcagagtacttcttcttgcagaagcggcagtgctgcttgatcttcttgtgcactcgctcgatgtgcaccttgaggtggcccttgctcaggcaggtgaacgagcaatagtcgcaggcgaacttctctccagtgtgcttgcgcaggtgcacattgaggttggccttgatggcactggcatagctgcactgggggcacttgtatggcttttcattggtgtggatcctcaggtgggcctgcagcgagtgcttgaacttgaagaccttgttgcagtattcacaagtgaagattttgag

SEQ ID NO: 25073 - DNA, 1009 bp, Homo sapiens
  MAP TO AL162387.2; EXPRESSED IN HELA, SIGNAL = 0.37; EST_HUMAN HIT: BF970414.1, EVALUE 3.60e-01; SWISSPROT HIT: Q25460, EVALUE 4.00e-06
atctgtgctacttggatcacatttgacatgttcatgtactcatccacccattcattcaccgcttcattcactccatacacatttactgagatgtactcatccacccattcactcatcccttcattccctccatacacatttactgagctgtactcatccacccattcactcatcccttcattccctccatacacatttactgagctgtactcatccacccattcactcacctcttcattccctccatacacatttactgagatgtactcatccacccattcactcatcccttcattccctccatacacatttactgagatgcactcatccacccattcattcaccccttcattccctccatacacatttactgagatgcactcatccacccattcattcacctcttcattcactccatacacatttactgagatgtactcatccacccattcattcaccccttcattccctccatacacatttactgagatgcactcatccacccattcattcacctcttcattcactccatacacatttactgagatgtactcatccacccattcactcatcccttcattccctccatacacatttactgagatgcactcatccacccattcattcacctcttcattccctccatacacatttactgagatgcactcatccacccattcattcacctcttcattcactccatacacatttactgagatgtactcatccacccattcactcatcccttcattccctccatacacatttactgagatgcactcatccacccattcattcacctcttcattcactccatacacatttactgagatgtactcatccacccattcattcaccccttcattccctccatacacatttactgagatgcactcatccacccattcattcacctcttcattcactccatacacatttactgagatgtactcatccacccattcactcatcccttcattccctccatacacatttactgagatgcact

SEQ ID NO: 25074 - DNA, 1466 bp, Homo sapiens
  MAP TO AC011467.3; EXPRESSED IN HELA, SIGNAL = 0.67; NT HIT: gi15309152, EVALUE 0.00e+00; SWISSPROT HIT: P35789, EVALUE 0.00e+00; EST_HUMAN HIT: AU143734.1, EVALUE 0.00e+00
ttgtatgttcttattttgcccgagacctttggccaaagcagggcaaaaaaaattatttccaaaaagtgatactgagaagatataaaaaatgtggatgtgaaaatttacagttaagaaaatactgtaaaagcatggatgagtgtaaggtgcacaaagaatgttacaatggacttaaccagtgtttgacgactacccagaacaaaatatttcaatgtgacaaatatgtgaaagtctttcataaattttcaaattcaaacagacatacgataagacatactggaaagaaatctttcaaatgtaaagaatgtgaaaagtcattttgcatgctttcacacttagctcaacataaaagaattcatagtggagagaaaccctacaaatgtaaagaatgtgggaaagcctataatgagacctcaaacctttctacacataaaagaattcatactggaaagaaaccctacaaatgcgaagagtgtggaaaagcctttaaccggctctcacaccttactacacataagataattcatactggaaagaaaccctacaaatgtgaggagtgtggcaaagcttttaaccaatctgcaaaccttactacacataagagaattcatactggagagaaaccctacaaatgtgaagaatgtggcagagcttttagccagtcctcaacccttactgcacataagataattcatgctggagagaaaccttacaaatgtgaagaatgtggcaaagcttttagccagtcctcaacccttactacacataagataattcatactggagagaaattctacaaatgtgaagaatgtggtaaggcctttagccagttatcccaccttactacacataagagaattcattctggagagaaaccctacaagtgtgaagaatgtggcaaagcttttaaacaatcctcaacccttactacacataagagaattcatgctggagagaaattctacaaatgtgaagtatgtagcaaagcctttagccggttctcacaccttactacacataagagaattcatactggagagaagccctacaaatgtgaagaatgtggcaaagcttttaacctatcgtcacaacttactacacataagataattcatactggagagaaaccctacaaatgtgaagaatgtggcaaagcttttaaccagtcctcaactctttctaaacataaggtaattcatactggagagaagccctacaaatatgaagaatgtggcaaagcttttaaccagtcctcacaccttactacacataagatgattcatactggagagaaaccctacaagtgtgaagaatgtggcaaagcctttaacaactcctctattcttaacagacataagatgattcatactggagagaaactctacaaacctgaaagttgtaacaatgcttgtgacaacattgcaaagatttccaaatataaaagaaattgtgctggtgagaaataa

SEQ ID NO: 25075 - DNA, 562 bp, Homo sapiens
  MAP TO Z83850.1; EXPRESSED IN HELA, SIGNAL = 0.24; EST_HUMAN HIT: BG568908.1, EVALUE 0.00e+00; NT HIT: gi13630478, EVALUE 0.00e+00; SWISSPROT HIT: P05543, EVALUE 6.00e-99
gacccacaactttccctttggtttgcatctccacatgactgttaatctcctgcttggctgcagaaatgttggagaagtcggtagaaaagacttcagtctcatagagggtcttgacatcattcaagaactttgccagtggtttcagatgcttgccaatgaagagggcatttcctatctgcaattccagttccttctttggaaaattcagtgaacagatcagatgctggaagccatgctggatctctaccattggagtgtctgtgaggttgaaccccaaggtctccacaatctcagtttgggtgctgcagcaggccccaaaggaaagcataaccaaagctgcagaaatgctcacaggggaaaagaagatgttcttatctggggtctccacagtgaacctccggtacagattgaatgcaaagtcagcattaatggatgacatcttgtagagagtggcatttggttgggatgaatggcaggctgttactttgccttcaggtgatgcacagtggattgtagcatgaagcccaagtaccaagagaaccagatacaggaatggtgacat

SEQ ID NO: 25076 - DNA, 497 bp, Homo sapiens
  MAP TO AL031427.15; EXPRESSED IN HELA, SIGNAL = 0.98; EST_HUMAN HIT: AL522978.1, EVALUE 0.00e+00; NT HIT: gi16159568, EVALUE 0.00e+00; SWISSPROT HIT: O95487, EVALUE 1.20e+00
ttgcaaccaaggcaatgtcttactacctcagctcagaaaaccacctggacccagggcccatctacatgcgagaaaatgggcagctgcacatggtcaatctggctctggatggtgtcaggagtagcctgcagaagccaaggcctttcagactgttccccaaaggcttttctgtggagctttgcatgaacagggaagacgacactgcacggaaagagaagactgatcatttcatcttcacatacacccgagaggggaatcttcggtactccgccaaatccctcttcagccttgtcctgggtttcatctccgacaatgtggatcacattgattcccttattggctttcctgagcagattgctgaaaagctgttctctgctgctgaagccagacagaaattcactgagccaggtgcagggctgagggctttacagaaattcactgaggcctatggaagtttggtgctttgctccctgtgtttgcgaaacaggtgggtgttc

SEQ ID NO: 25077 - DNA, 504 bp, Homo sapiens
  MAP TO AP001729.1; EXPRESSED IN HELA, SIGNAL = 0.9; EST_HUMAN HIT: BG253799.1, EVALUE 0.00e+00; NT HIT: gi14780430, EVALUE 0.00e+00; SWISSPROT HIT: P48051, EVALUE 4.00e-91
ctgtggcttccaccattccttctaggatgaccacaatttccagttcctctttgggcagctgggctttggagatctcccagaaaggactctgttggttaatttcatggctaatgatcagcggtgacaccagaaacagacggtcatcccccgtgtaataccctacgttgatatccgtctggttcaacgggatgaactccccctccgaggtctgtttggatttgatcaacttggctctgatggaagcctccacaatgtgggaattcctaaggtcccctacccggaacatcaggcacagtttcccatcccgcatggagatcactgcatgggtggaaaagaccagggtctctgccctcttcttgggttgagagatttttacaaacatgcatcccaccatgaatgcattgacaatggaccccaacacagattggattaagagaagaataattccctctgggcatttatctgtgatgacccggtagccataaccaatggtggtttctgtct

SEQ ID NO: 25078 - DNA, 1135 bp, Homo sapiens
  MAP TO AL049869.5; EXPRESSED IN HELA, SIGNAL = 0.97; EXPRESSED IN LUNG, SIGNAL = 1.2; SWISSPROT HIT: P24278, EVALUE 0.00e+00; EST_HUMAN HIT: BG025956.1, EVALUE 0.00e+00; NT HIT: gi12738673, EVALUE 0.00e+00
tgaatgcataaaaatacaaccaactgacatccaacctgacatattcagctatttgttgcacattatgtacacggggaaagggccaaaacagattgtggatcatagtcgtttggaggaagggattcgatttcttcacgccgactacctttctcacattgcaactgaaatgaatcaagtgttctcaccagagactgtgcagtcctcaaatttatatggcattcagatctcaacaacccaaaaaacagttgtcaaacaaggactggaggtcaaagaagctccttccagtaacagtggaaacagagctgctgtccagggtgaccacccccagttgcagttgtctcttgctattggtctggatgatggcactgcagaccagcagagggcctgtcctgccacccaggccctggaggagcaccagaagcccccagtttccatcaagcaggagagatgtgacccagaatctgtgatctcccagagccacccctcaccctcatcagaggtgacaggccccacttttactgaaaacagtgtcaaaatacacttatgccattactgtggggaacgttttgattcccgtagtaacctaaggcaacatctccatacacatgtgtctggatccctgccattcggtgtccctgcttccattctggaaagtaatgaccttggtgaagtgcatccccttaatgaaaacagcgaggcccttgaatgccgcaggctcagctccttcattgttaaggagaatgaacagcagccagaccacaccaaccggggtaccacagagcctttgcagatcagtcaagtatctttgatctccaaagacacagagccagtagaattaaactgtaatttttctttttcaaggaaaagaaaaatgagctgtaccatctgtggtcataaattccctcgaaagagccaattgttggaacacatgtatacacacaaaggtaaatcttacagatataaccgatgccaaaggtttggtaatgcattggcccagagatttcagccatactgtgacagctggtctgatgtctccctgaaaagttctcgcttgtcacaagaacacttagacttgccttgtgccttagagtcagagctcacacaagaaaatgtggatactatcctagttgagtag

SEQ ID NO: 25079 - DNA, 2257 bp, Homo sapiens
  MAP TO AL049555.6; EXPRESSED IN HELA, SIGNAL = 1.1; SWISSPROT HIT: P35663, EVALUE 1.80e-02; EST_HUMAN HIT: AW511345.1, EVALUE 0.00e+00
tcgaaacttgttctcattgggttgatatgagcgataaacaccagtgttgtaattaagcaatggactagacctgccataactgttgcccatagtcgcagattttatttctgggcgatttatactggtatttggcatgttgcttgttggctgaatagagctctcaatcttacaaaacggctcaaaacgactgtaaacacgccgatcagttgaatgagatcgtagaagctcactggacgttggccttggagaagaagtaggtcttctttcaggggtaacaactgcattaatctcccttgaatctcggtattggatctgttcagtgttaaatcttggggcagaggcatctcctgccctttccaagaacttgctttcaactggacctggagaaggtgttcttttattttcatctggtggagcatttatctcttgagatgggctaactgttacatcttccttactcttgtggatgctgccttgagaattcgatgaggaagaatgctttcttctaggagatgaatcaacttttgtgtctgatttctttggtttttgattttcttcaccctcagaaactaatgtgtcagagctactacacaatctataaaaggcaggtgctttatttttggatagattttctttcttatctggggtaaggctaagtaatgaccttaacttctgagacccctttttcaaaaaacttggggaacccttaacttccttctttgaagcaagttctttgttagattcctctttattcacatcaagtaaagcagcaatggaaactgatttggtagtagtgccacttggagagtttctcttggtaacttcctcctcatcctcctccaagttatgagtcacattgtgcatgcttttagaacttttcagcaaatcttctttgggcttttctggttgtctaactcgattcctggtaagtgtactatatacataatgcttactatttccaggatctaagttggcttttgagttgtcaaataacgggaaacttcgccttttaagtagattctcagtctgttgattctttagattttctgtctgcttatttacacccaaggttttatatatatagttatttgattcagtatggccatttgtagtttggtttaaggctactgagtggttttcaggaacctgcaaggtgtgcatttttggtgcctctgactgcaatgggagcttggggattgattctggcaagggtttgtctgtcaaatgctgtacattcgtaggggtgtctgggacctctttaggtgtctcacttccctgagaaccaatgatagttgaatttgaggagccagttgtacaactgttaacttccttttgctcaggtaaagtgggtttaaatactaaagaggaacgaagccgagaatgagtataaagggcattggccttcaaattctcaggattatcatagccctcaaatcggtcacctaaagctgatccatttgagtccggtgtagcttctgaatgatcatttaagtaggattcaattctccagttacgtaggaatgactttgtggtatgttcaagggttggcattcgttgttgcaaaaagcggatatggttatctgtcccattaaaagacctccgaacatttgaattcctgtctgcaagatttgttgtttttctctgcgcaagccgattggcaaaactctgggcaggtgtgttgtggtggcttacatagccttcccgtgatgaggacgccacactgagactatcagatggctttttccaattaccaggtggattattggttctattcagagccctattaagcaggaggtatggcactgtttctggctgttccccagcataactatgccttttccaattttcatttatctgattgggttgaaactgacgtattgcgtttggaccattaaagttaggaacaaaatgaggtttgtatccgtgacttcttatgttatatttgtcatgttcatttaaagtatatatccctctgtttttgaagtaactggaatctagtttatgaatcttgtcttgtctaccaaaaaggtttctctggctggaaacagatgctaatgaagacaccgaatgctggtaagtgccattttcccagagggcttttccatgcttcacccttgctgattcttcctgagcaaatgaactagggacacaggatctggcatagagagttctaaattcttcatcaaaggactcaacaagttgtcctgtaattatctgaaccatgctgaggtgagctttctcaaatgaccacatataa

SEQ ID NO: 25080 - DNA, 1029 bp, Homo sapiens
  MAP TO U82670.2; EXPRESSED IN HELA, SIGNAL = 0.31; EST_HUMAN HIT: BG030623.1, EVALUE 0.00e+00; NT HIT: M77481.1, EVALUE 0.00e+00; SWISSPROT HIT: P43355, EVALUE 0.00e+00
tcagactccctcttcctcctctctcaaagctgcttcacgcagggatgggaagaaaaagcgaactcttgcactgaccttgatcacatactcaaggactttcacatagctggtttcagcgagggcccttggaccccacaggaactcatagcgtgcgggatcactgtccggcacctgccggtactccaggtacttttcctgcaccaaatcttgggtgagcagcttcctgggctccccataggcactgtgctccctcccatcatacacctccatcacactcagctcctcccagatttcctcctcaggagcatggccgccctccattgcaatcatgaccaggacaattatcaggaagcctgtcttgggcatgatctgattatcacccagcaggccatcataggagagacctaggcaggtgacaaggacataggagtggccggtggggtctgcttccttcacgtcaatgccaaagaccagctgcaaggactcagaggctttgccgaagatctcaggaaaacagtgcttgtaatttttgatgacactctccagcatttctgcctttgtgactggctccctggctcgatatttgaggagcagaaaaccaaccaaatcagccaccttcttagtgattactgctcggaacaaggactccaggatacaagaggtgcttggcccctcctcttcacggctgctggaaccctcactgggttgcctctgtcgagtgaagttgatggtagtgggaaaggcggaggctccctgaggactctggggaggatctgttgacccagcagtgggcacctcctccagggtgcccaggaccagaggagaggaggaggaggtggcagcctgcacacacaccaggcccagggcctcttgttgggcctcaagggcttcctcaggcttgcagtgcagactcctctgctcaagagacatgatgactctcgtcagggcagcaggcaggagtgtgggcaggagctgggcaatgaagacccacaggcctggggagagagggagtgtgtgagaggcctcagc

SEQ ID NO: 25081 - DNA, 792 bp, Homo sapiens
  MAP TO AL133485.1; EXPRESSED IN HELA, SIGNAL = 1.3; SWISSPROT HIT: P22793, EVALUE 7.00e-06; EST_HUMAN HIT: BI562085.1, EVALUE 0.00e+00; NT HIT: gi16162529, EVALUE 0.00e+00
gccattttcacattttccttcactgcctgttcatgagctctctgcaggcttaagaggacgtccccattttcttccaacagctgctccccttgctgaagcagggacagggctccatctccttccacctcctcctctcctatcacctggcaaccactctgaagcattgagagaggagatgttgcctgctgcatttcctttattttactctgaagtctggagatttctgtgctcatctcggctctttctcgatctgctgtctcacaggtcgctttgtgaatgttctccatggctagaagcttggacatcatttcctgcctttcctggtcatgttccatttctagtctttccagccgctggctggccagctgctccgaagcccctgcctggcacaggacctcctcacgctccctcagttcccttttgtgactgctcttcagctcaagtatctggtcagacagcaggctttgctgggtttcagatacatttcttaggtcttccaggtcttggagtagctgctgtctctcgacgaccatgctgttcaaatgttctttgtatgttttctccagcatctctctctcctgggtcaggaccagagaagttgttttctctctcttaagagtctctttcagcagctcctgggcttccgcacactcctgggtgagctcgtccttctcaaattcccactgggatttctcctcacgctgctgttcctggaggtccttcagctcttggcggtagcgcccctccaggctttgcagagcgctttcacacctctcagtgactttctgacaa

SEQ ID NO: 25082 - DNA, 460 bp, Homo sapiens
  MAP TO AL034406.1; EXPRESSED IN HELA, SIGNAL = 1.7; SWISSPROT HIT: P08548, EVALUE 1.00e-12; EST_HUMAN HIT: BF921473.1, EVALUE 2.00e-10; NT HIT: gi16178050, EVALUE 2.00e-15
aaatacattaaaaaacatgatccaactttatgctggtaacaagaaactttcctttaaaaacaaatacagaatcaaaggggtgaaaaaaaagatatttcatgcaaatgaaaatcaaaagccagcaggagtagctatatttatatcagatacaacagactttaaatcaaaaacagtaaaaaaaaaagacaactcaagtgctattgataaaatgatcaattcagcaagaggatatcatgattctaaaaatataagcactcaacatgggagaaccatctatagaatattctatctaacaactacagaatattccttcttctcttcagcacatggaacagtctccaagatagaccacatacttggccacagaacaaatatcaacacatttttaaaattcaaattcatatccagcatcttctcagaccacaatggaataaaactaaaaatcactgaaaaggaaaac

SEQ ID NO: 25083 - DNA, 565 bp, Homo sapiens
  MAP TO AF225898.1; EXPRESSED IN HELA, SIGNAL = 1.2; NT HIT: gi14741373, EVALUE 0.00e+00; SWISSPROT HIT: P37275, EVALUE 7.00e-66; EST_HUMAN HIT: AW118587.1, EVALUE 0.00e+00
aaagacctcatgagtgtggaatctgtaaaaaggcatttaaacacaaacatcatttgattgaacacatgcgattacattctggagaaaagccctatcaatgtgacaaatgtggaaagcgcttctcacactctgggtcttattctcaacacatgaatcatcgctactcctactgtaagagagaagcggaagaacgtgacagcacagagcaggaagaggcagggcctgaaatcctctcgaatgagcacgtgggtgccagggcgtctccctcacagggcgactcggacgagagagagagtttgacaagggaagaggatgaagacagtgaaaaagaggaagaggaggaggataaagagatggaagaattgcaggaagaaaaagaatgtgaaaaaccacaaggggatgaggaagaggaggaggaggaggaagaagtggaagaagaagaggtagaagaggcagagaatgagggagaagaagcaaaaactgaaggtctgatgaaggatgacagggctgaaagtcaagcaagcagcttaggacaaaaagtaggcgagagtagtgagcaagtgtc

SEQ ID NO: 25084 - DNA, 600 bp, Homo sapiens
  MAP TO AL138735.2; EXPRESSED IN HELA, SIGNAL = 0.84; NT HIT: gi15300067, EVALUE 0.00e+00; SWISSPROT HIT: P80198, EVALUE 3.00e-01; EST_HUMAN HIT: BE062715.1, EVALUE 0.00e+00
ttgctgctgctgctcttgcaagtgctgcatcatgggttggggctgataatactgaggtatctgcattgaaccctgccgctgctgcagctgtagctgctgcggctgctgctgctgtggcggcggctgtggctgtgatgggcgaatttgttgcggctgcgtctgtatttcttgcatggagatacgctgttgcccggcttgctgctgttgctgcggtgggtaatactggtgctgctgcatctgttgcatgtgctgtgacagcatctgtggggcctgcagtggctgtcctccctgcactggcacctgagccagaggctgctggtagtcataatacaggtgcccttgggtagggtgctgcccgacctgaagagctggtttggacagcccaccagtgaaaccagggtgaggctgctggggcacctgctggtagcgggaagggatagccggtgctgggggctccatgggcttctgagacagcagctggcggagagcactgtcaggggctccatccatcactgctgactgagtgtgcagcacctgggccatattgttgacctgaattcgcaggttttggttggcaaacacctgggtgaaagagtccag

SEQ ID NO: 25085 - DNA, 686 bp, Homo sapiens
  MAP TO AC002286.1; EXPRESSED IN HELA, SIGNAL = 0.91; EXPRESSED IN LUNG, SIGNAL = 0.98; SWISSPROT HIT: Q9PW70, EVALUE 7.00e-15; EST_HUMAN HIT: BF111288.1, EVALUE 0.00e+00; NT HIT: gi14779957, EVALUE 0.00e+00
cgcacccccggacgctatggcccacccctccggctggccccttctgtaggatggtagcacacaaccaggtggcagccgacaatgcagtctccacagcagcagagccccgacggcggccagaaccttcctcctcttcctcctcctcgcccgcggcccccgcgcgcccgcggccgtgccccgcggtcccggccccggcccccggcgacacgcacttccgcacattccgttcgcacgccgattaccggcgcatcacgcgcgccagcgcgctcctggacgcctgcggattctactgggggcccctgagcgtgcacggggcgcacgagcggctgcgcgccgagcccgtgggcaccttcctggtgcgcgacagccgccagcggaactgctttttcgcccttagcgtgaagatggcctcgggacccacgagcatccgcgtgcactttcaggccggccgctttcacctggatggcagccgcgagagcttcgactgcctcttcgagctgctggagcactacgtggcggcgccgcgccgcatgctgggggccccgctgcgccagcgccgcgtgcggccgctgcaggagctgtgccgccagcgcatcgtggccaccgtgggccgcgagaacctggctcgcatccccctcaaccccgtcctccgcgactacctgagctccttccccttccagatttga

SEQ ID NO: 25086 - DNA, 937 bp, Homo sapiens
  MAP TO AL133485.1; EXPRESSED IN HELA, SIGNAL = 1.3; NT HIT: gi16162529, EVALUE 0.00e+00; SWISSPROT HIT: P22312, EVALUE 4.00e-05; EST_HUMAN HIT: AA631557.1, EVALUE 0.00e+00
ctcagaagttcaactttttgctgcatctcactgcacgtgatctgcaagtcatgcatcattgccttcagctcttcctccttttctccgtgagaaagtacatctttttgcttaactaaaatagtgactctctccttcaacttcctagtcagctcctgtaactttgttttctccagttctaactctgctatggtggcctgatgctgaaaatgtttgtcttgaaagcctaggagagtagtgttttcctccagtataacttgattctgtactcttggcctttcttgatgtgtctgaattgttccatgtaaccaggcaatttcatgtgcttttactttttccaagagctgtgtgttcccctcaaggtactggttttcttgcttacattcctctatgacatgatgtacactcctaaccctgggcacacactcttccagtgtctgattgagctggagtatatttccatcaggttcgatttccaggttctctaaactggcttcccataagcagcagtcacaccgctggaccacgctttcctgaagcttctcaatcttgccttgaagtctcaaaaccagaacattcagcccctcattttctattttgacctcatcgtaactcttttccaggctgaggaatgtttcagtgacttcctccattttcttcagctcatcctgcaacctgaaaacctctgcagtgagttctttgttattttctagtgcctcatcgtagcgtgtctccatcattctcagctcttcctgaaggcagtcattttctcggctcacatcttcatacaacagcttatatttgggagaagcctcagggattctctcaagcatcttcagtttcttttttagcacagaaacatcaaaaagtaggtcctgtttcttttcagaagctcgatcacagtccgcacataacatcattagctgttcctgaagctgac

SEQ ID NO: 25087 - DNA, 891 bp, Homo sapiens
  MAP TO AC007957.11; EXPRESSED IN LUNG, SIGNAL = 1.2; EXPRESSED IN HELA, SIGNAL = 0.67; EST_HUMAN HIT: AW958311.1, EVALUE 0.00e+00; NT HIT: AB051453.1, EVALUE 0.00e+00; SWISSPROT HIT: P08122, EVALUE 9.70e-02
gagggacatgtgatccagcaggtgggcaggaaccaggcccctgtggccgcccaactctccataatagaatccttggtcatccatgggcccgtaaaccatgaccacgtctcttgccctcagcgccagcctgcccttcccctggccccccatttgcccatccccaggatcatagtccagagctgctatcatgatctttggagtccacagtgggagtctcttggagttcccctggagcaccagggaggaaccctgggggatggtgagcccctgaaagtcctcgaggtgggccacagaaggcaggtgcccttgggccggagaacgccacctcctatcagtctgctctgtccccacctccatctcagccactaggcacccggggatattgcccacttgcctgttgcactcgctgaggtagaaatcatgggtgtcctgagagccccacactcttagcaactgctttttctggaagaccagctcctcctctgcagccttgaggttggcagacatcaccagggggttgtaatcagagagggccacaaagaccctggctggagtgttggcccccgtccccagctgttgggggccacccctgggcatcttgatgactttggcggatggagctggacacagtgccgagctgggctcatggagctggcaccctctcttcacccccagagcttgtccttgcctgctgtggggctcaggctccctcctctcctctcgcctctctgtgccccacagatccaagcacagtgcctcctgctcctccttcaaaacgttatggaagtcagatgcatactgttggctggcacccagctggggaggtgtgaacccttgggcatcttgcttttgccgaagtaccctctcaagggcagccttttcctgacacgg

SEQ ID NO: 25088 - DNA, 465 bp, Homo sapiens
  MAP TO AC007708.13; EXPRESSED IN PLACENTA, SIGNAL = 1.7; EXPRESSED IN HELA, SIGNAL = 2.4; EST_HUMAN HIT: AL042278.1, EVALUE 0.00e+00; NT HIT: gi16163581, EVALUE 0.00e+00; SWISSPROT HIT: Q9Y2N3, EVALUE 1.00e-09
atggactctctgtggggcccaggagccgggagtcacccctttggggtccacaacacccggctgtccccagacttgtgtccagggaagatagtgttgagggccctcaaggagagcggggcagggatgcctgagcaggacaaggaccctagagtccaagagaatcctggtgatcagagaagggtccccgaggtcaccggggatgcaccgtctgcatttcggcccctgcgggacaatagaggcctctctccctttgtgcccgggcccgggcctctgcagacagacctccatgcccagaggtcagaaatcagatataaccagacatcccagatctcctggacgagctcctgcaccaaccgaaatgccatctccagctcctacagctccatgggaggcttgccggggctaaagcggaggagggggccagcctcatcccactgccagctgaccctcagttcctcaaagaca

SEQ ID NO: 25089 - DNA, 571 bp, Homo sapiens
  MAP TO AP000347.1; EXPRESSED IN HELA, SIGNAL = 0.58; EST_HUMAN HIT: BE047989.1, EVALUE 0.00e+00; NT HIT: Z46906.1, EVALUE 3.50e-02; SWISSPROT HIT: P15265, EVALUE 2.40e+00
ctcagcacccagccacactgcccctctgagaaatgggcccaatgtggcctccaaagccttgtctgtttcaacgggctgggatctgccccacctctgtatctgggaaaacaaggccctggtggggcaagaagggagctcctggcataggaacctgcaggctgagaggggaagggacctgcccaaagccactcggcaagacagtgacccatgacaccaggaaggctgtgcaaaccacttcctgcaactggcgtctcattgcagccccaccccactgtcaggtccaggaagctgaccacaggaatcacccggaaatcctcgtgccctgagtgggccatgggggcatgacatcctgaactgcagtcatgaggctcacaatgagcgagcaatgcggatgggtccagatgcaagctgtgcctggcccatactccagaaccgctggaacaacatctcagggacccctgggagccagaaacccaatattatctaggacattttgtgtctcctggtgtcctgcaccaaggagacacttggtaaactggctaaatagaactgacttcaaatccaagcatca

SEQ ID NO: 25090 - DNA, 1657 bp, Homo sapiens
  MAP TO AF164115.1; EXPRESSED IN HELA, SIGNAL = 0.65; SWISSPROT HIT: Q92953, EVALUE 0.00e+00; EST_HUMAN HIT: BF919145.1, EVALUE 9.00e-31; NT HIT: gi14750889, EVALUE 0.00e+00
caccattgctttgtctctcaatacgctgccggagctgcaggaaacggacgaatttggacaactcaatgacaaccgccaattagcacacgtggaggctgtgtgtattgcatggtttaccatggagtaccttttgcgattcttatcctcaccaaataaatggaagttcttcaaaggcccactgaatgtcattgatttgctggccatcttgccgtactatgtcaccatttttctgacggagtccaacaagagcgtgctgcagttccaaaacgtgaggcgcgtggtccagatcttccgaatcatgcgcatcctcaggatcctgaaactcgccaggcattcgacaggcctgcagtctctgggtttcacccttaggcggagttacaatgaattgggcttgttgatattgtttctggccatggggataatgatattttccagcctggtattttttgctgagaaggatgaaaatgctaccaagttcaccagtatccctgcatcattttggtgggccaccatcaccatgaccactgttggctatggtgacatttaccctaaaacattactagggaaaattgtgggaggtctgtgctgtattgctggggttctggttattgcccttcctatcccaattattgtgaacaatttttctgagttttacaaggagcagaaacgccaagagaaagcaattaaaaggagggaggctcttgagcgggccaaaaggaacggaagcatcgtttctatgaacttaaaaaatgccttcgctcgaagtatggaactgatagatgtggctgttgagaaggccggagagtccgccaacacaaaggactccgccgacaataatcacctgtcgccaagccggtggaagtgggccaggaaggctctgtcggaaacaagctccaacaagtctttcgagaataagtaccaggaggttagccaaaaagactcccacgagcagctgaacaacacgtcttcctccagcccacagcatctgagtgcccagaaactggagatgctatacaatgaaatcaccaagacacagcctcattctcacccaaacccagactgccaagaaaagcctgagaggccatctgcatatgaagaagagattgaaatggaagaagtggtgtgtccacaggagcagctggccgtggcacagaccgaggtcattgtggacatgaagagcacctccagcatcgacagcttcaccagctgtgccaccgacttcacagagacagagagatcgccgctgccgccgccctccgcctctcaattgcagatgaagttcccaaccgacctcccagggacagaaaagcaccaaagagctaggggccccccgtttctaactctatccaaagataaaggacctgctgccagggatggcacgctggagtatgccccagttgacataactgtgaacctcgatgccagtggctcccagtgtgggctacatattcctttgcagtctgacaatgccaccgacagtcctaagagctctctaaaaggcagcaacccactaaagtccagatccctcaaagtgaactttaaggaaaatagaggcagtgcaccacagaccccgcccagcacagccaggccactgccagtcaccacagctgacttttcgctcactaccccgcagcacatcagtaccatcctcttataa

SEQ ID NO: 25091 - DNA, 645 bp, Homo sapiens
  MAP TO AL117379.14; EXPRESSED IN HELA, SIGNAL = 1.1; SWISSPROT HIT: P23583, EVALUE 2.50e-01; EST_HUMAN HIT: AL580669.1, EVALUE 0.00e+00; NT HIT: gi16193858, EVALUE 0.00e+00
tgggcaggacgccctccacagtgtcactggcctcggagcccacagtctcggcgggaccctcctcccggcgcttcttccgcaggcgactctggatccctttcaggggcctctcagtgggctcctgttcccgcttcctgcgaaggcgattctgaagctctttcaaggtcaggccatcgctgtcactatcggaggtgtcatcgtggtcatcccctcctttcaccttttcagaagaggctggtcgttccttcacagctgtggaagcagactgggggccgcttctggtctcagaagcgctttccacgctgccctcggaggctgtctcggcgtctgtggcggggcaggacgtgggctcaccagaatcctccagggagacaggcatgctcctcctgccgcggcgccgcgcaatggtcaggaactgctccacgcgctcagtgcgcttgggctgcctcccactgcgccgcagggacaggcccagctgctgctgtgggggtggcggctccagtgggtcagcctccgcgtcccctgcgccctctcgcttggcgatagtggtccttcgaaaaccccatgttttcctgaactctttgctggtgggtttgatggccttaggtgcctcctcattgctcgggtcgcctttgtcgtccatac

SEQ ID NO: 25092 - DNA, 911 bp, Homo sapiens
  MAP TO AC005004.1; EXPRESSED IN PLACENTA, SIGNAL = 1.8; EXPRESSED IN HELA, SIGNAL = 0.57; EXPRESSED IN LUNG, SIGNAL = 1.5; NT HIT: L04548.1, EVALUE 3.00e-87; SWISSPROT HIT: Q92359, EVALUE 5.80e-02; EST_HUMAN HIT: AW300856.1, EVALUE 0.00e+00
cttgaacgtgtacagtaattttcaaatcatttttatttaacattacttctgtggcttcagtaaaagaattgggcattaaagaactagagttccctgtatggagactgtcttgaatgcagttattgtggatattttcctttggagaaacaacaggctctttttcaccagaacaacgaccactaatctccttttctggttccctggcattaaaaagaaaaggtccacctctttcactcctaggaatcaaaagccgttcctcattttcttctctagaagccaagttcttcccttgatcatcccccctataaaaataagaactgtctgtcttttcagcagatctctttagcaaaccaccaccttcaaaaccacagttttctaaggatattgttctggattctggaccagacaagtctgatgtgaaacatgaaacttcagaattttctttcaaagggcttgtggctgtgggactatcatgtgtagaactgggttgttcattatggtggccatgaagctgttggtgattgtcatctgcttcacagaccaggtttggtttacacaactcttccttcccattgtccacattagaaatggcactgtttcctggtaatgacaaccaaggacaactttttaattcttcacattctttttctttaggagttgcttctgttaatacagggtccacaaaggttaaaggttctggggtaactaatgtgctggtttctgaaacctcatcactggtcatgattttgtctacttcttggaattcaccgcatccagctgagagatctttactcacattgccatttttgtgtccttcattattatccgtcttagtcccattgaccttcataccttgtacttcggcggattttagcagagtttcagctgtaatctgtacatttccttctgaa

SEQ ID NO: 25093 - DNA, 856 bp, Homo sapiens
  MAP TO AP001713.1; EXPRESSED IN HELA, SIGNAL = 0.38; EST_HUMAN HIT: BF765996.1, EVALUE 6.00e-95; NT HIT: gi14780183, EVALUE 0.00e+00; SWISSPROT HIT: O60287, EVALUE 0.00e+00
ctcctgctgggcgtgtgaagtggctccgtgtcctgcactggaggtacacatggatgaggggaaggaagtcgtccaggtccccctggaggccgagccctgggccagcctgcaggcaccactgctcgaaccacagcaagtgggtgcagctctcctggaggagcagggcagcgatgctgagggccgcctgtgtgcgccgggccaggcagtagtcaagcagatcagccccgactgcgggggccagcacagggtctctctgcagagtgtggaggagcactgtgtccagctcgtccactgctagcgtgggcagcagagcccccaggcctctcacatactcggaggaccacaggagctcaccactctgcagctgatcctgggggctgcaggtcagcagctgcaccagggtctttccaagagcattcaggtgtctttccttcccgggggatttcgtgggttgctgggtcaccaggtgtgtctcaggcaggctcagcaaggccagggtgacctcacggagctgggcaccctccatgtatggatgcagctcctgcagggcctccagctgcggcggggtctttggtggtgatgtggccgggcccgccctcctgttctgaagttccttcagcacactctgggtgatggcctctgagtacctggccagaaggcccagctgcccaatgttctggaggatcggggcacttgctgccagcagctgaaggacccctgcactaaagtgggtggccaggagcttcacgaggacagggctgagcgtgtgcggcgggagggcctgctgctccagggccaggaaccagccctccagggtggggtgcctgaggatggccacaagcacctcctccagcgt

SEQ ID NO: 25094 - DNA, 1794 bp, Homo sapiens
  MAP TO AC007957.34; EXPRESSED IN HELA, SIGNAL = 0.39; EST_HUMAN HIT: BG335852.1, EVALUE 0.00e+00; NT HIT: AF349035.1, EVALUE 0.00e+00; SWISSPROT HIT: Q61751, EVALUE 3.00e-32
gagctgcccagccactcgaagcagctcctgctgcagctgaaccagcagaggaccaagggcttcctgtgtgacgtcatcatcatggtggagaactccatcttccgggcccacaagaacgtcctagccgccagcagcatctatttcaagtccctggtcctgcacgacaacctcatcaacctggacacagacatggtcagctccacagtgttccagcagatcttggacttcatctacacaggcaagctgctgcccagcgaccagccagccgagcccaacttcagcaccctcctcactgccgccagctacctccagctgcccgagttggcagccctctgccgccgcaaactcaagcgagccggcaagccctttggctctgggagggcggggtccactggcatggggcggcccccccgcagccagcggctgtccacggcctctgtcatccaagctcggtatcaggggctcgtggatgggcgcaagggggcccacgccccccaggagctcccccaagccaaaggctcagacgatgaactctttcttggtggctctaaccaggatagcgtgcaaggtctgggccgggctgtctgcccagctggcggggaggcgggtctggggggctgcagcagcagcaccaacgggagcagcgggggctgcgagcaggagctgggcttggacctgtccaagaaaagcccacccttgccccctgccaccccaggtccccacctcactcccgatgacgcagcccagctgagcgacagccaacatggctcgccccctgcggcctctgcccctcccgttgccaacagtgcctcttattctgagctggggggcacccctgatgagcccatggatctggagggggccgaggacaaccacctgagcctgctggaggcgcctggtgggcagcctcggaagagcctccggcactccactcggaagaaggagtggggcaagaaggagcctgtggctggctccccctttgagcggagagaagcagggcccaagggtccctgcccgggagaggagggtgagggggtcggggacagggttcccaatggcatcctggctagtggggctggccctagcgggccctatggggagcccccctacccctgcaaggaggaggaggagaacggcaaggatgcaagtgaagacagtgcgcagagcgggagcgaggggggcagcggccacgccagcgcccactacatgtaccggcaggagggctacgagacggtgtcctacggggacaacttgtatgtgtgcattccctgcgccaagggcttccccagctctgagcagctcaatgcgcacgtggagactcacacggaggaagagctgttcatcaaggaagagggggcctacgagacaggcagtgggggtgccgaggaggaggccgaggacctgtcagcacccagtgcggcctacacggctgagccccggcccttcaagtgttcggtctgcgagaagacctacaaggacccagccacgctgcggcagcacgagaagacgcactggctgacacggcccttcccctgcaacatctgtggcaaaatgttcacgcagcgcggcaccatgacgcgtcacatgcggagccacctgggcctgaagcccttcgcctgcgatgagtgtggcatgcgcttcacccgtcagtaccgcctcacggagcacatgcgtgtgcactcgggcgagaaaccttacgagtgccagctgtgcgggggcaagttcacccagcagcgcaacctcatcagccacctgcgcatgcacacctccccctcctagaagccaaagacccgc

SEQ ID NO: 25095 - DNA, 838 bp, Homo sapiens
  MAP TO AC006138.1; EXPRESSED IN HELA, SIGNAL = 0.77; SWISSPROT HIT: P28968, EVALUE 1.00e-05; EST_HUMAN HIT: BG393453.1, EVALUE 0.00e+00; NT HIT: gi14752388, EVALUE 0.00e+00
gtccccatggaggccctggtgggccagtgggtccacgtcttctgggtcctccaccccctccccggggaggtgatcccttctgggatggcccgggcgaccctatgcggggtggcccaatgcgggggggtccaggaccaggtcctggaccataccatagaggccgaggtggccgaggaggaaacgaacctcctcctcctcctcctccattccgaggcgccagaggaggtcgctctggaggaggacccccaaatggacgagggggccctggtgggggcatggttggaggtggtgggcatcgtcctcacgaaggccctggtgggggcatgggcaacagcagtggacatcgtccccacgaaggccctggcggtggcatgggaagtgggcatcgcccccatgaaggccctggtggtagcatgggtgggggtggaggacatcgtccccacgaaggccctggcggtggcatcagtggtggcagtggccatcgtccccatgaaggccctggcggaggaatgggtgccggtggtggacatcgcccccacgaaggccctggcggaagcatgggtggaagtggtggacatcgtccccatgaaggccctggacacggggggccccatggccaccggcctcatgatgtccctggtcaccgaggccatgaccatcgagggccgccacctcatgagcaccgtggccatgatggtcctggccacgggggagggggccaccgagggcacgatggaggccacagccatggaggaggtgaggatgctccctgtcccccatatgccttttggttgtcccatacaagcttttggggagtgggtgagagtcactactgttg

SEQ ID NO: 25096 - DNA, 3299 bp, Homo sapiens
  MAP TO AC011547.3; EXPRESSED IN LUNG, SIGNAL = 0.92; EXPRESSED IN HELA, SIGNAL = 1.2; SWISSPROT HIT: P03181, EVALUE 1.00e-07; EST_HUMAN HIT: BI223886.1, EVALUE 1.20e+00
atgggacgtctgtgccctcatgggacacctgtgcccctcatgggaggcctgtgttctcatgggacgcctgtacccctcatgggacgcctgtacccctcatgggacgtctgtgttctcatgggatgcctgtgccctcatgggatggctgtgttctcatgggacgcctgtaccctcatgggacgcctgtgcccctcatgggacgcctgtgttctcatgggatgcctgtaccctcatgggacgcctgtgcccctcatgggacacctgtgttctcatgggacacctgtgcccctcatgggatgcctgtaccctcatgggatgcctgtgccccgcatgggatgcctgcattctcatgggacacctgtgccctcatgggacacctgtgttctcatgggacacctgtgttctcatgggacacctgtgccctcatgggacgcctgtgccctcatgggacaactgtgttctcatgggacgcctgtgttctcatgggacgcctgtgccctcatgggatgcctgtgttctcatgggacgcctgtgcccctcatgggatgcctgtgccctcatgggacgcctgtgttctcatgggatgcctgtgcccctcatgggatgcctgtgttctcatgggacgcctgtgcccctcatgggatgcctgtgttctcatgggatgcctgtgcccctcatgggatgcctgtgccctcatgggacacctgtgttctcatgggacacctgtgccctcatgggacgcctgtgttctcatgggacgcctgtgccctcatgggatgcctgtgccctcatgggacgcctgtgacctcatgggatgcctgtgttctcatgggacgcctgtgttctcatgggacgcctgtgccctcatgggacgcctgtgttctcatgggacgcctgtgccctcatgggatgcctgtgccctcatgggatgcctgtgccctcatgggacgcctgtgttctcatgggacgcctgtgcccctcatgggacgcctgtgccctcatgggacgcctgtgccctcatgggacgcctgtgttctcatgggacgcctgtgcccctcatgggacgcctgtgccctcatgggacgcctgtgccctcatgggacgcctgtgttctcatgggacgcctgtgcccctcatgggacgcctgtgttctcatgggactcctgtgccctcatgggacgcctgtgttctcatgggacgcctgtgcccctcatgggacgcctgtgttctcatgggacgcctgtgccctcatgggacgcctgtgttctcatgggacgcctgtgcccctcatgggacacctgtgttctcatgggacgcctgtgccctcatgggacgcctgtgttctcatgggacgcctgtgcctctcatgggacacctgtgttctcatgggacgcctgtgccctcatgggacgcctgtgccctcatgggacacctgtgttctcatgggacgcctgcattctcatgggacgcctgtgccctcatgggacacctgtgttctcatgggacacctgtgttctcatgggatgcctgtgccctcatgggatgcctgtacccctcatgggacgcctgtgttctcatgggatgcctgtaccctcatgggacgcctgtacccctcatgggacatctgtgccctcatgggatgcctgtgcccctcatgggatgcctgtgccctcatgggacgcctgtgttctcatgggatgcctgtaccctcatgggacgcctgtgcccctcatgggatgcctgtgttctcatgggatgcccgtgccccgcatgggacgcctgaattctcatgggacacctgtgccctcatgggacacctgtgttctcatgggacgcctgtgttctcatgggacacctgtgccctcatgggacgcctgtgttctcatgggatgcctgtgccctcatgggacgcctgtgttctcatgggacgcctgtgccctcatgggacgcctgtgccctcatgggacgcctgtgttctcatgggacgcctgtgcccctcatgggacgcctgtgccctcatgggacgcctgtgttctcatgggacgcctgtgcccctcatgggacgcctgtgttctcatgggacgcctgtgccctcatgggacgcctgtgccctcatgggacgcctgtgccctcatgggacgcctgtgttctcatgggacgcctgtgccctcatgggacgcctgtgccctcatgggacgcctgtgttctcatgggacgcctgtgccctcatgggacgcctgtgccctcatgggacgcctgtgttctcatgggacgcctgtgttctcatgggacgcctgtgcccctcatgggacgcctgtgttctcatgggacgcctgtgccctcatgggacgcctgtgttctcatgggacgcctgtgcccctcatgggacgcctgtgttctcatgggacgcctgtgcccctcatgggacacctgtgccctcatgggacgcctgtgccctcatgggacgcctgtgttctcatgggacgcctgtgcccctcatgggacgcctgtgccctcatgggacgcctgtgttctcatgggacgcctgtgcccctcatgggacacctgtgttctcatgggacgcctgtgccctcatgggacgcctgtgttctcatgggacgcctgtgcccctcatgggacacctgtgttctcatgggacgcctgtgccctcatgggacgcctgtgttctcatgggacgcctgtgcccctcatgggacacctgtgttctcacgggacgcctgtgccctcatgggacgcctgtgttctcatgggacgcctgtgcccctcatgggacgcctgtgttctcatgggacgcctgtgcccctcatgggacacctgtgccctcatgggacgcctgtgccctcatgggacgcctgcgttctcatgggacgcctgcattctcatgggacgcctgtgccctcatgggacacctgtgttctcatgggacacctgtgttctcatgggatgcctgtgccctcatgggatgcctgtacccctcatgggacgcctgtgttctcatgggatgcctgtaccctcatgggacgcctgtacccctcatgggacatctgtgctctcatgggatgcctgtgcccctcatgggatgcctgtgccctcatgggacgcctgcattctcatgggacacctgtgccctcatgggatgcctgtaccctcatgggacgcctgtgcccctcatgggatgcctgtgttctcatgggatgcctgtgcccctcatgggacgcctgcattctcatgggacacctgtgccctcatgggatgcctgtacccttcatgggacgcct

SEQ ID NO: 25097 - DNA, 488 bp, Homo sapiens
  MAP TO AL157911.2; EXPRESSED IN HELA, SIGNAL = 0.63; EST_HUMAN HIT: BI224637.1, EVALUE 0.00e+00; NT HIT: U03990.1, EVALUE 1.20e-01
gttattagtaatgttcatcatgtctgctggaacagctatagcatcatatttcattccaagcactgttggtgtggttcttttcatgactggatttggtttcttgctgagtctgaacttaagtgatatgggtcacaaaattggaaccaaatctaaggatttacccagtggtccggaaaaacatttttcatggaaggaatgccttttctacatcattatattagtcttggctcttttagaaactagcttgcttcatcactttgctggcttctcacagatttctaaaagcaattcccaggctattgtgggctatggtttgatgatattacttataatactgtggatacttagagaaattcaaagcgtatatatcattggaattttccgaaatcccttttatccgaaggatgtgcaaactgtgactgtattctttgagaagcaaactaggctcatgaagattggtattgtcagacggattttgctaactttag

SEQ ID NO: 25098 - DNA, 1070 bp, Homo sapiens
  MAP TO AC013691.3; EXPRESSED IN HELA, SIGNAL = 1.1; SWISSPROT HIT: O75325, EVALUE 4.00e-20; EST_HUMAN HIT: AL545235.1, EVALUE 0.00e+00; NT HIT: gi13640329, EVALUE 0.00e+00
tcacaagatggtggggcccctggcagcagaatcccgggtgtctacgcagtgcagggccaccttggggctggagccaggcctccgggggtaggtgccctcccgcaccaggcgccggcaccgcacatcctggcccacgctgacgctctgcagtgccgggaggtggaggagcagcgcctcaggcaggggcaccaggttggtgcccgaaaggtccagctcctgcagggagctcaggcctgaaaacacctcagctcctgcccagttaagcttggggttgcccgacaggtccaggacctgcaggcccggtagctcacggaagccactgggcgccagctcagggagcctctgcaggctggccagagacaggtgtgtaaggcctcccagccccgcgaaggcacccggaccaatgacagctagagggttcccatccaggctcaggtagcgcaggggcaagtctcggaggttgggcacggcatggagccggttccaggccaggttcaggctctgaatggtgggcgcaggcaggccggccctcgtggggtggggcacgaggcggtgaatgaggttgtgggagaggtccacgtgtagtgcccggccctgactgtgcgtcgtgaaggcagacactgagacctcccggagctggttgtggctaaggttcacgtcgctcaggggtgagctggtgaagctctcggctggcagggctgtcaggccattgtggctgaggtcaagcgactccaggtagcgaaggcgggagaaggcagtgggtgagatgctggtgagcaggttgtggctgagatccaggccagccaacgtcgtgtagcccggccccgccaacaccgactcattcaccatctccagccggttggaggacaggtccaagtgggctgtgtccagagggatgggcaccggcatgatgtgggggcccaggccgctacaatccacccgagtcaggctgaagctgtcgaaaaggccgaaggtctccacctcgcattggcacccggggaagcatggccgggttgtctgggccccactcacggccagcagcagcagcaggggccacggcatggtggggg

SEQ ID NO: 25099 - DNA, 2142 bp, Homo sapiens
  MAP TO AL049869.5; EXPRESSED IN HELA, SIGNAL = 1.3; EXPRESSED IN LUNG, SIGNAL =   1; SWISSPROT HIT: P18714, EVALUE 4.00e-27; EST_HUMAN HIT: BG674907.1, EVALUE 0.00e+00; NT HIT: gi13650439, EVALUE 0.00e+00
tcaggttcttttcaaatgcttggcattataatgtgatctcatatctttcctcaaattaaattttgctccacatattccacatgtatacagatgaacatccatgtgctgctccaactgttcattatttgggaatatctgaaagcagacctggcatatagtctcaccagcagataaatgagaaatcatatgccgtacatggtcatgttttctgaagtttccttgatcacaaatggaacagacatacctggccatgcctttgtgcatatcattgtgcagtcgcaactgacgctctcttaaaaactgctttccacatgtttgacaaacaaactgtttttccttagtatgaacagtatagtgttctcttaagtgacaccgctgataaaatccttttccacacagattacaaaaatgctttcgtctgtgatctctttcattttcttccatgatggcactcttaaacatatcttgatctaagcagctagacatatgttcaaccactagattttcagtttcaaaacgctggccacaattaggacatcgaaaagggcaggcagaatgtttaaataactgctttttttggatactgtttatctggtaatgattgtccctaaaatcatccagcatttcaacaaacatatctcttatttcggactgctcatcaggattctcttccaagtccattttctcctcagtatttcctaacccattcatggtcagatcttggggctcgccacatcgttgagcatgttcctgaagctgcctaccctttacaagtatttgtccacatttaccacatgcacagatattttcaatgtgtttggctaagtaatgagatgacaggtcctcctcggttattgtaagtccacacagctcacaagatgcattttcagcatcctcttgtactggactgctgttgttagggggcctcatattctctaaaccacctctttcatcagcacttactgacattcgaggttttagagttttcctaccacttttttttatgctgacatcttcttcaacatagtatctataaaatggctcttcaggttcatcttctaattcatcattgtcagtggattcattacagtctttatcagtaactttaataatgttaaagtctttcagttcatctgtaggaatatcttctggctccatcttaataataatccttttcctctcagcagctctgcttttctcttcgcttgctatttcagactccactgtgctactttttctgcttccagtggttgaagctgaatcatcagcagcctggcttgtgtctcctctgtatttgtccgtctgtgcagaaaatgttttggaagaatctttttcaccaaattcagctttgatgttactgtcttttccatctctaatatctactattctatggtaagatcttgtgttttggtataaatgtctgttagtacaggttagcacatgctcatctaataatttttcacagctaaagccaaatccacagctatcacaggtaaaactccgcccaaagcgtcttgacacacgttcttttggagtagataatttggacacggaactttttttacatacatcaaatagtggctcaggaaaattacctaattgtaaagactcttcatcagcctctctattatgtggtgtatttaccgttgaacttggctctgcacaccacctgttggcttcattgccatttcgagccacagtatcttcatacattcttaccccaaatatcattttgctgttctgtttgctggaagcagaagaggaacattttgaactagaacaatctgcatcctggatgtcttctaaacagtcaggaacattgtatagctgtaggtagttcattgccactttaaactgctcaaaactggagggagctgtcataatttttcctaaatacataaactgcaaaatgagatcaaaacattctgcactaattttcatgttgctgagattcagttgtgcagtactatgctgatggttcatgaaaaacattctaaaataggagctacaggcagctagaactgccttgtgtgcttgaaagtaaatgtcatcaattgcaatacagcagtcacagagaaaaccccattctctttggttgtttagctgctgaaggacatagctgctgtggctgggctttgccat

SEQ ID NO: 25100 - DNA, 3685 bp, Homo sapiens
  MAP TO AL135749.2; EXPRESSED IN HELA, SIGNAL = 0.25; NT HIT: gi14758933, EVALUE 0.00e+00; EST_HUMAN HIT: AL562758.1, EVALUE 0.00e+00; SWISSPROT HIT: Q03468, EVALUE 3.00e-84
tcaattgttattaagttgcttatacaaacttaaagtcaagagcataacttcaggatctgcactttttatgtcaagcgctttaactaagcagtttagggcctcctggatttttccacactcttttagttcttttccacgctttacaagagtctcatagtcatttgtagcctctgccgccttatcctggggagaaccaaccaactgttcaccagacaaaggctcaggggcaccaagagaggtctcttgagctagagcactaggcttagacgtcattaaccagctggacttgttttctgaagacagtgtttctccggaaggatcctcttctgtatacttggaggcttcgccactgctttcctccaccccttcttctggataatcttcaggaccctttgcttcactgctgtcgtcaagtctttcctccatgtcctccacgtggtctaaaaccatattaataagagacctcctagaagccagagatcttctagagttcatagacttatttacactactgggtatttgagatgaaaagaaccttcctggtggactgatgtcatttttgggagttgaagcatcaaattgtttcacagatgagaattgaaagagagatgtgttgaatggatttatgcttgaggtatctttaaaagaatcatcttcatcttcgccatctgaaacaatccttctagctttacttctgatttttgctttaactactacttcttctggttcatcgtctttctcagaaaactcccaactgagacatgttttgctatgcacaaaccctgctctggaattaggtgcagagccacacaagctattttctttctcaacatgctctaaagactgactggaaaaattttgtctgttgtctgctgagtcttccaagaaaagattgaaatcacatgcatactgtggtgaagatgctgaaggttcctcttccaacttggcctcacttgcttgagcatcctgcagtgcactatgggatgctgaaaggtcatcagctatttcaataatggatacatttgattctgcattttgactttcatttgttatggaaataatgggccaaggattgcaatgacgtaaaatctcatcatcctttagttgatctaaatttggcccaatatcagctttggttgatttgctaagtacataattaaaactttccagaggatcctcttgcagtgcctcttgcttaggcccctcttgtaatgtctctttttgtacagcttcatttttagttgcaaagcttttttccattcccaatgaagagttagtacaaagttcttctacacttccaaacccctttggtaaagtagctatagagtcagcactacctgtacctttaccatcttgcaaggtggtaacattcacctttatactggagagatcttgtttctcaccctctttgggcagatcatcaatgactacacttgccattttggaactgatatcttcttcctgagtatgatgagtacttagaagaggtgaaggctgaggctgtggtttattcaatttagggcatttcttctttgttgaagaaggaaatacaggttctcttagccaggccccctcatttctagttctttgttgttccatcaggaactctttattttgagactcgaattcaacgaggaattgagctttctgaaccctttgttgaatatagtgagattcttctaccacatcaagctcttctttaacagacagatcacatgtgtacatcaaatcatggtctgagattccagctatccccaaagactgcaggtaggcaatatgttcatctagttttatatcagatttcctctgagcagcatgcaaagactgaagctgcagctgggttacagagttctgaagatcctcgattgtaaagagctctcttaattcttgtttactaaaatatcggaaagggttctttttttcaccagtagtttgtcttattaatgagtccttgaaaacctgtcttctgtatattttttcctctacagtcccacaagtgattagcctataaaccacaacattctctttttgtccaattcggtaaactctatccacagcttgagcatcagttgcaggattccagctagggtcaaaaatgaccactctagttgctgcagttaatgttaaaccgacaccacctacttgagtggtaagcagaaaaacagagtaatctttattttgctggaataagttaattcttttttctcgttccaaaagatgagtaactgtcccatcgattcgcaatgtcttaaagtgcctattctttaagaggcgttcaatgatgtttagaatttgcctcgattgagaaaacaccagagtttgatgtccctcatctcgcagcctcttaagtaggtccattaggaatatcatttttccagattcttccatcaatgtgtcatcagttacttgatcaatatggtccacatctggggaatcttccccctcatttccatcttgagcagagaatgtcccaagatttagcaaacaacaagcccgtgcagacagcagcctaggatgatcacacagcttctttaagacacctagctcagccaaaggtgagcgcgtctccattagcaactccttgatatgatctaaagacacaaatttcctgtatatttcttcttgtaaaggcacaagtcgtatccaaataattaaatcatttttcctggaaagggaaggcatttcacaaatggcatcaacatctggattcttttcattaagtctggcctctgggttgcttgactttttcttctgtacgtcttctttagtcctcctgagaaaatagggttttatgattgccattaagttttcagatattttaaatcccaaggctttttctcctggggtagcatccttctctcttgctctagtaataggattttcatactccatcttaaaagtttttaatgttcccagcagggacccttgacaagcaaaatcaaatagggaccatagttcttgtaaattattctggattggggttcctgtgaggaggaggcgattacttgcaggaatagcacgagcacatattgctgacttagtagatgaggtttttattttatgtgcttcatcgaggatgacatagtcccacacaaactcttggcccctaaagcttgaaagttgctgccagttattgattaacatttggtatgtagtgataataacaccattcctttgctgaatccgattgaggtttctggtccgttcatccttgctaggaccatgaaaggttttgactctcattcctggagtccacttgatgaattcttttacccatgtgttaataagattggttggcatgatcagcagcacatgattcacaagtgatgcatcaaacataccggaaaggaaagcaatgatttgaacagtcttccctaatcccatatcatcagccaatataccaccttttcttccatccctatacaggctatagaggaaagctatgccttccttctggtgctcaaagagttggttgtgcagttctcgataaagtagcaagccagagttgcacacatctgtaaattcatcatctccctgttctgccaactcctccaaggcttcctgtattttttggattctgctcagcactttttcattgggaaaaatgtcctttgccaaattgaaaagtttaaatgcttcttccaggtctccattcttagttgcttctttggcctctttcacatat

SEQ ID NO: 25101 - DNA, 992 bp, Homo sapiens
  MAP TO AL008635.1; EXPRESSED IN HELA, SIGNAL = 0.67; SWISSPROT HIT: Q9UGU5, EVALUE 1.00e-101; NT HIT: gi14778498, EVALUE 0.00e+00; EST_HUMAN HIT: BF688916.1, EVALUE 0.00e+00
atatttcgtctttggaatcgtcacagaagaaaaagaaaaagtccagcccacagtctactgatacagctatggacctgttgaaagctatcacttccccactggcagcaggctccaagccctccaaaaagactggggagaaatcctctggctcttcaagccattcggagagtaaaaaggagcaccacaggaagaaagtcagtggaagcagtggggaactacccctagaggatggtggctcccacaaatcgaaaaaaatgaaacctctctatgtgaacacagagacactgacccttcgggagcctgatggtttaaaaatgaaacttattctgtcaccaaaggagaagggaagcagctctgttgatgaggagtcttttcaatatccctcccaacaagcgactgtgaaaaaatcctcaaagaaatcagctcgggatgagcagggtgctttactcctaggacatgagttacagagctttctgaaaacagcccggaaaaagcacaagtcatcctcagacgcacattcatctcctggccctgaaggctgtgggtctgacgcctcccagttcgcagagtcccacagtgctaaccttgatctttcagggcttgaacctattctggtagaatcagactcatcctctggtggggaactagaggctggggagttagtgatagatgattcttaccgagaaatcaagaagaaaaagaagtcaaagaagagcaaaaagaagaaagacaaggagaagcataaagagaagcgacactccaagtccaagagaagtttaggactttctgccgtgccagtgggagaggtcacagtgacatctggccctcctcccagcatcccatacgctggagcagcagcacctcccctgccacttcctggcctccacacagatgggcatagtgaaaaaaaaaagaaaaaagaagagaaggacaaagagagagagagaggagaaaaggtaaagcatcttttaagtgtggtgggggtaagagat

SEQ ID NO: 25102 - DNA, 581 bp, Homo sapiens
  MAP TO AC002059.3; EXPRESSED IN HELA, SIGNAL = 0.59; NT HIT: gi16167919, EVALUE 0.00e+00; EST_HUMAN HIT: BF347039.1, EVALUE 0.00e+00; SWISSPROT HIT: O15553, EVALUE 3.00e-36
tggatatgaccttggatgccgacacagccaacaacttcctcctcatttctgacgacctcaggagcgtccgaagtgggtgcatcacacagaatcggcaagaccttgccgagagatttgacgtgtccatttgcatcctgggctcccctcgctttacctgtggccgccactactgggaggtggacgtgggaacaagcacagaatgggacctgggagtctgcagagaatctgttcaccgcaaagggaggatccatctgaccacagagcgtggattctggactgtgagtttgagggatggaagccgcctctctgccagcacggtgccgctgactttcctcttcgtagaccgcaagttacagcgagtggggatttttctggatatgggcatgcagaacgtttccttttttgatgctgaaggtggttcccatgtctatacattcaggagtgtctctgctgaggagccactgcacttgttttttgctcctccaagtccacctaatggtgataagagtgtcttgagtatctgtcctgtgataaacccgggcactactgatgctccagtccatcctggggaggccaaataa

SEQ ID NO: 25103 - DNA, 1056 bp, Homo sapiens
  MAP TO AL021393.1; EXPRESSED IN HELA, SIGNAL = 0.9; SWISSPROT HIT: O43248, EVALUE 7.10e-02; NT HIT: gi14778044, EVALUE 0.00e+00; EST_HUMAN HIT: BG826524.1, EVALUE 8.00e-95
agtggccgcagcttctccaaggcagcttgcttctcccagtatgagaccatgtaccagcactactacttccagggcctcagctacccggagcaggaggggcagtccccacctagcctcgcaccccggggcccggcccgtgcctttcctccgagcggcagtggcagcctgctcttccccaccgtggtgcacgtggccccgccctcccacctggagagcggcagcacgtccagcttcagctgctatcacggccaccgctcggtgtgcagtggctacctggccgactgcccaggcagcgacagcagcagcagcagcagctccggccagtgccactgttcctccagtgactctgtggtagactgcactgaggtcagcaaccagggcgtgtacgggagctgctccaccttccgcagctccctcagcagcgactatgaccccttcatctaccgcagccggagcccctgtcgtgccagtgaggcggggggctcgggcagctcgggccggggacctgccctgtgcttcgagggctccccgcctcccgaggagctcccggcggtgcacagtcatggtgctgggcggggcgagccttggccgggccctgcctctccctcgggggatcaggtgtccacctgcagcctggagatgaactacagcagcaactcctccctggagcacagggggcccaatagctctacctcagaagtggggctcgaggcttctcctggggccgcccctgacctcaggaggacctggaaggggggccacgagttgccgtcgtgtgcctgctgctgcgagccccagccctccccagccgggcctagcgccggagcagctggcagcagcaccttgttcctggggccccacctctacgagggctctggcccggcgggtggggagccccagtcaggaagctcccagggcttgtacggccttcaccccgaccatttgcccaggacagatggggtgaaatacgagggtctgccctgctgcttctatgaagagaagcaggtggcccgcgggggcggagggggcagcggctgctacactgaggactactcg

SEQ ID NO: 25104 - DNA, 527 bp, Homo sapiens
  MAP TO AC005663.1; EXPRESSED IN HELA, SIGNAL = 0.92; SWISSPROT HIT: O00192, EVALUE 6.00e-49; NT HIT: gi4502246, EVALUE 0.00e+00; EST_HUMAN HIT: BG820536.1, EVALUE 0.00e+00
gtcaccaagactgtcaagacggtgaccactcggacagtacgccaggtgcccgtgggcccagatggactccccctgctggatggcggccccccactaggcccttttgcagatggtgccctggaccggcatttcctgctgcgtggtggtggcccagtggccacactctctcgagcctacctcagcagtgggggtggctttcccgaaggccccgagccccgggacagccccagctatggcagcctgtcccgagggctgggcatgcggcccccacgtgctggcccccttggcccaggccctggtgatggctgcttcacactgcctggccaccgggaagccttcccggtgggtcctgagcctgggccaccaggtggccgctccctgcccgagcgcttccaggcagagccgtatggcttggaggatgacacgcgcagcctggccgctgatgacgagggtggccctgagctggagcctgactatggcacggccacaaggaggaggcctgagtgtgggcggggccttcataccag

SEQ ID NO: 25105 - DNA, 539 bp, Homo sapiens
  MAP TO AL031133.1; EXPRESSED IN HELA, SIGNAL = 0.48; SWISSPROT HIT: P89876, EVALUE 3.00e+00; NT HIT: gi14732825, EVALUE 6.00e-07; EST_HUMAN HIT: BG773596.1, EVALUE 8.00e-07
atggcggcaaaaactggtgttttttccccgctcccctcaaaacctcatctgaccggcccgggaagcgggtggcctcgcgttgggggtggttctcaggggcggtgcccttgggccctcacccgcgtctccgtcgccccgccctcagagcagcacgtgctggcggagctggagcggcaggcggtgctggtgtacacgccgtcccgcaaggtgcacggcaagcgcctggtctgctacgacgaccgctacatcgtgaaggtggcctacgagcaggacggcgtcatcgtctccaacgacaactaccgggacctgcagagcgagaaccccgagtggaagtggttcatcgagcagaggctgctcatgttctccttcgtcaacgaccggtaggtccggctggggtcctgacaccctggggggcggcggggcggggggccggggtcgaggcagtggccacgcctgctaccaggtggaggagcttggggtcacccggtcacccagcccctcagacagagctcccccaggtccgcattctcggcgggcac

SEQ ID NO: 25106 - DNA, 515 bp, Homo sapiens
  MAP TO Z95114.19; EXPRESSED IN HELA, SIGNAL = 0.6; EST_HUMAN HIT: BG739857.1, EVALUE 0.00e+00; SWISSPROT HIT: O95236, EVALUE 4.00e-75; NT HIT: AF324238.1, EVALUE 0.00e+00
ataattattaagaagggaaagtaagttgggtgtgatgtcacgcataacttccttaaataccttcaatcggtcaatgctggttgcagtcagcctgctggcttcagcttctgctgatgatgtgtatgagtgctccacgatgctggtggtgatcccagtcacagcagacgctgctcccagccctaccccagctgcagtaagggccagactcgtccctgctgtaaatggtgccaaaacaagaccagcaagggacatgatgccagaggcagcgccagtggagctggacaccacattggagatggtgcagcctctgtggacctcttcaataccatttgcaagggcacgaagcttttctatggactcctggatcttcctcttgacttggggaaactctttcaaaaaccattccctaaactgctcatctttctgctgcacatattcgtcctcaatagctgcatatgttctaagcttcttcagagcttcgtagagagcatctgcctcatccctgtaccaataaa

SEQ ID NO: 25107 - DNA, 972 bp, Homo sapiens
  MAP TO AL138970.2; EXPRESSED IN HELA, SIGNAL = 0.3; NT HIT: AF418272.1, EVALUE 0.00e+00; EST_HUMAN HIT: AW562328.1, EVALUE 0.00e+00; SWISSPROT HIT: P08547, EVALUE 1.00e-115
ctagttcatgaggtatgaccttagaatgtcagtttgtgctctttcagtctttttgatgtaggcatttagggctatgaactttcctcttagcactgtctttgctgtaatccagaggtttgggtagtttgtgtcattattgtcattcagttcaaagaactttttaatttccatcttgattttatttttaacccaatgctcattcaggagcaggttatttaatttccatgtatttgcatggttttgaaggttccttttggtgttgatttccagtttcattccactgtggtctgagagagtgcttgatgtaatttcaattttcttagatgtattgaggctctttttatggcctatcatatggtctatcttggagaaagttccatgcactgttgaatagaatgtgtattctgtggttgttgggtgaaatgctctgtatatatctgttaagtccatttgttccaaggtatagtttaaatccattgtttctttgttgactttctctcttgatgacctgtctagtactgtcagtggagtattgaagtcccccactattattgtgttgctgtctatctcatttcttaagtctattagtaattgtttcataaatttggaagctccagtgttaggtgcatttttttttaggattgtgatattttcctgttggacaaggccttttaccattacataatgtctctctttgtctcttttaactgctgttgctttaaagtttgttttgtctgatataagaatagctacccctgctctcttttggcctccatttgcatgaaatgcctttttccacccatttactataagtttatgtgagtccttatgtgttaggtgagtctcctgaaggcagcaggtagttggctggtgagttcttatccattctgaggttctgtatcttttaagtggagcatttaggccatttacattcaatgttagtgttgaaatgttagatacggttgtattcat

SEQ ID NO: 25108 - DNA, 570 bp, Homo sapiens
  MAP TO AC005901.1; EXPRESSED IN HELA, SIGNAL = 0.32; SWISSPROT HIT: Q09503, EVALUE 3.20e+00; NT HIT: AF074706.1, EVALUE 1.40e-01; EST_HUMAN HIT: AL563666.1, EVALUE 3.20e+00
aggcaagtcctcaggcaagacacacacactccctgggcctcagttccccaggagacagaggaggcctggatggggagaccggaagccctctggagctctccacagggtactcaagtgtacttggaggaggggcctctggcccaggacctgggggtgggggggctatcctggagggaccaggtgcacttcattcactcatccagcaagggctttcggcactcctgccatgtgttatgcacatacacatgcacctaccacacacagacacacacgaacacacaaagacatgcccatatgaagatgcttggtggggtagtttccttgggaaaccaggccagttgccagctccccagcctctctgaggctctgcggctcctctctgcccccagtttgctggggctaagccttttcgcaccccaccccatgcactgccgtgtcttctcttgggaagggatatattccttgaatgtctctatcttctaccagatcattggctccctcaatgggggtgctggtgtctgtttcactcattgctgggtctcctggcccagtgtaggggtatgtgtgtgg

SEQ ID NO: 25109 - DNA, 600 bp, Homo sapiens
  MAP TO AC019278.3; EXPRESSED IN HELA, SIGNAL = 0.35; SWISSPROT HIT: Q05859, EVALUE 1.00e-40; NT HIT: X62379.1, EVALUE 2.00e-16; EST_HUMAN HIT: BE089593.1, EVALUE 1.00e-116
ctggtcctggctggggcgacgctctgtctgaagaccaccgttgccagcttccagtttgctgctcatctcaggtggaatcctttgaggatcttctgcacagagctctgcaccattcatttccccagtgacagtattttccctgaaacctcctgggttttctttggactcctgagatggctcagataaaacaccactaggggactttgggccattggtgctgcttccctcctctggctcctggccaccatcatcagagtcagaatcactggtggtgtgcaccagggtcccacgaacacaaatgacatcgtcttttgtccctttcaaagtagacagtggaagcagctcttgagcaaggagagatgtccctgcttcttttctctgacttccctctgattctgtctccacgcttgcaattttctcatcatttccgaggtcaggtgaaacccgagaccctgcttcctgtggatccaagccattgctggaatcatcctgctgagatgtgggattcacgtctaaactatggaatgctttcagcacagcatcttcctcttctggattcacagattctaatttactcgtaaacccaaatagggatttcat

SEQ ID NO: 25110 - DNA, 688 bp, Homo sapiens
  MAP TO Z84465.5; EXPRESSED IN HELA, SIGNAL = 0.97; NT HIT: gi14744069, EVALUE 0.00e+00; EST_HUMAN HIT: AW938874.1, EVALUE 0.00e+00; SWISSPROT HIT: Q15942, EVALUE 2.00e-49
tcagcagcacccagcagcactctgcttcacgtggcactgcttgcagaagagatggttgtccagggggtagcagccttggttcctgggctccacagacaggaggatcctgcagtcctcacacctgtagcaatttacatggaagtttcttcccatgcacttgattttgaaggcatctttcccatcccgaggaataatgggattctcacagatgctgcatacgggagcgaatttcttgtagaattcgtctaggcagtacatctcgttttggctgcccagggcagagctctcatcctggatgcaccgggcacaggtcacacacatgaagcaggaggggtggaaggcctggcccagggccctgatgatgtgctcccggaccacctggccacacttgccgcacttctccagcgtgtcctggtagcagggttcgcagaggggtcgcccatcctggtagaagctctgcccagctagctggcggtggcaggtgtgccacgtgaagcactgggcatggtactgcctctttatggcctccacagccagctcttgcgggggacacggttttgtggcagaaggcacagatgtctgtggacgactctctctcaacaggctctgctggggaaggcggaagctcttcctccccaggcccgaggggactgggcccaggctggactgaaggtccctccactggggc

SEQ ID NO: 25111 - DNA, 825 bp, Homo sapiens
  MAP TO AL121895.18; EXPRESSED IN HELA, SIGNAL = 0.38; NT HIT: gi14773020, EVALUE 0.00e+00; EST_HUMAN HIT: BI828623.1, EVALUE 0.00e+00; SWISSPROT HIT: Q09305, EVALUE 2.00e-29
ctattccaaaacacctctgctaatatcctccccttggcccactcccaaagagccttgttccttctcaccaagcacatcctgggggctgctggggaactgcttgttgagcacagtctccagggcatagctcaggtccatgctgtgcttggttatctcagctggcgtggcaccctctgggaacatctgcgtgggcagctctgagaagcggatctctgtcccggctctgggcttcatctctggtagccgggccaggccctcttggtagcttttgcactcaatgccacagcggggtagattctgccccacgcggtccttggtgtgcttcatggagagcacaggtagcacatcggaaaaggcacagatctgtcgattctcgggctgtagcttctccactgtggcttcgctgatgaagttggtgagtgagatccacttcttcagggtggcatatgggtaaggccccaggaactggtccagctcctggaggttggccctcatggcctccacctcagactctggggctggggacaggtctacctcttccctgagtgtgctccagcgcagcactgtcagcccccgctggtgcaggctaaggaagaaacccatacgagggcctacttccttcggattagccttgtccacagagctgtagtggaggaagtggatgcctggagggatcatcttcacgccccggaacttgggcccgacctcccaggagttatagtcaatcccaaactctgttcccttgggcatgttcaggatgaccacagtggccccttcaaagaagaggcgcttggctagctcaggatccatctgcacggcagccat

SEQ ID NO: 25112 - DNA, 599 bp, Homo sapiens
  MAP TO AC005225.2; EXPRESSED IN HELA, SIGNAL = 0.27; NT HIT: gi14749321, EVALUE 2.00e-04; EST_HUMAN HIT: BG188110.1, EVALUE 0.00e+00; SWISSPROT HIT: P49753, EVALUE 2.00e-66
ttatattttgctgtgcttgacagattttttaccattgagatgtttatggaagaaagtttgaatttgctgccaggcatctacctgtgcctttgagtgagcctttggctcacctccatagaatattgcctcacccaaaacagcgtgcacagaagctctagaaggaggaaaataaggtgggtcaatacagtgaccagtttctgggtaacagattatctggggtctttctttcccatgagcttgtagcctttcagaggctatctgagcatagaattcactcttccagctttgatcatccatgccaacaataaacaagaagggcacctgcgccttttccaatggaacaagactttggtgattgtgttcctccagtggattgctccaagtgtccataaaagtgagaaatcctgacttagtgatttttacttttcctagatcatcgacaagtttaggaataatcatatccttgtaatgtagaggagctactgtgttggctacacaggcattgataagtacagtggctgtgatgcccttcaagaaagaagccattgagagacacaggtcacctcctttggaaaatccaagaagcgcaatactaggac

SEQ ID NO: 25113 - DNA, 513 bp, Homo sapiens
  MAP TO AC005618.1; EXPRESSED IN HELA, SIGNAL = 0.8; SWISSPROT HIT: Q9UN66, EVALUE 2.00e-45; EST_HUMAN HIT: BI087139.1, EVALUE 0.00e+00; NT HIT: gi14724411, EVALUE 0.00e+00
actacgagcagctgcgcaccttcgaactcacactacaggcccgcgaccagggctcgcctgcgctcagcgcaaacgtgagcctgcgcgtgttggtgggcgaccgaaacgacaacgcaccgcgggtgctgtaccccgcgctgggtcccgacggctctgcgctcttcgatatggtgccgcgcgctgcagagcccggctacctggtgaccaaggtagtggccgtggacgcagactcaggacacaacgcctggctgtcctaccacgtgctgcaggctagcgagcccgggctcttcagcctggggctgcgcacaggagaggtgcgcacagcgcgtgccttgggcgacagggacgcggcccgccagcgcctgctggttgctgtgcgtgatggtggacagccgccactctccgccaccgccacgctgcacttggtctttgctgacagcttgcaggaggtgctgccggatatcactgaccgccctgtaccctctgacccccaggctgagctgcagttttacc

SEQ ID NO: 25114 - DNA, 1294 bp, Homo sapiens
  MAP TO AL109910.27; EXPRESSED IN HELA, SIGNAL = 0.61; SWISSPROT HIT: Q02817, EVALUE 2.00e-15; NT HIT: gi16177572, EVALUE 5.00e+00; EST_HUMAN HIT: BG222551.1, EVALUE 1.80e+00
ccaagggagcaggtgacgtgtcattagccggagtcgacggaaagaaaacccttcagttcctttttacttcacccaaaaatcaaccaagacagaagaggttggagcagccgcccagggcgcccagcataagcactggccaccaggacagctggggagacacaggcaggcccagcacggtgtcgagaagctccatcgctcaaataccacatcccccaaagaccccggcgtcccaaagattctcgaggccacaggaaagcctgcaccccacactcttcctgggtgcagagctgctgatccaaatatgtgcacacactcctttcccatctactcaacacggtacatggaaaacacacaacaaatccaagagtaagaggaacgaagatttggaaagtggctttcagatatcaactgagcaggaacagcagagctggccagcatctgaaactagcttgtatgccttagaaattcacccctccctgcagagtaaacactgtctcaacacagaacctgtgctttggaagcaagatgtggtgaacatgggggagtttccgtttaaacgactgagtctccctcactgcaaaggacaatgtcgctggatcccacgtgttaaacgactgcgtctccctcactgcaaaggacaatgtcgctggatcccacgtgttaaacgactgcgtctccctcactgcaaaggacagtgtcgcttgatcccacgtgttaaacgactgcgtctccctcactgcaaaggacagtgtcgccagatcccacgtgttaaacgactgcgtctccctcactgcaaaggacagtgtcgctggatcccacgtgttaaacgactgcgtctccctcactgcaaaggacagtgtcgcttgatcccacgtgttaaacgactgcgtctccctcactgcaaaggacagtgtcgcttgatcccacgtgttaaacgactgcgtctccctcactgcaaaggacagtgtcgccagatcccacgtgttaaacgactgcgtctccctcactgcaaaggacagtgtcgctggatcccacgtgttaaacgactgcgtctccctcactgcaaaggacagtgtcgcttgatcccacgtgttaaacgactgcgtctccctcactgcaaaggacagtgtcgcttgatcccacgtgttaaacgactgcgtctccctcactgcaaaggacagtgtcgctggatcccacctgtgctcttaaacgactgcatctccctcactgcgaaggacggtgtcactggatcccacatgtgctctgtgcctctcactggatcccacatgtgctc

SEQ ID NO: 25115 - DNA, 528 bp, Homo sapiens
  MAP TO AC003991.1; EXPRESSED IN HELA, SIGNAL = 1.2; SWISSPROT HIT: Q9UHE8, EVALUE 1.00e-32; NT HIT: gi14739825, EVALUE 0.00e+00; EST_HUMAN HIT: BF987948.1, EVALUE 6.00e-57
cggttaagtttcccaatctccatcgtacataatatcgaataggaatcacaagtgtgtagaggacatgaaggaaggcaaatcccagagctaccaagccaagctgctttcggcaaagcatccagtggtcaagccagtctgggaatcgacggtattttgtgcctcggtacagttgtagaatggcagcaataacaccagggaggtaaaccaaagcaagcagtgtaagtgctgttattggaaagatacgatttggaatggaaatagccatacgaaatgtattatctttcttttcataaacataagggtagattacgtctcttataacacaatagaaaaacaagaagacacacagcacagcagacaaatagaaggggaacctccacattggaaatagctgcagggggtacttttcaatttctttggctgccatgagtgatccttgatccattggagtaagtccaagattacgaacaatatccatcactctttgcttggctttgctgtcatttccacacacaaacacctagttta

SEQ ID NO: 25116 - DNA, 1260 bp, Homo sapiens
  MAP TO AL359402.1; EXPRESSED IN HELA, SIGNAL = 0.61; SWISSPROT HIT: Q08274, EVALUE 0.00e+00; NT HIT: gi14754210, EVALUE 0.00e+00; EST_HUMAN HIT: BI918099.1, EVALUE 0.00e+00
agactaatagacaagtcacgagttacctgtgtcaaatgggttcccggttcggaaagccttttcctagtagcccactcgagtgggaacatgtacttatataatgtggagcacacttgtggcaccacagccccccactaccagcttctgaagcagggagagagctttgccgtgcacacttgcaagagcaaatccacgaggaaccctctccttaagtggacggtgggcgagggggccctcaacgagtttgctttctccccagatggcaagttcttagcgtgcgtgagccaggacgggtttctgcgggtgttcaactttgactcagtggagctgcacggtacgatgaaaagctactttgggggcttgctgtgtgtgtgctggagcccggatggcaagtacatcgtgacaggtggggaggacgacttggtgacagtctggtcctttgtagactgccgagtaatagccagaggccacgggcacaagtcctgggtcagtgttgtagcgtttgacccttataccactagtgtagaagaaggtgaccctatggagtttagtggcagcgatgaggacttccaagaccttcttcattttggcagagatcgagcaaatagtacacagtccaggctctccaaacggaactctacagacagccgccccgtaagtgtcacgtatcggtttggttccgtgggccaggacacacagctctgtttatgggaccttacagaagatatccttttccctcaccaacccctctcaagagcaaggacacacacaaatgtcatgaatgccacgagtcctcctgctggaagcaatgggaacagtgttacaacacccgggaactctgtgccgcctcctctgccacggtccaacagccttccacattcagcagtctcaaatgctggcagcaaaagcagtgtcatggacggggccattgcttctggggtcagcaaatttgcaacactttcactacatgaccggaaggagaggcaccacgagaaagatcacaagcgaaatcatagcatgggacacatttctagcaagagcagtgacaaactgaatctagttaccaaaaccaaaacggaccctgctaaaactctgggaacgcccctgtgtcctcgaatggaagatgttcccttgttagagccgctgatatgtaaaaagatagcacatgagagactgactgtactaatatttcttgaagactgtatagtcactgcttgtcaggagggatttatttgcacatggggaaggcctggtaaagtg

SEQ ID NO: 25117 - DNA, 514 bp, Homo sapiens
  MAP TO AC002432.1; EXPRESSED IN HELA, SIGNAL = 6.7; EXPRESSED IN PLACENTA, SIGNAL =  33; SWISSPROT HIT: P30605, EVALUE 3.60e+00; EST_HUMAN HIT: BF348235.1, EVALUE 0.00e+00; NT HIT: AY052063.1, EVALUE 5.00e-07
atgctcccggctcaggaggctgccaagctgtaccacaccaactatgtgcggaactcgcgggccatcggcgtgctgtgggccatcttcaccatctgctttgccatcgtcaacgtggtgtgcttcatccagccctactggataggcgacggcgtggacaccccgcaagccggctatttcgggctcttccactactgcatcggcaacggcttctcccgggagctgacctgcaggggcagcttcacggacttctccacgctgccctcgggcgccttcaaagccgcctccttctttatcggcctctccatgatgctcatcattgcctgcatcatttgctttaccctcttcttcttctgcaacacggccactgtgtacaagatatgtgcctggatgcagctcacctccggtgagtgcgcgctcacctccgcggaggcggaggaccccggggcgcccgagccggggaggggccagagtgggagggacgggggctgtgcgcgccgctgcgagccaagccgcc

SEQ ID NO: 25118 - DNA, 1975 bp, Homo sapiens
  MAP TO AC007059.1; EXPRESSED IN HELA, SIGNAL = 0.44; NT HIT: AB012265.1, EVALUE 1.00e-102; SWISSPROT HIT: P52742, EVALUE 1.00e-07
aagctgccctaccttttttcttcttcttctggaaggagaacctgcgctcaatggccttcacctcctcagcggagatgaaatggcgcacattgtagctgacgcccacgcggttcaggtggccccggacgtggttggccaagccgatgccgttgtggaagcgatcggggcagtaggggcatttccgctcctcgtgcttcagtgccatggccggatccccatccaggagtgtgtccagccccagcgggccgcccagcggcgcgtccaggagcaggaagtccagggggtgggcgcctgccagccccagctcctcgggctgcaaccttgggggcaccctggctgccgccatgacctgcggccccagcttcgccacgagcacaatgggtaccatccctcggagctgctgctgctgcccctgggtggcctctactgcctgcagggcctctcggaatgcctgcttcagctccagggccgcctgcgggatgaggctgggggtggctaggggtgaaaagaccccattttcaggggaaaaatccatctcggaggtcagcactacatcctcctcctcctcctcctcctcctcctcttcgctccaagggcgcctccgttcccccagcccttgtgggtggacggtgcttttgtttctcccgagctgtaaggagtagggggtggatgctagtgtggagggaaaggccagccttccgagaggcctctggcccgtgccatgcaggagtggctttgacagcgggaaatctctgatgctcagctgctggcatcctgggccaaaggccaggctggggtcgtatccagcagggttctcccgccacatgggggccaaggacggctcagctttgccaaagtagtccacagcagtgtcagggaagcaggcgtgagcatcctggctagtgcctggctggctggcagggtcttcctcataagcctcgccatcctcctcccagtggggatgggcatgcaccagcctcacgtgctccctgagcaggctctcgctgggcgcggggaaaccacagaagacacaggcgctgaggccaacggcagctccgtagggctgatagaggagggcgctggcctcagggctggggctgccagccccgctgctgcctccaaaaggctctttggtggtctggcctgggggctcacgcatgtgcagcttggcatgctgcacataggccctggatgaattggtgccaaagacacacttagggcactgcagccgtgcctcccggccctcgtctcctggaacttgcttcagcttttggatctcctcaatgatcttctcccgggaggcctgatgcagctgccggtgctgctccagggcagtggggtcagcaaaggcccagccacactccccgcaggccagcggggccaggtccgcagggggctcctggcccggggctcggcggtgctggctcatgtgctccaggaggtgctccttctgcttgaagtagatgctgcactcgatgcatgggaacacggccggctcctcgtcctcgtcctcatctgggctggccaccccttcggccacctcctccagcagctcacacaggtagggcccggtccggatcgggggcagtagcggctgcagccgctccacagaagcctccgagttcactgtccaggtctgtgtggctacctccgaggctgacgtgggtaggccccactcggacggctgggccagcccctccaggtcctccagatcttctctgccacccaccaccgccatgtccagcgtcttcggggtgtcttccactggcacaaacaccctcctgaagggggcgaggggtggcggctgggcaggcaggtccaagtgcagccctgcgtcctggggggatccctgctcgtcctcatcttggagccagtcgaacctggggcggccctgggcatgtttctccaaaagccttggttccccccggtggtgtaagaaccttctagagccctctagctcagcgtggggtttcat

SEQ ID NO: 25119 - DNA, 588 bp, Homo sapiens
  MAP TO AC007106.6; EXPRESSED IN HELA, SIGNAL = 0.53; EST_HUMAN HIT: BG192739.1, EVALUE 3.30e+00; NT HIT: gi15791399, EVALUE 2.20e+00; SWISSPROT HIT: P10479, EVALUE 9.80e+00
cctgatgtctccaaaactctctgaatcattgtcaaacagttatgcaatttcatgcctatatcaggtagaacagatgtggaagtgcttcaggtttgaaaataaagcaagaacgttgagttggcttgcttgaaagttgttttactttgtgcaaagaagcagtgtacagactctaaaagaagataataatcattgtcaggaaatgtgtctccagactttaggcttgcatgtatcagaagcaatcctgatgttgagaaatttggggcatttagttaattgctgaccatatttgcagagatctgatttcgggacatcttgttttttgcattaatggtcaagttatagctaaaaacaaaacaaaagtaaattaagctaaataaggttaacactagcttaaaagttaatcattataaggtaataattatgtcatgtttctaagttttgaaagttttgctttgctagaactaaaatctcagctacaatcaaatccctagaaactttgctattaaaatcaatttaacatcttgccaattaatgtgtttgaatacatgcatttttctgaagagagaattttaagggaatttatggtca

SEQ ID NO: 25120 - DNA, 559 bp, Homo sapiens
  MAP TO AL133243.1; EXPRESSED IN HELA, SIGNAL = 0.74; EST_HUMAN HIT: BG002448.1, EVALUE 5.00e-39; NT HIT: gi14730293, EVALUE 0.00e+00; SWISSPROT HIT: Q9NR09, EVALUE 2.00e-86
atgatggttttactgttccacagattattgaaatggagctggatagtcaggagcagttgttattgcaggatcctcctgtgacttacattcagcaatttgcagatgcagcagccaaccttacctctccggattctgagaagtggaactctgtgtttcccaagcctgggactttggttcagtgcttgaggctgccaaagtttgcagaggaggagaatctttgtatagactcaataactccttgtgctgacggaattcatttgttggtaggactgcggacatgccctgttgaatccttgagtgcaataaatcaagtagaggccttgaataatttaaataaattaaactctgcactatgtaatagacggaaaggtgagctggaatcaaatcttgctgtagtgaatggtgcaaatattagtgtaatccaacatgaatcaccagcagatgtacagactcctttaataattcagcctgagcagaggaatgttagtggtggatatttagtgctttataaaatgaattatgccactcggatagtgactttagaagaggagccaataaa

SEQ ID NO: 25121 - DNA, 746 bp, Homo sapiens
  MAP TO Z98745.1; EXPRESSED IN HELA, SIGNAL = 1.2; SWISSPROT HIT: O43309, EVALUE 0.00e+00; EST_HUMAN HIT: BG619358.1, EVALUE 2.00e-08; NT HIT: gi12732534, EVALUE 0.00e+00
agttataaacaaaggcttttccacactcgttgcactcatacggcttggcgccggtatgaactccttgatgctgagtaagtatggaacgccgactaaaacttttattacactgagtgcactgataaggtttgtctcttgtgtggatcttgatatggtgaaagaggcctgctttctgactaaaggctttgccacagtcattacagtgatagtgtttttctcctgtgtgaagtctctgatgttggttaagagctgaccaccggccaaaggctttgccacattcattacacttatacggtttctctccagtgtgtattattttgtgtcgaataagcacagttctcccacggaaagcttttccacattcttcgcatttgtagggtctatctccagtatggatcctctgatgttctatgaggtgtgagtgctgactaaaagcttttccacagtcatcacatccgtaagattcttctcctggacagattctctgatgttcagtatggtcagagttctcagtcaggcttactccattttcatcacaggtaggttgtttatcttctctggagcaagcagagggctcttctgttatttcttcaggttcacgagtttctccacacctagcagacttggacatatcattttcaaatttactggatgtcttcccatgtggttccatttcttcagaaacttcttgctttaaattcccatactcatttccagtctcaacatctaaaactaagaagggatca

SEQ ID NO: 25122 - DNA, 1089 bp, Homo sapiens
  MAP TO AL160414.4; EXPRESSED IN HELA, SIGNAL = 0.3; SWISSPROT HIT: Q09349, EVALUE 2.00e-06; EST_HUMAN HIT: BE296416.1, EVALUE 0.00e+00; NT HIT: gi15305357, EVALUE 0.00e+00
tcaccaacagaggagcgaaacacgcagactgaagcctcggaacagatgagaatagacgagaacacatggaacccctccaaggctccaggttgtccctggtctgaagacaaagctgaggggccccaggatgggaaacgggaaggaggcagcacaggcacagcctcgggaatgtaagctggccaagcacaaagcaaagggcagcagagctgagagctcctgggaaggagatggatgagcctggctgcggacacaggatgctgaattacctgtcgagcagtccatatgtgtcaggctgggctcattggtggctttcattttcttagcagtgtgctctgaggtagtgggtaagaccaaagggcttgtggcagaaaaacaggaagcatttacaccaaagttactgtctgggacatgttcagcctgctctatcttccttttctgagagggcagaacaatggaagaagggatcactgccaatgccgtctgtgctctcccaagcaggtggcagccagggatggagtgctggagcaggaaatggtcaatccgggccttgagggaggggtgaggcaggggctgagagtgcggagtaaaagctacccccgtgaaagggtcactgggcactcggccccatgtggcttcactgcggttacacttctccagtgtgctctggtcgatgaccttgcctgagggcagcagcatgggacaaggcatgatctccagggtgatgggatccaggaactcctcaggcacatcctgaatgatctcggccagcttctgcaggctggagggagcctgctggctctcaggctggtccccagggtcacagtcactttccatgggcaaggctggagcctgcagagccacatcctgaggcaggttctctgaggtgaccagcaggatgctgtctatcacttcctgggagcaggtcttggccggctgaccccacacttccaaccgcttgatacaagggataccgccgcctgtcacatgggtgatacagatccttaagtgggccacgtggctaagggaaagagcccctttattccagagctcctgggccacaacagcaggggaggggagtgtggcttccat

SEQ ID NO: 25123 - DNA, 934 bp, Homo sapiens
  MAP TO AL022329.9; EXPRESSED IN HELA, SIGNAL = 0.29; EXPRESSED IN LUNG, SIGNAL = 2.4; SWISSPROT HIT: P16884, EVALUE 2.00e-06; NT HIT: gi16167728, EVALUE 0.00e+00
atcccagaaatttccatcagccaacccaacagcaagtccagcagtggcaccagatctggaagccagcagatctctcaggacgaccagtcaagctctcctgggagctcagacattctgggcaaggagagcgaggggtcccgcagccccgaccctgagcagatgacaagcatcaatggtgagaaggcccaggagctgggctccagtgcgacaccaaccaaaaagactgtccccttcaagaggggcgtgaggaggggtgatgtgttgttgatggtggccaagctggacccggactcagccaagccagagaagactcatccccatgacgcccccccttgcaagacctctccccccgccacagatactggaaaggaaaagaaaggggagacctctaggactccttgtggctcccaggccagcaccgagatcttggccccgaaagctgagaagacccggactgggggtcttggggacccaggccaaggaactgtggcactgaaaaaaggcgaggagggtcaaagcatagtggggaaggggcttgggacccccaagaccacagagctgaaagaggctgagccccagggcaaagacaggcaggggaccaggccccaagcccaagggcccggcgagggggtgcgaccagggaaagcagagaaggagggagcagagcccacaaacacggtggaaaaggggaatgtctctaaggacgtagggagtgaagggaagcacgtaaggccccaaatccctgggagaaagtggggaggtttcctgggaagaaggagtaagtgggacggtccccagaataagaaggacaaagaaggggtgctcttaagtaaggcagagaagacaggtgagcctcagacccagatggagaagacaagccaagtgcagggcgagttgggggacgatctgagaatgggggagaaagcaggtgagc

SEQ ID NO: 25124 - DNA, 580 bp, Homo sapiens
  MAP TO AL132671.19; EXPRESSED IN HELA, SIGNAL = 0.39; NT HIT: gi14756936, EVALUE 0.00e+00; SWISSPROT HIT: P08922, EVALUE 1.00e-93; EST_HUMAN HIT: BF847156.1, EVALUE 8.20e-01
gtatgtcttttacctcctgagagatggcatttatagagcagaccttcctgtaccatctggccggtgtgcagaagctgtgcgtattgtggagagttgcacgttaaaggactttgcaatcaagccacaagccaagcgaatcatttacttcaatgacactgcccaagtcttcatgtcaacatttctggatggctctgcttcccatctcatcctacctcgcatcccctttgctgatgtgaaaagttttgcttgtgaaaacaatgactttcttgtcacagatggcaaggtcattttccaacaggatgctttgtcttttaatgaattcatcgtgggatgtgacctgagtcacatagaagaatttgggtttggtaacttggtcatctttggctcatcctcccagctgcaccctctgccaggccgcccgcaggagctttcggtgctgtttggctctcaccaggctcttgttcaatggaagcctcctgcccttgccataggagccagtgagtgctctgtccccagtgtggttactggccttgctggaataagaggaaggtttgaactgcttggcgttgtgattcaattt

SEQ ID NO: 25125 - DNA, 1187 bp, Homo sapiens
  MAP TO Z73429.1; EXPRESSED IN HELA, SIGNAL = 0.25; EST_HUMAN HIT: BF057493.1, EVALUE 2.00e-34; NT HIT: gi14778494, EVALUE 2.00e-33; SWISSPROT HIT: P33479, EVALUE 2.30e-01
ctcccgcgctccaagccgattcgtcccttcagggcagggcctgcccgcgaacagcccggcgagacgagcgcggccgcgcccccagcttcgggcgcccgggctccggcgcggcggcggggcaggagcagactggccgggccgggcgccgaacgcggcggcgcggggggggctgcaaccggccgcggcgcgctctcccccagggcctgcgccgcccgcccgcggctccgcgggaaagaagcgccggaaaaggcctcgccccggcctggggcgcggggccgggggcgcggggctaggggaggcgccccgggaaggtcacgggagcggaggcgcggcgagtggatcgcggcgcggtgggtgcggggagccgaggcgggcggcccccgccgccgggagcgctcgccggccttggccgccgccgccgcctccgagatgcgccggcttcccggagcgcccggcgctcggagctgggcggccgctgcagccgccgcgggcagccgggcgccgctggccggagccggcgcgcgatccccgcctcccgcgcccggccaggagtgggccgccgcgcgggaaccggcaggggcgggcgctggggtccgggctccgggctggccccgccgcctccgcgtgcccagagcgccggactcgctcagcagctgcagtgactgtgtgtctgtgtcatgtctgtgcagccgggggggaccgcgagccggggctgggttccgagcgggggcggggccggcgcccgcgtcggcgcccgcccccgaccccgtgaccgagcggccggccaatggcaagcgccgcagccgcgcggaccgagagttcgcccccgcacaggctccgccccccggcgagactccgccccggtgcttcttcagctcgctggctggcaggcaggcggaagcaacacccggagccgggatcccgggccgggtcgggatgaaagggtgcaagctgggagctccccgcccttcttcccccaaccccggcggctcccggccgcctcgggcttggcgtgcctcgcggaaaaagggggaagggaagcgggacgggcccgcagctgccgtggtagagaggctcgcaggcttgcaggaccatgcagcctgctccccaaattgcacaaaacagccgtcgtgagaagtaggaagtttccccgcctcgggtcgcagcttctctcggaggtgggcatg

SEQ ID NO: 25126 - DNA, 856 bp, Homo sapiens
  MAP TO AL031667.17; EXPRESSED IN HELA, SIGNAL = 0.83; SWISSPROT HIT: Q09455, EVALUE 1.00e-06; EST_HUMAN HIT: BE783857.1, EVALUE 0.00e+00; NT HIT: gi14770873, EVALUE 0.00e+00
aacattggctggggagctaagccatgacagcgcctctccgggcaggtcagctcggccccttgtacagacagagctggctgtgctagagcaacggttggtctcactggagacttcgtgcaccccgagcaccacctcagccatcctggacagcctcgtggcagaggtgaaggcctggcagagccggagcgaggccctcctacgccaggtggccagccacgcagcactgctccagcagctcaatggcactgtggccgaggtccagggacagctggcagaagggacgggcagctcacttcaaggcgagatcactctgctcaaggtcaatctgaactcagtgagcaagtcgctcacaggcctcagtgactctgtcagccagtactctgatgccttcttggctgccaacacgtccctggatgagcgggaacgcaaggtggaagccgaagtccaggccatccaggagcaggtcagcagccaaggctccaggcttcaggctggccacaggcaggtcctgaacctgcgtggggagctggagcaactcaaggctggtgtggccaaggtggccagtgggctgagccgctgccaggacacagcccagaaacttcagcacacagtgggacactttgaccagcgggtggcacaagtggagggtgcgtgcaggaggctgggcctgctggccgcgggcctggacagcttgcccactgagccactgaggcccagagagggcctgtggagccatgtggaccagctgaatcgtacgctggcccagcacacgcaggacattgcccgcctccgggatgacctactggactgccaggcccagctggctgagcaggtgcggccagggcaagccaactag

SEQ ID NO: 25127 - DNA, 582 bp, Homo sapiens
  MAP TO AC004264.1; EXPRESSED IN HELA, SIGNAL = 0.44; SWISSPROT HIT: P13725, EVALUE 1.00e-112; EST_HUMAN HIT: BI907464.1, EVALUE 0.00e+00; NT HIT: gi15318321, EVALUE 0.00e+00
ctaccggggcagctgtcccctggtcatgagtctcttgcctttcctggagggtctggtcctgcgcacccccttcctcagggcctggtgggggctgtgtctccggctccggttcgggctctccccccacttgctgaagacccgccccactgagtgcatgaagcgatggtagccatgcaggaacctgcagccctccagcttgcgctgaaaagcatccgaggcaggggtgggggtgggcggctgagaggccccccggccagccttcgtgggctcagccgtgtctgagttgtccagcagctgggccatgcagtagatgttgttcctgagcccgaggatgttcggcctcgccatctgcagcttctccaagtcctcgatgttcagcccagacctctccaaatcctgggccttggggaggcgctgctctaagtcggccagtctgtgcaggacgcagcccagtgtggcattgagggtctgcaggaagccccgcctgcccagccccctcagggtctcctcactggggaaggccccggggcgctccctgcagtgctctctcagtttaggaacatccaggccttggatacgtat

SEQ ID NO: 25128 - DNA, 470 bp, Homo sapiens
  MAP TO AC009288.8; EXPRESSED IN PLACENTA, SIGNAL = 1.8; EXPRESSED IN HELA, SIGNAL = 2.5; EXPRESSED IN LUNG, SIGNAL = 2.1; NT HIT: gi14777543, EVALUE 0.00e+00; SWISSPROT HIT: Q9Y2N3, EVALUE 5.00e-09; EST_HUMAN HIT: AL042278.1, EVALUE 0.00e+00
atggactctctgtggggcccaggagccgggagtcacccctttggggtccacaacagccggctgtccccagacttgtgtccagggaagatagtgttgagggccctcaaggagagcggggcagggatgcctgagcaggacaaggaccctagagtccaagagaatcctggtgatcagagaagggtccccgaggtcaccggggatgcaccgtctgcatttcggcccctgcgggacaatggaggcctctctccctttgtgcccgggcccgggcctctgcagacagacctccatgcccagaggtcagaaatcagatataaccagacatcccagacctcctggacgagctcctgcaccaaccgaaatgccatctccagctcctacagctccacgggaggcttgccggggctaaagcggaggagggggccagcctcatcccactgccagctgaccctcagttcctcaaagacagtgag

SEQ ID NO: 25129 - DNA, 599 bp, Homo sapiens
  MAP TO AC018692.5; EXPRESSED IN HELA, SIGNAL = 0.67; SWISSPROT HIT: P17437, EVALUE 5.90e+00
ggctgaggcttcctctgctgagctcgcgccctcaccctccctgagcttccgcttccgcagagctgaggcttcctctgctgagcttgtgccctcaccctctccgagcttccgcagggctgaggctttctctgctgagctcgcgccctcgccctccctgagcttcgacagggctgagacttcctctgctgagcttgcgccctcaccctccctgagcttccgcttcggcagggctgaggcttcctctgctgagcttgcgccctcgccctacgtgagcttccgcagggctgaggcttcctctgctaagctggcgccctcgccctccctgaccttccgcttcggcaagattgaggcttcctctgctcagcttgcgccctccccctcccggagtttggacaggactgacgcttcctccgctgagcttgcgccctcaccctccctgagcttccgcttccgcagggctgaggctccgtctgctgagcttgcaccctcaccctccctgagcttccgcttccgcttccgcaggactgaggcttcctctgctgagcttgtgccttcaccttccctgagcttccgctttggcagggctgaggcttcctctg

SEQ ID NO: 25130 - DNA, 839 bp, Homo sapiens
  MAP TO U47924.1; EXPRESSED IN HELA, SIGNAL = 0.48; EST_HUMAN HIT: AU126229.1, EVALUE 0.00e+00; SWISSPROT HIT: Q25322, EVALUE 7.00e-06; NT HIT: gi11436303, EVALUE 0.00e+00
ggcctccctgcgctccaacgcattgtcctggctggcctgtgggctcctggcgctgctggccaatgcctggatcatcctcagcatctcggccaagcagcagaagcacaagccactggagctgctgctctgcttcctagcgggcacacacatactcatggcagctgtgcccctcaccacctttgccgtggtgcagctgcgtcgtcaggcttcctccgactatgactggaacgagagtatctgcaaggtcttcgtgtccacctactacaccctggcgctggccacctgcttcacggtcgcctccctctcctaccatcgcatgtggatggtgcgctggcccgtcaactaccgcctcagcaacgccaagaagcaggcactgcatgccgtcatgggcatctggatggtcagcttcatcctctccacactgccctccattggctggcacaacaacggcgagcgctactatgcccgcggctgccagttcatagtctccaagatcggcctcggctttggcgtttgcttcagcctcttgctacttgggggaattgtcatgggtctggtctgtgtggccatcaccttctaccagacactgtgggcccggccccggagggctcggcaggcccggagagtggggggtggtggggggaccaaagcgggtgggccaggggccttgggtacccggccagcttttgaggtaccagccattgtggtggaggatgcccgagggaagcggcggtcctcgctggatggctcggagtctgccaagacatccctgcaggtcaccaacttggtcagcgccatcgtctttctctatgactcactcacaggggtgcccatcttgg

SEQ ID NO: 25131 - DNA, 1015 bp, Homo sapiens
  MAP TO AL121907.2; EXPRESSED IN HELA, SIGNAL = 1.5; SWISSPROT HIT: P26436, EVALUE 1.90e-01; EST_HUMAN HIT: BI828873.1, EVALUE 0.00e+00; NT HIT: gi15011885, EVALUE 0.00e+00
ccggcttggtgtgcagggtgaggctgtccctccagggctcgtacaccagcgtggaggtctcggccctcttgatggtgaacttataggatcggttgggcagcaggtttcggacgtcgaaggtgcaggcagccacggggatgacgccacactgggcgcactcctgctgtgtccgcgggtccagcagcctgaagcgcaactcatactgctccgatgtggctggctggatggtgacgaaccagcgcagccgggcccagtcctggtgagccgccgacgcctttcggtcaaacacgacaggcatcttggtgctcagcatgagccagatgtgcgggatcttggtggcactgacatcagacaccaggcggtgcttgacgtgtagccgccccggcaccatcatggtcaggaagctgtccatgacggccgacacgtccgccagccgccgctccaccagcgcccagtcggccaggaagggccgtgggtctggcgaccggagcagggcatccagctcagcacggccatggtcgagctgttccaacaggtccccgagcagcaggagctggatcttggtctgagctgtgcccaccttcttcatgcgctggaacttccaggggtcgatgagctggaacaaggcgctaggcagcaccagcgggttctggtcgcccagggccaggtgcttgggcaggacctcgatgtagtaggagcacttacgcagcagctgcatgcgggcgtggtggcgcttgagcaggtgcggactcaggtccgaggtcaggaactcacgcagggcattgcggcgctcggtgtaggtcttccacgcctctggttccagcagctgctggtcatctgcctcctcctggtccaggaaggactggggattgcccagcttcatcttgtccaggcccaggcctgccacatgggtgctcattatccgggagctggggggagggctgggtgtcagctgccaggcaggctggcctcccctgggctgtggcatgttcgggggatggattcagcccactga

SEQ ID NO: 25132 - DNA, 489 bp, Homo sapiens
  MAP TO AC008764.4; EXPRESSED IN HELA, SIGNAL = 0.55; NT HIT: gi13376323, EVALUE 0.00e+00; SWISSPROT HIT: P49131, EVALUE 9.00e-03; EST_HUMAN HIT: AI951641.1, EVALUE 0.00e+00
atggcggcggccgcggtgggcgcgggccacggcgcggggggcccgggcgcagcgagcagcagtggtggggcgcgcgagggcgcgcgggtggcggcgctgtgcctgctgtggtacgcgctgagcgcgggcggcaacgtggtcaacaaggtgatcctgagcgccttcccgttcccggtgaccgtgtcgctgtgccacatcctggctctgtgcgctgggctcccgccgctgctgcgcgcctggcgcgtgccccccgcgccgcccgtctcgggccccggacccagtccgcatccgtcgtccggcccgctgctgccgccgcgcttctacccgcgctacgtgctaccgctcgccttcggcaagtacttcgcgtccgtgtcagcgcacgtcagcatctggaaggtgcccgtgtcctatgcacacaccggtaggttccgcgcccggcctcgggggcggcggccgggcccgccgcttcgggtttgggcgcatggatag

SEQ ID NO: 25133 - DNA, 1493 bp, Homo sapiens
  MAP TO AP001751.1; EXPRESSED IN PLACENTA, SIGNAL = 5.6; EXPRESSED IN HELA, SIGNAL = 2.7; EXPRESSED IN LUNG, SIGNAL = 3.6
ttacaagagtgagaacattactaacaccaccactgccaccactaccatcgccactatcatcccatcattatcactacaatcaccaccaccaccatcaccaccatcaccatcaccaccatcaccaccatcaccatcaccatcaccaccaccaccaccaacaccaccaccatcaccaccatcaccaccaccaccatcaccaccaccatcaccaacatcatcaccaccatcaccaccatcaccatcaccaccaccatcaccaccaccatcaccaacatcatcaccaccatcaccatcaccaccaccaccaccaacaccaccaccatcaccaccatcaccaccaccaccatcaccaccatcagcatcaccaccatcagcatcaccaccatcaccatcaccaccatcaccatcaccaccatcaccaccaccaacaccaccaccatcaccaccatcaccaccaccaccatcaccaccaccatcaccaccaccaccatcaccaccaccatcaccaccaccaacaccaccaccatcaccatcaccatcaccatcatgaccatcaccatcaccatcaccatcaccaccatcaccatcaccaccaccaacaccaccaccaaccccaccaccaccaccatcaccatcaccaccaccaccaccatcaccatcaccaccatcatcaccaccactatcaccaccatcagcatcaccaccatcaccatcaccaccatcaccaccatcaccaccaccaacaccaccaccatcaccaccatcaccaccaccaccatcaccaccaccaccaccaccaccatcaccaccaccatcaccaccaccaacaccgccaccatcaccatcaccaccatcaccatcatgaccatcaccatcaccaccaccatcaccatcaccaccaccaacaccaccacgacaatcaccaccaccaccaccaccatcaccaccaccaccaccatcaccatcaccaccaccatcaccatcaccaccatcatcaccaccaccatcaccaccatcatcaccaccatcatcaccaccatcaccaccaccatcaccaccaccaccaccaccatcaccatcatcaccatcaccatcaccaccatcaccaccaccatcaccaccaccaccatcaccaccaccatcaccaacaccaacaccaccatcaccaccaccatcaccatcaccatcagcagcatcatcaccaccatcatcaccaccatcaacatcaccaccatcaccatcagcatcatcatcaccaccaccaccatcaccaccaccaccaacaccaccaccatcaccatcaccaccatcaccatcatgaccatcaccatcaccaccaccatcaccatcaccaccaccaacaccaccacaacaatcaccaccaccaacaccaccaccaccaccatcaccatcaccaccaccaccactaccaccaccatcaccatcaccatcatcatcaccaccaccatcaccaccatcatcaccaccatcac

SEQ ID NO: 25134 - DNA, 544 bp, Homo sapiens
  MAP TO AC002544.1; EXPRESSED IN LUNG, SIGNAL = 1.8; EXPRESSED IN HELA, SIGNAL = 0.43; SWISSPROT HIT: P08640, EVALUE 5.70e-01; NT HIT: gi14777420, EVALUE 0.00e+00; EST_HUMAN HIT: BE902198.1, EVALUE 0.00e+00
acaacccaggacgcgggatgtggaactgaggagggagaggcgtctgtctcagagaaccaggagctggacggaagcacaggggcagacgcagggccttgcccgtcactgggagaggcctatgccagagaaactgaggatgaggaggcggaggctgacagaacatccagaagaggctggaggctgcaagcggtggctgtgggcctcccggaccgtgaggatgcacagactggctctgtggctgctgggattatggggggtgatgtggtcccacacatcagcgctgctggcgctggtgaagctttggaaggggcgcttgggcaaggctgggactcgaaagaaaaggaagaggcagcagcaggagagcatgcaggtgggcaagaatttggtctggagggctcagcagaggaagaggtgactggcagaggcagccaagtagaggcttttgagtccagggagggaggaccttggggagggcgggtagaggccgaggaatctgcaggcgcagaggacagctgtgggctggatcccgcgggctcccagacag

SEQ ID NO: 25135 - DNA, 2002 bp, Homo sapiens
  MAP TO AL121653.1; EXPRESSED IN HELA, SIGNAL = 0.36; EST_HUMAN HIT: AV656315.1, EVALUE 0.00e+00; SWISSPROT HIT: Q9JIB6, EVALUE 2.00e-40; NT HIT: gi15296399, EVALUE 0.00e+00
aatacccggcagccgttgattctgtaggtcatgaatactcaaggttttcaggtttgttacagatgtgatgtgcctctcatcttctatggtgaggggactggcttccaccatgagagaataaatgttcttacaggtgctgaggaccaaactgaggcttccagccacaccagcacatctctttatttgcagcctgaggcttgtggcagagctgaatattttccccagatatctgatatcttgcttattcaacttgctgaaatcccggagtgtgacctccagagtcctgaattcctgcttccagttgaagaacaaagatacagccctgctgggaatgtaggtttctggggcctcttccatgtggattccacctgtgtcttctgcagccttttcccatgaagccatagctcccccataaaagtccagtttaatgaagtccagggcacttgcacaattgggcaaatgttcaaagaagtcaaataagtaatcggggatgttccctgagttgatatataagcttttaccttgaaagaaagcttcaaattcttggctcagggctgatttggatgtactctcttgatataaatggatgccacactctacaaaggaattgatgtttatggctttcagaatttcttgctcagtggtgtttttcacactttgcaaagattcctgtctccagagaggcctcttggcgatggaaagtccgagaaggcagccgtgttgatacactgctgcgaggtgcttcataacagccctggtggcttccacagatgacccacaggtgtaccggagcaggctgctataagtggatgtaatgtccgaaatggaaaccattttctgcaagtaaccattccccttggtcacctcctctggctcatgagacgtcaataaactgctgagtcttcgtcctgctgtgtactcctggaatgacttgtgaaagaatttatactttggcttgaacctttgagctgtatatttacagaggagcccagttgtcagcaggacatcctcattcacgctggacacatcctgcagttcgaaatcaaacttgtgggagaacacaccctccagagctaggtctccacagtggtccaggctccgaatgaagtcacttgcagccacacctttatgtttgtgtttgtttttctgtatcaacagatcatagaaggtatggaacagcgttgtttgtgtgtgagagtggaactcactttcacccatctggattgcacaagtgatgaccacaaagagaggggtcttcatgagattcctcaagcacctggatttctgaatttggagcaacaagccttcagcaagctccttgatcagcacttctcggatgagagcctgggcgctgtcttctgtcatatcccccacctcagcagtcagggcaccaaactgccgtatgtgcctcaggcactcagtggtagtggtgacgatgaccatgttcttgaagcggtggttttcctttatcagggcttcgatttctgggcagttctggggcttgaattcattgtagccatcaagaaggaaaagaaccctctgccgcagcttcagcagcatggccatgaatgtctgcttcctgattgtgccaggtatatccaggagttgatcacagagggtttcaaaaagtccaccctgggccctgctgagacggaggaagaagacgaatttgaacttggtcagagccttgcactttccggagccccagagcatggcaattcgctgcagcagagtggacttgcctttgccagattccccttcaatgatgcaggggctctgaagagcctgcaggaggccattcagggtcagctgctccacgcggtgatggtgttggtccttcctccacaggacaggttctgtgaaggtgcttttcaagttaaaaataatgtcaatatcttcaccaaggggataaaagttcagaaaagatggggtatggtacaagtcctttaaatcctgagccaaatcgtccaagtctccttctgatgtctgatgaaaaagacct

SEQ ID NO: 25136 - DNA, 549 bp, Homo sapiens
  MAP TO AL121871.8; EXPRESSED IN HELA, SIGNAL =   1; SWISSPROT HIT: P70213, EVALUE 3.00e-35; EST_HUMAN HIT: AI436093.1, EVALUE 2.00e-66; NT HIT: AL163209.2, EVALUE 2.00e-96
ttttataagcagaaatctggagaacaggcatgggaatggatattaaaggcgtggaataatggtggaaggaacatagaattggatcaggctgaatttattgatttgggcccactaagcaggggctttgcattcaatgttgcagtttggggaattaaaaaaggttccaacagtttatttgcttggttagctaaaatatggattaaaagatggcatattgtgaatgagctggaaatgcctgatcttccttggtttaatgtggaggaagggatccaaaggcttggtgagatttggatgcaggagtggattagtaaatttagacctactcatcctagctgggagggttcagaagatgtacccttgaccaatattttgttaaatagatttgtgaggacagtacctgcatccttgaagagctctgttattgctcttctctgtatgccagatcttgcagtaggaaccacagtcactcaactacaaaatgggaataattggatcccgaggtggcagaggccaagtggcaacactcaaacgtcaaaggcaaggtgggca

SEQ ID NO: 25137 - DNA, 555 bp, Homo sapiens
  MAP TO AC008970.4; EXPRESSED IN HELA, SIGNAL = 0.69; SWISSPROT HIT: O08638, EVALUE 5.30e-02; EST_HUMAN HIT: AA421042.1, EVALUE 3.00e-77; NT HIT: AJ271735.1, EVALUE 2.00e-68
ttatttcagcaagatagtcttcgagctctgatattctttcttctgcttgatcaattcagctattgatacttgcgtttgcatcaaaatttcttgtgctgtgtttttcagcaccatcaggtcatttatgttcccctttaaatgagacattttagttagcagctcctgtaaccttttatcatgtttcttagcttctttgcattgggttagagcatgctcctttagctcagccaagtttgttattacccactttctgaggcctacttctgtcaatttttccatctcatcctctatccagttctgtgcccttgctggtgaggtgttgtgatcatttagaggaaaagaggcactctggccttttgaattttcagcattttttcgttgattctttctcatctccatgactttgtctagttttgatctttgaggatgctgacctttggatgaggtttttgtggggactttttgttgatgctgttgttgttgctttctgtttgtttttctttcaacagtcaggtccctctcctgtagggctgctgcagtttgctgggggttcat

SEQ ID NO: 25138 - DNA, 1250 bp, Homo sapiens
  MAP TO AC004621.1; EXPRESSED IN HELA, SIGNAL = 1.3; SWISSPROT HIT: P15771, EVALUE 1.40e-01; EST_HUMAN HIT: AI557289.1, EVALUE 0.00e+00
atgccaggcacagtaattactaccactttagagaaaggtgaaatagaagaatcagagtatgtccttgtcacaatgcatagaaacaaaagcagtttgctctttaaagagtcagaagaaattagaactcccaattgtaactgtaaatattgcagtcatccactccttgggcaaaatgtagagaacatttcacaacaagagagagaagatattcaaaacagctctaaggagctgctaggaatttcagatgagtgccagatgatttctccttctgactgccaagaagaaaatgctgttgatgttaaacagtacagagataaattaagaacttgctttgacgccaagttagagacagttgtttgcacaggatctgttccagtagacaaatgtgcattgtcagagtcaggcttagagtcaacagaggaaacatggcagagtgagaagttgctggattcagacagtcacacaggcaaagcaatgagatccacaggaatggttgtggaaaaaaaacctccagataagattgtgcctgcttcattttcttgtgaggctgcccagacaaaggttactttcctgattggggattctatgtcacctgattcagatactgagcttcgaagtcaggcagtggtggatcagattaccagacatcacaccaaaccattgaaggaagaaagaggggctattgatcagcatcaagaaactaaacaaacaaccaaggaccaatctggagagtctgatacacagaacatggtttctgaagagccctgtgaacttccctgttggaatcattcagacccagaaagcatgagcttattcgacgaatattttaatgatgattcaatcgaaaccaggactattgatgatgttccatttaaaacaagtacagatagtaaagaccattgctgtatgttagagttttcaaaaatattgtgtacaaaaaataacaagcagaacaatgaattttgtaaatgtatagaaacagttccccaagattcatgtaaaacctgctttcctcagcaggaccaaagagatacactctccattcttgtcccccatggggataaagagagttcagataaaaaaattgctgtaggaactgaatgggacattccaagaaatgaaagttcagacagtgcccttggggatagtgaaagtgaagatacaggtcatgatatgactagacaagttagcagttattatggaggagagcaagaagattgggcagaagaggatgagataccttttcctgg

SEQ ID NO: 25139 - DNA, 832 bp, Homo sapiens
  MAP TO AC005768.16; EXPRESSED IN HELA, SIGNAL = 0.85; SWISSPROT HIT: P40316, EVALUE 1.70e+00; EST_HUMAN HIT: AI671443.1, EVALUE 0.00e+00
gagactacacagaaacagagaggactatgtggaaagaagtgctgagtttgcagatggtttgctctcaaaagctttgaaagacattcagtctggagcactggacataaataaagcaggcatactttatggcatacctcaaaaaactttacttcttcacttagaagccttaccagcagggaagcctgcatcttttaaaaacaaaactcgagatttccatgatagttattcatataaggacagtaaagaaacttgtgcagtgctgcaaaaagtagccttgtgggcaagagctcaagcagagcgcacagaaaaaagtaaactcaatctacttgaaacctcagaaataaaattcccaacagcttccacttacctccatcagctaactctacagaaaatggtcactcagtttaaagaaaaaaatgaaagcctccaatatgaaacttcaaatcctactgtacagttaaaaattcctcagctacgagtaagttctgtctcaaaatcacaacctgatggttctggtctgttggatgttatgtatcaagtttccaaaacctcttcagtcctagaaggatcagctctccaaaaactgaaaaatatactccctaaacagaacaaaatagaatgttctgggcctgtaactcactcaagtgttgactcttactttctacatggggacctctctcctttgtgtcttaattctaaaaatggaacagttgatggaacctctgaaaatactgaagatggattagatcgaaaagacagtaagcagcccaggaaaaaacgtggccgctatcggcaatatgatcatgaaataatggaagaagctattgcaatg

SEQ ID NO: 25140 - DNA, 993 bp, Homo sapiens
  MAP TO AC008399.2; EXPRESSED IN HELA, SIGNAL = 0.27; EST_HUMAN HIT: BE746231.1, EVALUE 2.00e-27; SWISSPROT HIT: P21728, EVALUE 0.00e+00; NT HIT: S58541.1, EVALUE 0.00e+00
ataaatgatggggttcaaggatgaattagcccacccaaaccacacaaacacgtcaaaggtgttggaatcaatgcagaagggctgcgtctccccagacccacagaagggcaaaatgcagttcaagatgaagaaaggtagccaacagcacacaaacacacccatgatcaccgacagagtcttcaggactttagtttctcttttgaaggacatcttaaaagaactttccggttgagaacattcgacaggctttccattacctgtggtggtctggcaattcttggcgtggactgctgccctctccaaggccgcaatgcgccgtatttgtttctgagcaatcctgtagatcctggtgtaggtgacaatcatgatggccacagggatgtaaaagcttattacagaggatgagatggcatatgtcctgctgaggctggagtcacagttgtctatggtctcagccagggaagtggcatttccatcagaggggcttgtgggttttgccttgtgccagctgagctgcactgggatgaaggagatgagtacagacaaggtccatgccacactgatcaggatgaaggctgccttgggggtcatctttctctcataccggaaagggctggagatagcccaatacctgtccacgctgatcacacagaggttgaggatggatgcagtggagcacatgatgtcaaaggccacccagatgttacagaaggacccaaagggccagaagccagcaatctcagccactgccttccagggcatgaccaggacggccaccaagagatctgacacagccaaggagatgacaaagaagttggtcaccttggaccgcaggtgtcggaacctgataacggcagcacagaccagcgtgttccccaggagcgtggacaggatgagcagcgacaggaaacaggcagtgaggatacgaacagagaagtccctctccaccaccagcccagtcccgtccatggcagaggtgttcagagtcctcat

SEQ ID NO: 25141 - DNA, 1110 bp, Homo sapiens
  MAP TO AC012284.1; EXPRESSED IN HELA, SIGNAL = 0.48; EST_HUMAN HIT: AW139874.1, EVALUE 0.00e+00; SWISSPROT HIT: P36786, EVALUE 2.50e-02; NT HIT: gi15595198, EVALUE 2.70e-01
tcagagcagcaggagggcgcccagggacagctcaccctggcccagcaggcggccccgctcccggccgcggccctcgtcccgggccttgactcgaacggccaggcggcgcacttcgtcctccgagaggccgtcgaagcagaagtcctggtcaaaggaggccttgcggctgcgccccaccacagtgctgcattgccgaagcgcggtgcccggcggccgcaggacgaggctgaggcgacagctgacggctcggggcccgggggcgcctccggccgggctctcggcgcggagcagccggaggcggagccgcccggttcccggacagtactcggcggccaggcgcagggcgtcgccggcgcggcccagagccacggtgccctcggcctccaggcgctcgggaaacgggacccgggacgacggcgggctcgtggagggggcccgggccggggactgggagcccgcgcggcgctccttgtcctcgttcccgctggagacggagcggacgcgggtcaggcggcgactcctcccagcccgcagcgcgcgactcagcagcccgtcggggacgcgcaggaggcggcagccgcggggccgccgggcgagcgcgtcctggggcgggcggggacagccgggggccgcgggggtcgccgggcccggagctcgcgggacgcgcagggtccccaggagggcgtccgggccgccgccgccgccgtaggtgtgggcccggggccggggcgcgggcgggcccccgagcaggagcgactccttgcggcgcgtgtgcgggctctcgagcagcgcgcagaagccgtaggcggtgcgcacacggggcaggtgcggcagtgacagcgcggcctgcgagcgcgggtcccagtctgtgcggccggcgccctcgtccatccctgcttcttcgacccaagaattccggagcgcagccaaggccaggcggggcatgagccgtggcgggatgcagaactcagggatgcggtccggagtgagcacatttgcgcacgcggcggtggtgcgagacttggctccgcgggcccgacccgggagaagccagtctccgctccgccgaaggcactcaggacccaagcggagtcgctccaggcaccacat

SEQ ID NO: 25142 - DNA, 855 bp, Homo sapiens
  MAP TO AC005175.1; EXPRESSED IN HELA, SIGNAL = 0.42; SWISSPROT HIT: P21731, EVALUE 1.00e-112; EST_HUMAN HIT: AI521224.1, EVALUE 0.00e+00; NT HIT: D15055.1, EVALUE 0.00e+00
ctaaatccaccctgggtgaccagaggtccagtcaggagggtagcaggaccccgcagagcccctactcaccagaaggggcagccaacacacgctggccaccaccatgatccccaggagctgagccatcatctccacctcggagtcccggggacgctgctgggccgcctcctgcccgtggtagacgtggcacagggtggccacgctgaccgtgttcagcaggaaggacagcccgaccgagaggccgcccagcatggagaagagcagcccgaaggccacgtccccggactcggcgcccagcgtcaggaagcaccaggaccccgggtattgcacggtgtagcgacccacgcccagcaggggcagcaggcccagcgccagcgcggccgcccacaccagccccacggtggcccaggcgcggcgctgcgaggcgaccgccgggcgcgagaagggccgggtgatacccaggtagcgctctgaggccatggcggcccccagcagcagcggggacaggccgaagaagatcatgacgacgcccatgaagcgacagagacggcagccagggtccacggcgtgccactcgaagagcgcggcgtgctgggacaccacgatggtaccggtcaccagcagccccaggaagtcggtgaggacgaggccgcagaggaaggtgaggaaggaggagcgcgtgtgcgaacccccctgccgcgcgcccgccagcacgctcagggccagcaggttggaggccaggcccaccacgcagaaggaggcggcgaaccagggcgaggcgatcagccgtctctcctccagggtaatgtttgtgggccggaaacagggccccagggaactgccgttgggccacat

SEQ ID NO: 25143 - DNA, 1060 bp, Homo sapiens
  MAP TO Z93016.1; EXPRESSED IN HELA, SIGNAL = 1.3; NT HIT: gi13653716, EVALUE 0.00e+00; SWISSPROT HIT: P15387, EVALUE 1.00e-59; EST_HUMAN HIT: H49525.1, EVALUE 0.00e+00
tcagcgcgcccttctggtgtccgcagggaggagcactgaaacctttgtgagcgagttcccgggccccgacaccgggatccgctggcggcgaagcgacgaggcgctgcgcgtgaacgtgggtggcgtgcggcggcagctgagcgcgcgcgccctggcgcgcttcccgggcacgcggctgggccgcctgcaggccgcggcgtcggaggagcaggcgcggcgcctgtgcgacgactacgacgaggcggcgcgcgaattctacttcgaccggcacccgggcttcttcctgagcctgctgcacttctaccgcactggccacctgcacgtgctcgacgagctgtgcgtcttcgcctttggccaggaggccgactactggggcctaggcgagaacgcgcttgccgcgtgctgccgcgcgcgctacctggagaggcggctgacccagccgcacgcctgggacgaggacagcgacacgccgagcagcgtggacccgtgccccgacgagatctccgacgtgcagcgagaactggcgcgctatggcgcggcgcgctgtggccgcctgcgccgccgcctctggctgaccatggagaacccgggctactcgctgccgagcaagctcttcagctgcgtctccatcagcgtggtgctcgcctccatcgccgccatgtgcatccacagcctgcccgagtaccaggcccgcgaggcggcggccgccgtggctgcggtggccgcgggccgcagcccggaaggcgtgcgcgacgacccggtgctgcgacgcctcgagtacttctgcatcgcctggttcagcttcgaggtgtcgtcgcgcctcctgctggcgcccagtacgcgcaacttcttctgccacccgctcaacctcatcgacattgtgtctgtgctgcccttctatctcacgctgctggctggtgtggcactgggcgaccagggcggcaaggagttcggccacctgggcaaggtggtgcaggtgttccgcctcatgcgcatcttccgcgtactcaagttggcgcgccattccaccgggctgcgctcgctgggagccacgctcaag

SEQ ID NO: 25144 - DNA, 604 bp, Homo sapiens
  MAP TO Z98750.1; EXPRESSED IN HELA, SIGNAL = 1.2; SWISSPROT HIT: Q99972, EVALUE 1.00e-111; EST_HUMAN HIT: BI821411.1, EVALUE 0.00e+00; NT HIT: gi14736482, EVALUE 0.00e+00
cttctctggagcctggtggcacagcccgagcagtgtctcgggtctggggacactggccccttctcagccttgctacctcctggctgctgctttccaacctcctggccagattctcattttcttgccttagtcgcttcttctcttcctccagaactgacttgtctcggaggaggttgctgtaggcagtctccaactctctggtttgggtttccagctggtcccgctcccgcctcagggtgcccagctccctctgcagcccctcctgggtctcctggggcctggcagcctggtccaaggtcaattggtggaggaggctctccagggagctgagtcgagctttggtggcctccaggtctaagcgttgggtgctgctgtctctctgtaagttatggatgactgacatggcctggctctgctctgggcagctggattcattgggactggccacactgaaggtatactggcatcggccactctggtcattggccttcctgagctgagctgtcctggcccccacatcccacaccaggcaggccagaagcagcagctggacagctggcatctcaggcccaaagctgcagcaacgtgcacagaagaacctcat

SEQ ID NO: 25145 - DNA, 516 bp, Homo sapiens
  MAP TO AC003035.1; EXPRESSED IN HELA, SIGNAL = 0.67; EST_HUMAN HIT: BG831058.1, EVALUE 0.00e+00; SWISSPROT HIT: Q14687, EVALUE 7.20e-01; NT HIT: gi14763745, EVALUE 0.00e+00
gcatcaacatcgaaagctaccaggccttggtattctcatccggtatatgcaagatactggcaacattatcatcaagcaatggcttggatgcaaagccatcacaatgcctacaggaaggccgtggaatcctgtttcaatcttccatggtacttaccttctgcgcttcttccccaaagctcttacgataatgaggctgcgtatcctcagtccttctatgaccatcatgtggcctggcaggactacccctgcagttcttcacatttcagaagatctgggcagcatccacgttacagcagtaggatccaggcatccacaaaagaagaccaagctttgtccaaagaggaagagatggagactgagtcagatgcagaggtagaatgtgacctgagcaatatggaaatcactgaagagctccgccagtactttgcagagaccgagaggcatagagaagaacgacgtaagttcaggcctctgtctcttcatgcttcctttccttgccctgccttttacattttt

SEQ ID NO: 25146 - DNA, 1206 bp, Homo sapiens
  MAP TO U62631.1; EXPRESSED IN HELA, SIGNAL = 1.4; EST_HUMAN HIT: BF115946.1, EVALUE 2.80e-02; SWISSPROT HIT: O14843, EVALUE 0.00e+00; NT HIT: U62631.1, EVALUE 0.00e+00
atgctcaggaagacaggcaggctgaccccgcctggaaggcacccagagacaagaggggtgggcgtagtgacctcgtgcccttttaggggagatgctgctggccagaggccgttagggcccccactaccaactccatgttactctctctcaccagtggccaccaccatggatacaggccccgaccagtcctacttctccggcaatcactggttcgtcttctcggtgtaccttctcactttcctggtggggctccccctcaacctgctggccctggtggtcttcgtgggcaagctgcagcgccgcccggtggccgtggacgtgctcctgctcaacctgaccgcctcggacctgctcctgctgctgttcctgcctttccgcatggtggaggcagccaatggcatgcactggcccctgcccttcatcctctgcccactctctggattcatcttcttcaccaccatctatctcaccgccctcttcctggcagctgtgagcattgaacgcttcctgagtgtggcccacccactgtggtacaagacccggccgaggctggggcaggcaggtctggtgagtgtggcctgctggctgttggcctctgctcactgcagcgtggtctacgtcatagaattctcaggggacatctcccacagccagggcaccaatgggacctgctacctggagttccggaaggaccagctagccatcctcctgcccgtgcggctggagatggctgtggtcctctttgtggtcccgctgatcatcaccagctactgctacagccgcctggtgtggatcctcggcagagggggcagccaccgccggcagaggagggtggcggggctgttggcggccacgctgctcaacttccttgtctgctttgggccctacaacgtgtcccatgtcgtgggctatatctgcggtgaaagcccggcgtggaggatctacgtgacgcttctcagcaccctgaactcctgtgtcgacccctttgtctactacttctcctcctccgggttccaagccgactttcatgagctgctgaggaggttgtgtgggctctggggccagtggcagcaggagagcagcatggagctgaaggagcagaagggaggggaggagcagagagcggaccgaccagctgaaagaaagaccagtgaacactcacagggctgtggaactggtggccaggtggcctgtgctgaaagctag

SEQ ID NO: 25147 - DNA, 854 bp, Homo sapiens
  MAP TO AC005063.1; EXPRESSED IN HELA, SIGNAL = 0.54; NT HIT: gi15297906, EVALUE 0.00e+00; SWISSPROT HIT: Q9UWW3, EVALUE 1.40e+00; EST_HUMAN HIT: BG109194.1, EVALUE 0.00e+00
tgaatctctccatttttgttgggagaagactaaccatctctttactaagttctagctcaacttctatttcctgggcggcctcaggatgcttttcacagtaatcaacaataaatttgtaatgttccaatgatgttgccaaattttccagctctttcttgggatctgcagtaatgattttgccatagagacgggcaactcgaaacttagctaacatggcagggcgaagaacatcttcccctatatgctcagggaatactttatttgggtctctcagggagtctaagaagagctggtagtacttcagtgctgacttattaagattatttattttttttacaatgtgtgaatcaggatcccttagcctgtcagcaatggcaaccttcaaatccatcatatcatagtaagcatgtgcaatttcaaactggatctgtctgttgaccaacagataatactgtggattcaggtctacagttaggggctctagcatggctattctgcgtttatgcatcttgcaccgtctctccatgtcagtttcaaagaatgcaagcaccttaaacagagcactgtggtcttggacaacttcaatatggtcagtgacataaccatcaatctgaaagaactcttttgcctcaaagacatagtgctgacccaataagaaaagttctctggcttcttcaaaatctaaaggtctcaagtagctcactttctcttctactgcagagatggcatcacacagttcaccggttccaaactgcacagcttttttccgaatgctttcctcctcatctagttcttttttccttaaagctctaagttcagactgtttatcaagatcaagctctcctatgttgtcc

SEQ ID NO: 25148 - DNA, 683 bp, Homo sapiens
  MAP TO AL158091.7; EXPRESSED IN HELA, SIGNAL = 0.6; SWISSPROT HIT: Q92830, EVALUE 4.00e-05; EST_HUMAN HIT: BE889823.1, EVALUE 3.80e+00
aggaggggggatgacgctgggcctggattgggggacacatggaaagggtgggggtcccttggctcttggcctaagagccagtttggtgcttcctggcccctgcatttggcctctccagcctgcgtcccaggtggaccaggggcccagcccagagggcctaggatgtgtttccccacaggagtctctcgtgaggattccgactccaccaggggtcccaagtccacgggaggccacagaagttgcccctttttcctggctcccccaagtcgtggaaccatcgaaaatccctcagggcgacggcccgtgtgcccctgcaccttctcccctccccgtctccaccgcacctgcagctcgggtggtgggtggtggggacgggccgcaagcaggcagcggagtggtcagaaggactggagacccagccctccctccctgcgcccaaagaccgagggaggcgcgcccagcttgtgtcagcaggggtggggtggtcgctggcagccaagtcaaggtccttggtggggaccccggcgagctggatgcgcagcccacccccagcccttccttcctggggtgggtggctcccagctgccgggtgggtgggctgaaagccggcatctgccagggtccgggcgtctgtgctgtgagctcagggaccggggctccttcaaggccctagatctggggga

SEQ ID NO: 25149 - DNA, 1225 bp, Homo sapiens
  MAP TO AL118505.13; EXPRESSED IN HELA, SIGNAL = 0.36; SWISSPROT HIT: Q02858, EVALUE 1.00e-06; EST_HUMAN HIT: BE378604.1, EVALUE 0.00e+00; NT HIT: AF222861.1, EVALUE 7.60e-02
ggcagcagacactatgtgcgcgccagctgcgggatccagcggccccttctcagcctccctgtcactctcccagctgcccggagtgtgccagtccgaccaaagcaccactctcggggcttcacacccaccttgcttcaaccgctccacctacgcacagggtaccaccgtcgcgcccagcgcagcccccgccacccggcctgcgggagaccagcagagtgtctccaaggcccctaacgtgggctctcgcacgatagctgcatggccgcacagcgatgcacgggaggggactgccccctccacgaccaactctgtagcaggtcacagcaactccagcgttttccccagggctgccagcaccaccaggacccagcaccgaggagaacatgcccccgagcttgtccttgagcctgatatctcagctgcctccaccccactggccagcaagctcctgggccccttccctacctcgtgggaccgcagcataagctcgcctcagcccggccagaggacacacgccacaccccaagcccccaacccgagtctttccgagggcgagattccagtcttgctgctggacgactacagtgaggaggaggaagggaggaaggaggaggtgggaacgcctcaccaggacgtcccctgtgattaccatccctgcaagcacctgcagaccccgtgcgcggagctgcagaggcggtggcggtgccggtgccccggcctcagcggggaagacaccatcccagacccgcccaggctgcagggggtgacggagaccacggacacgtcggcgctggtccactggtgtgcccccaactcggtagtgcatgggtaccagatccgctactctgcggagggctgggcggggaaccagtcggtggtgggggtcatctacgccacggcccggcagcaccctctgtacgggctgtcgccgggcaccacctaccgcgtgtgcgtgctggcggccaacagggcgggcttgagccagccacggtcttcgggctggaggagcccgtgcgccgccttcaccaccaagcccagcttcgcgctcctgctctctgggctgtgcgccgccagcggcctgttgctcgccagcaccgtggtgctgtccgcatgtctctgcaggcggggccagacgctgggcctgcagcgctgcgacacgcacctggtggcctacaaaaacccggcctttgatgattacccgctggggctccagaccgtcagttag

SEQ ID NO: 25150 - DNA, 518 bp, Homo sapiens
  MAP TO AC010358.5; EXPRESSED IN PLACENTA, SIGNAL =   3; EXPRESSED IN HELA, SIGNAL = 1.8; EST_HUMAN HIT: AL532400.1, EVALUE 0.00e+00; SWISSPROT HIT: P72689, EVALUE 9.50e-01; NT HIT: AL163208.2, EVALUE 0.00e+00
ttgctctcggcacctcccctgcctgggctcccactttggtggcatttgaggagcccttcagccccctcactgcactgtggaagcccctttctggtctggccaaggctggagcccactccctcagcttgcagggaggtgtggagggagaggcacgagcgggaaccggggctgcgtgcagcgcttgcgggccagctggagttccgggtgggcgtgggcttggtgggccccgcactcggagcaaacagccagccctgctggccccgggcaatgggggacttagcacctgggccagtggctgcggagggtgtactgggtccccaggcagtgccagcccaccggcgctgtgctctgtttctcgctgggccttagctgccttcccgtggagcaaggctcgggacctgcagcccgccatgcctgagcctcccacccactccatgggctcctgtgcggccggagcctccctgacgagcaccgccccctgctccacggcgcccagtcccatcgaccacctaagggct

SEQ ID NO: 25151 - DNA, 774 bp, Homo sapiens
  MAP TO AC022325.3; EXPRESSED IN HELA, SIGNAL = 2.9; EXPRESSED IN LUNG, SIGNAL = 1.3; EST_HUMAN HIT: BI912809.1, EVALUE 6.00e-21; SWISSPROT HIT: O60035, EVALUE 2.00e-04; NT HIT: AJ271735.1, EVALUE 9.00e-19
atggaagataaagccagctataacattcccctgaaccaaggcctaatccagagcaaggtcctttctctcttcaattctgtgaaggctgagagaggagagaaagctgcagaagaaatgcttgatgcaaaccgagattcagtcatgcggtttaaagaaaaaagctgtctttttaacataaaaggtcaaggtgatgcagcaaatgctgatgcagaagctgcaacaagtaatccaaaagatctgaataaaataattgatgagagtgattacacaaaacaaaagattttcggtgtagacaaaacagccttctattggaaaaaaatatcatctaggactttaatggccagagagaagtcaatacccagcctcaaaacttcttcaaaggacagatggactctcatgttagaggctaatgcaggtggtgattttaacttgaagccaatgctcatttatcattctaaagatcttatggcccttaagaattatgctaaatcaactttgcctgttttctataaatgcaacaaaaaaccttggatgacagcacatttattatatttacagaatggtttactggatattttaagccccatgttgagacctactgctcagacagatattcctttcaaaatattactgcccattgacaatgcacttggtcacccaatgactctgatagagatatacaaggaatttatgttgttttcatgcatttgttcattctgtagcccatggatcaattttgattttcatttcttactgttcaggaaatacattttg

SEQ ID NO: 25152 - DNA, 1229 bp, Homo sapiens
  MAP TO AP001067.1; EXPRESSED IN HELA, SIGNAL = 0.37; EST_HUMAN HIT: BF057518.1, EVALUE 0.00e+00; NT HIT: AL163300.2, EVALUE 0.00e+00
atgtccgtctgctccagcgacctgagctacagcagccgcgtctgccttcctggttcctgtgactcttgctccgactcctggcaggtggacgactgcccagagagctgctgcgagcccccctgctgcgcccccagctgctgcgccccggccccctgcctgagcctggtctgcaccccagtgagccgtgtgtccagcccctgctgcccagtgacctgtgagcccagcccctgccaatcaggctgcaccagctcctgcacgccctcgtgctgccagcagtctagctgccagctggcttgctgtgcctcctccccctgccagcaggcctgctgcgtgcccgtctgctgcaagactgtctgctgcaagcctgtgtgctgtgtgcccgtctgctgtggggattcttcatgctgccagcagtctagctgccagtcagcttgctgcacctcctccccctgccagcaggcctgctgtgtgcccatctgctgcaagcctgtctgctctgggatttcctcttcgtgctgccagcagtctagctgtgtgagctgtgtgtccagcccctgctgccaggcggtctgtgagcccagcccctgccaatcaggctgcatcagctcctgcacgccctcgtgctgccagcagtctagctgccagccggcttgctgcacctcctcctcctgccagcaggcctgctgcgtgcccgtctgctgcaagactgtctgctgcaagcctgtgtgctctgaggattcctcttcatgctgccagcagtctagctgccagccggcttgctgcacctcctctccctgccagcaggcttgctgtgtgcctgtctgctgcaagcctgtgtgctgcaagcctgtctgctctgtgcccatctgctctggggcttcctctctgtgctgccagcagtctagctgccagccagcttgctgcacctcctcccaaagccagcagggctgctgcgtgcccgtctgctgcaagcctgtgagctgtgtgcctgtttgctctggggcttcctcttcatgctgccagcaatctagctgccagccagcttgctgcaccacctcctgctgcagaccctcctcctccgtgtccctcctctgccgccccgtgtgcaggcccgcctgctgcgtgcccgtcccttcctgctgtgctcccacctcctcctgccaacccagctgctgccgcccagcctcctgcgtgtccctcctctgacgccccgtgtgctcccgcccagc

SEQ ID NO: 25153 - DNA, 702 bp, Homo sapiens
  MAP TO AC005838.1; EXPRESSED IN HELA, SIGNAL = 0.45; EST_HUMAN HIT: BF979797.1, EVALUE 0.00e+00; NT HIT: gi14771513, EVALUE 0.00e+00; SWISSPROT HIT: P87178, EVALUE 4.10e-02
ctcctgactgttagcgccctgcagcacgcccgtaattccggggaatttgcctatccctgtaggccccaaacagaaattactgatgtctggggaccttcaatttcatacccaaggaaggtcttgaatttcaaaggaaaatcaatccaacgtgcagttgatcggttgagattgagcaatcctcctatagatgtgaaacgaaccagtattccccttgaaatccagaaactgcagcccaacttgaagatctctttgcacagtcctagagcccagtccaccatacccgagcccatgattatccgctccaggttctctggcagcttaaagggtggagaccaagtgaccagttcaattgaaagggctgtgtgcagtacgggtcccctgaccagtatgcaggtcattaaaccaaaccgcatgctagctccacaagtgggcacagccaccctgtctcttaagaaagaacggcctcgcatctatacagcccttgatccttttagagtgaacgctgagttcgtgctgttgaccgtgaaggaggagaaggagcaccaggaagccaagatgaaggaatatcaggccagggagtccactggagtggttgatccaggaaaagccagcaaagctgcatggatcaggaagatcaaaggcctgcctattgataatttcacgaagcaagggaaaacagcggcccctgaacttggacaaaat

SEQ ID NO: 25154 - DNA, 858 bp, Homo sapiens
  MAP TO AC011448.1; EXPRESSED IN HELA, SIGNAL = 0.49; SWISSPROT HIT: P57059, EVALUE 1.00e-43; EST_HUMAN HIT: BI559909.1, EVALUE 0.00e+00; NT HIT: gi14767814, EVALUE 0.00e+00
atgtcgggagacaaacttctgagcgaactcggttataagctgggccgcacaattggagagggcagctactccaaggtgaaggtggccacatccaagaagtacaagggtaccgtggccatcaaggtggtggaccggcggcgagcgcccccggacttcgtcaacaagttcctgccgcgagagctgtccatcctgcggggcgtgcgacacccgcacatcgtgcacgtcttcgagttcatcgaggtgtgcaacgggaaactgtacatcgtgatggaagcggccgccaccgacctgctgcaagccgtgcagcgcaacgggcgcatccccggagttcaggcgcgcgacctctttgcgcagatcgccggcgccgtgcgctacctgcacgatcatcacctggtgcaccgcgacctcaagtgcgaaaacgtgctgctgagcccggacgagcgccgcgtcaagctcaccgacttcggcttcggccgccaggcccatggctacccagacctgagcaccacctactgcggctcagccgcctacgcgtcacccgaggtgctcctgggcatcccctacgaccccaagaagtacgatgtgtggagcatgggcgtcgtgctctacgtcatggtcaccgggtgcatgcccttcgacgactcggacatcgccggcctgccccggcgccagaaacgcggcgtgctctatcccgaaggcctcgagctgtccgagcgctgcaaggccctgatcgccgagctgctgcagttcagcccgtccgccaggccctccgcgggccaggtagcgcgcaactgctggctgcgcgccggggactccggctagaagccgggtggttccagccattcctgcagccaaggg

SEQ ID NO: 25155 - DNA, 1263 bp, Homo sapiens
  MAP TO AF146367.1; EXPRESSED IN HELA, SIGNAL = 0.77; SWISSPROT HIT: P52742, EVALUE 0.00e+00; EST_HUMAN HIT: BE885790.1, EVALUE 0.00e+00; NT HIT: U09413.1, EVALUE 2.00e-14
agccattaatttcagagcaaacagtgattctggggaaaacacccttggggaggattgatcaagaaaataatgaaacaaagcaaagcttctgtctgagtccaaactctgttgaccaccgtgaagttcaggtcttaagccaaagcatgccactcactccgcaccaggcagtgcctagtggagagaggccctacatgtgtgttgagtgtgggaagtgctttggccggagttcccacctccttcagcatcagcgtatccacactggagagaagccctatgtgtgcagtgtatgtgggaaggccttcagccagagctcagtccttagtaaacacaggagaattcacacaggtgagaagccctatgagtgtaatgagtgtggaaaagcctttagagtgagctcagatcttgctcagcatcacaagatacatacaggagagaagcctcacgaatgtcttgagtgtcggaaagccttcactcaactctcacatctcattcagcaccagcggatccacacgggagaaaggccatatgtgtgtccgttgtgtgggaaagccttcaaccatagcactgttctgcggagccaccagagggtacacactggggagaagcctcacaggtgcaatgagtgtgggaaaaccttcagtgtgaagaggacactgctgcagcaccagaggatccacaccggggagaagccctacacgtgcagcgagtgtgggaaggccttcagcgaccgctcagtcctcattcagcaccacaacgtgcacaccggggagaagccctatgagtgcagtgagtgtgggaagaccttcagccaccgctccacactgatgaatcacgagcggatccacaccgaggaaaagccctatgcatgctacgaatgtgggaaggccttcgttcagcactcacacctgatccagcaccagagagtccacactggggagaagccctatgtgtgtggtgaatgtgggcacgccttcagtgcacgccggtctctgatccagcatgagagaatccacacaggtgaaaagcccttccagtgcacagaatgtggcaaagccttcagcctgaaagcaactctgattgtgcacctgaggacccacacgggcgagaagccatatgagtgcaatagctgcgggaaggccttcagccagtactcagtgctcatccagcaccagcggatccacacaggcgagaagccctatgagtgcggggagtgtgggcgtgccttcaaccagcatggccacctaatccagcaccagaaagtgc

SEQ ID NO: 25156 - DNA, 780 bp, Homo sapiens
  MAP TO AL021366.1; EXPRESSED IN HELA, SIGNAL = 1.2; EST_HUMAN HIT: BF317075.1, EVALUE 0.00e+00; SWISSPROT HIT: P79955, EVALUE 2.00e-53; NT HIT: gi16195831, EVALUE 0.00e+00
aggaggctgcagacatcagaagcagccctgtcaagcagccaagcagaggtggcatctctgcggcaggagactgtggcccaggcagccttactgactgagcgggaagaacgtcttcatgggctagaaatggagcgccggcgactgcacaaccagctgcaggaactcaagggcaacatccgtgtattctgccgggtccgccctgtcctgccgggggagcccactccaccccctggcctcctcctgtttccctctggccctggtgggccctctgatcctccaacccgccttagcctctcccggtctgacgagcggcgtgggaccctgagtggggcaccagctcccccaactcgccatgatttttcctttgaccgggtattcccaccaggaagtggacaggatgaagtgtttgaagagattgccatgcttgtccagtcagccctggatggctatccagtatgcatctttgcctatggccagacaggcagtggcaagaccttcacaatggagggtgggcctgggggagacccccagttggaggggctgatccctcgggccctgcggcacctcttctctgtggctcaggagctgagtggtcagggctggacctacagctttgtagcaagctacgtagagatctacaatgagactgtccgggacctgctggccactggaacccggaagggtcaagggggcgagtgtgagattcgccgtgcagggccagggagtgaggagctcactgtcaccaatgctcgatatgtccctgtctcctgtgagaaagaa

SEQ ID NO: 25157 - DNA, 2436 bp, Homo sapiens
  MAP TO AC025436.2; EXPRESSED IN HELA, SIGNAL = 0.73; EST_HUMAN HIT: AA448114.1, EVALUE 0.00e+00; SWISSPROT HIT: Q9Y5F3, EVALUE 0.00e+00; NT HIT: gi14861873, EVALUE 0.00e+00
atggcgggtacgcgcagaaaatctttgcaaaacaggcaagtgggatctcttctcatttttctgtgcatatctgtgggggatgcgacaactatccgctattcagtggcagaggaaatggagagcggctcgtttgtggccaacgtagctaaggacctaggactggaggtagggaagctggctgcgcgcggggcgcggctggtttccgagggcaacaaaatgcatttccggctccaccgcaagacgggagatttgtttgtgaaggagaaactggatcgggagtcactttgtggcaaagccgacccttgtgttctgcactttgaagtagtcctggtggagccgctgcagtccttccgggccgaggtcagggtatttgatatcaatgacaatgccccagttttcctaaacaaggagccgcttttaaagattccggagagcacccctttgggttcacgttttcctctgcagagcgcccaggatctggacgtgggccttaacggtctccagaactacaccctgagtgccaatgggtatttccacctgcacacccgcttctgcagccacgggcctaaatatgctgagctggtgctgaacaaacccctggaccgagaggagcagcctgaagtcaacttgacaattacggcggtggacggcgggtccccgcctaagtctggcacagctcacatccacgtggtggttctggatgtcaacgaccacgtgccccagttctcgcgactggtgtacagagcccaggtatcagagaacagccccaatggctctttggtggccacggtgactgccgtggacctagacgagggcaccaacaaagcgataacttactctttagctcaaaacccagaagcaattctcaagacgtttcagattgaccctcaaaatggagaagttcgactaagaggacccctcgattttgaagccattgaaacatacgacattgacattcaagctacagatggtggaggcctctctgcccacagcaaagtcctggtagaagtggtggatgtgaatgacaatcctcccgaagtgatggtctcctctgtgtccagcccactccctgaagactcaccaccacagacagtagtagcccttttcactatcagagaccgggacattcgagtgggaggaaaagtcacctgcttcctcagagaagaccttccctttgtaatcaaacctacatttgggaattcttactcactggtcactgacagaagcttggatcgggaggaggtctcaggctataatatcaccattgttgccatggatactggaccacctagcttgtctgccgagactatgatagaggtgctaatatccgacgttaatgacaatcctccaatatttcgggaagattcctatatcttgactgttcgagaaaacaacagtcctgcggtttttattggcaaagtccatgctgaggatcttgatttgggtgagaatgcccaaataacatattctctgttgcctccaaaaaacggagatctttcagtctttgcttacatatccataaattcaggcaatgggaagctctacgcgctgagaaccatggattatgaggccattcaagattttcaatttgtggtaaaggcaactgatgggggcttcctgtcactgagtagccaagttactgtcagagtggttgtcctagatgacaatgacaatcgtccaatgatcttatacccactgcagaacggcaccttgccctgcaatgacctggtgcccaggtctgcagaggcaggctacctagtgaccaaagtggtggctgtggatggtgactcaggtcagaattcttggctttcatatcatctacttaaggccactgaccttgggttattttctgttcaaagacaaaatggagaaatccatacattaaggcagatatctgagagagaccccatgatgcagaaattgatcattcttgttcaggatcacggccaaccagctctttccactactgtctcactcaacatcctgctggtagatggcttttcagagccctacctgcagttccaggatccaaccaagcattctagaaaggtaaatccatccactaaatatttggtcatttctctggtcatcctttcctttctctttctcctctctgtcatagtgatcttcattacacatgtctaccaaaagattaaatatagagaaaagttcacaattcaagagcatttctatgatgactgtaatttctctaacaacctggtacaaggacaaggcaatggatccttatctcggccttgtccatatgaaatgtgttcagccactggcactggtaatagtgagtttcgctttcttaagcgttttatgcccaacttccctttccctcatgccactggggagataaaaatggaggctggctccagtttgcccccaaattctgataggaataagtctcagagattagagggccatgaccag

SEQ ID NO: 25158 - DNA, 654 bp, Homo sapiens
  MAP TO AC008888.4; EXPRESSED IN HELA, SIGNAL = 0.97; NT HIT: gi8923375, EVALUE 2.00e-75; SWISSPROT HIT: P14728, EVALUE 7.60e-01; EST_HUMAN HIT: BE222437.1, EVALUE 0.00e+00
ccagacggcctccttgatgagccgggccaggcggcccagcagtcgtggcaggtggcccagctccagctcacgggcggaatgctgcacgcacagcgccagcagcgtggcgggcccgaggggcggcaggtctcccgagccggcggctgcggcgcgcacgatctcgcccagcagcgcctcctcctcgcgcggccggaagcgcaggactggctcacggccgtccaggtaggcggccagtgcctcgccgcgctcctgcaggccgcggccgcacaggcgacaggagaaggcccagccagggcctggcggcgtggccccggggcgcgcgggcagccacggcggcctcgcaggccccgagcccccagtgcgggggtccttgtacatgaacaggaagtgctcgcccagccccaggaggtcgcccgggtgcagctcagcctcccgcagcaggaggcacccgttgtgcgtgactggggcgccccgggacgggcgcaccatggccgggtgctcagggcccgcgcgcactgtgcagtgacgcggcaggatgtccggggcgttgaggaaggtgtccacatagggagccggggaccccccgcggccagacgagttcccacctcgcccaaacacgtgctgctctcgcgtcatcacatacaccacaaagtc

SEQ ID NO: 25159 - DNA, 771 bp, Homo sapiens
  MAP TO AL121953.10; EXPRESSED IN HELA, SIGNAL = 0.86; NT HIT: U73123.1, EVALUE 1.20e-02; SWISSPROT HIT: Q01656, EVALUE 4.00e-24; EST_HUMAN HIT: AA723541.1, EVALUE 8.00e-48
ctgatagattgagaagtgcaaagctcctacctgagagagaatatgctgtacatgatgaacccaattggatagggattctactagatcaatcacttggatgccttcaaaatcagggttttcctcaaagctatttcgcccaccttctgcctcttcctcctcctctccttcctcttcaccaaactgataaaatcctagaggactgacgtgggttcctgctgaaattcgggcaatttgtgctcgtaaataattactctcatttcctgggaaaggtgggtagcttatgatgggagcatccaatcgcccagtgaaaaatttcttgatttttcttgcaataacaatttgtgcaggtataactggtggtaacttcacccatggtcttcctggttcattgcaaacaaaatagacatatttgttggcacctgttctactttcttcttttggtatagcctgtggggccttgtaaaaggactttggtaattcatcttcctcatcttcatgagcttcactttctccattgtccctctcttcagctacatcttcctcttccacttcctcttcatcttccccctcacgaaattccacttcagctacaatataattcatttccagacccaagatctttccccagaagcggcatctttggattgggtgggtatcagtaagctgcttgagggcaagaaatatgcggtatgtctcatctgtgcccaaaccaactccagcttgttcaaaataaaaagctgactccattacatttggaagagcgttttctgc

SEQ ID NO: 25160 - DNA, 552 bp, Homo sapiens
  MAP TO AL136125.2; EXPRESSED IN HELA, SIGNAL = 0.39; EST_HUMAN HIT: BI546339.1, EVALUE 0.00e+00; SWISSPROT HIT: Q09749, EVALUE 4.00e-06; NT HIT: D49835.1, EVALUE 9.00e-03
gttgcataccctgtcctgagggcgcggcacggagtgcatgcgggccgctgccatgacgaccgccatcttggagcgcctgagcaccctgtcggtcagcgggcagcagctgcgccgcctgcccaagatcctggaggatgggcttcccaagatgccttgcactgtcccagaaacggatgtgccccagctcttccgggagccttacatccgcaccggctaccgccccacggggcacgagtggcgctactacttcttcagcctctttcagaaacacaacgaggtggtcaacgtctggacccatttactggcagccctggccgtcctcttgcgattctgggcctttgccgaggctgaggccttgccatgggcgtctacccactccctgcctctgctcctcttcatcctgtcgtcaatcacttacctcacctgcagccttctggcccacctgctgcagtccaagtcagagctctcccactacaccttctactttgtggactatgttggcgtgagcgtttaccaatatggcagtgctttggctcatttcttctacagctc

SEQ ID NO: 25161 - DNA, 755 bp, Homo sapiens
  MAP TO AL009182.13; EXPRESSED IN HELA, SIGNAL = 0.41; EST_HUMAN HIT: AW003346.1, EVALUE 0.00e+00; SWISSPROT HIT: Q12872, EVALUE 7.90e-02
tccagggagggaccggccgtctgaccccctccttctctgcccgcagccagccgcgctccaagtcggagatgctgtcgcggaagaacttcgccacgggggtgccggccgtttccatggacgagctggcggccttcgctgactcctacggccagcggccccgccgggcagacggcaacagtcacgaggcgcggggcgggagccgcttcgagcgctcggagtcgcgggcgcacagcggcttctaccaggacgactccttggaggagtactacggtcagcgcagccgcagccgcgagcccctgaccgatgctgaccgcggctgggccttcagccccgcgcgccgcagacccgccgaggacgcgcacctgccgcggctggtgagccgcacgccaggcaccgcacccaaatacgaccactcgtacctgggcagcgcgcgggagcgccaggcgcggcccgagggcgccagccgcggtggcagcctggagacgccatccaagcggagcgcgcagctcggcccgcgcagcgcctcctactacgcttggtcgccgcccggcacctacaaggccggctcgtcgcaggacgaccaggaggacgcgtccgacgacgcgctgccgccctacagcgagctggagctgacccgcggcccgtcctaccgcggccgcgacctgccctaccacagcaactcggagaagaagaggaaaaaggagcccgccaagaaaaccgtgagactgcgtctgcctcccctcctccgaggggac

SEQ ID NO: 25162 - DNA, 605 bp, Homo sapiens
  MAP TO AC007868.2; EXPRESSED IN HELA, SIGNAL = 0.8; SWISSPROT HIT: O96390, EVALUE 1.00e-03; EST_HUMAN HIT: AW499894.1, EVALUE 0.00e+00; NT HIT: gi14739350, EVALUE 0.00e+00
ccagagaagggtcgggaggtggccaaggagctgggcatcccctactatgagaccagcgtggtggcccagttcggcatcaaggacgtctttgacaacgccatccgagctgcactcatctcccgccgccacctgcagttctggaagtcccacctccgcaatgtgcagcggcctctgctgcaggcacccttcctaccccccaagccaccgcccccgatcatcgtggtgcccgaccctccctccagcagcgaggagtgccccgcccacctcctggaggacccgctctgcgcggacgtcatcctggtgctgcaggagcgggtgcgcatctttgcccacaagatctacctctccacctcctcctccaagttctatgacctgttcctcatggacctgagtgagggggagctggggggcccctcggagccagggggcacccacccagaggaccaccagggccactctgatcaacaccaccaccatcaccaccaccaccatgggcgagacttcctgctccgagcagccagctttgacgtgtgcgagagcgtggatgaggctgggggctccggtcctgctggcctccgtgcttccaccagcgacgggatcttacg

SEQ ID NO: 25163 - DNA, 465 bp, Homo sapiens
  MAP TO D87022.1; EXPRESSED IN HELA, SIGNAL = 0.81; SWISSPROT HIT: P04211, EVALUE 5.00e-28; EST_HUMAN HIT: AV709950.1, EVALUE 0.00e+00; NT HIT: U03637.1, EVALUE 0.00e+00
atggcctggatgatgcttctcctcggactccttgcttatggatcaggtcaggggaagggactctatccctgggggaccacagaaaacagggtccaggttactctcatcctcatgatcataactgtgtctctcctgttcgttttaggagtggattctcagactgtggtgacccaggagccatcgttctcagtgtcccctggagggacagtcacactcacttgtggcttgagctctggctcagtctctactagttactaccccagctggtaccagcagaccccaggccaggctccacgcacgctcatctacagcacaaacactcgctcttctggggtccctgatcgcttctctggctccatccttgggaacaaagctgccctcaccatcacgggggcccaggcagatgatgaatctgattattactgtgtgctgtatatgggtagtggcatttccacagtgatttaa

SEQ ID NO: 25164 - DNA, 543 bp, Homo sapiens
  MAP TO AL031228.1; EXPRESSED IN HELA, SIGNAL = 0.88; SWISSPROT HIT: Q9N293, EVALUE 2.00e-07; NT HIT: gi14782801, EVALUE 0.00e+00; EST_HUMAN HIT: BI764671.1, EVALUE 0.00e+00
ggagtcctggaaggcggcctgcaagatatccccctgggctgctgactccgaggccaggtcactcccctgggaaccccacacggggtgctgtgcgttcggctctcccagcaagaatagcgtctgtaccctgagcccccgggcctcgcgcagcccgccccacgaagcccgaatggcgtttctctggttcaggttctccggagccgtgcacaccaggatgagcaggaagggaggggccccgggaccactgcaagcttcctggttggggatcaagaggcggggcagggccaggggcggccccggtgaggcgggggctgggagcagggaggctagtgagaggctcagcagctcctcccccaaccccgaaggcccgaagagggtccagacgatcaccagcagcaaagcggcgagaaggaggcgccggaagagcctgagctgcatggtgcggcgtactccgaggggatccgtaagagcgaagggcggagactagctccccgggcctgggtcacggccggggacttaaccgaccacgcccgggatgcggag

SEQ ID NO: 25165 - DNA, 1489 bp, Homo sapiens
  MAP TO AC005754.1; EXPRESSED IN HELA, SIGNAL = 0.46; SWISSPROT HIT: Q9Y5E5, EVALUE 0.00e+00; EST_HUMAN HIT: BG722685.1, EVALUE 0.00e+00; NT HIT: gi15295801, EVALUE 0.00e+00
tgaacttggggttttccttaacttccctcccggtgtcctgaaccaagagattaggaaatattggcttcaggaacttgaactcaccagtcccagagtctcctgtcagacacacctcgtactggtagctctgggacagggtcccggtgccgcttacgtccaccagatgccctggaaaggggccctcgggcaccgagcagcgacccaccgaggccgccctgctcctcctgcacagccgcaccgccacgaacaggagcaccgagaagaggaagagcgacgacaccgaggccaacgccaccaccaggtagacggtgagagagtcggcctgggcctgggccggggccgcctcagggagaggcaggtagggctgggagaagccatccaccaggagcacgtgcagcgtggcggtggccgagcgcggaggctcgccattgtccttgacaagcaccacgagcctgtgcttggctgcgtcgcgctcgctcagcagcctggcggtgcgcacctcgccattgtgcgcccacacgccgaacagcccaggctccgtggccttgagcagctggtacgacagccaggcgttctggcccgagtcgccgtccaccgccaccaccttggtcaccaggtagcccggctcggccgcccggggcaccagctcggtgcagggcgcggagccattctgcagcgggtacagcacgaagggcgagttgtcgttggtgtccagcaccagcacgcgcaccagcgcctcgctgctcaaagccggagaaccgcggtctgaggcgcccacgcggaactcgaacgcctgcagggcctcgtagtccagcgacctgagggcgaacaggtggccgttgtctgcgttgatggagaccagggaggcgaggggcaggtgcgggtcctggggcggcagcagcgagtaggtgacctgggcgttggtgcccgagtctctgtctgtggcgctgacactgccgatgtgcagggcggggctgttgttctcgcggacgaacagggtgtaggaggtttgggtgaaggcgggggcgttgtcattgacgtcggagacctgcacggttatgttctgctgggttttcagcctgggtgtccccaagtcagtgacggcgatggtgatgttgtactcagcgctggtctctcggtccagtggtctctctgttaccagggtgtaaaaattcttcaaagttggttttagaataaacggtagattatctggaatagagcaaatcatctttccattttctccggaatctctatctcgaattcggaagatagagactaccgtctcaggagcattttctgggatggagctggtgagtgaagatatgataagttctgggggattgtcattcacatccaccacctctatgactacagtgccttttccagaaaggcctcctccatctgtggcctcaatttctacatggtaagatttaattttttcgaaatccaatttttttttcaacagtatttctcccgtgacttcatttat

SEQ ID NO: 25166 - DNA, 719 bp, Homo sapiens
  MAP TO AF176681.1; EXPRESSED IN HELA, SIGNAL = 0.63; SWISSPROT HIT: P52742, EVALUE 1.00e-101; EST_HUMAN HIT: BG117671.1, EVALUE 0.00e+00; NT HIT: gi15299827, EVALUE 0.00e+00
agctcaaacctcatcaaacaccacaggactcacacaggagagaagccttttgagtgtggcgagtgtgggaaagccttcagccagagtgcacacctgaggaagcaccagagggtccacactggagagaagccttatgagtgtaatgattgtggcaagcccttcagtcgggtctccaacctcattaagcaccacagggttcacactggagagaagccctataagtgcagtgactgtgggaaagcatttagtcagagctccagccttattcagcatcggagaattcacactggagaaaagcctcacgtgtgtaatgtatgtggaaaagcctttagttatagctcagtgctccgaaagcaccagatcatccacacgggagagaagccgtacagatgcagtgtctgtgggaaggccttcagccacagctcagccctcattcagcaccagggcgtgcacacaggcgacaagccctacgcctgccacgagtgtgggaagacctttggtcgcagctccaacctcatccttcaccagcgagtccacactggagagaagccctatgaatgtactgaatgtggaaaaaccttcagccagagctcaaccctcattcagcatcagaggattcataatgggctgaagccccatgaatgtaaccagtgtggtaaagccttcaaccgaagctcaaatctcattcaccaccagaaagttcatactgggggaaaaac

SEQ ID NO: 25167 - DNA, 669 bp, Homo sapiens
  MAP TO AC010486.5; EXPRESSED IN HELA, SIGNAL =   2; SWISSPROT HIT: P46777, EVALUE 8.00e-88; EST_HUMAN HIT: BI262158.1, EVALUE 0.00e+00; NT HIT: gi14591908, EVALUE 0.00e+00
catctgagctctgaggaagcttgccttcttttgagctaccccatctttcttctgagcaagggacattttgggacggttccacctcttctttttaacttctttcttggggttcttttcatagactggattctctcgtatagcagcataagctttcttatacatctcctccttcatgtctggagttacactattctttatgtattgagagaactctttcttgtaagcatcttccattaagtagtgtatgtactctgcaacattctggtccatgatgtgcttcctctgtacttctgcattaaattccttgctttcagaatcataaccagggaattgtttggtactgtgagggacagacaagcttccattgacagctcccttcagggcaccaaaaactttattgccagtggtagttctggcaaggcctgtgtccaaatagcaggtaaaggcacctggctggccatcaatgctttccacattgtattcattgccagtcacctccacttggccttcatagatcttgtccacgccaaatctattgagaagcctgtgggccagcagcacgcctgtccaatacactgcagcataatttgtcaggccaacttcacaccatattttggcagtttgtatgcatatgatgcgcagactatcatatccccgtctatatgggca

SEQ ID NO: 25168 - DNA, 948 bp, Homo sapiens
  MAP TO AC006457.3; EXPRESSED IN HELA, SIGNAL = 0.65; EST_HUMAN HIT: AU143734.1, EVALUE 1.00e-100; SWISSPROT HIT: Q05481, EVALUE 0.00e+00; NT HIT: gi14745941, EVALUE 0.00e+00
tttcacacctaaatcaacatcaggtaattcatactagggagaagtcctacaaatgcaaagaatgtggcaaatcctttaactgctcctcaaaccatactacacataaaataattcatactggagagaaaccatatagatgtgaggaatgtggcaaagcctttagctggtccgcaaacctcactagacataagagaactcatactggagagaaaccctacacatgtgaagaatgtggccaagcctttaggcgctcctcagcacttactaaccacaagagaattcatactggagggagaccctacaaatgtgaagaatgtggcaaagcctttagcgtatcctcaaccctcactgaccacaagagaattcatactggagagaaaccctgcaggtgtgaggaatgtggcaaagcctttagctggtcctcaaaccttagtagacataagagaattcatactagagagaaaccctatgcctgtgaagaatgtggccaagcctttagcttatcctcgaaccttactagacataagagaattcatactggagagaaaccctacacatgtgaagaatgtggccaagactttaggcgctcctcagcacttactatccacaagagaattcatactggagagagaccctacaaatgtgaagagtgtggcaaagtctttagcttatcctcaaccctcactgaccacaagagaattcatactggagagagaccctacaaatgtgaagaatgtggcaaagcctttagcttatcctcaaccctcactgaccacaagagaattcacactggagagagaccctacacatgtgaagaatgtggcaaagcctttaattgctcctcaacccttatgcaacataagagaattcatactggagagaaaccctacaaatgtgaagaatgtgaccaagcttataagtggcattcaagtcttgctaaacataaga

SEQ ID NO: 25169 - DNA, 499 bp, Homo sapiens
  MAP TO Z68869.1; EXPRESSED IN HELA, SIGNAL = 0.59; NT HIT: U81425.1, EVALUE 4.70e-01; SWISSPROT HIT: P30373, EVALUE 2.70e-02
cgcagtctgctgtccggagtctgccatttggtttacgtattgcgtaattttctggcatttcaccgcagtccgctgtccggagtctgccgtttggtttacgtattgcgtaattttctggcatttcaccgcagtccgctgtccggagtctgccgtttggtttacgtattgcataattttctggcatttcaccgcagtccgctgtccggagtctgccgtttggtttatgtattgcgtaattttctggcatttcaccgcagtccgctgtccggagtctgccgtttggtttacgtattgcgtaattttctggcatttcaccgcagtctgctgtccgcagtctgccgtttggtttacgtattgcgtaattttctggcatttcaccgcagtccgctgtccggagtctgccgtttggtttatgtattgcgtaattttctggcatttcaccgcagtccgctgtccggagtctgccgtttggtttatgtattgcgtaattttctggcat

SEQ ID NO: 25170 - DNA, 460 bp, Homo sapiens
  MAP TO AL031781.1; EXPRESSED IN HELA, SIGNAL = 1.1; SWISSPROT HIT: O00712, EVALUE 6.10e-01; NT HIT: AB067807.1, EVALUE 0.00e+00; EST_HUMAN HIT: AV657509.1, EVALUE 0.00e+00
taaaacaaaatttagttttcggtcttccctaatgcaaacttgtcttgcctctctaaaactgataaaatcatttcaaaatctgagggagcaaaaatatttataaagagaatgttgttaaccccatggggagaagaacttacctaatacaccactaggttcaataggatactcaaggattgatgtagctggtgccaatgtgtaggggtactcatagggtgtatagattaaaccagcttcgggccctggaggaactattgcagcagttgggtgaggagttccgtttggcatgacagcggtctgtatttgtctgatcaaaggcattatggtagggccagctggcgtaggagtacgcagggcagctggtgggagaaccggcgcaggcccagtaatgatccttggagcagcctgggctgttgctgcaagagaaaaggcaagggctgctacagtaagcaaagaaatt

SEQ ID NO: 25171 - DNA, 529 bp, Homo sapiens
  MAP TO AC009948.2; EXPRESSED IN HELA, SIGNAL = 0.21; SWISSPROT HIT: Q05623, EVALUE 1.00e-25; NT HIT: gi4507720, EVALUE 0.00e+00; EST_HUMAN HIT: F00495.1, EVALUE 1.00e-85
ggtgttccagtggaaactgttgatgccgtgaaagctgctgaacctccttccccaccaggaaaggttacactcactgatgtgtcccagaccagtgcatcacttatgtgggagaaacctgaacatgatggcggtagcagagtcctggggtacgttgttgaaatgcagcccaaaggaactgaaaaatggagcattgtggctgaatccaaagtctgtaatgcagttgttactggtttgagttctggacaagaatatcagttccgtgtcaaggcttataatgagaaaggaaaaagcgatccaagagtgttgggtgttcctgtcatagccaaggacttgactatacagcctagtttaaagttaccatttaacacatatagtatccaagctggagaagatcttaaaatagaaattccagttataggccgaccaagacctaacatttcttgggtcaaagatggtgagcctcttaaacagacaacaagagtaaacgttgaagaaacagctacctcaactgttttgcacattaaagaag

SEQ ID NO: 25172 - DNA, 565 bp, Homo sapiens
  MAP TO AL163300.2; EXPRESSED IN HELA, SIGNAL = 0.34; EST_HUMAN HIT: BF058205.1, EVALUE 2.00e-63; SWISSPROT HIT: Q52914, EVALUE 8.10e-01; NT HIT: AL163300.2, EVALUE 1.00e-100
ctcctccccaccccagcatggccgcgtccaccatgtctgtctgctccagcgcttactccgactcctggcaggtggacgactgcccagagagctgctgtgagcccccctgcagcgcccccagctgctgcgccccggccccctccctgagcctggtctgcaccccagtgagctgtgtgtccagcccctgctgccaggcggcctgtgagcccagcgcctgccaatcaggctgcaccagctcctgcacgccgtcatgctgccagcagtctagctgccagccggcttgctgcacctcctccccctgccagcaggcctgctgtgtgcctgtctgctgcaagactgtctgctgcaagcctgtgtgctgtgtgcctgtctgctgtggggctgcttcttcgtgctgccggcagtctagctgccagccagcttgctgtgcctcttcctcctgccagccggcctgctgtgtgcccgtctgctgcaagcctgtgtgctgtgtgtccacctgctctgaggattcctcttcatgctgccagcagtctagctgccagccagcttgctgcacctcctcctc

SEQ ID NO: 25173 - DNA, 609 bp, Homo sapiens
  MAP TO AC009948.2; EXPRESSED IN HELA, SIGNAL = 0.5; EST_HUMAN HIT: AA196192.1, EVALUE 0.00e+00; SWISSPROT HIT: Q00872, EVALUE 5.00e-24; NT HIT: X92412.1, EVALUE 0.00e+00
aatatcctgattatgaacttgatgaaagataccaagaaggtatctttgtaaggcaaggtggcgtcatcagacttaccataccaatcaaaggaaaaccattcccaatatgtaaatggaccaaggaaggccaggatattagtaagcgtgccatgattgcaacatctgaaacacacactgagcttgtgatcaaagaagcagacaggggtgattctggcacttatgacctggttctggaaaataaatgtggcaagaaggctgtctacatcaaggtcagggtgataggaagtcccaacagtccagaagggccactggaatatgatgacatccaagtccgctctgtgagggtcagctggagacctcctgctgatgatggtggtgctgacatcttaggctacatcctcgagagacgagaagtgcctaaagccgcctggtataccattgattccagagtccgaggtacatctctggtggtaaaaggcctcaaagagaatgtagaataccatttccgtgtttcagcagaaaaccagtttggcataagcaaacccttgaaatctgaggaaccagtcacaccaaaaacaccattgagtaagtgccctttcaaccacaaaa

SEQ ID NO: 25174 - DNA, 1262 bp, Homo sapiens
  MAP TO AC005926.1; EXPRESSED IN HELA, SIGNAL = 0.54; EST_HUMAN HIT: BG490066.1, EVALUE 0.00e+00; SWISSPROT HIT: P51843, EVALUE 0.00e+00; NT HIT: U31929.1, EVALUE 0.00e+00
ctgcccgcgcccctagataggcactgcccgatgcttttgtgagctgggaaaagccggcgcctaaggccagtacccttacccgggttaaagagcacggtccccttgaggtaggcgtactccttggtactgatgttcagactccagcatttggaaagaaagcacttgatggcttggacctgggaggcggagggcaccttcctggcctccgccggcggtgccaaatggtgctgcagcgtgggcacgggcagtggctcgttgcccccggtctcccgccgcctggtggtgaggatcttctgcagcatgctgggctccgagacttccacagtctcgaactgcaagcggtcctgggccagctcaagcatgagcagggacgcccagcagttgcgcaccagcaccagctgctggtccaggggcagcacctggaagcagggcaagtacttgacgaagcgcagcgtcttcaacaggcccgctgaggctgcctcgcagaccacctgtggactcttgagcgccaccggccgcagcgcaccagaggaggtgtcccaccagggggccctcggccgctcctccggagccgcctgcgcttgatttgtgctcgtgggcacgcagtagagggtgctgccctgctgcgggtggtcttcaccgcaaaagcagcagcggtacagaagcgccgtggcccgcccgcctggtagcgcctctttaccccctggcctctgcgcgaagtaggagcggtcccaccacgcgccccctggccgtgcctcgggcgctgccggagccacgtgcgtttgctttgagctagtgagcaagctgtagaggatgctgccctgccgcgggtggtcttcaccacaaaagcagcagcggtacaggagtgccacgggccgcccacccggaagccccgctctgcccaccccgggatcagagccgcacgaacagccccagcacggacccagcgtcgcctcgggcgccttcggtgccgcgtacgtttgctttgcgctcgtcagcatgctgtagaggatgctgccctgccgtgggtggtctttaccgcaaaagcagcagcggtacaggagcgccacgttccgcccgcccagcagcccctctctgcccaccccgggctcatcgccgcacgaacagccccagcactgatccaccagccgcgtctctggagcctcaggagccgcgcgcgtttgcttcgcgctcataagcatgttgtagaggatgctgccctgccactggtggttctcgcccgccatggcccgcggcgcccg

SEQ ID NO: 25175 - DNA, 592 bp, Homo sapiens
  MAP TO AC004736.1; EXPRESSED IN HELA, SIGNAL = 0.28; EST_HUMAN HIT: H19662.1, EVALUE 0.00e+00; SWISSPROT HIT: P48547, EVALUE 2.00e-83; NT HIT: gi13640821, EVALUE 0.00e+00
aggagtaatacatcccgaaattgttcacgatgacgggcacgggcatggcgatggtgagcacgcccgccagcgcacacagagcccccaccagcatgccggaccacgtctgcgggtacatgtctccatagcccagggtcgtcatggtgaccacggcccaccagaagccgatggggatgttcttaaagtgcgtgtgctcactggcgctggggtcattgggctgtgcccctatcctctcggcgtagtagatcatggtggcgaagatcagcacgcccaaggccaggaagatgatgagcagcaggaactcgttggtgctggctcggagcgtgtggcccaggacccgcaggcccacaaagtggcgggtcagcttaaagatgcgcaagatgcgcacgaagcggacgacgcgcaggaagcccagcacgtccttggctgccttggaggacaggccgctcagccccacctccaggtagaagggcaggatggccacaaagtcaatgatgttgagcgagttcttgatgaactctaccttgttggggcagaagatgacacgcatgaggaactcgaaggtgaaccagaccacacagacgccctcgat

SEQ ID NO: 25176 - DNA, 559 bp, Homo sapiens
  MAP TO AC009516.17; EXPRESSED IN HELA, SIGNAL = 0.26; EST_HUMAN HIT: BI831230.1, EVALUE 0.00e+00; SWISSPROT HIT: Q9Z5X5, EVALUE 1.10e+00
gtgcagctgcccaagaagccactggtcccagaaatgcggccagcctgcaagccgggccgtgtgccacacccaccatccacatgtggcagctcagcactccagggccaacgccgaaacaagaggcaccctcagccctttggccactttctggatttcctaactgagagccaggtcctggacagcctggagacagtggtggagaaggcgactgagcgcatggctgccatgaagacggaggctggggtgccgcttgtggaggtgcaggacccagtggaggtgccaagtggtagacggcgggcacatgcccggcccagcctcagcaccgtacaccggcaccgtgtacggccgaccctctgcactggacaccccaacaactacccatccagctccagctccatgtccaactgccatagcagcctcatggccggctgtctgggctcccacagccgggacagtgacctaggtgcccaaggctcattgccacctgtgagggacaaactcctgctggagaagaacctcaagcggctgctacagctggagagggaaggggtgagagcca

SEQ ID NO: 25177 - DNA, 1426 bp, Homo sapiens
  MAP TO AC002085.2; EXPRESSED IN HELA, SIGNAL = 1.1; SWISSPROT HIT: P47883, EVALUE 0.00e+00; NT HIT: U04680.1, EVALUE 0.00e+00; EST_HUMAN HIT: BG193339.1, EVALUE 8.10e+00
atggatctggggaactcagggaatgattcagttgtgaccaagtttgtcctgctgggcctcacagagactgcagctctacagcccatcctctttgtcatcttccttcttgcttacgtcactaccattggaggcaccctcagcatcctggcggccatccttatggaaaccaaactccacagccccatgtacttcttcctggggaacttgtccctgccagatgtggggtgtgtcagtgtcactgtccctgccatgctgagccatttcatatccaacgacagaagcattccctataaggcctgcctctccgagctcttcttcttccacctcctggctggggcagactgcttcttgctgaccatcatggcctatgaccgctatctggccatctgccagtccctcacctacagcagccgcatgagctggggaatccagcaagccctggtgggcatgtcatgtgtcttttccttcaccaatgcactgacccaaactgttgccctgtctcctcttaacttctgtggccccaatgtgatcaatcacttctactgtgacctcccacagcccttccagctctcctgcgccagtgttcatctcaatgggcagttgctgtttgtagcagcagctttcatgggtgtggcccccttggtcctcatcactgtgtcctatgcccatgtggcagctgcagtcctgcgaatccgctctgcagagggcaaaaagaaagccttctccacgtgtagttcccacctcactgtggtgggcatcttctatgggacgggcgtcttcagctacacaaggctgggttcagtggagtcttcggacaaggacaagggcattggcatcctcaacactgtcatcagccccatgctgaacccactcatctactggacatctctgctggacgtcgggtgcatcagtcactgttcctccgatgctggcgtgtctccaggcccaccagtgcagagttccctatgctgcctgcagttcacagctcttctttccccacctcctggctggggtggactgtcacctcttaatagccatggcctatgaccgctacctggctatctgtcagcttctcaccaacagcactcgcatgagctgtgaagtccagggtgccctggtgggaatttgctgcactgtctccttcatcaatgctctgactcacacagtggctgtgtctgcgcttgacttctgtggccctaatgtggtcaaccacttctactgtgacctcccacctcttttccagctctcttgctccagcatccacctcaatgggcagctgctgcttgtgggggccaccttcataggagtgatccccatgatctttatctcagtgtcctatgcccacgtcacagctgcaatattacaaatccgctcagctgaggggaggaagaaggctttctccacatgtggctcccacctcactgtg

SEQ ID NO: 25178 - DNA, 669 bp, Homo sapiens
  MAP TO AC009470.2; EXPRESSED IN HELA, SIGNAL = 0.83; SWISSPROT HIT: Q9Y6W5, EVALUE 4.00e-02; EST_HUMAN HIT: BI830908.1, EVALUE 8.00e-60
gcctgtgcagcttctccaggtcccatggcccctgcagctccttggcccttgtcttcctccattgtcgccttcggaggttgttgaagctggggctgctcccctggctctggccctgcacttctccctcatcggaggcttcctctccagaaatctgcccctttctctgacaaccagccctccttctgcagggagtcctgtgctctccctcctcagcctcctctgtggcctctgaaaattgctcctcctctgagatcgaccccctcctggggcgctggggcagcaccccagaactcagacccctctcggcctcctcagcacccaggctttgcagctggacctgcttgtcggacaccgatcctgatcctggcctcctcccaggcagctggagaccactggggggctctgatcctagctcccctttgccagtagggatggagacaccgccccaggctcccagctgctgtctcgccttcaggttttgcgcctctgtcttccagcagcagccatgggcctctgggaggttggccgtggacttgcgcctggactgacgctgggagaacgaggagggcatgggcagggcttggtggccaggggttggggagcttggctgaagcacagcccggacatctgtggcgatgctctcccaggcccactggaaggggaaggagg

SEQ ID NO: 25179 - DNA, 556 bp, Homo sapiens
  MAP TO AL022101.1; EXPRESSED IN HELA, SIGNAL = 0.63; EST_HUMAN HIT: AA448412.1, EVALUE 5.00e-42; NT HIT: gi13637310, EVALUE 1.00e-44; SWISSPROT HIT: O60809, EVALUE 4.00e-97
gtacctcaagaaccccttgggggcctttatattcagtgatgcttacctaactgatcgggacatggagtgtctgtctcagtacccaagcctcagtcagctaaaggagctgcgtctgattcatatcctaatgtggaccacccatcttgagccccttggagttctgctggagaaagttgctgctactctcaagaccctcgtcttaaaggactgtcggatccaggacccccaactcagggtcctcctgcctgccctgagccactgttcccagctcaccaccttcaactttcatggaaatgagacctccatgaatgctctgaaagacctgctgcgtcacacaggcgggctgagcaagttaggcctggagttgtatcctgcccctctggagagtcttgactacaagggtcatgtcaattgggagatcctcaccccaattcgggctgagctgatgcgtacactcagggaagtcaggcagcccaagaggatcttctttggtcccgtcccttgccctaactgtggctcatggccatctgagaaagtggacttccatctttgctcc

SEQ ID NO: 25180 - DNA, 766 bp, Homo sapiens
  MAP TO AL118557.2; EXPRESSED IN HELA, SIGNAL = 0.69; NT HIT: gi14753591, EVALUE 0.00e+00; EST_HUMAN HIT: AU140510.1, EVALUE 0.00e+00; SWISSPROT HIT: Q14112, EVALUE 1.00e-115
cctcggtgttggaacctatgttgtcttccagtcccacctcatacgtccctcgacttaagggtgtagtgtgacctgaagcagggtaacttcgaagaacaatttcttcttcaggatgagctgggggaacatccatttccgaaggcactggccctccatctgggtagggctggatgcttccgttttcggggtacggtggtggggtttcccaggaaggagccagtgaatctctgtctacctctggtggagctgggcttctggtctctctctcatcccagggctcaacttggccttttaaatctgggccccctacctctcccagagatgttccttctttggtgtgaggatccaaggtggaagattctgtttcaggatagaatggccaataagtaggtgttggatgcaagggggaggacagatcagaatctggaggggagatcctaccctctaaaggctttgtatccactttggattggaaggaaacatcaatgctgctgtggccattcaatgcctcctctggttcacccggaaggtattcagcttcctcctcattcacatcatagtaatccaaattgtcctcattatagtcactttccagggctgtagcatggctgaaggaacgtcccaggggaacagaagagtgggcagcggaaaggtctccaactgcagctggcctgacattgtccaacggggaagtgctgccgatatggaaagcccacactccagggatccccaggttgcttagtctaaatcccccggcaacagtcat

SEQ ID NO: 25181 - DNA, 688 bp, Homo sapiens
  MAP TO AL163201.2; EXPRESSED IN HELA, SIGNAL = 0.24; NT HIT: gi16166559, EVALUE 0.00e+00; EST_HUMAN HIT: BF994092.1, EVALUE 0.00e+00; SWISSPROT HIT: O62771, EVALUE 4.10e+00
aaattttctcttagtaatagctggtttacccatgccagttttttggagtgactgagatgtaagttgttggcatgatgtttccagcagaggaactaagagctgaagggtaattacgcagcatgtcatgcgaaggcaagtctgaagaaggtgttggggaggaagacacatctgccttgcttatgtctgctgataatgaaaatgatgactctgtctcagatgataactttatagatttgcctccttggtatgaaacatctttcacacaaccctcaattgtaggagtcatttcagagtccatcaatccagtagaaagttcagaatcttctttctgttccttttctccttgtagcctttctataaccaactgttcctcaggacataatgaagtgctttcctcatgtggggacactaaggtttctagtggaagagtgacagattcaatgacaaattttggaggccttgattcttctttggataccactgttttaggttcctctaacaactgcagttgctcttgctgcacagtgatctggtgtgtaacgacttcaatgttttctgtcacttccattttatcttcaatttgatcttcgccacaaatatgcttcacttcagaagacattttcatttcttcactatcagcctcattagaaatctgtttttccaattcggtattcactgtatgttggga

SEQ ID NO: 25182 - DNA, 1087 bp, Homo sapiens
  MAP TO AL137039.1; EXPRESSED IN HELA, SIGNAL = 0.69; NT HIT: gi14770815, EVALUE 0.00e+00; EST_HUMAN HIT: BI019643.1, EVALUE 0.00e+00; SWISSPROT HIT: P02976, EVALUE 1.60e-01
aatgacagtctttcccctatcttccttctttattcttatcttctacctttccctcccaaactctttccccgacataacagaaaacatgaaggaattaaaggaggccaggccgcgcaaagataacaggcgtccagatctggaaatctataagcctggcctttctcggctaaggaacaagcccaaaatcaaggaaccccctgggagtgaggaattcaaagatgaaattgttaatgaccgagattgctctgctgttgaaaatggtacacagcccgttaaagatgtctgcaaggaactgaacaaccaagagcagaatggtcctatagacccagaaaataatcggggacaagaatcctttcctaggactgctggacaagaggatcgtagtctaaaaattatcaaaagaacaaagaaacccgacctgcagatctatcagcctggacgacgtttgcagactgttagcaaagaatccgccagtcgggtggaggaggaagaagtcctcaaccaggtagaacaactgagagtagaggaagatgagtgtaggggaaatgttgcgaaggaggaagttgcgaataaaccagacagggctgagatagaaaagagcccaggtggtgggagagtaggggctgcaaaaggagaaaaaggaaagaggatgggaaaaggggagggggtgagggaaacccacgacgacccagcccgcgggaggccgggctccgcaaagcgctactcccgctcagacaaacgaaggaatcgctaccgcacgcgcagcaccagctcagctggcagcaacaacagcgctgagggagctggcctgacggataatggatgtcgccgccgccgacaggataggaccaaggagaggccacgactgaagaagcaagtgtctgtgtcctcaaccgattccttagacgaggacagaattgatgagcctgatggattaggacccaggagaagttcagaaaggaagagacatttagaaagaaactggtctggccgtggggagggtgagcagaaaaacagtgctaaagaatatcgaggcactcttcgtgtcactttcgatgcagaagccatgaacaaagagtctcccatg

SEQ ID NO: 25183 - DNA, 1002 bp, Homo sapiens
  MAP TO AP001067.1; EXPRESSED IN HELA, SIGNAL = 0.84; NT HIT: AL163300.2, EVALUE 0.00e+00; EST_HUMAN HIT: BF057369.1, EVALUE 0.00e+00; SWISSPROT HIT: Q01042, EVALUE 3.90e-02
atggggcggcagaggagggaaacacaggaggccgtgcggcagcagctgggctggcaggaggaggcagaggcaccacaggaggggacgggcacgcagcaggtggacttgcacacagggtggcagaggagggacacggaggaggaggatctgcagcaggaggcggtgcagcaagccggctggcagctagactgctggcagcatgatgtggaagccccagagcagacgggcacacagcaggcgtgctggcagggggaggaggtgcagcaagctggctggcagctagactgctggcagcatgaagaggaatcctcagagcaggtgggcacacagcacacaggcacgcagcagacgggcacgcagcaggcctgctggcagggggaggaggtgcagcaagttggctggcagctagactgctggcagcatgagggtgtgcaggagctggtgcagcctgattggcaggggctgggctcacagaccgcctggcagcaggggctggacacacagctcacacagctagactgctggcagcacgaagaggaaatcccagagcagacaggcttgcagcagacgggcacacagcaggcctgctggcagggggaggaggtgcagcaagctgactggcagctagactgctggcagcatgaagaatccccacagcagacggacacacagcacacaggcttgcagcagacagtcttgcagcagacgggcacgcagcaggcctgctggcagggggaggaggcacagcaagccagctggcagctagactgctggcagcacgagggcgtgcaggagctggtgcagcctgattggcaggggctgggctcacaggtcactgggcagcaggggctggacacacggctcactggggtgcagaccaggctcaggcagggggccggggcgcagcaggggggctcacagcagctctctgggcagtcgtccacctgccaggagtcggagcaagagtcacaggaaccaggaaggcagacgcggctgccgtag

SEQ ID NO: 25184 - DNA, 659 bp, Homo sapiens
  MAP TO AC009509.7; EXPRESSED IN HELA, SIGNAL = 0.49; SWISSPROT HIT: P24506, EVALUE 3.90e-02; NT HIT: U67532.1, EVALUE 6.30e-01; EST_HUMAN HIT: AI697525.1, EVALUE 0.00e+00
ctatgaagagttctccttcatatggttacggtttttaatttgcaaggatcctgattttctctgtcctggtttatactggccctgctgctttccacagcatccagatgccaggatgactatacaacagccgagaaagatgacagaggtgcaaagggccacagaaaccagccaagtctttgaagtcacagatacctcatcttcatttgcagatgtgtggtttctgctattgtatcctttggttttgtttagtaattgtttgctactgttgagtccaggtggaacaggcatatgagaaagttttgtgtctatgggttcaaagaaaggagaaatagtcttattatctggattgctgatgaaatcagtacttggtgacaccttatttatctttgtggtaatggactcattcagggaagtaaatcttgcccaaaaatctgtggttaattccttagaataactggtactgtttgtgtttacaaccaaatcttgatgcgtggttgaggatggagcctctgtggatggcagcataccatttatcgtggtggtttgtttatctaaattcatagcttttagaatccttagtctgtcccatctattggatgaagaacgagtatttagatatgtgggagattgttcaaaaaccagcaaatccggatctatac

SEQ ID NO: 25185 - DNA, 620 bp, Homo sapiens
  MAP TO AL358293.1; EXPRESSED IN HELA, SIGNAL = 0.49; EST_HUMAN HIT: BE064410.1, EVALUE 2.00e-84; NT HIT: AL163246.2, EVALUE 0.00e+00; SWISSPROT HIT: P26808, EVALUE 4.00e-05
cagaggaggattttaataatcaagtggacaggatgacccattctgtggataccactcagccttttttcccagccaactctgcatccacccaatgggcccatgaacaaagtggccatggtggcagggatgaaggtttcgcatgggctcatcaatatggacttccactcaccaaggctgacctggctacagccaatgctgagtgcccaatttcccatcagcagagaccaacactgaggcctcaatatggcaccattcctcagggtgatcagccagctacgtggtggctggttgattatattggacctcttcatggaaagggcagaggtttgttctcactggaacagatatttactccagatatgagtttgtctatcctgcatgcaatgattctgccaagactaccacccatggactcacggaatgccttatccaccgtcatggtattccacacagcattgcctctgaccaaggcactcactttatggctaaagaagtgcagcagtgggctcatggtcacgggattcactagtcttaccatgttctccatcatcctgaagcacctggatgcatctggttgtgcactttgcatagaaggaaaaacgcccagatgtgcgatctga

SEQ ID NO: 25186 - DNA, 730 bp, Homo sapiens
  MAP TO Z97630.11; EXPRESSED IN HELA, SIGNAL = 2.9; EXPRESSED IN LUNG, SIGNAL = 2.1; EST_HUMAN HIT: BF116239.1, EVALUE 3.00e-87; SWISSPROT HIT: O60755, EVALUE 6.00e-97; NT HIT: gi14778797, EVALUE 0.00e+00
gtacctggccgtgcggcacccgctgcgctcgcgcgccctgcgcacgccgcgtaacgcccgcgccgcagtggggctggtgtggctgctggcggcgctcttctcggcgccctacctcagctactacggcaccgtgcgctacggcgcgctggagctctgcgtgcccgcctgggaggacgcgcgccgccgcgccctggacgtggccaccttcgctgccggctacctgctgcccgtggctgtggtgagcctggcctacgggcgcacgctgcgcttcctgtgggccgccgtgggtcccgcgggcgcggcggcggccgaggcgcggcggagggcgacgggccgcgcggggcgcgccatgctggcggtggccgcgctctacgcgctctgctggggtccgcaccacgcgctcatcctgtgcttctggtacggccgcttcgccttcagcccggccacctacgcctgccgcctggcctcacactgcctggcctacgccaactcctgcctcaacccgctcgtctacgcgctcgcctcgcgccacttccgcgcgcgcttccgccgcctgtggccgtgcggccgccgacgccgccaccgtgcccgccgcgccttgcgtcgcgtccgccccgcgtcctcgggcccacccggctgccccggagacgcccggcctagcgggaggctgctggctggtggcggccagggcccggagcccagggagggacccgtccacggcggagaggct

SEQ ID NO: 25187 - DNA, 456 bp, Homo sapiens
  MAP TO AL022318.2; EXPRESSED IN HELA, SIGNAL = 0.55; NT HIT: gi15318714, EVALUE 0.00e+00; EST_HUMAN HIT: BI827663.1, EVALUE 0.00e+00; SWISSPROT HIT: Q9UH17, EVALUE 3.00e-18
agctttggagcagacaaacactcaaaccgaacagggggatggaggaaaggagcttcaatggcaagatctcctggactcctgtcctggcccctcctccccctgccccacccctgctctcctcctgctccccctctcagagcttgccctgaccctgctcctctcccaggtgtattccgaacttaagtaccacccagagatgagattcttccactggttcagcaagtggaggaagctgcatcgtgaccaggagtatgaggtcacctggtacatatcctggagcccctgcacaaagtgtacaagggatatggccacgttcctggccgaggacccgaaggttaccctgaccatctttgttgcccgcctctactacttctgggacccagattaccaggaggcgcttcgcagcctgtgtcagaaaagagacggtccgcgtgccaccatgaagatcatgaatta

SEQ ID NO: 25188 - DNA, 514 bp, Homo sapiens
  MAP TO U82672.1; EXPRESSED IN HELA, SIGNAL = 0.22; NT HIT: M89986.1, EVALUE 0.00e+00; SWISSPROT HIT: Q99715, EVALUE 1.90e-01
ctgcacctcctgcctcacctgctgctcctgcctcacctgctgctcctgcctcacctgctgctcctgcctcacctacacctcctgcctcacctatacctcctgcctcatcttcacctgcagatctttcctcattcacacctcctgcctcacctacagatcctgcctcacctgcagctcctgcttcacctgcacctctggccactgcttgcccctggggctgtgcagggaaactgggtatatcctgaaactcagcatcaagggcctggggcagggagatcactttccagggtccccctttgcctgctatttggcggggaatcaagctttggtttaaaccctcagcgaattccaccaaggctgccctggccccgagctcctttctgaagaccttgatgagcactcggtacctgcccaggggcgacagggcagcccgcacggcctcctggaactcatgttcctcgcagtcgtcagggatatccaggatgagcagagagcgctctgcgttcacacccat

SEQ ID NO: 25189 - DNA, 612 bp, Homo sapiens
  MAP TO AC005031.1; EXPRESSED IN HELA, SIGNAL = 1.6; EXPRESSED IN LUNG, SIGNAL = 0.95; EST_HUMAN HIT: BG994334.1, EVALUE 0.00e+00; NT HIT: gi14728855, EVALUE 0.00e+00; SWISSPROT HIT: Q13075, EVALUE 1.00e-114
aaatggcacagggtgaagcccagtggtttcaagaggcaaagaatctgaatgagcagctgagagcagcttataccagcgccagtttccgccacatgtctttgcttgatatctcttccgatctggccacggaccacttgctgggctgtgatctgtctattgcttcaaaacacatcagcaaacctgtgcaagaacctctggtgctgcctgaggtctttggcaacttgaactctgtcatgtgtgtggagggtgaagctggaagtggaaagacggtcctcctgaagaaaatagcttttctgtgggcatctggatgctgtcccctgttaaacaggttccagctggttttctacctctcccttagttccaccagaccagacgaggggctggccagtatcatctgtgaccagctcctagagaaagaaggatctgttactgaaatgtgcatgaggaacattatccagcagttaaagaatcaggtcttattccttttagatgactacaaagaaatatgttcaatccctcaagtcataggaaaactgattcaaaaaaaccacttatcccggacctgcctattgattgctgtccgtacaaacagggccagggacatccgccgat

SEQ ID NO: 25190 - DNA, 511 bp, Homo sapiens
  MAP TO AL022328.21; EXPRESSED IN HELA, SIGNAL =   1; SWISSPROT HIT: P12107, EVALUE 2.40e-01; EST_HUMAN HIT: BI821344.1, EVALUE 1.00e-101; NT HIT: gi14779835, EVALUE 1.00e-100
ctggaaatgagggaagtgctaacagcagtgcccatcccacaagcattaaactcgggaggtggagactctccagcagaaagctgggcagcagagtggtcctgcccctcggcccacaaagggccttggccgagcatgggcatgcctggtgtgtgcccactggggtccatccctgccagtggggttccagggacctcggggaccgggctgcttgggcccttggactctaggtgagccgtgagagcgggctggggcaggcggagcagctgcctgcagggcagggacacggtcaggggctacctcccagacaccctggcctctccacaggcagctatccatgatgctgatgctggcgcagtcaaacccgcagctgttcgcgcttatgggcacccgggcaggcatcgccagggagctggagcgtgtggagcagcagtctcggctggagcagctgagtgcggcagagctgcagagcaggaaccagggccactgggctgactggctacaggcgtacagg

SEQ ID NO: 25191 - DNA, 734 bp, Homo sapiens
  MAP TO AL133245.2; EXPRESSED IN HELA, SIGNAL = 0.5; NT HIT: gi14730293, EVALUE 0.00e+00; SWISSPROT HIT: Q9NR09, EVALUE 1.00e-122; EST_HUMAN HIT: BG002448.1, EVALUE 0.00e+00
atgatggttttactgttccacagattattgaaatggagctggatagtcaggagcagttgttattgcaggatcctcctgtgacttacattcagcaatttgcagatgcagcagccaaccttacctctccggattctgagaagtggaactctgtgtttcccaagcctgggactttggttcagtgcttgaggctgccaaagtttgcagaggaggagaatctttgtatagactcaataactccttgtgctgacggaattcatttgttggtaggactgcggacatgccctgttgaatccttgagtgcaataaatcaagtagaggccttgaataatttaaataaattaaactctgcactatgtaatagacggaaaggtgagctggaatcaaatcttgctgtagtgaatggtgcaaatattagtgtaatccaacatgaatcaccagcagatgtacagactcctttaataattcagcctgagcagaggaatgttagtggtggatatttagtgctttataaaatgaattatgccactcggatagtgactttagaagaggagccaataaaaatacaacatatcaaagatccccaggacacaattacctcgctcattttgcttccacccgatatattggataatcgagaggatgactgtgaggaacctattgaggacatgcagttaacctcaaagaatggttttgagagagaaaaaacgtctgacatttctactcttggacacctg

SEQ ID NO: 25192 - DNA, 966 bp, Homo sapiens
  MAP TO AC022882.3; EXPRESSED IN HELA, SIGNAL = 1.3; EST_HUMAN HIT: BI753109.1, EVALUE 8.80e-02; SWISSPROT HIT: Q13606, EVALUE 3.00e-76; NT HIT: AF101764.1, EVALUE 2.00e-04
atggacaagttgtcatcaggtttggatatatacaggaatccactgaagaacaagactgaagtcaccatgtttatattgacaggcttcacagatgattttgagctgcaagtcttcctatttttactattttttgcaatctatctctttaccttgataggcaatttagggctggttgtgttggtcattgaggattcctggctccacaaccccatgtattattttcttagtgttttatcattcttggatgcttgctattctacagttgtcactccaaaaatgttggtcaatttcctggcaaaaaataaatccatttcatttatcggatgtgcaacacagatgcttctttttgttacttttggaactacagaatgttttctcttggctgcaatggcttatgatcactatgtagccatctacaaccctctcctgtattcagtgagcatgtcacccagagtctatgtgccactcatcactgcttcctacgttgctggcattttacatgctactatacatatagtggctacatttagcctgtccttctgtggatccaatgaaattaggcatgtcttttgtgatatgcctcctctccttgctatttcttgttctgacactcacacaaaccagcttctactcttctactttgtgggttctattgagatagtcactatcctgattgtcctcatttcctgtgatttcattctgttgtccattctgaagatgcattctgctaagggaaggcaaaaggccttctctacatgtggctctcacctaactggagtgacaatttatcatggaacaattctcgtcagttatatgagaccaagttccagctatgcttcagaccatgacatcatagtgtcaatattttacacaattgtgattcccaagttgaatcccatcatctatagtttgaggaacaaagaagtaaaaaaggcagtgaagaaaatgttgaaattggtttacaaa

SEQ ID NO: 25193 - DNA, 480 bp, Homo sapiens
  MAP TO AP000322.1; EXPRESSED IN HELA, SIGNAL = 0.21; NT HIT: gi15302072, EVALUE 1.20e-01; EST_HUMAN HIT: L25181.1, EVALUE 2.00e-65; SWISSPROT HIT: P46486, EVALUE 7.50e-02
ctctgggcaacacataatgcttgctaagctaatgactgtagggatatagaactggccctcagcctctctgtcttcctttggcctctgctcttcctgctgccttctctctttgaccacgatgacacactttccataggccttcctcaccacatcacagaactcagagaagaggctgtcttcttgtttgatacacagctcgtctcttaggaacacccgatatttccaaggcacccatccttgactacccgcagcatgcacaatacaccaagttggggtttgtatgaaatatccatcactaatatcttccccagttacgagactttctgggatattggtttccccaaaatatacggtcttaaatccatcatattgcagtgttctcagggttttcagatattggaggcattgcttcctcttgatgccatcaaattgacttctgataatgacatttcttaaaagagggcttgcaaagcgaggcat

SEQ ID NO: 25194 - DNA, 463 bp, Homo sapiens
  MAP TO AL356019.2; EXPRESSED IN HELA, SIGNAL = 0.63; SWISSPROT HIT: O95221, EVALUE 4.00e-30; NT HIT: AF109308.1, EVALUE 2.80e-02; EST_HUMAN HIT: BF744523.1, EVALUE 1.60e-01
tcagtaattgctggtgcttttacaattcacaggcacatgaaaatcttcaacagccccagcaactccagcaccttcactggcttcatcctcctgggcttcccttgccccagggaggggcagatcctcctctttgtgctcttcactgttgtttacctcctgaccctcatgggcaatggttccatcatctgtgctgtgcactgggatcagagactccacgcccccatgtacatcctgctcgccaacttctccttcttggagatatgttatgtcacctccacagtccccagcatgctggccaacttcctctctgacaccaagatcatctcgttctctggctgcttcctccagttctactttttcttctccttgggctctacagaatgctttttcctggcagttatggcatttgatcgataccttgccatctgtcggcctctacgctatccaaccattatgaccagac

SEQ ID NO: 25195 - DNA, 844 bp, Homo sapiens
  MAP TO AC004890.2; EXPRESSED IN HELA, SIGNAL = 1.4; NT HIT: gi14743417, EVALUE 0.00e+00; EST_HUMAN HIT: BI084224.1, EVALUE 0.00e+00; SWISSPROT HIT: Q9UDV7, EVALUE 1.00e-106
ctccccaggtgacagcctgctgatggtgaagaacccacccccggccccgccacagccccagccccagccccagccaccgcagccgcagctgcagtcgcagccccagccccagagcctgccccccatcgcggtggccgagaacccgggcggccccccgagccgagggctgctggacgacggtttccaggtgctgcccggggagcgtggctccggcgaggcgccgccgggtggggaccgcagcaccgggggcggcgggggcgatgggggcggtgggggcggcggcgcggaggcggggacgggggcaggcggcggctgtggcagctgctgccctggcgggctgcggcggagcctcctcctgcacggcgcccgcagcaagccctactcgtgccccgagtgcggcaagagcttcggcgtgcgcaagagcctcatcatccaccaccgcagccacaccaaggagcggccctacgagtgcgctgagtgcgagaagagcttcaactgccactcgggcctcatccgccaccagatgacgcaccgcggcgagcggccctacaagtgctcggagtgcgagaagacctacagccgtaaggagcacctgcagaaccaccagcggctgcacacgggcgagcggcctttccaatgtgcactgtgcggcaagagcttcatccgcaagcagaacctgctcaagcaccagcgcatccacacgggcgagcgcccctacacgtgcggcgagtgcggcaagagcttccgctacaaggagtcgctcaaggaccacctgcgcgtgcacagcggcggcccgggccccggcgccccacggcagctcccgccgcctcctgagcgagactag

SEQ ID NO: 25196 - DNA, 1131 bp, Homo sapiens
  MAP TO AC006147.2; EXPRESSED IN HELA, SIGNAL = 0.45; NT HIT: gi14760973, EVALUE 1.80e-02; EST_HUMAN HIT: AW997214.1, EVALUE 1.00e-123; SWISSPROT HIT: P11227, EVALUE 3.00e-82
atgtcaaggaatggcagttggagtcttaactcagttcttgggctcttggcatcggccggtagcatacttatccaaaagactggacttggtggctttaggttggccccactgcctcagggcattggcagctaccgcaatccttatagaagatgccaacaagctagccctaggtcagaagttaatagttcagtgccacacgccgtagtcaccttaatggagcaaagaggatatggttggctgtccaactctagaatgctaaagtatcaagggcttctatgtgaaaatccccagataacactagagaatgtaaataccttgaacccagctaccctgctgcctgtggaggaacccgattggaaggatgctgggttgcctcactcctggcaggaccttccccactgttgcataaatatggtggacaaagtgttctcgagccaggaagacctcagagattcccccttggagagcccagatgttatatacttcactgatggtagcagtttcataacagatggggtgagatatgcaggatatgcagtagtgacccaacactcagtggttgaggctcaagccttaccttctgggacttccgctaagaaggctgaattaatagcattaaccagagcactgttattggccaaggggaagaaagtaaacatatgtactgactcaaaatatgcttttgcaaccctgcgtgcccatgggggaatacacaaagagagaggacttttgactactgaaggaaaagaaataaaaaataaagaggaaattttgcaattattggaagccgtatgggctccggagaaggtggctgtcattcattgcaaaggacaccaaatcaggaaaagctatgaggtgcagggcaacagaaaggcagaccaagaggctcggcaggcagcaatgagcaaggcttcacctgaagaaagaactctagcaatgcctctccttatagagccccctttgctggaggtacccccttactcttcgagtgaaaaagcttgttttgttctggaaacagggaaatatattaaaggtggatggtggctgttctctgatgggagactagacgtcccagagacaatagcctcaaggtttgtgaagcagatccatcaaagaacacacactggaaac

SEQ ID NO: 25197 - DNA, 895 bp, Homo sapiens
  MAP TO AC002544.1; EXPRESSED IN LUNG, SIGNAL = 1.4; EXPRESSED IN HELA, SIGNAL = 0.9; NT HIT: gi14777420, EVALUE 0.00e+00; EST_HUMAN HIT: BI015793.1, EVALUE 0.00e+00; SWISSPROT HIT: Q01042, EVALUE 3.00e-03
ctgctgggagtcagacagacagaatatggagcagtcccaggagaaaggctcctagaggctactggaaaagtctgggtcctagaggaggagggggatgaggagagagaggctgaggtgagccctttccccaaacaggcccaggtcctgggcactgaaagaacagaagaggctgctgagagccagaccgcagggagggaagctgtgggaggccaggaggcaggggagagctttgagggccaggtagacctgcgtggtaaggaggctgagatgaggcaggacttggggatcagggccgaccgggccaggatggaagagctggtacaggcagaggaggcccaggaggagagagggagcagcagggatccagtggctgagctgccctcagatggagaggctgaaggcactgccgacttggaggcaactccagaggccaggcctgaggaggagctcacaggggaggagagtgaggcggcccagactagctgtggcctactgggcgtggaatggggtggcctcacacacagcgtcaccaaaggccagggacctgagctgatggggggtgcccagaccccaactaagcaacccgaggaaagggaggcaggggaggtggagctcatgggagttctggccctgagcaaagaggagcaggagaggagcctggaggcaggtcccaggcacgcggggtctgtaaagcctgaggcctccgaggccttcccaggagcctgggaaaaccgcacgagaaaggacatggagagaggaaatactcaggaggatgcggccgatggcgagcagcgggaggaggaggagactgcgggaggccagaccctggcggctgaggctgaaggagaccgagagtctgaactatcagaagtcccagaggcaggcggggaggggc

SEQ ID NO: 25198 - DNA, 507 bp, Homo sapiens
  MAP TO AP001067.1; EXPRESSED IN HELA, SIGNAL = 0.28; NT HIT: AL163300.2, EVALUE 0.00e+00; EST_HUMAN HIT: BF057518.1, EVALUE 1.00e-61
agggcggcagaggagggacacggaggaggagggtctgcagcaggaggtggtgcagcaagccggctggcagctagactgctggcagcatgaagtggaagccccagagcagacgggcacacagcagatgggcttgcagcagacaggcttgcaacggacgggcacgcagcaggcctgctggcagggggaggaggtgcagcaagctggatggcagctagactgctggcagcatgaagaggaatcctcagagcaggtgggcacatagcacacaggcttgcagcaaacaggcacacagcaggactgctggctggaggaagaggcacagcaagttggctggcagctagactgctggcagcatgaagaggaatccttagagcaggtgggcaggcagcacacaggcttgcagcagacgggcacgcagcaggcctgctggcagggggaggaggtgcagcaagccggctggcagctagactgctggcagcacgagggcgtgcaggagctggtgcagcc

SEQ ID NO: 25199 - DNA, 2664 bp, Homo sapiens
  MAP TO AC016577.4; EXPRESSED IN HELA, SIGNAL = 0.22; NT HIT: M14123.1, EVALUE 0.00e+00; EST_HUMAN HIT: AL535594.1, EVALUE 0.00e+00; SWISSPROT HIT: P10266, EVALUE 0.00e+00
ccgtggcctgagtgacatcccgcttaccatgtgataagtgaatctactgatgggactgacagtaggtacttctaccaaccaattttggactgcaggcattaaacatcctggtgctctccctaggcaaataggaggataacgatacccaatggaaatatttatcatcatcccttcttcctcaggtttggcagggcagcgatcatctatggggccaggtacccatacactatcattaacatatacttctataggattatccatccatgtgactggtgttaccatctccgtggaggcccttttctttgcatctccgatgggttcattgtagaacttcaaatgtctagtgggtaaccaaacaggaagctgattttctcctggtgaaacacaagcaaaacctctcccccacgttatcaccttccctatttcccatgtcttatttttattatctttccaccaaattagttttccttcatgtgggctgttctttttaccagtaagatgttgttctgcagaagtagtagtctgatttctataaatgtttaaaaaatttaaagtatagagtgctagattaagttgcatctgaggagtggtacactccttactgtctcccccttctttttgtttaactaattgagttttgagtgttctattagttctttcaactatggcctgtccttgggaattataaggaattcctgttgtatgtgaaattttccactgacttaagaatttttggaaagctttactacaatatcctggtccattgtcagttttgattttttctggaactcccattacagcaaaacaagacaataaatgttttttaacatgggaagtactttctcctgtttggcaagttgcccatatgaaatgtgaataagtatcaactgttacatgaacatatgataatcttccaaatgaaggtacatgcgtgacatccatttgccataatgcattaggacacagacctctgggattaactcctgcctcttgagtgggcaggtgtaagacttgacactgggtgcaatgttgtacaatatcttttgcctgtttccatgtgacatcaaatttgttttttaatcctgctgcatttacatgagtcaaagcatgaagttcttgtgcttttatgagtgcagatgataccagtaagtcagcttgttcatttgctttagtcaaaggccctggtaaattagtgtgtgctcgaatatgagtaatataaaatgggaaatttctttttcttacagtttgttgtaataaattgaatagctggtttaactgatcatccatgctatatttaattagagctgtctcaacatcccttgtagcctgtactacatatgcagaatctgatataatattgataggttggtcaaaatcttgtaacactgtaatgactgcaaccaactctgctctttgagccgattgatatggagttttgattactcgttctttcggccctgtgtaagctgcttttccattgctggaaccatcagtaaatactgttagagcattttctaaaggttcacgtctggtaattttaggtagaatccaagtagtcaattttaagaactggaagatctttgtttttgggtaatgattatcaataagtcccacaaaattagcaagaccaatctgccatgcaccagaattgataaaggcttgtctaacttgttccttggttaaagggacaactattttgtctgggtcatttccacataattttgttattcgtaatcttgtctgaccgattaatgtagctatttgatccaagtacaatgtaaaagtcttaactgtactgtgaggaaggaatgaccactccacaagatcagtattttgaataatgatgcctgttggagaatgtgcagtggcaaaaataaaaagttggagtggggctaagggatctattctatttatttgcgctgactgaattttttcttccactaatttaatttcttttgttgcctctggggttaatattctttgactatttaagtctgagtctcctcttaagatagagaacaaatttgacatggcataagtaggaatgcctagagttggccgaatccaattaatatctcctagtaatttttgaaaatcatttagtgtttttaatgtgtcttttcttatttctattttttgtggcttaatttttctattttctatctgcatccctaaataatgaaaaggagtagaggtttggatcttatcagatgctattgccagtccagcattggcaacctctgcttgcagaaatgtataacagtcaattaatttatctttcgtttctgcagcacataaaatatcatcaatataatgaataatataacagtctgaaaacttttctctcactggttgaagagctcgacctacaaaagtctgacaaatagttggactattaagcattccctgaggtaacactttccactgaaacctggtggctggttctttattatttatggctggtatagtaaaggcaaatttttcacaatcctgctctgccagagggatggtaaaaaagcaatcctttagatcaattataattaaaggccaatcttttgggatcatggccggagagggcaacccgggttggagaggccccatgggttgaattacggcgtttacagcccttaagtcagttaacatacgccatttgcctgatttctt

SEQ ID NO: 25200 - DNA, 861 bp, Homo sapiens
  MAP TO AL160233.1; EXPRESSED IN HELA, SIGNAL = 1.3; EST_HUMAN HIT: BG573287.1, EVALUE 0.00e+00; NT HIT: gi14753969, EVALUE 9.00e-04; SWISSPROT HIT: Q90423, EVALUE 8.10e-01
atgagaaacatcctgagtttgagaaacttactcaagtttatagaactcttcagggagcttacacaaaaattctggaaagttatgcatacaaaaaaaaaagagaattttaggcactttcttcagagttgcctttatggccagtctttttttgaagaagatggaaaggagtacatctataaagaaccaaagctcactggcctctcagaaatttccctgagacttgttaaactttatggtgaaaaatttggtatggcgaatgtcaaaaaaattcaggatacagacgaggtaaataccaaagagtttgatccaaaatatgctcatatacaagttacttatgtgaagccttactttgatgacaaagaactcacagaaagaaagaccgagtttggaagaaatcataatatcagcagatttgtttttgaggctccttacactttatcaggcaaaaagcagggttgtacagaagaacagtgcaaatgccgtacaatcttgacaacctcaaagtcatttccctatgtgaagaggaggattcctattaactgtgaacagcagattaatttaaaaccaattgatgttgccactgatgaaataaaagataaaactgcagatctgcaaaagctttgctcctctgtttatgtggacatgattcaactccaacttaaattgcagggctgtgtttccatgcaggtcaatgctggtccattagcatatgcaggggctttcttaaatgatagccaagctagcaagtatccacctaggaaagtgagtgagttgaaagacatgtttaggaaatccatacaagcatgcagcattgcacttgaactaaatgagtggctaattaaagaagatcaagttgagtac

SEQ ID NO: 25201 - DNA, 949 bp, Homo sapiens
  MAP TO AC009974.2; EXPRESSED IN HELA, SIGNAL = 0.94; EST_HUMAN HIT: BF306690.1, EVALUE 0.00e+00; NT HIT: gi15297081, EVALUE 0.00e+00; SWISSPROT HIT: Q11053, EVALUE 3.50e+00
aaccatacctctgcttggcagcggctggggaaaacccttcagggaagagcctggcctctgccatctcagggaagatcccatctccactctcttcctcctataagcccatgctgaataataattccttcatgtggccaaatagcacgccagtgcctttattgcagaccacacagggcctgaagccagtatcgccacccaagatccagcctgtctcctggcatcattcagggggtactggagactgtgcaccgcagcctgttgaccataaggtgcccaaaagcattggcactgtcccagctgatgccagtgcccatatcgccttgtctaccgctagctcccacgacacatccaccaccagtgttgcctcttcctggtataaccggaataacttagccatgagggcagagccactttcctgtgctctggatgacagctctgattcccaggatccaactaaggagattcggttcactgaggccgtgaggaaattgaccgcaagaggctttgagaagatgccgaggcaaggctgccagcttgaacagtctagtttcctgaaccccagcttccagtggaatgtcctcaacaggagcaggcggtggaaacctcctgcggtaaatcagcagtttcctcaggaggatgctggatcggtcaggcgggtcctccctggtgcctcagataccttggggttggacaatacagtcttctgtaccaagcgtatcagcattcacctccttgcctcacatgccagtgggctcaatcacaaccctgcctgtgaatctgtaattgactcctcagcatttggagaaggcaaagctccaggtcccccttttcctcaaactcttggcatagccaacgtggccacccgcctctcttccatccagctgggccagtctgagaaggagagacctgaggaggccagggagctggactcatctgatagggatattag

SEQ ID NO: 25202 - DNA, 603 bp, Homo sapiens
  MAP TO AC010636.3; EXPRESSED IN HELA, SIGNAL = 1.1; NT HIT: gi16163579, EVALUE 0.00e+00; EST_HUMAN HIT: BE177799.1, EVALUE 0.00e+00; SWISSPROT HIT: P35789, EVALUE 3.00e-84
taatgtgttctcattttgcccaagacctttggccagagcagagcatgaaagattctttccaaaaagtggtactgagaagatatgaaaaatgtgaacatgacaatttacagttaaaaaaaggatgtataagtgtggatgagtgtaaggtgcacaaagaaggttataatgaacttaaccaatgtttgacaactaccccaagaaaaatatgtcaatgtgataaatatgtgaaagtccttcatcaatttccaaattcaaacggacaaaagagaggacatactgggaaaaaacctttcaaatatatagaatgtggcaaagcttttaagcagttctcaactcttactacacataagaaaattcatactggagggaaaccctacaaatgtgaagaatgtggcaaagcctttaaccactcttgtagccttactagacataagaaaattcatactggagagaaaccctacaaatgtgaagaatgtggcaaagcctttaagcactcctccactcttactacacataagagaaatcatactggagagaaaccctacaagtgtgataaatgtggcaaagcctttatgtcatcctcaacccttagtaaacatgaga

SEQ ID NO: 25203 - DNA, 772 bp, Homo sapiens
  MAP TO AL135999.2; EXPRESSED IN HELA, SIGNAL = 0.62; NT HIT: gi14751043, EVALUE 0.00e+00; EST_HUMAN HIT: BG705567.1, EVALUE 0.00e+00; SWISSPROT HIT: P16698, EVALUE 3.60e+00
ctggcagcggcgatctcctggcgctgacgggcagcactcacggctcgacgggcgccctcgacagccctgtccaccttctccttaaccttgccccgccgaagggccagaggcaggagactgcggacgcgcccgccgtgcaccagccggttgcgcttgtacttgccctcctcgcgggagccgtcggggcgggtggtgcgcccgtagccgtgccgccggttgcccagccactcgccctcgtagcgcagcccgttggagcgctggctgacgccgaagccgctgcgccgatctgcgcgccactcgcccgcgtacacctctgtggccgagccctcgatgagggcgggcggcgctgcggccgggggcccgctggcctccgagccgggcggtccggtgctgcccacctcgctgctcacctcgctgcgcagggagcctcgcttgctgcccagggagctgcgacgtccgcccgctcggagcccgctgagcagcagcgaacggcgaaagaatccgccggccgccggagtgcgctttcgggacgacgcgccgtcggcgtccccgggcccggccagcacgaagccgccccgggagcccgaggcggggctgcctccctcgtcgcccggcaagggcaggggcgggggtggcgtcggggggtcgctgtggccggaatccagggaggtgcggcggggcgagcgcagcagcgccgcctgatggtagggcacactctggcgtaccccgtagccgtggcgcttcccggcctgccactggccctggtaggtgc

SEQ ID NO: 25204 - DNA, 642 bp, Homo sapiens
  MAP TO AC004889.1; EXPRESSED IN HELA, SIGNAL = 0.99; EST_HUMAN HIT: BE393864.1, EVALUE 0.00e+00; SWISSPROT HIT: Q09345, EVALUE 2.80e+00
actgggacccctttctcctttataccatgatcttcttgctttccagttacttcctctgattttcccaaaaaggtttgactcttttcgtcctgagagtccgccctgttctcttctggcacctgcagctccctcttcctctcttctccctgttctggacctccctgaccctgagccttcctctccatatcctcctgctcccactcaccgtcattcagaccctctggctccccagtgagccccattctttctccttgtctcccaagcatcacatcttgtacctgttcctgtttttgcttctgttctcccttttcatcattaacctgctctatcatctgttcctcccctaatagcccatcggcacaaacatcctccctcagagttccttccccccgaaatcctgcttcctgctgtccctgctcctccagaacttggacctcctggggatgcaagagcccttgactttcctgcagctcctcagatggcagctcttccccctgcctgatagtcccactttcagcgccttcattctggttggtctctgcaggatgctcttcgcagggagaataatatctggtctgaccagagttatctgaagaggtttcctcttcttcttctgcctgtccagatcccaatgtcaaagaa

SEQ ID NO: 25205 - DNA, 551 bp, Homo sapiens
  MAP TO AL121657.1; EXPRESSED IN HELA, SIGNAL = 0.41; NT HIT: gi14723978, EVALUE 0.00e+00; EST_HUMAN HIT: AA972967.1, EVALUE 0.00e+00; SWISSPROT HIT: P42567, EVALUE 5.00e-21
gaccagctgcaggcccaggactttagcaagttccagccgctgaagagcaagctgctggaggtagtggacgacatgctggcccatgacattgcccagctcatggtgctagtgcgccaggaggagtcacagcggcccatccagatggtgaagggcggagcgttcgagggcaccctgcacggcccctttgggcatggctatggggagggggctggagaaggtatcgatgatgctgagtgggtggtggccagggacaagcccatgtacgacgagatcttctacaccctgtcaccggtggatggcaagatcacaggcgctaatgccaagaaggagatggtgcgctccaagctgcccaacagtgtgctgggcaagatctggaagctggccgacattgacaaggatggcatgctggacgacgacgagtttgcactggccaaccacctcatcaaagtcaagctggaggggcacgagctgcccaacgagctgcctgcccacctcctgcccccgtccaagaggaaagttgccgagtgatggggtggggggacattcagacg

SEQ ID NO: 25206 - DNA, 566 bp, Homo sapiens
  MAP TO AB016897.1; EXPRESSED IN HELA, SIGNAL =   1; NT HIT: gi7657157, EVALUE 0.00e+00; EST_HUMAN HIT: BI771211.1, EVALUE 0.00e+00; SWISSPROT HIT: Q9Y613, EVALUE 3.20e+00
cctctctggatacggtctggacaccggcagaccaagcaggcagttgcctccctggctggctctgacctcctgcagcacaaggagaggatgcactgcactgccaggcctctgggcaccgagggcgctgctttttccgccgtttctttctgctaccgctaattcaaaacagggcagggagcagctaggcagcagctgggagagctgcgggctcctccacccggttgctggtgggctccatccggccgcaccgcccgcacctgctcacctccagctgcctcggccccagcggcacggacggactcaacggcgaccaccgcggcagctccccggggactcctcgcaggtcagctgagctttgctttcagtcggcgtgcacggttcccaaacgtcggcgtgcacggttcccaaacgtcggtggtgatttttgtaagtgaggtgggggtcaccacaggaagagaggggaggcaaacctcccttcccgctgtgtcccgcctttcctcctggcggttgcgtttccacgtgtcctccctgctgcccgccccagcccacactgagcaggaaggtgg

SEQ ID NO: 25207 - DNA, 1129 bp, Homo sapiens
  MAP TO AL121895.18; EXPRESSED IN HELA, SIGNAL = 0.61; NT HIT: gi11067406, EVALUE 6.00e-27; EST_HUMAN HIT: BF954513.1, EVALUE 0.00e+00; SWISSPROT HIT: P51859, EVALUE 2.00e-03
aagcctcgcggtccttcagctcagcccctcctttctgggtgggaaccactcccctctctttgggtgggaagttgcctctgtctggtttgactggcttcctgacattcagagggatggcccgaggaagggcgcaggcctgggggtcgggatgcacgccctgtcctctgtgaggagggtgcttcttcagttcctctgtgggactttcctcagcctttcccagcaaatctccactcacgggggtcccttcctctcgggctgcgctggctgtcaggtggggaaactctccttccactccccactgggcatcttcccagccttcagcaaacgtctgtcctgcgggagatcccttcaggtcaccaggtcctccatggttcttgggggtccctgccccttcctttggggaagtcatgtgggcttcgtccttgctcctgctggaagcagcagcagaaaccctcaggtctaaggaattcagcgtcggcctgggctcacctccgggaggggcatccaggcgcccttttctctcctccaggggtggagggaggacttggtcttctgagtctttttcttcataatttaaatagaagctcctctctgcaaaggaagtatcagtttcattgctcaactcagctctggcttctgcgtgggctggatccaatagaaacgactggagtcctcccttgtcggaggctggagagaggacgtccacctctgctggcctggtccctggagcagtgggtctcccacaagtgtgaggctcctccagccccttcctcagctctgtctggccctccggctgaccatctgacatgcagcggttcctgatggttgcctctctggtgtctgccctgagctcagagccctcgaggagcttttctgccaatgtgcggccggaagccagggcagcccctcctgggctttccctgatccaggggccttcctcccccactgactcaaagtcttcaggacttgcaatcatttttccttgttgctgggtgtttgctcttctgtttcccaccatttcttctgtggccacttccactttgaacttgtccaccagaacgtctaccttggagagtctgccgttggcaaggataccagcaaggcctgcctgcctttcttcctgctgcat

SEQ ID NO: 25208 - DNA, 530 bp, Homo sapiens
  MAP TO AC002310.1; EXPRESSED IN HELA, SIGNAL = 1.2; NT HIT: gi13027593, EVALUE 0.00e+00; EST_HUMAN HIT: BE295830.1, EVALUE 0.00e+00; SWISSPROT HIT: P28698, EVALUE 7.00e-35
aacaaggaagaggaaagacaaagggaagggacgggagccctggagaagcccgaccctgtggccgccgggtctcctgggctgaaggctccccaagccccctttgccgggttggagcagctgtccaaggcccggcgccggagtcgcccccgcttttttgcccacccccctgtcccccgagctgaccagcgtcacggctgctacgtgtgcgggaagagcttcgcctggcgctccacactggtggagcacatttacagccacaggggcgagaagcccttccactgcgcagactgcggcaagggcttcggccacgcttcctccctgagcaaacaccgggccatccatcgtggggagcggccccaccgctgtcccgagtgtggtcgggccttcatgcgccgcacggcgctgacttctcacctgcgcgttcacactggcgagaagccctaccgctgcccgcagtgtggccgctgcttcggcctgaagaccggcatggccaagcaccaatgggtccatcggcccgggggcgaggggcg

SEQ ID NO: 25209 - DNA, 761 bp, Homo sapiens
  MAP TO AL022326.1; EXPRESSED IN HELA, SIGNAL = 0.53; NT HIT: gi11418145, EVALUE 0.00e+00; EST_HUMAN HIT: BF315928.1, EVALUE 1.00e-124; SWISSPROT HIT: O43759, EVALUE 2.00e-36
ctccagccatcacatctgtgttccaggcatcaggtcagagggtgggacagagaacatgagggtaccccattggccaaaacgtagtcacatggccatgcctagctgcaagagagacaaaagaatgactcttaggagatgctaacagtcctttgtcccgctgagaagctttttttaagaaggctgttgtgagcctttgagccatcttaacactccataatggagatctagaacttttggtagcccagactgacctctgggattgggagacaggggcaggtgatttctggggtactttctggctggatgatatggttctgggcatttccgggggtggctgcgagaacagccttccttctccacagccaagcttggtctcatgtttggtgctttgaggatctttaaccctctcctgcctgtgtcctgtgaactaaccaccactaacccagtgctcttgtctgtctctcccctaaccaccccctcccgcctgtccttgtcctcgccggcctttgtccccaggcgggccaggctgtgctggccttccagcggtaccagattggcgccgactcggccctcttctcccaggactacatggaccccagccaggactccagcatgccttacgcgccctacgtggagcccactgggccggatcccgccggtatgggcggcacctaccagcagccggccaacaccttcgacaccgagccccagggctaccagtcgcagggctactgagccacagtgaccgcctgcccccgccc

SEQ ID NO: 25210 - DNA, 529 bp, Homo sapiens
  MAP TO U52112.1; EXPRESSED IN HELA, SIGNAL = 0.52; NT HIT: X79198.1, EVALUE 0.00e+00; EST_HUMAN HIT: BI261737.1, EVALUE 3.00e-74; SWISSPROT HIT: P51610, EVALUE 1.00e-37
tggctcccaagtgagaccgagcctcccgtcctgccctcacctccctgggtgcccccaccaccccagcaccaattcgccctcagtcgcttactctcagtggccgttgagggcagcagcgccacagtgctggggaccgtgccggccagctcattgaggcaattgctctcaatggctgggtcgttgagactgtcggcaggggccagggcctcagtggggaggtggtgatgctgctgctgggcctgggcctcctgcagctgctgctgctgcaccagggcagccagctcctgctgtgtcagcacaatgggtatggtggtggcctggccctcctgaccctcggccgacaggtgccccagctccgcctgagtcacggttgctgctgcctcggaggtgtccatgggctcgccggtgcctgctccagggtcgagagaaacactacttactaggaaggctggccagaagcgggcagcccgggcggaggcccccaaagcctgtcctagagaccccgtccacctcctaccgtgctccactg

SEQ ID NO: 25211 - DNA, 637 bp, Homo sapiens
  MAP TO AC004382.1; EXPRESSED IN HELA, SIGNAL = 0.57; NT HIT: gi14775195, EVALUE 0.00e+00; EST_HUMAN HIT: AL558932.1, EVALUE 0.00e+00; SWISSPROT HIT: O29209, EVALUE 9.10e+00
ggccccgcccacttcgagactggagcgcgaacgccccgcccgcgccgcgcacctggctgcctggcggcctctcggacccgacgtcacgcactggctcgcgctccgcttccggctcggggccgtcgcgcgtctggtcggcgaccccccgggcgcccctcagccgcgccagctcgcggccccgtgcctcgcactcgccctgcgcctcttggcgctcgcgccgtgcgcccgccagctccttggtgagcgcgtccaggcgctggcgcagctggcgcacctcctcgcgcgcgcggttgcgctcagcgcgcaccttgctccatttctcgcgccaattggcagtgcagtccgaccaccggcgcatggtcttctccatctgcgccgcccgcgcccgcgcctcctccagctcccgcagccgcagctcctcgcggctctcccagtcgccgtcggccagcagcgcgggcgcggggggcaggggcagtgcgggcggcggcccgggcgagggcgtgccgctgggcggcgtgggcggcaaggagtcggcaggccccatgcgctccggcgacgggctgcccaggatggtcaggaggctgcccttggacagctgcggggactcggccagccgggggctgggcccgtggctcat

SEQ ID NO: 25212 - DNA, 891 bp, Homo sapiens
  MAP TO AL138752.2; EXPRESSED IN HELA, SIGNAL = 0.43; EST_HUMAN HIT: AI268054.1, EVALUE 0.00e+00; NT HIT: gi15529971, EVALUE 0.00e+00; SWISSPROT HIT: Q99297, EVALUE 1.00e-11
atgatggattcagaagctcatgaaaagaggccaccaatactaacatcttcaaaacaagatatatcacctcatattacaaatgttggtgagatgaagcattacttgtgtggctgctgtgcagccttcaacaatgtcgcaatcacatttcccattcagaaggtcctctttcgacaacagctgtatggcatcaaaacccgggatgcaatacttcagttgagaagggatggatttcgaaatttgtatcgtggaatccttcccccattgatgcagaagacaactacgcttgcacttatgtttggtctgtatgaggatttatcctgccttctccacaagcatgtcagtgctccagagtttgcaaccagtggcgtggcggcagtgcttgcagggacaacagaagcaattttcactccactggaaagagttcagacattgcttcaagaccacaagcatcatgacaaatttaccaacacttaccaggctttcaaggcactgaaatgtcatggaattggagagtattatcgaggcttggtgcccattcttttccggaatggactcagcaatgtcttgtttttcggccttcgaggtcccattaaggagcatctgcctaccgcaacgactcacagtgctcatctggtcaatgattttatctgtggaggtctattgggtgccatgttgggattcttgttttttccaattaatgttgtaaaaactcgcatacagtctcagattggtggggaatttcagtctttccccaaggttttccaaaaaatctggctggaacgggacagaaaactgataaatcttttcagaggtgcccatctgaattaccatcggtccctcatctcttggggcataatcaatgcaacttatgagttcttgttaaaggttata

SEQ ID NO: 25213 - DNA, 569 bp, Homo sapiens
  MAP TO AL031406.1; EXPRESSED IN HELA, SIGNAL = 0.74; EST_HUMAN HIT: BG565740.1, EVALUE 5.10e-02; NT HIT: M34491.1, EVALUE 1.40e-01; SWISSPROT HIT: Q28640, EVALUE 5.00e-10
aggaaacatgctccctcctgtgccacccctgagtgcctggaggcacagcaagcaagttgatcagaccacggagaccaccggcccacctctcccacctccaccgaccacggggaccaccagcccacctctcccacctccaccgaccacggggaccaccggcccacctctcccacctccaccgaccacggggaccaccagcccacctctcccacctccaccgaccacggggaccaccagcccacctctcccacctccaccgaccacggggaccatcagcccacctctcccacccccactgagccccctgcgtcgcacacctgggccaccggcctctgccctcaccggctgctggctcccatgagattggaatagtatccaaaatcttcccagacttcacttcttcacctcccacctcactcacttgctccagccaccacctccccgccatggccgccttgctcctcctggtaaatgaaagaaggaagggcttgcagagcttgaccacgtgcttcctcagcacccactgaaccctcaaaccagcatcattcgcaaaggacagaggaggaaac

SEQ ID NO: 25214 - DNA, 1101 bp, Homo sapiens
  MAP TO AF230666.1; EXPRESSED IN HELA, SIGNAL = 0.33; NT HIT: gi14748739, EVALUE 0.00e+00; EST_HUMAN HIT: BG284464.1, EVALUE 0.00e+00; SWISSPROT HIT: P01266, EVALUE 0.00e+00
ctgaaggccaatcttgtgcctccgaaaggcagcaggccttgtccagactctactttgggacctcaggctacttcagccagcacgacctgttctcttccccagagaaaagatgggcctctccaagagtagccagatttgccacatcctgcccacccacgatcaaggagctctttgtggactctgggcttctccgcccaatggtggagggacagagccaacagttttctgtctcagaaaatcttctcaaagaagccatccgagcaatttttccctcccgagggctggctcgtcttgcccttcagtttaccaccaacccaaagagactccagcaaaacctttttggagggaaatttttggtgaatgttggccagtttaacttgtctggagcccttggcacaagaggcacatttaacttcagtcaatttttccagcaacttggtcttgcaagcttcttgaatggagggagacaagaagatttggccaagccactctctgtgggattagattcaaattcttccacaggaacccctgaagctgctaagaaggatggtactatgaataagccaactgtgggcagctttggctttgaaattaacctacaagagaaccaaaatgccctcaaattccttgcttctctcctggagcttccagaattccttctcttcttgcaacatgctatctctgtgccagaagatgtggcaagagatttaggtgatgtgatggaaacggtactcagctcccagacctgtgagcagacacctgaaaggctatttgtcccatcatgcacgacagaaggaagctatgaggatgtccaatgcttttccggagagtgctggtgtgtgaattcctggggcaaagagcttccaggctcaagagtcagaggtggacagccaaggtgccccacagactgtgaaaagcaaagggctcgcatgcaaagcctcatgggcagccagcctgctggctccaccttgtttgtccctgcttgtactagtgagggacatttcctgcctgtccagtgcttcaactcagagtgctactgtgttgatgctgagggtcaggccattcctggaactcgaagtgcaatagggaagcccaagaaat

SEQ ID NO: 25215 - DNA, 690 bp, Homo sapiens
  MAP TO AC004206.1; EXPRESSED IN HELA, SIGNAL = 0.31; NT HIT: AF058953.1, EVALUE 0.00e+00; EST_HUMAN HIT: BI260562.1, EVALUE 0.00e+00; SWISSPROT HIT: P53588, EVALUE 4.00e-70
tcacatccacatgcgcttgctttgcttcactatttcagagagctttacaagcactctagcagcttccaccaaatcatcacaagcaagtattttaagtccactgtctgcttttagtgccttaacatcatcaacttgtgtaccttgtaactgtaccacaacaggtattttaatttccaaactttttactgccatgactataccctttgctgtaatatcacagtgcatgattcctccacaaatgttgaccagaatagccagtacctttttatctgaagtgataggcttaaatgcttctgttacttgatggactgtagcaccaccaccaacaaggaaattagctggagtctctccatgaagttttattatatccattgtggccatagccaaaccagcaccatttactaggcagcctatacttccatcgaggccagtgtagttgagatctgccttagcagcatctttgttcctttcatcttcctgggtccagtcctgtagatcaaacattttcttttggcgataggctgaattagagtcaaaattgatctttgcatccttacacaatgcagctccatctgaatcttccaccattgaatttatttctatcatggttgcatcgtatttcagaaaaaggctgtaaagcttgatcatgttttctgctgctgaagccacaatattagatggaaatcccat

SEQ ID NO: 25216 - DNA, 566 bp, Homo sapiens
  MAP TO AC002364.1; EXPRESSED IN HELA, SIGNAL = 1.2; NT HIT: gi14764618, EVALUE 0.00e+00; EST_HUMAN HIT: AW501070.1, EVALUE 0.00e+00; SWISSPROT HIT: Q14031, EVALUE 3.60e-01
cctgtgtgccagcaccctgacggtgtcctcggggagcagccgcgggtccctagcctccagccgtgggtctctggcctccagccggggctccctgagctcggtcagcttcacggacatctacggcctcccgcagtacgagaagcccgacgctgagggcagccagcttctacgcttcgacctcattcccttcgactctctggggcgagatgctcccttttcagagcccccaggcccctcgggcttccacaagcagaggcggtccctggacacgccccagtccctggcatcgctgtcctcccgctcctcgctgtcctcgctgtcgcccccaagctcgcccctggacacgcccttcctccctgcctcacgggactcgccgctggcgcagctggcggacagctgtgaggggccaggcctgggcgccctagacagactgcgggcacacgcctcggctatgggggacgaagacttaccaggcatggcggcccttcagccacacggggtccccggggacggggaagggccgcacgagcgaggacccccaccagccagcgctcccgtgggtggaa

SEQ ID NO: 25217 - DNA, 542 bp, Homo sapiens
  MAP TO AC004690.1; EXPRESSED IN HELA, SIGNAL = 1.5; NT HIT: gi15595198, EVALUE 8.10e+00; EST_HUMAN HIT: BI907732.1, EVALUE 7.60e-01; SWISSPROT HIT: P15265, EVALUE 4.00e-02
ggacagcgagggccccgcacggaggggcggcgcggcgcggcgtccgggggcccctggcgggccaggaagcgaggcggcagccggctgcccggagccgctgtccactgctgaagcgccggctgagagcgccacgctgcccgcctggatgcgcctctacttctacgggatgcacgggatcaccctggacgtgctggtgtcctcggcccggcgcttcgcccgcagcccggacctgcggatgctaggcttctcctcgccctaccgctgcctgctgcactcgctcacccatttcgccctggagaaggtgtacctgcagcagcggcgctgtcccaacgccttcgtcttcaatttcctcctctacccctcggcccacgtggggctgcagaccctagcgggccaggcgctactactcagcctgggcggcggggcgggggtcgcggtggcgccaggggcgctggacctggcgctgcagtacgtgctggcgctctaccactgccaagtgttcctgaagcgcttcctgcgcttgcggtacgggcgacagaggc

SEQ ID NO: 25218 - DNA, 580 bp, Homo sapiens
  MAP TO AC010328.4; EXPRESSED IN HELA, SIGNAL = 0.39; EST_HUMAN HIT: AU129991.1, EVALUE 0.00e+00; NT HIT: gi13649241, EVALUE 0.00e+00; SWISSPROT HIT: P51522, EVALUE 4.00e-56
agcaaagggaaaattgatagtcaagatgagaagtctgtcaatgatgcttcctcagtttcagcatcccaaagaatttcttgtattcctaaaacccatatttctaataagtatgggaataatttcctccaggaagcacacatgagagaaaaatctttccaatgtaatgagagtggcaaagcctttaattgtagctcactgttaaaaaaatgtcagataatccatttaggagagaaaaaatataaatgtgatatatgtggcaaggtctttaatcagaagcgataccttgcataccatcatagatgtcacactggtgagaaaccttacaagtgtaatcagtgtggcaagaccttcagttacaagtcatcccttgtaattcacaaggcaattcatactggagagaaacctcacaagtgtaatgaatgtggcaaggtttttaatcaaaaagcatatcttgcaagtcatcatagacttcatactggagagaaaccttacaaatgtgaagaatgtgacaaagtttttagtcgctaatcacaccttgaaagacataggagaattcatactggagagaaaccgtacaaat

SEQ ID NO: 25219 - DNA, 512 bp, Homo sapiens
  MAP TO AC010336.5; EXPRESSED IN HELA, SIGNAL = 0.39; EST_HUMAN HIT: AL566847.1, EVALUE 0.00e+00; NT HIT: gi15302946, EVALUE 0.00e+00
gtgcgcccctgccgtggcctcccgctaccggaccgggctctgctgacggtctgtgcaccatctacgagactgaagggcccgagtcggcgacccccgcccctggcgcactggatccggggcccagtcccggcacgagcggtgggaaggcggcggctggggccggggccggggcgtcctcgcggagcccgaagcaggcgcgcctgggcgagctgccactgggggcgctgcaggcgagcgtcgtgcagcacctgctgagccggacgctgctgctggcggctgccgagggtgccgcgggcggcagcggcgggggcccaggaggtgcggagggtggtggcgtcacagggggcgcccgggctgcactcagcgacgccgaactcggccgctgggccgaactactgtctcccctggacgagtcccgtgccagcatcacctcggtcaccagcttctctccggacgacgtggcctccccgcagggtgactggaccgtggtggaggtggagaccttccactga

SEQ ID NO: 25220 - DNA, 947 bp, Homo sapiens
  MAP TO AL356019.2; EXPRESSED IN HELA, SIGNAL = 0.91; SWISSPROT HIT: Q9GZK7, EVALUE 7.00e-71; EST_HUMAN HIT: AU118870.1, EVALUE 2.20e-02; NT HIT: gi9938009, EVALUE 7.00e-17
ctttgggaccccagaacagaacaatgcattttgtgactgagtttgtcctcctgggtttccatggtcaaagggagatgcagagctgcttcttctcattcatcctggttctctatctcctgacactgctagggaatggagctattgtctgtgcagtgaaattggacaggcggctccacacacccatgtacatccttctgggaaactttgcctttctagagatctggtacatttcctccactgtcccaaacatgctagtcaatatcctctctgagattaaaaccatctccttctctggttgcttcctgcaattctatttctttttttcactgggtacaacagagtgtttctttttatcagttatggcttatgatcggtacctggccatctgtcgtccattacactacccctccatcatgactgggaagttctgtataattctggtctgtgtatgctgggtaggcggatttctctgctatccagtccctattgttcttatctcccaacttcccttctgtgggcccaacatcattgaccacttggtgtgtgacccaggcccattgtttgcactggcctgcatctctgctccttccactgagcttatctgttacaccttcaactcgatgattatctttgggcccttcctctccatcttgggatcttacactctggtcatcagagctgtgctttgtattccctctggtgctggtcgaactaaagctttctccacatgtgggtcccacctaatggtggtgtctctattctatggaacccttatggtgatgtatgtgagcccaacatcagggaacccagcaggaatgcagaagatcatcactctggtatacacagcaatgactccattcttaaatccccttatctatagtcttcgaaacaaagacatgaaagatgctctaaagagagtcctggggttaacagttagccaaaactga

SEQ ID NO: 25221 - DNA, 849 bp, Homo sapiens
  MAP TO AC005609.1; EXPRESSED IN HELA, SIGNAL = 0.49; SWISSPROT HIT: Q9Y5H7, EVALUE 0.00e+00; NT HIT: gi14861872, EVALUE 0.00e+00; EST_HUMAN HIT: BI465306.1, EVALUE 0.00e+00
gttgtctgtagaggtgggaccctgaggaaggcttggactgaaggccatgaggtctgttttgggtggagcttccccagagcacaccctctgtctcctctgctgcgagtacgaccagctccccaccgcgctggagcacaacagagtgggcttgccccgtgtgcacacggcctcggtgggctgcgccgagcaccgcagcgcggtgtacagcagcagcgtgagcaccagcaggctggacaccgcacagatggcgatgatcaggtacacgttgacatccaccagggcagcctcgggacccacagcgcccgccgacgcccgcgatgaggccttcggcgcctggccactttccaccagcgacaccagcactgtggctgtggctgtcagcgggggctctccatggtccttcaccagcaccagaaggcggtggcgcggtgcttcggtctcatccagagagcgtgttgtgctgatctcgcctgtgtacagccccacgcggaacgggatgcgcgcactgccaggcgctggctgcagctcatacgaaagccaagcgttgtagcccgaatcagggtccactgcgcgcaccttcgccaccacgtggcccgcacccactgacctcggcaccagctcgctcactgcgccgccggtgccacccactcgaggcaccagcagcgccggcgcgttgtcgttctcgtccagcacgaacacctgcagcgtcacgttgctgcccagaggcggcacgcccgcgtcgcgcgcgctcacctggaactgcagcagctccacttcctcgtggtccagcggctgcagcgcgtacaccttgccgctctccgcgtgcaccgaaacgtaactcgacagcgg

SEQ ID NO: 25222 - DNA, 1503 bp, Homo sapiens
  MAP TO AC018836.2; EXPRESSED IN HELA, SIGNAL = 0.77; NT HIT: gi14730805, EVALUE 0.00e+00; EST_HUMAN HIT: BE783517.1, EVALUE 0.00e+00; SWISSPROT HIT: P28968, EVALUE 1.80e-01
ctgcagcaagctgcttccgcaagcggggcagaaggaacgaagggttcacaaggaccagcttcccaatgcactcggccaccaccccccgggtgccctcctcagcaccctcgcagcgctggaacagcaaggcccagatgtcctcggcgtagggcttcaggctgtcaggctgggcggcccccagggcctccctgagtgagtgcagcagcaggtactgtcgtcggggctcagcctcgatctgctccagcaggaagggcaggaagtcgggcaggctgccagcacccacacggcccagtgcatacgaggctgcagccctcacatcctcactgggtgaccccaaagcttccaggagcaccgccttcagctcccgctggtggcctggcccagccacctgacccacctcagccagcgacaagaatgccaggaccttgacccccgtgctggagtggggcgacctggcatcgcagaccaggcgactggctgtgcttgccgcctcttggggacaggcagctgagagggctgccacacaccgggccaatgagtggaacacctgcttgtgcaggccaggcccaccatccacagcctgctcataaacaggcgcagtgagcaggctgatgagtttggcatagtccacacacgggggacgggtccctaccagggcctgcaggaagccttcagcagctgccagaaccccggctggcaacaggggcgaacgcagcagccgcagcagctctgagagcacagggccactgacctccaccaaagaggctggctgggcctgggtcactgtggcaaggaagtccacagccagctgggccacatgcatgtcgctctcgttgaccagggcaggcagctcagccagcacggcctgcacggcagacggtgggaggctgaggccctggctctgggccagggcgtccagggctgccagtgtggccagtcgcaaagcccgctggttcttccgcaggaatgaggccagaatgtgcagtgcctcggccaggatgggctgtaggtcaagctgtagtggggatacggccaccagcgtaagcgccttgatggcgggcagccgggtgatctcattccgcaggcggtccaggaggagcagtaacgtgggctccaggtcatccccaagccggtcacccaggtggcctacaaggtggcccatgcaggaaatggcccgctccttcacctcctggtccaggtcagtggcacgaagtcgcgccagggtgacagcagacatctctccaacatatggctcaggatccagcatccgaggcctgtgcagcggccacagggcccgcaccagctcctgcagcaccaccagggcctcggctgcaatcttgtagaaagagtcagccacacaggccatcacaggtggcaggaggataggcaagtgtgggtggaaggcctcagctggttcggtgcccagcagcccctgcaagaaggccagggcatccatccggatggtggaggagctggagcggtcggccagcgagaagatgatgc

SEQ ID NO: 25223 - DNA, 651 bp, Homo sapiens
  MAP TO AC004979.1; EXPRESSED IN PLACENTA, SIGNAL = 1.6; EXPRESSED IN HELA, SIGNAL = 2.4; NT HIT: gi11420322, EVALUE 0.00e+00; EST_HUMAN HIT: BE896939.1, EVALUE 4.00e-03; SWISSPROT HIT: P33250, EVALUE 4.40e-01
tctctgctattattgcctcagttattttaaattttgtaggaatcattatgaatctgtttattacagtggtcaattgcaaaacttgggtcaaaagccatagaatctcctcttctgataggattctgttcagcctgggcatcaccaggtttcttatgctgggactatttctggtgaacaccatctacttcgtctcttcaaatacggaaaggtcagtctacctgtctgctttttttgtgttgtgtttcatgtttttggactcgagcagtgtctggtttgtgaccttgctcaatatcttgtactgtgtgaagattactaacttccaacactcagtgtttctcctgctgaagcggaatatctccccaaagatccccaggctgctgctggcctgtgtgctgatttctgctttcaccacttgcctgtacatcacgcttagccaggcatcaccttttcctgaacttgtgactacgagaaataacacatcatttaatatcagtgagggcatcttgtctttagtggtttctttggtcttgagctcatctctccagttcatcattaatgtgacttctgcttccttgctaatacactccttgaggagacatatacagaagatgcagaaaaatgccactggtttctggaatccccagacggaag

SEQ ID NO: 25224 - DNA, 472 bp, Homo sapiens
  MAP TO AP001731.1; EXPRESSED IN HELA, SIGNAL = 0.5; NT HIT: gi14780450, EVALUE 0.00e+00; EST_HUMAN HIT: R87572.1, EVALUE 0.00e+00; SWISSPROT HIT: P11308, EVALUE 3.00e-87
gtgttggggtatatacccccagttggtgaattccagtatgggtttggggcagcaaaaaaactggaagatgtcacggggagggctggagggtggggcgccacaaagttcatcttctgtgggtgggcgtgataggagcccatgtacgggaggtctgaggggtacttgtacagagatgactccggggggtggggctggagggcctgggcgatcccgtggaagtcgaacttgtaggcgtagcgcttcccatggaccttggtcatgatgttcttgtcatagtagtaacggagggcgcggctgagcttatcgtagttcatgttgggtttgctcttccgctctccccagcgccgggccacctcgtcgggatccgtcatcttgaactccccgttggtgccttcccaggtgatgcagctggagttggagctgtccgacaggagctccaggaggaactgccaaagctggatctggccactgc

SEQ ID NO: 25225 - DNA, 1268 bp, Homo sapiens
  MAP TO AC008848.4; EXPRESSED IN HELA, SIGNAL = 0.57; NT HIT: gi12741684, EVALUE 7.00e-33; EST_HUMAN HIT: AW957690.1, EVALUE 0.00e+00; SWISSPROT HIT: Q14585, EVALUE 0.00e+00
acttggagtccaggtgtgagaaatttctacaaaaagacatttttgaaatcggggcattcaactgggagataatggaaagccttaaatgcagtgacctggagggctccgattttagagctgactgggaatgcgaaggccagtttgagagacaagtcaatgaagagtgctattttaagcaagtgaacgtcacctatggacatatgcccgtgttccagcatcacacgtctcacactgtacgtcagagcagggagactggtgagaaactgatggaatgtcatgaatgtgggaaagcatttagccgtggctcacaccttattcaacatcagaaaattcacactggtgaaaaaccctttggatgtaaggaatgtgggaaggccttcagccgtgcctcacaccttgttcagcatcagagaattcacacgggtgagaaaccttatgactgtaaggactgtgggaaggcctttggtcgtacatcagaacttattctacatcagagacttcatactggtgtcaaaccttatgaatgtaaagaatgtgggaagacctttaggcagcattcacagctgattctgcatcaaagaactcacacaggcgagaaaccctacgtatgtaaagactgtggcaaggctttcattcgtggctcccaactcactgtgcatcggagaatccacacaggggccagaccctatgagtgtaaagaatgcgggaaagcctttagacagcactcacagctgactgtacaccagcgaatccacactggtgagaaaccctacgagtgtaaggaatgcggaaagggctttattcacagctcagaagttactcgacatcaaagaattcattctggggagaaaccctatgagtgtaaggaatgtgggaaggccttcagacagcacgcacagctcacacgacatcagagagtccatactggcgacagaccctatgaatgtaaggactgcgggaaggcatttagtcgtagctcatacctcattcaacatcaaagaattcatacaggtgacaaaccctacgaatgtaaggaatgtgggaaggcctttattcgtgtttcacaactgactcatcatcagcgaattcacacttgtgagaaaccctatgaatgcagggagtgtggaatggcctttattcgtagttcacaacttaccgaacatcagagaattcatcctggtatcaaaccttacgaatgtagagagtgtgggcaggcatttattcttggctcacaactcattgaacactacagaattcatactggttag

SEQ ID NO: 25226 - DNA, 666 bp, Homo sapiens
  MAP TO AC009086.5; EXPRESSED IN HELA, SIGNAL =  10; SWISSPROT HIT: Q01650, EVALUE 6.00e-77; EST_HUMAN HIT: BI522879.1, EVALUE 0.00e+00; NT HIT: gi14775898, EVALUE 0.00e+00
ctagaactgccgggacggtccaggaacgcaaaaatgtagagatgtgggagccaggggcgtagtgatgcaaggatgcagggacccagggaccacgacctcccaacccccggcccgcgccccgtactcacgcacgcagtggcaggccatgagcttggctgcctcctcgggcaccgggcagctggggaagagcggcttgagcaggtaggtggcgaagaccagggccacgatgtactgcgatgaaggccggatgacgagcagctcgatccagagcttgaggaaggcgggcagcgagccgtagacgtccagcatgtaggcgtagtcgccgcccgatttggagatggtggtgcccagctccgcgtagcagagcgcgcccacgatggagaagacgccgcacgcggcccacatcaccagcgccagccccggcgagcctgcctccttaagcacgcccgtgggcgtcacgaagatgcccgagccgatgatggcgcccacgatgatggccacgccgttgagtagcgtgatgttccgctgcagggtcacgccctcgccctcgcctgccggcgccgcgccgtccgcgcgcttggaggccagcatcttctcccgcgcctcttccttctcctcggccaccggggccgctagcgcccgccgcttcgggcccgcacccgccat

SEQ ID NO: 25227 - DNA, 753 bp, Homo sapiens
  MAP TO U52112.1; EXPRESSED IN LUNG, SIGNAL = 0.94; EXPRESSED IN HELA, SIGNAL = 1.7; NT HIT: gi14768288, EVALUE 0.00e+00; EST_HUMAN HIT: BF527758.1, EVALUE 0.00e+00; SWISSPROT HIT: P51610, EVALUE 2.00e-89
ggccagactccacggtcctgtgggaagaagtggcgtcgggaagcagggcacccacgctgaccgacatggtggtgccagtggaagtggtctggtgtgtctcacaggggcgaccagcagggggctgctgcccaccctcgggctggcccgtgcccccgtttgaagtagcggtggtggccgtgtgggtggtgcccgtctcgtgggtctcgcatggcgggttggagcacaccctctgggcgctgcctgcattcgaggtagtggcggtgttggtggtgcctgtctcgtgggtctcacatggtgggttggagcagacttgggtcacggtggccgaggggcacagcagtgcctccagggctgtcacagtcactgtggtgctgggcgagccaccctggaggctctcgcacacaggtgccatgcggggctccccagcacccacgctggaacgggtcatggcagcggtgctgaccgcatggctgtggcgccccgcaggaaggtccttaatgcttgggctgctcagcctgactttgctgctcagaggggccaactgcacaaaagcagggctgcggcccccgggctcccgtgccatgctcggcccaaggagtgggccggccgagcacggggccccggtggccatcacagtcatggtggtgctggtcgcgctggtctggcgggtttggcactgggacttagagccctgggctgcctccagcgccccagtggccacactgatccggatcacggcaggggtgccagctg

SEQ ID NO: 25228 - DNA, 611 bp, Homo sapiens
  MAP TO AC011530.5; EXPRESSED IN HELA, SIGNAL = 0.66; NT HIT: X84813.1, EVALUE 0.00e+00; EST_HUMAN HIT: BG752690.1, EVALUE 0.00e+00; SWISSPROT HIT: P70178, EVALUE 9.00e-52
tcacagttccaagggctcctccacaggcaccgactggagctgggtcagaaccttggcctcagcttccaacccctcgtcaacctcaccccctgcggtggcccccaggagcagcccctcagggtcggggtctggcagcctcagcacggtgtggggggcctgtgtccccagccccttttccgcttccagcagcccctctgttcctgcgcttagttccagccctgctgaccagacaggcacggccgcgggtgacaacatcagcccctctggtgggggcgccgggaagttgggcaggaggccaggggagtcaggggagaagggcaggctggtgctggaggtggtggcagcggcggggggtggctgctgtgcagaaagggtgcctagggcgtgagcctctgggagagcagggctgggggccaccgggaggcctccctcaggcacggagatggccgtctctggcttcagtggcagggccaggccgggggctggcggcaggacctgggagacgagcatgctggtggggaaggtggcggtgaggatgatcttgccctgctgcagggccacacccgtcacgatggggctgccagacacagggttggccaggaggaagtttc

SEQ ID NO: 25229 - DNA, 452 bp, Homo sapiens
  MAP TO AL023096.1; EXPRESSED IN HELA, SIGNAL = 0.61; NT HIT: gi14727647, EVALUE 0.00e+00; EST_HUMAN HIT: BG770144.1, EVALUE 0.00e+00; SWISSPROT HIT: Q01196, EVALUE 6.00e-33
atgcggcctggcgtgctcagggccgtgggtgagttgctgtggctgccgtcggcctccacgccatcactctggccgcccaggctggggttcatgaggttgccggcggcgacagaggcagcgctgctggtgcaagaggccagcatgcgggtaggtgagcggtcgcccccactgctgctgccggccaccatggagaactggtaggagccagaggatgtcccgtagtagaggtggtagggggacgggttggcctggaagggcccgctctggttctgcggggcccccgggtagggtggcgggaggtaggtatggtggaagcggctggtggccggcatgcccgccacgctgaggctgctgatgctcgtgcccgagggcgtggcgctgtaggggaaggcagctgacatggccccgggataatgcatcctggggtctgggaagcggctctccgtgagggt

SEQ ID NO: 25230 - DNA, 697 bp, Homo sapiens
  MAP TO AL035703.19; EXPRESSED IN HELA, SIGNAL = 0.69; SWISSPROT HIT: Q60821, EVALUE 7.00e-17; EST_HUMAN HIT: AA806623.1, EVALUE 0.00e+00; NT HIT: AF055716.1, EVALUE 2.60e+00
ctggttctgtgcttgtcttctttgcctcactaaaggtttgcacagcaggggagggggaacaagcttcagctgtagtaggagtctccgctggggtttctgcattcctctggctctcctgggctgtgggagaattcacactcatctcttgtgaaactgaatgggctgcttcctcagtctcagctttcacagggccccctggagtggcagcaagctctggggaagaatgaggctctccagcaccttcagatgaaaggatttctacttgaggcttctctggttcctttctgaatgtctctgaggatggcgcagagacatcccttaccacctgaccctgaaccgagcagtttacaaggctggtcagaagatttttgcagctaacagctacatcaaacatctgtagactgtctgctaaggagatgattttggagaagttgtgcttgcccacaggtagtttgcccgtgtacatcatttccaacaagagcgcaaactcctcggggctcaccacagatgcatcgatggagatggtatctgtgttatccagcagggttttgaacaggaggctggcagcagccaggacaagcttgtgagccctgaagtaaatggtaccaatggagatggtgcaatcacagaactgctgctccttgcacagagtgtacagctgctgcagcagctgccggctgtagttggggagctccat

SEQ ID NO: 25231 - DNA, 605 bp, Homo sapiens
  MAP TO AL158075.2; EXPRESSED IN HELA, SIGNAL = 0.84; EST_HUMAN HIT: BG007443.1, EVALUE 0.00e+00; NT HIT: gi15298461, EVALUE 1.00e-32; SWISSPROT HIT: O70624, EVALUE 4.00e-41
tcagaccacgaagtggagggtgtaggtgagctggtggccattgtcccaggcgtacagcacccgctccttggggttgtagtcgatctgggtggtgtaggcgtgctcgttgaggaacggcagctgggggcgtgcgtcggtgcccgtgtgcgtgtcgaaagcgtaggcgacctggccttcctgctggttgtacgtgtccacggcatacaggatgccgcacaccaggaagcagttcccgtaggagttccgccgcagccgtgtcttccacgtggtctcccggtgcacggagagatcgccggggtccaagcgactcaggacgatcacctcgggctgggcctcatcgcggtcgtccacggcggggtagatgacccacaggccgctctcgtccacggcaaagtcaatgtccgagtgtccgcgccacttccaaggtgtggtgtcctcatataccacgtcgggcagcagcgcccaggaggccacgaagcgctgccgtaggtcgtacttgatgatgttcttggtgaaggcgcggttgtagtagaaggcgccctggtacaccacgtggcctgtgccgatccagttgtagggtagcttgtacatgttactccagcggc

SEQ ID NO: 25232 - DNA, 726 bp, Homo sapiens
  MAP TO AC004447.1; EXPRESSED IN HELA, SIGNAL = 0.74; NT HIT: gi14766906, EVALUE 0.00e+00; EST_HUMAN HIT: BE513354.1, EVALUE 0.00e+00; SWISSPROT HIT: P08640, EVALUE 5.00e-01
tttgattatttctatcccaaatcttgaaaaaacatcagacttatctatgatgtcaaagctcatctttcttctggggagccgaagattcttcagatccagccccagagggatcttctgaatggggaactggatatcttctgtccctgggtttgtccccagggtcacatcaggacttggagtgtttttctggatttggttagtgccctgagttttgggagtaatacgattcacggtgggtattttttttgtgctcacatttctcaatgtgacaagtttcccaacaccccccttagctgtgagcaggccctgagtctccccctttcctaggagggaaccttcctggtcaacgatgtttagagctcgacctctggcctggacttgactgccgcccctaagcacagagtcagcctccccaggatggtccacgtcataatcccgactctccttctccaaacactctttctcaatcagcctggaagatccaaagtcccccaaaactgcagagggaccaaaactatactcctgtgaccaagaggactcttgagaaactggatggccaaagtcttgttcccaagaaccacggagcgcaaatttccagtcctgagaacggaaatgccccaatttccggtggccaatgacctggtcccgagaatcagagtgagaaaattccagatcccggccacattctttgcgaaagtagctgtcatcactgatggaagggttgct

SEQ ID NO: 25233 - DNA, 591 bp, Homo sapiens
  MAP TO AC000040.4; EXPRESSED IN HELA, SIGNAL = 1.6; SWISSPROT HIT: P46591, EVALUE 9.00e-13
tcaaggcatgtcttttgcatgctcagaattctccaaacccttcccatcacatctagaaaaaaacatcagagtccttgctaggtgtgtacagggatccagggtcttgcccattgcctttctgatctcagctctttctattcctgcccagttgggatccagggtcttgcccattgcctttctgatctcagctctttctattcctgcccagttgggatccagggtcttgcccattgcctttctgatctcagctctttctattcctgcccagttgggatccagggtcttgcccattgcctttctgatctcagctctttctattcctgcccagttgggatccagggtcttgcccattgcctttctgatctcagctctttctattcctgcccagttgggatccagggtcttgcccattgcctttctgatctcagctctttctattcctgcccagttgggatccagggtcttgcccattgcctttctgatctcagctctttctgttcctgcccagttgggatccagggtcttgcccattgcctttctgatctcagctctttctattcctgcccagttgggatctagggtcttgcccat

SEQ ID NO: 25234 - DNA, 1200 bp, Homo sapiens
  MAP TO AC004204.1; EXPRESSED IN HELA, SIGNAL =  13; NT HIT: gi14753112, EVALUE 0.00e+00; EST_HUMAN HIT: BI860878.1, EVALUE 0.00e+00; SWISSPROT HIT: P39023, EVALUE 0.00e+00
ttaagctccttcttcctttgcaattcggtctttcttgagtggtcccatgaatgctttcttctcctccgtggtctggaagcggccatggccaaacttggaggaggtgtcaatgaacttaaggtcaatcttctccagagcccgctgctttgtctgcaccagcaaggacttgtggagggtgagcacccacttcttggttcccaccacacagcctttcagcatgacaaagtcattggtcacttcaccatagtggacgaagccacccaaagggttgatgctcttgtcagacaggtcatagtcagtggaggcattgttcttgatcagcttgccatccttgataaggtagccctagccaatcctatagatcttgttgatctcagtgcggtgatggtagcctttctgcccaccacgtaccacagagaagcccacacgagcaggatgccatgccccaatacaggccaccttgcacaggccttggtgggtcttgcggggcagcttcttggtgtgccaatgactggtgacccttttgtagcctttgcccttggtcaccctgatgacgtcgatcatctcatcctgcccaaacacttggttcacaggtacctggtgcttgagcctctcgccagcccagtccagcttctcagccacagtgcctccattcacctggatctccatcaggtgggccttcttctggcacagaggaagcaggtgcatctgggtgtgggcaatgacgcagatgacttggcagtacttcttcatgctgctgaagtccttctccagctgcttcttgccatcctcatcctgccatttcttgcagtacttggtaaaggccttcttcttagatttatgccagttcttatagaaacgcctcttgcattcatcactgatgtgctcagcgaagacagtcttgcaagtccggaagccttgaggggtttccacgcagcccacaatgcccactggtggcctctccacaatggtcacagcctccaccacctccttcttgttcaccttggatcctggcctgtcgacttcccgcacgatgtgggtcatgccagccttgtatcccaggaaggctgtgaggtggaccggcttggatgggtcatccttagggaagctcttcaccttcccacgatgcctgctgctgtgcttccaaggcaggaagccgagggacccatgtctgggagtggagaactttctgtgagacat

SEQ ID NO: 25235 - DNA, 597 bp, Homo sapiens
  MAP TO AL355885.1; EXPRESSED IN HELA, SIGNAL = 0.34; NT HIT: gi14749902, EVALUE 0.00e+00; EST_HUMAN HIT: BF795264.1, EVALUE 0.00e+00; SWISSPROT HIT: Q9QWK5, EVALUE 5.80e+00
ctgaaaaatgaaatttctcttcagaaaaacgggctagctgtgcacatattctgcttttctcttgtaacaaagtttcttttaaggcactttctctatgtcctctagaattaagagcttcaataagctggtctagctgttcacaagaactgtaaaagcaccaccgatttggcttatgcactggttttggcagctgcacagaatggtcacgtggaccttggtcaatgttggaggtagattcagacatcaaaggctctccagttttagtggatacctgaggatcttgagactgtacattattctgaaatgatgaaggtctaggcaacagcatgtcttcagtaagaccagaataatcctcttcaataaagagtccaggaatagaagggaaaatccagtatcgtctatacatgcggtcgcgacccaagggaaagatattggtacaggctatggcactttggattttttctaagagctctttctcttttcgttggtgttcctgttttaatgcttcttcctcatcagcagtaagaggctctcttgttacacagttgatctgttcttgccttgtaaattctttaaatccattttgtcctcttttcc

SEQ ID NO: 25236 - DNA, 630 bp, Homo sapiens
  MAP TO AC006027.1; EXPRESSED IN HELA, SIGNAL = 0.47; NT HIT: gi16162304, EVALUE 0.00e+00; EST_HUMAN HIT: BE887277.1, EVALUE 0.00e+00; SWISSPROT HIT: P79621, EVALUE 6.30e-02
caaagaggctcttctccatgccccggtgggccacctgccccagcgagcacagagtgtcccggccggcgtggagggtctccactgggctgcgtgtgttccgctgcaccaggctgctgggctgcatcctgttcagatggacctcagtgaccaggaggaagacatctgtcagggtcatcgtgcagtcgggcagctgtggtgagccttcaaaggcagcacggaagtgctggaagcaccggaagatgatccagcagaagaggggcacagagcacaggctgcagaggttggggttggcctccagctggctcagcaggcggtcctgcagggcccgctcggggaacatcctcctggcataggcgcgcaggtggctgggggagaagccccggagaagcaccttcttccgcaggaactggcgcgggacctcgatgcctgtgcgggctgtgagcagcttgctagcccccttgagcagcttcccactgagcaggttggccagcaagaccagggggtgggcaggctcccaggggcaggagctgtcaggcacgcggctcaggtccaagtccgagtgcagctcgtccaggccatcgaaggtgaagagggccacgtgggggaagcgcagcaggaaggcaaacacct

SEQ ID NO: 25237 - DNA, 1120 bp, Homo sapiens
  MAP TO AF228728.1; EXPRESSED IN PLACENTA, SIGNAL = 1.9; EXPRESSED IN HELA, SIGNAL = 0.55; SWISSPROT HIT: P52742, EVALUE 3.00e-90; NT HIT: gi15298475, EVALUE 3.00e-07; EST_HUMAN HIT: BI917324.1, EVALUE 0.00e+00
tcaggaagcccaacagggcgcccgcctgccctctgtgtcctccccgggctcgcggccgtgcaccttctggtgctggatgagggtggacagccggctgcaggccctcccgcaggcgcggcaccggtatggcctctcgccgctgtggagccggtagtgctcgttcagcgtgtagctcctgcggaacgccttgccgcactcggtgcacgcgaagggcttctccttggtgtggatcttctggtgcagagtgaggttggacttgcgaccgaaggccttgccgcactccgcgcactcgaacggcttctcgcccgtgtgtaggcgcaggtgcagcagcagcagggagttgtgtcggaacggcctcccgcacaccgggcactcgtggggcgggtcccccgcctggggcctctgcgcagctccgagcagggcgccctgccccgcgccgccgtcctgggcaccctcctgcgcgtgcagccggtggtgcttcaggagcgaggaccctcggatgaagcgctgcccacaccgcaggcaccggtagggccgctccccgctgtggatgcggccgtgctcgttgagggtgaacctgcggcagaacgccttgccgcactctgtgcacgcgaagggcttctccccggtgtggaacttctggtgctgcagcagccgggagctgcggctgaaggccttgccgcactcgccgcatgcgtagggccgctcgcgggtgtggacgcggtggtgggcagccagctgcgtgctctgccggaaggccttcccgcactcgccgcactggaacggcttctcctcagtgtggatcagctggtgccgcagcaggatggagctttgcttgaaggccttcccgcactctgtgcactggaagggcttggcgccggtgtggatgatctggtgcctgagaagcagcgagttgtatttgaacgccttgccgcacacgcacctgtagcggggggctgagctccccacaggccggcccaggtcttcctgcagaacccttggggaggcgctgtgctcccgagcccgggggtgggtgggtttatctgacccgtcctcaggaccgccatgcgggtggggtggtgcagggtgcccccccacagggtgcccccaggggaggcac

SEQ ID NO: 25238 - DNA, 535 bp, Homo sapiens
  MAP TO AC005005.1; EXPRESSED IN HELA, SIGNAL = 0.66; SWISSPROT HIT: P15073, EVALUE 6.50e+00; NT HIT: AF132449.2, EVALUE 3.00e-95; EST_HUMAN HIT: BI760784.1, EVALUE 1.00e-45
aggctcagagaaggtggtgacatacctaaagtcaagaggaggcagagcctggctcaaaactacccctcccaccaacccagaagcacttacgagactagtgctgcgggtggtgccggtggaggagcggcggcgggtgctgaaggcaggtgggtgggccacgggggtcccggcatcctcggcagcctgaaagagggcctcggggtcggcggcagccaggagcagctcgctgggctccagctcaggctcaaggccggacacaagtgggacccccagccgtaggctcagcacctccacctgcctgctcagtgcatccagccgccggctcagtgctgctctctctgcccgcagctcttcagctgcccgggccaccggctccacggtggctacagctacctcggctgcctgggtcactgccacccggcctgcttcagccaccgcccgcagctcctccagtgcccggcccaactgctcctcaagggctgcggccagctcaggcccaggccctggtacccccggcatggtgctggtggggact

SEQ ID NO: 25239 - DNA, 1077 bp, Homo sapiens
  MAP TO AL118558.2; EXPRESSED IN HELA, SIGNAL = 1.3; NT HIT: D13896.1, EVALUE 0.00e+00; EST_HUMAN HIT: BE005981.1, EVALUE 0.00e+00; SWISSPROT HIT: Q9JHU4, EVALUE 0.00e+00
gtcacggcagttgcacaacagaatcaaggagaggtccctgaaccccaagatatgaaagtggctgaggttctctttgatgctgcagatgcaaatgccattgaggaagtaaaccttgcttatgagaacgtcaaggaagtggatggactggatgtttccaaagagggcacggaagcctgggaggctgctatgaagaggtacgatgagaggatcgacagagtggagacccggatcaccgctcgccttcgggatcagcttggcacagccaagaatgccaacgagatgtttaggattttctccaggtttaatgcactgtttgtcaggcctcacatccgtggggccattcgcgaataccagacccagctgatccagcgcgtgaaagatgacattgagtctcttcacgacaagttcaaggtccagtacccacagagtcaggcttgtaagatgagtcacgttcgtgacttgccccctgtgtcagggtctatcatctgggctaaacagatcgacaggcagctgacggcctacatgaagcgggtggaagatgtccttggcaagggctgggagaatcacgtggaggggcagaagctgaagcaggatggagacagcttccgcatgaagctcaacacgcaggagatctttgatgactgggcaaggaaggtgcagcagcgcaacctcggtgtctcggggcgcattttcaccatcgaaagtactcgggttcggggccgaactggaaatgtgcttaagctgaaagttaactttcttcctgagattatcacactatccaaagaagtccggaacctcaaatggcttggtttccgcgtcccactggcgattgtgatcaaagcccatcaagcaaaccagctttacccgtttgccatctcactgatcgagagcgttcgtacctatgaacggacctgcgagaaggtggaggagcggaacaccatttcccttttggtggctggcttgaaaaaggaagtgcaggccctgatcgcagaaggcattgcgttggtgtgggagtcctacaaacttgacccatatgtacagcgcttagcagagactgtcttcaacttccaagaaaag

SEQ ID NO: 25240 - DNA, 1767 bp, Homo sapiens
  MAP TO AC009948.2; EXPRESSED IN HELA, SIGNAL = 1.1; NT HIT: gi16157781, EVALUE 0.00e+00; EST_HUMAN HIT: BF575343.1, EVALUE 0.00e+00; SWISSPROT HIT: P16419, EVALUE 2.00e-58
aggcaccagagattgacctggatgtggctctcagaacttctgttattgccaaagctggtgaagatgtacaagtgttgattccctttaaaggcagacctccacctactgtcacatggagaaaagatgagaagaatcttggcagtgatgccagatacagcattgaaaacactgattcatcctcattactcaccattcctcaagttactcgcaatgatacaggaaaatatattctcacaatagaaaatggagttggtgaacctaagtcttcaactgtgagtgttaaagtgcttgacacaccagctgcctgccagaaactacaggttaaacatgtttctcgaggcacagtcactttgctctgggatcctcctctcattgatggaggatctccaataattaattatgtcattgaaaagagagatgccaccaagagaacatggtctgtcgtgtcacacaaatgttctagcacatccttcaagctaatagatttgtcggagaagactccattcttcttcagagttcttgcagaaaatgaaattggaattggggaaccctgtgaaactacagagccagtgaaggctgctgaagtaccagctcctatacgtgatctctcaatgaaagactcaacaaagacatctgtcatcctcagctggaccaaacctgactttgatggtggtagcgtcatcacagaatatgttgtagaaaggaaaggtaaaggtgaacagacgtggtcccacgctggcataagtaagacatgtgaaattgaggttagccaacttaaggagcagtcagtcctggagttcagagtgtttgccaaaaatgagaaaggactgagtgatcctgtcactattgggccaattacagtgaaagaacttattattacacctgaagttgacctgtcagatatccctggggcacaagtcactgtgagaattgggcacaatgtgcaccttgaattaccttataagggaaaacccaaaccatccatcagttggctgaaagatggcttgccactgaaagaaagtgaatttgttcgcttcagtaaaactgaaaacaaaattactttgagtattaagaatgccaagaaggagcatggaggaaaatacactgttattcttgataatgcagtgtgtagaattgcagtccccattacagtcatcacccttggcccaccatcaaagcccaaaggacccattcgatttgatgaaatcaaggctgatagtgtcatcctgtcatgggatgtacctgaagataatggaggaggagaaattacttgttacagcatcgagaagcgggaaacttcacaaactaactggaagatggtgtgttcaagtgttgccagaacgactttcaaagttcctaatctagtcaaagatgctgagtaccagtttagagtgagagcagaaaacagatacggagtcagccaaccacttgtctcaagcattattgtggcaaaacaccagttcaggattcctggtcccccaggaaagccagttatatacaatgtgacttctgatggcatgtcactaacttgggatgctccagtttatgatggtggttcagaagttactggattccatgttgaaaagaaagaaagaaatagcatcctctggcaaaaagttaatacatcaccaatctctggaagagaatatagagccactggactggtagaaggtctggattaccaattccgtgtatatgctgaaaattctgctggcctaagctcacctagtgacccaagcaaatttaccttagctgtttctccagtag

SEQ ID NO: 25241 - DNA, 477 bp, Homo sapiens
  MAP TO AL022718.1; EXPRESSED IN HELA, SIGNAL = 0.59; SWISSPROT HIT: P56524, EVALUE 2.90e-01
taaagtaagactgaaaggggaggtgaggggtggactggttgtcggcagcagccggtaccggaagtggcggcagcagctgaggcgacgcaccgtgaggcagctgcttgactaggccacagccgccatggcgatgaattttggggaccatgccagcggcttccgccacaatgatgtgatcaggttcattaacaatgaagtcctcatggacggcagcggcccagccttttacgtggccttccgctcgcggccgtggaacgaggtagaggacagccttcaggccattgtggccgactctcaggtgccgcgcgccatcaagagggcctgtacctggagcgctttggctttgagcgtgcgagtggccacgaggcagcgggaggagctgctgcaccacgttcggcggctgcaaaggcatgcggaggagcgccaggcgacctcctgggctctaacgtcccagctgcagcagctgcgcctggagca

SEQ ID NO: 25242 - DNA, 567 bp, Homo sapiens
  MAP TO AC004962.1; EXPRESSED IN HELA, SIGNAL = 0.99; NT HIT: gi14729175, EVALUE 0.00e+00; EST_HUMAN HIT: AW083178.1, EVALUE 0.00e+00; SWISSPROT HIT: P56558, EVALUE 2.80e-01
atggcggagctggaggctgtggccgacgatctagacgccgtcatcgacgacctggactacctcccgggccactttcacctggagatgcagttgaacttcgagccgcgctcgccggccccacagcgcgcccgggacctgaagctgcagcgggagggtctgcggcaggagctccagctggcggccgccccgcagcgccccgctgtgcgtcacctcctgggcgctttcgcattctacctggaggagctggacgaggcccgcgagtgcttcctcgaggtggcccacgagcacccgggcaacctcaatgcctgggccaatctggcacacgtgtacgggcggctgggccaggaagaagaggaggaggcgtgcgccgcacggctggccgacctcatgggcctggcagaggagcccgaggccgccggggacccccagctccgcgccgctcgctgcctggccgagcagggctacgcgcatggcttcgacgtcggctgcgccagcccagaggagcgtgcgcgggggctggcggcaggcatcgcgctctacgacaaggcgctaggctacgggcagcag

SEQ ID NO: 25243 - DNA, 468 bp, Homo sapiens
  MAP TO AC007011.1; EXPRESSED IN HELA, SIGNAL = 0.41; NT HIT: gi15319512, EVALUE 0.00e+00; EST_HUMAN HIT: AL524697.1, EVALUE 0.00e+00; SWISSPROT HIT: Q64739, EVALUE 1.20e-01
ggcctcccgcgacgacgacttgctactgccctatccacgcgcgcgcgcgcgcctcccccgggactgcacacgggtgcgcgccggcaaccgcgagcacgagagttggcctccgcctcccgcgactcccggcgccggcggtctggccgtgcgcaccttcgtgtcgcacttcagggaccgcgcggtggccggccacctgacgcgggccgttgagcccctgcgcaccttctcggtgctggagcccggtggacccggcggctgcgcggcgagacgacgcgccaccgtggaggagacggcgcgggcggccgactgccgtgtcgcccagaacggcggcttcttccgcatgaactcgggcgagtgcctggggaacgtggtgagcgacgagcggcgggtgagcagctccggggggctgcagaacgcgcagttcgggatccgccgcgacgggaccctggtcaccgggtgaggaggcag

SEQ ID NO: 25244 - DNA, 953 bp, Homo sapiens
  MAP TO AF205588.1; EXPRESSED IN HELA, SIGNAL = 0.83; NT HIT: X52350.1, EVALUE 1.00e-86; EST_HUMAN HIT: AA161185.1, EVALUE 0.00e+00; SWISSPROT HIT: Q06730, EVALUE 1.00e-122
ttctctgatgtataataaaatgtgacttctgagaaaaggacttcccacattccttgcatgcatagggcttctctcctgtgtgagtcctttgatgtaatctgaggactgaattcacagcaaaagatttgccacattctgtgcattcatagggcttctcccctgtgtgttttctctgatgtttagtgaggtctgatttatagtaaaatgttttcccacatttattacattcaaagggtttctcccctgtgtgagttcgctgatgtactgtgagggctgacttctggtagaagcatttcctacattccttacattcatagggtttctctcctgtgtgacttctctgatgagttttgaggtgtgaattcctagagaagaatttcccacattccttacatttatagggtttctcccctgtgtgcattctctgatgtactgtgaggtgtgacttctgggaaaaggctttcccacactccttacactcatagggtttctcccctgtgtgtgttttctgatgtaccatgaggtatgccttcacataaaagaacttcccacattcagtacattcaaaaggtttctcccctgtgtgtgttttctgatgttctgtgagatgtggtttctggtagaaggatttttcacactgattacattcatagggtttctctcctgcatgggttctcagatgtctactgagagatgataggtggtaaaatattttcttacattctttacactcataggttttatctctcgtgtgaattttctgatgtcttatgaggtcttcatttttagagaaagatttcccacatttatcacagtcataggatttgccctttgagtgagtatgctgatgtactatgagggcagacttctggcagaagaacttcccacattccttacattcacaggctttctctgtggtatgagttttctgatgttttgtgagttctccattc

SEQ ID NO: 25245 - DNA, 2210 bp, Homo sapiens
  MAP TO AC021385.3; EXPRESSED IN HELA, SIGNAL = 1.2; SWISSPROT HIT: Q9UQ13, EVALUE 3.00e-18; NT HIT: gi16168882, EVALUE 0.00e+00; EST_HUMAN HIT: BE731434.1, EVALUE 0.00e+00
ctataagtacggcagatactgaataaaagaaagaatggatttacttacattgttgttggtcacagcaaagtactgcaaattactcagatactggatttcttctggaatgaaggtcaagtggttatagcttagatccaaataatgtagtttagtgcataggaaaagctgcaagggcagattctcaatattattatggtccaaagagagctgctctaggttagataatgccccaatctgtgcaggaatataagcaatgttattgtgccacaactttaagcaggaaagattctgaagatgctgaaagctaatgatctcttccacagttttaaggttattttcccttaggtctaactcatgcaaattattcaggctgaaaatggaatgtgggatgcgttccaggtcacagctgatcagttctaggcttttcagattgaccatctttttcaagttgttcaacacaaccagtttgcttccctcattatcaagggacagtttctgcaatgaaggcaggaggtctgtaacaacttgtgggatccgggagaggctgctcttcaagtacagggtccttagattttttaagtcctgaaagccctccaactgcatagtactcaactgttcagggagaacacagcccgaaagataaagttccttgagattcttgaggtgaaatacccagcgtgggatttttcccatttcagtaaatttcaggcggaggatttttaaattctcctctagaaaggccagtgcaggatggtctacgaccagagatgaatggtacacacgaagctccttgaggttgaccagctgtgagactgcagagggcagcttcacctctgggataagctccaggcttagcacttccatttcagttaactcaaagacattgtctggaagaccgttgagcataaaaagatgcagttctatcttgtcctgggcatttttcacaagcttacttttcagtttctcaactgtccattcattattgaggttgatctgtttcagtttgttctcactgacctctgataggaatatggagaagcgtttggaataaagaggatcatactgatcagccagatgaaggatgaaggcaaagtcattcttgacatcagggatgtcactgtagttgcttttttctcttaacgcctcaaaggaatattgcttcagggaactcctcagcatccaccacaggctgtaggaagaggtcagaccataaagtataaccaaaatgacataaaatgaagccaggaccttaaagatttctgccaaggaatagacacactggtagcgcttatatcctgtaaaagcctgcacatcaactgaacagtcgatttcaagagtgatgtgggttaaaaaatatggaacataagttatgatgagcacaaacaaaatgactttgactattatctgtttcagatatactctataaatgatgtccttctgctccacatgcatgcggaatcttttcactttttcaaagatggctttggcctgttcaccctccttcttgtccaggacactggaagttgggctttctatgccagctgactccaaacctggctgtgggtagggcaatgactgtttgccggaatctatgtcagctgaacaccctgaggacgaaagcaaaatcttggacttggagagtttcagaggcctcactgactgctcagccactgtttctgaaagggcgcgggtggtccatggagaatcgaagcacttgtgaaggatggccacaaaatgctcgagcctggaactggtactggggtagtgaagccaaaagttgctgcaggctgcaaagatgagcgtgtgcaagagcaccagataggggaaaaactttgcaaaccaatggagctgtttctcgtaacagacggcatcaatataggagtactgctgtcggtggaggtcattctgaattcggagggggagcggaagcggtgtcccaggattagaggatgtgttcatgctggctttcaggatgtcccaaggcacggcacagtgattgtcaaattccactttgcatggaagacagcacagaaccctgctctgcgtcagctggagagctccggccagcacggccaccagcagcatgatcagtgtgatgtaataccagaagacgtcccaccatggttttaagatgtgataagatgactgggcatctgctaagcattttagctcagttagtgtaatcatgactttcccttgtaggaggacag

SEQ ID NO: 25246 - DNA, 950 bp, Homo sapiens
  MAP TO Z81314.1; EXPRESSED IN HELA, SIGNAL = 0.33; NT HIT: gi13655032, EVALUE 0.00e+00; EST_HUMAN HIT: AL045458.1, EVALUE 0.00e+00; SWISSPROT HIT: O95236, EVALUE 9.00e-20
accttctggtttaaccacacgggatcctcgaacagccctgccccgggagctggaacaggtctggctcgccttctgcggcaggtgccggtggtgctgggtgagccggtccagctcctgctccagcttcttagcaagtgctctcagttcctctgctgtctccgtccttgccccatcctccaggtgcttccagctctgcaggaagctgctcatgtctttcataagtaagaagccagccccagcagcacccatcacccaggcaccattggtcatggccagagttgtgccctcaaaggctctctgcacccctctagccgtccagaaagggatgtgtctcttggccacaaaattcttgaccatagccatgaagccagagttggatttggccatctggtaggcatgaagatccttgatgccctggatagcttttacacacttattaacacaaaagccagcagcctcgatttcagaccaatttattcctccgaaagcctcatgtgatgttgtcagaggccccagtcggctggctttgtctcttgctgctgaattgcttctattttctaagacatttgttactatgttggtgatggcagctgctgcccccaaccctgtcccagttgctgagagcatgagactgcctcctgctgtcacaggtgctagggccaaacccaggatgttcatgaccccagaaacagccccggaagagctggccaccaggctggtcttggtaagcaactcgtgagtggtgtcaacttggtccgcaagggtgttaagttctttgatgttctgttctagctcaaacttgtgcaaaggaaaatatgagagaaacaatttttcctcctctgacagatttccatctggcatggaatctttgtcacatcgcatcagctcttcaaacagaaagtaggacagcataccagcctcatcactgtggacagttgacatcaaattgt

SEQ ID NO: 25247 - DNA, 484 bp, Homo sapiens
  MAP TO AC006059.3; EXPRESSED IN HELA, SIGNAL = 0.75; NT HIT: L04288.2, EVALUE 1.00e-109; EST_HUMAN HIT: BF911138.1, EVALUE 1.00e-101; SWISSPROT HIT: P30414, EVALUE 2.00e-63
aacagtcactgtatcatgtttacctgaaaggtcctcttcactggatttctcagtttttagaatattatcttttatggtttcattgttttcagaaacttttttctcttttgattcctgagtaacttgcttgtcatcaatctcctcctcctcctcttcaccaaattctagtggaggctgccagtgaaatgcttgctttcgttttggagccttatgctttttgtcttttttccctttcaatttctctttcacttttttggtgtgttctcttttaagattttcctttgacccatgtttgtgcttttgtggctttcccctattgttttccgaattggaacaggacccctcagagtcagaagttgatgtgcgctgtttgcttgatttccaagcaccattatcatcaggcagtgaagtatttgtggacgacttggttgtgggtttgactttgatgtgaatttcactaacctctgattcagaatcggatgtg

SEQ ID NO: 25248 - DNA, 1062 bp, Homo sapiens
  MAP TO AF178030.1; EXPRESSED IN HELA, SIGNAL = 0.3; EST_HUMAN HIT: BG254038.1, EVALUE 0.00e+00; NT HIT: gi14747642, EVALUE 0.00e+00; SWISSPROT HIT: O42410, EVALUE 7.00e-15
ttactctttaggttttccatttttttccacttgtgcattgttcctatgcaggcccctctggatatgtgttgtgaagtcatatttgtccgtgcaaagatgctggcatatgctgcactggaaaggtccactgtcaccatggcaactcatatgcaaagcatacatcacttcatccagaaagacaatgccacagtgcacacattttgttgaaagttcatcttgagtacttctatcaactttctctgtttttactacattcaagggaccttcattttttacatttggtggtgccttcgttttctccttggaggcaccgtttgcagttggcccaggtctggaatgcttgatcgccaaatctagaggaatgtcattgtctgatccaacagctgaaaaatgaggaggcagattgaaggtgggataaggcacatagttttggcaaggatttggtaggccaggcacgtgactcaagtagtgcggattcccaggaacggagagcttatatttactccagaaccgcagccaatcagcttcactctggaagtcattatgtacaaagggaagtccaaaaagtgggtactggtacttttcaatagggctgcctggtggtgaataatttgggtgtttcgcaggtctcatgtacttttctataggactgcctctctcagaacttcctttcccttcagatacggatgaactatttcctggatctccagtactttcctgaggactttttatctgaatgtgcaaaggttgcatccttttgtgaatatccaaagtttggctgaccaggactggctgctgagcagaatggcttttagtcaatgaaccctgggcttcgtatttacttaggctggggagtggaatttctctctggtgactttcagttagatgatcttctgacctcctctctaacgggcttccattgacttgctcctcattgctgcccctctgctgtttgttgagctgctcagcctgaagtgcctctgggttaaggcgctttcttgttctcctcctaataatctgctcaccgttgttttgtttaatgatgtttaaaggcctgggagt

SEQ ID NO: 25249 - DNA, 615 bp, Homo sapiens
  MAP TO AP000540.2; EXPRESSED IN HELA, SIGNAL = 0.44; EST_HUMAN HIT: BG009093.1, EVALUE 5.00e-64; NT HIT: AL163202.2, EVALUE 1.00e-103; SWISSPROT HIT: Q07283, EVALUE 2.40e-01
ttacagaacactgccactgggttctaagtgtttgtccctcacattagattccagaacactgctgctcggttctgagggtttgttcctcacataggattccaaaacactgctgctgggttctgactgtttgtccctcacataggatttcagaacactgttaagattgtctgaatgtttgtccctcacaaagtattctggaacactgctgctgtgttctgagtgtttgtccctcacataggattccagaagattgctgctgcattctgagtgtttgtccctcacataggattccacaaaactgctacgaaggtctgaatgtttgtccctcagataggattccagaatactgcaatgagggtctgaatcattgtccctcacataggattctgtcactcctatgagtgtctgaaagctgagctctcccataggattccagaaaacttctactgggttctcagtgttttttctcacataggatttcagaacactgctgctgcattctgagtgtttgtccctcagataggattccagaacactgctgctgggttctgagtgtttgtccctcatatagaattctagaacaatgctgctgggttctgagggtttgtccctcat

SEQ ID NO: 25250 - DNA, 466 bp, Homo sapiens
  MAP TO AC005940.3; EXPRESSED IN HELA, SIGNAL = 0.19; EST_HUMAN HIT: AW504509.1, EVALUE 0.00e+00; NT HIT: Y15725.1, EVALUE 0.00e+00; SWISSPROT HIT: Q93084, EVALUE 4.00e-85
ggcaccaatatcacatcgggcaaagcggtgggtgtggccgtggccaccggcctgcacacggagctgggcaagatccggagccagatggcggcagtcgagcccgagcggacgccgctgcagcgcaagctggacgagtttggacggcagctgtcccacgccatctctgtgatctgcgtggccgtgtgggtcatcaacatcggccacttcgccgacccggcccacggtggctcctggctgcgtggcgctgtctactacttcaagatcgccgtggccctggcggtggcggccatccccgagggcctcccggctgtcatcactacatgcctggcactgggcacgcggcgcatggcacgcaagaacgccatcgtgcgaagcctgccgtccgtggagaccctgggctgcacctcagtcatctgctccgacaagacgggcacgctcaccaccaatcagatgtctgtctgccggg

SEQ ID NO: 25251 - DNA, 764 bp, Homo sapiens
  MAP TO AL031667.17; EXPRESSED IN HELA, SIGNAL = 0.26; NT HIT: gi14770873, EVALUE 0.00e+00; EST_HUMAN HIT: AL043012.2, EVALUE 0.00e+00; SWISSPROT HIT: P17136, EVALUE 1.20e+00
gaaggaaaggcccagggctgtttggtgagcggctggaacgcctggagggtgatgtccagcgcctggctcaaacatatggtaccctcagtggcctggtggctagccacgaggatcccaacaggatgactggtggccccagggctcctgctgtccctgtgggctttggggtcatccctgaggggcttgtgggcccaggagacagagccagagggccactaacacctcccttagacgagatcctaagcaaggtgacagaggtgagcaacactcttcagaccaaggtgcagcttctagacaaggtgcatgggctggcacttggccatgaggcccacctgcagcggctgcgggaagccccaccatccccgctcacctccctggccctgctggaggagtacgtggaccgacggctgcaccgactctgggggagcctgctggatggctttgagcagaagctgcaaggcgtccagagtgagtgtgacctgcgggtgcaggaggtacggcggcaatgtgaggagggtcaggccgccagccggaggctgcaccagagccttgatggccgggagctggccctgcgccaggagctgtcacagctgggcagccagctgcagggcctgagcgtgtctggcaggggcagctgctgtgggcaactagccttgatcaatgcccgtatggatggccttgagagggccctgcaggcagtcaccgagacccaaaggggccccggtgccccggccggggatgagcttacgaggctctctgctgcc

SEQ ID NO: 25252 - DNA, 518 bp, Homo sapiens
  MAP TO AC008132.26; EXPRESSED IN HELA, SIGNAL = 0.45; NT HIT: gi14756466, EVALUE 7.00e-65; EST_HUMAN HIT: AL110383.1, EVALUE 6.00e-54; SWISSPROT HIT: P18899, EVALUE 3.00e-05
ctccccatgaggacaccgtacacaacatcactaacgaggatgcctcacacgatatcactaacgaggacgctgtccacggcatcgctaacgaggccgccgcccagggcatcgccaacgaggacgccgcccagggcatcgccaacgaggacgccgcccacggaatcgccagcgaggacgccgcccagggcatcgccaacgaggtcgccgcccagggcatcgccaacgaggacgccgcccagggcatcgccaacgaggacgccgtccatggcatcgccaacgaggacgctgcccacggcattgctaacgaggatgccgtgcacggcatcgctaatgaggactccgtatacgacatcgctaatgaggatgccatatatgacatcgctaatgacaccgtacaaggcacgctaacgaggatgctgtacacgacatcgctaatgaggacaccatacaaggcatcggtaatgaggacgttgtatatgacatcgctaacaaggacactctacaagccgtcgctaaca

SEQ ID NO: 25253 - DNA, 791 bp, Homo sapiens
  MAP TO AL121758.4; EXPRESSED IN HELA, SIGNAL = 0.5; SWISSPROT HIT: Q91924, EVALUE 6.00e-45; NT HIT: gi13775235, EVALUE 0.00e+00; EST_HUMAN HIT: BF346626.1, EVALUE 0.00e+00
ggtacgccccgcaccgcctgcccccgagcagctacgatgcggaccagaagccgggcctggagctggccccggccgagcccgcgtacccgccggcggcgccggaggagtacagcgaccccgaaagcccgcagtcgagcctgtcggcgcgctacttccgaggggaggcggcagtgaccgacagctactccatggacgccttcttcatctcggacgggcgctcgcggcggcggcggggcgggggcggcggggacgcggggggctcgggagacgcggggggcgccggggggcgcgcggggcgcgcgggggcgcaggcgggcggcgggcaccggcacgcgtgcgccgagtgcggcaagacctacgccacgtcgtcgaacctgagccgccacaagcagacgcaccgcagcctggacagccagctggcgcgcaaatgcccgacgtgcggcaaggcctacgtgtccatgcccgcgctcgccatgcacctgctcacgcacaacctgcgccacaagtgcggcgtctgcggcaaggccttctcgcggccctggctgctgcagggtcacatgcgctcgcacaccggcgaaaagccgttcggctgcgcgcactgcggcaaggccttcgccgaccgctccaacctgcgcgcgcacatgcagacgcactcggccttcaagcactaccgctgccgccagtgcgacaagagcttcgcgctcaagtcctacctccacaagcactgcgaggcggcctgcgccaaggcggccgagccacccccgccgacccccgccggcccggccagctga

SEQ ID NO: 25254 - DNA, 845 bp, Homo sapiens
  MAP TO AF196779.1; EXPRESSED IN HELA, SIGNAL = 0.87; SWISSPROT HIT: P02812, EVALUE 6.00e-03; NT HIT: gi15826861, EVALUE 0.00e+00; EST_HUMAN HIT: AA905650.1, EVALUE 7.00e-36
cctgcctccgatcgcgcctccctcttcgtagctcgcacccgccgcagcaacagttctgaggccctgctggtggaccgggccgctggtgggggagctggctccccgcctgcccctctggctccctctgcctctggccccccagtctgcaagagcagtgaggtgctgtatgagcgcccccaaccaacccctgccttctcctcccgcacagcaggccccccagaccctccccgggccgcccggcctagctcagctgcccctgcctcccgaggtgccccccggctcccacctgtgtgtggagacttcctcttggactattccttggaccggggcctgccccgcagtggcggtggaacaggctggggggagctgccgcctgcagctgaggtcccaggacccctctcccgccgggatgggctcctcaccatgctccccggcccaccacctgtgtatgcagctgacagcaacagccccctcctccgcaccaaggacccccacacccgtgccacccgcactaagccctgtggcctgcccccagaggctgccgaaggccctgaggtgcatccaaaccctctgctgtggatgcccccacccacccgtatcccctcggctggtgaacgcagtggccacaagaacctggctctggaggggctgcgggactggtacatccggaactcgggactggctgcggggccccagcgccggcctgtgctcccttccgtgggcccgccacacccacccttcctccatgcccgctgctatgaggtgggccaggcgctgtacggggcccccagccaggcgccactcccacactcgaggagtttcacggcgccccctgtctctggcag

SEQ ID NO: 25255 - DNA, 557 bp, Homo sapiens
  MAP TO AL136295.2; EXPRESSED IN HELA, SIGNAL = 0.54; EST_HUMAN HIT: BI523233.1, EVALUE 1.00e-127; SWISSPROT HIT: O95741, EVALUE 5.00e-50; NT HIT: gi14750997, EVALUE 0.00e+00
agaagctgaggagtccttcagccggaaggggcccgggggactcacatccttgaagtctcggaagggcacgaactggacaatgtctcgggctgcaggcacccctcgggggcagcgcaaggggccgtcgtcgccatccagcagccgcatgtcagagaagtcagcattgcccacgcctacgatgatgatggacatgggcaggcgggaggcacgcacgatagcagtgcgagtctcagccatgtcgctcaccacaccgtcagtgagcaccagcagcaccgagtacttctgagggcaagcagagagggtggaagggttggctttgtgtgcaagggcgttgacaccgtttccaccaaggtgcagaccctggccctggcaccacttaaagacacatgggacagctcctgtttgcccgccatgtcttcctaccgtggcttggccggtgctctgctcccgctgggccggctcagccacacggttgatgatgggggccacattggtggggccgtagagctggatctggggcaggcaacgacggtaggaggcgatgacccctgagatct

SEQ ID NO: 25256 - DNA, 695 bp, Homo sapiens
  MAP TO AC004449.1; EXPRESSED IN HELA, SIGNAL = 0.57; NT HIT: gi14790137, EVALUE 0.00e+00; EST_HUMAN HIT: BG257533.1, EVALUE 0.00e+00; SWISSPROT HIT: O00411, EVALUE 5.00e-88
ctaaatgagggcaagttcctgtctccaacgaccagggcaggtggcccggctcccggctgcactcacctgccgcgcccagccaagcatcacggcgttgtacatgtccagcgtgagcagcttccgcttctgccgctggccgtggtggacgaccagcaggtggtgggcgaggggcagctggtcagtgagcaggcagcacttgaagaaggccaggagcctctgctgctgacctgagagctgggcctgcgagtgctgccccgacggggcctgctccacatcgaggctcagcttcccaggggcctcctgcagcagccgggccagctgctcctcccaggggctctcgggggcctggcgcgtgcagtcctccaggcacccggccatctgcttgctcaggagccggggctccacctgcaggcgcctggtcagcgccttgaactccccgctctggaatggcatctgcagcttcgccttcaaccgctgcatacgcatctgctgggtccgcttatccttctccagtatctttgcccagcggccacagggcaccggggtggcatccttggcccccatctggaccttcctgggtggctggaggctaccatctccactgccacattctgggagccgcgccacatccaccctgttcaccaccacctccgacacgctctcagcctgcagctgccgcacccgcgcctggagca

SEQ ID NO: 25257 - DNA, 499 bp, Homo sapiens
  MAP TO Z98048.1; EXPRESSED IN HELA, SIGNAL = 0.43; NT HIT: gi11496244, EVALUE 1.00e-26; EST_HUMAN HIT: AI239873.1, EVALUE 0.00e+00; SWISSPROT HIT: O75190, EVALUE 2.00e-24
gggggatctctgttgctggtaacccaagatatacctccctcatcattgtccacgaaagtatattgagatacatgtttggagctgtgagaatttggtgaatagttgttgaatgactgtgttctccagctgcattcttttgcaaagccctcttcattggccacactatttacaagaaaaaatgtcaactctccattatcttcagcttctctttcttgatcactttcaataattttctttgtattaatatttctgccattaacgattttgtctgaagttgtaacagatatgtagttgtccatcccactattatcaaaagccagggaagagaaagaagtaaggccttcatgccccaatgaaccctgtgatgtatatcctgtatcatatgaagaaaatttctcaaaaattggatattcactggcagtggagaaaaagtatcctgcatctctgtttctgtttccataggagcttcctggacgatttaacaggtcctcaagcgagt

SEQ ID NO: 25258 - DNA, 721 bp, Homo sapiens
  MAP TO AC008764.4; EXPRESSED IN HELA, SIGNAL = 0.73; NT HIT: gi15302708, EVALUE 0.00e+00; EST_HUMAN HIT: BE885087.1, EVALUE 0.00e+00; SWISSPROT HIT: Q05722, EVALUE 1.00e-03
gaaacacgacttgggaagctcatcaacgacgtccgcaagaaaaccaagaacgaggagctcgccaagcgggccaagaagctgctgcggagctggcagaagctcatcgagccggcacaccagcatgaggcggcgctgcgggggctggcgggggccaccggctctgccaacgggggcgcacacaactgccggccggaggtgggggcggctggcccacccaggagcatccatgacctgaagagccgcaatgacctccagaggctgcccgggcagcggctggacaggctgggcagccgcaagcgccggggtgaccagcgtgacctcggccacccagggccgccacccaaggtctccaaagctagccacgaccccctggtccccaactcatcccccctccccaccaacgggatcagtgggagtccagagagcttcgccagctccctggatggcagtgggcatgcaggcccagagggcagccgcctggagcgtgacgagaatgacaagcacagtggcaagatccccgtcaacgccgtgcgaccgcacaccagctccccgggcctgggcaagcccctggaccctgcttgcagccaaaggcttcggtgctgcagcagctggacagggtggacgagactccggggcctccccatcccaagggaccccctcgctgctctttcagtcctcggaactcacggcatgagggctcctttgcccggcagcagagctt

SEQ ID NO: 25259 - DNA, 644 bp, Homo sapiens
  MAP TO AL353997.2; EXPRESSED IN HELA, SIGNAL = 0.21; SWISSPROT HIT: Q12967, EVALUE 9.70e-01; NT HIT: gi16157931, EVALUE 3.00e-21; EST_HUMAN HIT: BE464137.1, EVALUE 0.00e+00
ctcttgccgcacgtgcagagagagaggaacttccagtgcccgctatggagccacagcccacagcatggggaagtccccatccagaggcagtgctgcagctagaggtagctccagagtcctccgggccctgcaccgatacagccaaagaccagcaaagcgacaagctgccagacctcatgccacctgctgtagccactgggctcagccctggagctgagagcatcgctggagatagacgtggcagagaagaggttgcgagcatggccccagccagcagctcccacgctgcccctagtcctgggcatggagcgagccttggtgtcagagaccagggtgtgcagtctgagctcctctaccttactaaagagaggcctcttttatttaccagagccacagccctgctgcctcaggaccttttcattctgccggtgctggggctgtctatctgcaagctggaggtgttgagagcaggaaaaggaggctgtgaggaagggttcgggcagctcctcctgctctcagaggtggcctcctcctccaggcatggaggtctgtccactactgggcttctgggctatttgcccctgatttgctccctggtacgggctcttcttaacaggcaggcaaggggtgcggggaccaggtga

SEQ ID NO: 25260 - DNA, 494 bp, Homo sapiens
  MAP TO AC007732.1; EXPRESSED IN HELA, SIGNAL = 1.2; EXPRESSED IN LUNG, SIGNAL = 0.94; EST_HUMAN HIT: BG248274.1, EVALUE 0.00e+00; SWISSPROT HIT: Q02788, EVALUE 1.80e-01; NT HIT: AE002460.1, EVALUE 4.70e-01
  unsure 4
  unsure 5
ttgnnttttcaaaggtgcggtagagccaaggtcgacgacgtcatgctgaggcgactcggacgctgaaacgtcactaggcgatttttccaaagacaccggcgcctcgtgctcagtgacgtagctgtgcggctggtctacagagctttgccagtccttggaactttcttcgctctccgttcggtggatcgaatcacgtgctcctgggactgggggtcctaagcaatcctgccacatctcccggatgggggttccgcacaccatctctgggaggcagacctgtgcgtaacaggattccaggtccagttgcagttcagtgccgtccagtgaaaacatgggcactaggagtgtgaagccggcatcgtagtgaggtccccgggcgtagggacccaggggtgcatgccccagatccagggagccctcgcgaatcccatcacgaagcaccaagagctctgcctggggagaaaagcgagggtcccggcggtgaactagaccta

SEQ ID NO: 25261 - DNA, 742 bp, Homo sapiens
  MAP TO AL031777.2; EXPRESSED IN HELA, SIGNAL = 0.88; NT HIT: gi11418846, EVALUE 0.00e+00; EST_HUMAN HIT: BG943891.1, EVALUE 0.00e+00; SWISSPROT HIT: P15865, EVALUE 6.00e-27
atgtcggagactgctccacttgctcctaccattcctgcacccgcagaaaaaacacctgtgaagaaaaaggcgaagaaggcaggcgcaactgctgggaaacgcaaagcatccggacccccagtatctgagcttatcaccaaggcagtggcagcttctaaggagcgcagcggcgtttctctggccgcgcttaagaaagcgcttgcggctgctggctacgatgtagaaaaaaacaacagccgtatcaagcttggcctcaagagcttggtgagcaaaggtactctggtgcagaccaaaggtaccggtgcttctggctccttcaaactcaacaagaaagcggcttccggggaaggcaaacccaaggccaaaaaggctggcgcagccaagcctaggaagcctgctggggcagccaagaagcccaagaaggtggctggcgccgctaccccgaagaaaagcatcaaaaagactcctaagaaggtaaagaagccagcaaccgctgctgggaccaagaaagtggccaagagtgcgaaaaaggtgaaaacacctcagccaaaaaaagctgccaagagtccagctaaggccaaagcccctaagcccaaggcggccaagcctaagtcggggaagccgaaggttacaaaggcaaagaaggcagctccgaagaaaaagtgaaactggcgggacgttcccctttgaaaattttaaacggctcttttcagagccacccacaggtctcagtcaaaagagc

SEQ ID NO: 25262 - DNA, 483 bp, Homo sapiens
  MAP TO AC004889.1; EXPRESSED IN HELA, SIGNAL = 0.2; NT HIT: U86281.1, EVALUE 0.00e+00; EST_HUMAN HIT: BF974217.1, EVALUE 0.00e+00; SWISSPROT HIT: P34984, EVALUE 2.00e-58
aaatagaaaaaggaccttctgctgctcctcaggatggcgggacttaggggccatgtacatgacgatggcgctgccaaagaagagtcccactacgcagaggtgggaggagcaggtggagaaggcctttctgcggccctccccagactggatcctcaggatggccgccaggatgtgtgagtaggagaccagcaccaggcagagtggtcccaccaggatgaacatgcaggctgcaaagatgaccacctggttgagccaggtatcagcacaggccagcctgaggacagacaggatttcacagaagaagtggttgatttcacgaggcccacaaaagggcagtcttaggatgaggctcacatggaccatagccaggagggagccacatgtccaggaagtgatggccagagtgatgcagactttccaggtcatgatgatgaaatatcggagagggtggcagatggccacgtaccgatcgtaggacatcag

SEQ ID NO: 25263 - DNA, 670 bp, Homo sapiens
  MAP TO AP000041.1; EXPRESSED IN HELA, SIGNAL = 0.48; EST_HUMAN HIT: BF663371.1, EVALUE 9.50e-01; SWISSPROT HIT: Q59098, EVALUE 3.50e-01
tccgcatgcacatctgcacgtgtgtgcattcggcagtatttaccaagcacctgccaagtgccagggcctgtcctccgcacccggcgtgaactgtcctggaccagtcccgggagccgcggttctgaccagccgtgctgaccctggacgactccatgagctgttttgtgagaaagacacgccatttgtttgcagagttctgacttctgaggggtcatgtagcacatgtttggtagccaaacgctgtcattcacgaccaggagcgatggctgcaatgcctttttctttgctttgctttccggtgccgggagccttgcctcccgccgccacccctggtcagctctgcgcaagaacgtcgttctgtttggcagccaggccgagacgcagcctgaatgtgagcaggaactcggagaagggaagggagagaatcagaaagaaggcccgggagggacccgggaagcagtgggaggtctgcgccctggagccccgcgagagcccgccggtttggcacgggctcctcccgggccgcccggcggtccaacaaaggccggccccgacacgcacccggtcttttgtgggagagaaacacaaagaagagggaaaaacacggaggaggccaacagcaccaggacgcgggggccaaccaggaactcccggagccggggcccattag

SEQ ID NO: 25264 - DNA, 780 bp, Homo sapiens
  MAP TO AL078605.18; EXPRESSED IN HELA, SIGNAL = 0.6; SWISSPROT HIT: O00548, EVALUE 0.00e+00; NT HIT: gi14760127, EVALUE 0.00e+00; EST_HUMAN HIT: BG740465.1, EVALUE 0.00e+00
gtgccaagtgtgtggacctcggtgatgcctacctgtgccgctgccaggccggcttctcggggaggcactgtgacgacaacgtggacgactgcgcctcctccccgtgcgccaacgggggcacctgccgggatggcgtgaacgacttctcctgcacctgcccgcctggctacacgggcaggaactgcagtgcccccgtcagcaggtgcgagcacgcaccctgccacaatggggccacctgccacgagaggggccaccgctatgtgtgcgagtgtgcccgaggctacgggggtcccaactgccagttcctgctccccgagctgcccccgggcccagcggtggtggacctcactgagaagctagagggccagggcgggccattcccctgggtggccgtgtgcgccggggtcatccttgtcctcatgctgctgctgggctgtgccgctgtggtggtctgcgtccggctgaggctgcagaagcaccggcccccagccgacccctgccggggggagacggagaccatgaacaacctggccaactgccagcgtgagaaggacatctcagtcagcatcatcggggccacgcagatcaagaacaccaacaagaaggcggacttccacggggaccacagcgccgacaagaatggcttcaaggcccgctacccagcggtggactataacctcgtgcaggacctcaagggtgacgacaccgccgtcagggacgcgcacagcaagcgtgacaccaagtgccagccccagggctcctcaggggaggagaagggga

SEQ ID NO: 25265 - DNA, 591 bp, Homo sapiens
  MAP TO AC022517.1; EXPRESSED IN HELA, SIGNAL = 0.47; EST_HUMAN HIT: BF907707.1, EVALUE 0.00e+00; SWISSPROT HIT: P43699, EVALUE 1.70e-01; NT HIT: AF317660.1, EVALUE 1.40e-01
ctgaaactcataacctgagagaagagctgccaggtgagctgagcagggattattctcttttgctgctgcctgggatgggctaaggggtgcaaatcgaccttgcccttggtctaagcctaacacaatcaggaagtccaaggagctgcctgagcctccccccagggaaggctggagctgagcagaagtgacagtgtctggagattggtggtagctcccacagggctggccatggggatggcttgtccccgaaaccacccccttctcaaggagcagggaagaccctgcaaggtccgagagtggtgaccgggtggggccagcctgcatggcaaggaggtcctggatgctcagtgacaggtcgagagtggtgactgggcggggccggcctgcacggcggagcggggggggtcctggatgctcagtgacaggtccgagagcagtgaccgggcggggccggcctgcatggcaaggcggtcctggatgctcagtgacaggttgagagtggtgactgggcggggtcggcctgcacggccgggggtgggggtcctggatgctcagtgacaggtccgagagtggtgaccgggcggggccggc

SEQ ID NO: 25266 - DNA, 455 bp, Homo sapiens
  MAP TO Z98885.1; EXPRESSED IN HELA, SIGNAL = 0.8; EST_HUMAN HIT: BE838449.1, EVALUE 1.00e-118; SWISSPROT HIT: O95696, EVALUE 9.00e-51; NT HIT: gi14779673, EVALUE 0.00e+00
gaaagagcgtcttccacctcctccggacacggcgccagttcttaccgtcttcccaggagaaaggccgccgcggtgccgcagcaggccgctcaggcaggtgcatccccgaggcctcttccaagccgatgctgtccacctcgcgccgggcctgcctcagaacaacacctccctgatcgcgcagcctcaccgcggctctatagaacacggtgtccctggcattgtacttcatgcagttatctataatgagatcaaaatcctcctcaaactcatggaggtttttatacccttgagcttctaaccgtttcctcattgtggcaaagtccatgggatgtttaatgtgatccaaataatctggtacctaattttagggaggaaaaagaatcatttacaaactaaaacaggatattagttgactctatatttattattccatataacccacaagcccatcctat

SEQ ID NO: 25267 - DNA, 1044 bp, Homo sapiens
  MAP TO AC018761.2; EXPRESSED IN HELA, SIGNAL = 7.6; EST_HUMAN HIT: BG741058.1, EVALUE 0.00e+00; SWISSPROT HIT: P17275, EVALUE 0.00e+00; NT HIT: gi14759453, EVALUE 0.00e+00
atgtgcactaaaatggaacagcccttctaccacgacgactcatacacagctacgggatacggccgggcccctggtggcctctctctacacgactacaaactcctgaaaccgagcctggcggtcaacctggccgacccctaccggagtctcaaagcgcctggggctcgcggacccggcccagagggcggcggtggcggcagctacttttctggtcagggctcggacaccggcgcgtctctcaagctcgcctcttcggagctggaacgcctgattgtccccaacagcaacggcgtgatcacgacgacgcctacacccccgggacagtacttttacccccgcgggggtggcagcggtggaggtgcagggggcgcagggggcggcgtcaccgaggagcaggagggcttcgccgacggctttgtcaaagccctggacgatctgcacaagatgaaccacgtgacaccccccaacgtgtccctgggcgctaccggggggcccccggctgggcccgggggcgtctacgccggcccggagccacctcccgtttacaccaacctcagcagctactccccagcctctgcgtcctcgggaggcgccggggctgccgtcgggaccgggagctcgtacccgacgaccaccatcagctacctcccacacgcgccgcccttcgccggtggccacccggcgcagctgggcttgggccgcggcgcctccaccttcaaggaggaaccgcagaccgtgccggaggcgcgcagccgggacgccacgccgccggtgtcccccatcaacatggaagaccaagagcgcatcaaagtggagcgcaagcggctgcggaaccggctggcggccaccaagtgccggaagcggaagctggagcgcatcgcgcgcctggaggacaaggtgaagacgctcaaggccgagaacgcggggctgtcgagtaccgccggcctcctccgggagcaggtggcccagctcaaacagaaggtcatgacccacgtcagcaacggctgtcagctgctgcttggggtcaagggacacgccttctga

SEQ ID NO: 25268 - DNA, 1455 bp, Homo sapiens
  MAP TO AL034406.1; EXPRESSED IN HELA, SIGNAL = 0.76; NT HIT: gi15616630, EVALUE 5.60e+00; SWISSPROT HIT: P09719, EVALUE 8.60e-01
tgggaaagaacatttgtgggatataacttgggtaggactgtgtaggacagggaggatggtggaagatacagttgcctaggtgtagccaaagaaggagaggataaaaggacatggagatctggaacctaagataccaagggaacaggcagctccatagttttgtctacttttcaccttctctgtttctgaccaagaaatctaatttgtgttcatgcaattgaattcagcaccaatatgtaaatgacaaagatgaaagggataccactacttaaagcaatgctacctattctagaaaatatcaaagataaatcagctggctcttttaaaaagatctatgacttgataataaaatacttgaaagcagcctatttttttttatgtttcattttaatgattgttcttatttatttatttactcattccatctatgtgataacatctatagttcatatgctcctgaaactcaaattcataaaagcatacataagttatgtgattatttctgcaaagtaccaaatctattattgaatgaaaataaattatttacatttctattatagtattgatatttctgtaaatgacacaaaacattaattcttattgtcttatttttaccaagtgaaaactgtagtaattgtaaatgttttcaaacattcttttctcactaacatgttttcttttggctgttcaatttgttatccaattttgaaacatatttccaatttggcaatggacacaataaatatttcacagtctgttatttgattggaaagaaaaataaataatattttgtctttgaatacagaacatgtatgccttgcttcaaatggaaataggccactgattatcataaaatatcatggtctgaaaaaatttcatggttacagtgctcagtgggaatatactatctaaaaatgtattattttaagttggtgtgaacacctgcacccttgtatttttctttaaaatctgggttgcatttttaccatgtaccaccttgattacctttaaaaaaatattaacagcttgcatcctcataccaatgcccagttacaaactccaaatgttttgtcacatttcttctgagcaatgccatctgccagaggtggcattcatggctgtttaccctgactccctccaagtattcatctgccactatctaatgctgcctgaataaaggggattaagactctgatgcaacagagactattgataatttggtataattgggaagaaatgaagataaatgaggttgaggatggataggcaattagttgagctgcctgtacagctgtgttctcggcctagctcccctggccttttcttcagtgaggtatgtgcaaattaaccataatgacaaacacacacttcccaaagctcttatactttataaaacttgagaattcacttttcacttctgataactcagttagttgtttggtaaagttgtttctc

SEQ ID NO: 25269 - DNA, 845 bp, Homo sapiens
  MAP TO AL161730.2; EXPRESSED IN HELA, SIGNAL = 0.9; NT HIT: AJ290954.1, EVALUE 0.00e+00; EST_HUMAN HIT: BI769349.1, EVALUE 0.00e+00; SWISSPROT HIT: Q21313, EVALUE 2.30e+00
aacaaaaagagagtaaatgtgagtcatgccagaatggacaagaagaactgatctccaaatcccatcagctttacctaggatcatcttctaggtctaatggtgtcattgggaaacaaagtatcgggtcatctatttcagaatactccaacaagcctgatagtatcctgtctcctcatcctggagagcaatcaggaggtgaagagagtcccaggtccttatcatcctctgatctggaatcaggaaatgaaagtgaatgggtcaaagacttgactgcgaccaaggcaagccttccgacagtgtcctcaagaccaagagatcctcttgatatccttactaagattttcccaaattacaggcgcagccggctagaaggcattctacggttctgcaaaggggatgtggtccaagccattgaacaggttttaaatggcaaagaacacaagccagacaacaggaacctagcaaactcagaagaactggaaaacacagcctttcagagagcttcaagttttagtcttgctggaattggttttggaactctaggtaataaatcagctttctctcctcttcaaactacttctgcttcttatggaggtgattcaagtctctacggcgtaaatcctagagtaggtatcagtccattaaggctggcatattcttctgcaggaagagggttatctggttttatgtcaccctacctaacacctgggttagtaccaaccttaccttttcggccagctttggattatgccttttcagggatgattagagattcttcctacctttccagtaaagactcaataacttgtggcagactgtacttcagaccaaatcaggacaatccg

SEQ ID NO: 25270 - DNA, 774 bp, Homo sapiens
  MAP TO AC011625.2; EXPRESSED IN HELA, SIGNAL = 0.43; NT HIT: gi14742774, EVALUE 0.00e+00; EST_HUMAN HIT: AL138180.1, EVALUE 1.00e-03; SWISSPROT HIT: P51805, EVALUE 1.00e-66
aaaggggaaggatgatacacatcccatgggggctacaggctggggttctcatcctacactcccgaccatcccagcgcgcagccctccctgtactcaccgcactgctgcaggggatgtccttcaccttaagccaggccaggtccagcgtgccctcgccccggtaacaagactgcagccgctccttaatgcggtcatttatctgcttcaagatgaagatgcacagggccgactcatccagggatttcattttccgcttctggcccttggagaagacggtgaagagcaggtcatcatctggatggactccaagggtcctgccaagcacggcccccgctttggacaggtaggcagcctgcagcaggcggtactccaccccactgcgctcacagccaatgggcacctctacataggagttgaaggctgtgtcctccttgcaaagcctcacgagcttggatgtatacacctgctccttggtggtggagcctggtggagacaccatctcaggttggagggtcaaaaagtagacaaagttgccactgctaaaaccatagacatagtagatatcaaagtcagggatgatggtgaaggtgtccgaagggatcttaatcatcgaggccacgaactcatcatggaagacgtacgcgaacatgccatccgcctcagagttcttggtcagtttccggctggagatggtgggaaaatactcgggcttcccatccactgccgtggcaatgaacagcttgtcatccaggttgctgtaggagacgatcactc

SEQ ID NO: 25271 - DNA, 593 bp, Homo sapiens
  MAP TO AC010724.1; EXPRESSED IN HELA, SIGNAL = 0.87; NT HIT: gi16161055, EVALUE 7.00e-93; EST_HUMAN HIT: AI806468.1, EVALUE 3.00e-77; SWISSPROT HIT: Q08379, EVALUE 6.00e-10
ctgaacccctggccccacagcccccagcagggccatctaaggtggagcagctacaagatgagaccaaccacctaaggaaggagctagagagtgtgggaagacagctccaggctgaggtggaaaacaatcagatgttgagtctcctgaacaggagacaggaggagaggctacgtgaacaggaggagaggctacgtgaacaggaggagaggctgtgtgaacaggaggagaggctgtgtgaacaggaggagaggctacgtgaacaggaggagaggctgtgtgaacaggagaagctgccagggcaggagaggctgctggaagaggtggagaagctgttaaaacaggagaggcggcaggaggagcaggagaggctgctggagagggagaggctgctggacgaggtggaggagctcctggagcaggagaggcttcggcaacaggatgagaggctgtggcagcaggagactctgcgggagctggagaggttgcgggagctggagaggatgctggagctggggtgggaagccctgtacgagcagcgggccgagccacgcagcggcttcgaggagctggtacgttgccccacctggggaggc

SEQ ID NO: 25272 - DNA, 571 bp, Homo sapiens
  MAP TO AC007564.9; EXPRESSED IN HELA, SIGNAL = 0.78; SWISSPROT HIT: P35439, EVALUE 1.90e+00; NT HIT: gi8924119, EVALUE 1.00e-35; EST_HUMAN HIT: BG483371.1, EVALUE 7.00e-23
gcagaggcagccataatctccccgagaacgtaactctatccacctgagaaccacaccatcatctcccacagcagccacagcaagccctgcccaaggacagtctaggcttagacacgcctaaccctgcacccacctaattgtttttctataccactctggtagccaaagacaaaggacataatctcttcagagctctatgtcctcatccaccacctgagaaacccaaatatttatccaggcaaccctagggcaaccttgtgtcttacctatactatcagctgatgctctcttgaaagcaccacttcctggctggaggccaaccaacacaaaaccagtgcactaaaaaaaatacaatcaaggaccttcacagaatccacttcactcccctactacctccaccagagcaggtgctggtatccatggctgagagacctgaaggtggatcatattacaggattttttgcagacactcctctgtaccagcccagagcccggtagcttcgatgggtgcctagacccagaagagaaataacaatcactgcagttcagttctcaggaagctccatcccta

SEQ ID NO: 25273 - DNA, 697 bp, Homo sapiens
  MAP TO AL121757.2; EXPRESSED IN HELA, SIGNAL = 0.61; SWISSPROT HIT: P25103, EVALUE 1.00e-20; NT HIT: gi10946717, EVALUE 4.00e-98; EST_HUMAN HIT: BG747606.1, EVALUE 6.30e-02
atatctcgccatcgttcaccccttgaaaccacggatgaattatcaaacggcctccttcctgatcgccttggtctggatggtgtccattctcattgccatcccatcggcttactttgcaacagaaacggtcctctttattgtcaagagccaggagaagatcttctgtggccagatctggcctgtggatcagcagctctactacaagtcctacttcctcttcatctttggtgtcgagttcgtgggccctgtggtcaccatgaccctgtgctatgccaggatctcccgggagctctggttcaaggcagtccctgggttccagacggagcagattcgcaagcggctgcgctgccgcaggaagacggtcctggtgctcatgtgcattctcacggcctatgtgctgtgctgggcacccttctacggtttcaccatcgttcgtgacttcttccccactgtgttcgtgaaggaaaagcactacctcactgccttctacgtggtcgagtgcatcgccatgagcaacagcatgatcaacaccgtgtgcttcgtgacggtcaagaacaacaccatgaagtacttcaagaagatgatgctgctgcactggcgtccctcccagcgggggagcaagtccagtgctgaccttgacctcagaaccaacggggtgcccaccacagaagaggtggactgtatcaggctgaagtga

SEQ ID NO: 25274 - DNA, 761 bp, Homo sapiens
  MAP TO AC005038.1; EXPRESSED IN HELA, SIGNAL = 0.3; EST_HUMAN HIT: BG423439.1, EVALUE 0.00e+00; SWISSPROT HIT: P30822, EVALUE 7.00e-03; NT HIT: gi14742683, EVALUE 0.00e+00
ctctgggcatcaggctgtgagatggcattcacaatggcctccacactgctgtcgaagagctccgagtcctgcagagcagcaaaggcagcctgaatgagcgcctcacagtcctgcagcggcacctccagctgcacccagctggagaaacacttgagcaccttctgacgcacacagctgggtgagctgggctgctgtagcagctgctccagcagcgggaagacagccccacattccaccgccaggctggtccgcaccaggcctttgcggtactggggtaggcgactggtctggaactcctcaggcagcactgtcagcagctctaacagggctaggcagcggccctgcccatccactggtgagtcctcagcctggaagagtcgtaccatatctgccacagcacatggccaagcgtcaggcatcatgctgagagccagtgaggccagtgccacgcacagccgagtcagtacaatcttggagccactggcaaagcgggtgatctgggtgaagagctgtgcctttaggctttcatactggtcagtggggatgtcactccagtagcgagagatcttgatgtgaagagcactggccccaaagtactggatctctggtaccttgtcgggctgcagtagctgccagctgaagtgccaggcctgtggggagacctgggcctgcatcagccacttctgagccaggttcttattctcaatgttgggatcatagtagagctggtgcagcgcctgcaggacagcacaggactgagc

SEQ ID NO: 25275 - DNA, 1209 bp, Homo sapiens
  MAP TO AL139392.1; EXPRESSED IN HELA, SIGNAL = 0.61; EST_HUMAN HIT: BE671218.1, EVALUE 0.00e+00; NT HIT: X15120.1, EVALUE 5.00e-03
tcacagtgaggtctctacgcaggagccgtggcggtgcagcggccggtggctgtggcccagacacccctcctgccggtggacgatgaggaccggaaagtagagggcgtcgtggtagggcggcggcggcccggcctcctcctcgtcgtcgtcctcgtcgtcccccatgctggcctggctggacagccgcgtctgctccgtggggcagctggcctcgttgacgctcccgctgcggctgcgccacaggcagctgcgccgggagccgtagagacggcccagcgagaagcggctgcccccgcagcccgcgcccccaccgggccccgggccggcccgcgggctggcgcagatgcttagggcgctgcgcgagaagatagacgagctgctgacggcgcgctggcagtgctcgcagctgcgccggtagggagccacgcccgccgcgcccgggccgcctaccccaccgtagcggcacgagggcgcgtagccgccgcctgccccgccgcagcgcgtcccgagccccgccaggtccatgagcaccgcctcagagtagctgggcaccagctgctggttggagcggatgtgccactcgagctccgtgctgtctactgtgttgacccgcggcaggcggtgggtgagcgggggcagcagctcatcgctggggctgaggccaccgcctgcgctgctggccgagcccgggccctccaggccaaatagcttctccacgtggtagtgcgcgtaggccgtgcggtactcggccagcactcgcagcggccacgacagcgtgagcagcgccgcggcccagaaggccgacgagcaggcgtaccagggcggccgggccgggtccgggaaggccaccatgaactcacggaagtccacgttcttgaggtgcatgccctcgcgtgcctccatgtagtcgtctaggccctcgttctctgcgaagaagcgcgcgcgctggcacaggtacgcgttctcggcctccacgctggcgaaactgaagcacttggtgaagcgcagccgcgtggccggcgcgccctccagccccaccagcgtcttggacacgtcgcgaacgccgcagcgcgcgtagtcgaactcagcctccgccacgtgcgtgttgacgcgttcgtggtagacctgcggcgcggggggcaggcggcggggtcgcggggagcccgtcattggtgcccgcttctgcccactcaccctttcccgccccat

SEQ ID NO: 25276 - DNA, 706 bp, Homo sapiens
  MAP TO AC025115.2; EXPRESSED IN HELA, SIGNAL = 0.99; NT HIT: AF262722.1, EVALUE 5.00e-11; EST_HUMAN HIT: BG193339.1, EVALUE 1.00e-03; SWISSPROT HIT: Q13606, EVALUE 5.00e-66
cacttacacaatggtgaattttacacatgtctcagaatttgttctacttgggttccaagggggtcccgggatgcaggctatgctatttctgatttttctgatcctgtatggcatagctgtggtgggaaaccttggcatgattgtaattatctgggtagatgcacacctccacaccccaatgtatgccttcctgcaaagcctttcattgttggacatctgctattcctccacaattgcacccagggctctggcgaactccatgcaagaggaccacacaatttcctttggcggatgtgctgctcagttctttttcttgtctctctttggtatcacagaggctttcctcctggctgccatggcctatgaccgcttcatcgccatctgcaaccctcttctgtactctgtgagcatgtctcaccaggtctgtgtgctgttaatatcaggatcctacttgtggggtgtagtcaatgccattgctcaaacaaccatgaccttcaggttgcctttctgtgggtccaatgagatcaacgactttttctgtgatgttcccccactcttgtccctctcatgttcagatacctttataaaccaactggttcttcttggtttatgtggctccattattgtcagtacctttttgattgtcctggtctcatacatttacatcatctcaacaattctgaggatcccgaccatgcagggacgc

SEQ ID NO: 25277 - DNA, 453 bp, Homo sapiens
  MAP TO AL034380.22; EXPRESSED IN HELA, SIGNAL = 0.79; NT HIT: gi16157940, EVALUE 0.00e+00; EST_HUMAN HIT: BG470398.1, EVALUE 0.00e+00; SWISSPROT HIT: P46577, EVALUE 7.00e-08
gcggtgatcggcccgccgggctcagggaagaccacgtactgcctgggcatgagtgagttcctgcgcgcgctgggccggcgcgtggcggtggtgaacctggacccggccaacgaggggctgccgtacgagtgtgccgtggacgtgggcgagctggtggggctgggcgacgtgatggacgcgctgcgcctggggcccaacggcggcctgctctactgcatggagtacctggaagccaacctggactggctgcgtgccaagctcgaccccctccgcggccactacttcctcttcgactgcccaggccaggtggagctctgcacgcatcacggcgccttgcgcagcatcttctcccaaatggcgcagtgggacctcagggtgcgtctcagggcggggaggcccattttgcggatggagtaactgagacagggaggacagacgccacgcccccatgtc

SEQ ID NO: 25278 - DNA, 584 bp, Homo sapiens
  MAP TO AL022327.17; EXPRESSED IN HELA, SIGNAL = 0.56; NT HIT: gi15319292, EVALUE 2.00e-34; EST_HUMAN HIT: BI603053.1, EVALUE 3.00e-34; SWISSPROT HIT: Q15049, EVALUE 2.00e-03
cgataaggaaggttattaccaatgataccaataacagactagagtctccacagatgaggcgcacgccgccatgcggtgtagacagccaactcttcgccaactcggaatcgaaacgtgacgtttaatccagcctcagtcacccccgacagagtatgagagaaaagagaaagaagggaagttttcttactgagtaagatttcaggacccgagcaggaaatggcacttcgtccagaatgttggcgctgtcagacatggagccctacgaagaaacagaactgtcaccccgggtgcacgggcacagggactcagcactgccgctggcatccggccgccgtgggcagtgggtcaggtcagcctgccgtgtagatgcgagaccgccttggaggcgcccgtggatctttgggcttgaggaaatgttcacacacattgtccttgcatatgaaaattagcagatgtggtgtctcctggtgatcccctggggacgagcactggactgagtcaggcttagggggaggggagggtacagcatctgtcttcacctccctgtagccagcggccgccaacccctcacccagctccagagc

SEQ ID NO: 25279 - DNA, 668 bp, Homo sapiens
  MAP TO Z82188.2; EXPRESSED IN HELA, SIGNAL = 0.42; NT HIT: AL445067.1, EVALUE 1.00e-02; EST_HUMAN HIT: BF514979.1, EVALUE 0.00e+00; SWISSPROT HIT: Q95107, EVALUE 3.50e-01
gccaggccagagtgtccatcacagtgccctaccttctctctggctggaaatgtaggcacatgacccgcacctggccaaccatggcaccctatcaccacgtctttggtgattggcccaagggaccatcatgtgacctagttggagccaatccactttcttccctgaaatctgctatttggataatagggagaaaggacatctactgcttttggatcaaggtctataaggatgtgggctcagccccatcaagggtatcttccatgttccctgaaggacctggactctgggaggtcacacccgaacaggccagggtgcacggagcccacacacacctacacattcacacccatcaggacacagtgtctggcggagaaattggcccaggccacagctgttatcaggtgtcaccgtctttattgacaagagctagagacagaagcagcaaagggtttcctaactggcctcccagggaccattctaggacattactctcctgtcctaggcagcaagaaggcaggatcagccagagaaggccagaaggccagggcatccttcctcccttggaccctcagatcttcctcaagaaaccccagaccaagtcccagggccgggcctccagcctccatctccacacaaaatgtggttttgtaaacttccttctcttctga

SEQ ID NO: 25280 - DNA, 689 bp, Homo sapiens
  MAP TO AL121895.18; EXPRESSED IN HELA, SIGNAL = 0.39; NT HIT: gi11067406, EVALUE 1.00e-23; EST_HUMAN HIT: BF380880.1, EVALUE 3.00e-81; SWISSPROT HIT: P16884, EVALUE 1.60e-01
cccagttccagtagcttctgccagcgtggtttcacagcctgaattgggggacacgggctctagttccgtgtgtgcttcctggtaggatgcagaagtgtcctccctgaagtgtctggtagccagaggtatcactgtggaatgtgtggctttggggctggcaaagtcccctgggggctggagttgggcgaagcccaggtctgagagcgtactccgctgctgctctgcttgtcccacgggtgcctctgaagatacgtcatttggaagggaccttgcttcaccctcactcattcggcgagtttcagctccgtgggtctcaaatatccgaattttgttggccactgaggtcttgctaatatcttctagggagccctcttggtccccagcctggaaagaggtcatctcccttcgcttccctgaagggaacccaaaccccagaggtatgcgcccctcagcttcttcagggactactctgggctttctgctggtgatgggaggaggcctgcgctcacctcctgtggcaggggacaccacaaaccctacttggtccttgggctctgggctggctttcgaaagatggacatgtctaagaaagggctccctgagctccgaaggctcccctgacccatgggaggttgggcttggagaagcttcctccagagctgccaggtcctcagaatgaccaggggagg

SEQ ID NO: 25281 - DNA, 1258 bp, Homo sapiens
  MAP TO AC022432.2; EXPRESSED IN HELA, SIGNAL = 0.44; SWISSPROT HIT: Q03923, EVALUE 0.00e+00; NT HIT: gi4508026, EVALUE 0.00e+00; EST_HUMAN HIT: BG616121.1, EVALUE 0.00e+00
atgtgttctcattttgccaaagaccttaggccagagcaatatataaaaaattctttccaacaagtgatactgagaagatatggaaaatgtggatatcagaaaggctgtaaaagtgtggatgagcataagttgcacaaaggaggtcacaagggacttaaccggtgtgtgacaactacccagagcaaaatagttcagtgtgacaaatacgtgaaagtctttcataaatattcaaatgcaaagagacataagataagacatactggaaaaaatcctttcaaatgtaaagaatgtggcaaatcattttgcatgctttcacaactaactcaacatgagataattcatactggagaaaaaccctacaaatgtgaagaatgtggcaaagcttttaaaaagtcctcaaaccttacgaatcataagataattcatactggagagaaaccctacaaatgtgaagaatgtggaaaagcttttaaccagtcctcaactcttactagacataagataattcatactggagagaaactctacaaatgtgaagaatgtggcaaagcttttaaccggtcctcaaaccttactaaacataagatagttcatactggagagaaaccctacaaatgtgaagaatgtggcaaagcttttaaacagtcctcaaaccttactaatcacaagaaaattcatactggagagaaaccctacaaatgtggagaatgtggcaaagcctttaccctatcttcacaccttactacacataagaggattcatactggtgagaaaccctacaaatgtgaagaatgtggcaaagcttttagtgtattttcaacccttactaaacataagataattcatactgaagagaaaccctacaaatgtgaagaatgtggcaaagcttttaaccggtcctcacaccttactaatcataaggtaattcatactggagagaaaccctacaaatgtgaagaatgtggtaaagcctttaccaagtcctcaactcttacttatcataaggtaattcatactggaaagaaaccctacaaatgtgaagaatgtggtaaagcctttagtatattctcaatccttactaaacataaagtaattcatactgaagacaaaccctacaaatgtgaagaatgtggcaaaacttttaactactcctcaaattttactaatcataaaaaaattcatactggagagaaaccctataagtgtgaagaatgtggcaaaagctttattctgtcctctcatcttactacacataaga

SEQ ID NO: 25282 - DNA, 588 bp, Homo sapiens
  MAP TO AC007324.38; EXPRESSED IN HELA, SIGNAL = 0.44; SWISSPROT HIT: Q04503, EVALUE 1.00e-03; NT HIT: gi14756466, EVALUE 9.00e-03; EST_HUMAN HIT: BI829297.1, EVALUE 0.00e+00
aaagtgtcttacattggcagcatcttcttttttacagatgtcttgtacagtgtcctcattagcaatgtcatatacagcgtccttattagcgaattcgtatacagcatcctcattagcgatgccatatacagcgtcctcattagcgatgttgtatacagcgtcctcattaatgatgtcgtatagagcgtcctcattagcgatgtcatatacaatgtcctcattagcgatgtcatatacagcaacctcattagctatgtcttgtaaagcatcctcattagcgatgtcatatacaacgtcctcattagcgatgtcatatacagcgtcctcgttagcgatgtcttgtacggtgtccttataagcaatgtcgtctacagcatcctcgttagcatgccttgtgggtgccattagcgatgtcatatacagcatcctcattggtgatgtcttatatggtgtcctcattagcgatgttgtgtacagcgtcctcgttagcaatgccttgtacagtgtcctcgttagcgatgccatatacagtgtcctcattagtgatggcttgtacactgtcctcattagtgatgtcgtgtacagcat

SEQ ID NO: 25283 - DNA, 602 bp, Homo sapiens
  MAP TO AL163152.2; EXPRESSED IN HELA, SIGNAL = 0.38; SWISSPROT HIT: Q15615, EVALUE 2.00e-59; NT HIT: AE008683.1, EVALUE 3.70e-02; EST_HUMAN HIT: AI809240.1, EVALUE 6.00e-82
cgggagagatgttcctcctcgttgtgatggcctttgaccgctacatcgccatctgccggcctttacactattcaaccatcatgaaccctagagcctgctatgcattatcgttggttctgtggcttgggggctttatccattccattgtacaagtagcccttatcctgcacttgcctttctgtggcccaaaccagctcgataacttcttctgtgatgttccacaggtcatcaagctggcctgcaccaatacctttgtggtggagcttctgatggtctccaacagtggcctgctcagcctcctgtgcttcctgggccttctggcctcctatgcagtcatcctctgtcgtataagggagcactcctctgaaggaaagagcaaggctatttccacatgcaccacccatattatcattatatttctcatgtttggacctgctattttcatctacacttgccccttccaggctttcccagctgacaaggtagtttctcttttccatactgtcatctttcctttgatgaaccctgttatttatacgcttcgcaaccaggaggtgaaagcttccatgaggaagttgttaagtcaacatatgttttgctga

SEQ ID NO: 25284 - DNA, 550 bp, Homo sapiens
  MAP TO AP000345.1; EXPRESSED IN HELA, SIGNAL = 0.9; NT HIT: AB053119.1, EVALUE 3.40e-02; EST_HUMAN HIT: AW853055.1, EVALUE 7.70e-01; SWISSPROT HIT: O60242, EVALUE 2.30e+00
tccctatccctcatgcaaagcactaacctggaggcggagcatttcatcgaagcaaagcatctcctgccaccaagcacgtccacggtattggggattgattgcttctatcctccagcccactctacggagcacccaccgtgtgacaggcgcggcgctgggcaacgaggataagaaaatgaataggccacgacatgtgcgcctgagaagtcacagactcagacaggagacaggctcgataccacacaccaaggtctggatgcacacaggacactgagtaactcctgcagggtgagcgggtttccagggcactcgacaaccggcagagtctggaagcagcctggaggggaaagggcattcctgacgggggcacagcagaagcaaaggcccagtggcatgaaagaccaaggagtgttgagggaacagagagcagcttggtgttggggcggcatcagcgggtggagctggagccgatgagaaaggataggccaactagggttcaagtggccaagaccttctatgccctgctctgccagttacagccagcagtggt

SEQ ID NO: 25285 - DNA, 666 bp, Homo sapiens
  MAP TO AL096801.15; EXPRESSED IN HELA, SIGNAL = 0.49; NT HIT: gi14758506, EVALUE 0.00e+00; EST_HUMAN HIT: BF530378.1, EVALUE 0.00e+00; SWISSPROT HIT: P20333, EVALUE 6.00e-24
cttggattccttagcaccaccacagctcagccagaacagaaggcctcgaatctcattggcacataccgccatgttgaccgtgccaccggccaggtgctaacctgtgacaagtgtccagcaggaacctatgtctctgagcattgtaccaacacaagcctgcgcgtctgcagcagttgccctgtggggacctttaccaggcatgagaatggcatagagaaatgccatgactgtagtcagccatgcccatggccaatgattgagaaattaccttgtgctgccttgactgaccgagaatgcacttgcccacctggcatgttccagtctaacgctacctgtgccccccatacggtgtgtcctgtgggttggggtgtgcggaagaaagggacagagactgaggatgtgcggtgtaagcagtgtgctcggggtaccttctcagatgtgccttctagtgtgatgaaatgcaaagcatacacagactgtctgagtcagaacctggtggtgatcaagccggggaccaaggagacagacaacgtctgtggcacactcccgtccttctccagctccacctcaccttcccctggcacagccatctttccacgccctgagcacatggaaacccatgaagtcccttcctccacttatgttcccaaaggtaacttaacctca

SEQ ID NO: 25286 - DNA, 1011 bp, Homo sapiens
  MAP TO AL157955.1; EXPRESSED IN HELA, SIGNAL = 0.22; SWISSPROT HIT: Q61038, EVALUE 0.00e+00; NT HIT: gi13632481, EVALUE 0.00e+00; EST_HUMAN HIT: BI824101.1, EVALUE 0.00e+00
atgaacagcacatgtattgaagaacagcatgacctggatcactatttgtttcccattgtttacatctttgtgattatagtcagcattccagccaatattggatctctgtgtgtgtctttcctgcaagcaaagaaggaaagtgaactaggaatttacctcttcagtttgtcactatcagatttactctatgcattaactctccctttatggattgattatacctggaataaagacaactggactttctctcctgccttgtgcaaagggagtgcttttctcatgtacatgaatttttacagcagcacagcattcctcacctgcattgccgttgatcggtatttggctgttgtctaccctttgaagttttttttcctaaggacaagaagatttgcactcatggtcagcctgtccatctggatattggaaaccatcttcaatgctgttatgttgtgggaagatgaaacagttgttgaatattgcgatgccgaaaagtctaattttactttatgctatgacaaataccctttagagaaatggcaaatcaacctcaacttgttcaggacgtgtacaggctatgcaatacctttggtcaccatcctgatctgcaaccggaaagtctaccaagctgtgcggcacaataaagccacggaaaacaaggaaaagaagagaatcataaaactacttgtcagcatcacagttacttttgtcttatgctttactccctttcatgtgatgttgctgattcgctgcattttagagcatgctgtgaacttcgaagaccacagcaattctgggaagcgaacttacacaatgtatagaatcacggttgcattaacaagtttaaattgtgttgctgatccaattctgtactgttttgtaaccgaaacaggaagatatgatatgtggaatatattaaaattctgcactgggaggtgtaatacatcacaaagacaaagaaaacgcatactttctgtgtctacaaaagatactatggaattagaggtccttgag

SEQ ID NO: 25287 - DNA, 1613 bp, Homo sapiens
  MAP TO AC022150.5; EXPRESSED IN HELA, SIGNAL = 0.74; SWISSPROT HIT: P51522, EVALUE 0.00e+00; NT HIT: gi8922743, EVALUE 0.00e+00; EST_HUMAN HIT: BI761488.1, EVALUE 1.00e-129
ctaatgatttgcaatgcttgtagcattactgaggactttgtgagaatcattacatttgtaaagtttccctataccatggattgcttgatgatgaataagtgatgactgcccactaaaggctttgccacactcattgcacttataaggattttctccagtatgaagtctatgatggcatacaaaggatgacatatgactgaaggtcttgccacactcattgcacttgtaaggtttctctccactatgaagtctataatggtatacaaaggatgacatatgactgaaggtcttgccacactcattacacctgtaaggtttctctccagtatgaactctctgatgttgtgcaaggtttgactgttgattaaaaaccttgccacattcattacacttgtaaggtttctctccagtatgaattgccttatgaattagaagggatgaatttcgagcaaaggtcttgccacactcatgacagttgtaaggtttttctccggtatgaagtctacgatggcccacaagggatgacttctgactgaaggtcttgccacactcattacacttgtaaggtttctctccagtatgaagcctataatgacatgcaaggtgtgctttttgattaaaaaccttaccacattcattacatgtgtaaggtttctctccagtatgaactctctgatgttgtgcaaggtatgaatcacgctggaaaaccttgccacattcattacatgtgtaaggtttctcttcagtatgaactctgttatggcgtgaaaggcatgaattatgcctaaaagctttgtcacaaaccttacatttgtatggtttctctccagtatgaattcgcctatgtgtttcaagttgtgatctgcaactgtaaactttgtcacatccttcacatttgtaaggtttctctccagtatgacgtctacgatgccctacaagggatgacgtctgactgaaggtcttaccacactcattacacttgtaaggtttttctccagtatgaagtctatgatggcgtgtaagagatgacttgtgaccgaaggtcttggaacactcattacacttgtaaggtttttctccagtatgaactctatggtgccatgcaaggtattgcttttgatgaaacactttgccacatacatcacatttatattgtttctctcctgaatgggttacatgatgtcttcttaaatgtgagctataattaaaggctttgccacactcattacattggaaaggtttttctctcatgtgttcttcctggatttgtgtcaataatgaagaatggagaaagttcttcccatacctattagaaatatgggttttgagcctacaagaaattctttgggatgttgaaaccaaggaagcattgttgatagacttctccacttgattatcaattttcccttcagtctgaaattcgtgcagttcaggcagatgtgaataaaagcttgatccaagctgatctttaataggcttgtttccagcatgcctttgatcacgtcggtctgtactaccagtcaactttttgatttttgtcatgggtgcttcatggccatttcttttaatttcttgccactgaaactcaaagtcatgaatatctttcttgattt

SEQ ID NO: 25288 - DNA, 495 bp, Homo sapiens
  MAP TO AC002080.1; EXPRESSED IN HELA, SIGNAL = 0.82; EST_HUMAN HIT: AA005247.1, EVALUE 0.00e+00; SWISSPROT HIT: P08581, EVALUE 3.00e-96; NT HIT: gi14752522, EVALUE 0.00e+00
tgtgcttgcacctggcatcctcgtgctcctgtttaccttggtgcagaggagcaatggggagtgtaaagaggcactagcaaagtccgagatgaatgtgaatatgaagtatcagcttcccaacttcaccgcggaaacacccatccagaatgtcattctacatgagcatcacattttccttggtgccactaactacatttatgttttaaatgaggaagaccttcagaaggttgctgagtacaagactgggcctgtgctggaacacccagattgtttcccatgtcaggactgcagcagcaaagccaatttatcaggaggtgtttggaaagataacatcaacatggctctagttgtcgacacctactatgatgatcaactcattagctgtggcagcgtcaacagagggacctgccagcgacatgtctttccccacaatcatactgctgacatacagtcggaggttcactgcatattctccccacagatagaagagcccag

SEQ ID NO: 25289 - DNA, 647 bp, Homo sapiens
  MAP TO AC023490.4; EXPRESSED IN HELA, SIGNAL = 0.39; EST_HUMAN HIT: BE531263.1, EVALUE 4.00e-03; SWISSPROT HIT: P27806, EVALUE 4.40e-01; NT HIT: gi11427757, EVALUE 0.00e+00
aaagtgggccctgggcagcctgagggcagctctcacctctggccagcaaacttctagactgcaccttgagggccaaaaacgtccagatttcctgctcaatgctgtcgtcgctgtccacggagctactgtcaccatcagagcgggaaggcacgttgggggagtagaagagtgggcttgcggacagggacccatcgctgccctccatagggccggcaggatcgtcttgaaaatgtccaggactgcttctacacacatcagctcagcggaggtgtctgcctggcaagaggaccattccacaaacttgctcctggaagccgggctcgttggaggtggagctttggtttcctttgggatcttgggggaatggtcagcgtccagatcccctggaccagggtccgtggtcttggtgggcactggcttcttcttgctgggtgttttcctgtgggtctctggcaaggcactttttgtggcgctgcttgtgctgtgtgcgggaggggcaggtgctctttcctcttggagctggaccctctggggcgggtccccgtcggcctccttgcgtgttttctgcacctggtacagctggatggcctcctcaatgccgtcgtcgctgctggagtcggacgcctcgggcgcctgtacggcgctcg

SEQ ID NO: 25290 - DNA, 465 bp, Homo sapiens
  MAP TO AC006453.3; EXPRESSED IN HELA, SIGNAL = 0.36; NT HIT: M67440.1, EVALUE 0.00e+00; EST_HUMAN HIT: BE746231.1, EVALUE 0.00e+00; SWISSPROT HIT: P21918, EVALUE 1.00e-51
tcttgcgctcgtagcggaagggcctggagatggcccagtagcggcccacgctgatgacctgctgacgcacaggttcaggatggaggcggtggagcacatgatgtcgaaggccacccagacgtcgcagaacgcttcaaagggccaataaccggccacctcggcgactgccttccagggcatgaccagcagcgccacgaagaggtctgacacagccagagacacgatgaagacgttggtcatcttggcgcgcaggtggcggctccgcacgatggctgcggacatcagcacgttgcccagcaaggtccagatgatgagtagggtcagcaggcaggcggtgaccacctgcacgggccccagtggcggtgcccccgccgagccccccacggcgttcccctgcgccagctgctggtatagcgctaactgccccgggtacgcggtgccgttgctccttggcggcagcatttc

SEQ ID NO: 25291 - DNA, 1424 bp, Homo sapiens
  MAP TO AC012313.5; EXPRESSED IN HELA, SIGNAL = 0.38; NT HIT: gi16162715, EVALUE 0.00e+00; EST_HUMAN HIT: AU142635.1, EVALUE 0.00e+00; SWISSPROT HIT: P52742, EVALUE 2.00e-97
tcagacctccgctggctgcgagacggcggctgggcccgaggcgggagtgggctcggtttccttcgctggcgcaccttctgatgatgccccggcaacagacctggcctgggggtgcaggctggccctggatcgccggacggtcttctcgccggtatggatcctctggtggtggaagagggccgggcgctcacggaaggcgcggccacactgcgtacacacgaagggcttctcgcccgtgtgaatgcgccggtggctgagcagcacggcgcccttggcgaaggccttgccacagtccacgcagcggaagggccgctcgcccgtgtgcaggagctggtgctgggtgaggttggagctgtggctaaaggcgcggccgcactgtgggcaggcgaagggcttctcgcctgtgtgcacgcgctggtgcttaaagagcgaggagccctggctgaaggcagcaccgcagagcgcgcacacgaagggcttctcgcctgtgtgcgtacgctcgtgctggatcaggtgcgagttgcggcagaagcggcggccacactgtgcgcaagcataaggacgcccacccgcgtggatcttgcggtgctggctgaggttggagccgtggctgaaggccttgccgcactcggagcagcggaaggacttctcggccgtgtggatgcgctggtgccgcaccagcgaggagctatgccggaaggccttgccgcacacggggcacgcgtagggcgtctcgccgctgtggatgcgctggtgctgcgtcaagtgcgacgtctggctgaaggccttgccgcactgggtgcactcgtagggccgctccccggtgtgggtgcgtaggtgcttgaggaggtcggagctcttcacgaacactttgctgcacgccctgcattcgaaggacttctccccagcgtgaagagcctcgcccagctcgtcccaggtcgagggctcctggccaccgaggagtctatgaggctcctgccaaactgcacccattcggtgatgtccccgaccgccggcagcctccaggtcctgggcgctcccaaaggttctcccagggacctcctgtgcacatggtttctgccgctcaggcgtcctgggctgcctccccagcaacgcatgctctgtgagtgtcttttctctaagccggacgccctcgggaggcctaagcggggaggtcagtcgcaggctgacgctggcttgcccactgcctgagcctagcaggagcctctcccagtagatcaccgacacccccgtgggttttctctcccgagatggggaggcaccccgttgtctctgcaggctttttacactgtggcaggcaccggcaacagggaagacgctagtagtcatcccaggtggggtatctgggaaagctcgtggccattctccagaaacatctctatcctctgtcaaactccaggaac

SEQ ID NO: 25292 - DNA, 2167 bp, Homo sapiens
  MAP TO AC005754.1; EXPRESSED IN HELA, SIGNAL = 0.69; SWISSPROT HIT: Q9Y5E4, EVALUE 0.00e+00; NT HIT: gi15295799, EVALUE 0.00e+00; EST_HUMAN HIT: BI831368.1, EVALUE 0.00e+00
ggaaggcagcagttttccctatttcttcaccagcgccctggggcaaaaggttaggaataatcggcttcaggaacttgaactcgccggcccctgagtctccggtcaaacacacctcgtagtggtagctctgggatagggtcccggtgccgctcacgtccaccagatgccctggaaaggggccctcgggcaccgagcagcgaccgaccgaggccgccctgctcctcctgcacagccgcactgccacgaacaggagcaccgaaaagaggaagagcgacgacaccgaggccaatgccaccaccaggtagacagtgagcgagtcggcctgggcctgggccggggccgcctccggcagcggcaggtagggctgggagaagccgtccaccaggagcacgtgcagcgtggcggtggccgagcgcggaggctcgccattgtccttgaccagcaccaccagcctgtgcttggccgcgtcgcgctcgctcagcagcctggcggtgcgcacctcgccattgtgcgcccacatgctgaacagcccgggctccgtggccttgagcagctggtacgacagccaggcgttctggcccgagtcgccgtccaccgccaccaccttggtcaccaggtagcccggctcggccgcccggggcaccagctcggtgcaaggcgccgagccgttctgcagcggatacagcacgaagggcgagttgtcgttggcgtccagcaccagcacgcgcaccagcgcctcgctgctcagcgccggggagccgcggtctgtggctcccacgcggaactcgaacgcctgcagggcctcgtagtccagcgacctgagggcaaacaggtggccgttgtccgcgttgatggagaccagggaggcgaggcgcaggtgtgggttctggggcggcagcagcgagtaggtgacctgggcgttggtgcctgagtctctgtctgtggcgctgacactgccgatgtgcagggcggggctgttgttctctcggacgaacagggtgtaggaggtttgggtgaaggcgggggcgttgtcattgacgtcggagaccaggaccgttatgttgtgctcggttttcagcctgggtgtccccatgtcggtgacagtgatggtgatgttgtactcggcttggctctctctgtccagtgttctctgtgtcactagggtgtaaaagttttttaatgtgggcttcaaaagaaaggggagatcattctggatggagcaaatcatcctaccgttgtccccggagtctggatcagaaacactgaaaacggcaactacagtttccggggcattttctggggtagggctggagagcgtagacatggtgagttcaggggcgttgtcattcacatccaccacttctatagccacagtgcattttcctgaaaggcccccaccatctgtggctacaatttccacgttataatatggagttgcctcgaaatccaatgcccttttcaggcgaatttctgctgttttctcgtctattacaaatggttgagtaacttcatcgccttggaatagagcataggctacactcccatatgctcctgcatctaaatctcgagcggagacaacgacaactaaggagttaagggggctgttctcgggcacctgtacctcatagaatgattgtaaaaattcgggggcgttgtcattattatccaagacgacaatgcgaattgtggtggtcccggacctgggcggagccccaccgtccagtgcagtgagtgttaagctgagctcaggccgctcctcccggtccagcgctttgtccagcaccagctctgggtattttctgccatctccgcgattatgcgtagcaacatgaaagtgtgaatttgggctgattgtgtagttctgaacagtgttgctacctatgtcaaagtcctgggctatttttaagggaaacacagtccctggctgggtgctctctgggatttttaggagcatttccttctctgggaactctggggcatggtcatttatatctgtgagctgcagatcagtttgaaaaaactgcactggattttctagtaagagctggaaatgcaatatacagggttctgtcgccccgcacatcacctcccggtctagtttttcatatagaagcaaattgccggtctttatatcaagctgcaagagctctttgtttcctttgtaatg

SEQ ID NO: 25293 - DNA, 894 bp, Homo sapiens
  MAP TO AD000092.1; EXPRESSED IN HELA, SIGNAL = 0.19; SWISSPROT HIT: Q13351, EVALUE 1.00e-108; NT HIT: U37106.1, EVALUE 0.00e+00; EST_HUMAN HIT: BI523767.1, EVALUE 0.00e+00
ctgtgtgcgtgcgcagatgcgccttcaggtgggagctcttggtgtagctcttgccgcaacccgggtgcgcgcacgtgtgcgctgcctgcctcttgcgcgcccacgaacgtcggcctcgcttggatggcgcggtctcggctatcacacctggatcctctgcagtccccccgagtccagtgcccaccgtcccgggtcccaaacaactcaggaaggagggggacgtggcgggaccgggcgcgggtccctggagcccgcggaagagctggaagtgcccttggtactgaggcgccgggtacatcgcggggtacccggacagtagcccgtagggggcgcccgacgccgcaggcactgaaagcccggtccgcgggaagtagccacccgaggagccggcgccgggccccgggtacaccggttgcagcgccagcgccttgggctcgggggccggggctggagccagggctgggcccacgaaggcgtcgggagcccgggctcgcagggcagggcgcacccaacccgagtgatcctccgaacccaaaagcccagccaccagccccgggccgccagcatatgcgcccagagtctcgggcggcggcggatattgcgccccggaggcctcgctgggcgccagagcgcaggtctggggcgcgccaccgggctccgggcccgagaagttggtgaggaggagatccaggtcccaggtggcgtccgcgcccctctcatcgtcctcttcctccccgggctggtcctcagacttcacgtggaggggcggctccgtggggtcaggaggacccgggcccatgtcctgcgcctcttcggagcgccaccactgcgggagggagcaggcagctcgaggttcggtggacactggggtgccctgcccagggacatcgcggg

SEQ ID NO: 25294 - DNA, 626 bp, Homo sapiens
  MAP TO AC005343.1; EXPRESSED IN HELA, SIGNAL = 0.5; SWISSPROT HIT: P35859, EVALUE 2.00e-12; EST_HUMAN HIT: BG120237.1, EVALUE 5.70e-02
ctcggtaggagaaccactccatccagtgtttgaactcacgcaggttacagtcacactcccaggggttatccccgacctgcagcagctgcaggtttgctaggggttcaaatgtcagccggtccagattctgcagacggttggagcgaagcgagagggagcgcagagccaggagcccgtcgaaaagaccagggggcaactgggccaggccgttgatggacaggtccaggtggcggagcagcggcgagtgccgcagcaggtccctgtccagggtcctgatgctgttattgcgcagctgaagctcagtcagattcgtcaggtccccgaaaatggagcggggcagccggtccaggaagttgttggacaggtccaaccgctgcaggctggagaggttggcgaaagcccagcttggcagggcactcagcttattgttcaagagcaagagggttcgggtggctgcgggcacgtctgggggcaccgtggtgaggccaaggccactgcagtccacctccaggctgcggctgtcacacttgcaggagaaagggcaggtggggagggcctccacagcatacagggcgatccagcaggtgatcccttggtgggagggacagacgggggaaagaaagcaa

SEQ ID NO: 25295 - DNA, 1516 bp, Homo sapiens
  MAP TO AL137853.3; EXPRESSED IN HELA, SIGNAL = 0.3; EST_HUMAN HIT: BG956303.1, EVALUE 0.00e+00; SWISSPROT HIT: Q9UPN3, EVALUE 0.00e+00; NT HIT: gi16168500, EVALUE 0.00e+00
ccgatcgcattaacagactccaggcagctcttgccagcacccagcagttccagcaaatgtttgatgagttgaggacctggttggatgataaacaaagccagcaagcaaaaaactgcccaatttctgcaaaattggagcggctacagtctcagctacaggagaatgaagagtttcagaaaagtcttaatcaacacagtggctcctatgaggtgattgtggctgaaggggaatctctacttctttctgtacctcctggagaagagaaaaggactctacaaaaccagttggttgagctcaaaaaccattgggaagagcttagtaaaaaaactgcagacagacaatccaggctcaaggattgtatgcagaaagctcagaaatatcagtggcatgtggaagaccttgtgccatggatagaagattgtaaagctaagatgtctgagttgcgagtcactctggatccagtgcagctagagtccagtctcctaagatcaaaggctatgctgaatgaggtggagaagcgccgctccctgctggaaatattgaatagtgctgctgacattctgatcaattcttcagaagcagatgaggatggaatccgggatgagaaggctgggatcaaccagaacatggatgctgttacagaagagctgcaggccaaaacagggtcactcgaagaaatgactcagaggctcagggagttccaggaaagctttaagaatattgaaaagaaggttgaaggagccaaacaccaacttgagatctttgatgctctgggttctcaagcctgtagcaacaagaacctggagaagctaagagctcaacaggaagtgctgcaggccctagagcctcaggtagactatctgaggaactttactcagggtctggtagaagatgccccagatggatctgatgcttctcaacttctccaccaagctgaggtcgcccagcaagagttcctcgaagttaagcaaagagtgaacagtggttgtgtgatgatggaaaacaagctggaggggattggccagtttcactgccgggtccgagagatgttctctcaattggcagacctggatgatgagctagatggcatgggtgctattggcagagacactgatagcctccagtcccaaatcgaggatgtccggctattccttaacaaaattcacgtcctcaaattagacatagaggcctctgaagcagagtgtcgacatatgctagaagaagaggggactctggatttgttaggtctcaaaagggagctagaagccctgaacaaacagtgtggcaaactgacagagagggggaaagctcgtcaggaacagctggaactgacactaggccgtgtagaggacttctacaggaaattgaaaggactcaatgacgcgaccacagcagcagaggaggcagaggccctccagtgggtagtggggaccgaagtggaaatcatcaaccaacaattagcagattttaaagtaagtctgaaccttgtttttctttttcttttacatgtatttat

SEQ ID NO: 25296 - DNA, 1425 bp, Homo sapiens
  MAP TO AL139342.2; EXPRESSED IN HELA, SIGNAL = 0.88; EST_HUMAN HIT: BG982543.1, EVALUE 0.00e+00; SWISSPROT HIT: P53832, EVALUE 9.40e-02; NT HIT: gi14729298, EVALUE 3.00e-63
atgctaataaagttgccatgtgtcatttcaggtgtcattctattagaagaccatcccatagcaccagtgtcatctacctcacctggtatcaaagtggaaagcttacctgcgtctcaagcacacatgctggaaaccacgaccaagtcagtaatacctgtaaaaccagttgccacagaaactctcatcaatggtaaaggaaaggaaagaggaggcaaggggcagcctcctttgcgccacagatccgagggtggcttagtggataagggacccttgaagaagttgccccacctgtctttgtctcagtatgacttactagaaacagacgtttctttccagccgtgggggagtgagaattcagtcctgattccagaacctgtcagttgtccccggggctccataagggaacgggtacaaagcaagtcacctcaggacagcctgagcagcagctgccctcaatgtgacaccatcgtggccaagcctgtggaggagccagcagacacatcctgtcaggtagatacctcctgccagggggacctgcccttgcaccaggaagtggactcctcagatagtgaggtagctgttactctcatcgatacttctcaacccggagacccactgagtctacatgagcccataaaaattgttatcacgatgagcagtaccccaaactccatgacagatttggaaagctccctccacctgagggtggttggcacagagaagaccagtgtaaagtctgacgctgagcccactaacccaggggcggccggttctccaaatgccgagcagatctcaattcctgtaatcaccctggacctgcctgagggtgggggaggaggtgttccctgtcccgaaggcaatggaagtgaaaggactccagagagactgaagacgagggtatccaccaatcagtgttctggctacggatctggggaggggggaaatgccatcaaggatcacagttcttcatcacgggaaccctgggaatcggtgtcccggcttacacctgatacaggctccgagtctaaggtggggaaggaaggccagactaaccttgacccatcgtcttgtaagtccagccatgaaaagaggcatgcccgggtgctcagtgtggacagtgggacagatgtcttcttgagtaaaagttctgcagaaattgttaacgatacagagaaaacaatgccaacttccaaatctgacctagaggctaaggaaggacaaatgccaaatgagtccaacttcctggaatttgtctccctgttagaatccattaatacttccaagatgacggcatccagtcaactgaatggctcagctgagcagaatgaagaaagtgggcttctccgaggtgcgattccatgtcatttccgttctgatgatgacatagaaggcaatacacctttttgccatttgccttgtgtaatt

SEQ ID NO: 25297 - DNA, 566 bp, Homo sapiens
  MAP TO AP000359.1; EXPRESSED IN HELA, SIGNAL = 0.54; EST_HUMAN HIT: H55399.1, EVALUE 8.00e-38; SWISSPROT HIT: P50117, EVALUE 4.10e+00; NT HIT: AY056266.1, EVALUE 1.40e-01
ggctcttgctggtgatgtatgagcatcagacttcgcttgggtccctggtgggagccagcacagaaaaaagtcaacattgtagatggtgagtggtgagtgacaccacagtaggtttatgaatttctttttcagggcctcctaggtatggagcaaggagcattttacaggatgggatgatgatgctgtgtgagcatgtgaaggaaagaactcactggtaggtgaatgatgtgaatgtgatttcacagagtatgggaaccctggacccagggaatgaaggcgggaggctccaggggaatttttagagaaagcctggtggctccttttgatgagcagccctggtgagcagcaggttgatgaatgaagtgatttcactgtaacagatttccaagtctaaaatcgaggatgtaaaggaaccctgcttctccccataaatagacaatctcaacttttctcttcttgattttcacttaaggctggatttttttttctactttctcccagatgagtttcattcattcattcattcattcattttttcagtgttttgtttgagagcccacaatgtg

SEQ ID NO: 25298 - DNA, 494 bp, Homo sapiens
  MAP TO AP001660.1; EXPRESSED IN HELA, SIGNAL = 0.52; NT HIT: AY043279.1, EVALUE 1.90e+00; EST_HUMAN HIT: AV726972.1, EVALUE 2.70e+00; SWISSPROT HIT: P11227, EVALUE 1.00e-26
atgaatggagacttcatgaaagtagttgccaggagtatggaagaagatatagtgtggctgaaagagaaaaactattcacagacttacttcttaagttatcaggagtctgggcagaggacagtcccccggggctggtagtgaatcaagcacctgtcatagtagaactactacaaggaacctacctggtgcagatctgtcagtatcccattcccacagaggttaaccaagggattgcaaaacacttaaaatggctccttgaatttggaataatagagagatgtgtctcctcatggaatgctcccctattgctggtgttaaaactttctggtgactactggcctatacaagccttaaaggcaatcaacgaggtggtggctacactgcatgctattgtgcctaacctgtacgctatgcttgcacaaatacctgctagtgctgcttggttcacatgcttacacataaaagatgcattcttctgcatccaattagcccct

SEQ ID NO: 25299 - DNA, 963 bp, Homo sapiens
  MAP TO AP001710.1; EXPRESSED IN HELA, SIGNAL = 0.46; SWISSPROT HIT: Q13009, EVALUE 0.00e+00; NT HIT: gi15320009, EVALUE 0.00e+00; EST_HUMAN HIT: BI058851.1, EVALUE 0.00e+00
ctgagttgttttagctcttctgccttgcatgctgttgctatggctaatttgtgggttggtggcaccttcagagagacagtgagatttcctacagggaagtgtgttataattactgtacggaggagtctcttcagcagcagctggtggcatcttatggtttgcaagattgggaatatcagacaccaaattccgacagtagcctgcaaatttgctccccggccccccgtttgctgtcactccagagtttttctgagcatacaagtcacccaaggaattggctctctgacaggtgctgagctgccgcggactcgcccgcgtttccatcccccgagcctcctcgcagtccttctcttcggcggaacccaagatttcttcgttgcttgttaaatgttcttggctcagatcagagagtgagaattccaggctgtcctcccgccagatgtctgcagatttggagcgtttcttcttaaagctcgccgtctccatgaaagtgggcccattggatgtataggaatgctgcctcctgcctccctcagccaaatatgtagcgtcatccccgtaaagcctgctctcctcagtgtctggcatgctctgcacagaggctgctgtgaggacgatgctgctgtctacgctgggagtgacagaagagtcagtgtaagacacaggtctcaagcccatgtccactcggtccacccagatggggctcccgaagtcttctagggtaccatcttgggagaagggctccaggccattttcagccagggactgggggatgctgggggtgctgctggatcgggtgctcacttcggagttcctgtggatcaccttccccgaggaagcgtgcctggtcctccgcgtcttgtgcgagaggcgcagggagcgggaagtgtgcttgcgccccaggctggcatgcttttctccataaaactcgtgctctacatgttgactttctgcgtttcccat

SEQ ID NO: 25300 - DNA, 748 bp, Homo sapiens
  MAP TO AC002319.1; EXPRESSED IN HELA, SIGNAL = 0.35; SWISSPROT HIT: P16442, EVALUE 1.00e-62; NT HIT: AF163572.1, EVALUE 0.00e+00; EST_HUMAN HIT: BI858477.1, EVALUE 0.00e+00
cacacagtggggaccctggcaggctgctggtgtagcagtgggtgaccgggtgatcatcactaggtacactcatttcatccagtccttcctggagtcagccgaggagttcttcatgcgtgggtaccgggtgcactactacatcttcactgacaaccctgcagccgttcccggggtcccgctgggtccccaccggcttctcagctccatccccatccagggtcactcccactgggaggagacatccatgcgccggatggagaccatcagccagcacattgctaagagggctcaccgggaggtggactacctcttctgccttgatgtggacatggtgtttcggaacccgtggggccctgagaccttgggagacctggtggctgccattcacccaagctactacgccgttccccgccagcagttcccctatgagcgcaggcgtgtttccactgcctttgtggcagacagcgaaggggacttctattatggtggggcagtcttcggggggcaggtggccagggtatatgagtttactaggggctgccacatggccatcctggcggacaaggccaatggcatcatggctgcctggcgggaggaaagccacctgaaccgtcacttcatctcaaacaagccgtccaaggtgctgtcccccgagtacctctgggacgacaggaagccccagccacccagcctgaagctgatccgcttttctacactggacaaggatatcagctgcctgaggagctga

SEQ ID NO: 25301 - DNA, 972 bp, Homo sapiens
  MAP TO AC011904.3; EXPRESSED IN HELA, SIGNAL = 0.85; NT HIT: gi13937343, EVALUE 0.00e+00; EST_HUMAN HIT: BF674130.1, EVALUE 9.00e-05; SWISSPROT HIT: O43869, EVALUE 3.00e-80
atgtggcagaagaatcagacctctctggcagacttcatccttgaggggctcttcgatgactcccttacccaccttttccttttctccttgaccatggtggtcttccttattgcggtgagtggcaacaccctcaccattctcctcatctgcattgatccccagcttcatacaccaatgtatttcctgctcagccagctctccctcatggatctgatgcatgtctccacaatcatcctgaagatggctaccaactacctatctggcaagaaatctatctcctttgtgggctgtgcaacccagcacttcctctatttgtgtctaggtggtgctgaatgttttctcttagctgtcatgtcctatgaccgctatgttgccatctgtcatccactgcgctatgctgtgctcatgaacaagaaggtgggactgatgatggctgtcatgtcatggttgggggcatccgtgaactccctaattcacatggcgatcttgatgcacttccctttctgtgggcctcggaaagtctaccacttctactgtgagttcccagctgttgtgaagttggtatgtggcgacatcactgtgtatgagaccacagtgtacatcagcagcattctcctcctcctccccatcttcctgatttctacatcctatgtcttcatccttcaaagtgtcattcagatgcgctcatctgggagcaagagaaatgcctttgccacttgtggctcccacctcacggtggtttctctttggtttggtgcctgcatcttctcctacatgagacccaggtcccagtgcactctattgcagaacaaagttggttctgtgttctacagcatcattacgcccacattgaattctctgatttatactctccggaataaagatgtagctaaggctctgagaagagtgctgaggagagatgttatcacccagtgcattcaacgactgcaattgtggttgccccgagtgtag

SEQ ID NO: 25302 - DNA, 539 bp, Homo sapiens
  MAP TO AC004181.1; EXPRESSED IN HELA, SIGNAL = 0.77; NT HIT: gi14782290, EVALUE 0.00e+00; EST_HUMAN HIT: AL575644.1, EVALUE 0.00e+00; SWISSPROT HIT: P39881, EVALUE 3.40e-01
tgctcccatcacacggcccagctcccaggtctcaatctggcttcggaatcgctgcaggaagcggtcagggtgccagcggacctgctggaccctcaagtacctcctcagagccccctgttcctccaaaggggggcccctggccaccagggctgcagccatggcctctgggtcccctcccccagggcagggccagggcacatcaccaaatcgccagaggctgcccctccccgctcctctggggtgctcttccctgggcccggccctggttggcttgggttctcggtcccctagagcctcctgcgccctcctggctcggctctcacgcagctcttcctccttggcccgggctcgctccctgaagagccgctgctcctcctcctgctgtcgccagctctggctggagccctcagcacgtgggggtcgacaggatccctctgcttctcgctgctgctgctggcacttctgggcatgttcccgggccaggcgatctgaccaggctgagaaggactcaggttcctgggtttcatgggaggcatcac

SEQ ID NO: 25303 - DNA, 520 bp, Homo sapiens
  MAP TO AC005500.1; EXPRESSED IN HELA, SIGNAL = 0.79; SWISSPROT HIT: Q21313, EVALUE 5.00e-18; NT HIT: gi14777504, EVALUE 4.00e-14; EST_HUMAN HIT: AI949809.1, EVALUE 0.00e+00
agtgcccgcgccagttctggggccccgactgcaaggagctgtgtagctgccacccacacgggcagtgcgaggacgtgacaggccagtgtacttgtcacgcgcggcgctggggcgcgcgctgcgagcatgcgtgccagtgccagcacggcacgtgccacccccggagcggcgcgtgccgctgtgagtccggctggtggggcgcgcagtgcgccagcgcgtgctactgcagcgccacgtcgcgctgcgacccacagaccggcgcctgcctgtgccacgcaggctggtggggccgcagctgcaacaaccagtgcgcctgcaactcgtctccctgcgagcagcagagcggccgctgtcagtgccgcgagcgtacgttcggcgcgcgctgcgatcgctactgccagtgcttccgcggccgctgccaccctgtggacggcacgtgtgcctgcgagccgggctaccgcggcaagtactgtcgcgagccgtgccccgccggcttctacggcttgggctgtcgccgccg

SEQ ID NO: 25304 - DNA, 666 bp, Homo sapiens
  MAP TO AC010271.5; EXPRESSED IN HELA, SIGNAL = 0.46; SWISSPROT HIT: Q14140, EVALUE 2.70e-01; NT HIT: gi14787055, EVALUE 0.00e+00; EST_HUMAN HIT: BG468137.1, EVALUE 0.00e+00
atgctgagcaagggtctgaagcggaaacgggaggaggaggaggagaaggaacctctggcagtcgactcctggtggctagatcctggccacacagcggtggcacaggcacccccggccgtggcctctagctccctctttgacctctcagtgctcaagctccaccacagcctgcagcagagtgagccggacctgcggcacctggtgctggtcgtgaacactctgcggcgcatccaggcgtccatggcacccgcggctgccctgccacctgtgcctagcccacctgcagcccccagtgtggctgacaacttactggcaagctcggacgctgccctttcagcctccatggccagcctcctggaggacctcagccacattgagggcctgagtcaggctccccaacccttggcagacgaggggccaccaggccgtagcatcgggggagcagcgcccagcctgggtgccttggacctgctgggcccagccactggctgtctactggacgatgggcttgagggcctgtttgaggatattgacacctctatgtatgacaatgaactttgggcaccagcctctgagggcctcaaaccaggccctgaggatgggccgggcaaggaggaagctccggagctggacgaggccgaattggactacctcatggatgtgctg

SEQ ID NO: 25305 - DNA, 646 bp, Homo sapiens
  MAP TO AL355834.1; EXPRESSED IN HELA, SIGNAL = 0.45; EST_HUMAN HIT: AU132960.1, EVALUE 0.00e+00; SWISSPROT HIT: Q58508, EVALUE 8.60e-02; NT HIT: gi16190317, EVALUE 0.00e+00
acggtatccaactgttgaaaaacgagccagagtcttcaatggagcaagttatgtgcctgttcctgaagatggtccctttcttaaagcactgctctttgaacttagattattggatgatgataaagacttcgttgagagtcgtgatagctgttcacgcatcaataaaacatccatttatggactcctgataggaggtgaagaactctggccagttgttgcttttctgaagaatgacatgatatatgcttgtgttccactagttgaacaaactctgtcccctcgtccgccactaattagtgtcagtggagtttcacaaggctttgaatttctttttgggatacaggattttctttattcaggtcaaaaaaatgactctgagctgaatacaaaattgagccagttgcctgacttgcttctgcaggcttgtccatttggtactttattagatgccaacttacagaattcattagataataccaattttgcatctgtgactcagccacagaaacagccagcttggaaaactgggacgtacaaaggaaaaccacaagtttctatttctatcactgaaaaggtaaaatccatgcagtatgataaacagggtatagcagatacatggcaagttgttggaacagtgacttgcaag

SEQ ID NO: 25306 - DNA, 499 bp, Homo sapiens
  MAP TO AL355839.1; EXPRESSED IN HELA, SIGNAL = 0.66; EST_HUMAN HIT: BG008447.1, EVALUE 2.00e-59; SWISSPROT HIT: P03356, EVALUE 5.00e-16; NT HIT: AL163209.2, EVALUE 1.00e-118
agggattgcggagattagtgccaccatcaaagacttgaaagatgctagtctggtgattcccaccacaccacccttcaactctcccatatgggctgtgcagaagacaggtggatcttggagaatgacagtggattatcataagcttaaccaagtggtgactccaattgcagcttcagtaccagatgtagtttcattgcttgagcaaattaacacatctcctggtacctggtatacagtcaatgacttggcaaatgcctgtttctccatccctctccatacagcccaccagaagcaatgtgtcttcagctggcaaggccagcaatatacctttactatcctacctcaggcgtacatcaactcttcagctttgtgtcaaaatcttattcagagagaacttgatcactttttgcttctgcaaaatatcacactggtccattacattgatgacattgtattgattggatccagccagcaacaagtagcaaacacattggactga

SEQ ID NO: 25307 - DNA, 518 bp, Homo sapiens
  MAP TO AL163278.2; EXPRESSED IN HELA, SIGNAL = 2.4; NT HIT: AL163278.2, EVALUE 0.00e+00; EST_HUMAN HIT: BG777685.1, EVALUE 0.00e+00; SWISSPROT HIT: P29316, EVALUE 8.00e-60
attgttgccctatttgttgtttaagaaatgctgacccttttcacaagacagtgctgaaagcgaagaaagaagttcctgcccctcctaaagccaaagccaaagcaaaggctttaaaggccaagaaggcagtgttgaaaggtgttcacaaccacaaaaaaaagaagatccacacgtcccccaccttccggcggcccaagacactgcaactccggaggcagcccaaatatccttggaagagcacccccaggagaaacaagcttgaccactatgctatcatcaagtttccgctgaccactgagtcggccatgaagaagacaggagacaataacacacgtgtgttcatggtggatgttaaagccaacaagcaccagatcaaacaggctgtgaagaggctctatgatattgacatgatcaaggtcaacaccctgatttggcctgatggagagaagaaggcatatgttccactggctcctgattacgatgctttggatgttgccaacaaaattgggatcatctaa

SEQ ID NO: 25308 - DNA, 615 bp, Homo sapiens
  MAP TO AP001754.1; EXPRESSED IN HELA, SIGNAL = 0.49; SWISSPROT HIT: Q15695, EVALUE 5.30e-01; NT HIT: AL163300.2, EVALUE 0.00e+00; EST_HUMAN HIT: BF057518.1, EVALUE 0.00e+00
agctgtgagcccagcccctgccaatcaggctgcaccgactcctgcacaccttcatgctgccagcagtctagctgccagccggcttgctgcacctcctccccctgccaacaggcctgctgtgtgcctgtgtgctgcaagtccaactgctgcaagcccgtgtgctgcgtgtccatctgctctggagcttcctccccatgctgccagcagtctagctgccagtcagcttgctgcaccttctccccatgccaacaggcctgctgtgtgcccatctgctgcaagcccatctgctgtgtgcctgtctgctctggggcttcctctctgtgctgccagaagtctagctgccagccggcttgctgcaccacctcctgctgcagaccctcctcctccgtgtccctcctctgccgccctgtgtgccggcctgcctgctgtgtgcctgtcccctcctgttgtgtccctgcctcctcctgccagcccagctgctgccacccggcctcctgcctgtccttcctctgccgccccgcgtgctcccgcctggcctgctgaggcctctgctcaggccaggagtccagctgctgatgggcacgtcccccagggccagccggctccggtcctgtc

SEQ ID NO: 25309 - DNA, 579 bp, Homo sapiens
  MAP TO AC023112.3; EXPRESSED IN HELA, SIGNAL = 0.39; NT HIT: gi16160675, EVALUE 3.50e-02; EST_HUMAN HIT: AI652410.1, EVALUE 3.00e-03
acagatttcccactgaaggagattctggtcctaaatcaccaccgtcgtgatctccatcaccatcatcaccaccatcatcaccagcaccatcatcaccatcattgccatcattgcattaccattaccataattaccattatcatcaccctcatcaccatcatcaccatcatcaccatcatcaccaccatcaccaccatcaccaccatcaccaccatcatcaccatcatcaccatcatcaccatcaccgtaactaccatcaccatcatcaccctcatcatcatcattgccatcatcaccatcatcattaccatcatcaccatcaccataattaccatcaccatcatcattaccattatcatcactctcaccatcaccaccttcatcatcattatcaccatcattaccaccatcattaccatcattgctattatcaccatcattaccaccaccatcatttgtcatcactatcaccaccaccaccatgatcataaccatcaccaccaccaccactatcaccaccatcatgatcatcattatcatcctcctcctcacatttattggacacttactatgtgctag

SEQ ID NO: 25310 - DNA, 680 bp, Homo sapiens
  MAP TO AC000026.3; EXPRESSED IN HELA, SIGNAL = 0.39; SWISSPROT HIT: Q99501, EVALUE 2.00e-55; NT HIT: gi15318242, EVALUE 0.00e+00; EST_HUMAN HIT: BI829316.1, EVALUE 0.00e+00
cgatcctgaactgtgttcctgcccacagtgactcggccggtccgggcatggcagacccagtggcgggcatcgcgggctcggcggccaagagcgtgcggccatttcgctccagtgaggcctacgtggaggccatgaaggaggacctggccgagtggctcaatgccttgtacggcctgggtctcccgggtggtggcgatggcttcctgacagggctggccacgggcacgaccctgtgccaacatgccaacgccgtgaccgaggctgcccgtgcattggcagccgcccgcccggcccgaggtgtggccttccaggcgcacagtgtagtgcctggctccttcatggcgcgcgacaacgtggccaccttcatcggctggtgccgcgtggagctgggtgtgccggaggtgctcatgtttgagactgaggacctggtgctgcgcaagaacgagaagagcgtggtgctgtgcctgctggaggtggcgcggcgtggggcacgcctgggcctgctggccccacgcctcgtgcagtttgagcaggagattgagcgggagctgcgtgctgcacccccagcccccaacgcccctgccgctggggaggacaccactgaaaccgcccccgcaccagggactcctgcccgcggcccccgcatgacacccagcgacctgcgcaacctcgacgagctg

SEQ ID NO: 25311 - DNA, 961 bp, Homo sapiens
  MAP TO AC007954.6; EXPRESSED IN HELA, SIGNAL = 1.1; SWISSPROT HIT: Q10475, EVALUE 2.00e-08; NT HIT: U50871.1, EVALUE 2.40e-01; EST_HUMAN HIT: AL523064.1, EVALUE 0.00e+00
atggaaacagatccagatccagtgccaccaacggaaaccatgtctgaggtttcgggggccacagtcagagagagaaatttagaattactagaggaggagactgaaccgggggttccagaggaatcacttagagtgcaacatgaagagacaggtctagagcctccagagcagaccaaacaagattttccaagtgagaaactaggagaatcacttgaagagacagatcttcagccaccaaagatgaccaaaccagagactccagaggagacacaaagagagtcaactgagaagaaaaggacagagccacccgagcaggctagactggaatttctggagaaggaaccaagaaagtctagtgaggaggcaggtctagagcctccagaagagactcaaccagaggttccagaggagatgcaaagaaaggcaactgaggagaaagggacagaactacctgagcggactaaaccagactttccagaccacaagccaagaaagtctactgatgagaacgttcctgagccactagaagagatcaaattagagtttcctgaggaagaatcaagaaaaacaaatgaggaaacaattctagaacaatcagaaatgatgaaaccagaaagtccagaagagataagaaagtcaaatgagaaaaaaaatccacagccaccagaggagactggtccagtgctaccacaggagatcaacccacaagttgaagagaaaacacaaacaaagccaactgagaaaattctagagttaccagatgaaaccaaaccaagggagacacatgtagaattttccaaggaagacaggccagaaccaataaagtctaagtattctgtaggaaacgatgagctagagcaccgtgagcctaaaagaggaaagttgtcactaagtgacaaatttagaaaagaatattacgcattaggatctctcagagaaagtgaagaatcaattggtacac

SEQ ID NO: 25312 - DNA, 611 bp, Homo sapiens
  MAP TO AC002084.1; EXPRESSED IN HELA, SIGNAL = 0.97; EST_HUMAN HIT: BE064410.1, EVALUE 2.00e-94; SWISSPROT HIT: P03361, EVALUE 5.00e-10; NT HIT: AL163246.2, EVALUE 0.00e+00
atgtactccagatatgagtttgcctgtcctgcacacaatgcttctgccaagactaccatccatggactcacagaatgcccggtccactgtcatggtatcccacacagcattgcctctgaccaaggcactcactttgtggccaaagaagtgtggcagtgggctcatgctcatggaattcactggtcttaccatgttccccatcatcctgaagcagctggattgacagaatggcagaatggccttttgaagtcacaattaaaatgccaactaggtgacaatactttgcagggctggggcaaagtcctctggaaggctgtgtatgctctgaatcggcgtcctatatatggtactgtttctcccatagccaagattcactggtccaggaatcaaggggtggaagtcgaagtggcagcactcaccatcacccttagtgatccaccagcaaaatttttgcttcctggtaccgcgacattatgttctgctcgcctagaggtcttagttccagagggaggaatgctgccaccaggaaacacaacaataattccattaaactggatgttaagattgccacctggacactttgggctcctcctacctttaagtcaacaggc

SEQ ID NO: 25313 - DNA, 1194 bp, Homo sapiens
  MAP TO AC004382.1; EXPRESSED IN HELA, SIGNAL = 0.5; EST_HUMAN HIT: BE263269.1, EVALUE 0.00e+00; SWISSPROT HIT: P78423, EVALUE 0.00e+00; NT HIT: gi14775235, EVALUE 0.00e+00
ggtgaggacctggatgctcaggagagcgggttgccccagctggtcagttgcctcacagacgctaagtgggaggacagggtttccagccgggtgtgttcacctgcagagtattggtgctgtgcccccacaccacgctggcccgggtttctggtatctgggcataaccgaatccctgtcttcctcccttgtagcttggagacgagacagcacaggctgttctgtgccgacccgaaggagcaatgggtcaaggacgcgatgcagcatctggaccgccaggctgctgccctaactcgaaatggcggcaccttcgagaagcagatcggcgaggtgaagcccaggaccacccctgccgccgggggaatggacgagtctgtggtcctggagcccgaagccacaggcgaaagcagtagcctggagccgactccttcttcccaggaagcacagagggccctggggacctccccagagctgccgacgggcgtgactggttcctcagggaccaggctccccccgacgccaaaggctcaggatggagggcctgtgggcacggagcttttccgagtgcctcccgtctccactgccgccacgtggcagagttctgctccccaccaacctgggcccagcctctgggctgaggcaaagacctctgaggccccgtccacccaggacccctccacccaggcctccactgcgtcctccccagccccagaggagaatgctccgtctgaaggccagcgtgtgtggggtcagggacagagccccaggccagagaactctctggagcgggaggagatgggtcccgtgccagcgcacacggatgccttccaggactgggggcctggcagcatggcccacgtctctgtggtccctgtctcctcagaagggacccccagcagggagccagtggcttcaggcagctggacccctaaggctgaggaacccatccatgccaccatggacccccagaggctgggcgtccttatcactcctgtccctgacgcccaggctgccacccggaggcaggcggtggggctgctggccttccttggcctcctcttctgcctgggggtggccatgttcacctaccagagcctccagggctgccctcgaaagatggcaggagagatggcggagggccttcgctacatcccccggagctgtggtagtaattcatatgtcctggtgcccgtgtga

SEQ ID NO: 25314 - DNA, 589 bp, Homo sapiens
  MAP TO AL163974.2; EXPRESSED IN HELA, SIGNAL = 0.31; NT HIT: J00153.1, EVALUE 1.40e-01; SWISSPROT HIT: Q9M291, EVALUE 7.00e-05
gcaggacggctacagctccctcctggagcccgggacagaagcccccatcaaggaagctcacagacaggaccttcgaagccacatgccaagccccagccaaggtcggaaccccaagggcaaagcatcttgccaccgctgggcagctcggtccagccaggagatggcccgggtgtcgccagcccagccttcctccccagagtccctgaacacaggcagccgggctgtcactggctccctcgcacgcctgggccgctggcgggaggccagactgcccttctccaggttcctggatgaggtcactgtgcgggttctggaccctgggaccctggaggccttcagggtgcccagaggccgcagcccagagccctctgcagtggatcgaggccaaggtctagcccaggaggcccttacaagagctgcagccccaggggagaaggacccagccctgagctcccagctttcttcggaggcggccactgaggctgcaagcagagtggggccaggccaggccgtgggaactagtgggccttgcttgggcagtggcaagcgtggaggccggactgcctccccttggaggtctccaggtcgg

SEQ ID NO: 25315 - DNA, 1303 bp, Homo sapiens
  MAP TO AC005937.1; EXPRESSED IN HELA, SIGNAL = 0.74; NT HIT: gi14747215, EVALUE 2.10e-02; EST_HUMAN HIT: BG474091.1, EVALUE 3.00e-02; SWISSPROT HIT: P04929, EVALUE 2.00e-06
ctagaggccaatgtagtcacagactgcagtggttcctgaggttatgatggaagccagagtgatctcagagcctgtggtggtttcaggcgctttgataaagactgcagtaggcacagatactatcttggagagagtggtgctcttggaggctatggtagagtccatggtgggcacagacttggtcacggagtctatagtattctgatagagtgtggtggaggctgtggtggacacagatgctgtagtggtcttagcaggcattacggtggctgtggagaacccagactgtgtggttgtcacaggagctttggtggagaccacagcagtctcagaacctgtggtcatggctgtggtcatggctgtagtcacttcagtggcagaggtggaagctctggtggtctcagagcctgtgctgctttcagaggctgtagcgaagactgtggtgggcacagatgatactgtgtggtgtccggtgttctcagagcctgtggtagaggttgtggtgggcacagatgctgtggtggtctcagcaggtgttggaggggctgtagagggcgcagactctacagttgtcccagaggcttttgtggagattgcagtggtcgcagagtctgtggtggaggctgtgggggtctcagagcctgcggtgattttagaggttgtggtgaagactgtggtgggcagagatgttatcgtagaggtcgtggcggtcttggaagctgtggtcatggttttagaggctgtgttgggagctgtggaaggtgtagatgttatcacagagggtgtgttgttcttggggactgtggcggacacagatgctgtggtggtgtcagtaggtgttttggtggctgtgtggggcacagactctgcagctatcacagaggtttgagtggagactgtggtgtcctcggaggctgtgatggcagcaatggtagtttcagacatggtggcctcacaggctgttgtgttcttagagcctgaggtggaagctgtggtgggcacagatgttactgtggaagatgtggtggtgttagagaccgtggtgaaggccagggtggactcaagggccaggatagaggctgtcactggctcagacactgcagtggagaacctgatggtctcataagctgtggaggagactgggatggctgcagagctcatggtgatctcagaggctgtgctggaggctgtgctggaggctgtggctgacacagacattgtagaggacgtgatgatctcagaggccgtgctgctctcagagccggtggttgaggccacagtggcacagatgctgtggtggagg

SEQ ID NO: 25316 - DNA, 543 bp, Homo sapiens
  MAP TO AC007057.3; EXPRESSED IN HELA, SIGNAL = 0.31; NT HIT: gi11434816, EVALUE 0.00e+00; EST_HUMAN HIT: AU138211.1, EVALUE 0.00e+00; SWISSPROT HIT: P49454, EVALUE 2.00e-07
acaatactccatccagaacacacctgttctttctctttcaatagctgttcaaaagcaagagccttctccttcattgagtggcactcaaactctttttctcgcagcatcatagaaaacttcatgttagtctcttgtaacgcttgatattctgtttcctttcccctgtatgtttccactattttttcattttctccttttagtttgccaatgtccatctctagaattaatattctctccttcaggtttgttactgcctgcctcaaaagttcgttttcatttactttgttagtgaaattttcattggaagaaagtagttgatcacttttggctttgattaagaggtctttttccttaagtaacttttgcaaaacatcttgtttctcctttagctgcttgatttctgaatcggtttgttcgtgttcttttctttctagctctgaggtggcagcaatcgaatcagacaatctgtggttattttcctggagagttctaattgttgcatctttttcctgtagtgattttcttagctcttctaactcttgc

SEQ ID NO: 25317 - DNA, 781 bp, Homo sapiens
  MAP TO AP001697.1; EXPRESSED IN PLACENTA, SIGNAL = 2.2; EXPRESSED IN HELA, SIGNAL = 1.5; SWISSPROT HIT: Q9UHI8, EVALUE 1.00e-107; NT HIT: gi14780110, EVALUE 0.00e+00; EST_HUMAN HIT: BI459665.1, EVALUE 4.00e-74
aagtgaggagaggaggatgaatggacagacaaacgagagcaattcttctacctgtgggctgtcctacgccttgcagtgccgggtcctgcggcgaccactgagccccttcgtcctcgccctcagtcccttcgtcctcgtcttcggtctccgctttcccagtcggccggggctcgtcgtccacgaccccgcacgtgccgccgacgtcgccctgccgattccgccgcaggaggtggaactgtagtggtgccggcggcttctcccctggggcggcggtggcgaggcgctcgctggcggcgggcagcggctggatgaaatacgcctcccccagcaggtagaaggcgccgcgcacgccctcgcagaggctgagggcggcagccgagctgggatcgccattcacggtgccggagtagaagcagtgcgccaggtcggtttccggaagcggcgtctcggacccggatttgcgccccacgttctggagcgtgaagccgggcgccaaaaagctgctgtcgggccgcagctccagatccagctgctggtcaaaggcgtgcaggcggaggcgcgtggtcccgtgtcccggggcgcgctccagctccggcaccactagctcctcgtcctcctcggaggggcgcccgagtgcgtccgacacggccagtagcgccgcggcgagcagcagcagcgtgggtactggcccaaagctccgagaccccggagcccgctccgcgttccccatgtcgctgcccagcttgcgccttccgaacccctcgggcacagctcgctgcat

SEQ ID NO: 25318 - DNA, 1629 bp, Homo sapiens
  MAP TO D87011.2; EXPRESSED IN HELA, SIGNAL = 1.1; SWISSPROT HIT: Q60821, EVALUE 6.00e-09; NT HIT: gi15300639, EVALUE 2.00e-43; EST_HUMAN HIT: N39816.1, EVALUE 0.00e+00
tcagctagaatccttgctgcaagggagtctggaatctctagtgttcatagccgtcttctttttagtttttacaggagaagactgagggtcagtgttgctaacaataacggaagccataccacttgatcctggctgaactgaagtttgaataataacttttgtttcactaggcaacccttgcagttgctccggctttttaaatgtttgatggtccttggttttgtgctctatttcctccttcaacgtcaaaaactgtagccggcacttggaacactgaaggaccctccttctgctgtgcctccaacaatgattcatgtatggtattgcagttttgaaaagtttgagacaaaacagacaaagcaaattctttgtgttttcatggcacgttctaaaatgtgtttccacatcagcaaagaccgacgatctgtaatggcaaacctggcacacataaggcatttcgccaggcttatgatggtccttcatgtgttgtaagaggacctgatctgtttcaaatgacaattcacagattttacagacagcagagggccccatggcgatgtgtacactatcaatgtgacactgtagctggaagggagtgggaaactgccggtggcagtgctggcaggtggtgtggtcttcccagctgtcgttcctctgcttctcaaattccaaatgatgcttcatgtgattcataaacttaatattttttagaactttcacgcagctgaggcatttaaaggtggtgtgagtcttctgttccggctgcccatctcctttatgctgtccatagtaaaagtcgctaagtaacacgatgggattttctttcttgggatcaaaggtcttgttttgacttgctagacttgaaatgtctgtcattgccagggcagactcacttgctctctctggatctgtaagattgaaatgtgcctttccattagcatcaggccaaggaaatgttactccattctgaacatggtttgatgagttgcagatcccctgtgagggtgtatttgtgcttattgtagaagacatatctgaagggaccacagctaaagaaggtacccctgggattccatccctgagtttaacccttttggaatctctgctgtttatatctgaagtggaaagtcgctttgaatcaggagaactctcatttctgcctcctccagagaccatagctccaactagacactgagtccctggggggagcgagtctgaggaactgggagaaacaacttgtggtgagctcattttataaccaggttcagatgaagacttcatagtgacaggactatctgtcgatcgcccctcagacagagaaaccggcatgatggcttttgccatagaggtcacatgatttgcaggctgcgacacgtgagcaggatattgacggaagtggcctttctttcttcttgaatttgagcctggggtgactctgttcaaaatgtttgaaacgactggttttgaatttgaaatcatcccgacaaagagaacttcagcatctctatgtacatgctccaccccaacatagatcagatctggatcttcatcatcctcctccctttgtttggattctctcaaattcttctttggtgattccactttcttacacaaaaagatatctcccat

SEQ ID NO: 25319 - DNA, 1142 bp, Homo sapiens
  MAP TO AL050313.6; EXPRESSED IN HELA, SIGNAL = 0.5; EST_HUMAN HIT: AW502388.1, EVALUE 0.00e+00; SWISSPROT HIT: P81274, EVALUE 3.00e-41; NT HIT: AJ011301.1, EVALUE 2.80e-01
caattgctgctcaaagtagccaatggcttcttccatcacattcatgttcatctttgtgatgcccatgttgccatagacctgggcttccagactcggatccttcagcttttgccctagatccagttgctcttcataacacttgaatgccattgtgtatttcccaagggccatgtagacagcagccaggtgcccatgagctctgcactcccctggcaagtcactcagctcctgatatacctccagttcctgtgtgtgataacccagggccttgtcatacttctggatcattcggtatgcagtgcccagggctgcatatgcactggcttctaatcttctgtcctttacctggtgagctaagcccagttgctgctcatagaattttattgcaccatttatatcttttttacagatgaatatatcgcccaggtttcctagggctcgaaatttagcctgggaattattcagagactgggctagggacagtaggtacttctgacactcttcagctttactgaaattcagcagagccttgaatgctaggcccaagttgcagtaggcttttgcttggctcaacttgtcgtgaaggtctttagccagtgccagatcctgttcgtagtacttcactgcctcctgatagtttccaaggcagtaatgggcatagccaagattgtggcagaccttcccttctccttccatgtcttgaaggtcgggagcaagccggaggtactgttcataatagggggcagcctggacatactctccccgagagcagtggaaattgcccaggttgctgagggcccgggcctcgctctggatgtctcgtagctcccgggcgatgttcaagtggttctgatagtgttgcagggcccggtcatgggcacccagggcctggtaggccacggcaaggttcccatgtgtggaggcctgtgaggcgcggtcattcacttccatggagatctgcagctcctgccgatggtatttgaccgcctggtcgtacatgcccagggcattgtaggcattgcccatattcccataggcacggccctgggcagcataatcactcagctcctgggcaatgcacaggtgggtcttgtggagtttcagtgcagtgtcataatcacctttcatctggtgtatgattc

SEQ ID NO: 25320 - DNA, 466 bp, Homo sapiens
  MAP TO AP000511.1; EXPRESSED IN HELA, SIGNAL = 0.71; SWISSPROT HIT: Q95157, EVALUE 6.20e-01; NT HIT: J03965.1, EVALUE 6.90e+00
cctccagaaccactccctatttttctgactgtcccgttggccaaaccctctgtgctcttttctctggttcttttcttgattttgatcatgaccatctctatggccaatcccttggagacctcagagaagcccatcctgacccattttatggtcactaccttctcctccatgatcccccttcttccccaagattttcttttccatagcaccttccattatccagtctatgtctatactctcctttgccttggcgaccttctctgtgatgcatttcatgattattgctgtagcctcctccaagtccataacgcccaccatgattcactccacagccatctccatggctgtggctcagctcatggcccactccatgtccaaagccatgtgttcctgtgtgtcccatctcaagtccccctccatgaatgagtgcatttcccaggctgtggaatgtcccagagcccaggac

SEQ ID NO: 25321 - DNA, 517 bp, Homo sapiens
  MAP TO AF176678.1; EXPRESSED IN HELA, SIGNAL = 1.1; NT HIT: gi16162443, EVALUE 0.00e+00; EST_HUMAN HIT: H15318.1, EVALUE 0.00e+00; SWISSPROT HIT: P49777, EVALUE 7.00e-14
gcgggcgtgggggccctgcagggggaccggagggttaatgaagttcctcatgaaatctttccgaatgccctgctccatgggctgcaccaatgaggccacgctggcaggcaggaagatggtgaaaacgttactggacaccagctcggcctcctgcgggtgagcccgggagctgtccagcaagagaacggctttgctgtcttccggcaaacctatggttctgaagtgctctctcaccgagggcacaaagatatgatggaaccaatcggaaaaaatctccttgtccacccaggcgttcccctgggccttataggcgacgggcaggtgctggatgcctttgaaagccctgggaccgctgcacttcccgatggccaagggcttgagcctgtgggagcccgtggcgttggcacacatcagcacggtcagccggtccttgccctgcttggggccaggcacagccccgccttccggagtgggatttggcaggcaccgccagaaaaggccggtctcatcagcgttg

SEQ ID NO: 25322 - DNA, 565 bp, Homo sapiens
  MAP TO AL132857.3; EXPRESSED IN HELA, SIGNAL = 0.45; NT HIT: gi14747648, EVALUE 0.00e+00; EST_HUMAN HIT: BI830535.1, EVALUE 0.00e+00; SWISSPROT HIT: O15522, EVALUE 5.00e-66
cctcggacgagagcagcctggagaccagcccgccagactcgtcgcagcggccgtccgctaggcccgcgtctccgggctcggacgccgagaaaaggaagaagcggcgggtgctattctccaaggcgcagacgctggagttggagcggcgcttccggcagcagcggtacctgtctgcgcccgagcgcgagcagctggcgagcctgcttcgcctcacgcccacgcaggtcaagatctggttccagaatcatcgctacaagctgaagcgcgctcgcgctccaggggcggcggagtcgcctgacctggcagcatccgccgagctgcacgccgcgcccggcctgctgcgtcgcgtggtggtgccggtgcttgttcgcgacgggcagccgtgcggcggcggcggcggtggcgaggtgggaaccgccgcggcccaggagaagtgcggcgcccctccagccgccgcctgccctctgccgggctaccctgccttcggtcccggctcggcgcttggcctcttccccgcctaccagcacttagcatcccccgccctggtctcctggaactggtgagg

SEQ ID NO: 25323 - DNA, 832 bp, Homo sapiens
  MAP TO AP000536.1; EXPRESSED IN HELA, SIGNAL = 0.35; NT HIT: AL163202.2, EVALUE 0.00e+00; EST_HUMAN HIT: BG009093.1, EVALUE 2.00e-64; SWISSPROT HIT: P41891, EVALUE 1.00e-04
agggacagacagaatgtggcagcagtgttctccaatcccatgtgagggaaaaacactcagaacccagcagcagtgttctagaatatttgtgaggcacaaacattcagaaactagtagcagtgatctggaatcgtatatgaaggacaaacactctgaaaccagcagcacagttttggaatcccacgtgagggaaaaacattcacaatccagcagcagtgttctggaatcctatgtgagggacaaacactcagaacccatcagcagtgttctagaatcctttctgaggcacaaacattcagaaattagtagcagtgttgtggaatcgtacgtgagggacaaacactctgaacccagcagcagtgttttggaatcccatgtgaggaacaaacactcagaagccagaagcagtgttctggaatcctatgtgagtgacaaacactcagaacccagcagcagtgttctagaatcctttgtgaggcacaaacattcagaaactagtagcagtgttctggaatcgtatgtgagggacaaacactctgaacccagcagcagtgttttggaatcccatgtaaggaacaaacactctgaacccagcagcagtgttttggaatcccatgtgagggacaaacactcagaagccagaagcagtgttgcggaatcctatgtgagtgacaaacactcaaaatccaaaagcagtgttctagaatcctttgtgagggacaaaccttcagaccctcaaagcactgttctggaatactatgtgagggaaaaacactcagaaaccagcgggagtgctctggaatcccttgtgagggacaaacactcacagtcc

SEQ ID NO: 25324 - DNA, 1110 bp, Homo sapiens
  MAP TO AL024496.5; EXPRESSED IN HELA, SIGNAL = 1.7; SWISSPROT HIT: Q99102, EVALUE 5.00e-31
atgaagtgccaaacgcaaaaggacatacggcggcagccatcgtccctcagtatccgtgagggtcgttccaaaccccagaggacaccagggtccacgggtgctgaggtccccggcttggagggtgctgaggtccccggcgtggagggtgctgaggtccccggcttggagggtgctgaggtccccggcttggagggtgctgaggtccccggcgtggagggtgctgaggtccccggcttggagggtgctgaggtccctggtgtggagggtgctgaggtccccggcgtggagggtgctgaggtccccggcgtggagggtgctgaggtccccggcttggagggtgctgaggtccccggcgtggagggtgctgaggtccccggcgtggagggtgctgaggtccccggcttggagggtgctgaggtccccggcttggagggtgctgaggtccccggcgtggagggtgctgaggtccccggcttggagggtgctgaggtccccggcgtggagggtgctgaggtccccggcgtggagggtgctgaggtccctggtgtggagggtgctgaggtccctggtgtggagggtgctgaggtccctggtgtgaagggtgctgaggtccctggcttggaggatgctgaggtccctggtgtggagggtgctgaggtccctggcttagagggtgctgaggtccctggcttggagggtgctaaggtccccggcttggagggtgctgaggtccccgatgtggagggtgctgagatccgtggcttggagggtgctgaggtccccggcttggaggatgctgaggtccccggtgtggagggtgctgaggtccccggtgtggagggtgctgaggtccccggtgtggagggtgctgaggtccctggtgtggagggtgctgaggtccctgatgtggagggtgctgaggtccctggtgtgaagggtgctgaggtccctgatgtggagggtgctgaggtccctggtgtggagcgtgcggtgtccgcacatgaaacagggtgtaactttacatcatctgcagtccctgctgaccccaatgccaggcacacgcgcagaagccgttctcacaccgtgtggcttggggaagagcaacaataa

SEQ ID NO: 25325 - DNA, 588 bp, Homo sapiens
  MAP TO AF216808.2; EXPRESSED IN HELA, SIGNAL = 3.9; SWISSPROT HIT: P38828, EVALUE 4.00e-12; NT HIT: gi14783974, EVALUE 5.60e-01; EST_HUMAN HIT: BI827289.1, EVALUE 0.00e+00
tcaggatgacagggcagcctccttctgtggttgctgggcttgtgaacgttgcagtatcttttggctttccacgtctctaaaatgtttttcaactattttgcgtacatggctcagtgcactcccctctttgcctttacagttttccacttgatatgggggtgtaataacaacttcttccatgactacgatgtttttttcttgccatttacagtctttaatggtcttgtgaatggtctggaagagctgctggccctctagagagacaccagcactgattgcataggcctggctcagcttctcctccttctctgtccgtgctttgctggcaagcttactaacattgagtgaagctaggggaggaggggtttctgttcggtcattaattatttccacttctgaaacatactgtaagtttatgagcaagatgtctgcatggttgggctttccactggaagagggacattttaaagccagcattttggattggtagtcaaaggctaccacctcgccctgcagccgctgctcctggcacgtccggcacgacacctggctcccaacgctgaagtactcgcccggaggagccgccat

SEQ ID NO: 25326 - DNA, 880 bp, Homo sapiens
  MAP TO AC016597.4; EXPRESSED IN HELA, SIGNAL = 0.94; SWISSPROT HIT: Q9WVS8, EVALUE 5.00e-03; NT HIT: gi15318237, EVALUE 0.00e+00; EST_HUMAN HIT: BF370333.1, EVALUE 0.00e+00
ctctgctggctggctggtcgtccccatgactactgctgccagcatccttccttgagcccctcctcccactagcagggcgctctctgttggggggctggttaaagatgtctgagtcatcactgtggactttggtggttgccctctggggtctctccttggtgttgacactccggctggtcccccaccctggctcatgccgtaggcctttatccctggcctcggtctctccaggaccctcaccgatgacatcgtctgatgggagcctgcccttccaggccaggggcttctcgggactaagccagaggggttttggcttcctgcctccctgcttcctgtccttgccggtgggagaaggttgtaaccaggatggggttttcccgggtggctcacagatttttctgcccatgaggttttccagttgttggatgagagagggctcctcatggacaggagggcacttcacaggtggggaagtggcaggagcactgggcatgtcacccatcgaagtggggactgccgacagtctcaaatattcctctaactgggacaaactgtctttcctgcaattagtagaattctttcttttgccagacacatttccttgtgaagaaagctttgcatccgctaatgtttcagctggcggtgagcaaccgagaccaagctccttgtccccgctggcaccagccatctcatgggtgcctttgctttcttccgagtgagcgttcatggcctcctctagttgctcgctcttctcgttcttctggtcaaccaggatgctgtggtcagctggggcctccctatctcctttgtctaacttgccattgaagatgaggtttctgttgacgtaaagcttcacgttcttggcaccaatgtcaagatc

SEQ ID NO: 25327 - DNA, 574 bp, Homo sapiens
  MAP TO AC011536.5; EXPRESSED IN HELA, SIGNAL = 0.84; SWISSPROT HIT: Q28983, EVALUE 7.00e-26; NT HIT: gi16163229, EVALUE 0.00e+00; EST_HUMAN HIT: BI005091.1, EVALUE 0.00e+00
gtgaacggtgtgctcacagccttgcctgtctctgtggccgacgggcggatttcagtgacccagggtgcatcgaaggcactgctggtggctgactttggactgcaagtcagctatgactggaactggcgggtagacgtgacgctgcccagcagctatcatggcgcagtgtgcgggctctgcggtaacatggaccgcaaccccaacaatgaccaggtcttccctaatggcacactggctccctccatacccatctggggcggcagctggcgagccccaggctgggacccactgtgttgggacgaatgtcgggggtcctgcccaacgtgccctgaggaccggttggagcagtacgagggccctggcttctgcggacccctggcccccggcacagggggccctttcaccacctgccatgctcatgtgccacctgagagcttcttcaagggctgtgttctggacgtctgcatgggtggtggggaccgtgacattctttgcaaggctctggcttcctatgtggccgcctgccaggctgctggggttgtcatcgaagactggcgggcacaggttggctgtg

SEQ ID NO: 25328 - DNA, 643 bp, Homo sapiens
  MAP TO AF106564.1; EXPRESSED IN HELA, SIGNAL = 0.44; SWISSPROT HIT: P07197, EVALUE 1.00e-101; NT HIT: gi11424723, EVALUE 0.00e+00; EST_HUMAN HIT: AL537508.1, EVALUE 0.00e+00
agtggctttcgagctgggagcggatttccttcagcgccgtcgagatgtctgtcttcaggtagtctttgcgctccaccgtgatgtgcgatgcctggatctgggccagaaggtcggccacctcctcctcgtggttgctccgcaggaaggccacctcatcctgcagcgactgcaccttcttgtccagctccaccttgaccagcgacgcctcctcgatgtctttgcgcagcgcgcggatggccgcctcagtgtcgtcgcgcaaccgcgcctcctcctcaaagcgctccttgagccggtggatgtcttcctccaggtggtccgagtccagctgcacctgagccttctcgtggttcaccatctccagggtggcgcgcagctcgcggatctcctggtcgtacgcgtcgcccagctgggcgtgcgaggcctgcttctgccgcagcgcctggatctccgcctcaatctccttattctgctgctccaggtagtgcaccttctctatgtagccggcaaagcggtcgttcagcccctgcagctgctccttctcgttggagcgggacagcttgtagtcgccgccgggtccggagccgccgttgagcagggacgaggactggctgaagtcaaggctgctctcggcggagctgagcat

SEQ ID NO: 25329 - DNA, 600 bp, Homo sapiens
  MAP TO AC012398.4; EXPRESSED IN HELA, SIGNAL = 0.49; EST_HUMAN HIT: BI829297.1, EVALUE 0.00e+00; SWISSPROT HIT: Q04503, EVALUE 1.00e-03; NT HIT: gi14756466, EVALUE 3.70e-02
atgctgtacacaacatcgctaatgaggacagtgtacaagccatcgctaatgaggacactgtatatgacattgctaacgaggacactgtacaaggcattgctaacgaggacgctgtacacaacatcgctaatgaggacaccatataagacatcaccaatgaggatgctctatatgacatcgctaatgacacccacaaggcatgctaacgaggacgctgtagacgacattgcttataaggacaccgtacaagacatcgctaacgaggacgctgtatacgacatcgctaatgaggacgttgtatatgacatcgctaatgaggatgctttacaagacatagcgaatgaggttgctgtatatgacatcgctaatgaggacattgtatatgacatcgctaatgaggacgctctatacgacatcactaatgaggacgctgtatacaacatcgctaatgaggacgctgtatatggcatcgctaatgaggatgctgtatacgaattcgctaataaggacgctgtatatgacattgctaatgaggacactgtacaagacatctgtaaaaaagaagatgctgccaatgtaagacacttttctttgtcttga

SEQ ID NO: 25330 - DNA, 862 bp, Homo sapiens
  MAP TO AL160231.1; EXPRESSED IN HELA, SIGNAL = 0.91; NT HIT: gi9910327, EVALUE 0.00e+00; EST_HUMAN HIT: BG194789.1, EVALUE 0.00e+00; SWISSPROT HIT: P97739, EVALUE 2.10e-01
cgtttgtcccaggaattcattcccaatatactaagaagcaatctgcaataataaaatgctgactgaggtttttgaggtattggttcatcttgttccacagctttcatgtttaagtcattaaagtgcttctcaacaaattctttttcttctgtatgttgcttaaggatagcattaataacatcattttcttgtttttcagaaatgcacacaggttgtggagcaggaatattaagtgagattccagttctctgtaagcattcaggactagtaacacccaaatactgcaagagctcatcaagaacatcttcttcatctcttattgtatcccaagttggtacagtttctctaaatcttttaaactggagagaaagtccatcttttacggttatatcttctaagcattcattagatgtcggaggctcttctggcttctcttggtgagacaatgaaagcatgaaagatgtaggttctgacaagccacttacaggaggtgggccatacagtatagcagaatcccatgaatattttccagagagatcacgtactatgattctgacatttgaattggctgatgcaaggccagcagataaacctcctccaggcatattctcttctgatctgatctggatacaggacactaaggttgtattatttaacacaaagaactggatatttggactctcaaagagttcaggagaaagttcagtactttcactgtaatgattgtcgtgattttcacacacctgacttgttagcatagcaggaccaccgctcattggataatggcccaggtgatttaccagatgtgtaataacagtgcgggctgctatagagattaatccatgctgcatttgagttttca

SEQ ID NO: 25331 - DNA, 698 bp, Homo sapiens
  MAP TO Z98883.3; EXPRESSED IN HELA, SIGNAL = 0.61; NT HIT: gi15317753, EVALUE 0.00e+00; EST_HUMAN HIT: AL531729.1, EVALUE 0.00e+00; SWISSPROT HIT: Q61645, EVALUE 1.40e+00
cctcccggcatggtgctcaaggccttcttccccacgtgctgcgtctcgacggacagcgggctgctggtgggacggtgggtgccggagcagagcagcgccgtggtcctggcggtcctgcactttcccttcatccccatccaggtcaagcagctcctggcccaggtgcggcaggccagccaggtgggcgtggccgtgctgggcacctggtgccactgccggcaggagcccgaggagagcctgggccgcttcctggagagcctgggtgctgtcttcccccatgagccctggctgcggctgtgccgggagagaggcggcacgttctggagctgcgaggccacccaccggcaagcgcccactgcccccggtgcccctggtgaggaccaggtcatgctcatcttctatgaccagcgccaggtgttgctgtcacagctacacctgcccaccgtcctgcccgaccgccaggctggagccaccactgccagcacggggggcctggctgccgtcttcgacacggtagcacgcagtgaggtgctcttccgcagtgaccgctttgatgagggccccgtgcggctgagccactggcagtcggagggcgtggaggccagcatcctcgcggagctggccaggcgagcctcgggacccatttgcctgctgttggccagcctgctgtcgctggtctcagctgtcagtgcctgccg

SEQ ID NO: 25332 - DNA, 1434 bp, Homo sapiens
  MAP TO AL135818.3; EXPRESSED IN HELA, SIGNAL = 0.58; SWISSPROT HIT: Q15743, EVALUE 0.00e+00; NT HIT: U48405.1, EVALUE 0.00e+00; EST_HUMAN HIT: BG191616.1, EVALUE 0.00e+00
atgtcctcacactccccatgcacaaactctgcaggaagcaggccagggaacgcagttcactgtcttcccccgaccagcagccccagcctggccacatcgcagccgcggcagaggacacggcttattcccacgagccaaccggggcttattcccaccctcggcggtcccagcgggctcagcaagcgagagcaggcttccggagttacaggggcttccctgcctccgcagcgagggaagcaggaggcggcaggccctgaggcccgtgggctgaaggctcaggcctcacgtggagccacccgcggaggacccaggctaggccaacctgcccgtggggaacccgcccgaccctggcgagttaggggtctggaaggccgggtggagcttggtcaacagctcgggctcctcaccctgggccccgcttttcccggaggcctcgggggcacccagcgggtaggcctccctggcccggccggtcctggagcaggtgaggaaggccaggcaggccccgcggaggcgggccaggtcccggtgggtggtctcgctgacgaagcagtagagcacggggtcggcgacgcagttgaagctggtgagcaggagggagaagtggtaggcgttgaaaacgcccttggcgaagtcgcagctggcctcccagacgctgcgcaccagcagcaacacgtggtagggcaggaagcaggccaggaagatgaccacggtgctgagcaccagccgctggatctggtccttgcggctcttctgggtgccgtggctccggcgcacggcgcgcaggatgccctggtaggacgccagcagcaggcagatggggaagaggaagcccaccaggaagcggtagtagttgatggcgcgctgccatgcctggatggggtagtgctcaaagcacacgcggtgctggttctcgtcctcgatgacctcctcgtgcatcaggaagtagatgctggtcagcagctccttggcccagatgaccacgctgacgccgacggccgccttcagggtccggaactggtggaagcggaagggatgggccacagccaggtagcggtccacggagatgcagcagaggaagcccacgctgatgtagatgttctcgtacaggaggatgccgcacacctggcaggacaggtcgccgtgagaccagttgtcgtgctgcagcacgtactgcagccagaagggcagcgagcagatgtagaagaggtcggccaccgtcaggttgcacaggtacacgcccagctcgttccgggccttgatctgcaggtagccgaagtagagggacaggcagttggccgggaagcccaccaccagcacggtaacatagaccaccggggccagcgtctggtggatggtatggtcgatggtacagctcatcgaggagttgtctgcagtgatgttccccatctttgggcctgaaggggccacact

SEQ ID NO: 25333 - DNA, 598 bp, Homo sapiens
  MAP TO AC007092.4; EXPRESSED IN HELA, SIGNAL = 0.48; SWISSPROT HIT: P54922, EVALUE 2.00e+00; NT HIT: K03038.1, EVALUE 5.70e-01
aaaaacggcaattgatgtcgcctgaagcggaggctcggaaacccaattataccacatttcattcaagtgtcagaattggaataatagtgcccaacagcaagggcccctgtgtgaaaggacgctgccatattatcttgttttggcccaatgttttcataaatttaggcttggagcagagcccagcgctgctttctttcaaggtcttagcttccctcatcctttttctcagctcttgctgctgagccctgttctttcctcctgcagagtcccctctcaccctctcctcctcagcactggctgtcctgtggtaccagtggctgctctgtttactgaagaacatatgcatcattggaacattttccacaccccttgggccaaatgttttctgtacttggccctgagcagccttttggattctgtgatgaggagccactaaaaaccatgtggcggccactaactcacatattatagcctgttctgtatattactgccattgttattactagtcgccttgccctgagagtaatgcacacctcaacgagctttaattaaaattgctctgcttagctaaatgttttcctaccaaaggcctccctgt

SEQ ID NO: 25334 - DNA, 537 bp, Homo sapiens
  MAP TO AL031685.15; EXPRESSED IN HELA, SIGNAL = 1.2; SWISSPROT HIT: Q9UM82, EVALUE 2.00e-72; NT HIT: gi14786324, EVALUE 0.00e+00; EST_HUMAN HIT: BE746201.1, EVALUE 0.00e+00
accatggccagctccccccacggcagcccggatgtgcttccacccgcctcccccagcaacggcccggccctgctgcgcggtacctacttctccactcaggatgacgtggatctgtacacagactctgaacccagggccacctaccgtcggcaggatgctctgcggccggatgtgtggctgctcagaaacgatgcccactccctctaccacaagcgctcgccccctgccaaagagtccgccctctccaagtgccaaagctgcgggctgtcctgcagctcctccctctgccagcgctgtgacagcctgctcacctgtcctccagcttccaagcccagcgccttccccagcaaggcctcgactcatgacagcctggcccacggggcatctctgcgggagaagtacccaggccagactcagggcctcgaccgcctcccgcaccttcactccaaatccaagccctccaccacgcccacttcccgctgtggcttctgcaaccgcccaggcgccaccaacacctgcacccagtgttcaaaagtc

SEQ ID NO: 25335 - DNA, 1827 bp, Homo sapiens
  MAP TO AC012313.5; EXPRESSED IN HELA, SIGNAL = 0.46; SWISSPROT HIT: P52740, EVALUE 0.00e+00; NT HIT: U09411.1, EVALUE 0.00e+00; EST_HUMAN HIT: BE897589.1, EVALUE 0.00e+00
atgtgtgggccattcttgaaagacattttgcacctggctgagcatcagggaacacagtctgaggagaaaccctacacatgtggagcatgtgggagagacttttggttgaatgcaaaccttcaccagcaccagaaggagcacagtggagggaagccctttagatggtacaaggacagggacgcacttatgaagagctctaaagtccacctgtcagagaaccccttcacttgcagggaaggtgggaaggtcatcctgggcagctgtgacctcctccagcttcaagctgttgacagtgggcagaagccatattccaatcttgggcagcttccagaagtctgtaccacacagaaactcttcgagtgcagcaactgtggaaaagccttcctgaagagctccactctccccaaccatctgagaactcactctgaagagataccatttacatgcccaacaggtggaaatttcttagaggagaaatcaatccttggtaataaaaagtttcacactggggaaataccccatgtgtgtaaggagtgtgggaaggcctttagtcactcatctaagctgaggaagcaccagaaatttcacactgaagtaaaatattatgagtgcattgcatgtgggaaaaccttcaaccacaaactcacatttgttcatcatcagagaattcactcaggagaaagaccttatgagtgtgatgaatgtgggaaagccttcagtaacagatcacacctcattcggcatgagaaagttcacactggagaaaggccttttgagtgcctgaaatgtggaagagccttcagccaaagctccaatttccttcggcatcagaaagttcacacacaggtaagaccttatgagtgcagtcaatgtggtaaatccttcagccgaagctctgctctcattcagcactggagagttcacactggagaaagaccgtatgaatgcagtgaatgtggaagagcttttaacaataactccaaccttgctcagcaccagaaagttcacaccggagaacggccttttgagtgcagtgaatgtggaagagacttcagccaaagctcccatctccttcgacatcagaaagttcacactggagaacggccttttgaatgctgtgattgtggtaaagccttcagtaatagctccaccctcatccagcaccagaaagtacatactgggcaaaggccttatgagtgcagcgaatgtaggaaatccttcagccgcagctccagcctgattcagcactggagaattcacactggagaaaagccttacgagtgtagtgagtgtgggaaagcctttgctcacagctccactctcattgaacactggagagttcacacaaaagaaaggccttatgagtgcaatgaatgtgggaaattctttagccaaaactccattctcattaagcatcagaaagttcatactggagaaaagccttataaatgcagtgaatgtgggaaattctttagccgaaaatccagccttatttgtcactggagagttcacactggagaaaggccttacgaatgcagtgaatgtgggagagcctttagcagtaactcccacctggttcgtcatcagagagttcacacacaagaaaggccctatgagtgcatccagtgtggaaaagcctttagtgaaagatctacacttgttcggcaccagaaagttcacaccagagaaaggacttatgagtgtagccagtgtgggaaactcttcagccatctttgtaaccttgcacagcataaaaagattcatacctgagtggagccttatggaagtggtctttgtgagaaaatcttcagccaagtcaaacttcat

SEQ ID NO: 25336 - DNA, 882 bp, Homo sapiens
  MAP TO AL031276.1; EXPRESSED IN HELA, SIGNAL = 0.99; EST_HUMAN HIT: BF355896.1, EVALUE 1.00e-107; SWISSPROT HIT: Q92331, EVALUE 1.90e-02; NT HIT: AL162331.1, EVALUE 0.00e+00
cttccttcagacccaacagcttctctacctgccaactgggtgcaattcaaagaatacagtttaatgtccttgatttccacctgcagacggtcacttctggattcatcatctcccgccacaaaattctggatgaatatctgtcccaagtgtcccaccaacaactcaggactccccggcttccgagggatagaaacaactggtgattcaatgtttatgttcaagattagctttacagtgtccaaatgagacgaagctaggtcaaacccatatatttcattttcctctaagataaagggttcccgagtcttccttggagtttcaaagagcgataccatctcgctatactcggcagtcttggtagctagtactgtggtgactttggtggctgcgcttttcagcatacctcgaaaattttcttccagttcatccatggataacgtcaactccttcaaaaacttagcagagtggttataatgtaaagaagccatcttcaggttgagaaaacactcctgtttagatctctcaacaaacgtgaaactcaaagcttcagtgagggctgcatcttccattctgacaaacacagattcaaagtagccaatatcactgatgatattttcatagcctacagaattcccaatgctgacaacatactggtttttaacgttatcttgtgtcaaatccataagctgtaaacagccaagagaaccattcatgtcaaacgtgctacccattgagacattaactttggtgccacctatacttgcagttgcaatttttctgccatatttctctctatttgccatgcccactgtccgaagaagcagtaagttcagcctatggatttccactgcaacctcagtgttttgttcatatgtagactgg

SEQ ID NO: 25337 - DNA, 746 bp, Homo sapiens
  MAP TO AC002994.2; EXPRESSED IN HELA, SIGNAL = 0.23; NT HIT: gi14772614, EVALUE 0.00e+00; EST_HUMAN HIT: AI218496.1, EVALUE 0.00e+00; SWISSPROT HIT: P53288, EVALUE 6.00e-02
atgatccagtattcctggaagaagcagggaaagcagaaaaaattgtgatttccagatccacaagcccaactttcaacaaacaaacaaagagagttagctggtcaagctttaattctttgggacagtattttactggtaaaataccgaaggcaacacctgagctcgggtcatcagagaatagtgcctctagtcctccccgtttcaaaacagagaagatggaaagtaaaactgttttgcccttcactgataaatgtgaatcctcaaatctgacagtaaacacatcgtttggatcatgccctcaatcagaaaccattatttcatcattaaagattgatgccacccttactagaaaaaatcattctgaacatccgctctgttctgaagaagccctggatccagacattgaattgtctctagtaagtgaagaagataaacagtccacttcaaatagagattttgaaacagaagcagaagatgaatctatctattttacacctgaactttatgatcctgaagatacagatgaagaaaaaaatgacctagctgaaactgatagaggaaatagattggctaacaattcagattgcattttagctaaagacctttttgaaattagaactataaaagaagtagattcagccagagaagtgaaagctgaggattgcatagatacaaagttgaatggaattctgcatattgaagaaagtaaaattgatgacattgatggtaatgtaaaaacaacttgg

SEQ ID NO: 25338 - DNA, 581 bp, Homo sapiens
  MAP TO AL050336.7; EXPRESSED IN HELA, SIGNAL = 1.2; NT HIT: AY032602.1, EVALUE 0.00e+00; EST_HUMAN HIT: AW183890.1, EVALUE 2.10e-01; SWISSPROT HIT: P35526, EVALUE 5.00e-38
atctactcaggtctccctgtaaacagatctctcggatcaataagcatgaatgacgaagactacagcaccatctatgacacaatccaaaatgagaggacgtatgaggttccagaccagccagaagaaaatgaaagtccccattatgatgatgtccatgagtacttaaggccagaaaatgatttatatgccactcagctgaatacccatgagtatgattttgtgtcagtctataccattaagggtgaagagaccagcttggcctctgtccagtcagaagacagaggctacctcctgcctgatgagatatactctgaactccaggaggctcatccaggtgagccccaggaggacaggggcatctcaatggaagggttatattcatcaacccaggaccagcaactctgcgcagcagaactccaggagaatgggagtgtgatgaaggaagatctgccttctccttcaagcttcaccattcagcacagtaaggccttctctaccaccaagtattcctgctattctgatgctgaaggtttggaagaaaaggagggagctcacatgaaccctgagatttacctctttgt

SEQ ID NO: 25339 - DNA, 1061 bp, Homo sapiens
  MAP TO AL031963.12; EXPRESSED IN HELA, SIGNAL = 0.8; SWISSPROT HIT: P32882, EVALUE 0.00e+00; NT HIT: gi14781831, EVALUE 0.00e+00; EST_HUMAN HIT: AL537243.1, EVALUE 0.00e+00
ttaagcctcgtcctcgccctcctcctcctcgaactccccttgttcgtcggccgtggcgtcctggtactgctggtactcggacaccaggtcgttcatgttgctctcggcctcggtgaactccatctcgtccatgccctcgcccgtgtaccagtgcaggaaggccttgcgccggaacatggccgtgaactgctcggagatgcgcttgaacagctcctggatggccgtgctgttgccgatgaaggtggccgacatcttcaggccgcggggcgggatgtcgcacacggccgtcttcacgttgttggggatccactccacgaagtagctgctgttcttgttctgcacgttgagcatctgctcgtccacctccttcatggacatgcggccccggaagatggcagccaccgtcaggtagcggccgtggcgcgggtcgcaggcggccatcatgttcttggagtcgaacatctgctgggtgagctcgggcaccgtgagcgcccggtactgctggctgccccggctggtcaggggcgcgaagccgggcatgaagaagtgcaggcgagggaagggcaccatgttcaccgccagcttgcgcaggtctgcgttcagctggcccgggaagcgcaggcaggtggtgaccccgctcatggtggccgacaccaggtggttgaggtccccgtaggtgggggtggtcagcttcagggtgcggaagcagatgtcatacagggcctcgttatcaatggagtaggtttcatctgtgttttccaccagctggtggacagagagggtggcgttgtagggctccaccaccgtgtctgacaccttgggtgagggcatgacgctgaaggtgttcatgatgcggtctgggtactcttcccggatcttgctgatgagcagggtgcccatcccggaccccgtgccgccccccagagagtgggtcagctggaagccctggagacagtcacagctctctgactccttcctcaccacatccaggaccgagtcgaccagctcggctccctctgtgtagtggcccttggcccagttattcccggctccactctggc

SEQ ID NO: 25340 - DNA, 737 bp, Homo sapiens
  MAP TO AC018762.4; EXPRESSED IN HELA, SIGNAL = 0.65; SWISSPROT HIT: P34284, EVALUE 7.00e-26; NT HIT: gi16306589, EVALUE 0.00e+00; EST_HUMAN HIT: BF846665.1, EVALUE 0.00e+00
gatgctccaaagtgacctgcatcagcttgacccgggaggcctccattaaactgtcacccttgcatggcaaacagatttccatccgctacctggacatgacggactgcttcgtgctggaggacgaaggcctgcacaccatcgcggcgcactgcacgcagctcacccacctctacctgcgccgctgcgtccgcctgaccgacgaaggcctgcgctacctggtgatctactgcgcctccatcaaggagctgagcgtcagcgactgccgcttcgtcagcgacttcggcctgcgggagatcgccaagctggagtcccgcctgcggtacctgagcatcgcgcactgcggccgggtcaccgacgtgggcatccgctacgtggccaagtactgcagcaagctgcgctacctcaacgcgaggggctgcgagggcatcacggaccacggtgtggagtacctcgccaagaactgcaccaaactcaaatccctggatatcggcaaatgccctttggtatccgacacgggcctggagtgcctggccctgaactgcttcaacctcaagcggctcagcctcaagtcctgcgagagcatcaccggccagggcttgcagatcgtggccgccaactgctttgacctccagacgctgaatgtccaggactgcgaggtctccgtggaggccctgcgctttgtcaaacgccactgcaagcgctgcgtcatcgagcacaccaacccggctttcttctga

SEQ ID NO: 25341 - DNA, 638 bp, Homo sapiens
  MAP TO AC005629.2; EXPRESSED IN HELA, SIGNAL = 0.77; SWISSPROT HIT: P21918, EVALUE 1.00e-108; NT HIT: M76064.1, EVALUE 0.00e+00; EST_HUMAN HIT: AI148329.1, EVALUE 5.00e-64
ggggatgtctgatagatctgggacatgcgatcgaaaggactctccttctcctcatcgttgtccacctcccggtccccggggggaacggcgttgggcatcatgtggatgtaggcagctgcgatttccttgtggaagaccgtgtcttggttgtaggagatgagctcattgctgatgttcaccgtctccaccggcgtgcgggagcagacgtggctgcaccccagcagctgggcaaacaccttccggaagtcggcgttgaaggcatagtgactgggttgagtgaggagttggcccagcagaaccagatgaagacatcgaatgtggtctcactgacgcaggggaagccggccggagggcctttggggtgtccactgcagaaagggaccatgcagttaaggatgaagaagggcagccagcaacacacgaagacccccatgatcaccgacagggtcttgagaacctcggtctccttcttgatggaaaaccgcaggctggtgtcgggcgcgcagcctgcgctgctccggcagctctgcacgtgctctgcggccctctccagggaggaaatcctgcggatctgcacctgggcgatgcggtagatgcgcgtgtaggtcacgatcatgatggccatggggatgtagaag

SEQ ID NO: 25342 - DNA, 898 bp, Homo sapiens
  MAP TO AC009466.2; EXPRESSED IN HELA, SIGNAL = 0.46; SWISSPROT HIT: P13595, EVALUE 8.00e-61; NT HIT: X07198.1, EVALUE 4.00e-95; EST_HUMAN HIT: AV701738.1, EVALUE 3.20e-01
ctaacaaggaggacacagcacagcacaaatgcacaccaccacaggacacaacccgatgacagcagacaaagagaggccgtactcggtctttgctggcgcaggcgaaacagagctgtctgcagtggaaggagcaagctcaggggcttgtccactggccccagcggcgggagcaggagagcccagggctgcaaaaacatcctttgcaaggtcaatatctggggtcttgaagttcccttcgtccattttaaagtcctcgccctgggaagggtttgtggtgctgacggaggcagcctcgctcttcgggctagcaagggctgtggctgcctcggccgggctcttcgcggctccgggctgggtgggctccgggtccgggcctttggtgctgggagcctcctgcttggcctgaggggcttctgtggcaggggcagccgctgctgctagaggactggctgccccagtcggggtggggactggtgcaggggtgggcttgctggccggaggagccttagaggcctccccgacaccagcaggggcgcttgggctgaggacagccccttggttagccaggacactagaagacaaattgctagcggcaggggttgaggtcggggtgtcgctcaggtcaacgaggggggcgaccttgggggctgaagctggggccggggagggggcagaggcgctgggccccttggaaggggtggcctggccagccggtacagagtttgagtcaggcgtggccgtggccggcggggcaatactggaggtcagggtggtggtctcactggtggggctgttctgagcagtggcaaaggtttcggtgatagtgtcagagttagtggtgacggtggtgacagaaggcagcatgtcctcgacagtggccgtagtgtcggcaggcagc

SEQ ID NO: 25343 - DNA, 607 bp, Homo sapiens
  MAP TO AL163636.2; EXPRESSED IN HELA, SIGNAL = 0.23; SWISSPROT HIT: P31792, EVALUE 6.00e-21; NT HIT: AL163209.2, EVALUE 0.00e+00; EST_HUMAN HIT: BG008447.1, EVALUE 6.00e-85
atgacagtggattatcgtaagcttaaccaagtggtgagtccaattgcagctgctgtaccagatgtggttttattgcttgagcaaattaacacatctcctgatacctggtatgcagccattgacttggcaaatgcctttttctccattcctgtccataaggcccaacagaagcaatttgccttcagctggcaaggccagcaatatacctttactgtcctacctcaggggtatatcagctctctggctttgtgtcataatcttattcgaagagaccttgatggctttttgcttctgcaaaatatcacactgctggtccattatgttgatgacattatgctgattggatccagtgagcaagaagtagcaaatgcactggacttattggtgagacatttgcatgccagaggatgggaaataaatctgactaaaattcagggaacttctacctcagtaaaatttctaggggtccagtggtgtgcagcctgtcaagatagtccttctaaggtgaaggataagttgcttcatttggcccctcctgcaaccaagaaagaagcacgatgcctagtgggcctatttggattttggaggcagcacattcctcatttgg

SEQ ID NO: 25344 - DNA, 975 bp, Homo sapiens
  MAP TO AL032818.2; EXPRESSED IN HELA, SIGNAL =   1; NT HIT: gi11418311, EVALUE 0.00e+00; EST_HUMAN HIT: AA017376.1, EVALUE 3.50e-01; SWISSPROT HIT: Q13563, EVALUE 4.00e-10
aagtagatttctgctgaagcttttctgtcaaaatcagcaagtgaaaaagagtgcagagatatgcttgtgttgacaactcctaactgagagacttcaaatatgaccgaaatgctacagaacagatttatatctggattaaaagttgttaattccaaaaccacagcccatgtcttctcatccagccaattgctttcttgaagttctttgagcctcagtgtggaattaaaccgctgctgttctggaaaaaaatagagtgcatatcctccagatccataggtgtgtagtagtccataggaataatatagccattgcgttccttgaggcttataagtaaatccattggtactctcatctatagcctgcttatcaacttcattccaaaagccagaatagttttttgtgtcttctgggtcaatgccatatttggggtgacaatgaatttctcttctgatgctgttttgcacaaacttttcggcaggtagacacattttttcactagattttgctctcacttgcctcatcaatggaaggccaaggattttagacgagctttcaggaagaaatgttggattcaggtcattgtgtaacaaaggcaacagcacgctgtttagccatctatagatgtcttccagcttagtcacagtagcaagatccatagagaaccgatcacgaataaactggttatagtaaaagcagtcagtgtgacgtagtaagacgataaggatcaacagaagggctagaaagataaagtgagttagaatgtaactcagaaacaggagtgctcttctcttgatcctcttctttcttttgaatattctgatttcatcttctgtaaggggttggtacatcctcgtgcctcggattcggacgatctggtcatgtatcctctgcatttcttctggatgcatacgcattccatccaacctgatctcagtatatttatacttggttgaccatgaaaggtttttgcaatac

SEQ ID NO: 25345 - DNA, 703 bp, Homo sapiens
  MAP TO AL162471.1; EXPRESSED IN HELA, SIGNAL = 0.28; SWISSPROT HIT: P25931, EVALUE 7.30e-02; NT HIT: gi14753049, EVALUE 0.00e+00; EST_HUMAN HIT: BG772522.1, EVALUE 1.00e-119
atggaggagccgccgccgccccgcccaccagcgagcatggccttactgggcagccagcactccggcgccccctccgcggccggcccacctggcgggacttcctccgcggccacggcggccgtgctctccttcagcaccgtggcgaccgcggcgctggggaacctgagcgacgcaagcggaggcggcacagctgccgctcccggtggcggcggccttggcgggtccggggcagcgcgggaggcgggggcggcggtgaggcggccgctaggcccggaggcggcgccgctgctgtcgcacggagctgcagtggcggcccaggcgctcgtcctcctgctcatcttcctgctgtctagccttggcaactgcgcggtgatgggggtgattgtgaagcaccggcagctccgcaccgtcaccaacgccttcatcctgtcgctgtccctatcggatctgctcacggcgctgctctgcctgcccgccgccttcctggacctcttcactccgcccgggggttcggcgcctgccgccgccgcggggccctggcgcggcttctgcgccgccagccgcttcttcagctcgtgcttcggcatcgtgtccacgctcagcgtggcgctcatctcgttggaccgttactgcgctatcgtgcggccgccgcgggagaagatcggccgccgccgcgcgctgcagctgctggcgggcgcctggc

SEQ ID NO: 25346 - DNA, 795 bp, Homo sapiens
  MAP TO AC008149.14; EXPRESSED IN HELA, SIGNAL = 0.51; SWISSPROT HIT: P41970, EVALUE 2.00e-92; NT HIT: gi11435887, EVALUE 0.00e+00; EST_HUMAN HIT: AW500624.1, EVALUE 0.00e+00
ctgtgcggtgaagaaggctggggtgagggatcccgaggggagggctgggctgttgagggcgatggagccgatgtcggtgccggagagcaccagcgggggcgctgagatttccaagcctttgggttttttggcctttgggggaagagatggagacttggtcttggagcccgatgacaggttcaagggctccagggaatcggagtcatggcaggcggcctccaggaagaggcttctgtgttcagaagggaggggtgagttgggggacagggacggggaccgagatgagaagggtgaggcggatgaaatactggcagcgtttggcaacattaaagaggagatcttggccgagacggacgaggccaggaaggcggacgccgccgcagcctctgacgtggaaggcagggacaccaccggcctggtgacgtgcttgtcggttttattggtcacaaacctgatcacagtcctgacttcttccacgggggggctgtcttcgggcggctcctccagcttctccgtcttgatggccttgaaggcgtctggtgggttctgcagggaattaatggtgaaggacgagtacaggcctgagtggatgtattcgttgcggctcgtgcttctgagggcggccaggccgtgtttgtgggcctcgcggccctccggagacgccttgcagtcgctgtcctgcagcagaaggctctcccggctgatctccaccgcgtgaggatccatcttcaggatctccgggaaagagacaaacttgtacacaaacttctgcccgatcaccttcttgatgatgtt

SEQ ID NO: 25347 - DNA, 864 bp, Homo sapiens
  MAP TO AL121673.27; EXPRESSED IN HELA, SIGNAL = 0.96; SWISSPROT HIT: P09593, EVALUE 8.00e-31; NT HIT: AF159105.1, EVALUE 8.30e-01; EST_HUMAN HIT: BG740622.1, EVALUE 7.80e-02
tgctgcacgcctggctggtgcctgagcagctctgcgatgcgcatcatggtcggggctgttttggggccgtttccaacaccagcagcgtcgtggctccacagcagcaaggcttcctgaaggaagaagggggcttcgcagtatagttcgagtcgggctctgtttctttccatcccaaacacatagagacgaccaaggccctgatcccaaaagaagaacccaggctgccggcgatcctggggacaacgatgttaactcagggacaggcgcagtctctggaccaggccaggtcgtggtgcacacactcgatctctgcagcgtttcccacatgggcactgcggaccgggaatgtcaggggaacgcgggcaccgtggaccgggaatgccaggggatcgtgggcaccgccgaccgggaatgtcaggggaacacgggcactgccgaccgggaatgtcaggggaacgggggcactgcagaccgggaatgtcaggggaacgtgggcactgcggaccgggaatgtcaggggaacgtgggcacggctgaccgggaatgtcaggggaacgcgggcacggccgaccgggaatgtcaggggaacgtgggcactgtggaccgggaatgtcaggggaacgcgggcacggctgaccgggaatgccaggggaacgcgggcactgcggaccgggaatgccaggggaacacgggcactgccgaccgggaatgtcaggggaacgtgggcacggccgaccgggaatgccaggggaacacgggcactgtggaccgggaatgtcaggggatcatgggcactgtggactgggaatgccaggggaacacgggcacggcggaccgggaatgtcaggggaacgcaggcacggc

SEQ ID NO: 25348 - DNA, 2397 bp, Homo sapiens
  MAP TO AC018432.4; EXPRESSED IN HELA, SIGNAL = 0.75; SWISSPROT HIT: Q02508, EVALUE 2.20e-01; NT HIT: AL161495.2, EVALUE 9.30e+00
attttgtagacattttccaaaggaatgcctgtctgtaattcaaatagaatgttttctgattcctgacttaaataagagttggcttccagaaacacacattcctcactctcacttacttcaagacatgaacactcgtccaagtcagctggactctcaatatctgtctgaatatcaacaaaatcttcagaaatctgagtttcacatgaaacagctgaaccagtagcatttctctgggtccttaaatcaacagattcacatgtatttctttcttgaaaccatacatgatattgtttgtttttttctggagtcacatggaattctgactctgaaagaacttgagtatctttcttcctcgggctgtgcagatcacggtcagaagcacacacaagggttggctgtgggaattttctgatgagtgatgagttttcatggggactttgctttttgaaagaaatatgttgttctaacagttctgtatcaatggaaagactaccactttgtccaccagcatttacgtttttacacactgcaattgtgtttaacttactatgtttgggaagtacatttggcttagggaacgtacttccaacaggaagccccaggagaaaacgaaggtatttgtattgtaaatcaagatctatttgatggagagatttctcctcagaaagtaacaaaattctgttttgtcgttttggtcctgtgaaaccaggatgaatacagttagataagggtttctttctctcatgagcactggtcattgcataagattctcttacaattctgggaaaggctttcatttgtatctccaatgttttcacagaaaagtgcatgaggagtttgcctttttcttttactgagtggttttggagggtatgaggcaatagcatctcactagcagaagtcactgcagatgttccattttctagcttattaatactctgtagctttgtgattgtctcctcactgtcacttgaaacatcaacaatcagtgtcttcatattgctggcaagaggtgaatccttttggtgtttatgttttgagttaggttctatggtatcagtcccttctagagacataaagttcattgttttatgtctagaatagaacctccaactgttatcttttgaaatagtcccttttggataaaagttgaacatttgtaaagatttccttgccatctctggtatcagattcagttgtatttcaagtgcttttgactctaaatgactagtaagcttatttttttctttgggagtaaactgttctaaaagggatttgtgctgcgttttgggatatattgctgttgatattgtatctggaccctctggaaaaggtggtgacttcaagtcgtcaggcttataggcttgtatgttatctagtttatcagaagaaactttgtcttggatcatatttttaacctgggactcagagatagctttggttgcttcacaaatgggaagtaaatgttctgcatttgtactgtctgcaactattttgacttcgctacttttaacttgaggcggtatgggcacagttcctgggaaagctttttgctgctgaaccttttgtgtggtcatgtcccatactggttcactctgatccctttgcttgggtaactttggatcttcaagcatagatggacactctgtgggtgtcagaatgcgttttagaatcttttcttcctgctcgatgatacgtaagtctggttttttaatgatccttgagacatcatgctctggaacaatccgttcttttgtttgtgcctttaagtattttttattcatttcacttctgaggtttgcttctgatttgacattaggaagtttctgcatttgttgtttgtccactgcaaagggctggggatcttgtggaactgtgtttgtaaaattctgttccccttttacaattgttaaagtgtctctcttagacatttcactagtgtttggtgatttttcctggaatttaggaagacagattctcttttctctttctaggtttgtcttagggtcagtgtgaggtgaacgcatgatggaaatagaaagacttctgataaatattcctgagacatctttactccacgaagctatgttctttaacttaacatcatactctaatttctttctattgcttggtgtaccacgccccgtgatattaagcatctgtggaattgggtgattctggattttcatagttaaatatttggtgctcaattctcttttcagatctcttattgttaatctgcctttctgatctttacgtttgggagaaagaggaacatatgaataaaatgaatccagaacatttctttgaaataatttttgtagttgaatgctttgttttgcattagatgcttctagttcttttttctgcttttgcatgattaggcggctgttctcc

SEQ ID NO: 25349 - DNA, 807 bp, Homo sapiens
  MAP TO AC011530.5; EXPRESSED IN HELA, SIGNAL = 0.47; SWISSPROT HIT: P70178, EVALUE 2.00e-97; NT HIT: X84813.1, EVALUE 0.00e+00; EST_HUMAN HIT: BI764029.1, EVALUE 0.00e+00
tcacctcttgcagggcgcgccgcctccggccccggtccggtcgcgctgtcgccggttcttgaaccagttgctgacctgcgtgagcgacaggccggtgagtgtggccaggcggcgcttctcgtccggcgtggggtagcggttgccgcggtagcaggccttgagcgctgcgcgggagcgctccttgaagcagtagactgtctcctcgccgtcccagatggtcttgggcagcgggaacttcttgcgcagtcgatacttgtccactgcgccaagcgcgcggccgcgggcccgctcggcctcatggtagcgcgcgcgcaggtagaggtcctgcaggaaggcgtggtgggcggcggggaaggggcggctctcgagtagccggtagagctcggcgtactcgccccgctggaaggccaccagggcccgcgcgcgcaacaccgggtcgctgccacgtaggcgctcggccgggggcagtgcgcccaggaagcggctcaagcggccggcgtggcccgcctggagcagcgcctcgcagacgcacgccacctgctcgggcgagaagcggaggcccgtgggcggttcggaagcggcctcggggggcgacccggggacgcccggggatcccgggccctcagctcccgcagccgctgcgcccgccccggccccggccgccgccgccgcctcaccctcggccgcctgcaaagtctgcaagagctggcgcgcttcctcctcctcctcttcggtcgccgccgccgccgccaccgcctcccccccagccgccggccccgcgctcggctccgcaggcaaggtagccat

SEQ ID NO: 25350 - DNA, 581 bp, Homo sapiens
  MAP TO AC005225.2; EXPRESSED IN HELA, SIGNAL = 0.43; SWISSPROT HIT: Q9QYR9, EVALUE 7.00e-09; EST_HUMAN HIT: BG422270.1, EVALUE 5.20e-02; NT HIT: gi16124256, EVALUE 2.20e+00
atggcagcaggaagaccccccgcaggcggccggctcgcaggcgcgcggcgcagctcggggatggagaaccagcgctgcacctgggccgaggccagcgccggactcagcggcgccgcctgctgcagcggcgttaggtggatggtcacctccactatgagggggtttttcaaggcggccctccgcattcgactgaggcgtggatccttcgaagcggccggcatgaggctccacaggagccccatgggccccacgcccgtgaagtcgcctcctagagccaggtccccggccaggtccagccccccgccgctgtccacctcgtagtgggcaagggagtggaagaggcggcctcggtggctgacgcccgacacctgcagggtcaccggctcccccgagcccaagccttctgctttcatatccaggcacttgtcggccagcccagtcttgggcgtgacggtcagggtcgcggccttttgggagaaaaaggacgatgtggatatcggcctccaggcctggagggggaccccagaggctcggagcgctgcccggaccgccggccacatggtccgggactgtcgcggctt

SEQ ID NO: 25351 - DNA, 711 bp, Homo sapiens
  MAP TO AC006994.2; EXPRESSED IN HELA, SIGNAL = 0.62; SWISSPROT HIT: P40223, EVALUE 6.40e-01; NT HIT: U30311.1, EVALUE 6.80e-01; EST_HUMAN HIT: BG724218.1, EVALUE 0.00e+00
gtttccaatacttatctacaggaatcgccatgaccccagctctgagggaggcaacagcaaagggtatcagcttttcatctttgccaagtaccatggagtctgacaagatgctctacatggaaagtcccagaactgtagatgaaaagctaaagggagacaccttttctcagatgcttggatttccaactcctgaacctactcttaatactaattttgtgaatttaaaacattttggctcccctcagtcttcaaaacattaccagactgtttttttaatgagatctaattctacattaaataaacacaatgagaattataaacaaaagaaattaggggagcccagttgcaataagctgaaaaacatactgtataatggcagcaacattcagctcagtaaaatctgtctttctcattctgaagagttcatcaaaaaggagcctctatcagataccacgagccagtgcatgaaagatgtacaaattattctggattcaaatataaccaaagacactaatgtagataaagtacaactacaaaactgtaaatggtatcaagagaatgcacttttggataaagttactgatgctgagattaaaaagggtttattgcactgtactcaaaagaaaattgtacctggccactcaaatgtgcctgttagttcttcagctgctgaaaaagaggaggaagtacatgctcgtttacttcattgtg

SEQ ID NO: 25352 - DNA, 590 bp, Homo sapiens
  MAP TO AL022328.21; EXPRESSED IN HELA, SIGNAL = 0.58; NT HIT: gi14779822, EVALUE 1.00e-29; EST_HUMAN HIT: H61279.1, EVALUE 5.30e-02; SWISSPROT HIT: Q08695, EVALUE 8.00e-12
aagacagggattttttttgttaatgtgtgttgatgagtcaaaggtcaagagccgaagagccagtcctcactggggtgcagagggctctttgggggcagagcgggcactgcatggaccctgcaccctggagctgatgttcaggtagtgggaggaggtggccggccagggcaggccgctctctcagaggcactctgtgcagaagcagggagggtgctgcaggccgctctctcagaggcgctctgtgcagaagcagggagggtgctgcaggccgctctctcagaggcgctctgtgcagaagcagggagggtgctgcaggccgctctctcagaggcgctctgtgcagaagcagggagggtgctgcaggccgctctctcagaggcgctctgtgcagaagcagggagggtgctgcaggccgctctctcagaggcgctctgtgcagaagcagggagggtgctgcaggccgctctctcagaggcgctctgtgcagaagcagggagggtgctgcaggccgctctctcagaggcgctctgtgcagaagcagggagggtgctgcaggccgctctctcagaggcgctctgtgcagaagcagg

SEQ ID NO: 25353 - DNA, 774 bp, Homo sapiens
  MAP TO AL137790.1; EXPRESSED IN HELA, SIGNAL = 0.98; SWISSPROT HIT: Q03721, EVALUE 7.00e-94; NT HIT: gi14739513, EVALUE 0.00e+00; EST_HUMAN HIT: BF732938.1, EVALUE 0.00e+00
tcaggctcggtccctgctcctcccggcccctacccaccacccaccacggaccccttgcagacccaagatggggagacacgggctcctgccactcaccctagcggcccgggaggagtagggatcctcgaagagcgcccacatgcggggctgccagccgcggcagcccccagacccggcgccatggcccgcgcctccctcgtgggggcccagtcgctgcagggccagctcccgctcatcgtcgccggcctcgtcgctgggccccgcgccgctgccgcctccgtccgggctctcgaagatgtcgagcgcctcctcggcgtcgcggtgctgccggtaggtcatccagcagcagggttccacgtcggtctcgtcgatgccccagaaggtgagctcctcttcgaagagcggcccgcacacgtccgcggggcagtgcagcttgccggtgcggtagtagttgagcacgtaggcgaagacgcccgggtgcctgtcgaagaagaactcgcagcccccgccgccgctgctgccgctgctacccacaccgccgccatcggtctcgggccggcccccgccgtcggggtcggccagccaggcgaggcgggttcccggtagggtgcgcagggtgctgcggtaggtctcatgtcgcgtgccgcccacgttgatgatgatcttctccgacgcctcgcccttggccatctcctccttcagacatgttttggacggaggcttgttccccgacttgcgcccgcggtaggaggagacacacaccgagctgatcat

SEQ ID NO: 25354 - DNA, 2041 bp, Homo sapiens
  MAP TO AL135999.2; EXPRESSED IN HELA, SIGNAL = 0.91; SWISSPROT HIT: P28167, EVALUE 5.00e-53; NT HIT: gi14751069, EVALUE 0.00e+00; EST_HUMAN HIT: BG472553.1, EVALUE 4.80e-02
cggatgtggggaacttgcgggcaggtgctcctacgtggtggaaaccattgagaagtagctgggcttccaggggcttgtctggcctcagccccgggccagccaagggagtctgaggctgccctagggcctggggcccaaagtactggaagagttcaggggggctagtgggggtagcccctggtgggggaggagggcctggccccatcaatccaggtggcaggcccagcggcagcccctggtgcagcattaggacattctgcatgtgcttctcagaggtcatatggatgcgcaggttacgggagatgtttgtctcgtagctgcacaccttgcactgccaggatgatttggtcttaggctctttgtctcccgcggagggtgggagtgatgcctctggtggacttccctgcccaccagggcccgcctggaagccctgtaggttggccaggtgcttgtcagactgcatatggatgctgaggttgcctttggtggttgtagagtagttgcagacgtcacagcggtagggtttgtagccacagttgtagctctctccacgagcaaggcgggggtgggcgcccccagcactgcagtagctgcagtgactgttgctctcagggtgcttctctcgcatgtgcacatccagggtctgctggtacttgtagtgccagttgcacttgggacacttgagtgtcttgcaggagttgcgtgagtggagcagggacatgtggctggacaggctgaggccctggaaggctgcaggggctggggtgtagtcatcagctaggcgatagggctggggtgggtcactggggtcttcgggggagcccactggggcagggagagtgcccccctccttggaggtgggtgagctttggttgagtggggggcagagccctccatcctcttcttgcccctcagggaaccaatctggccctgcctcgcctgctgctactggcgattctttggcttgggttgggctggggtcccaggtggctgtgggtggagagggtgggctgagggccataacttcttcatccaggaggataagggcctggacttctgcctcaggggggccatcctctgtctgggccacattcgcctccatgttcactgtgctgctgttgtcaaggggtatgtcagaagaggggcgagcagggagttttggctccagaaagcttatgagggccttgcagccttcatctccctcctggagtacagctgggctacctgacaggccctgatattgggcaggggttagcttcaccccatgagactgtgtgtgatccataaaggcctggggcttgctgaaacccaggcggcacagaaggcagagccagaagaccgccacgtggttgcccccgctgttccccatggggccatctttgggatctccgggtggatttggagccagctggtagctccagaaagctccatgcctttcctcacaggcagccggagatggtgctgaggtatcatgggacagaatttggtcagaagagctaaagccttggattgggtcaaagccatgttggatgtgaagggcagtgaggtgtgaggggggtgggtaggcaaggaagggcagactgggctcttccttgatgcccgcctcaccccaggggaagccctttggtaacaggagttcactgccacctggcagggacagcttggccactaggtaggcctcacctccagctgtgaagaataagtggttgcttaggtccatgggagggagcccttcttcttcctcctcctgctccttgtccttttccacccctgggtcatttggtgggaagtgaccacagtcaggcccttcctggggctccccaatctcctttggtgggacgaggccacagcccgactccaggagctgtccccctggctctgaggacctcatgttctcagaggtggaggaggcagcagggggatctttggtgacaggatcagagggggtgctggaggagaaggtgtccgaaggcagggacggggcattgtgcccaggggagggggtggtaccagtggtagaggctgagttaagggtggccat

SEQ ID NO: 25355 - DNA, 2010 bp, Homo sapiens
  MAP TO AC005523.1; EXPRESSED IN HELA, SIGNAL = 0.48; SWISSPROT HIT: P17221, EVALUE 3.00e-72; NT HIT: gi14764059, EVALUE 0.00e+00; EST_HUMAN HIT: BG740106.1, EVALUE 0.00e+00
atggacctccgcaccgccgtgtacaacgccgcccgtgatggcaagctgcagctgctccagaagctgctcagcggccggagccgggaggaactggacgagctgacgggcgaggtggccggcgggggaacgccgctactcatcgccgcccgctacggccacctggacgtggtggagtacctggtggaccggtgcggcgcgagcgtggaggccggtggctcggtgcacttcgatggcgagaccatcgagggcgcgccgccgctgtgggccgcctccgcagccggccacctggacgtggtgcggagcctgctgcgccgcggggcctcggtgaaccgcaccacgcgcaccaactccacgcctctccgcgccgcctgcttcgacggccacctggaggtggtgcgctacctggtcggcgagcaccaggccgacctggaggtggccaaccggcacggccacacgtgcctcatgatctcgtgctacaagggccaccgtgagatcgcccgctacctgctggagcagggcgcccaggtgaaccggcgcagcgccaagggcaacacggccctgcatgactgcgccgagtccggcagcctggagatcctgcagctgctgctggggtgcaaggcccgcatggaacgtgacggctacggcatgaccccgctgctcgcggccagcgtgacgggccacaccaacatcgtggagtacctcatccaggagcagcccggccaggagcaggtcgcagggggagaggctcagcctgggctgccccaagaagacccctccaccagccaggggtgtgcgcagcctcagggggctccgtgctgcagctcctccccagaggaaccactgaacggggaatcttacgaaagctgctgtcccaccagccgggaagctgccgtggaagccttggaattgctgggagctacgtatgtggataagaaacgagatctgcttggggcccttaaacactggaggcgggccatggagctgcgtcaccaggggggcgagtacctgcccaaaccggagcccccacagctggtcctggcctatgactattccagggaggtcaacaccaccgaggagctggaggcgctgatcaccgacccggatgagatgcgcatgcaggccctgttgatccgggagcgcatcctcggtccctcgcacccggacacttcctattacatccgttacaggggtgccgtgtacgccgactcgggcaatttcgagcgctgcatccgcttgtggaagtacgccctggacatgcaacagagcaacctggagcctctgagccccatgaccgccagcagcttcctctccttcgcggaactcttctcctacgtgcttcaggaccgggccgccaaaggcagcctgggcacccagatcggctttgcagacctcatgggggttctcaccaaaggggtccgggaagtggaacgggccctgcagctgcccagggagcccggagactcagcccagttcaccaaggcgctggccatcatcctccacctgctctacctgctggagaaagtggagtgcacccccagccaggagcacctgaagcaccagaccgtctaccgcctgctcaagtgcgcgcccaggggcaagaacggcttcacccctctgcacatggctgtggacaaggacaccacaaacgtgggccgctatcccgtgggcagattcccctccctgcacgtggtcaaagtgctgctcgactgcggggccgacccggacagcagggattttgacaacaacaccccgctacacatagcagcccagaacaactgcccggccatcatgaatgccctgatcgaagcaggggcccacatggacgccaccaatgccttcaagaagacggcctacgagctgctggacgagaagctgctggccaggggtaccatgcagcccttcaactacgtgaccctgcagtgccttgcggcccgggccctggataagaacaagatcccttacaagggcttcatcccggaagatctggaggcgttcatcgaactgcactga

SEQ ID NO: 25356 - DNA, 585 bp, Homo sapiens
  MAP TO AF230667.1; EXPRESSED IN HELA, SIGNAL = 0.72; SWISSPROT HIT: P01266, EVALUE 1.00e-113; NT HIT: U93033.2, EVALUE 0.00e+00; EST_HUMAN HIT: BG986270.1, EVALUE 0.00e+00
gccccacgccctgtcaattacagtctgagcaagctttcctcaggacggtgcaggccctgctctctaactccagcatgctacccaccctttccgacacctacatcccacagtgcagcaccgatgggcagtggagacaagtgcaatgcaatgggcctcctgagcatgtcttcgagttgtaccaacgatgggaggctcagaacaagggccaggatctgacgcctgccaagctgctagtgaagatcatgagctacagagaagcagcttccggaaacttcagtctctttattcaaagtctgtatgaggctggccagcaagatgtcttcccggtgctgtcacaatacccttctctgcaagatgtcccactagcagcactggaagggaaacggccccagcccagggagaatatcctcctggagccctacctcttctggcagatcttaaatggccaactcagccaatacccggggtcctactcagacttcagcactcctttggcacattttgatcttcggaactgctggtgtgtggatgaggctggccaagaactggaaggaatgcggtctgagccaagcaagctcccaacat

SEQ ID NO: 25357 - DNA, 3716 bp, Homo sapiens
  MAP TO AL121829.12; EXPRESSED IN HELA, SIGNAL = 1.2; SWISSPROT HIT: O84402, EVALUE 3.00e-24; NT HIT: gi14769949, EVALUE 0.00e+00; EST_HUMAN HIT: BG761449.1, EVALUE 0.00e+00
tcacagatcaggaagctgcttgggcagcagctcaacggtgaacagggtgcccggcctcagcacctcttccggaaccttctccatgcccatgtggtggacgaagaggtgcacccgtctgggagcctcctgccggtctgcccggcgctcctggtcccagtcctgcgtctgcccgtgggccacccaggtatacgtgccggggtcaacattcaggccagggccgaggctgctgggcccagggcgtgggctggccgtgggagccggcagcccctcgagccggatgcagaggtagcagcagctgaagttgatgtcggcacagttctcctcgaggaaggcggcctccaggcggaaggcgccctgcagctgcccctgcggcgtccgtgacgcctcccaggagacactcaggtgctgaagtgtgacggagtcattctcggcaaccgcgccggtggccgactccagggcgcagaatggttcccacacgcaggcgtactcatccacgtcgcggtaccggtccctcggggcccggtacacacggcctgagaagcagtctccgggccgctccacgtgctccaggcagaggctgaagcccggtgccaccgtccagagctgagggctcggtaccaggaagccgtgctgcaggctggtgccgagctgcacctgcagggtgtccccactgcccagctcccgggccacctccaggaaatggccacagtggctccgctgcacctgcaccagctcccgccgctgggacgcctcgcccttctcctggatgagagcagccgcctccggccagcgctgcagctccaccagctccagcagctgcttccacagggccgtctccacggccagggtgtgtgggtccggcacagtgccaggcagtggcaggggcgggctggatccctgcgctgagtagacacggcgccgccacaggagccgcaggcccggccggcctgccagggcgtgggggtgctcggccagctgcagggagccgtaggggacggggcaggggtcaggcagcgtctcccggttgctggggaagagcagccggaagcagcgggagcccgcctccacgtccaccacgaagcccagcttgtccagaggctgggccttgagctgcacggccaggtgcaggctgcgcgcccgccgctgatagctctgggcaagtgcgtgctggaggctgaaggcctggcagagcccatcgatgtccctggcagagtaggcagagcccccatggcccagcgccagcaggatctgccgctgcaacaccacgtccaggtacctgcggatgggcgaggtggcccacgtgtaccagtccacctgcagcgagtagtggccgccctgctgctggtggccccgggcgcagcggccgaacgccgagcgctccagggccttgcggaggtcgcggcctgcaggagccaggaatgggtgcatgtcgtccgtggtgaccaagtccaccatctgttcgtagtcctgggtgcgggcagcaaactggacctgcttccagagggaggccaggaggtgcagccgcgtgtcggggggactgcccccgccgccgtgcaggtggtggccgaggtgcagtgacaggggcacccggtccccatgcttctcacacagggccttgagctgctggctgcggggtgctggctgccaccgcagaggcgtgaccgtccgcgtgcactcgctgcccaccaggaactcagccacgagcctattaaactgaatcatgtactccttcaccatgatgtgggccgcgcggaagcccagggtgccgtcctcgtccggctgctcatagaagcagtcggaccgcaggcggtgccggcgcagcagccgagagaagtagcacgcggccacgacgcaggcgtccacggagtccaggcgggccggcagctcacggccggcacccgggtgctgcctgatcacctcctccgcctcctcgtaggacagctggcggtcagactggaccacggagggtgcaaagcgcaggctcttcagctggccactggccttctccatggtgaggaacagggagatggccaggcggtcccggccaggcaggaggctgaggacgtcctggcagaggctggccggcagcatgggcactggctccctgccgggggcatagaacgcagcgccctgccttcgcgcctccacgtccagcaccccgtccctgggcacgaagctggccacatcagtgatgtgcacagccacctcgcacctgggacccaggtctcggacactgagggcatcatcgaggttgcaggcgccctgggggtccacagtgaaggtcaagaaggcgcggcagtcctctcggcggccggcaacccggccaagctccgtgtggtatttctgcagcaccttggtgatggtggcctggtccgacgggggcaccctcaagctgtactccaggccgaggatgcggaggccctgctcccaggtgctggcctcaggcagcacctcccggacgatgcccagcgggtagtagaagccttgccgccacaggacaatttggacccagaagagccggctgtgccgggcctcggcggtgagcctctcaagccccacacgctgcagccggcccttccggaggctgtagatggggacctgcgatgggtccttcagctcggccacgaagatcttggtcacggagccattgatggggaccatgatgcgcgggtcccacgtgtccatgcggcacacaaacgccagctcgtgcctcttcctcttcagcacgcccagcacgcggccccgaagccgcccctcgggcgccttgtctcccgaaaggagctgcaccagcacctcatccccggcgaaggccatcccacagtccaggcggcccctgacctggatggggcccgaggaggcatcgtccagcgggatggctgacgcccgctcgaaggtctctggcacgaaagagcagtggcggtaccgctcgggctccgcgtgcagcagcttccgtagcgcagccgggggcaggttctcgtacagccgggcctgctgcagggactcgggcctggcgacagtgtccagcagcccgtcctccccgacggtcaccatcaccttctggctctcgtccagaagctcccgtaggatggcgtcgtcagcgttgagctccccgtcccacggccagaagtcagcctctgcatcctcagcctccgtggactccacgcccgctgcagcagccgctcctgccgcacaggccccgggcaccacgtcttccttcactgcgtctcctgctggtgctgccgcagcctccgtctgcgctgtggttgccgtgatgtcacgggatgctgggctcagagcctcatctcccggctctgccttcaccatggccgtcaccacagccgcctgctcctcggccaggtcccctactggctctggggcagcctcccagttccccgctgccccagcctgtgtgcctcggggaggccagcgccgtctctgcgccacaccctgctcgacctgctccatggacaggccctcggggcagacactgtgccgctccacgcactcacggatgaagctctcccagagcttgccgcaggccccgaaggagcagagggccacggcgtcccccactaccaccagctgggactgggcgcgggtcaggacggtgttgagcacgcgggcgtcggtgaagaactcaggggccagtgccccagggctgagcaggctctggcaggtgtgcacagtgctgagcaccacgacccggaactgccgcc

SEQ ID NO: 25358 - DNA, 893 bp, Homo sapiens
  MAP TO AL138811.1; EXPRESSED IN HELA, SIGNAL =   2; SWISSPROT HIT: P93203, EVALUE 1.70e-01; EST_HUMAN HIT: BF477471.1, EVALUE 8.10e-02; NT HIT: L24077.1, EVALUE 5.50e-02
ttgcatatcactcatatttttacacatagtttttcccccagggcttgagttaggtttcaccaacatagacatactatggacatttttatctgagttcttcagaagtagttttgaattagcactaaaagcagcatatgaaacatggtggtcgattactatatcacagggaacagttagttcagatttctctaaagtatcattacagacttgcagaaaatctgaagtttgtttagaaagtaatatgctgcactcactttttttagttaacagttgtatttgttttattttacattgtttatcatctaacataacattacttgaattccgtaaactatatttctgacatggaacaggatttttttttatatctagagacgagtccaaatctgctttggtttggtcactatttgtaatttccttctctagagcatgttctcgagtccctggaagcaatctgaattgtttgaatggctcattttcagaaacatctttattattattgtgatatgtattgtgtgctgtctcatttaaaatactgttaaatgatgttttgttattttcaacctccagatttacatctgtatggtgaacatctaatcctctggttctttctagatgtattttttctgtttctattgctgtatctaacactacaaaatgattatttggtgatttaaattctgtacatccattgtctttttccaagcatatcttgtcttttatttctgtagtaactgattttctgttgtccgtaacattcgaggtttgtccttgactaattacttctttatctaaggagagggttttgcttaaggagatttcactttgattttcatcctgagaaacaacagtatcaatttcattcttgaagcttttttcaaaaagctgtaaat

SEQ ID NO: 25359 - DNA, 2447 bp, Homo sapiens
  MAP TO AL049732.11; EXPRESSED IN HELA, SIGNAL =   1; NT HIT: gi14760383, EVALUE 0.00e+00; SWISSPROT HIT: Q12816, EVALUE 0.00e+00; EST_HUMAN HIT: BE894856.1, EVALUE 0.00e+00
gtgcagaagaaagaccccaaggactgggctgtgcagtaccgcgaggcagtggagatggaagtccaagctgcagctgtggctgtggctgaggctgaagccagggctgaggcaagagcccaaatggggattggagaggaagctgtggctgggccctggaattgggatgacatggatatcgactgcctaacaagggaagagttaggcgatgatgctcaggcctggagcagattttcatttgaaattgaggccagagcccaagaaaatgcagatgccagcaccaacgtcaacttcagcagaggagctagtaccagggctggcttcagcgatggtgctagtattagcttcaatggtgcacccagctccagtggtggcttcagtggtggacctggcattacctttggtgttgcacccagcaccagtgccagcttcagcaatacagccagcattagctttggtggtacactgagcactagctccagcttcagcagcgcagccagcattagctttggttgtgcacacagcaccagcactagtttcagcagtgaagccagcattagctttggtggcatgccttgtaccagtgccagctttagtggtggagtcagctctagttttagtggcccactcagcaccagtgccactttcagtggtggagccagctctggctttggaggcacactcagcaccacggctggctttagtggtgtactcagcactagcaccagctttggcagtgcacccacaacgagcacagtcttcagtagtgcgcttagcaccagcactggctttggaggcatactcagcaccagtgtctgttttggtggctctcccagctccagtggtagctttggtggtacactcagtaccagtatctgcttcggtggctctccctgcaccagcactggctttggaggcacacttagcaccagtgtctcctttggtggctcttccagcaccagtgccaattttggtggtacactaagtaccagcatctgctttgatggctctcccagcactggtgctggctttggtggtgctctcaacaccagtgccagctttggcagtgtgctcaacaccagtactggttttggtggtgctatgagcaccagtgctgactttggcggtacactaagcaccagtgtctgctttggtggctctcctggcaccagtgtcagctttggcagtgcactcaacaccaatgctggttatggtggtgctgtcagcaccaacactgactttggtggtacactaagcaccagcgtctgttttggtggctctcccagcaccagtgctggctttggtggtgcactcaacaccaatgccagctttggctgtgccgtcagcaccagtgccagcttcagtggtgctgtcagcaccagtgcttgcttcagtggtgcaccaatcaccaaccctggctttggcggtgcatttagcaccagtgctggcttcggtggggcacttagtaccgctgctgacttcggtggtactcccagcaacagcattggctttggtgctgctcccagcaccagtgtcagctttggtggtgctcatggcaccagcctctgttttggtggagctcccagcaccagcctctgctttggcagtgcatctaatactaacctatgctttggtggccctcctagcaccagtgcctgctttagtggtgctaccagccctagtttttgtgatggacccagcaccagtaccggtttcagctttggcaatgggttaagcaccaatgctggatttggtggtggactgaacaccagtgctggctttggtggtggcctaggcaccagtgctggcttcagtggtggcctaagcacaagttctggctttgatggtgggctaggtaccagcgctggcttcggtggaggaccaggcaccagcactggttttggtggtggactgggcaccagtgctggcttcagtggcggactgggcaccagtgctggctttggtggtggactggtcactagtgatggctttggtggtggactgggcaccaatgctagtttcggcagcacacttggcaccagtgctggctttagtggtggcctcagcaccagcgatggctttggcagtaggcctaatgccagcttcgacagaggactgagtaccatcattggctttggcagtggttccaacaccagcactggctttactggcgaacccagcaccagcacgggcttcagtagtggacccagttctattgttggcttcagcggtggaccaagcactggtgttggcttctgcagtggaccaagcaccagtggcttcagcggtggaccgagcacaggagctggcttcggcggtggaccaaacactggtgctggctttggtggtggaccgagcaccagtgctggctttggcagtggagccgccagtcttggtgcctgtggcttctcgtatggctagtgaggtttcaggtaactgcaatatttcca

SEQ ID NO: 25360 - DNA, 575 bp, Homo sapiens
  MAP TO AB016897.1; EXPRESSED IN HELA, SIGNAL = 0.99; SWISSPROT HIT: P03186, EVALUE 3.20e+00; EST_HUMAN HIT: BG678183.1, EVALUE 2.00e-01
gagttggctgctgtgtcttgtgcccacgctgactaacactgctccttgtgcagcagccagaagcagagctggcacctgcaccaagcccggccctctgtgcccaagattgccgcctctccagggggcacttggttatttgaccccctcctcaccccacgggctctgttacccagtgaactatgtttaatcaatggataatttgcattcacagcttttcttcatcagcctttctaaactaattcaatgagtcctttagcggcacaggctcagatcgcggaacacaccagcggactcgccgtagccagatgaagccggccatggcggcctcgatcccgcagctctgcgggcagctctggggctgccgagtcagcagggggactccccccacctcccgctctgtggcttgctgtccccctgacctcactggcccattgtccccactgtatcacagcctcctccaagagcacccgcctcttcccgtacctcactctgggagttggtccagggctaacttctatccctgcctcctgcttcctccctgcctggtctcctctcgcccctcttgaacttccttc

SEQ ID NO: 25361 - DNA, 552 bp, Homo sapiens
  MAP TO AL008639.10; EXPRESSED IN HELA, SIGNAL = 0.4; SWISSPROT HIT: Q15417, EVALUE 1.00e-48; NT HIT: gi4758017, EVALUE 0.00e+00; EST_HUMAN HIT: BE728936.1, EVALUE 0.00e+00
ccatgagttccacgcagttcaacaaggggccttcttaccagctttttgccgagatcaagaaccagctcctgttcaaatgcgaccctcagaagcaggcggcgctctgcagctggatcgagggactcacccgcctctctttcagccccgacttccagaagagtctgaaggaagggattgtcttatgcacactcatgaacaagctgggctcagtccccaagatcaacggctcatgcagaactggcaccagctagaaaatctctccaacttcatcaaggccatggttggatacgacatgaaccccatggacctgttcgaggccaacgacctgtttgagagtaggaacatgacgcaggtgcagctgtctcttctagccctggcagggaaggtcaagacaaagctgctgcagaatggggtggacgtcggggtcaaatactcggagaagcaggagcggaacttcgacgacgccaccttgaaggccagccagtgcctcactgagctgcagatgggcaccaacatatgtgcctgccagtcgggcgcgacaacttagggcac

SEQ ID NO: 25362 - DNA, 732 bp, Homo sapiens
  MAP TO AC004771.1; EXPRESSED IN HELA, SIGNAL = 1.8; SWISSPROT HIT: P07359, EVALUE 4.00e-78; NT HIT: AF395009.1, EVALUE 0.00e+00; EST_HUMAN HIT: AW950474.1, EVALUE 0.00e+00
cagaccacattcccacctagatggaccccaaatttcacacttcacatggaatccatcacattctccaaaactccaaaatccactactgaaccaaccccaagcccgaccacctcagagcccgtcccggagcccgccccaaacatgaccaccctggagcccactccaagcccgaccaccccagagcccacctcagagcccgcccccagcccgaccaccccggagcccaccccaatcccgaccatcgccacaagcccgaccatcctggtgtctgccacaagcctgatcactccaaaaagcacatttttaactaccacaaaacccgtatcactcttagaatccaccaaaaaaaccatccctgaacttgatcagccaccaaagctccgtggggtgctccaagggcatttggagagctccagaaatgacccttttctccaccccgacttttgctgcctcctccccctgggcttctatgtcttgggtctcttctggctgctctttgcctctgtggtcctcatcctgctgctgagctgggttgggcatgtgaaaccacaggccctggactctggccaaggtgctgctctgaccacagccacacaaaccacacacctggagctgcagaggggacggcaagtgacagtgccccgggcctggctgctcttccttcgaggttcgcttcccactttccgctccagcctcttcctgtgggtacggcctaatggccgtgtggggcct

SEQ ID NO: 25363 - DNA, 537 bp, Homo sapiens
  MAP TO AP001671.1; EXPRESSED IN HELA, SIGNAL = 1.2; SWISSPROT HIT: P10180, EVALUE 1.70e+00; NT HIT: gi14780044, EVALUE 0.00e+00; EST_HUMAN HIT: BI752644.1, EVALUE 0.00e+00
attcctctctgctgtaatgtggatgctgggtctggacattagcctctggactagagattgtctcttcttttttctgtgcctggttgtgactatgaggccacaatacactgttacgacataaagtggcacctgaatcttgtaacatagaaagtccaaagtctgtattttccctctgctccaaaattctttgtgtacagttagagatgccacctgcacttccatctatccattttgcagaatattttggtacttgggagtcaaactgtgggagtaatttttcttctggcttatgcctgaaattaaacagatgatgctgggggtttttagaacattcagaatctgaatccagatccttattttgtgcatactgcacaatccagtttatcttcttactcaaaatggttttaacttcttcataagtactttttgaaagcttagatcgaggacaaccctggtttgcaattaaatggtatttttcaaagcagtctttatggccccttaatgatttggtgtgcaagagatcagactttggtaccc

SEQ ID NO: 25364 - DNA, 540 bp, Homo sapiens
  MAP TO AC009516.17; EXPRESSED IN HELA, SIGNAL = 0.27; SWISSPROT HIT: P14632, EVALUE 3.90e+00; NT HIT: AB051453.1, EVALUE 0.00e+00; EST_HUMAN HIT: BI465158.1, EVALUE 1.00e-100
acacgcgcggcccaggtggccgcgcacttcgctattctcagcctccaccttccgcacccagtcggtcttggcctgcagccgcccattctcctccgccagccaggcgtttttgagcagcgccgcctgcagctgtgtctcggcctcctcgccacgtcgccgcgccggggccgcctgcgcgcccagctcctggcactcgcgccgccgctggtccagctcgcgctccagcgccagcatctgccgtcgcacctcctcgcaggttgcgctctggccgcccgcctcgggccaagcgccaccgttgccctgctgaagcatcaactgcctctgcaggcgcagcacttcccgctgggactcgcgctgcaggcggtctaagtctctgacgttgagccactgggtgcaggggccgccccttccagtatgcaggtcgctgcagggacccgaggcgacacgcgcctgcaggaggtggcactcctgccgcagctcttcgatctgcttgtccttggccagcggcgcgctcgcctgctccgacaggtcccgagcgcg

SEQ ID NO: 25365 - DNA, 642 bp, Homo sapiens
  MAP TO AJ239328.2; EXPRESSED IN HELA, SIGNAL = 1.1; SWISSPROT HIT: Q99102, EVALUE 3.00e-20; NT HIT: AL163303.2, EVALUE 0.00e+00
ctaggtgtaattccagtgctggaggaagaagttaccctcagataaacggtcggtgtaattccagtgctgggggaagaagttaccctcagataaacggtcggtgtaattccagtgctgggggaagaagttactctcagataaaccgtcggtgtaattccagtgctggaggaagaagttactctcagataaacggtcggtgtaattccagtgctgggggaagaagttactctcagataaacggtcggtgtaattccagtgctgggggaagaagttaccctcagataaacggtcggtgtaattccagtgctgggggaagaagttaccctcagataaaccgtcggtgtaattccagtgctgggggaagaagttaccctcagataaaccgtcggtgtaattccagtgctgggggaagaagttactctcagataaaccgtcggtgtaattccagtgctggaggaagaagttactctcagataaacggtcggtgtaattccagtgctgggggaagaagttaccctcagataaaccattggtgtaattccagtgctgagggaagaagttaccctcagataaaccactggtgtaattccagtgctggaggaagaagttactctcagataaaccgtcggtgtaattccagtg

SEQ ID NO: 25366 - DNA, 485 bp, Homo sapiens
  MAP TO AC007957.34; EXPRESSED IN HELA, SIGNAL = 0.24; SWISSPROT HIT: P39881, EVALUE 3.40e-02; EST_HUMAN HIT: BG472142.1, EVALUE 1.70e-01; NT HIT: AB051453.1, EVALUE 0.00e+00
atgaatcctggagcagggcttttgctggtgcccatgtgctgggagcaattttccttctccccaggctggtcactgactgaaggtggcctgtggttctggggactcttctgaaagagcaggtcctttctacagccctcccaggcctctgcaagctcctgggcttggctgccagcccctgaactcggacattctccttctgagcccaggttggacactggggattgcctccttgggggttcttcaaagaatgcttctaggaacttggcctggggctccccgcagcttccagggttgtgggggctggccttggcactcggaggagccagtgacagcttctgggggcagacggggaaggtgactctgtaggtggatgggtcgccacaagtgtagctaaagggtggagtctctggccatcggtgacacatgaagaagtcctcggggatctgagcaggcactgaatccagggactcaccacagagtgacat

SEQ ID NO: 25367 - DNA, 659 bp, Homo sapiens
  MAP TO AP000510.1; EXPRESSED IN HELA, SIGNAL = 0.21; NT HIT: gi11419124, EVALUE 0.00e+00; EST_HUMAN HIT: BG676174.1, EVALUE 0.00e+00; SWISSPROT HIT: Q15517, EVALUE 7.00e-25
ggaccttggctaagagcattggcaccttctcagacccctgtaaggaccccacgcgtatcacctcccctaacgacccctgcctcactgggaagggtgactccagcggcttcagtagctacagtggctccagcagttctggcagctccatttccagtgccagaagctctggtggtggctccagtggtagctccagcggatccagcattgcccagggtggttctgcaggatcttttaagccaggaacggggtattcccaggtcagctactcctccggatctggctctagtctacaaggtgcatccggttcctcccagctggggagcagcagctctcactcgggaagcagcggctctcactcgggaagcagcagctctcattcgagcagcagcagcagctttcagttcagcagcagcagcttccaagtagggaatggctctgctctgccaaccaatgacaactcttaccgcggaatactaaacccttcccagcctggacaaagctcttcctcttcccaaacctctggggtatccagcagtggccaaagcgtcagctccaaccagcgtccctgtagttcggacatccccgactctccctgcagtggagggcccatcgtctcgcactctggcccctacatccccagctcccactctgtgtcaggg

SEQ ID NO: 25368 - DNA, 585 bp, Homo sapiens
  MAP TO AC025740.1; EXPRESSED IN HELA, SIGNAL = 0.95; SWISSPROT HIT: Q91428, EVALUE 2.50e+00; NT HIT: AJ310932.1, EVALUE 4.00e-05; EST_HUMAN HIT: BI830720.1, EVALUE 2.00e-04
gaattcttggcacagacacaagccccggagaagggtaacattgcccacgggctgtacgtccaaactgtcaggctttcaatcccaaatctctggaggcaaaaggccagatttcatgtgcttcccatgaagtggggagagtcttgtcaatgttggagagaagggagtattattagtgggattgccaccgctgtctctaacagcctcagtgccactggcaagcgccatatggtcccagacagcctcttccctgggctgtctccacacccagagccatttgcaggatgggaaagagccctcaacgttcgccacacggcaccaggccccatttacctccagcgccctggtcctatgtggaagcatccatcaggcatctggtttttctcagcctcacaggttctagtcttcccccaccccccaacccctgccccgggcagtttgctgctgaagacaatgaaccaagtggaatttcccggcctaagaggggaactggagctcggcatcctgcttttgttaccagttcatcttgagctccttcttggcctcagtttcttcatctgtaaaataaaaatccagaaaaatctgctc

SEQ ID NO: 25369 - DNA, 2157 bp, Homo sapiens
  MAP TO AC004760.1; EXPRESSED IN HELA, SIGNAL = 0.78; EST_HUMAN HIT: BF943044.1, EVALUE 0.00e+00; SWISSPROT HIT: Q92793, EVALUE 0.00e+00; NT HIT: gi14778081, EVALUE 0.00e+00
gactacgacctctgcatcaactgctataacacgaagagccatgcccataagatggtgaagtgggggctgggcctggatgacgagggcagcagccagggcgagccacagtcaaagagcccccaggagtcacgccggctgagcatccagcgctgcatccagtcgctggtgcacgcgtgccagtgccgcaacgccaactgctcgctgccatcctgccagaagatgaagcgggtggtgcagcacaccaagggctgcaaacgcaagaccaacgggggctgcccggtgtgcaagcagctcatcgccctctgctgctaccacgccaagcactgccaagaaaacaaatgccccgtgcccttctgcctcaacatcaaacacaagctccgccagcagcagatccagcaccgcctgcagcaggcccagctcatgcgccggcggatggccaccatgaacacccgcaacgtgcctcagcagagtctgccttctcctacctcagcaccgcccgggacccccacacagcagcccagcacaccccagacgccgcagccccctgcccagccccaaccctcacccgtgagcatgtcaccagctggcttccccagcgtggcccggactcagccccccaccacggtgtccacagggaagcctaccagccaggtgccggcccccccacccccggcccagccccctcctgcagcggtggaagcggctcggcagatcgagcgtgaggcccagcagcagcagcacctgtaccgggtgaacatcaacaacagcatgcccccaggacgcacgggcatggggaccccggggagccagatggcccccgtgagcctgaatgtgccccgacccaaccaggtgagcgggcccgtcatgcccagcatgcctcccgggcagtggcagcaggcgccccttccccagcagcagcccatgccaggcttgcccaggcctgtgatatccatgcaggcccaggcggccgtggctgggccccggatgcccagcgtgcagccacccaggagcatctcacccagcgctctgcaagacctgctgcggaccctgaagtcgcccagctcccctcagcagcaacagcaggtgctgaacattctcaaatcaaacccgcagctaatggcagctttcatcaaacagcgcacagccaagtacgtggccaatcagcccggcatgcagccccagcctggcctccagtcccagcccggcatgcaaccccagcctggcatgcaccagcagcccagcctgcagaacctgaatgccatgcaggctggcgtgccgcggcccggtgtgcctccacagcagcaggcgatgggaggcctgaacccccagggccaggccttgaacatcatgaacccaggacacaaccccaacatggcgagtatgaatccacagtaccgagaaatgttacggaggcagctgctgcagcagcagcagcaacagcagcagcaacaacagcagcaacagcagcagcagcaagggagtgccggcatggctgggggcatggcggggcacggccagttccagcagcctcaaggacccggaggctacccaccggccatgcagcagcagcagcgcatgcagcagcatctccccctccagggcagctccatgggccagatggcggctcagatgggacagcttggccagatggggcagccggggctgggggcagacagcacccccaacatccagcaagccctgcagcagcggattctgcagcaacagcagatgaagcagcagattgggtccccaggccagccgaaccccatgagcccccagcaacacatgctctcaggacagccacaggcctcgcatctccctggccagcagatcgccacgtcccttagtaaccaggtgcggtctccagcccctgtccagtctccacggccccagtcccagcctccacattccagcccgtcaccacggatacagccccagccttcgccacaccacgtctcaccccagactggttccccccaccccggactcgcagtcaccatggccagctccatagatcagggacacttggggaaccccgaacagagtgcaatgctcccccagctgaacacccccagcaggagtgcgctgtccagcgaactgtccctggtcggggacaccacgggggacacgctagagaagtttgtggagggcttgtag

SEQ ID NO: 25370 - DNA, 1569 bp, Homo sapiens
  MAP TO AL034396.6; EXPRESSED IN HELA, SIGNAL = 0.91; EST_HUMAN HIT: AL046615.1, EVALUE 0.00e+00; SWISSPROT HIT: P98168, EVALUE 0.00e+00; NT HIT: gi14758093, EVALUE 0.00e+00
agagatcctggcccaccttatgccttttaaccatgtgcgtcttcatgctgtgcttggatgtgaagagtttattacaagaggagatcgggcaacggcttttccaagtgtccacatcctgcaggtgtttcttggagtgaatgtagaggctactgcgagcagagaacctggcacagcagcctgccacaggacacacgaaaggctttgtgcccaggtgggtaatgctgtggcctttcagatgttcggccctcgtgaaagatttcccacagccttccacagggcacatgaacctccggtcatcgtcgtgcttccttttgtgccttaagagtttggacatgctggtgaagttccagccacagccatcaaagtcacaaaggaaaggtctctcgccggtgtgactccgcaggtgaattttcagcctacaagccttgtcatattgcttgctgcagccagggaaagagcaggaaaacagttcctgttccctgaaatgggcgcggttatgggaaaacagagcactcactgtgataaatgtcttcttgcagccagaaaacgcgcactggtaaggcctctcgggttcgaagtggctgcgctggtgggcgccgagtttggcctgcgtggggaagctctcctcgcacacctcacatttgaacgagttctcctgctcatggcccttcatgtgcgccttgaggttgtacacggtggtgaagctcttgccacagccctccgcagggcagccgaagggccgcagtttatcgtgcgactgcaggtgcctcttgagcttgtaagaggtggtgaaggtccagccgcagccacccagggggcatttgaagggcctctggccctggctgctgctgtgcgtcagcaggtgcatcttcagctggtgcttcttggcgaaggtttgcccgcacagcgcctcggggcacaggtacagcaccacgcctggaccagagcccagcagtccgcgggggcccagggcggcggccaggccctccgcctcctcctggggcgccggagcaggcgcgggttctgcgggctcggctagcaggaggtcggaccgcagctctgggcagtcacccgggtgcgcggcttgcgggaacccagcttggggggcgatcagacacctgggctgctgggcaggagcggcccctggctcccaggcgtgtggtgggggcgtggccagggtgaggacgccgttctcaaagcgcaacagcaggtcctggttgtggatagtgactgtgcccgcgaaggccgcggcggggccgggggcggagatcggggccggagtgggaaccgcggacaggcagtgggggccctgcgcagagcagcccgcggggttcgcgccgctctcgtccccctggagccccgggcccgccttggcctcctccctcaacacaggccctgcggcctgaccggagcccgcggtctccacgtcgccacccaccgggtcaagcagcaccaggaagaagtcgtcgccgccgccgctaggttgatggggcctcggcgcgaacaggcttgggccagggccccgtgatgccgtgctggcctcctcgcgccgccgcccgggcccgccat

SEQ ID NO: 25371 - DNA, 470 bp, Homo sapiens
  MAP TO AP001710.1; EXPRESSED IN HELA, SIGNAL = 0.17; SWISSPROT HIT: Q13009, EVALUE 3.00e-77; EST_HUMAN HIT: BE711811.1, EVALUE 0.00e+00; NT HIT: gi15320009, EVALUE 0.00e+00
tcagatctcagtgttcagtttcctggagggggcaaagtcttcacgcctaacccaaatgacttcctcgcttgcgctctccaggcctccattgatccccgacagggcagcttgcttcttgagctgtgccatgcgggacgcgtgactatccagggttttccggcctctttcccgctgactgatggaggtggcctgaagccgctcctgcaggtctctgtccactgaggcacccttcacggactcacagaactcatcatcgtcactgaggatgtctgtctccttgatgtcatcttgctcctcatactgagcaagatcaaactgctcctctacccatcggtcagtgtccccaccaccggggggctgctgggactctttctccgggctgcttgcggagacggcatcagaatcaatggtaaacctgtttcgagccagccgccgcctcctcctcccaagagacttgcttggggcagaca

SEQ ID NO: 25372 - DNA, 621 bp, Homo sapiens
  MAP TO AC004736.1; EXPRESSED IN HELA, SIGNAL = 0.41; SWISSPROT HIT: P15172, EVALUE 1.00e-99; EST_HUMAN HIT: BG828102.1, EVALUE 0.00e+00; NT HIT: X56677.1, EVALUE 0.00e+00
catgccgtcggagcagttggagcgcgggctggacgcgtcggagtcgccgctgtagtgctcgccgccgcggcccgggggcagcgggcccggcgcatagaaggcggctgcggcgccagggggcgcggcgtcctggtcgcgcagcagagcctgcaggccctcgatatagcggatggcgttgcgcaggatctccaccttgggcaaccgctggtttggattgctcgacgtgcagcgcttgagtgtctcaaaggcctcatttactttgctcaggcggcgccgctcgcgcatggtggcggccttgcggcggtcggcgttggtggtcttgcgcttgcacgccttgcaggcccacagtaggcagcggcccgcctggtggtgcccgctgggcgcgcgcacatgctcgtcctcacgtgcgcccggggccgggtgcaccgccgcggggaagtgcgagtgctcttcgggtttcaggagcgcgcccacgtgcatcaggcgcgggtccaggtcttcgaagaagcgcaggtccggggagtcgaaacacgggtcgtcatagaagtcgtccgttgtggcaaaggagcagagagagccgtcgggggccgtcaggtctacgtcgcggagcggtggcgacag

SEQ ID NO: 25373 - DNA, 686 bp, Homo sapiens
  MAP TO AC023120.3; EXPRESSED IN HELA, SIGNAL = 0.44; SWISSPROT HIT: Q99104, EVALUE 7.60e-01; EST_HUMAN HIT: AU133797.1, EVALUE 0.00e+00; NT HIT: gi15300388, EVALUE 0.00e+00
gaagctcttactttggatatcaacagggaaactagaaggtatcactgctcaggaaaagatcagattgttccttctttgaatacagagtcttctaatcctgtgcttaagaagttagaaaagctaaacactgagaaggaagaaaggcaaaaacagttgcagcaacagaatgaaaaagagatgatggaacagattcgccagcaaacagatattttagagaaggagcgcaaagccttcaagacaattgaaaagccaagaattggagagtgtttggtggcaccatcttcctatcagtcaaagcaaagagtagagaggccatcctctctcctcagcttaaatacctcaaataagggagaacttaatgtactggggtccctatcattaaaagatgcagctcttgcccaaaaagacagttcctctgctcacttacccccaaaggaccgacctgtcaccgtgttctttgaaagaaaaggaagtccatgccaatctagtactgtcaaggaattatccaagacagacagaatgggcacccagctgaatgtagcctgtaaactctcaaataatcgcatttcaaaaagagaacactttaggccaactcagtcttacagccacaattctgatgacctttccagagagggaaatgctaggcccattttcttcactccaaaggacaatatgagtattcccct

SEQ ID NO: 25374 - DNA, 521 bp, Homo sapiens
  MAP TO AC006124.1; EXPRESSED IN PLACENTA, SIGNAL = 1.8; EXPRESSED IN HELA, SIGNAL = 0.5; SWISSPROT HIT: P14918, EVALUE 4.00e-10; EST_HUMAN HIT: BI520645.1, EVALUE 1.00e-128
ctagcagcagcggccgggcagcctgtgccccgcaggccgggagggcgtggtggcggccatggtgctggcccgtttcgagtggcggatgcccatagagaacgctggagccctggctttgttcacggtgacctgctctgggcagtgggcgccagggccgggggtctcctccaggggtcgcggggcccggggccgccccagcatggtgaaggcaggcaggcgctggcggtaggtgtttgcgtccgggctgtcgtactggcccgggcctggtatctcagcaggatcctgcggggggcgggcggggggggtgcggcccaccaccgtgtagctggggctgctgggcttggtgaagatctgtgagccccacagagggggcatggtgtaggcattaggggcaggggctgaggtgtccaggggcttcagggggaggcggcagcccagggtgaaagccggcggtgtccgatggcgcacagggggcaccttctctgggctgtaggccccagggcctggcgtcacctccggac

SEQ ID NO: 25375 - DNA, 753 bp, Homo sapiens
  MAP TO Z98272.1; EXPRESSED IN HELA, SIGNAL = 0.84; SWISSPROT HIT: O15169, EVALUE 0.00e+00; NT HIT: gi14777210, EVALUE 0.00e+00; EST_HUMAN HIT: BE894571.1, EVALUE 0.00e+00
ctgaactctctgccttcgctgtaccgtctactggaggagaccctcggggcagctgtctccaggagcagcttctgagggagtcttccggggggagcagcgtctctgccatcgtcctcatccatgtcctggtcacacttccattcctcatcttcatttaaggtcggcaggtatccagatatgcccttccctgtccctgacccagagctctggtcactacagactttggggctctccgagcctgtcctcgtatattccaaataaatatcagacttaaggaaggagggataggtgttttcctccatagtggcctggatttcggtctgggcctggtcaaacatggcaggatcgatcagctgcttcatgatgcagccctttatgaagctcttggtggctggcttggtctgccgggacacgatgccattgttatcaagaatgtactttcggtagatggctctcgccagcttcagcctcttctcctcgttcgagtcacagggctccagcttcctgaagccagtgcaggcaaaccagaagtccagcaagtcggcacagccctcctgcttcaggaaagtcctgaacaggcttatcccatcttggtcatccagcagggaatgcagtgactcagcccacttcaagtatggtggggtgggggaggcactgccctcaggctcataccccaggtccagatccgagcgcctcggagtggccgtcgaagtctcacctttaatgccaacacctttcccggagcagaaactg

SEQ ID NO: 25376 - DNA, 636 bp, Homo sapiens
  MAP TO AC003005.1; EXPRESSED IN HELA, SIGNAL = 0.59; EST_HUMAN HIT: BF743864.1, EVALUE 0.00e+00; SWISSPROT HIT: P52741, EVALUE 4.00e-59; NT HIT: gi13375967, EVALUE 0.00e+00
gtagttggcaaggagccaaggctgaggcagctgctgagcagagtgcttctgtagaagtgcccagttcaaacgttcagcaacaccagaagcagcactgtggagagaaacccttaaaaagacaagagggcagggtcccagttttgaggagttgcagagtccacctatcagagaagtccttgcaaagcagggaagttgggaaggatcttctgaccagctcaggtgttctcaagcaccaggtgactcacacgggagagaagtcacataggagctccaaaagtagggaggcctttcatgctggaaaaaggcattacaaatgcagtgaatgtgggaaagcctttggtcagaaatatttacttgttcagcaccagagactgcacactggggaaaagccttatgaatgcagtgaatgtgggaagttatttagccataagtccaacctttttatacaccaaatagttcacactggagaaaggccttatgggtgtagtgactgtggaaaatcctttagccgtaatgctgacctcattcaacaccagagagttcacactggagaaaagccttttacatgcagtgaatgtggaaaagctttcaggcataattccacacttgttcagcatcacagaatccacactggag

SEQ ID NO: 25377 - DNA, 531 bp, Homo sapiens
  MAP TO AC007731.8; EXPRESSED IN HELA, SIGNAL = 0.83; NT HIT: gi14777504, EVALUE 2.00e-15; EST_HUMAN HIT: AI949809.1, EVALUE 0.00e+00; SWISSPROT HIT: Q61001, EVALUE 3.00e-18
agtgcccgcgccagttctggggccccgactgcaaggagctgtgtagctgccacccacacgggcagtgcgaggacgtgacaggccagtgtacttgtcacgcgcggcgctggggcgcgcgctgcgagcatgcgtgccagtgccagcacggcacgtgccacccgcggagcggcgcgtgccgctgtgagcccggctggtggggcgcgcagtgcgccagcgcgtgctactgcagcgccacgtcgcgctgcgacccacagaccggcgcctgcctgtgccacgcaggctggtggggccgcagctgcaacaaccagtgcgcctgcaactcgtctccctgcgagcagcagagcggccgctgtcagtgccgcgagcgtacgttcggcgcgcgctgcgatcgctactgccagtgcttccgcggccgctgccaccctgtggacggcacgtgtgcctgcgagccgggctaccgcggcaagtactgtcgcgagccgtgccccgccggcttctacggcttgggctgtcgccgccggtaagcgcggt

SEQ ID NO: 25378 - DNA, 533 bp, Homo sapiens
  MAP TO AL135999.2; EXPRESSED IN HELA, SIGNAL = 0.19; NT HIT: gi14751043, EVALUE 0.00e+00; EST_HUMAN HIT: BI918843.1, EVALUE 0.00e+00; SWISSPROT HIT: P35799, EVALUE 1.50e-01
cggctgggcaggcctctcggttgcagcgggctccccgagctcttctgtcaggcacccagcatcaggacccctcgaggacgagcccctcaggaccagcatggcgatgggctcaggctccgtgcctgctggggccctcagcgggggcaggggctcttcatcctccccctcctcctctcgaagacttcctgaactgtcgctgcagcctccgaggagtggggaaccgtctctgggccctggcccttgcatcccagcctcatcctcagcctcatagccagctagttcctctgcctgtgcgcctgcccccccccactcctcaggccaagctttggggctggagaagggaccctggtcccctccaggaggcagtgggctccggcaggcagggggtcgccagggttggcgggaggaggcaggactgctgggcagttcaggggatccctctgagggggtcagtccgttctcatataccccagggctgtcctcatccaggggctccgtgtcggaaccttctgagtcctgcctgggtctgcggc

SEQ ID NO: 25379 - DNA, 884 bp, Homo sapiens
  MAP TO AC016397.5; EXPRESSED IN HELA, SIGNAL = 0.31; SWISSPROT HIT: P42331, EVALUE 6.00e-04; NT HIT: AB017499.1, EVALUE 2.20e-01; EST_HUMAN HIT: AL519797.1, EVALUE 0.00e+00
ttaccttttcacactcctctcgtactcagtccgctggcggcacagctcggccctgagctcagtgaccagcccctgtaaggcctcggagcggcgcgcgtgttcccgggtggggctgtccggctcgctgggctcgctgttgctggcacccgcgcccgcctcgtccatgctgtggtccaggtccagggacttggggtcctcgctgctgctggggagcggggagggctccagggcccagtcggtgtgcagggaactgcgggcagacgagtcgctggcgcggcaggccgtgcagctgctgagtgagccccccaccgacgactcgctggacgaggccccggaccacgccatactggccacgctgggtatgccggggaccaggcccggcgcgggcacattgtcgtaggtggagagtctctgcacggagcccgagtccttgagccggtctcccgacgaggcccggcggtgtccgcgcagggaggacagcccgttcataagccagttcccgccggaggagatgatgggcacctccagggatgagccgccccccttcgggcttcccgatagggacctcggctgccggaaggaggacttccaactgggcagggtctgcaccttcttcccagggctgcaccggctccccggccccgtgggggctgttctggagagcaccgccacggccgccccgtccagggaagaggtcctgtgcgcgggcaggccggggccgccgggctctccttggctgtccctggtgacctcctcggagccccaccccactgcgcattgcaggcccccgcgcggggaggtgggcccttccgggaccggtgccgtgaagagctggctgtgtttgcggatgaggacggtcatcaggtgctggacgagggaagtgc

SEQ ID NO: 25380 - DNA, 966 bp, Homo sapiens
  MAP TO AL163636.2; EXPRESSED IN HELA, SIGNAL = 0.44; SWISSPROT HIT: P23267, EVALUE 4.00e-72; EST_HUMAN HIT: AI909504.1, EVALUE 8.80e-02
attccctaaaacgcctgccactaccttcctaaacatgtccttcaaagcttccttgacttgctcattacgtaaggcatagatgaatggattcaacagtggtgtcacaaatgtcgttattactgtcactgcccagttagtgtccacagaaccactctgcgatggccgcacatagagaaaaatggcacttccatagaagagggtcaccactatcaagtgggaggtacaggtagagaaggccttctgacggcctgaagcagaggggatgctcaggactgccagcacaatgaggccgtaggacacagcagtgatcagcaaggaagatacaatgacgagggaggccaggacaaagtcagtctcctccagcttcttggtgttggtgcaagccaggcggagcagtgggccactgtcgcagaagaagtgctgtaccacagcaccctgcttacagaaaggaagcaaggccacagccactgtgggaccaagcacagggacgagtccccccacccagcaggccaaggccacacgaaagcacacagccccactcatgagcaaggggtagcgcagaggatgacagatggccaggtagcgatccgcagacatgacagccaacagtaagaactcggaggccccgagaaagaagtagaaatagaattgggtgatacatgcagcaaaggaaatagtgtgttgccttgagaggaaattgctcagcatctttggaatgatgacagaagtgagcagtatctctaggcaggacaggttacccagaaagaagtacataggggtctgtagtcgagtatcagcccttaccacccccacaatcaacacattgcctgtcagattcaggagatagacaagaagaaacacagaaaataattccactcttgcgctgttgagatttgggagccctgccaggacgaactctgttggatcactactgtggttcccatcaggactcattgtctttttcac

SEQ ID NO: 25381 - DNA, 562 bp, Homo sapiens
  MAP TO AC008009.4; EXPRESSED IN HELA, SIGNAL = 0.3; NT HIT: X03912.1, EVALUE 5.40e-01; SWISSPROT HIT: P43560, EVALUE 1.40e+00; EST_HUMAN HIT: BI870364.1, EVALUE 0.00e+00
ccaaaaattgagtttaccctgaagacactaataatgaattgtatacaccaggggtcacaactgactcaagaggaatacttatggctactgcaggggaatttttaaaactaaggtttaaaatgtgttggacatggtaccaacgtagttttcagctgaagatttttaccagtgtgcctactagagagggacaaagttgtgaaatatgtaatatagacttgtagggaaacaaatggtgtcatcagattttactgtcaactagaaaccttacccagccagaaatctttgtattttagatagtaggaaagatgttcctcatttagacaagtggggttctcattcaacctgcaaatcaaaaagattactcttatcttgctttacaaaaaagtactctttaattagtgaaaaaattcaaattcaagccttgcctaatgcttattgcccttccttgcaggtctaaatgctagacctagtgactgtggcaactatctctcactgatgttccagaaagagaagaactccttcctgctagactttcttcgatatttcagttgtgataagcaga

SEQ ID NO: 25382 - DNA, 1203 bp, Homo sapiens
  MAP TO AP001743.1; EXPRESSED IN HELA, SIGNAL = 1.3; NT HIT: gi14780526, EVALUE 0.00e+00; SWISSPROT HIT: P57078, EVALUE 0.00e+00; EST_HUMAN HIT: BG031653.1, EVALUE 0.00e+00
ctaggtcttgcttcgccgcaggagcgtggcggcggggccatggccgccctggaacttgaggctctgcaggttgatgtgggccccatgcctgagcagagtctccaccgtctgtgcgtgccggccctgggcggccaggtgcagcgcgctgagcccctgctcgtcgaacaggtcaatgacatcggcgctgaccaactcctccaccacctccgagtgcccgtgggcggcagccaggtgcagcgccgtctggttcaggggtccccgggccagcacatcggccttctcctcgacaagcagcttgacagtggccaggtgtccgttgcgggcagccaggtgcagagcggtgtagccgtctgaggtcatggcctccttgccagcgccccgatgcaggagcagcctggcagtgctcgtgtgccccgtctccgcggccacgtgcaggggtgtctgtgccagcaggctgcagacgttgacgtcggagcacaggtcgatgaggatgcgggccacgcggtagtgcccgcgctgtgcggccaggtgcaatggcgtcctcccatccagcgtctgggcgttcacactcacccccggctgcttggccagcagcttgacgatgggcaggtggccctgccaggcagcgtagtgcagtggcagccaggcatccttgccctgcaggctcacgtccacgcctcggcgcagcaggatgcgcacgatattctcctgcccgtgctggcaggccacgtgcatgggcgtccggccctcaaagtccacctcgttgaccgaggcgttcttctccaacagcagccgtgtgctagactcgtccccgttctgggctgcaaagtggagggctgtccactggtcctcatccttggcgttgacactgatcttccgcgccagcaggagctccacgacaccccgcaccctcctctccacggccatgtgcaacggggtggagcccctacggttgctcaggttggggttggcattgttgagcagcagccacttggcgcactcctcttgcccggcctccaccgccaggtgcagcaggctggcaccgctgtccagtgccaggtccacgtcctgcggctgcaggatcttcatcagtttgctggtgtccccggacacgatggcatccacaagcttcttcttctggacgtctgtggtgcccagatctgcagggagaggagaggcaaaggtcagagcgtggctgcacat

SEQ ID NO: 25383 - DNA, 681 bp, Homo sapiens
  MAP TO AC006960.1; EXPRESSED IN HELA, SIGNAL = 1.3; SWISSPROT HIT: P26897, EVALUE 8.00e-01; EST_HUMAN HIT: AL135448.1, EVALUE 0.00e+00; NT HIT: gi14749462, EVALUE 0.00e+00
gaaatcggtcagatgcgtggctatgcttagctaatacgcttggcagagcaggattggcatactcaaactgaggattgtaggtatagtcagatttgaagaatctcagtttttctttctctaagttggtgggttttatagcagtcaatatacaaaatttcttcccagaaaagtcatctcccttttcaaagcttctagacagctgaggctttggctttggaagagtggagaaatggcaccacttgaccttgcttttgggtttaggtggcagtactatgccattccctgtaacagagatatcatgtgtaaactttacaggacttgacactgaactagtgacaaaaacagcaggccgcctctccaggcagtaccaagtaccactgcttgtcacaggcaccagggctttcatcctgcgaggatctttgctacgagaagtgttaggagatttgctgggttttctacatcttttggagtaggtggaggaagactgtttttgtgaatgatactttttttcctccttgctctgtagtaggacattgtaactactggttccagttgtgaaaatgtcttttagcactcccgaggacaaatgtgaaatgcttcttttgttgtcaatgatcaatgaatcttctgcatttagaatagacttcttagcaagttcttgctcaggccagtgaagctttt

SEQ ID NO: 25384 - DNA, 565 bp, Homo sapiens
  MAP TO AC023890.3; EXPRESSED IN HELA, SIGNAL =   1; NT HIT: gi14751837, EVALUE 0.00e+00; EST_HUMAN HIT: AA398148.1, EVALUE 0.00e+00; SWISSPROT HIT: P06151, EVALUE 1.00e-85
ttaaagcttaagcttattctgaatttcccagagtgtttttgcactttttttcagatgggcctcttcttcaggggtcagctttatctttataaggttggtaataccgttctctcccaggatacaaggaatactgaggaatacttcttcatctattccatagaggcccttaattatggtggaaactggatgtattctcctaagattcttcaaaatactttctgttaaatcggccacagataggccaatggcccaagaagtataacctttcattttaataatctcataggcagttgcagtcacttctttgtggacatttttccattgctcaggatctttatcagttcctatatcagagttcagatccttcaaagggacaccagctatgttcactccactccacacaggaacacttgagtctccatgctctccgaggatccatccatggcagctttcagaatggataccaagcttttgtccaatcaagaaacgaaaacgagcagtatccagattacagccgcttccaataatacggtttttgggaaatgcactcaacttccaagctaca

SEQ ID NO: 25385 - DNA, 471 bp, Homo sapiens
  MAP TO AC004595.1; EXPRESSED IN HELA, SIGNAL = 0.86; NT HIT: gi16161062, EVALUE 1.00e-106; EST_HUMAN HIT: AI470098.1, EVALUE 0.00e+00; SWISSPROT HIT: P23098, EVALUE 4.30e-02
atggcagcccaggtggcagcccgggaggcgcgagacttcagagaagccccgacccttcgcctaacctcgggggccggcctggaggcagtgggcgctgtggagctcgaggaggaggaggagaacgaggaggaggcggcggccaggagagcgcggagtttcgcccaagacgcgcgggtgcgcttcctcggcggccgcctggcgatgatgctggggttcacggaggagaaatggagccagtatttggaaagcgaggacaaccggcaggttcttggggagtttctggaaagcaccagcccggcttgccttgtgtttagcttcgccgcctcggggcgccttgcggcttcccaggaggtaagaggcgacgggcaaggggacctgcccatccaacaaaactacccaggggagacagcccagtcgctcccctttggattcccgcggggcgctcactcgggcactttaacaaacttggct

SEQ ID NO: 25386 - DNA, 1798 bp, Homo sapiens
  MAP TO AL031406.1; EXPRESSED IN HELA, SIGNAL = 0.56; NT HIT: gi16168272, EVALUE 0.00e+00; EST_HUMAN HIT: BE246628.1, EVALUE 0.00e+00; SWISSPROT HIT: P47179, EVALUE 1.30e-01
tcacagcttctgctgggcggagacccccttccagtaatcaaggatgtcatgcagatcctcgtccttggcgaactggaccttcttgcgcagggcgtgaccggcggccatgtacacctcctcccggtggtgcttcttgtagggccggaagcgctcccagatcttgtgcgtgctctcggatgagtactcggggctggaggagtaccctgagtagtagtgtctgggggagagctgcgagtaggtggagtcacgcttggagcgggtcagcggcttgaggaaggacacgcgctggctcaggctgtcggcaccctcctcgtagtacagggcgggaaagctgtgccggtgctcgctgcagtggtaggccggcttcacctccaggtggtggatgcccccgcccccgccgctgcccccgccgctgcccgccggcaccagcgggagccggtccagcgggctgttgagggggctgcccttctcgatgtacttggagtcgcccttagccagccctgtggcggccggatggtcgggcacgtccaggctaaagaccttggcgctcttgatggaaccactggacgacacgctgcaggtcttgcgggtcacggccgcgtcggcgctcagctggcgctgtagtgggtggtgggagctctccttgtagggaggcgaaaggaagctgggccgctccaggccccgggcccagtggctgagaggcggcagcagctgcagggagggactggcactcgaaggccagctcggggtccaccactgctgctggccgcctcccagaaaagaggccgagtccagcttgagagcatcgatgcagttgttaatgatctggttgaccttgtccacctccttggcaatggtggagatctctgcagccgagccctggccgttctcgaggtccgggaggtcatcctcgggccgagccagaccgtccccgccggcgcctgtgcgcacctcgatatagttgcctttggtggctaccttgggtgtgtccagcccggcctccaaccccttggcggtgggcagcttctccccgatcatggaggggatggaggccatgcgagatacgggcagcacgggaggctcgcccagcttctgggcggcgtgcacaatggagccggcatccacatcagccccgtagcgcatctccaggatggtcttcttgacgttgacagacttctgcttctcctcctgcatgcgccgcttgcgcaggcagtagtacacggctcccagcacgataaccatgccaaagaggcagcccaggatggtcatgatgtagtgggtggtggtggaggtgctgggcgccaagtctccggggacggggtcccgcgtggtgaaggtcaggcaggtgtggttgaagcggcggctgttgcgcagcgaggtcacgcagaaggtgtactcagtgtgcgcccgcagtttgtccagcgtcacgatctccttcttgttcttgagggtcatgacgtcggagaagtagctgttgttgtactgcacgaggatgtacatcttgctgtaggggtgtgggatgatgaccaccagggtggccgaggtgaacgtgacgtggtgcagcttgatggctggccctgccgacgcatccgtggtggacgaggccggcggctccaccgaaaggatctcgtcggggttgaagcccgagttctcgtctggctccctctgggcgtcggtggagtagggcgtggggtggctcacgggccgggcgggcagcgagccattccgacacttggcctggagtacggtgatggcgttgaggctgtggtagggccggggcaccagcagcgggtagccg

SEQ ID NO: 25387 - DNA, 581 bp, Homo sapiens
  MAP TO AP000477.2; EXPRESSED IN HELA, SIGNAL = 0.57; NT HIT: AJ271735.1, EVALUE 2.00e-71; EST_HUMAN HIT: BF868997.1, EVALUE 9.00e-81; SWISSPROT HIT: P08547, EVALUE 1.00e-38
ggtattttattttttatttgtagtaattgtaaatgcaattgctttcttgatttctttctcagattatttgctgttggcatatagaaatgcttctaatttttgtacattgattttgtatcctgcaactatactgaatttgtttatcagttctaactgttttttagtggaatcttttagttttcccaagtgtaagaatatatcatcagcaaacaaagataatttgactgctttcattccaatttggatgacctttatttctttctcttgtctgattgctctagctaggacttccagtactatgttgaataccagtggtaaaagtgggcacccttatattgttccagttcttagagacaaggctttaagtttttcctcattcaatatgatactagctgtgggtctgtcatatatggcttttcttgtgttgaggtatattccttctatactcagtttttgagggtttttattatgaaaggatgttgaatttatcaaacagtttttcagcatcaatcaaaattgtcataaggtttttgtccttattctgttgatacgatgtatcacattgattgatttgcatatgt

SEQ ID NO: 25388 - DNA, 1490 bp, Homo sapiens
  MAP TO AC007228.1; EXPRESSED IN HELA, SIGNAL = 0.54; NT HIT: gi16177749, EVALUE 0.00e+00; EST_HUMAN HIT: BE613849.1, EVALUE 0.00e+00; SWISSPROT HIT: P52742, EVALUE 0.00e+00
actgggagactagacctgaaatgaaagagttggatccaaagaatgacatttcggaagacaagctctccgttgttggggaggccacggggggacccacgaggaatggtgccaggggtcctggctcagaaggagtgtgggaaccaggcagctggccagagaggccgcggggagatgcaggtgcagagtgggagccattgggaattccccaggggaacaaactcttagggggctcagtacccgcatgtcatgaactgaaggcatttgccaaccaaggctgtgtcctggtcccaccacggctggacgaccccacagaaaagggggcctgtccacccgtaaggcgtggcaagaacttctccagcacttcagacctcagtaagccccccatgccctgcgaggagaagaaaacctacgactgcagcgagtgtggcaaggcctttagccgaagctcgtccctgataaagcaccaaaggatccacacgggagaaaagccgtttgagtgtgacacctgtgggaagcacttcatcgagcgctcgtccctcaccatccaccagcgggtgcacacgggcgagaagccctatgcctgcggggactgcggcaaggccttcagccagcgcatgaacctcactgtgcaccagcgcacgcacacgggcgagaagccgtatgtgtgcgacgtgtgtggcaaggccttccggaagacttcctctctcacccagcacgagcggatccacacgggggagaagccctacgcgtgcggggactgcggcaaggccttcagccagaacatgcacctcatcgtgcaccagcgcacgcacaccggggagaagccgtacgtgtgccccgagtgcgggcgagccttcagccagaacatgcacctgaccgagcaccagcgcacgcacaccggggagaagccgtacgcctgcaaggagtgcggcaaggccttcaacaagagctcctcgctcaccctgcaccagaggaaccacaccggcgagaagccctacgtgtgcggcgagtgcggcaaggccttcagccagagctcctacctcatccagcaccagcgcttccacatcggcgtgaagccgttcgagtgcagcgagtgcggcaaggccttcagcaagaactcctcgctcacgcagcaccagcgcatccacaccggcgagaagccctacgagtgctacatctgcaagaagcacttcacggggcgctcgtccctcatcgtgcaccagatcgtgcacaccggggagaagccctacgtgtgcggcgagtgcggcaaggccttcagccagagcgcctacctcatcgagcaccagcggatccacaccggcgagaagccgtacaggtgcggccagtgcgggaagtccttcatcaagaactcctccctcactgtgcaccagcggatccacacgggcgagaagccctaccgatgcggcgagtgcgggaagaccttcagccgcaacacgaacctgacgcgccacctgcggattcacacctga

SEQ ID NO: 25389 - DNA, 985 bp, Homo sapiens
  MAP TO AC006596.2; EXPRESSED IN HELA, SIGNAL = 0.17; NT HIT: gi11432870, EVALUE 0.00e+00; SWISSPROT HIT: Q9Y5V3, EVALUE 6.00e-24; EST_HUMAN HIT: AL528236.1, EVALUE 0.00e+00
aaggcccctctgctgcctcagagaccccaaagtcactgccatatgctctgcaggatccctttgcctgtgtagaggccctgcctgcagttccatgggtcccacagcccaatatgaatgcctcaaaggcatcgcaggcagtgcccaccttcctgatggctacagcagctgccccccaggcaactgccaccactcaagaggcctccaagacctccgtcgagccgccacgccgctccggcaaggccacccggaagaagaagcatctggaagcccaagaggacagccgtggccacacgctagcctttcatgactggcagggcccaaggccctgggagaatctaaatctgagtgactgggaggtccaaagccctatccaggtctcgggtgactgggagcacccaaacaccccccgtggcctgagtggttgggagggccctagcacctccaggatcctgagtggctgggaagggcccagcgcatcctgggccctgagtgcctgggagggcccgagcacctccagggccctgggtctctctgaaagcccagggagctctctgcccgtagttgtgtctgaggtcgcaagtgtctctccgggatccagtgccacccaggataattccaaggtggaggcacagcccttgtctcccttggatgagagggcaaatgcgttggtgcagttcctcttagtcaaggaccaagccaaggtgcctgtccagcgctcggagatggtgaaagtcatcctccgagagtataaagatgagtgcttagatatcatcaaccgtgccaacaataagctggagtgtgcctttggttatcaattgaaagaaattgataccaaaaaccacgcctatattatcatcaacaagctgggctaccatacagggaatttggtggcatcctatttagacaggcccaagtttggccttctgatggtggtcttgagcctcatctttatgaaaggcaactgtgtcagggaggatctgatctt

SEQ ID NO: 25390 - DNA, 912 bp, Homo sapiens
  MAP TO AC007981.24; EXPRESSED IN HELA, SIGNAL = 0.53; NT HIT: gi11427757, EVALUE 0.00e+00; SWISSPROT HIT: P23462, EVALUE 2.90e-01; EST_HUMAN HIT: BE531263.1, EVALUE 1.00e-74
aaagtgggccctgggcagcctgagggcagctctcacctctggccagcaaacttctagactgcaccttgagggccaaaaacgtccagatttcctgctcaatgctgtcgtcgctgtccacggagctactgtcaccatcagagcgggaaggcacgttgggggagtagaagagtgggcttgcggacagggacccatcgctgccctccatagggccggcaggatcgtcttgaaaatgtccaggactgcttctacacacatcagctcagcggaggtgtctgcctggcaagaggaccattccacaaacttgctcctggaagccgggctcgttggaggtggagctttggtttcctttgggatcttgggggaatggtcagcgtccagatcccctggaccagggtccgtggtcttggtgggcactggcttcttcttgctgggtgttttcctgtgggtctctggcaaggcactttttgtggcgctgcttgtgctgtgtgcgggaggggcaggtgctctttcctcttggagctggaccctctggggcgggtccccgtcggcctccttgcgtgttttctgcacctggtacagctggatggcctcctcaatgccgtcgtcgctgctggagtcggacgcctcgggcgcctgtacggcgctcgtgactcgctttcccctccttgcggtgctggcgttccttttaatcccacttttattctgtactgcttctgaagggcggtgggggttgctggctttgtgctgccctccttctcctgcgtggtcgtgaccttggacttgaggcttctgggctgcacgtttgtctttgctaaccgggggaggtctgcagaaggcgaactccttctggacgcccatcaggccctgccggtgcaccacctttgtagccggctcttggtgggatttcgagag

SEQ ID NO: 25391 - DNA, 575 bp, Homo sapiens
  MAP TO AL035427.17; EXPRESSED IN HELA, SIGNAL = 0.48; NT HIT: gi14769619, EVALUE 0.00e+00; SWISSPROT HIT: P43025, EVALUE 2.50e+00; EST_HUMAN HIT: BG989595.1, EVALUE 3.00e-99
gagcagagagggaggctactggtgttgttaggcctgtagccaagaccagggccaaagcaaaagccaagacagggtctaagacagatgcagtagcagagatgaaggcagtgtctaagaacaaggttgttgctgagacgaaggaaggagctctgtcagagcctaagactctgggcaaagccatgggagatttcactcccaaggctgggaatgagtccaccagctccacatgtaaaaatgaggctggtactgatgcctggttctgggctggggaagaggccactatcaattcctggttctggaatggagaagaggctggtaatagtttcagcactaagaatgataaacctgaaattggtgcccaggtctgtgctgaggagttggaacctgcggctggggccgattgcaaacctaggtcaggggctgaggaggaggaggaagagaatgttattgggaactggttttgggaaggagatgatactagttttgaccctaatcctaaacctgtgagcaggatagttaagcctcagcctgtgtatgaaattaatgaaaaaaataggcccaaggactggtctgag

SEQ ID NO: 25392 - DNA, 608 bp, Homo sapiens
  MAP TO AC013685.3; EXPRESSED IN HELA, SIGNAL = 0.64; SWISSPROT HIT: P54727, EVALUE 9.00e-32; EST_HUMAN HIT: AL549735.1, EVALUE 0.00e+00; NT HIT: gi13639852, EVALUE 0.00e+00
atgcaaaatggctcagtcccattggaaacattttggcagtttcttgttaaaataactataggatttattatacaactcaccatttgcatatctaagtattattccaagagaaataaaaagttatctaatgaggccgcagaccctgcccagcagccagcacctggcacaggccctgcagccgagctgtacagtggcaccatgcaggtcaccctgaagaccctccagccgcagaccttgacctgcaagatagacattgaccccgaggagacagtgaaagcactgaaagagaagacggaatctgaaaaggggaaagttgcctctctggtagcaggtcaaacattaatttatgcaggcaaaatcctcaatgatgatactgctctcaaagaatataaaattgatgagaaaaactttgtggtggttatggtgaccgaacccaaagcagtgtccacaccagcactagctacaactcagcagtcagctcctgccagcactacagcagttacttcctccacaacaacaactgtggctcaggctccaacccctgtccctgctttggctccccctttcacacctgcattcatcactccagtatcagtgacagtgtcctc

SEQ ID NO: 25393 - DNA, 613 bp, Homo sapiens
  MAP TO AC003956.1; EXPRESSED IN HELA, SIGNAL = 0.43; NT HIT: gi13651742, EVALUE 7.00e-10; SWISSPROT HIT: O60403, EVALUE 1.00e-43; EST_HUMAN HIT: BG197640.1, EVALUE 1.00e-09
ttatttaaaaaccccacggctccacgccagggtcctcctcagagccactctcacctccttgttccacagagtgcacaccacagggttcagcagtggcatcaccaccgtgtagaacacagccaccaagcggtcctggtcggggttggccccggactccggacgcaagtagatgatggaggcgcagtcaaaatgtactacgaccacggtgacgtgggccacacaggtggagaaggccttgcgccggccggctgccaaggaaatcctcacgatggcagccacgatgaaggcataggagaagaggatcgggacgaaggacatcagcaccaccaggacgctcaggaaaaagatgcccagcgccttgctggcactcttggcgcagctgagcttcagcaccggggcgatgtcacagaagaagtgctccacgtggtctccgccgcaaaagggcgatgagaagatcatgctggtctcgatcaaggccaccgagaacccagagcagaaaaccagggctcccaggcagaggcaaacggtgggtctcatgaccatagagtagcgcagggggtggcagatggccacatagcggtcataacccatcagggtaaggaggaagcagtgg

SEQ ID NO: 25394 - DNA, 586 bp, Homo sapiens
  MAP TO U82672.1; EXPRESSED IN HELA, SIGNAL = 0.29; NT HIT: AF157613.2, EVALUE 8.70e+00; EST_HUMAN HIT: R53167.1, EVALUE 5.30e-02; SWISSPROT HIT: Q9CCQ3, EVALUE 1.10e+00
cttttcccagctcatcatggactcggagtacgtcctatgctcttggaaaggccgactatggccagcaaaggttttgtgcacacgtgggacttcaccaaaaacgaagcctgaaaaggcgatttctctagaagttcaaatcctcgcagtagatgaaaaaatcaaggtgaaaagcacagacgtgaagaccccaactaagtttgagatggaagacattgccgcctctgcagcagcacagacgaagctcggtgccccactcagagagaagatggggtacagaggaacccttcgggtggccctggagattctgaaagagagaacaaatctgggtggaggaaggaaaccacatgaactagagagcaccacaccctctcagctttctcaaaaggtgcccgaaaagccagccagttctgtccctcgtgaagatgactggagatgcaaaggcgacctaaggaggagtcttgggaagagggaaaacccaagctcaccgacggtcccttcagagagtaagcgtgccctgcgggatgacaggtcgcaggagcccacagccattgcccctactccaggcgccctgcccggggacaggtca

SEQ ID NO: 25395 - DNA, 758 bp, Homo sapiens
  MAP TO AL132640.2; EXPRESSED IN HELA, SIGNAL = 0.53; NT HIT: gi14784186, EVALUE 0.00e+00; EST_HUMAN HIT: AI792090.1, EVALUE 0.00e+00; SWISSPROT HIT: P43027, EVALUE 2.00e-03
ccaggatgaaaactggtgcagcgggggtgtaggtggcttgttacccagctccacttcctccagctcagctccaagggcctttgggctctctctttcctcattcttccctgctgggggtggctcctccatctccatcttctctggttcctcccgggacctagctcgggactccagctcaggaaggccagaggggtggagggctgagaaggcctcagtctcaatgttcaccacacggccaaagtgcccatggcccacctggggctggctgtggtgccttttggccaactggatgctgtcccgcggggtgccaggagcccgcacctttggtagggtcagactgctgccaggaccaccttccctggcagaggtctttgtcccagggagcatccctctctgagcagtaaccagaccctcaccccaggaagctgaactacatctgaaggtaagaagcttcatgcatggctggtggggagggctctctcttcccagatgaggttgaaggggcttggcctctactgtttccccagaatggaccgtgctggaactagaatcctccaaggggcttgctgcttcagaaacagagtccttgctctgcagggcacctggggaaggtgcaagcacagctgccttcagaccctgggcctgggagccactgtcctggcccataggctggattcccggctctgaagggacagaatcctgctctgcagctccgtaggggggcaccagcagcttccgtgaaggagctatctgaatag

SEQ ID NO: 25396 - DNA, 1096 bp, Homo sapiens
  MAP TO AL096870.3; EXPRESSED IN HELA, SIGNAL = 0.41; NT HIT: gi14750679, EVALUE 0.00e+00; EST_HUMAN HIT: AI750778.1, EVALUE 0.00e+00; SWISSPROT HIT: Q14934, EVALUE 1.00e-119
ctgaagatagggctgtgtcccccaatccgggccttggaccaagcgagtggggagggcactgccaggtagtccatgccagccacctccttccgggaacctcctggaggagccacagactcctctgctcccaagggcagcttcccattgcatgaggcaggctcctcagaccgaggcagagccactgcctgctcgctggaagtccgccgtgtcttctgagggatgctctcagctggtggggcccccacatagtcaaagggaccaggggagcccgggtcccgggccagaggcaatgggggtggtggaggtggctcagacccctcttcccccaggctgccacggcgggacagagctggggaggctgaagatggggttcccgagctggaatagcgccgcttgccacatggagaggcaggccgcggggaggctggggtgggcccaggagcactgaggagtagccagctatcctctggccctcggcctccggggcttggaccatacaggctccagggatcttcgggggtccatggccgaggggaggcccggggcgagggcagcggggagcccaggccaaagcgggaggccgcctcatttagctcagactccacctcgtcgcaggctgcatacagggctgcctcgtcagaggcatcggagaagaagctccacgaggacaggctgctgctgccagggcttgggctgaagaaggcccccccaccctggccccctgcttctctgtagcccccaaagccttctggtggggggtaatctctaggagagccgtccccccaggcatcagggttgtcctccagcgctgctggcggctccggcgtgggagagatggaggtgatgcggatgctgggacactcgagaacacggccacccccagcacccccagcaccccctcctggtcctcccagcctcaccgacctggcgggctggctctcccaggtgccaggtgagggggctggtcgcggcggtggcgaatgcatgccaggccgagggggtggaggtcggggaataccgataggtgcagcgccatagggagggggctctcccaaggccagacggcagcatggcggggcatcctctgagtccagtt

SEQ ID NO: 25397 - DNA, 640 bp, Homo sapiens
  MAP TO AC005768.16; EXPRESSED IN HELA, SIGNAL = 0.56; NT HIT: M58833.1, EVALUE 1.00e-02; EST_HUMAN HIT: W01695.1, EVALUE 9.00e-01; SWISSPROT HIT: Q85437, EVALUE 2.20e+00
acaagaagaacctaaggacaattcaagcagtgctactgatccatcttttaaaagaaaaccaggtagaccaaaaaaaataggtccccaagttgtgaaacagattaagcgaccaattggaagaccaccaaagcctaaaattgatcaaacaaacatcactgtttgccagaatgagccctttagtgctggaaggaaaagcccagaatgtctcatatcagaagtaaaagaaggtatttataaaaagagtattacagtaactgttatttacggaaggtcaagaagaactaaaaggcatgtttctgaaggaagggtaaacataagcaaccttatgtctttaaacaataatgctggtgattttccaactgaatataatagtcccagaaatattagtgaagacaaaattgacttgggtgaaagaataagtgctgtagcaagcttgactactgaaagtgagatcttggggtctggctttgaatatgtgagacccatcaagaacaaatctgtgatacctcagccttccaagaacattattcgaccaaatcagaagcctttggcaataagtaggaagcctggtagaccggcaaaagtgaaaatctctggcatatctgtgactattaatagaacttcacctcaggaaagagaa

SEQ ID NO: 25398 - DNA, 708 bp, Homo sapiens
  MAP TO AP001716.1; EXPRESSED IN HELA, SIGNAL = 0.6; NT HIT: gi15320040, EVALUE 0.00e+00; EST_HUMAN HIT: BI253289.1, EVALUE 0.00e+00; SWISSPROT HIT: P48551, EVALUE 1.00e-125
aattttcataactttttagcctggccatttcctaacctgccaccgttggaagccatggatatggtggaggtcatttacatcaacagaaagaagaaagtgtgggattataattatgatgatgaaagtgatagcgatactgaggcagcgcccaggacaagtggcggtggctataccatgcatggactgactgtcaggcctctgggtcaggcctctgccacctctacagaatcccagttgatagacccggagtccgaggaggagcctgacctgcctgaggttgatgtggagctccccacgatgccaaaggacagccctcagcagttggaactcttgagtgggccctgtgagaggagaaagagtccactccaggacccttttcccgaagaggactacagctccacggaggggtctgggggcagaattaccttcaatgtggacttaaactctgtgtttttgagagttcttgatgacgaggacagtgacgacttagaagcccctctgatgctatcgtctcatctggaagagatggttgacccagaggatcctgataatgtgcaatcaaaccatttgctggccagcggggaagggacacagccaacctttcccagcccctcttcagagggcctgtggtccgaagatgctccatctgatcaaagtgacacttctgagtcagatgttgaccttggggatggttatataatgagatga

SEQ ID NO: 25399 - DNA, 594 bp, Homo sapiens
  MAP TO AC011895.2; EXPRESSED IN HELA, SIGNAL =   1; SWISSPROT HIT: P22303, EVALUE 1.00e-114; NT HIT: gi14753878, EVALUE 0.00e+00; EST_HUMAN HIT: BE535653.1, EVALUE 0.00e+00
ctgcaggccgtggaagtctcccgcgttgatgagggcctctggggtgtcactgaggaagtctccatctaccacaggcacgaaggagaaccggaagacgctttcttgaggcagcacgtgccattcgtggttcaccaggacctgcgctggtcgtgtccgaaggcaggctaccagctctgtgtcattcccaccagtgccgcctggaggacagcccacaaggtgggccagctgcgtggccctgcgacgggcctctcccatgcccaccgtggcccagggtccattgggggcaccgctctgcagcacggccctgtggaacaggccccggctgggcggggacagcaggtgcatgcccaccgaggcggctcccgcgctctccccaaacagcgtcactgatgtcgggtcacccccgaaggctgccacgttctcctgcacccactgcagggccagcctctgatccaggagacccacattgcccggggcctctcggctccccggcagggccaggaagccaaaggctcccacccggtagttcatggacaccagcacagtcctctcggcctgtaccaagaagcggccatcgtacacgtccaaggagga

SEQ ID NO: 25400 - DNA, 547 bp, Homo sapiens
  MAP TO AL135999.2; EXPRESSED IN HELA, SIGNAL = 0.37; SWISSPROT HIT: P30871, EVALUE 6.90e-02; NT HIT: gi13236576, EVALUE 0.00e+00; EST_HUMAN HIT: BI522644.1, EVALUE 0.00e+00
atggcccagggcttgattgaggtggagcgaaagttccttccagggcctggcacagaggagcggctgcaggagttggggggcaccctggagtaccgggtcaccttccgagacacctactatgacacccctgagctgagcctcatgcaggctgaccactggctgcgacgacgagaggatagtggatgggagctcaaatgtcctggagcagcaggtgtcttaggaccccacacggagtataaggaactcacagcggaacctacaattgtggcccaactctgtaaggtgctgcgggctgacggcctgggggctggagatgtggctgctgtgctgggcccactggggctgcaggaagtagctagttttgtgactaagcggagtgcctggaagctggtgctcttgggagctgatgaagaggagccacagctcagggtggacttggatacagccgactttggctacgctgtgggtgaggtagaggccctggtgcatgaggaggctgaagtaccaactgccctagagaagatccacaggctcagcagcatgcttg

SEQ ID NO: 25401 - DNA, 686 bp, Homo sapiens
  MAP TO AL138846.2; EXPRESSED IN HELA, SIGNAL = 0.19; EST_HUMAN HIT: BF966478.1, EVALUE 0.00e+00; SWISSPROT HIT: Q61772, EVALUE 9.00e-91; NT HIT: gi6679662, EVALUE 2.00e-04
tgggaggagatcagcggcgtggatgaacacgaccgtcccatccgcacgtaccaagtgtgcaatgtgctggagcccaaccaggacaactggctgcagactggctggataagccgtggccgcgggcagcgcatcttcgtggaactgcagttcacactccgtgactgcagcagcatccctggcgccgcgggtacctgcaaggagaccttcaacgtctactacctggaaactgaggccgacctgggccgtgggcgtccccgcctaggcggcagccggccccgcaaaatcgacacgatcgcggcggacgagagcttcacgcagggcgacctgggtgagcgcaagatgaagctgaacacagaggtgcgcgagatcggaccgctcagccggcggggtttccacctggcctttcaggacgtgggcgcatgcgtggcgcttgtctcggtgcgcgtctactacaagcagtgccgcgccaccgtgcggggcctggccacgttcccagccaccgcagccgagagcgccttctccacactggtggaagtggccggaacgtgcgtggcgcactcggaaggggagcctggcagccccccacgcatgcactgcggcgccgacggcgagtggctggtgcctgtgggccgctgcagctgcagcgcgggattccaggagcgtggtgacttctgcgaaggtatcca

SEQ ID NO: 25402 - DNA, 688 bp, Homo sapiens
  MAP TO AL122010.2; EXPRESSED IN HELA, SIGNAL = 0.48; SWISSPROT HIT: Q9NTQ9, EVALUE 1.00e-130; NT HIT: X76168.1, EVALUE 0.00e+00; EST_HUMAN HIT: BG675316.1, EVALUE 0.00e+00
ggcattcccggcaccgaggccgccggtgcctggggccgaagatctccatgcacctcttgcccaccaggtagaagacttcactgaggttgagcaggatgcagatggcagctgtggtcaccatgaagtaggtgaagaccttcttctccgtgggccgggagatgtaacagtccacagtgtgggggcaaggctccacggagcaggccaccacgcggggcatgtcataatccttgtagaggcggtggaagatatagaggaagccagcatccacggcggccttgaagatgaggctcagcaagtacgtccaccacagtccgccccgcttcttgctcaggttgtcgtacagggacggggcattgggcccgtgtttcaggtggtgcttgcactcgcgttcctcgcggtaggccacgtgcatgaccacgagcagtgaggggcacgtgaccaggatgagctgtagggcccagaggcgcacgtgggacacggggaagaactcgtcatagcagacgttggggcagccgggctgcttggtgttgcagacaaagtccttctgctcatcgtcccacacctcctccgctgccaccacgtacaccagcacacgaaagatgaacaccacagacagccagatgcggctcagcactgtggagtacttgttcacgccactcagcaggccctgcagaaatgcccagttcat

SEQ ID NO: 25403 - DNA, 994 bp, Homo sapiens
  MAP TO AC002511.1; EXPRESSED IN HELA, SIGNAL = 0.28; SWISSPROT HIT: O15552, EVALUE 0.00e+00; NT HIT: AF024690.1, EVALUE 0.00e+00; EST_HUMAN HIT: BF106231.1, EVALUE 1.00e-28
gatgctgccggactggaagagctccttgatcctcatggcttacatcatcatcttcctcactggcctccctgccaacctcctggccctgcgggcctttgtggggcggatccgccagccccagcctgcacctgtgcacatcctcctgctgagcctgacgctggccgacctcctcctgctgctgctgctgcccttcaagatcatcgaggctgcgtcgaacttccgctggtacctgcccaaggtcgtctgcgccctcacgagttttggcttctacagcagcatctactgcagcacgtggctcctggcgggcatcagcatcgagcgctacctgggagtggctttccccgtgcagtacaagctctcccgccggcctctgtatggagtgattgcagctctggtggcctgggttatgtcctttggtcactgcaccatcgtgatcatcgttcaatacttgaacacgactgagcaggtcagaagtggcaatgaaattacctgctacgagaacttcaccgataaccagttggacgtggtgctgcccgtgcggctggagctgtgcctggtgctcttcttcatccccatggcagtcaccatcttctgctactggcgttttgtgtggatcatgctctcccagccccttgtgggggcccagaggcggcgccgagccgtggggctggctgtggtgacgctgctcaatttcctggtgtgcttcggaccttacaacgtgtcccacctggtggggtatcaccagagaaaaagcccctggtggcggtcaatagccgtggtgttcagttcactcaacgccagtctggaccccctgctcttctatttctcttcttcagtggtgcgcagggcatttgggagagggctgcaggtgctgcggaatcagggctcctccctgttgggacgcagaggcaaagacacagcagaggggacaaatgaggacaggggtgtgggtcaaggagaagggatgccaagttcggacttcactacagagtag

SEQ ID NO: 25404 - DNA, 1016 bp, Homo sapiens
  MAP TO AC008547.2; EXPRESSED IN HELA, SIGNAL = 0.4; SWISSPROT HIT: P97926, EVALUE 1.00e-09; NT HIT: gi15805042, EVALUE 3.90e+00; EST_HUMAN HIT: BI752897.1, EVALUE 7.00e-95
agagcgctgttggccatcgccaccacgcgcagcgccgccgacaggccctctccctcccagtctcccgcgggcccggacgaccacgcggccgccagccgggcggcaaagtagggcagctcgcagcccacgaacagcagcgccagcagcaggctcatcttcaggctctgcaccttggcgcggggcagcgcgctgggcgcaggggctcgacctgggctcgccgaccagggcgctgcagccgcgggggcctgcggccggtgccgccaccagacggagagtaggtggccgcaagcgacgcccaggaccgtaacaggcgcgacgaagcccgcgacggcctcgtagaacgcgtagacctgcaggtgccagcgcggcaggggcgcgaagatcccgtggcagcgacgctcccccggccaggcgcgggcggccgggggcgcgcctggctgcagggacgttggcggcggcggcggcggcagcggcgagggggagtccccgcgcaccacgaaggccgggggcagcgccagcagcagtgccagcagccagcccagggcggcgagggcacgcgcgggcagcggccggccgtgcggaagacgcaccgcgcgccggcgctcgagggcgatgagcaccacgaggtgggccgaggcgccccgcccggatgcctgcagcagctgcaggaagcggcacgccaggtcccccgtggccgcgcggggctcgcccagcagttcccaggccagctgtgacagcgccgtgcccccgcacgcgtacaggtccgccagggccagctgcaccagcaggaagtccatcttgcgacgcttggggcccgcccagggcccgccgccgccgcacaggcggcacagcactgtggtgttgcctgccaccgccaccaccaggatgacccccaggaacaccaggcggacgcggcggctgggcggcccagaggcaggggctccttgccccaaggtcaggttgagaccccagcccagcaagatgggcacggaaatgttgggcgccggcggcagaat

SEQ ID NO: 25405 - DNA, 1101 bp, Homo sapiens
  MAP TO AC010320.7; EXPRESSED IN HELA, SIGNAL = 0.62; SWISSPROT HIT: P51522, EVALUE 0.00e+00; NT HIT: gi8922823, EVALUE 1.00e-55; EST_HUMAN HIT: BG027418.1, EVALUE 0.00e+00
ctatcccatatgaattgtccaatgttgtgctaggtatgaaatgcgactaaaggccttgccacactcattacatttgtaaggtttctctccagtatgaattttccgatgtcgtgcaaggtgtgcaattcgattgaagaccttgccacattcattacatttgtaaggtctttctccagtatggattctctgatgattggttagtgataacttgtgtctgaatgccttgccacattcactacatttgtaaggcttctctccagtgtggattacaagatgggctgaaaggcctgaatactcactaaatgctttaccacattcattacatttgtaaggcttctctccagtatgaattcttcgatgtcgtgcaagatttgaaagttgattaaatacttttccacattcattacatttgtaaggtttctctcctgtatgaattctccaatgttgtgctaggtgcgaattttgaataaagacctttccacattcattacatttgtaaggtttctctccagtatgaattttctgatgtcgtacaaggagcgcaatcctatagaaggccttgccacattcatcacatttgtaaggcttctctccagtataaattctccaatgatttgctagagatgacttatgactgaagcctttaccacattcattacatttgtaaggtttctcttcagcatgaattctttgatgtcgtgcaaggtaagaattattactgaagactttaccacattcattacattcatacggcttctctctggtatgaattctttgatgtcgtgcaaagtttgaattgtaactaaaaaccttgccacagacattacatttgtaaggtttctctccagtatgaattctacaatgttctgcaaggtgtgaattgcgactaaagaccttgccgcatgaattacatttgtaaggtttctctacagtatggattacttgatgtttagtaaggctggaagatactctaaagactttgctatgctcattacattcataaggtttttctctaaggtgtactttctgttcttgtgggagaaatgaagaatcatcaaaatcattcctattaaaaatgggggttttgacactggaagacat

SEQ ID NO: 25406 - DNA, 516 bp, Homo sapiens
  MAP TO AC005701.1; EXPRESSED IN HELA, SIGNAL = 0.38; SWISSPROT HIT: Q9NYC9, EVALUE 2.00e-86; NT HIT: AJ404468.1, EVALUE 0.00e+00; EST_HUMAN HIT: BI818870.1, EVALUE 1.80e-01
gtggtgcagctggagctgcagcaggtgcgctagggtggtgtcctggtccatagtgaagctcacaccggtggcctgcatcagctgcctccagtgccgctcccggatggctggattctgcagctcagctactgccctcagggagctcagcgtgttccacacagtgctttccaggcctgtgaatgcatcccaggccctgacctccttgtccaggtttcggatatgccgggcaaactgtttgcactccaactccatggcttccacgttgatattcctccagggtgtggtctcccaggcatggatgctggaggtcaccattccaatggtgtcccagagctccttcagctggcagacctccttcctgcactgcctcagctgcttatagtcagggacattgacttcaaataagctggcagactcagaaatggaggccatagtggattccatctgctggatctcgatgtgcctggcatccagcatttgatgagggtggatgctatcaaacctacaaaacacagt

SEQ ID NO: 25407 - DNA, 923 bp, Homo sapiens
  MAP TO AL133417.9; EXPRESSED IN HELA, SIGNAL = 0.4; SWISSPROT HIT: P11161, EVALUE 0.00e+00; NT HIT: gi14740094, EVALUE 0.00e+00; EST_HUMAN HIT: BG680727.1, EVALUE 0.00e+00
cgatgcagagggggcactgcttttccgctctttctgtctcaggtggatcttggtgtggcgcttcctctcatcactccgggcaaactttcggccacagtagtcacaggcgaagggcttctcaccggtgtgggtgcggatatgggtggtgaggtggtcactgcggctgaagttgcgcatgcagatccgacactggaagggcttatgcccagtgtggattcggatgtgccgtgtcagctcgtcagagcgggagaaccgccggtcgcagccttctgctgggcacgggtagggcctctcgtgcaccggcgtcttgctgggtctgttggggtacttgcgaggcctcagaatgggccgcagtggcaggtggtgtgggttataggcggcggcggcggcggctgctgctgctgctgagctgctaccaggcagccggggtccctcgctgcctccactggcccctggtccggtcaccccagcactggggccccccagggtaaagttacggattgtagagagtggagtgagtggagggggcacccgcagggtgtccagtgggcagggaaagggcttacggtctgggccagctgtaccatgtaggtctctctggcactgagatggaaagaatccaggatagtctgggatcattgggaagagacctgggtccgtggctggcttgggggacggataggaaggaggtggtgggtaggccagagaggaagaggtggaggtggtggctgctgacaggaacgcagaagggtcctggtagaggtctcctgcacagccagaataaggaggaggaggcggtggcggagagtacaggtggtccaggtcaggctgggtctgggacatggtgcacacacccaggggtcctgtggccagtgggttgggggaggcagaggtgacgctggatgaggctgtggttgaagctg

SEQ ID NO: 25408 - DNA, 618 bp, Homo sapiens
  MAP TO AC005006.2; EXPRESSED IN HELA, SIGNAL = 0.37; NT HIT: AF182714.1, EVALUE 3.00e-15; SWISSPROT HIT: O75690, EVALUE 2.00e-03; EST_HUMAN HIT: BF035708.1, EVALUE 0.00e+00
tgtgccgctgcccgccggagcaccatgatggcaggatgacctcagccgaagtaggagcagcagctggtggtgctcaggcggctgggccccccgagtggccccctggcagccctcaggccctccggcagcctggccgggcccgagtggccatggcagcactggtgtggctgctggcgggagccagcatgtcaagcctcaacaagtggatcttcacagtgcacggctttgggcggcccctgctgctgtcggccctgcacatgctggtggcagccctggcatgccaccggggggcacggcgccccatgccaggcggcactcgctgccgagtcctactgctcagtctcacctttggcacgtccatggcctgcggcaacgtgggcctaagggctgtgcccctggacctggcacaactggttactaccaccacacctctgttcaccctggccctgtcggcgctgctgctgggccgccgccaccacccacttcagttggccgccatgggtccgctctgcctgggggccgcctgcagcctggctggagagttccggacaccccctaccggctgtggcttcctgctcgcagccacctgcctccgcggactcaagtcggttcagcaaa

SEQ ID NO: 25409 - DNA, 757 bp, Homo sapiens
  MAP TO AC005531.1; EXPRESSED IN HELA, SIGNAL = 0.62; SWISSPROT HIT: P23225, EVALUE 1.80e-01; NT HIT: gi15805042, EVALUE 2.90e+00
atggaggagtcttgggaggctgcgcccggaggccaagccggggcagagctcccaatggagcccgtgggaagcctggtccccacgctggagcagccgcaggtgcccgcgaaggtgcgacaacctgaaggtcccgaaagcagcccaagtccggccggggccgtggagaaggcggcgggcgcaggcctggagccctcgagcaagaaaaagccgccttcgcctcgccccgggtccccgcgcgtgccgccgctcagcctgggctacggggtctgccccgagccgccgtcaccgggccctgccttggtcaagctgccccggaatggcgaggcgcccggggctgagcctgcgcccagcgcctgggcgcccatggagctgcaggtagatgtgcgcgtgaagcccgtgggcgcggccggtggcagcagcacgccatcgcccaggccctccacgcgcttcctcaaggtgccggtgcccgagtcccctgccttctcccgccacgcggacccggcgcaccagctcctgctgcgcgcaccatcccagggcggcacgtggggccgccgctcgccgctggctgcagcccggacggagagcggctgcgacgcagagggccgggccagccccgcggaaggaagcgccggctccccgggctcccccacgtgctgccgctgcaaggagctggggctggagaaggaggatgcggcgctgttgccccgcgcggggttggacggcgacgagaagctgccccgggccgtaacgcttacgg

SEQ ID NO: 25410 - DNA, 845 bp, Homo sapiens
  MAP TO AC022845.2; EXPRESSED IN HELA, SIGNAL = 0.64; SWISSPROT HIT: Q02952, EVALUE 2.10e-01; NT HIT: AB057755.1, EVALUE 2.00e-14; EST_HUMAN HIT: AA610043.1, EVALUE 0.00e+00
tggaaggatttctccagctctctgcattagaactggtgtttccatctgaaaaatcagactcagagaaaccttctttttcttcctctttctcttgtttcatatatggcgatgctagagtcaattcaactttacttgtttttgtagagttttctttgttcatcaggagaggaatgggttgcctatttctggacacactaattgcttcagaagcctctccaaagccaggttcctgaagagtcccttgtccccctgcaaccccactttcactgtccctgtcctctgggggggttacagttttaatggtccctatttcatgagccacataaagttgtggggttctagggatctcaactccacttctggaaccacaaaaatctaccaataaatcagtcacaagtgcgtctcctcccaacattttatcacattggttgacttgagattccaaaccattacttttatccttcatttcagaggtctgtgaggctgccctgtaaaaatggggcactgtccccaagaacctggtctgctctgactgtgaggactccttctcgtgagtttcttctctcactgacacctggggctgataaggaggagcttcagttatttctttaagaagtttctcaaaaccagcatcaaaagcactctcagttattaatggagcctcggccttttctactgtttcttttaattcctcaggatggcattcagaagtggctcgcctgggctcctctgtactacctattaactttgatggagaaagattccctgtatcactttcatattttgaggggaaggtttcagtttcttccttcagtagtttttctaagccagcactgaattcgagg

SEQ ID NO: 25411 - DNA, 527 bp, Homo sapiens
  MAP TO AC012678.1; EXPRESSED IN HELA, SIGNAL = 0.51; SWISSPROT HIT: Q61768, EVALUE 1.10e-01; NT HIT: AF120995.1, EVALUE 1.30e-01; EST_HUMAN HIT: BF744133.1, EVALUE 2.00e-59
aagcccagaagaagattctgagcaaaatagccagcaaaactgtggccaacatgttgattgatgacaccagcagcgagatctttgatgagctctacaaagtcaccaaagagcacacacacaacaagaaggaagcccacaagatcatgaaagacttaatcaaggtggcgatcaaaatcgggatcctctaccggaacaaccagtttagccaagaggagctggttattgtggagaagttccggaagaagctgaaccagaccgccatgaccattgtcagcttctatgaggtggaatacaccttcgataggaacgtgctctccaatctcctgcatgagtgcaaggacctggtgcatgaactggtgcagcggcacctgacgcccaggacccacgggcgcatcaaccacgtctttaaccactttgccgatgtggagttcctctccaccctctatagtctggatggagactgtaggcccaacctcaagaggatttgtgaaggaatcaataagttgctagatgagaaagtcctttaa

SEQ ID NO: 25412 - DNA, 1284 bp, Homo sapiens
  MAP TO AC006059.3; EXPRESSED IN HELA, SIGNAL = 0.6; SWISSPROT HIT: Q60821, EVALUE 1.00e-13; NT HIT: gi14725814, EVALUE 2.00e-18; EST_HUMAN HIT: BI825242.1, EVALUE 0.00e+00
ccgtgtggccatgtgactgtggggaggggggtctgcccggctgcttcggcttccccgtggcccctgcttgcccccagcctccccctcctccccctcctcctcctcagagctctcttgatcctgctcactaggcccttcctcctcttcctcctcctcttcctcttcctgctcactgtgcccgtcctcctcctcttcttcctcttctccctgactgccaccctcttcctcctcctcctcctcccgtccactgccaccaccttcctcttcctcttcttcctcctcctcctcctcgtcgtcctcctcctcctcgtccgagtgtctctgcagcccgtcctcccggcccagaaccacggtggctgggcttggcccggcacctggcttcccctctggccccgtggacacgtgcagtgtctggttgttgaggttcacctccacgatgatctgggattgctccctgcggctgtaggtgccagaacccccaagctcttcctccaactcttctccaccctccagcttgcacaagctggctgggggcccaccggcctcctcgacaccaccctccttctcctccttaaagaagggctgggctggcccaatggtggcaggcactgtgccaccagcagtccctgccccgtcctcaacacgcaccgagtaagggtcagggccctcgcgggcatagatcttgggcaggcctggggtgtcggcctcctgcttgatgtcacagtagtagggcggcgcagctggagtgcagctggcagccggctgggccagggccacagtgcccggacctggtgggcctagagagcgggcgtccagcagctcttggcaggacgcagcgatgtcagccatctgcagcaatgaggcggcgctgagcacctcgtggacgttggccgcgttgaccagcagcttggacgtatagatgaagttgaggatctgctgcaggccaccaggtgccagtgcctccagggacagctccacacgctgcagctgcttgttctgggtgaagagtgagtggaagaactggctgtaggcggctagcacacccttgtgtgccggaaagacgctgcgctggggcaccagcaccaagtccacgtcgcagaggtcaggctggaagaggcgctgctcgttcaggcggcccatcaagcaggcaaagtgcagcgccacgtcctccaccagcgagaactcagccgccggggagtcagttgtcttctcaaccagcaactgcggggacagagggcacaggagtgggtcaaggccagtgggcccctgcccgcccttccccca

SEQ ID NO: 25413 - DNA, 819 bp, Homo sapiens
  MAP TO AC006460.3; EXPRESSED IN HELA, SIGNAL = 1.6; SWISSPROT HIT: Q13506, EVALUE 0.00e+00; NT HIT: gi13637858, EVALUE 0.00e+00; EST_HUMAN HIT: AU131373.1, EVALUE 0.00e+00
ctcatgaagtgtgagatgtttcccatccttcctctttgagtcaaatctgccatatattgcactgtatttccgaatttcctcctctttgtgtggatcatcatcgttcatctcaaagatgtgaccaatcattttggccaacttcttgttggtttttagcagctctttcacttcattcaagtcactttttggcagtgtgggggccatccgctccacacactcagccacagagagcgcagcagcagcatccagcgcctcactgctctcctttggggacgcgggggagcccaggtctgctggggagaggctgtgctcgctctcagtggcatggtggccttgccagagtctggactcaccaacactctgcagtgctaggctcccaaccacatctgacttcccctgtcccaagctctgcacacaggtggtggcagcacatttggggatttttaaatgaggttcccgggcattgctactcctttcataactactgcaggatattcccagccatgttggtgatccctctggtaatttatagatgggtatgctactgacaggaagggaagtcagtggctgattgaaaagcccagggtttgtgacccagtctctcaaagccttctgcagccttctaacatgaaggggcttgctagccatgcccacgagtgccatgatttccaaaaactcctcttctcctgcttcacagagttgctggacatcatcaccaccttgttggataaaggcatcaaaataagaaagtagattggctttttgtaatattctatacagctgcaactcccccagggtcctgggtaaggccgcagccat

SEQ ID NO: 25414 - DNA, 630 bp, Homo sapiens
  MAP TO AC005609.1; EXPRESSED IN HELA, SIGNAL = 0.74; SWISSPROT HIT: Q9Y5I1, EVALUE 1.00e-104; NT HIT: gi14861872, EVALUE 0.00e+00; EST_HUMAN HIT: BI465306.1, EVALUE 3.00e-87
atttgaccctggctcctgtctttccccttcctcctctttattcagacctagaggaagactggggctgaaggccatgaggtccgtcttaggtgggccctcctcagagcacaccctctgccgcctctgctgcgagtatgaccagctccccaccgcgcgggagcacaccagcgtgggcttccccggcgcgcacgcgccctcagtgggcgttgccgaccaccacagcgccgtatacagcagcagcgtgagtaccaggaggctggacaccacgcagatggcgatgatcaggtacacgttgacatccaccagcgcagcctctgggctcgcggcgcccgccaaagtccgggaagaggcctttggcgcctgtccgctctccaccaacgacaccagcacggtggccgtggccgtcagcgccggctcaccgtgatccttcaccagtactagaagtcggtggcgcggcgagtctgcctcgtccagggcacgcgttgtgcttatctcgcccgtgtacagccccacgcggaacgggatgcgcgagccgcccgccgccggctgcaattcatatgaaagccacgcgttgtagcctgagtccgcatccactgcgcgcaccttcgccaccacgtggcccgcacccac

SEQ ID NO: 25415 - DNA, 671 bp, Homo sapiens
  MAP TO AC004805.1; EXPRESSED IN HELA, SIGNAL = 0.44; EST_HUMAN HIT: BE872155.1, EVALUE 0.00e+00; SWISSPROT HIT: Q9Y2T1, EVALUE 1.00e-127; NT HIT: gi4757823, EVALUE 0.00e+00
ctgtatccactgtcaacagtttccgtggacctcacactcgccgtggccctcagagttttgctggacaagccaaccacggttggcgaaagtttgcacttgaagtcggcacaagtccactcctcttcttcattcaaggtggggagatagccacacacgacctttaggctcccgagtcccccattactcatgtaagctgtgttttctcccccactcctcacatattcgaggtatatatcagaagtcaaaaacatctggtaggcattttcctccatcaccgactggatctcggtctgcgcctggtcaaacatgatggaatcaatctgctgcttcttgatgccatctcttatgtaggtcttggtggcaggcttcagctgcttggagacaatgctgttgttctcaatgtaccttttgtagatcgctttggctactcgtaaagttttggtatccttcaggttcatctgcctgaatccattgcaggcaaaccagaagtctaaggtatccacgcatttctccctctccaggaaagttcggaacaggtaagcaccgtcttgatcgcccaataaggagtgtaaggacttggtccaccgggtcagaggggaatccggagatgcccgcccctccggctcccccaacccatcttcgttccgcctggtgttggaagagacaggcat

SEQ ID NO: 25416 - DNA, 586 bp, Homo sapiens
  MAP TO AL136324.2; EXPRESSED IN HELA, SIGNAL = 0.47; EST_HUMAN HIT: AU140128.1, EVALUE 0.00e+00; SWISSPROT HIT: P43088, EVALUE 1.00e-102
cagaaatgggctccaacaaatacaggagacacacattatcgccaggagctggattaccatttccaaatgatgagatctgccttgtctgtgctgctgacttttaaatttaactcttaaaagtgtaattcctgtgattgcattgcacaacaatgaaacaccaagggctaagagccccagaaaagaaaaaagtagaagataaaatctatcttcccagtctttgatgtcttctgtgttgtagaaacaccaggtcctcgacgcctgaattttatagtctcgatgtccaaggatgggcagcaaagctatgaaaacagcaaacaagcacacaccacttaacatcattttcacatgtttggatgtaattttcgtagaatgaaatattggttttgtgactccaatacaccgctcaatggccatcacactgcctagaagaagtgggcacagaccagaaaacaccatgcagataccaaaaatactgcaaaggacatttgattggtcaaagcggatccattctttatcagaagcatatacaaatactgctatggctccattgatgagatggccaaagaaatcagtgattaccaggcca

SEQ ID NO: 25417 - DNA, 2977 bp, Homo sapiens
  MAP TO AC009516.17; EXPRESSED IN HELA, SIGNAL = 0.28; NT HIT: gi14777577, EVALUE 0.00e+00; EST_HUMAN HIT: BG723046.1, EVALUE 0.00e+00; SWISSPROT HIT: P19706, EVALUE 8.00e-03
tcagtgtccatggagggacatgtgatccagcaggtgggcaggaaccaggcccctgtggccgcccaactctccataatagaatccttggtcatccatgggcccgtaaaccatgaccacgtctcctgccctcagcgccagcctgcccttcccctggccccccatttgcccatccccaggatcatagtccagagctgctatcatgatctttggagtccacagtgggagtctcttggagttcccctggagcaccagggaggaaccctgggggatggtgagcccctgaaagtcctcgaggtgggccacagaaggcaggtgcccttgggccggagaacgccacctcctatcagtctgctctgtccccacctccatctcagccactaggcgcccggggatattgcccacttgcctgttgcactcgctgaggtagaaatcatgggtgtcctgagagccccacactcttagcaactgccttttctggaagaccagctcctcctctgcagccttgaggttggcagacatcaccagggggttgtaatcagagagggccacaaagaccctggctggagtgttggcccccgtccccagctgttgggggccacccctgggcatcttgatgactttggcggatggagctggacacagtgccgagctgggctcatggagctggcaccctctcttgacccccagagcttgtccttgcctgctgtggggctcaggctccctcctctcctctcgcctctctgtgccccacagatccaagcacagtgcctcctgctcctccttcaaaacgttatggaagtcagatgcatactgttggctggcacccagctggggaggtgtgaacccttgggcatcttgcttttgccgaagtaccctctcaagggcagccttttcctgacacggttctttcctgggcccacactcggtgcgtagatggatgaatcctggagcagggcttttgctggtgcccatgtgctggtagcaattttccttctccccagtctggtcactgactgaaggtggcctgtggttctggggactcttctgaaagagcaggtcctttctacagccctcccaggcctctgcaagctcctgggcttggctgccagcccctgaactcggacattctccttctgagcccaggttggacactggggattgcctccttgggggttcttcaaagaatgcttctaggaacttggcctggggctccccgcagcttccagggttgtgggggctggccttggcactcggaggagccagtgacagcttctgggggcagacggggaaggtgactctgtaggtggatgggtcgccacaagtgtagctaaagggtggagtctctggccatcggtgacacatgaagaagtcctcggggatctgagcaggcactgaatccagggactcaccacagagtgacatggttctcactgagaccttctgccacgtgaggggcacctgtagctgggagaattccaatagggtgctcccagcagtggcatcggcgacctcacaaaccttaagcccatctgcatacacagcataaccggtgacctggactccattggaggacccagctgagtcaatggtcacagggagccagctgaccaccaggacacctggcgaggcatggcgctccaccagcacctccagcggtgggtagggaggtcctgccaagagtgtgtcgaaggtgacggtggaggacatagttccccaatacacctgcagcaagtcccgtggcagccgcacctccacccgcgcccggtagtgcgtgccggggcacaggccctggaaggtgtagcagctcacgcccgctggggtcagggcatgctctcggtcatcaagatataccacatgggggtggcggtggctgctgtagacccaggtgatgttggctgatgtggctgtgacattctgcaggtgtagctgcatgggagccatacggagcacccctttggtccccagaaggggtctggagaggccctgcttccccatgctctgcagcaagcccagctggcaggcttccgtcttggtatccaggatctctgttgctacttctgtcttggagcccaccctgaccatctggcacagccctctgtccaccactccctgggctttcccagataataagctgtcttcctccagagcttcatcctgccccgctgggagttgactggggccaagatcaggggatttggcaggcaggcagcctgggatgtagctgtccggaatctgctccacgaagttggagggcaccagcccccgccggccatcctcaagctccccctcatagaagccatcctcatccatgtccccgaagatatatatgtagtccccagctgtgaggggcagctcaccctcagggtgatcattgggcccctcaaatgggttgtagttatactgagccatgaagatcttgagcttgggggcagcaggagccgccgagccccccatttccagggccagggacacgctgtcaggctccaggtcatccacctcactggctgtgtccctgtccagagtaggggaggacggcacggtggcccacatcgacccctcagaggaggagtttgactgggagctggttttcttggacagaggttggctggcagggactgtctctgaaacttgggggacactggctgactccccaagggcaactgggctctcctcgagggaggcttcccttttctcctgtatgtctctgttgggctgtgacactgcgtagtcttcaggccgtgcgtggaacttgggccttctgctacctttaacttgggactccggcatttgactggtctcccagggctgttcaggagggtgaccaggccgacactggagcgcctgtatctccttccaggaaggatggaggtcacacagggccttctgcgggtcgcgttgcagctgctgctgcctgtcctgcccgcgcgccgcctgctgcagcagctgttcggcgatcaagccggaggcatcgcgctct

SEQ ID NO: 25418 - DNA, 1121 bp, Homo sapiens
  MAP TO U73479.1; EXPRESSED IN HELA, SIGNAL = 0.95; NT HIT: gi14754367, EVALUE 3.00e-78; EST_HUMAN HIT: BE077380.1, EVALUE 0.00e+00; SWISSPROT HIT: Q00899, EVALUE 1.00e-103
ccatggcctccaacgaagatttctccatcacacaagacctggagatcccggcagatattgtggagctccacgacatcaatgtggagccccttcctatggaggacattccgacggaaagcgtccagtacgaggatgtggatggcaattggatctacggtggccacaaccatccgccattgatggtgttgcagccgctcttcacgaacacgggctatggcgaccacgaccaggaaatgcttatgttgcagacacaagaggaagtggtgggctattgcgactcagacaaccagctaggcaacgacttggaggaccagttggccctcccggatagcattgaagacgagcacttccagatgaccctggcctctctgtcggcctcggcggcatcaacatcaacatcaacccagagccgcagcaaaaagcccagcaaaaagcccagcggcaagagtgccaccagcactgaggccaacccggcaggcagcagctccagcctgggcacgaggaagtgggagcagaagcaaatgcaggtcaaaacgctggagggtgagttttccgtgactatgtggtcccctaacgataacaatgaccaaggggcagtgggtgaaggccaggctgaaaacccacctgattattccgagtacttgaaagggaagaaacttcctcctggggggttaccaggcattgatctctcagatcctaaacagctggcagaatttactaaagtgaagcccaaaaggtccaaaggagaacctcccaaaacagtcccttgctcttatagcggctgcgaaaagatgttccgggattacgccgccatgagaaaacatctccacatccacgggcccagagtccacgtatgtgcagaatgtggcaaagcttttcttgagagctcaaagctgagacgacaccagctggtccacaccggcgagaagccctttcagtgcacattcgaaggctgcgggaaacgcttttcccttgatttcaatttgcgcacacacttgcgcatccacaccggcgataagcccttcgtgtgccccttcgatgtttgcaacaggaagttcgctcagtcaaccaacctgaaaacccacatattaacgcatgtgaagaccaaaaacaacccgtga

SEQ ID NO: 25419 - DNA, 572 bp, Homo sapiens
  MAP TO AL079336.5; EXPRESSED IN HELA, SIGNAL = 0.62; NT HIT: AF128626.1, EVALUE 1.40e-01
tcatctgatattttcaccacggcattgccagtccaaatcacgcctgacacaaagcatgccaccatctatctgagtcttcatcaggaaaacaaacttgcagagaggccagccaacaccaacatcactatcatcagcatcaggaacatcagtaccgccatcaacatcaacaatgacaccaccaacatcagcatcaagaacatcaacatcaccaacatcaacaatattgacaccaccaacatcagcatcagcaacatcaataccaccaccatcaacaccactaacatcaacaatattgacaccacttacatcaacaccaccaccatcaacatcaacatcacaaacatcaacaatatcaacaccacctacatcaacaccaacatcaacaccaccaacatcaacaatactgacaccaccatcagcatcagcaacatcaacaccaccaatatcaacaatatcaacaccaccaatatcaacaatatcaacaccaccaatatcaacaatatcgacaccaacaacatcagcaatatcgacaccaccaacatttacaatatcgacaccaccaacatcaacac

SEQ ID NO: 25420 - DNA, 613 bp, Homo sapiens
  MAP TO AC000359.1; EXPRESSED IN HELA, SIGNAL = 0.38; NT HIT: gi14753053, EVALUE 0.00e+00; SWISSPROT HIT: Q61553, EVALUE 2.00e-15; EST_HUMAN HIT: BG718594.1, EVALUE 0.00e+00
acctgggagatcttggtgagcaatgagcatgagacacaggccgtggtgcgactaaagagcgtgcagggcctctacctgctgtgtgagtgtgatggcaccgtgtgttatggccgcccaaggaccagccaccatgggtgctttctactgcgtttccaccggaacagcaagtggaccctccagtgcctaatctctggtcgttatttggagtccaatggcaaggacgtgttttgcacttcccacgtcctctcagcttaccacatgtggaccccccgaccagccctccatgtccacgtgatcctctacagccccatccaccgctgctatgcccgggctgaccccactatgggccgcatctgggtggacgcagcagttccctgcctggaggagtgtggcttcctgttgcatttccgagatggatgctaccacctggagacctctacacaccacttcttgtcccatgtagaccggctgttctcccaaccctcatcacagacagcttttcacatgcaagtgcggcctggagggcttgtggcactgtgtgatggagaaggaggcatgttatatccacagggcacgcatctgctcttgggcatgggctgcaaccccatgaggg

SEQ ID NO: 25421 - DNA, 798 bp, Homo sapiens
  MAP TO AC004554.1; EXPRESSED IN HELA, SIGNAL = 0.2; SWISSPROT HIT: Q9Y2J0, EVALUE 4.30e-01; EST_HUMAN HIT: BI088264.1, EVALUE 1.80e-02; NT HIT: gi14764512, EVALUE 0.00e+00
ctcggatttccacacgacgtaggggtgcccgcgactgtcgggtggggactggaacttcctctgctggagccacctcctaggagaagcgaagatgccattggggcctcccccggatgaacagaggatgctggaagcgcttcggctactggctggcccggccaggacagaaggcaggtcccaggccatgctcttcttgaggccgccgcgacccaggggaacctcatagtcaaagtgaaagctgccggatggtgacttctcctgcggggtgctgggtgtggagaaggacgagcaaagaggtccaggaggcggtagcctggtggccctggggggcggaccccgggaagaggacgccaagcgagggccgagactctcggctgggagtgatggggagtagaggcggcccgccgtggctccccgcgcactgccctccgcgcccgcctcgtcgctcccgcagccgccgatcagggccgggtccaggctgcgggtctggcgcagcttcctcttggagaagcccttggccgaggccgcgctacttgaagcgggcgaggaacaggagaagacgctgtggagcaggctctgcgcggacatctcggcggggctgcacctgaggaccacctcctcctccctccctggacgctggtggctttgggtcgggaaccgaaagggactcaggcaaaggtgccaggcggggctggcccggggtttgcccagggcagtggagagcaaagcccagctcacgcgccgccggtgcgctccaagtgccccggcggcggcaggagcagcagatccatcaccagc

SEQ ID NO: 25422 - DNA, 891 bp, Homo sapiens
  MAP TO AC024049.2; EXPRESSED IN HELA, SIGNAL = 0.44; SWISSPROT HIT: P23091, EVALUE 3.00e-32; EST_HUMAN HIT: BE676631.1, EVALUE 0.00e+00; NT HIT: gi5453735, EVALUE 9.00e-41
  unsure 111
atgagcggctaccagcatcacctcaaccccgaggcgctcaacctgacgcccgaggacgcggtggaggcgctcatcggcagcggccaccacggccgcacggcgcgcaccatncggccgccagcctacgagctttccgcggccgggcttcgcgggcggcggtggagcggacgacaatgggcgccggccaccaccacggccggcaccacgccgcccaccatcaccacgccgcccaccaccaccaccaccaccaccaccaccatggcggcgcgggacacggcggtgcgcgggccaccacgtgcgcctggaggagcgcttctccgacgaccagctggtgtccatgtcggtgcgcgagctgaaccggcagctccgcggcttcagcaaggaggaggtcatccggctcaagcagaagcggccacgctcaagaaccgcggctacgcgcagtcctgccgcttcaagcgggtgcagcagcggcacattctggagagcgagaagtgccaactccagagccaggtggagcagctgaagctggaggtggggcgcctggccaaagagcgggacctgtacaaggagaaatacgagaagctggcgggccggggccgggagcgcgggcggggccggtttcccgcgggaccttcgccgccgcacggtcccgcggggccaagggacggccgacttcttcctgtaggcgccggaccccgagcccgcgccgccgtcgccggggacaagttcgcgcaggcctctcggggcctcggctcggactccgcggtacaggacgtggacaccaggcccggccggcgtgctggccccggtgccaagtctgcgggcgcggggctggaggccccattgctcccggtccccgttcgcgcgcgtcggcccgggtcgccgtcctga

SEQ ID NO: 25423 - DNA, 951 bp, Homo sapiens
  MAP TO AC024052.2; EXPRESSED IN HELA, SIGNAL = 1.3; SWISSPROT HIT: Q10256, EVALUE 2.00e-19; EST_HUMAN HIT: BI830275.1, EVALUE 0.00e+00; NT HIT: gi14744047, EVALUE 7.00e-17
cttcaatttgaatctgagctagatgaacacggccaataattctctgtgtgcccactcctttagcaaccccagcccaccgtcggtccaccagcctcatgatgttacatcgctcggcacaagcctggctcataatggtcatctgggcgcccgagtcaacaaaagccttcaaaggatgcccattcactttgcagttaatgtagagcatcgtcacttgtccaaaactctcgggggcctcttctatcgctatattcatgttttcttcaatgttttgctgccggatttcctcttctattttggcctgagcttcccgatccagtgggtcggctgtgtagagacgaagcctctcttgctctctcaaggccttttccctttgctgctccatcagcacctgagaaaaggtctcaaggcttccgctgagcagggcttccgccaagggagggttgcgttccttgagcagggacagatcgtgggggttggagagcagcatgctgcggatcagggcggggctgcccagaccttgcaggccggccaccttctctcctgacgccaagccctgtgaccgctgggcagcgggtgtgcgctgctgctgctgtccagggtgctgtggacgggagctggacgtcccaggcaccgcaatgccactgaagtctacacgaggctggttcggggcacgccctggagcccgaggtcccacattgtccttctgcagtaaaaccacgatatcgccatctttgaggccgtaggagcccagggaacagtggtcctcgatgaggagtcgctccatgtggatgatctggatctcttcgacggggactctggactccgcttcgcagaggaccttgaagtttcggagctcaaagtcggggctgacctggagagagaaggtgacctcggagaggtccctccgcacgcagtacacggtgatcagcatggcggcgcgggcgggccggg

SEQ ID NO: 25424 - DNA, 609 bp, Homo sapiens
  MAP TO AC003003.1; EXPRESSED IN HELA, SIGNAL = 0.62; NT HIT: gi16179329, EVALUE 0.00e+00; SWISSPROT HIT: P21521, EVALUE 1.00e-25; EST_HUMAN HIT: BG527236.1, EVALUE 0.00e+00
agacgtcccagctctccactcatcgatattaaacccatcgagtttggcgttctcagcgccaagaaggagcccatccaaccttcggtgctcagacggacctataaccccgacgactatttcaggaagttcgaaccccacctgtactccctcgactccaacagcgacgatgtggactctctgacagacgaggagatcctgtccaagtaccagctgggcatgctgcacttcagcactcagtacgacctgctgcacaaccacctcaccgtgcgcgtgatcgaggccagggacctgccacctcccatctcccacgatggctcgcgccaggacatggcgcactccaacccctacgtcaagatctgtctcctgccagaccagaagaactcaaagcagaccggggtcaaacgcaagacccagaagcccgtgtttgaggagcgctacaccttcgagatccccttcctggaggcccagaggaggaccctgctcctgaccgtggtggattttgataagttctcccgccactgtgtcattgggaaagtttctgtgcctttgtgtgaagttgacctggtcaagggcgggcactggtggaaggcgctgattcccagttctcag

SEQ ID NO: 25425 - DNA, 470 bp, Homo sapiens
  MAP TO AC022517.1; EXPRESSED IN HELA, SIGNAL = 0.83; NT HIT: AB020683.2, EVALUE 0.00e+00; SWISSPROT HIT: Q09442, EVALUE 1.40e+00; EST_HUMAN HIT: BF313933.1, EVALUE 0.00e+00
ctgcccctctccggcccgggctttggtctccatgcgacctgccccactgctggctgcaccgtcctctggccccgtcagctccatgggggaaactggttccttccaggtcggacccttctgggcaaagtgctcaaaggcctgctggcaggacacgtgctcctggttgaaggctgccttgcccggccgcggcaccacgtacagcatggggatgatgggccgaggcttggcctctagctcctcactgggcacctcagggggcacgacattaaggggtgccggcagggggctctcctccatggctgcagggcctgggcccagcaccgggggctccagtggggatggcagccacagcgcctcctctgaggggaagtgagcaggcgggggcggcagctgtgggggcagcaggccgaagctcttcttcttccgctcgctcttggccttggttggccgcagcttgcccctcccgtcct

SEQ ID NO: 25426 - DNA, 723 bp, Homo sapiens
  MAP TO AL132654.12; EXPRESSED IN HELA, SIGNAL =   1; NT HIT: gi14770873, EVALUE 0.00e+00; EST_HUMAN HIT: AL043012.2, EVALUE 0.00e+00; SWISSPROT HIT: Q9TU67, EVALUE 1.10e+00
cggggcccctttgggtctcggtgactgcctgcagggccctctcaaggccatccatacgggcattgatcaaggctagttgcccacagcagctgcccctgccagacacgctcaggccctgcagctggctgcccagctgtgacagctcctggcgcagggccagctcccggccatcaaggctctggtgcagcctccggctggcggcctgaccctcctcacattgccgccgtacctcctgcacccgcaggtcacactcactctggacgccttgcagcttctgctcaaagccatccagcaggctcccccagagtcggtgcagccgtcggtccacgtactcctccagcagggccagggaggtgagcggggatggtggggcttcccgcagccgctgcaggtgggcctcatggccaagtgccagcccatgcaccttgtctagaagctgcaccttggtctgaagagtgttgctcacctctgtcaccttgcttaggatctcgtctaagggaggtgttagtggccctctggctctgtctcctgggcccacaagcccctcagggatgaccccaaagcccacagggacagcaggagccctggggccaccagtcatcctgttgggatcctcgtggctagccaccaggccactgagggtaccatatgtttgagccaggcgctggacatcaccctccaggcgttccagccgctcaccaaacagccctgggcctttccttc

SEQ ID NO: 25427 - DNA, 1199 bp, Homo sapiens
  MAP TO AC006059.3; EXPRESSED IN HELA, SIGNAL = 0.61; EST_HUMAN HIT: F00401.1, EVALUE 2.00e-74; SWISSPROT HIT: O60662, EVALUE 1.00e-103
ctgcaggaagtatgcgctcatggggtcctctttgttgtcttcgttgtagaagaggcctccagccacgaagacctggttctccttggtaaccaggctgacgtggttcttggggacctggttggagagggaagcacagtagcactcgttggctgctggatcgtaggccacagcgccctcctcactgatcatgaagatgagatcctgcaggaacatgccgaagcgcagggtgtcattgaggatcccaggaaggatacgttcggcctcctcatcctcctctgctttggctttgcttgtgcccttatcagcctccttggccccggctccatccttccccttctttttcttccgcagcgtggtgatgcggccctcgtgtgcatccttcaccatctgcaccttgcgcagcaactcgggctgggcacgcacgagagggtggcgctccacgcggctttccagaaaggcgcgcggcagcaagcggcagcgcacgctctcgaagacggtgggcagcgcgcgctggcgctcagcctgcgcctcggcgtcgccgctacccgcccaccgcatcaccgcctcgaacactgcctcctccttctccacgttaaggccgtcgctggagatgatggcgatgagctcgtcggccgagagtccgaggaagtcagcgtcgcgcgccaccagcgtgaagtgagcgcagatgaagtcgcgggcagccacggcgagacgcgcgcagtcgagcaggaggccgagacggaagacggccaagcagttggagaggcacaggcgcttctgcaggaaggacacgcagatggtgaagatggaagggatctggaagcggtgtgccgcggcgaacaaatcctgcacgctcgcctcatccagcgcgatctctgatgtgtacaggtagtgcagcacctgggccaccacgtccggggacacctcctccaggtgcagctcgcccgcgcgctccggctcggctagaaagcgcgcccggaagtaggggctgcaggcggccagcaccaggcgatggcacgggaactcgcgctcgcccgcccgcaccacacagtcgaggaacttgccatggtccagcatgtctttgagcccgtcttgcaggagcgtctgctggtacaaccgctgctcctccgcctgctccaagcccagcgccatggtgggtggcctagggtgcggtggcggtgccaagggggctcctctct

SEQ ID NO: 25428 - DNA, 594 bp, Homo sapiens
  MAP TO AC003966.1; EXPRESSED IN HELA, SIGNAL = 0.43; NT HIT: S67970.1, EVALUE 1.00e-106; EST_HUMAN HIT: BI836429.1, EVALUE 0.00e+00; SWISSPROT HIT: P51815, EVALUE 7.00e-87
ggttaaagctcaaaaacgacactgaaaatcatcagcctgtgtctctttctgacttagaaatacaagcatcagcaggcgtcatatcaaaaaaggccaaagtaaaagttccccagaaaacagcaggcaaagaaaatcattttgatatgcacagagtgggaaaatggcaccaagattttccagtgaagaaaagaaagaaactttcaacctggaaacaagagctgctcaaacttatggatcgtcacaagaaagattgtgcaagagagaagccttttaaatgtcaggaatgtgggaaaaccttcagagttagctctgaccttattaagcaccaaagaattcacactgaagagaaaccctataaatgtcaacagtgtgataagaggtttagatggagttcagatcttaataagcacttaacaacacaccaaggaataaaaccatataaatgttcatggtgtgggaaaagcttcagtcaaaatacaaatttacatacacaccaaagaactcatacaggagaaaagcccttcacatgtcatgaatgtggaaaaaaattcagtcagaactcccaccttattaaacaccggagaacccacacag

SEQ ID NO: 25429 - DNA, 527 bp, Homo sapiens
  MAP TO AC005500.1; EXPRESSED IN HELA, SIGNAL = 0.42; NT HIT: gi14756466, EVALUE 1.00e-103; EST_HUMAN HIT: AL041090.1, EVALUE 3.00e-80
tgggcggcatcctcgttagcgacgccgtgggcggcgacctctttagcgatgccgtggacggcgtcctcgttagcgatgccctggacggcgtcctcgtgtgcgatgccctgggcggcgtcctcgttcgcgatgccctgggcggcatcctcgttcgcgatgccatgggcagcgacctcgttagcgatgccgtgggcggcgtcctcgttagcgatgccctggacggcgtcctcgtgtgcgacaccctggacttcaacctcgttagcgacgccctggacggcgtcctcgttagcgacgccctggacggggtcctcgttagcgacgccgtgggcggcaacctctttagcgacgccgtggacggcgtcctcgttagcaatgccctggacggcgtcctcgtgtgcgatgccctgggcggcgtcctcgttcgcgatgccctgggcggcgtcctcgttcgcgatgccctggacggcgtcctccttagagatgccatgggtggcgacctcgttagcgatgccctgggcggcgtcctc

SEQ ID NO: 25430 - DNA, 2257 bp, Homo sapiens
  MAP TO AL031346.8; EXPRESSED IN HELA, SIGNAL = 1.3; SWISSPROT HIT: P08462, EVALUE 3.00e-03; EST_HUMAN HIT: AW604940.1, EVALUE 0.00e+00; NT HIT: gi14779283, EVALUE 0.00e+00
ggaggcttgggaatttttcatttctaccctttcgttccccatggccagtgaaatctcccttttcttgccctgtaggatactgaggaaagccactgacatttcgtggcacggctgacccgaaactatctttgtaactatagcgcagacttccaggagatttgctaggctcagttctgctcgtaaaaccagggcccgctgcagagtggccactctggccatttccttctccattatggttggagttgttatcgccattcttgtttcctttgctccctcctcctcctggaggctctggctggggaagtgatgcatgactggtttcctttgccccaccattgctaggtggcctttgagtggctgcaggatcatcctcttgggagcctttatcttgtccaccaggcttttctacccgacctgtcatggcttcccgggagacaatcaccccaacagtcttctcattaacctttgggttcccgtcggatgacaatggcatgtccttagcgcctggtgaggtggcctcttctcttgcggcaggactagcattgagtctggggggttcattctgagcaccttgtgccggtgaggagccagctttctcagaggctccacccttgtaggtggtgtcagagctggtgctctggccacttagttgccgcactctctcgccttgatcctctgaactgctggagcagcctccatctaatgactctgccataggggacttcagctgttcttcaggttgtgaggagccttcagaatttgtgcagctatctgctttcttggaagatgagggcctcttggaggtcttcttctgaggagtcagggcatcagaaagtaacatgtgctggacagtgttaggaagattggccacttgagtactcagagcactcaaactactcaacccaggatctgtcagtcgcttttctggtaccccttctagtccaaaccctttgaagcctgcagcatgagaattaggactgggcatcattgatggggttggactgagttgaggcattaactgtaaaattctgtttctggaacccataggcacactgccttgcccacactggagattctccccagtctgcatgagaggagatggggtagaactacagcttggagactgaaccacagaggcagctggagaagggttagaaatggggctgaagttctggtgaaactgcatgggggacctcacaggaacctcaggctggttgtactgccccacttggctttgcaggggcagcttggtggcagcgttagtatactgcatcacatgctgagaagggtgttgttgttgctgcggttgctgctgctgctgcccctgttgggtcccttgtggaatctttgcctgttcaaaattcttcatagattgaggctgatagctgtaattggattgtgttccataagcctgtgcattagaacccacattgtgtccttcatactgagatccagcattcacattgtaactgccatcatagctctgtccagactggctaaaacgctgtggtgaagggaaggaggaggaggaggaggaggaagcagaagactgatagtgttggccaaactgacccactcttaactggtaaccagcagcagaggatggcagagttgagggccgctgcattggctgtagatgggatgagctggatgctggttggccagtggcctgtggcaggggctgatgggactggtaaagctgttgtctcaactgctggacttgctgctgctgctgctggctggaagcctgctgttggtactgagcactccctggagagaaaggcccagtgtaatcctgctgataatgtgacacaccgccaaggccagagtgctgtgcttgaaactggcccacatgaccctcactcccatactgattgccaaagctgctcccctgggggggtccatagctctgcacaggcccagaaggccttcgctgaggaggctgtggggttcctgtagtcacggggtctttgttgcctgccatgtagtaaaaatctccagcctctttcctgaaaccctggtaaccttgatggccagaggtctcgctagccatcgctgccgcagcagctgctgctcctcgtcgtccaccaccactgccactgccactgctgccactactgccacctgtacctccaaaattctggaacatctgggcctgacgagggctgaactcttctagccgggatgagccgtgtacctcctgtgggtagctttgctggtttccgtggtaactgctttgctcccgaaaggactgcat

SEQ ID NO: 25431 - DNA, 940 bp, Homo sapiens
  MAP TO AL139824.7; EXPRESSED IN HELA, SIGNAL = 1.2; SWISSPROT HIT: P41968, EVALUE 0.00e+00; EST_HUMAN HIT: BI830442.1, EVALUE 2.20e-02; NT HIT: gi11420990, EVALUE 0.00e+00
ctatcccaagttcatgccgttgcagccacagagaatctccctaaaggtgttgcgcaattccaggctccggaaagcgtagatgagtgggtcgatgacggagttgcacatgatgaggaccaggtaggtgttgaagtgggcagtgtagcagatgcagtaggggttggtggggcaggtgatgatgaggaccaggtggaggaagaagggggcccagcagaagatgaacacgcccaggagaatggtgatggtgactgcccccttcatgcatgagtgttgctgtggggccaccccgtcggcaggtggcagtgctgctatgcgcttgacgtgcagccgcgcaaagaggaacatgtgcacgtagagggtgcccatgaggagcatcatggcgaagaacatggtgatgaggcacacaatgaccattttgctctccgagtagacgatgaacaccacgccacagacgccgcagcagacccagatggccacgatcaaggtgagggccttcctcacggtcatgatgctgtggtagcggagcgcgtaaaagatggtgacgtacctgtcgacggcgatggccaggaggttgcagatggaggccaccagggagatgcagatcatggagtcgaagatgttgtccatgtgctggataaactggtcctcgaaggtcaggtagtcgctgtggacgatggcgatcatgatggtctccagggcattggacacacttaccagcatgtcggccaccgccaggctgcagagaaagaagtacatcggggagtgcaggttgccgttcctgaccacggccaggataaccaggatgttttccagcagactgacgatgcccagagacaggaaaacctcgggcttgatgaagacctgctcacagaaggcgctgctgctctggttgctgaagaaaggggcttggaggtgctccgagccattaggcagtgttggc

SEQ ID NO: 25432 - DNA, 726 bp, Homo sapiens
  MAP TO AC008120.15; EXPRESSED IN HELA, SIGNAL = 0.76; SWISSPROT HIT: P04058, EVALUE 3.00e-19; EST_HUMAN HIT: BI458898.1, EVALUE 0.00e+00; NT HIT: gi13647848, EVALUE 0.00e+00
ttacaactgcactcagcatcacatcatttttggagaaattgcaaggaaataactctgtagggccaatcatggggattcccagtacatagggaacctcgtctccgtgggctgcatcagcccaagctggaacctgatctgtttggcaatgatggtaaaaggcatagaagtacgtaggtgaaccaaagtttgagtgaagatccgctgtggctacagctggtgccacccactgatggtccgtaaacaaagccagtaatgtctttcttctggtttcagggttatgacggtcagcccagtcagtatacatgaacttaatggtttctctcaaaacatctttgccttcaggatatccatataaattatcaacaaaatttgaaacagcaaagtcaaaatcactagctgatataccatcatcgctatctactatattttcaacaaattttaacccttccccttggttcactcctaacattatatcatagttgagaaactctccttgctccatcaatatctgggggtcgtctggtattacatcaccatcaatcacaggtccaaaggctatgtggtatcgagctggttgaatatcttggtcaacaagttctttgtaaggcttcttctgtaggcattccactaactctactgtatctgaaacattgcaaccaacttttgtggccaacattctagcatattttgcaggttgaaaactaacagcccagctggaaagggctg

SEQ ID NO: 25433 - DNA, 573 bp, Homo sapiens
  MAP TO AL133232.9; EXPRESSED IN HELA, SIGNAL = 0.16; NT HIT: U63807.1, EVALUE 8.50e+00
ctaaatgatacccatggtgatgatgatggtgaggctggtgctactaccgctgctgatggtggtggcgataatggtgatggcaatggtggcgatgatgatgataaaggtgatgctgctgctgctgctgttaatggtagtgatgatgatgatggtgataatgattatgatggtgttgatggtgatgatggtgatgatggtgataatagtgatggtgataatggtggtggtggtggtaccggtgatgatcatggtggtacagatggtggtaatgatggtgatgataatgatggtgatgatgatgatggtaatgatggtgataatagtgatggtgatgatgatggtggtaatggtgatgatggtggtggtggtgttggtgatggtgaaggttacgatagtgagggtgatggtggtgatggtgatggtgatgatgctgatggtggtgatggtgatggtggtagtgatggtaatggtgatggttatgatagtgatgataatggtgatgatggtgatggcaatgatgatgatggtgataatgtcaaaatattggactgtttccagctccaactttgctga

SEQ ID NO: 25434 - DNA, 501 bp, Homo sapiens
  MAP TO AL355076.2; EXPRESSED IN HELA, SIGNAL = 2.5; NT HIT: AB072380.1, EVALUE 0.00e+00; SWISSPROT HIT: Q29099, EVALUE 4.00e-61; EST_HUMAN HIT: BG754848.1, EVALUE 0.00e+00
gccttcatcaagatgagcacggaggaggctgccaacaccatggtgaattactacacctcggtgacgcccgtgctgcgcggccagcccatctacatccagttctccaaccacaaggggctgaagaccgacagctctcccaaccaggcgcgggacccggcagccctcaggccgtgaactcggtccagtcggggaacctggcctggactgccccggcggcagccgtagacgcagggatggcgatggccgggcagagcctggtgctcaggatcatcgtggagaacctcttctaccccacgaccctggatgtgctgcaccagattttctccaagttcggcacagtgaagaccatcacattcatcaaggacaaccagttccaggccctgctgcagtacacggaccccgagaacgcccagcataccaagctgtcgctggattggcagaacacctacaacgcctgccacacgctgtgcatcgacttctccaagctcatcagcctcaacg

SEQ ID NO: 25435 - DNA, 590 bp, Homo sapiens
  MAP TO NM_006994.1; EXPRESSED IN HELA, SIGNAL = 1.4; NT HIT: gi16174351, EVALUE 0.00e+00; SWISSPROT HIT: P18892, EVALUE 1.00e-54; EST_HUMAN HIT: BI754184.1, EVALUE 0.00e+00
ctgatgtggtcctggatccagacaccgctcatcccgagctcttcctgtcagaggaccggagaagtgtgaggcggggcccctacaggcagagagtgcctgacaacccagagagattcgacagtcagccttgtgtcctgggatgggagagcttcgcctcagggaaacattactgggaggtggaggtggaaaacgtgatggtgtggactgtgggggtctgcagacacagtgttgagaggaaaggggaggtcctgctgattcctcagaatggcttctggaccctggagatgtttggaaaccaataccgggccctgtcctcccctgagaggattctccctttgaaggagtccctttgccgggtgggcgtcttcctggactatgaagctggagatgtctccttctacaacatgagggacagatcgcacatctacacatgtccccgttcagcctttactgtgcctgtgaggcccttcttcaggttagggtctgatgacagccccatcttcatctgccctgcactcacaggagccagtggggtcatggtgcctgaagagggcctgaaacttcacagagtggggacccaccagagccta

SEQ ID NO: 25436 - DNA, 785 bp, Homo sapiens
  MAP TO AC011506.1; EXPRESSED IN HELA, SIGNAL = 1.3; NT HIT: gi13236531, EVALUE 0.00e+00; SWISSPROT HIT: P18747, EVALUE 1.00e-43; EST_HUMAN HIT: AI041519.1, EVALUE 0.00e+00
tcactgggaggtggtttcccggtgtgttttcaggtgacgcttgaatgtccccagctgacggaaggccttttgacaggtgggacatttgtagggcttctctccggagtgggtgcgctggtgaacgttcaggttccccttgtggctgaaaactttgctgcagtatttacatttaaacggcctctccccggtgtggatcctcttgtggccctgtaaggtggactcgtgggcgaaccgcttttggcagacgtcacacatgtagggcctctcgccagtgtggactcgctggtgaactcggaggtctgagggctgcaagaagcgcttccgacagagatcacattgaaagggtctgtctcctgtgtgtgacctcctgtggatgcttagctgggaaaaatacttaaatgatttattgcacacgtcacatgcaaagggcggcagggccttggcttcttggccatctgggtgactgaccgggcccgcagggcctggggaatgaactggattgatctcagcttgtcctggggattctctgttgcccacaggtgtggcttctccttgaggctcttcttgggaaatggaggaggcatctggtttgcttcttttgggactgctcagattcagagcatctcctctgttcccgctgtgagtcaaagcttctctctccacaacgcaggcagaaggtgtgtcagcatccacattttccacagaggctcttttctggggttccttcccctcctttgctctcaccagatctggtggaagaagggattccacacacaacagttaac

SEQ ID NO: 25437 - DNA, 1722 bp, Homo sapiens
  MAP TO AL022312.7; EXPRESSED IN HELA, SIGNAL = 0.38; SWISSPROT HIT: Q09327, EVALUE 0.00e+00; EST_HUMAN HIT: BE675503.1, EVALUE 0.00e+00; NT HIT: gi14779010, EVALUE 0.00e+00
atgaagatgagacgctacaagctctttctcatgttctgtatggccggcctgtgcctcatctccttcctgcacttcttcaagaccctgtcctatgtcaccttcccccgagaactggcctccctcagccctaacctggtgtccagctttttctggaacaatgccccggtcacgccccaggccagccccgagccaggaggccctgacctgctgcgtaccccactctactcccactcgcccctgctgcagccgctgccgcccagcaaggcggccgaggagctccaccgggtggacttggtgctgcccgaggacaccaccgagtatttcgtgcgcaccaaggccggcggcgtctgcttcaaacccggcaccaagatgctggagaggccgcccccgggacggccggaggagaagcctgagggggccaacggctcctcggcccggcggccaccccggtacctcctgagcgcccgggagcgcacggggggccgaggcgcccggcgcaagtgggtggagtgcgtgtgcctgcccggctggcacggacccagctgcggcgtgcccactgtggtgcagtactccaacctgcccaccaaggagcggctggtgcccagggaggtgccgcgccgcgtcatcaacgccatcaacgtcaaccacgagttcgacctgctggacgtgcgcttccacgagctgggcgacgtggtggacgcctttgtggtgtgcgagtccaacttcacggcttatggggagccgcggccgctcaagttccgggagatgctgaccaatggcaccttcgagtacatccgccacaaggtgctctatgtcttcctggaccacttcccgcccggcggccggcaggacggctggatcgccgacgactacctgcgcaccttcctcacccaggacggcgtctcgcggctgcgcaacctgcggcccgacgacgtcttcatcattgacgatgcggacgagatcccggcccgtgacggcgtccttttcctcaagctctacgatggctggaccgagcccttcgccttccacatgcgcaagtcgctctacggcttcttctggaagcagccgggcaccctggaggtggtgtcaggctgcacggtggacatgctgcaggcagtgtatgggctggacggcatccgcctgcgccgccgccagtactacaccatgcccaacttcagacagtatgagaaccgcaccggccacatcctggtgcagtggtcgctgggcagccccctgcacttcgccggctggcactgctcctggtgcttcacgcccgagggcatctacttcaagctcgtgtccgcccagaatggcgacttcccacgctggggtgactacgaggacaagcgggacctgaactacatccgcggcctgatccgcaccgggggctggttcgacggcacgcagcaggagtacccgcctgcagaccccagcgagcacatgtatgcgcccaagtacctgctgaagaactacgaccggttccactacctgctggacaacccctaccaggagcccaggagcacggcggcgggcgggtggcgccacaggggtcccgagggaaggccgcccgcccggggcaaactggacgaggcggaagtctagagctgcatgatctgatagggtttgtgacagggcgggggtggcggcggcccctagcgctatctccctgcctcctgccggctccttggttcttgaggggaccaggagtgggtggggagtggg

SEQ ID NO: 25438 - DNA, 1279 bp, Homo sapiens
  MAP TO AC012313.5; EXPRESSED IN HELA, SIGNAL = 0.8; SWISSPROT HIT: Q9Y573, EVALUE 2.00e-09; EST_HUMAN HIT: BE905729.1, EVALUE 0.00e+00; NT HIT: gi14755583, EVALUE 0.00e+00
atggcggctgcagaggctgtgcatcacatacacctgcagaacttctcacgctctctgcttgagaccctcaatgggcagaggcttgggggacacttctgtgacgtgactgtgcgcattcgtgaagcttcgctgcgtgcccaccgctgcgtgctggcggccggctcacccttcttccaagacaagctgctgctcggccactctgagatccgtgtgcctccggtggtgcccgcgcagacagtgcgacagctggtagagttcctgtacagcggttcgctcgttgtggcgcagggtgaagccctgcaggtgctcacggccgcgtcagtgcttcgcatacagacagttatcgacgaatgcacgcagattatcgcccgcgctcgagccccgggcacctctgcgcccacgcccctgcccacccctgtgcccccgccactcgcacctgcgcagctgcgtcaccgcctgcgccacctgctggctgcacgtcccccggggcaccccggtgctgcacacagccgtaagcagcgccagcccgcgcgtttgcagctgccagcgcccccaacacctgccaaggctgaggggcctgatgctgacccctcactgtccgcggcccctgatgaccgaggtgacgaggatgacgaggaaagtgacgatgagaccgatggcgaggatggcgaaggtggcggcccaggcgagggccaggcacctccttccttcccagactgtgctgctggcttcctcactgctgctgctgacagcgcgtgcgaggagccccctgcacccactggcctcgctgactacagtggtgccgggagagattttcttcggggagctgggtcagctgaggacgtatttccagacagctatgtatccacttggcacgacgaggatggcgctgtccccgaaggctgtcccactgagacccctgtccagcccgactgcatactgtctggatcccgcccgcctggtgtgaagaccccagggccgcccgttgcactcttcccctttcacttgggtgcccctgggccacccgcaccacccccttcagcaccatcggggccagcccctgcgcccccacccgccttctaccccacactccagcccgaggcagcccccagtactcagctgggggaggtcccggctccctctgctgctcccaccacggccccctcaggcacccctgctcgcaccccaggtgctgagccacctacgtatgagtgcagccactgtcgcaagacgttcagctcccggaaaaactacaccaagcacatgttcatccactcgg

SEQ ID NO: 25439 - DNA, 726 bp, Homo sapiens
  MAP TO AL035703.17; EXPRESSED IN HELA, SIGNAL =   1; SWISSPROT HIT: O09127, EVALUE 1.00e-127; EST_HUMAN HIT: AL528782.1, EVALUE 0.00e+00; NT HIT: gi11425791, EVALUE 0.00e+00
acccatgcccaggccatggcgcgctcacccacacaggcatcccgccgctcctcgtagccggcactgcacacgcatttgccgatgggcacgagccactcgccctccgcgctgcagtacatcttgggtgtgtcccgctcctctgagtgccgcacgcactggcccctcacctccaccagtgaggacgagtcggcccccgtcactgcctccgagaaggcagccagattgcgcaccatggcagggcacttcttatagtagatgcggagagagaggatggccaggcaggcacctatgtcctggaaggccaggtagaagccgcgcttgctgaggggacccacactgcgcacctccgtgttgagcttgagacgccgcacaccaaggtcggcacctgtgaagctctcgtcggccgcaatggtgtcgattttgaggaactggctttcttgtgtgctggcccccaggtcgcggtccgactccaggtagtagaggttgaaggtctccttgcaggtgcccagcacaccaggcatgctgttgcagtcgcgcagggtaaacttgatctcagcatagacgcgccgggcgccgtctcgggggacccagctcgtgcgcagccagttgttctggttggggctcatgacgttgcaaacctggtacgtgtggatgggctggaaggactcgtccacctcgttgatggagtcccactgtgggcagagagaacacagccactacagcaga

SEQ ID NO: 25440 - DNA, 577 bp, Homo sapiens
  MAP TO AL121869.18; EXPRESSED IN HELA, SIGNAL = 9.1; NT HIT: gi14766685, EVALUE 0.00e+00; SWISSPROT HIT: P05783, EVALUE 9.00e-68; EST_HUMAN HIT: BE730907.1, EVALUE 0.00e+00
catgagcttcaccactcggtccaccttctccaccaactaccagtcactgggctctgtccaggcgcccagctacggcgcccggccggtcagcagcgcggccagcgtctatgcaggcgccgggggctctggttcccggatctccgtgtcccgctccaccagcttccggggtggcatggggcctgggggcctggccgcggggatggctgggggtctggcaggaatgggaggcatccagaacaagaagaccatgcaaagcctgaacgaccgcctggcctcttacctggacagagtgaggagcctggagactgagaaccgtaggctggagagcaaaatccgggagcacttggagaataagggaccccaggtcaaagactggagccattactgcaagaccatcgaggacctgagggctcagatcttcgcaaatactgtggacaatgcctgcatcgttctgcatattgacaatgcccgtcttgctgctgatgactttagagtcaagtatgagacacagctggcgatgcgccagtctgtggagaacgacatccatgggctccgcaaggtcattgatgacaccaat

SEQ ID NO: 25441 - DNA, 482 bp, Homo sapiens
  MAP TO D87012.1; EXPRESSED IN HELA, SIGNAL = 0.95; NT HIT: gi4507634, EVALUE 0.00e+00; SWISSPROT HIT: O95985, EVALUE 7.00e-75; EST_HUMAN HIT: BG180123.1, EVALUE 0.00e+00
tcatacaaagtaggcggccagggctgacatcttgtccttgggccgtctggggttgggcttcccagggggcctcctggcccggccccgccctcgaccctgccttctccctggtccaccgcggtgcatggggtggcaggaggccgcatgcttcagctccaccagctcctggaagacggggtcacaaaagacgcagcccatgtgctgcgtctcatcgcccgggagtggggacttggccttgttgaagtccacatcaagcaaggcggcctcacagacactgcaggtgtcggcggacacccgcacgcggtgggcgttctcgaagcagtgcgctaccacgttgcacttgttgcaggccaccttccacttggggcccgaggtggggtccagcaccagcaccccgctctcacattccacgcactggccgatgcccagcatgctcagcgagtgctggcaggaggggtgcgtacactcgttgcagcccatgc

SEQ ID NO: 25442 - DNA, 2157 bp, Homo sapiens
  MAP TO AP000467.1; EXPRESSED IN HELA, SIGNAL = 1.2; NT HIT: gi11526218, EVALUE 0.00e+00; SWISSPROT HIT: P53794, EVALUE 0.00e+00; EST_HUMAN HIT: BF725434.1, EVALUE 0.00e+00
atgagagctgtactggacacagcagacattgccatagtggccctgtattttatcctggtcatgtgcattggtttttttgccatgtggaaatctaatagaagcaccgtgagtggatacttcctggcggggcgctctatgacctgggtaacaattggtgcctctctgtttgtgagcaatattgggagtgagcacttcattgggctggcaggatctggagctgcaagtggatttgcagtgggcgcatgggaattcaatgccttactgcttttacaacttctgggatgggttttcatcccaatttacatccggtcaggggtatataccatgcctgaatacttgtccaagcgatttggtggccataggattcaggtctattttgcagccttgtctctgattctctatattttcaccaagctctcggtggatctgtattcgggtgccctttttatccaggagtctttgggttggaatctttatgtgtctgtcatcctgctcattggcatgactgctttgctgactgtcaccggaggccttgttgcagtgatctacacagacactctgcaggctctgctcatgatcattggggcacttacacttatgattattagcataatggagattggcgggtttgaggaagttaagagaaggtacatgttggcctcacccgatgtcacttccatcttattgacatacaacctttccaacacaaattcttgtaatgtctcccctaagaaagaagccctgaaaatgctgcggaatccaacagatgaagatgttccttggcctggattcattcttgggcagaccccagcttcagtatggtactggtgtgctgaccaagtcatcgtgcagagggtccttgcagccaaaaacattgctcatgccaaaggctctactcttatggctggcttcttaaagctcctgccaatgtttatcatagttgtcccaggaatgatttccaggatactgtttactgatgatatagcttgcatcaacccagagcactgcatgctggtgtgtggaagcagagctggttgctccaatattgcttacccacgcctggtgatgaagctggttcctgtgggccttcggggtttaatgatggcagtgatgattgcagctctgatgagtgacttagactctatctttaacagtgccagtaccatattcaccctcgatgtgtacaaacttatccgcaagagcgcaagctcccgggagttaatgattgtggggaggatatttgtggcatttatggtggtgatcagcatagcatgggtgccaatcatcgtggagatgcaaggaggccagatgtacctttacattcaggaggtagcagattacctgacacccccagtggcagccttgttcctgctggcaattttctggaagcgctgcaatgaacaaggggctttctatggtggaatggctggctttgttcttggagcagtccgtttgatactggcctttgcctaccgtgccccagaatgtgaccaacctgataataggccgggcttcatcaaagacatccattatatgtatgtggccacaggattgttttgggtcacgggactcattactgtaattgtgagccttctcacaccacctcccacaaaggaacagattcgaaccaccaccttttggtctaagaagaacctggtggtgaaggagaactgctccccaaaagaggaaccataccaaatgcaagaaaagagcattctgagatgcagtgagaataatgagaccatcaaccacatcattcccaacgggaaatctgaagacagcattaagggccttcagcctgaagatgttaatctgttggtaacctgcagagaggagggcaacccagtggcatccttaggtcattcagaggcagaaacaccagttgacgcttactccaatgggcaagcagctctcatgggtgagaaagagagaaagaaagaaacggatgatggaggtcggtactggaagttcatagactggttttgtggctttaaaagtaagagcctcagcaagaggagtctcagagacctgatggaagaggaggctgtttgtttacagatgctagaagagactcggcaagttaaagtaatactaaatattggactttttgctgtgtgttcacttggaattttcatgtttgtttatttctccttatga

SEQ ID NO: 25443 - DNA, 828 bp, Homo sapiens
  MAP TO AC009288.12; EXPRESSED IN HELA, SIGNAL = 1.2; NT HIT: gi14756466, EVALUE 1.00e-124; SWISSPROT HIT: P08673, EVALUE 1.00e-19; EST_HUMAN HIT: AL110383.1, EVALUE 0.00e+00
ctccccatgaggacaccgtacacgacatcactaacgaggacgccacacacgacatcgctaacgaggatactgtacacgacatcgctaacgaggccgccgacaagggcatcgccaacgaggatgccgcccagggcatcgccaacgaggacgccgcccagggcatcgccaaggaggacgccgcccagggcatcgccaaggaggacgccgcccagggcatcgctaacgaggccgccgacaagggcaccgccaacgaggatgccgcccacggcatcgccaacgaggacgccgcccacggcatcgccagcgaggacgccgcccacggaatcgccagcgaggacgccgcccagggcatcgccaacgaggacgccgcccagggcaccgccaacgaggacgccgcccacggcatcgccaacgaggacgccgcccacggcatcgccagcgaggacgccgcccacggcatcgccagcgaggacgccgcccagggcatcgccaacgaggacgccgcccagggcatcgccaacgaggacgccgtccacggcatcgccaacgaggacgccgcccagggcatcgccaacgaggacgccgcccagggcatcgccaacgaggacgccgcccagggcatcgccaacgagctgtatacgacatcgctaacgaggacaccctacaagccgtcgctaacaagtacactgtacacaacatcgctaatgagggcactgtacaagacatcaccaatgagggcgctttatacgacattgctaatggcaccgacaaggcacgctaacgtggacgctgtacacgacattgctaatgaggacagcgtataagaca

SEQ ID NO: 25444 - DNA, 529 bp, Homo sapiens
  MAP TO AP000356.1; EXPRESSED IN HELA, SIGNAL = 0.54; NT HIT: gi14777830, EVALUE 0.00e+00; SWISSPROT HIT: P28477, EVALUE 2.20e+00; EST_HUMAN HIT: AV720239.1, EVALUE 0.00e+00
ttggggtgaggaagacacctctgccccagtggattagcaagtgtggcaggcttaacatgtccaggttctccccaataacattgtccaggttggttttaaaattcccaggcagggggagagtggcatggggagtgacttcttaatgggtaaggggctgcttacttctggggtattggaaatgtttggggactaggtagaggtgaatgtactaaatgccactgaatttgtatacttcagaatgtttgttatgtaaattttacctcaactaaaaaaaaaaatgcccaggtactgcttgtgcaggtggatttgaggttaggcagatgatgctgtccatcccgtacaccagtgggaagagggtgagggctgatccagagaccctgagcctacagcaaggctgtggtgggtcggatggtctttggatgtgtcagcttagctaggccacagtcaccagtaattcaatcagacactaatctaggtatttctgtgaaggtattttgtagatgtgacagaagtccattcccaattgact

SEQ ID NO: 25445 - DNA, 727 bp, Homo sapiens
  MAP TO AP000557.2; EXPRESSED IN HELA, SIGNAL = 0.2; SWISSPROT HIT: O88671, EVALUE 1.90e+00; EST_HUMAN HIT: AA311249.1, EVALUE 2.00e-79; NT HIT: gi14777593, EVALUE 0.00e+00
cacctccatctcagccactaggcgcccggggatattgcccacttgcctgttgcactcgctgaggtagaaatcatgggtgtcctgagagccccacactcttagcaactgccttttctggaagaccagctcctcctctgcagccttgaggttggcagacatcaccagggggttgtaatcagagagggccacaaagaccctggctggagtgttggcccccgtccccagctgttgggggccacccctgggcatcttgatgactttggcggatggagctggacacagtgccgagctgggctcatggagctggcaccctctcttcacccccagagcttgtccttgcctgctgtggggctcaggctccctcctctcctctcgcctctctgtgccccgcagatccaagcacagtgcctcctgctcctccttcaaaacgttatggaagtcagatgcatactgttggctggcgcccagctggggaggtgtgaacccttgggcatcttgcttttgccgaagtaccctctcaagggcagccttttcctgacacggttctttcctgggcccacactcggtgcgtagatggatgaatcctggagcagggcttttgctggtgcccatgtgctggtagcaattttccttctccccaggctggtcactgactgaaggtggcctgtggttctggggactcttctgaaagagcaggtcctttctacagccctcccaggcctctgca

SEQ ID NO: 25446 - DNA, 958 bp, Homo sapiens
  MAP TO AC012398.4; EXPRESSED IN HELA, SIGNAL = 0.55; SWISSPROT HIT: P18899, EVALUE 2.00e-06; EST_HUMAN HIT: AL110383.1, EVALUE 8.00e-73; NT HIT: gi14756466, EVALUE 1.00e-67
ctccccatgaggacaccgtacacaacatcactaacgaggatgcctcacacgatatcactaacgaggacgctgtccacggcatcgctaacgaggccgccgacaagggcaacgccaacgaggacgccgcccagggcatcgccaacgaggacgccgcccacggaatcgccagcgaggacgccgcccagggcatcgccaacgaggtcgccgcccagggcatcgccaacgaggacgccgcccagggcatcgccaacgaggacgccgtccagggcatcgccaacgaggacgccgcccacggcatcgccaacgaggacgctgcccacggcattgctaacgaggatgccgtgcacggcatcgctaatgaggactccgtatacgacatcgctaatgaggatgccatatatgacatcgctaatgacaccgtacaaggcacgctaaagaggacgctgtacacgacatcgctaatgaggacaccatacaaggcattggtaatgaggacgttgtatatgacatcgctaacaaggacactctacaagccgtcgctaacaaggacactgtacacaacatcgctaatgacggcaccgtacaagacatcaccaatgagggcgctttatacgacattgctaatgataccgacaaggcacgctaacgcggacactgtacacgacatcgctaatgaggactccgtataccacatcgctaatgagggtgccgtatatgacatcgctaatgacaccgtacaaggcacgctaacgaggacgctgtacacgacatcgctaatgaggacaccatacaaggcatcggtaatgaggacgctgtatacgacatcgctaacgaggacaccatacaagccgtcgctaacaaggacactgtacacaacatcgctaatgacggcaccgtacaagacatcaccaatgagggcgctttatacgacattgctaatgataccgacaaggcacgc

SEQ ID NO: 25447 - DNA, 611 bp, Homo sapiens
  MAP TO AL139177.1; EXPRESSED IN HELA, SIGNAL = 1.3; NT HIT: AE006776.1, EVALUE 5.80e-01; SWISSPROT HIT: P08964, EVALUE 5.00e-04; EST_HUMAN HIT: BG272740.1, EVALUE 0.00e+00
cgatgtttcacagctggaacagtaggatccttaagaccaattttactgatttgactctgcacatcttgaatatttttaaggagttcattatttttgaaaatacaagcctctagtaatttgttttcctcagtgaattcctcctgtaccccatagccatgtgtctcagataactttattgaaaaagcatcaagcaggttttcacaggaggtgtcatcaccccgttcagcatctttaaagctcatatcgagcatcttcaaacatttatccaaatgtttggccttgtctttcatcagatgaatttctccctctttattttttactgtcaacgtattttcttgtgccacctgtgtatctgaggctgaaaggtctgtaacgggctcagcagagagtttagctgttctgagagacgccaaaaagtcttccagagctttgagagtatcttcactcctctgcaccctgtggttcattccttcaaattgtgttttgtatttcagtataatattctgcattgcgtgtagatcaaatgggtgtaactcctttaatacaaagttgcctggctcttctaagcggttacatatttcaatctgttttgctatggaatcttggatatt

SEQ ID NO: 25448 - DNA, 1083 bp, Homo sapiens
  MAP TO AC018452.11; EXPRESSED IN HELA, SIGNAL = 0.92; NT HIT: AF143413.1, EVALUE 6.70e-02; SWISSPROT HIT: P33479, EVALUE 1.80e-02; EST_HUMAN HIT: BG772682.1, EVALUE 0.00e+00
ctttatccttcccagactggaaaacttctccttgtcttccatcaccactttcagaacaggctgggacattctgttcttcttcttcgagctggtaggactgtcaaaatcaaagccactgaccactgccctgcgataagacgtggaccgcaagcctctccgcagagaccctgggctatccacgtcgttatcgacctcactctcctcccctgcgtgacccaggggtcctcctaggccctccaccatgctgcgcaccttgaggagtctcttgtggggctccacattttgattgttggatttacttattttaatttccgaggccagactcttcggaatgatctgctgcttccccactttgagggcggcggggctgtttgtactcaaaaccacggaaggattctcgaggagctcgttctcctgggagggcagcctttggagggggagtttttgttccgaagaacttttctggggcccaggaaagagcccccgttcggggtcctttgccttccggccggactgcgaacctgacccaggagagtcgttattagcggcaaggccatttgcagtgggcgaaggcaccgggctggcagtcaacccagtaaggtcctcctcgggggtgcagggggcgggcgcgttaggagtccgcggggggcgcagaaccggcggcggcggcggcgcaggcaaggtcaccgcgccatttgctggggatttcggggagccgccaggcaccgctttggggagcttgggtgacttgggccgtcgaagtcgaggagaggcagccctgtactccggggatgccgtcccaccattggccaccgctctccgctgggcgcccagaagcagggggctcctatgtaccgtcctgctgtccgaggcggtgggcacctgggcgggaatctgcgctgcgaggagcgtccctccgtcctccaccgggaaatccgtaattagtaacccgttggggctctggtaggactggggcctcggcttgctccggcccagaacctggtggggctgaggaatcgaccgcctccgccacaaaggggttatgctgttgctagaaaaatccacctcgctctcgccgtccat

SEQ ID NO: 25449 - DNA, 835 bp, Homo sapiens
  MAP TO AC007688.15; EXPRESSED IN HELA, SIGNAL = 0.59; NT HIT: gi11435919, EVALUE 0.00e+00; SWISSPROT HIT: Q24738, EVALUE 2.00e-03; EST_HUMAN HIT: BI039311.1, EVALUE 0.00e+00
ccatggggcatcattctggagtccctggccatacttggcatcgtggtcacaattctgctactcttagcatttctcttcctcatgcgaaagatccaagactgcagccagtggaatgtcctccccacccagctcctcttcctcctgagtgtcctggggctcttcggactcgcttttgccttcatcatcgagctcaatcaacaaactgcccccgtacgctactttctctttggggttctctttgctctctgtttctcatgcctcttagctcatgcctccaatctagtgaagctggttcggggttgtgtctccttctcctggacgacaattctgtgcattgctattggttgcagtctgttgcaaatcattattgccactgagtatgtgactctcatcatgaccagaggtatgatgtttgtgaatatgacaccctgccagctcaatgtggactttgttgtactcctggtctatgtcctcttcctgatggccctcacattcttcgtctccaaagccaccttctgtggcccgtgtgagaactggaagcagcatggaaggctcatctttatcactgtgctcttctccatcatcatctgggtggtgtggatctccatgctcctgagaggcaacccgcagttccagcgacagccccagtgggacgacccggtcgtctgcattgctctggtcaccaacgcatgggttttcctgctgctgtacatcgtccctgagctctgcattctctacagatcgtgtagacaggagtgccctttacaaggcaatgcctgccccgtcacagcctaccaacacagcttccaagtggagaaccaggagctctccagag

SEQ ID NO: 25450 - DNA, 519 bp, Homo sapiens
  MAP TO AC016940.7; EXPRESSED IN HELA, SIGNAL = 0.51; NT HIT: gi14753375, EVALUE 1.90e+00; SWISSPROT HIT: Q64317, EVALUE 1.40e-01; EST_HUMAN HIT: BG192113.1, EVALUE 0.00e+00
atctactgcaactccaattttcagagagacaagcccaggctcctggagaatatccagagaaaggatgccctcagaaacaccgctcagcaagcgacccgtgtcccaactccaaagagaaagaatctggtagctacaagacgctccctacgtatctatcacatcaatgccaggaaagaagcaatcaaaatgtgtcagcagggagcccccagtgttcaggggcccagtggcacccagtccttcaggcgctctggcatgtggtccaagaagagtgccactaggcatcccctgggaaatgggccccctcaggaaccaaatggcccaagttgggagggcacctctgggaatgtcacatttacatcttcggctactacctggatggaaggcacagggattcttagtagtctggtttactcagataatggtagtgtaatgtctttgtacaatatctgttactatgctctgttggcctccctctcagtcatgtctccaaatgagccctctgacgatgaggaggagtag

SEQ ID NO: 25451 - DNA, 658 bp, Homo sapiens
  MAP TO Z49236.1; EXPRESSED IN HELA, SIGNAL = 0.32; NT HIT: gi16157814, EVALUE 0.00e+00; SWISSPROT HIT: P38931, EVALUE 3.40e-01; EST_HUMAN HIT: BG187725.1, EVALUE 0.00e+00
cttctccgcccgccccagtactcgtgcaggtgccctcatagggtggccatgctcactgctcaaggtcacatgaccccttacacaacgtctcctaaatacctttttatctgaaggacttgagatcttagacacaagagctgcttcgacaaggccctgctccagcaaggagtcatattttatgctcctcttcctgttccttctcgccttgttttctggtttttgtccattttcttctgactgagacacatcagcagcactgtcaccacaaatggaagattcaaagagaggcttcccattcatgtatgttttggtgattttcagcttaatttctggagagccatttttgataggggtagtgttagggggtgtcccaatccctttcatttcctgggactcaaaacgcagtttggcatcgtgtgcgccgggttctccattaaacacccgggaagtaagatctttcagcttgtcggctggaataaagggcagggcgtcgtggccgttaaacttctgcatgaccccctcctgcaggctactggagagctgggctttgctgaggaacacagaacactcgcggttcacctcgcagctcggagtcttcccgttggcactgccgaggatttctggtgcctgcttcatctttatgcactttacaacactc

SEQ ID NO: 25452 - DNA, 996 bp, Homo sapiens
  MAP TO U82672.1; EXPRESSED IN HELA, SIGNAL = 0.4; NT HIT: M77481.1, EVALUE 0.00e+00; EST_HUMAN HIT: BG030623.1, EVALUE 0.00e+00; SWISSPROT HIT: P43355, EVALUE 0.00e+00
tcagactccctcttcctcctctctcaaagctgcttcacgcagggatgggaagaaaaagcgaactcttgcactgaccttgatcacatactcaaggactttcacatagctggtttcagcgagggcccttggaccccacaggaactcatagcgtgcgggatcactgtccggcacctgccggtactccaggtacttttcctgcaccaaatcttgggtgagcagcttcctgggctccccataggcactgtgctccctcccatcatacacctccatcacactcagctcctcccagatttcctcctcaggagcatggccgccctccattgcaatcatgaccaggacaattatcaggaagcctgtcttgggcatgatctgattatcacccagcaggccatcataggagagacctaggcaggtgacaaggacataggagtggccggtggggtctgcttccttcacgtcaatgccaaagaccagctgcaaggactcagaggctttgccgaagatctcaggaaaacagtgcttgtaatttttgatgacactctccagcatttctgcctttgtgactggctccctggctcgatatttgaggagcagaaaaccaaccaaatcagccaccttcttagtgattactgctcggaacaaggactccaggatacaagaggtgcttggcccctcctcttcacggctgctggaaccctcactgggttgcctctgttgagtgaagttgatggtagtgggaaaggcggaggctccctgaggactctggggaggatctgttgacccagcagtgggcacctcctccagggtgcccaggaccagaggagaggaggaggaggcggcagcctgcacacacaccaggcccagggcctcttgttgggcctcaagggcttcctcaggcttgcagtgcagactcctctgctcaagagacatgatgactctcgtcagggcaacaggcaggagtgtgggcaggagctgggcaatgaagacccacaggcc

SEQ ID NO: 25453 - DNA, 476 bp, Homo sapiens
  MAP TO Z84484.1; EXPRESSED IN HELA, SIGNAL = 0.35; SWISSPROT HIT: Q05152, EVALUE 8.00e-04; NT HIT: AL163204.2, EVALUE 1.10e-01; EST_HUMAN HIT: H64974.1, EVALUE 2.60e+00
ccttcctctcggcctctggcctcctggtcttgagctgccttagtcacctcggccgcgtgtttcttgtgaccttgcttcttgcggctgggcttcttgtcgtggtgggctttcttcctgagggctggctcccctgctgcttccaggggctccggatgctgggagataccctccttcccccttggcctcctgctggccttttctctgggctcctcagggcccgtcctcacgaagaagttcagcatggtcttcagccaccccttcttggtgtcttgcgaaggcctctgctcgctggggagaaaatctccggtctcctcgggagtgggggctgcagcggtggtgcagtgagcctctgcagatggagctgggctgtctgaatgtctggcccaatcactggtcgtccagtgaagcgccttcctggagggggcagtgggcagggagagccaatggcagtcccacgactccgagcctttcccggg

SEQ ID NO: 25454 - DNA, 1572 bp, Homo sapiens
  MAP TO AC018702.2; EXPRESSED IN HELA, SIGNAL = 3.6; SWISSPROT HIT: O14423, EVALUE 3.00e-22; NT HIT: gi14768600, EVALUE 0.00e+00; EST_HUMAN HIT: BI060457.1, EVALUE 4.00e-08
atgtcagggaaacggaagcgtgtggtgttgactattaaagataagcttgatataataaagaaacttgaagacggaggttcttccaaacaactggcagtgatttatggaattggtgaaacaacagttcgggatataagaaaaaataaggaaaagattataacttatgcaagcagttctgattccacaagtcttttggccaagaggaaatctatgaagccatccatgtatgaggaattggacagggcaatgctggaatggttcaaccagcaaagagcaaaagggaatcccatatctggaccaatttgtgcaaaaagggcagagttcttcttttatgctttgggaatggatggtgattttaacccctctgccggttggctaactcgttttaagcagcggcacagcattagagagattaacattagaaatgaaagattaaatggagatgagactgcggtggaagatttttgtaataactttcgagattttattgaacgagagaatttacagcctgaacaaatctacaatgcagatgaaactggactcttttggaagtgcttgccttctaggatttcagtaatcaaaggtaaatgcactgtccctgggcacaaatcaattgaagaaagagtcacaatcatgtgttgtgccaatgcaacaggtttacacaaacttaaactttgtgttgtggggaaagcaaagaaacctcgctcctttaaatcaactgacaccttaaacctgccagtctcttatttcagccaaaaaggtgcatggatggatctttccattttccgacaatggtttgataaaatttttgtgccgcaagttcgagagtatttaagatctaaaggcttgcaggaaaaggctgtgctcttgttggataattcaccaacacatccaaatgaaaatgtcctaaggtcagatgatggccaaatatttgctaaatatttaccacctaatgtggcctcattgattcagccttcagatcagggagtcatagcaacgatgaagagaaattatcgtgcaggtcttctccagaacaacttggaagaaggtaatgacctgaaatcattctggaagaagctaactctgttggatgcactttatgaaatagcaatggcatggaacttagtaaaaccagttaccattagcagagcatggaagaagattctccctatggtagaggagaaagagagcctggactttgatgttgaagatatttctgtggctactgtggctgccattttacaacacaccaaaggattggaaaatgtgactactgagaaccttgaaaaatggcttgaagtagacagtactgaaccaggctatgaagtgttaactgatagcgaaatcatcagaagagcacaaggccaggcagatgaatccagtgaaaatgaggaggaggaaatagaactaattccagagaaacatattaatcatgcagctgccctccagtggactgaaaatttattggattatctagaacaacaaggtgatatgattctacctgatagactggtaatacgtaaacttcgagccaccatcagaaataaacagaagatgacaaagtcaagtcaa

SEQ ID NO: 25455 - DNA, 640 bp, Homo sapiens
  MAP TO AC005874.2; EXPRESSED IN HELA, SIGNAL =  14; EST_HUMAN HIT: BG388741.1, EVALUE 0.00e+00; SWISSPROT HIT: P09058, EVALUE 2.00e-98; NT HIT: gi14742855, EVALUE 0.00e+00
ccagcgccgagtgatgggcatctctcaggacaactggcacaagcgccgcaagactggcagcaagagaaagccctacgacaagaagcggaagtatgagttggggcacctggctgccaacaccaagattggcccccaccacatccacacagtccgtgtgtggggaggtaacaataaatacggtgccctgaggcgggacatggggaatttctcctggggttcagagtgttgtactcgcaaaacaaggatcactgatgttgtctacgatgcgcccaatagcaagctggtccgtaccaagaccctggtggagaactgcttcgtgctcactgacagcacaccgtaccaccagtggtatgagtcccactatgcgctgcccctgggctgcaagaagggagccaaactgactcctgaggaagaaaagactttaaacaaaaaacgatctaaaaaaattcagaagaaatacgatgaaagggaaaagaatgccaaaatcagccgtctcctgggggagcagttccagcagggcaagcttcttgcatgcgtcgcttcaaggctgggacagtgtggccaagcccatgtctatgtgccagggggcaaggagatggagttctatcttaggaaaatcaaggcccggaaaggcaaataa

SEQ ID NO: 25456 - DNA, 804 bp, Homo sapiens
  MAP TO AC013648.3; EXPRESSED IN HELA, SIGNAL = 6.2; EST_HUMAN HIT: BE531080.1, EVALUE 0.00e+00; SWISSPROT HIT: gi1351900, EVALUE 9.00e-19
acaaggacgtgactgccaaagacagcaagttcaaaatgcccaagttcaagatgccatcctttgggatgttgtccccaggcaagtccatcgaggtctcggtggatgtgtctgcgccaaagatggaggccgacatgagcattccctccatgcagggggacctcaagaccactgacctccgcattcaggccccttccgccgacctggaggtccaggctggccaggtggacttgaaacttccagaaggccacatgcccgaggtagccggcctcaaagggcacctgcccaaggtggagatgcccagtttcaagatgcccaaagtggacctcaagggcccccaggtggacgtcaagggccccaagctggacctgaaaggcccaaaggcagaggtgatggcccccgatgtggaggtgtctctgcccagcgtggagacggatgtccaggccccaggatccatgctggatggtgcgcggcttgagggggacctgtccctggcccacgaggatgtagctgggaaagacagtaagtttcaaggaccaaaactgagcacgtctggttttgaatggtcgtcaaagaaagtttccatgtcttcctctgaaatcgaaggaaatgttacattccatgagaagacttccacatttcccattgtggaatctgttgttcatgaaggtgatcttcatgatccatctcgcgatggtaacttggggcttgctgttggagaagttggaatggattcgaagtttaagaaactgcattttaaagtgcccaaagtttcattttcttctaccaaaactcctaaagatagtt

SEQ ID NO: 25457 - DNA, 1713 bp, Homo sapiens
  MAP TO Z97986.3; EXPRESSED IN HELA, SIGNAL = 0.83; NT HIT: gi13648149, EVALUE 0.00e+00; EST_HUMAN HIT: BE244620.1, EVALUE 0.00e+00; SWISSPROT HIT: P27398, EVALUE 7.00e-06
atggatccattctgggtggaggcagcccccaccgccgcctgcctcaaatgctcagccctaggccctcggccccgtagctctgcagccacagacgggtgccttccccaggccgagaggagggtggggtccagccactcaggacctcacagggtggccctgatgagcaccttcccttgcagccacacccactcgcccgggtctatggccacggtcggagagtggtcctgtgtgcgctgcaccttcctgaacccggccggccagcgccagtgctccatctgcgaggctccccggcacaagcccgacctcaaccacatcctgcggctcagcgtggaggagcagaaatggccctgcgcccgctgcaccttccgcaacttcctgggcaaggaggcctgcgaggtgtgcggcttcaccccggagcctgcgcctggggctgccttcctgccagtcctcaacggggtcctccccaagccacccgccatcctgggggagcccaagggcagctgccaggaggaagcaggtccagtgaggactgcggggctggtggccacggagcccgccagggggcagtgcgaggacaaggacgaggaggagaaggaggagcaggaggaggaggagggagcggcggagcccagagggggctgggcgtgtccgcgttgcacgctgcacaacacgcccgtggccagctcctgctccgtctgcgggggcccacgcaggctctcgctgccacggatccctcctgaggccctggtggtcccggaagtggtggccccggccggcttccacgtcgtgcctgccgcgcctccacctggcctccccggggaaggtgccgaggccaaccccccagccaccagccagggcccagctgccgaaccagagccgcccagggtcccgcccttcagccccttctcgtccaccctgcagaacaaccccgtgccgcgcagccgacgcgaggttcccccccagctgcagccaccggtgcctgaggctgcccagccgtcaccctctgccggctgcaggggagccccccagggctcgggctgggctggggcctcccgcctagcagagttgctgtctggcaagcggctgagtgtgctggaggaagaggccacggagggtggcaccagccgcgtagaggccggcagctccacctcgggcagtgacatcattgacctggccggagacaccgtgcgttacacgcccgccagcccctccagccccgacttcaccacctggtcatgtgccaagtgcacgctcagaaaccccacagtggcccccaggtgctcggcctgcggctgctccaaactgcacggcttccaggagcatggcgagccccccacccactgccccgactgtggggccgacaagcccagcccctgcggcagaagctgcggacgggtgtcctcggcccagaaggccgcccgcgtcctgcccgagcgcccgggccagtgggcctgccctgcctgtaccctgctcaacgcactgcgggccaagcactgcgccgcctgccacacgcctcagctcctggtggcccagcggcggggggccgcgcccctgaggcgcagggagagcatgcacgtggagcagcggcggcagacagacgagggcgaggccaaggcactctgggagaacatcgtggccttctgccgggaggtgaggcgccccctcgccctcttcctgctcctgagcctcctgctcccgccctccccttcctag

SEQ ID NO: 25458 - DNA, 554 bp, Homo sapiens
  MAP TO AC005768.16; EXPRESSED IN HELA, SIGNAL = 0.3; NT HIT: gi14781110, EVALUE 0.00e+00; EST_HUMAN HIT: BG912689.1, EVALUE 0.00e+00; SWISSPROT HIT: P37709, EVALUE 3.00e-08
gccaggatgaggctgaggccagcatggaggcgctgcgggaagcgcaccaggaggagctccagaatgcggtggcagagaccaaggccaggctcctgcaggaacagggctgcgcagaggaggaagcccttctacagcgcatccaggccctggagagcgccctggagctgcaaaagaggctgacggaggaggcgctggctgagtcggcctcgtgcaggctggagacgaaggagagagagctgagggtggaggcagagcacgccgagcgagtcctcacgctctccagggaaatgctggagctcaaggctgactacgagaggaggctccagcacctgacgagccacgaggctaccccgcagggccggctgccccaggagagccctgaaaccaagtcggagccaggccagggcccggagatgcaggaggtcctgctagaggtgcagcggctgcgagtggagaaccagcagctgagcaaggactacgcccgcaaggccgaggagctgcaggccacctacgagagggaaaacgaggccatccggcaggccatgcagcagtcg

SEQ ID NO: 25459 - DNA, 677 bp, Homo sapiens
  MAP TO Z98885.1; EXPRESSED IN HELA, SIGNAL = 0.69; NT HIT: AF005637.1, EVALUE 4.20e-02; EST_HUMAN HIT: AI693676.1, EVALUE 2.00e-05; SWISSPROT HIT: Q9WTN3, EVALUE 7.90e-01
atccattagaaagagacaaacaagccaacaaaatgatgcacaaaacccaaatcaacaaagaaacccatgtcataatcaggcttcttgcagagaacatggaaaggccaatcatcttactagtaaatttggaaatgcaaacaaaatacacaccaaataggcaccagcgttcatatgtggcaatactcagcgatggcaagatggcagagcaataccctgctggccagaatgtcgagtgggacaattatttggtaaatatcttggtcataaggcgttacccagtgaaagtggacatgtttatcagttacctcttgctgcaaaacaaaccacccccaaaactttgtagctcaaaacagcagtcattccttttgttcacacatctgctatttgggcaggattcagcaggtacaactagactacttcctgcatccttatctggggcacctccactaggggctggaggagccacttccaagatggtgcactcacgtggctgggaccttgatccaggctctgggctgagggccttgggaacatcctcatggaatagtagccatgctgcaggagcaagggtctcaagagaagcaggtgggacctgtatcacttttcacatcctagcttctgaagtcacacgcatcacttctgccatagggacaagcctgtccagattcaagagttag

SEQ ID NO: 25460 - DNA, 639 bp, Homo sapiens
  MAP TO AC004990.1; EXPRESSED IN HELA, SIGNAL = 0.4; SWISSPROT HIT: O46392, EVALUE 4.30e-01; NT HIT: gi16175845, EVALUE 0.00e+00; EST_HUMAN HIT: BI544306.1, EVALUE 5.00e-33
tcatctgctggcggccgaggcgccgggtttgaggacgctgggcagcttgtcagaacccggcaccttccagggccccggcgcgacggcggccttgcgcgccggggcgccccccgggggtcgcgggcccggccggggacccgcgcgcgcacccgccctgccctcggcctccagcgcgccgctgccgccgccgcccgggccggcaaacgccggcgcagcccccgggccttcgcgccggcagagctcggagcccgccgccgcacggggcgcctccttcccgcccgcccgcgccgcgtccgccgcgtctgccgccgcgagcccgggcgccctggcctccgaggcgggcctgccggcctcgggccgcccctggccgccgggcgcctcctcgagcctcggccgcgcggccctctgcggactcgccgagcgctccctctgctccccgaggcgctgcttcttctggccgcaggctgaaagctcctttggtttcctaacgtcgtgttcccgtttgatatcccaagttgggcctgggcttatctggtgggaagggtcggagggtggggctggatgtgatggagagaatggagcgaggccgtcgtccagggagacgcctacttccggcagacctggggcggcggcagcggg

SEQ ID NO: 25461 - DNA, 637 bp, Homo sapiens
  MAP TO AL008726.1; EXPRESSED IN HELA, SIGNAL = 0.66; SWISSPROT HIT: Q9NRS6, EVALUE 2.00e-05; NT HIT: gi15303763, EVALUE 0.00e+00; EST_HUMAN HIT: AL518047.1, EVALUE 0.00e+00
gcatgcccgggcctctccagggtcttccagctcctggtggcacacggccagcccagccagggtcagcagggggcggtctgggccagagggggtgcccagctgggcttgcagctgccaggcattggcccagagtgccagagcctcacgatagaggccagtacaggtgaggctctgtgcccgccgcagctccggcagcacgaagaagtcctgcaggtccggggcatggcgcagctcaggcactgcctgcaggtgacccaaaaactgctcaaaggcccggctacggcgggcaatggtctctgcagtaaaattccggcgcagccgcttacgggggaaggagatggcagccattgggccccggaattgccgctgcaggtttcggtgcagccgctcaaagtccgagtaacggcgagagatctgggctggctggcaatctggcggtcctgggccgatcacggcgagggtgtagagctgcagggagggtgggtgtcagggcaaatgcaagttgtccacgggcccgttccctccccatccttccccatcccccacactcccagctgtacctccccacctcttcctttcacccctgggacagcacccaggagggcgggagctgctgcgcagtggcggggaagcccag

SEQ ID NO: 25462 - DNA, 1086 bp, Homo sapiens
  MAP TO AC004659.1; EXPRESSED IN HELA, SIGNAL = 0.3; EST_HUMAN HIT: BG204873.1, EVALUE 1.00e-31; SWISSPROT HIT: O60412, EVALUE 0.00e+00; NT HIT: gi14767378, EVALUE 0.00e+00
gggtttgaataaaggatattgcagtcattctggggaatgcttatttggagtaaattttgtgtggctgttttttttcctccttctcggcaaacccagcggccccatggaaagaggaaaccaaacagaagttggaaactttctcctcctgggattcgcagaggactctgacatgcagcttctcctccatgggctgttcctctccatgtacctggttaccatcatcggaaacctgctcatcatcctgaccatcagttcagactcccacctccacacccccatgtacttcttcctctccaacctgtcctttgctgacatctgtttcacatccacgactgtcccaaagatgctggtgaatatccaaacacaaagcaaaatgatcacttttgcaggctgcctcactcagatattttttttcattgcatttggatgcctggacaatttgctcctgaccatgacggcctatgaccgcttcgtggccatctgttaccccctgcactacacggtcatcatgaacccccggctctgtggactgctggttctggggtcctggtgcatcagtgtcatgggttccttgcttgagaccttgaccattttgaggctgtccttctgcacaaatatggaaattccgcactttttttgtgatccttccgaagtcctgaagctggcctgttctgacaccttcatcaataacatcgtgatgtattttgtgaccattgtcctgggtgtttttcctctctgtggaatcctattctcttattctcagattttctcctccgtcctaagagtatctgccagaggccagcacaaagccttttccacctgtggttcccacctctcagtggtcagcttgttctatggcactggccttggggtctatctcagttctgcagttacaccaccttctaggacaagtctggcagcctcggtgatgtacaccatggtcacccccatgctgaaccccttcatctacagcctgaggaacaaggacatgaaggggtcactggggagactcctcctcagggcaacgtctctcaaagaggggaccattgctaagctctcatgaattgcagtgaacacaatactgag

SEQ ID NO: 25463 - DNA, 2186 bp, Homo sapiens
  MAP TO AC010328.4; EXPRESSED IN HELA, SIGNAL = 0.44; NT HIT: gi14754700, EVALUE 0.00e+00; EST_HUMAN HIT: BE734288.1, EVALUE 0.00e+00; SWISSPROT HIT: Q05481, EVALUE 0.00e+00
atatccctcctaaatgtacaatcaaggatttgctaccaaaagagaagagcagtacagaagcagtattccacacagtggtgttggaaagacacgaaagccctgacattgaagacttttccttcaaggaaccccagaaaaatgtgcatgattttgagtgtcaatggagagatgacacaggaaattacaagggagtgcttatggcccagaaagaaggtaaaagagatcaacgcgacagaagagacatagaaaacaagcttatgaacaatcagcttggagtaagctttcattctcatctgcctgaactgcagctatttcaaggtgaggggaaaatgtatgaatgtaatcaagttgagaagtctaccaacaatggttcctcagtgtcaccacttcaacaaattccttctagtgtccaaacccacaggtctaaaaaatatcatgaacttaaccatttttcattactcacacaaagacgaaaagcaaacagttgtggaaaaccttataaatgtaatgaatgtggcaaggcgttcactcagaattcgaaccttacaagtcataggagaattcatagtggagagaagccttacaaatgcagtgagtgcggcaaaacctttactgttcgttcaaatctaactattcatcaggtcatccatactggagaaaaaccttacaaatgtcatgagtgtggcaaggtcttcaggcacaattcataccttgcaactcatcggcgaattcatactggagagaaaccttacaagtgtaatgagtgtggaaaagcctttagaggacattcaaacctaactacccatcagttaattcatactggagaaaaaccgttcaaatgtaatgaatgtggcaagctcttcactcaaaattcacaccttataagtcattggagaattcacactggagagaaaccttacaagtgcaatgagtgcggcaaagcctttagtgttcgttcaagcctagcaatccatcagacaatccacactggagaaaaaccttacaaatgtaatgaatgtggcaaagtctttaggtacaattcatacctcggaaggcatcggagagttcatactggtgagaaaccttacaagtgtaatgaatgtggcaaagccttcagtatgcattcaaacctagctacccatcaggtcatccatactggaacaaaacctttcaaatgcaatgaatgcagcaaggttttcactcaaaattcacaacttgcaaatcatcgaagaattcatactggagagaaaccttacaagtgtaatgagtgtgggaaagccttcagtgttcgttcaagtctgactacccatcaggcaatccattctggagagaaaccttacaaatgtattgaatgtggcaagagcttcactcaaaaatcacaccttagaagtcatcggggaattcattctggagagaaaccttacaagtgtaatgaatgtggtaaagtcttcgctcaaacatcacaacttgcaaggcattggagagttcatactggagaaaaaccttacaagtgtaatgactgtggcagagcctttagtgatcgttcaagcctaacttttcatcaggcaatacatactggagagaaaccttacaaatgtcatgaatgcggcaaggtttttaggcacaattcataccttgcaactcatcggcgaattcatactggagagaaaccttacaagtgtaatgagtgtgggaaagcctttagtatgcattcaaacctaactacccataaggtcatccatactggagagaagccttacaaatgtaatcaatgtggcaaggtcttcactcagaactcacaccttgcaaatcatcaaaggactcacaccggagagaaaccttaccgatgcaatgagtgtgggaaagccttcagtgttcgttcaagcctaaccacccatcaggcaatccatactgggaaaaaaccttacaaatgtaatgaatgtggcaaggtctttactcaaaatgctcacctggcaaatcaccgaagaattcatactggggagaaaccttacaggtgtacagagtgtgggaaagcctttagggtaagatcaagtctaactacccatatggcaatccacactggagaaaagcgttacaaatgtaatgagtgtggcaaggtcttcaggcagagttcaaatcttgcaagtcatcacagaatgcataccggagagaaaccttacaaatga

SEQ ID NO: 25464 - DNA, 567 bp, Homo sapiens
  MAP TO AC004231.1; EXPRESSED IN HELA, SIGNAL = 0.42; NT HIT: gi13652014, EVALUE 0.00e+00; EST_HUMAN HIT: W95802.1, EVALUE 2.00e-07; SWISSPROT HIT: Q99456, EVALUE 8.00e-32
atggatctctccaacaacaccatgtcactctcagtgcgcacccccggactgtcccggcggctctcctcgcagagtgtgataggcagacccaggggcatgtctgcttccagtgttggaagtggttatgggggaagtgcctttggctttggagccagctgtgggggaggcttttctgctgcttccatgtttggttctagttccggctttgggggtggctccggaagttccatggcaggaggactgggtgctggttatgggagagccctgggtggaggtagctttggagggctggggatgggatttgggggcagcccaggaggtggctctctaggtattctctcgggcaatgatggaggccttctttctggatcagaaaaagaaactatgcaaaatcttaatgatagattagcttcctacctggataaggtgcgagctctagaagaggctaatactgagctagaaaataaaattcgagaatggtatgaaacacgaggaactgggactgcagatgcttcacagagcgattacagcaaatattatccactgattgaagacctcaggaataag

SEQ ID NO: 25465 - DNA, 481 bp, Homo sapiens
  MAP TO AL121749.7; EXPRESSED IN HELA, SIGNAL = 0.93; NT HIT: gi15595198, EVALUE 4.60e-01; EST_HUMAN HIT: BI833289.1, EVALUE 0.00e+00; SWISSPROT HIT: P40764, EVALUE 8.80e-01
tcaggtgtccgctccgccttccggtctggatttgctcctgggtgtccagcaggaaggagactgtgtgcacctcgcccgactgcggccggagcgcggcgctgacttttccaggcggcgggggtccgtctgtcccggcggcggacggacgaaggacggacgccggagaaagagggcggcggcctgggccgaggcgggtccccaactccggcggcggcggcggcggcttggccttgggggcgggcatgagcccccgggggccgagtggtggccgccagggctgacccggcgcggcaagcggcccggcccagccatcttgactgcgcaccgcggccccagaggaaacttgcggcgcctccgccctctctgtccggcggagtcaccgccgcccggcgcggcggggagaagtggtcgggcgcgcggagaggaggcgagcgagcgcgggccgatgagccgaggcccggccgctctgcgccgcgagggc

SEQ ID NO: 25466 - DNA, 572 bp, Homo sapiens
  MAP TO AL163202.2; EXPRESSED IN HELA, SIGNAL = 0.63; NT HIT: AL163202.2, EVALUE 0.00e+00; EST_HUMAN HIT: BG009093.1, EVALUE 5.00e-36; SWISSPROT HIT: P42825, EVALUE 1.30e-01
acaatcacagcagtgttctggaaaccaatgtgaggaccaaacactcagaacccagcagcagtgttctggaatatttggtaagggacgaacattcagacaatcttagcagtgttctggaatccaaagtgacggagaaacactcagaaacgagctgcagtgttctagaattctatgtgagggacaaacactcagaacccagcagcagtgttctggaatccttagtgaatgacaaacgctcagaacccagaagtagtgttttagactggtttgtgagatacaaacattcagaccctcaaagcagtgttgtggaatcctatttgagggacaaacactcatcacacagccactgtgttctggaatcctatctaaaggacaaatattcggagcctcttagaagtgttctggaatcctatgtcagggacaaacattcagaaaccagcagcagtgctctggaatcctttgtgagggacaaacaaacagagcccagcagctgtgttctggaatccgatttgatggacaaacactcagaacccagcagcagtgttctggaatcctttgtgagggacaaacat

SEQ ID NO: 25467 - DNA, 595 bp, Homo sapiens
  MAP TO AP000344.1; EXPRESSED IN HELA, SIGNAL = 0.5; NT HIT: U09506.1, EVALUE 1.40e-01; EST_HUMAN HIT: AW375630.1, EVALUE 3.30e+00; SWISSPROT HIT: Q61467, EVALUE 4.40e+00
gatggaggtggagaggtttgggggagttcatttgaagcccccagatatgcccactctcccaagtcctacccaactgcttagaagttaaggccagttcctaggattttactctgcacatcatgtaattccacatgggaaaccagagggtgttccccagaaaaaagcaataaccccaaccaactgccacttaaacaagagacatactgcttacagctgaagtggtgccagaggtgttacacgtattaaacaaaaatgagatctattgtgaggcttggtatgctccagcctcacccatcacaatctgcagagtcatcacgaaccagaaattggcttcagaggctgcagccagaccctggcaaaacccaggagtggccaaaagattctctgtttgcagaattggctagtgtcacaagcgggcatgtgatcgagcagtggatcaagagaagaactaatccttaccttttatattttgcgaacacagcaccgtaaagtcttcataggccaagagccagggccgtttcccgggttgcaaaggtcagctggctagggcaacaggcaggatggttaacaggcacgtgtgtgtgcgtgtgtgtgt

SEQ ID NO: 25468 - DNA, 582 bp, Homo sapiens
  MAP TO AL163246.2; EXPRESSED IN HELA, SIGNAL = 0.46; SWISSPROT HIT: P27918, EVALUE 1.70e-01; NT HIT: AL163246.2, EVALUE 0.00e+00; EST_HUMAN HIT: AI050027.1, EVALUE 4.00e-09
attgttacatgggcagccatgggcaggcccatgtaaaagcaccacgagatccccctcagaactggcagcctgccgccaggcttcagaccttccccggcctaaaggtggggcttcactggggacctgctcccttctgcccatgaacctgccatccttctcctgctgttcaaggcaaccaggctgcctgactttgctcctatctcctggcacaaaaaaagagagaagccagacatcaagaacaggcacctccgaacctgcaaggacaggggccttcctgagcgagagtgcagggaggttttcccaggcctccaagagtgtgaggatgcctgagtctgcagccgctgtttgggcagttgcagctgtgcctgggagtggggcaggactcctgcctgctccacggagcgaggctgtgtatgcagctgtggtttgggcagctgcagcagcacccggggagctaccaccccaactcagaaggggtggggctccagcttgtccatggtcccctggctccacacagtaggcagccccaaccgcacctccctgctccagccgggtgatggcagtggcaggttgtctggaggg

SEQ ID NO: 25469 - DNA, 1002 bp, Homo sapiens
  MAP TO AL137861.1; EXPRESSED IN HELA, SIGNAL = 0.46; SWISSPROT HIT: P18175, EVALUE 2.00e-09; NT HIT: AL163202.2, EVALUE 1.00e-101; EST_HUMAN HIT: AW976364.1, EVALUE 4.00e-75
atgaaggacaagcattctgactcttgtagcagttttctggaatcctatgtgagggacaaaccttcagacctcagcagcagtgttctgggatcctatgtgagggacaaacattcagaccccaggagcagtgttcttggatgccatgtgagagacaaatcttcagaccacagcaggaatgtgctccaatcctatgtgaaggacaagcattctgactcttgtagcagttttctggaatcctatgtaagggagaaacattcagaccccagtagcagcgttgtgaaatcttatgtgagggacaaacattcagaccctcctagcagtgttctggaatcctatgtgagggacaaacattcagaccctcctagcagtgttctggaatcctatgtgagggacaaacattcagaccctcatagcagtgttctggaatcctatgtgaggaacaaacattcagacaactgtaggattgttctggaatcctatgtgagggagaaacgttcagaccctcgtaacagtgttctggaatcctatgtgagggacaaacattcagaccagagcaggagtgttctggaatcgcatgtgacgaaaaaactttcagagcacagtaggagtgttctggaatcctacgtgatggacaaacattcagaacccagcagcagtgttctggaatattatgtgaggggcaaaagctcagactccagcagcagtgttcttgaatgctatctcagagacaaacattcagaccacagttggagtgttctggagtcctatgtgagggacaaacattcagatcacagcaggagtgttctgaaatcctatgtgagggacaaacattcagatcacagcaggagtcttctggaatcccttgtgaaggacaaacattcagacacttgtggtagtgttctggaatcctatgtgagggacaagcatgcagaacactgcaggagtgttctgaaatcctatgtgaggaacaaacattcagaccacactaggagtgttatgtaa

SEQ ID NO: 25470 - DNA, 1738 bp, Homo sapiens
  MAP TO AC005300.10; EXPRESSED IN HELA, SIGNAL = 0.53; EST_HUMAN HIT: BG472529.1, EVALUE 2.00e-87; SWISSPROT HIT: P91645, EVALUE 9.10e+00; NT HIT: gi14776795, EVALUE 0.00e+00
tcaattctgagaggccacagccagggtgttgacatagccatgagcacccccctcgttctccgagatgcagtggcccagctgggagcctccctgaggtggtggcggaggtggtggaggggcggagggcggagcaccgtagccccctctggcccgactcggggaggcccgattgccccggtcccagcagccctccagggcctccaggccccggcagccgaggaagaagaggttcttgagcatgaagatggagaggggctgctggtagctgaccaccaggaggcagcgcagcgccagcaagggcacgtccaccaggcagccgcccagcaggcgcagaaggcggctgcagctgccaggcccggaggcctggccccaggatgcagccgctgcggccgcggcgttgagctcgtagagccagagcaccggcgaggcgagggtgaggaagtagacggcgataagcaggtagcgcaggtgcgcgggcagcggcacgcggccctccagcatcagctccaccagcgtgaagctgtcgagcaggtccaagcacgtgcccaggaagcatccggccgcgcggtgccgctggggctgcagcagcaggggtcctgccgatcccgggggcgcgcccgcctcgctgatggcccgcaccaagctgtagagcaggggcaccgacagcgccatggtgagacggaagcccgtggtgccgaagggcgcgcgtagctcgatgaggtctaggatggacgtgcccaggatcagcaccaccttgggagtgaaggcgatggagtagataagccaggccaggtaggcgaaggcgaactcgcccgctgccgcggccgcccccaggccgccccccgcgccgccggcgcccccgcgggctccgcgtgccttggccccagcggtagcggccgagggggcgggcagatgcaggggcggcgcggcgtggtggtggtgcaggtggtggttgtgcgcgccgctggctgcgccgccccgacggccccggctgttcttggcgaagaagatggcccagcccaccaccaccaccaggtcagtggcgatccaggagcaccagtacaggtcggtgacggcgatgaggtacaggtccagcaggccgccctgcgccagcagcagcaccacggacagcgcctggtagccccagcggcacctgggactgggggcgcagccgcggcgccgacctctgcggccggggcggtctgggcagccgcagcagcagcaacacgggcagcaggaggcgccgctgccggtcccggtgccgcccgcgccccccgccgagcggctcccggggcccccgacggccccggccgcggcgcccccgccgaagtccgcggctgtcatgctgcaggaagaggtgggcgtggaggtggaggaggaggtggccgctgaggaggagaaggcgacaggcgcggggccggcgggggcgcccacctgagccggcggccccaggagcgcggcgttgggcaccagcggcttgctgacgctgaggctctcgtcgtcgtcctcgcgctcggcgcccgtgctgctgctcggggagccgccgcccccgccgcgtctgccgccgcctcccccgcggctggtgctggtgctggtgctgctgtcgccggagcctctccggccgcggaaggagcccccgcggaggaagaggggctgcagccgggcggctgccgggggcggcgggaaggaaccggacgcggaggagaccgagcgagggtggccgagcgccgggcgcatt

SEQ ID NO: 25471 - DNA, 681 bp, Homo sapiens
  MAP TO AC009079.4; EXPRESSED IN HELA, SIGNAL = 0.35; NT HIT: gi14774585, EVALUE 1.00e-94; EST_HUMAN HIT: BI560783.1, EVALUE 0.00e+00; SWISSPROT HIT: O88935, EVALUE 7.00e-02
atggcggcctcggaggcggcggcggcggcggggtccgcggctctggcggcgggtgcccgggccgtcccggcggccacgacaggagccgccgccgccgcctcgggcccgtgggtgcccccgggaccccgactgaggggcagccggccgcggcccgcgggggcgacgcagcagcccgctgtccccgcgccgccggcgggggagctgatccagccgtcggtgagcgagctgtcccgggccgtgcggaccaacatcctgtgcaccgtgcgcggctgcggcaagatcctgcccaacagccccgcgctcaacatgcacctagtcaagagccaccgcctgcaggtgagcccgacgcggccggcggcccggggggccgggcctggctccaacaaagcgcccggcgccggcgcgcgaagccggcctcggggggacgagcgccctgcgcgctgccgctgccgctgccccaccggcctctgccctccccggccggaggcggctctcgaaccctcgcggcaggcgccgcaggtgcggcctctgggggggaggaggagctgggagccccgggtccgccgtacgcgccagttccctggttccctggctccctggccccgagtgtcgtgccggacgccggcccaggctttttacacttttttgcctgtgagttcttaacggcgttttggcgaggga

SEQ ID NO: 25472 - DNA, 91 bp, Homo sapiens
  MAP TO CHR14.3; EXPRESSED IN HELA, SIGNAL = 3.4; EXPRESSED IN HEART, SIGNAL = 6.4; EXPRESSED IN FETAL LIVER, SIGNAL =  28; EXPRESSED IN LUNG, SIGNAL = 1.9; NT HIT: M25765.1, EVALUE 3.00e-44; EST_HUMAN HIT: AV696794.1, EVALUE 9.00e-30; SWISSPROT HIT: P00167, EVALUE 2.00e-06
ccaaccgagacggccgagcagctggacgaggccgtgaagtactacaccctagaggagattcagaagcacaacgacagcaagagcacctgac

SEQ ID NO: 25473 - DNA, 122 bp, Homo sapiens
  MAP TO CHR14.3; EXPRESSED IN FETAL LIVER, SIGNAL = 1.2; EXPRESSED IN HELA, SIGNAL = 1.2; SWISSPROT HIT: P49719, EVALUE 2.00e-17; EST_HUMAN HIT: AV730974.1, EVALUE 2.00e-62; NT HIT: gi11434083, EVALUE 1.00e-62
gttactgaatcaaatggatggatttgatactctgcatagagttaaaatgatcatggctacaaacagaccagatacactggatcctgctttgctgcgtccaggaagattagatagaaaaatac

SEQ ID NO: 25474 - DNA, 80 bp, Homo sapiens
  MAP TO CHR19.3; EXPRESSED IN HEART, SIGNAL = 1.7; EXPRESSED IN HELA, SIGNAL = 1.8; EXPRESSED IN LUNG, SIGNAL = 1.5; EXPRESSED IN BONE MARROW, SIGNAL = 2.2; NT HIT: gi12741684, EVALUE 4.00e-37; EST_HUMAN HIT: BE836109.1, EVALUE 1.00e-37
cgcctgttcggatagggtcagctccgttctactagaatccacacaagtcgaccctagctatctcacaaagccccaaggcc

SEQ ID NO: 25475 - DNA, 421 bp, Homo sapiens
  MAP TO CHR16.3; EXPRESSED IN FETAL LIVER, SIGNAL = 0.82; EXPRESSED IN PLACENTA, SIGNAL = 1.4; EXPRESSED IN HELA, SIGNAL = 1.9; EST_HUMAN HIT: AA708475.1, EVALUE 1.50e-01; SWISSPROT HIT: P04280, EVALUE 2.40e-01
cttggccatgacttcatcatgaccctccaccatcttccggagcttgatcagatgccacaggtcctggacgggccgggcagtgccctggctggcttccagcagctgggcagtggagggcaggtcctgcagcagggccagctggttctccaacttgtcgaggcggctcaccacgtggtcgaagacattgctgagcctcttcatggggttgaggataggctgggcgtctccttccctgggcatgatgaccacctgcgaggtctgcaggaagtcctcatcgcctgagaggactttcttgagctcggccatgtggatgtgctccaagatgccgtgcagcaggaggtgcagggccttgaagttcagcaccccgcactgtgggatggcgatgttggccagctcggtgaacgtgagtgagaagctcatc

SEQ ID NO: 25476 - DNA, 230 bp, Homo sapiens
  MAP TO CHR16.3; EXPRESSED IN HELA, SIGNAL = 0.9; EXPRESSED IN PLACENTA, SIGNAL = 0.97; EXPRESSED IN BONE MARROW, SIGNAL = 0.94; EXPRESSED IN FETAL LIVER, SIGNAL = 1.3; EST_HUMAN HIT: BF962847.1, EVALUE 2.00e-30; SWISSPROT HIT: P27321, EVALUE 1.20e+00; NT HIT: D86330.1, EVALUE 9.00e-04
gcagtattcctcgggggtccctgggccagaaagacatcagctcggagttcctccagcaactcaaagaagagagaaagctgttccccaaactcttccgctgtagcgccttctgggtccctggtagatgccttcttgtgctcaaaaccggttatcactgtgaaaaattgaaagacgccatgcgcagacactggttgctaaacgtgcttttgccctccaggggcagacgctga

SEQ ID NO: 25477 - DNA, 254 bp, Homo sapiens
  MAP TO CHR19.3; EXPRESSED IN HELA, SIGNAL = 0.97; EXPRESSED IN FETAL LIVER, SIGNAL = 1.1; EXPRESSED IN PLACENTA, SIGNAL = 1.1; SWISSPROT HIT: P49305, EVALUE 1.00e-03; NT HIT: gi11425216, EVALUE 1.00e-128; EST_HUMAN HIT: BF431299.1, EVALUE 1.00e-112
ggccatctggacccgcttctttcctgcctccgaggctctgaggtctgttttggcccagggaactctaggagacctccgggtggctcgggcagaatttgggaagaatctcatccacgttccccgggccgtagaccgggcccaggctgggggggccctgctggacatcggcatctactgtgtccagttcacctccatggtctttggagggcagaagccagagaagatttctgtcgtgggaaggcgtcatgaaacag

SEQ ID NO: 25478 - DNA, 168 bp, Homo sapiens
  MAP TO CHR18.3; EXPRESSED IN BONE MARROW, SIGNAL = 1.5; EXPRESSED IN PLACENTA, SIGNAL = 1.2; EXPRESSED IN HELA, SIGNAL = 1.3; EXPRESSED IN HEART, SIGNAL = 1.7; EXPRESSED IN LUNG, SIGNAL = 1.3; SWISSPROT HIT: O14924, EVALUE 8.70e-01; NT HIT: AE005526.1, EVALUE 1.50e-01; EST_HUMAN HIT: H70949.1, EVALUE 8.60e-01
tagtagctgcagctctctaccaagccctccaccggaccctgtgggcggcggctgtgggctgagtcctctttgcgtgccacggaggatatggaggtatggaagcggctccaggctttgctgtcgggttcacaccctgttcctttaaaggtgacaaatcgaacacacagg

SEQ ID NO: 25479 - DNA, 88 bp, Homo sapiens
  MAP TO CHR14.3; EXPRESSED IN BONE MARROW, SIGNAL = 1.2; EXPRESSED IN PLACENTA, SIGNAL = 0.94; EXPRESSED IN HELA, SIGNAL = 0.86; EST_HUMAN HIT: BE261324.1, EVALUE 3.00e-42; SWISSPROT HIT: P49356, EVALUE 7.00e-10; NT HIT: L10414.1, EVALUE 2.00e-42
cttgctatccattcagcagtgccctcaaagaggtctggagtgatgatgttggtcagcgaggctacggaggcagcacagtatgcgcttc

SEQ ID NO: 25480 - DNA, 164 bp, Homo sapiens
  MAP TO CHR16.3; EXPRESSED IN HELA, SIGNAL = 0.95; EXPRESSED IN BONE MARROW, SIGNAL = 1.1; SWISSPROT HIT: P80074, EVALUE 5.80e+00; NT HIT: gi15920163, EVALUE 5.70e-01; EST_HUMAN HIT: AL560848.1, EVALUE 3.30e+00
agtgctcagacaaggctcagaggatgtcgagagctgaaaagagtcctgctgaccatcctaggggcgggcaaatttcagcctggactcggaagacctgcccttgcccaaagcacctgaggagagtgggatcagtgtcagccacagcaggttccagagagacacag

SEQ ID NO: 25481 - DNA, 163 bp, Homo sapiens
  MAP TO CHR16.3; EXPRESSED IN PLACENTA, SIGNAL = 1.2; EXPRESSED IN HELA, SIGNAL = 1.1; EXPRESSED IN BONE MARROW, SIGNAL = 1.5; EST_HUMAN HIT: BI910966.1, EVALUE 3.00e-53; SWISSPROT HIT: P51828, EVALUE 2.00e-19; NT HIT: gi15319601, EVALUE 3.00e-86
gtgcccttcttcctgttcattgtcttcgtggtgtacacactactgcccttcagcatgcggggcgctgtcgccgttggggccgtctccactgcctcccacctcctggtgctcggttctttgatgggaggcttcacgacacccagtgtccgggtggggctgcagg

SEQ ID NO: 25482 - DNA, 139 bp, Homo sapiens
  MAP TO CHR14.3; EXPRESSED IN FETAL LIVER, SIGNAL = 2.2; EXPRESSED IN HELA, SIGNAL = 1.5; EXPRESSED IN HEART, SIGNAL = 1.6; EXPRESSED IN LUNG, SIGNAL = 2.1; EXPRESSED IN BONE MARROW, SIGNAL = 1.9; SWISSPROT HIT: Q51334, EVALUE 1.50e+00; EST_HUMAN HIT: AU137366.1, EVALUE 2.00e-72; NT HIT: gi16189350, EVALUE 1.00e-72
ggttgctgagtcattaggaatcacagaattcctacggaagaaagaaatacacccagacaaccttggacccaagcacctcagccgagacatggatggggagcagctagagggagctagcagcgagaagagggaacgtgag

SEQ ID NO: 25483 - DNA, 161 bp, Homo sapiens
  MAP TO CHR18.3; EXPRESSED IN PLACENTA, SIGNAL = 1.8; EXPRESSED IN HELA, SIGNAL = 6.3; EXPRESSED IN HEART, SIGNAL = 3.8; EXPRESSED IN FETAL LIVER, SIGNAL = 3.6; SWISSPROT HIT: Q9Z2D6, EVALUE 3.00e-01; NT HIT: gi7710146, EVALUE 1.00e-85; EST_HUMAN HIT: AA164764.1, EVALUE 1.00e-85
ccttattttgattgagaggatcgtttcgcagtctctgtttgttcttctgtaatttactaggcatcatctttccagttctgaagtcaaaactgctgagatcaacagtatttcccaggtaccttgccaactgaggcttgcttctgaacttcttaccacttgga

SEQ ID NO: 25484 - DNA, 267 bp, Homo sapiens
  MAP TO CHR14.3; EXPRESSED IN PLACENTA, SIGNAL =   2; EXPRESSED IN HELA, SIGNAL = 2.1; EXPRESSED IN LUNG, SIGNAL = 2.6; EXPRESSED IN FETAL LIVER, SIGNAL =   2; EXPRESSED IN BONE MARROW, SIGNAL = 3.3; SWISSPROT HIT: P22695, EVALUE 3.70e-02; EST_HUMAN HIT: BF038174.1, EVALUE 3.60e-01
ctacagccgcaggacatcctccaagagcctggcctggggctgcggaggctgccacggctcccacggctcccacggatgctgagtgcgcgagggctgcaggtcccacatcctgtagtccagccagctgcaaaggctgccctgcacctcagaggaagggcaggatttcaatctgcgcaggaggcaggacgggggggccacctgagggcctgcaatgtgccttctgcacagcaagtggtcctggggccacaactccagggccagggtggt

SEQ ID NO: 25485 - DNA, 210 bp, Homo sapiens
  MAP TO CHR19.3; EXPRESSED IN HEART, SIGNAL = 2.2; EXPRESSED IN HELA, SIGNAL = 3.3; EXPRESSED IN LUNG, SIGNAL =   4; EXPRESSED IN BONE MARROW, SIGNAL =   3; EXPRESSED IN PLACENTA, SIGNAL = 2.2; EST_HUMAN HIT: BI837733.1, EVALUE 5.00e-86; NT HIT: gi8923076, EVALUE 1.00e-100; SWISSPROT HIT: P16258, EVALUE 3.70e-01
cctgagcaggcgccctcagagcggctgctgccgccatgactctgggcggggggggaacgcgggctcggcggtgttcctgtcgttgtcctgtcccgggtcgcgaccagcggcgtcgccgaacctcagatccgcctgtgtgcaatggccacaaccactcctcccgagctcgtccagacccagcatcgccggatggacctgacaggccaaaat

SEQ ID NO: 25486 - DNA, 162 bp, Homo sapiens
  MAP TO CHR14.3; EXPRESSED IN HEART, SIGNAL = 1.6; EXPRESSED IN HELA, SIGNAL = 4.2; EXPRESSED IN LUNG, SIGNAL = 4.7; EXPRESSED IN BONE MARROW, SIGNAL = 4.8; EXPRESSED IN PLACENTA, SIGNAL =   4; SWISSPROT HIT: P55291, EVALUE 5.10e-01; EST_HUMAN HIT: BF125625.1, EVALUE 5.30e-02
agttcaaggaggcagaggaaccagacattaaagcacaaatccactctggccctaatactagggcaaaggaaaatgctgccacctcccctggagaagacagcggtagaggggcagctgcaacctcttccacagagcaccgctttgtggaaacagaagtctcct

SEQ ID NO: 25487 - DNA, 388 bp, Homo sapiens
  MAP TO CHR16.3; EXPRESSED IN HELA, SIGNAL = 8.9; SWISSPROT HIT: Q13084, EVALUE 2.00e-05; NT HIT: gi14777207, EVALUE 0.00e+00; EST_HUMAN HIT: AI302070.1, EVALUE 0.00e+00
agcctggcccagactttactcgctcccggccccacgggcacaaggaacactgccgcaaacgtcggggcccagcctgagaggagcctctgggcggcccaggcctcctggggatccctgccaagctggccccgggctggaaggtgcatgggcagcacacgaaaccaggatccacccactgcccaccggtggccctcacagctccccgggatctgtgtcctcagtgcaaagggcctggcagggaaagctgggcctgttggtcaggcatggaggagctgtgtggtcactggccactggctctcttctgcaccaccgccggctctgacagtgcctgctgctgcagctgctggatcagctccgccacatagatcttgaacaggggtacagggtc

SEQ ID NO: 25488 - DNA, 125 bp, Homo sapiens
  MAP TO CHR18.3; EXPRESSED IN BONE MARROW, SIGNAL = 0.73; EXPRESSED IN HELA, SIGNAL = 1.3; NT HIT: AF338230.1, EVALUE 1.60e+00; EST_HUMAN HIT: AW378766.1, EVALUE 6.10e-01
acatacgggacggttattaaagtctctgtgcttcatcagtctttccttcctgttgctgcacatcattttccacatcacgttggtgagccttgaagctcaacatcgtattgcacctggctacaact

SEQ ID NO: 25489 - DNA, 220 bp, Homo sapiens
  MAP TO CHR14.3; EXPRESSED IN PLACENTA, SIGNAL = 0.89; EXPRESSED IN HELA, SIGNAL = 0.92; EST_HUMAN HIT: BG394106.1, EVALUE 1.20e+00; SWISSPROT HIT: Q9ZDZ8, EVALUE 3.50e-01
tcagcatcctgctgaagactttgtgggtttcctcaagtccttcgagggtatcaataatgagggaatgccagtaattcctgagagaagttggccctgcttttcagtctattcctacaaacgcccaatcactcctttgactgggacccgaacttttctcctggatactgctcacactggatacttggccgaatcctatgcatttcctgtcattaaccaataa

SEQ ID NO: 25490 - DNA, 97 bp, Homo sapiens
  MAP TO CHR16.3; EXPRESSED IN BONE MARROW, SIGNAL = 1.2; EXPRESSED IN HELA, SIGNAL = 2.2; EXPRESSED IN PLACENTA, SIGNAL = 1.3; NT HIT: gi5454035, EVALUE 9.00e-48; EST_HUMAN HIT: BG422541.1, EVALUE 1.00e-47
ctgctccagactccgcagcacggcccccgaggccacttccagaatgttgactctggtgccacagacgcagaagaggtgctggccagtctggtccagc

SEQ ID NO: 25491 - DNA, 139 bp, Homo sapiens
  MAP TO CHR18.3; EXPRESSED IN PLACENTA, SIGNAL =   5; EXPRESSED IN HELA, SIGNAL = 4.9; EXPRESSED IN LUNG, SIGNAL = 5.4; EXPRESSED IN FETAL LIVER, SIGNAL = 4.9; EXPRESSED IN BONE MARROW, SIGNAL = 4.9; EST_HUMAN HIT: AV700111.1, EVALUE 4.40e-02; SWISSPROT HIT: Q9UPY6, EVALUE 5.90e+00; NT HIT: AB007978.1, EVALUE 1.20e-01
acacacagacaaggtctgatgactccaattattggacttccccgcatactccagttcactcccctctcctggatcagatccatgagctgttagctcctgaaactgttccacctcagaaacctctatctcaagccccagg

SEQ ID NO: 25492 - DNA, 393 bp, Homo sapiens
  MAP TO CHR14.3; EXPRESSED IN FETAL LIVER, SIGNAL = 0.95; EXPRESSED IN HELA, SIGNAL = 1.6; SWISSPROT HIT: Q02280, EVALUE 3.00e-48; NT HIT: AJ250280.1, EVALUE 0.00e+00
ctcatccacattttcaaaggcattgatgatgtcataaggtaaacaagacagcagatcgatcacaaaccaagttttcagatagttcatccttatgagcttagggtcagaaatgacctctccaccgggccccacgaaagtcgtgtgaaaatttaaaacgatgtcaaccagaaaaataacgtccaccacactatccagtaccagccaggctatgttgttctgctttgttttgaaggaaacattataaggaaccataatggcggtgtagaaggtaagaattaaaatcacccaatcccaagtagttttaaaagcacaataatgtaaaataatgtgtggtggcgtctttggcgcttcttgtttatactgaggaaggatatctgatcccagctgaagaac

SEQ ID NO: 25493 - DNA, 100 bp, Homo sapiens
  MAP TO CHR18.3; EXPRESSED IN HELA, SIGNAL = 1.4; EXPRESSED IN PLACENTA, SIGNAL = 0.83; EXPRESSED IN BONE MARROW, SIGNAL = 1.1; EST_HUMAN HIT: BF027364.1, EVALUE 2.00e-49; NT HIT: AB058733.1, EVALUE 1.00e-49
tttcaaaggtgattctccacctacataaacgaaaaatacacggtgtctcttctgcatatgttcaaacatttgttgacttggaagtggccgaattagagcc

SEQ ID NO: 25494 - DNA, 221 bp, Homo sapiens
  MAP TO CHR18.3; EXPRESSED IN HELA, SIGNAL = 1.6; EXPRESSED IN BONE MARROW, SIGNAL = 1.3; EST_HUMAN HIT: BG283349.1, EVALUE 1.00e-121; SWISSPROT HIT: O42632, EVALUE 7.10e+00; NT HIT: AF133531.1, EVALUE 7.90e-01
ctcaaggagacctgacaagtacttcacacagatatctagaggctttgtgagaggagagtgtgagctccatcccggaaacgcagtgaggttagccatccctcgtaaggtccgctcaagggacggcaggccatagaaatgaggcgcatccgtcactttcagacactggagcagtttcagagccagctgcgtttgaaaaacgtaaagaagttccgagcatttcc

SEQ ID NO: 25495 - DNA, 76 bp, Homo sapiens
  MAP TO CHR19.3; EXPRESSED IN HELA, SIGNAL = 2.6; EXPRESSED IN LUNG, SIGNAL = 1.7; EXPRESSED IN BONE MARROW, SIGNAL = 1.5; EXPRESSED IN FETAL LIVER, SIGNAL = 1.5; EST_HUMAN HIT: BI820967.1, EVALUE 3.00e-35; SWISSPROT HIT: P16960, EVALUE 6.30e+00; NT HIT: gi13375951, EVALUE 2.00e-35
cttcttggagaagaggatttgggtggaatctccagcctcctctacaggagcccagtgcaggaggacgtcattgtcc

SEQ ID NO: 25496 - DNA, 112 bp, Homo sapiens
  MAP TO CHR19.3; EXPRESSED IN HELA, SIGNAL = 1.8; SWISSPROT HIT: Q03405, EVALUE 1.00e-17; NT HIT: U09932.1, EVALUE 1.00e-56; EST_HUMAN HIT: BE386005.1, EVALUE 7.00e-56
ccttcccacaagcgcacgatcgtggtcctgcagaggtcctgtcccagggcgcactcttccacacggcaatccccgttggtcttacactgcatgcaccgcaggccccaagagg

SEQ ID NO: 25497 - DNA, 148 bp, Homo sapiens
  MAP TO CHR16.3; EXPRESSED IN FETAL LIVER, SIGNAL = 0.82; EXPRESSED IN BONE MARROW, SIGNAL = 1.5; EXPRESSED IN HELA, SIGNAL = 1.1; SWISSPROT HIT: P55268, EVALUE 2.60e+00; NT HIT: gi6677632, EVALUE 9.00e-43
ctgggggcagcttggttgctgggtgtccggcccctggcgagtagatctcacccttggagccaggctggcagaccatgtggttggtgaccaagtggctgtagaggatgtcccttgtggtggagatgaagccacagctgtggcagacacc

SEQ ID NO: 25498 - DNA, 128 bp, Homo sapiens
  MAP TO CHR16.3; EXPRESSED IN HELA, SIGNAL = 3.3; EXPRESSED IN PLACENTA, SIGNAL = 3.4; NT HIT: gi13654697, EVALUE 2.00e-65; EST_HUMAN HIT: BI036283.1, EVALUE 2.00e-65; SWISSPROT HIT: O95255, EVALUE 1.00e-18
actccggaggcctgctgggcagcgttggtagctggcaagacaaagcagagaagccagtaaccaaacagcactccagatgactggactccctttttcctctcggtgtgaatcaggaacactgcgaagct

SEQ ID NO: 25499 - DNA, 90 bp, Homo sapiens
  MAP TO CHR19.3; EXPRESSED IN HELA, SIGNAL =   1; EXPRESSED IN LUNG, SIGNAL =   1; EXPRESSED IN FETAL LIVER, SIGNAL = 1.2; EXPRESSED IN BONE MARROW, SIGNAL = 1.1; EXPRESSED IN PLACENTA, SIGNAL = 1.1; EST_HUMAN HIT: BI917128.1, EVALUE 2.00e-43
tttcagcctgcaggtccagcgccggggacaggccccaccaggacacggagccgaagccgctgccggagccggcaggtgtggtcatcaccc

SEQ ID NO: 25500 - DNA, 141 bp, Homo sapiens
  MAP TO CHR16.3; EXPRESSED IN PLACENTA, SIGNAL = 1.1; EXPRESSED IN HELA, SIGNAL = 1.1; SWISSPROT HIT: P16303, EVALUE 1.00e-16; EST_HUMAN HIT: BF849162.1, EVALUE 4.00e-24; NT HIT: AB010633.1, EVALUE 1.00e-26
agttacccccacacacccacggtgattgatggagtggtgctgccaaaaacacccgaggagcttcaagctgaaaggaagttccacactgtcccctacattgtcggatttaacaggaaggaatttggctggtttcttccaaca

SEQ ID NO: 25501 - DNA, 131 bp, Homo sapiens
  MAP TO CHR19.3; EXPRESSED IN HELA, SIGNAL = 1.2; EXPRESSED IN LUNG, SIGNAL = 1.6; EXPRESSED IN FETAL LIVER, SIGNAL = 1.1; EXPRESSED IN BONE MARROW, SIGNAL = 1.8; SWISSPROT HIT: P90587, EVALUE 4.00e-04; EST_HUMAN HIT: BI560259.1, EVALUE 5.00e-23; NT HIT: AF072879.1, EVALUE 4.40e-01
ttagtgatggtgagcagcgtggcctgggatgtaacatcccagatcttgatgcacctgtccaatgagacagaagccaccctctggctgtcggggtcaaagcagcatgacgtgatggaccttgtgtgatgatc

SEQ ID NO: 25502 - DNA, 116 bp, Homo sapiens
  MAP TO CHR16.3; EXPRESSED IN HELA, SIGNAL = 4.4; EXPRESSED IN FETAL LIVER, SIGNAL = 4.7; EXPRESSED IN BONE MARROW, SIGNAL = 5.4; EST_HUMAN HIT: BI597291.1, EVALUE 5.60e-01; NT HIT: AF342999.1, EVALUE 5.90e+00; SWISSPROT HIT: P39059, EVALUE 3.50e+00
cgcgcttcattgtcatccccttctgtctccgactccgcattttctgcttcctccaagatagcccctgtctgcctcaaaggatcatggaaaagcagagcctctccaggcactgccat

SEQ ID NO: 25503 - DNA, 56 bp, Homo sapiens
  MAP TO CHR16.3; EXPRESSED IN HELA, SIGNAL = 0.87; NT HIT: M96150.1, EVALUE 1.50e-01; EST_HUMAN HIT: BF038602.1, EVALUE 8.70e-01
ctcctttgcaaagagcagcaatttgaaagtgtgatttttgcccccctcagtttcac

SEQ ID NO: 25504 - DNA, 308 bp, Homo sapiens
  MAP TO CHR14.3; EXPRESSED IN HELA, SIGNAL = 7.4; EXPRESSED IN FETAL LIVER, SIGNAL = 2.2; EXPRESSED IN LUNG, SIGNAL = 4.1; SWISSPROT HIT: P28074, EVALUE 1.00e-54; NT HIT: X95586.1, EVALUE 0.00e+00; EST_HUMAN HIT: BG698701.1, EVALUE 0.00e+00
ccagggcctctcttatcccagccacagatcatggtgcccatggacagccccatgcctttgtactgatacaccatgttggcaagcagtttggaggcagctgctacagagatgcgttccttatttcgaagctcatagattcgacattgccgagccaacagccgttcccagaagctgcaatccgctgcgcccccagccatggtgcctagcaggtatgggttgatctctatcaccttcttcaccgtctgggaggcaatgtaagcacccgctgtagccctggagtcagctgcaactatgactccatggcggaa

SEQ ID NO: 25505 - DNA, 152 bp, Homo sapiens
  MAP TO CHR14.3; EXPRESSED IN BONE MARROW, SIGNAL = 2.1; EXPRESSED IN PLACENTA, SIGNAL = 1.7; EXPRESSED IN HELA, SIGNAL = 1.9; EXPRESSED IN FETAL LIVER, SIGNAL = 0.89; EST_HUMAN HIT: BE082216.1, EVALUE 3.00e+00; SWISSPROT HIT: P13586, EVALUE 1.00e+01
cccacctgcggggagtaccaaaagtacaagaattacccaaccagtgagtgggtcaatcgggttctccctggggagtatgacactccccgacgagcaagggaagtacactcactccccaggacggctccgcagacgcagaccgaagcttatgg

SEQ ID NO: 25506 - DNA, 180 bp, Homo sapiens
  MAP TO CHR14.3; EXPRESSED IN PLACENTA, SIGNAL =   1; EXPRESSED IN HELA, SIGNAL = 1.9; EXPRESSED IN FETAL LIVER, SIGNAL = 0.78; EXPRESSED IN LUNG, SIGNAL = 1.8; EXPRESSED IN BONE MARROW, SIGNAL = 1.4; EST_HUMAN HIT: BF674879.1, EVALUE 1.00e-49; SWISSPROT HIT: P20186, EVALUE 2.20e-01; NT HIT: U18745.1, EVALUE 1.60e-01
taaaatagctccaggccaggagcagcggctccatctccgagctcatggctgccggtgcggccagcgaaggcccagcgctccaggagagaggtgggcgtggagtgaagagctggcggcgtccgactctgcccggcaacccgcgacggctggggccttgtccgagaggtgcccgcagcgcgc

SEQ ID NO: 25507 - DNA, 190 bp, Homo sapiens
  MAP TO CHR16.3; EXPRESSED IN HELA, SIGNAL = 1.3; EXPRESSED IN PLACENTA, SIGNAL = 1.6; EXPRESSED IN HEART, SIGNAL =  13; EXPRESSED IN FETAL LIVER, SIGNAL = 1.3; EXPRESSED IN LUNG, SIGNAL =   2; NT HIT: gi5835820, EVALUE 3.00e-15; SWISSPROT HIT: O03205, EVALUE 6.00e-10; EST_HUMAN HIT: BE772194.1, EVALUE 3.00e-04
cagccgttggtatatgatgtgtttgcggttttgataataagatctttagaataaaagcctgtgaggaaaagcatacctgtaagtgtgaggctaccaataattagggaggaggaagtgaggagtaaagtcttgaatagatctcctgttttttggatgtcttgttcatcattgaggttatggatcatggatc

SEQ ID NO: 25508 - DNA, 355 bp, Homo sapiens
  MAP TO CHR16.3; EXPRESSED IN PLACENTA, SIGNAL = 0.96; EXPRESSED IN HELA, SIGNAL = 0.89; NT HIT: gi16164460, EVALUE 1.00e-107; SWISSPROT HIT: Q46100, EVALUE 7.10e-01; EST_HUMAN HIT: BG718223.1, EVALUE 5.00e-35
ccaaaagaccagagagggaggtggtgtcagccgcttgggagacaccacaggtttctcccctgatccatgaaccttgatccacagcccaaatggccgcacgcagaccctggggccccagaggaagggaatgaaaggagccccccagcttcccacgggtaccttctgtctgacgtctatgctcagtgactgtcctgagccctggctttcatgctcttggttcagcatggaggacacagccttggccagctggaggagctgctcggggccaccctcgccttgcagagctgtggggattttctctgacacggcagcctggaatgctacatcctcaacacatgtgtctccgagtgccacc

SEQ ID NO: 25509 - DNA, 316 bp, Homo sapiens
  MAP TO CHR18.3; EXPRESSED IN HELA, SIGNAL = 1.6; EXPRESSED IN PLACENTA, SIGNAL = 2.1; EXPRESSED IN LUNG, SIGNAL = 2.4; EXPRESSED IN BONE MARROW, SIGNAL = 1.6; NT HIT: U18671.1, EVALUE 1.90e-02; SWISSPROT HIT: P48553, EVALUE 6.00e-03; EST_HUMAN HIT: BI013137.1, EVALUE 2.00e-03
ctcagaggattctacagatgtctggagatgcccacgggactgcggcccagcctggagacttagggagctctcggtcttggtgagcaatgcatgttgccccagagtcccctggggagaaacatctccccacagaaaagctgggttctgaaccatggagattgcttgagtccaggagttcctagtgtgaacaggggtctcattgagcagtagtgaagtcagaagagctgagaatctctgcgaagtaaggacacaagaaaaagagaagacgatgcaggacacagcatctgggagcaaagaagtctggagaagccggagc

SEQ ID NO: 25510 - DNA, 445 bp, Homo sapiens
  MAP TO CHR14.3; EXPRESSED IN HEART, SIGNAL = 3.2; EXPRESSED IN FETAL LIVER, SIGNAL =  10; EXPRESSED IN HELA, SIGNAL =  26; EXPRESSED IN PLACENTA, SIGNAL = 4.4; EST_HUMAN HIT: BG822921.1, EVALUE 0.00e+00; SWISSPROT HIT: P26599, EVALUE 3.00e-58; NT HIT: X60648.1, EVALUE 0.00e+00
tcagctgctttttaaagtcgctttttttggaatgatggaagttgtcgccagggggcccggctgtggtgggcctgtgcccatagatggtggacttggagaaggagacccgcaggtggtggttctcccagatgtcgtggttgtgtagggcaatgggggtctggaccgcctcctccacggagcgcatttggatcagcgccatcttgcggtccttctggaagaacttgaatcctatgactatgcccccatggctggaggagaggaccttgagatcttcctcggatactgagggcgggatgttggagaggtgcacggtggccgagggcgggaatatgttctggaagttcttgaagcctggcttcttgaagcggtgcaggggcgagttgccatagtccttggtcaggccctggtcctcccggccctcgcggggcagctgcacgttctggtg

SEQ ID NO: 25511 - DNA, 389 bp, Homo sapiens
  MAP TO CHR14.3; EXPRESSED IN FETAL LIVER, SIGNAL = 4.3; EXPRESSED IN HELA, SIGNAL =  12; EXPRESSED IN PLACENTA, SIGNAL = 3.3; EST_HUMAN HIT: AA434040.1, EVALUE 0.00e+00; SWISSPROT HIT: Q15427, EVALUE 9.00e-05; NT HIT: gi14746759, EVALUE 0.00e+00
cagctggacgacttctggcagctcagaacccgctctcccagcctgaccgccctcatcagctgtttgcagatgcacctccttcaccctctgcccccaatcctgtggtatcatcattggggtctgggcttcctccaccaggcatgcctcctcctggctccttcccacccccagtgctgcctcctggagccctcccacctgggatacccccagccatgccccaccacctatgcctcctggggctgcaggacatggccccccatcggcaggaaccccaggggcaggacatcctggtcatggacactcccaagctcacccattcccaccaggaggagtgccccatccagggatgtctcagatgcagctggcacaccatggacctcatggtttag

SEQ ID NO: 25512 - DNA, 327 bp, Homo sapiens
  MAP TO CHR16.3; EXPRESSED IN HELA, SIGNAL = 4.3; EXPRESSED IN HEART, SIGNAL = 8.2; EXPRESSED IN BONE MARROW, SIGNAL =   9; SWISSPROT HIT: P38198, EVALUE 3.10e+00; NT HIT: AB009270.1, EVALUE 0.00e+00; EST_HUMAN HIT: AV756368.1, EVALUE 0.00e+00
ggtacattgaacggaaagccttccttgaccgagtggatcacaggcagtttgaaattgagcgagatctcaggctgagcaaaatgaaaccttgatgttacgggctaaatcaagagcagcttaatcctgtttacaatgtgagctttttgtgcgtctgtgaaatgttttacagtgtttctcatcatctgtttcccagcaaggtcttttttttttctacattgaagttctgtctatgtatcttaatcacaaatggtttcattcactttacttttaaaaatttgtccttaaatgaataaataaaataaaagttggtcctgtgagaggataatg

SEQ ID NO: 25513 - DNA, 176 bp, Homo sapiens
  MAP TO CHR19.3; EXPRESSED IN LUNG, SIGNAL = 2.5; EXPRESSED IN HELA, SIGNAL = 2.5; EXPRESSED IN PLACENTA, SIGNAL = 2.4; NT HIT: gi14572198, EVALUE 1.00e-94; EST_HUMAN HIT: AW206860.1, EVALUE 2.00e-63; SWISSPROT HIT: P20813, EVALUE 2.00e-04
ccctcagaaaggatttgagtaggcctcttctatccatctgcagaaggtttcccaaaaggggcagagggcggggccctggtgggaggcggtcatgggtgttagggtggcgctgaaccaggagtagcaagagtcctgtgaggagtgcaaggaagaggaggacgctgagttccatggtc

SEQ ID NO: 25514 - DNA, 202 bp, Homo sapiens
  MAP TO CHR19.3; EXPRESSED IN HELA, SIGNAL = 3.2; EXPRESSED IN LUNG, SIGNAL = 2.2; EXPRESSED IN FETAL LIVER, SIGNAL = 2.7; NT HIT: gi15302718, EVALUE 1.00e-110; SWISSPROT HIT: P22579, EVALUE 5.00e-10; EST_HUMAN HIT: AL561447.1, EVALUE 1.00e-110
ctggtacgtgtgcaggatctccaggaatgacctgtagatttctgggtggtctaggaagcgggttttaatcttattcacatagctgatggcgttgttgaattccacggaatcggactccaggggcacctggggtttgtcctctttatacggcacctgctgcttgaagtcctctgcaccgtccccgtggttgtgcgaattctcc

SEQ ID NO: 25515 - DNA, 238 bp, Homo sapiens
  MAP TO CHR14.3; EXPRESSED IN HELA, SIGNAL = 4.8; EXPRESSED IN LUNG, SIGNAL = 4.3; EXPRESSED IN FETAL LIVER, SIGNAL = 1.6; EXPRESSED IN PLACENTA, SIGNAL =   4; SWISSPROT HIT: P55690, EVALUE 4.90e+00; EST_HUMAN HIT: BI793194.1, EVALUE 1.00e-119; NT HIT: gi14750002, EVALUE 1.00e-119
ctttccctttgtgctttttttgtttctgttcactcagcttatccaatggtaaatcactgagatccaaactatataaattcctagctaaaactttagttaatgtctccatagtcagtgaccactcagtggccaactcttcccaataggtcagcgatgacaatactgacagtaagtcatcccaaagttctcgggagatgtacacatttaggtttgctttgatccaggcaactataagggt

SEQ ID NO: 25516 - DNA, 162 bp, Homo sapiens
  MAP TO CHR18.3; EXPRESSED IN HELA, SIGNAL = 3.2; EXPRESSED IN LUNG, SIGNAL = 3.8; EXPRESSED IN BONE MARROW, SIGNAL = 3.7; EXPRESSED IN PLACENTA, SIGNAL =   3; NT HIT: L33260.1, EVALUE 2.20e+00; EST_HUMAN HIT: BG334718.1, EVALUE 2.10e-01; SWISSPROT HIT: P38335, EVALUE 6.70e-01
atggaaacagaagatcatagtgacagcgcttatggtcagttgaggaaggggttggaggagaaagaggggtcagggatgacacttaagatttcaggttggagagatgaagatgctatttctcccaacagagaacaacaaagacagaatgggttcaaaggcaag

SEQ ID NO: 25517 - DNA, 175 bp, Homo sapiens
  MAP TO CHR14.3; EXPRESSED IN HELA, SIGNAL =   1; EXPRESSED IN PLACENTA, SIGNAL = 0.98; NT HIT: D89784.1, EVALUE 1.50e-01; SWISSPROT HIT: P46939, EVALUE 6.60e-01; EST_HUMAN HIT: BF376527.1, EVALUE 7.00e-57
atcaatgtggtaaaactcattgcagcgttgaagaacttaactgacgtttcaccagatttggacatcaggctgaagatggaagaatcccagaaggaacttgaatcatatatgatgagggctcagcagttactggggcaaagagagagccccggtgaactcatttcaaaacacaagg

SEQ ID NO: 25518 - DNA, 449 bp, Homo sapiens
  MAP TO CHR19.3; EXPRESSED IN FETAL LIVER, SIGNAL = 0.81; EXPRESSED IN BONE MARROW, SIGNAL = 1.4; EXPRESSED IN PLACENTA, SIGNAL = 1.3; EXPRESSED IN HELA, SIGNAL = 1.6; EXPRESSED IN LUNG, SIGNAL = 2.5; NT HIT: gi14765029, EVALUE 0.00e+00; SWISSPROT HIT: P42679, EVALUE 5.00e-41; EST_HUMAN HIT: AW337493.1, EVALUE 0.00e+00
gtcactgaaagaggtgtcggaggccgtggagaaggggtaccgcatggaaccccccgagggctgtccaggccccgtgcacgtcctcatgagcagctgctgggaggcagagcccgcccgccggccacccttccgcaaactggccgagaagctggcccgggagctacgcagtgcaggtgccccagcctccgtctcagggcaggacgccgacggctccacctcgccccgaagccaggagccctgaccccacccggtggggcccttggccccagaggaccgagagagtggagagtgcggcgtgggggcactgaccaggcccaaggagggtccaggcgggcaagtcatcctcctggtgcccacagcaggggctggcccacgtagggggctctgggcggcccgtggacaccccagacctgcgaaggatgatcgcccgataaagacggattctaagg

SEQ ID NO: 25519 - DNA, 289 bp, Homo sapiens
  MAP TO CHR14.3; EXPRESSED IN HELA, SIGNAL = 1.4; EXPRESSED IN PLACENTA, SIGNAL = 1.1; EXPRESSED IN BONE MARROW, SIGNAL = 1.5; NT HIT: AB032264.1, EVALUE 6.70e-02; SWISSPROT HIT: P39612, EVALUE 2.90e-01; EST_HUMAN HIT: AL520587.1, EVALUE 3.90e-01
gttggcacttggcacagacacaacataacagatggcacaaatatatcaattgttctcaattcaagaacagtgtcacacgcagaactcaattatgcacatatggatacagaagccctttgtacaagaagttttatcagctacctctacatctgtgcctttattatttataccaacaaagcctcttcaggaattctttctgaggtaaagctactccctttaattataaagcaccagggtgatttgctcaacactaaagaccacatgaaatgggaaaacaatattgaaggct

SEQ ID NO: 25520 - DNA, 85 bp, Homo sapiens
  MAP TO CHR14.3; EXPRESSED IN FETAL LIVER, SIGNAL = 3.3; EXPRESSED IN PLACENTA, SIGNAL = 1.2; EXPRESSED IN HEART, SIGNAL = 3.4; EXPRESSED IN HELA, SIGNAL = 3.2; NT HIT: AF109907.1, EVALUE 1.00e-40; EST_HUMAN HIT: AA732593.1, EVALUE 2.00e-40
gaggatataaatgctatagaaatggaagaagacaaaagagacctgatatctcgagagatcagcaaattcagagacacacataagg

SEQ ID NO: 25521 - DNA, 153 bp, Homo sapiens
  MAP TO CHR14.3; EXPRESSED IN LUNG, SIGNAL =   2; EXPRESSED IN HELA, SIGNAL = 2.2; NT HIT: gi14746833, EVALUE 2.00e-80; SWISSPROT HIT: P05199, EVALUE 2.00e-24; EST_HUMAN HIT: BG695898.1, EVALUE 3.00e-80
ggtttatagcattcttcgtcatgttgctgaggtgttagaatacaccaaggatgagcagctggaaagcctattccagaggactgcctgggtctttgatgacaagtacaagagacctggatatggtgcctatgatgcatttaagcatgcagtctc

SEQ ID NO: 25522 - DNA, 97 bp, Homo sapiens
  MAP TO CHR19.3; EXPRESSED IN HELA, SIGNAL = 1.8; EXPRESSED IN FETAL LIVER, SIGNAL = 1.2; EXPRESSED IN PLACENTA, SIGNAL = 1.1; NT HIT: gi15303230, EVALUE 9.00e-48; SWISSPROT HIT: P22670, EVALUE 2.00e-12; EST_HUMAN HIT: AW452532.1, EVALUE 1.00e-47
ctcttgagccacgtggactggctggaggccctgcacggtcagcggctgcaccgggccgggtttgggcgcttgtggagtggcctggaccacagatctc

SEQ ID NO: 25523 - DNA, 288 bp, Homo sapiens
  MAP TO CHR14.3; EXPRESSED IN LUNG, SIGNAL =  11; EXPRESSED IN FETAL LIVER, SIGNAL =  11; EXPRESSED IN HELA, SIGNAL =  10; SWISSPROT HIT: P28074, EVALUE 1.00e-50; EST_HUMAN HIT: BG825190.1, EVALUE 0.00e+00; NT HIT: gi14751296, EVALUE 0.00e+00
ttcagggggtagagccactatacttctcatgtagatcagccacattgtcactggagactcggatccagccatcctcccgcacgtggtagaggttgactgcacctcctgagtaggcatctctgtaggtggcttggtagatggctcgacgggccagatcataggcctgctccacttccaggtcataggaatagccccgatccatgaccccatatgcatacacagagccagaacctacagagaaggtggcccctgaaatccggttcccttcactgtccacgtagtagaggc

SEQ ID NO: 25524 - DNA, 115 bp, Homo sapiens
  MAP TO CHR14.3; EXPRESSED IN HELA, SIGNAL = 1.4; EXPRESSED IN LUNG, SIGNAL = 1.6; EXPRESSED IN BONE MARROW, SIGNAL =   1; SWISSPROT HIT: O06493, EVALUE 7.90e+00; EST_HUMAN HIT: BI759379.1, EVALUE 8.60e+00
gttgtaggggtggaatacgttcatgaaggtgaaacggcaatacatattcctaacttgaaattctccatactgtctgacataaagatcccacctctgctctacgaatcgatgtagt

SEQ ID NO: 25525 - DNA, 131 bp, Homo sapiens
  MAP TO CHR18.3; EXPRESSED IN PLACENTA, SIGNAL = 1.1; EXPRESSED IN HELA, SIGNAL = 1.8; EXPRESSED IN LUNG, SIGNAL = 1.5; NT HIT: S97776.1, EVALUE 4.40e-01; EST_HUMAN HIT: BG482355.1, EVALUE 1.00e-54; SWISSPROT HIT: P15489, EVALUE 4.50e+00
ggatctcagtgtggatgctggcttgagtcctgctcagttccaggtgcggcccatccctcagcactatcagcattacctagccactcctcgaatgcaccactttcccagaaactcctcctccacacagatgg

SEQ ID NO: 25526 - DNA, 145 bp, Homo sapiens
  MAP TO CHR14.3; EXPRESSED IN HELA, SIGNAL = 0.96; EXPRESSED IN FETAL LIVER, SIGNAL =   1; EXPRESSED IN PLACENTA, SIGNAL = 0.97; NT HIT: AJ131019.1, EVALUE 4.90e-01; EST_HUMAN HIT: T02819.1, EVALUE 7.30e-01; SWISSPROT HIT: P04175, EVALUE 1.50e+00
ctcatctgtggcttcctcaccattggtggggcaagtaccaatccagaaagatccagtccagtggttttcagtacttccagcatcagcatcatcatatcccaaatgcaaatcgttggtctccaccctgaactaacagtatgagcaa

SEQ ID NO: 25527 - DNA, 127 bp, Homo sapiens
  MAP TO CHR18.3; EXPRESSED IN HELA, SIGNAL = 3.3; EXPRESSED IN FETAL LIVER, SIGNAL = 1.2; SWISSPROT HIT: Q99708, EVALUE 5.00e-19; NT HIT: gi13647868, EVALUE 2.00e-65; EST_HUMAN HIT: BG682112.1, EVALUE 2.00e-65
cttggttgttttgtagagactttattttaccagttctacatggatttaactgaagaactgatgcaagttcacatcctccatggtctgacctggtttgtatttttattggctcatgagaaccagcact

SEQ ID NO: 25528 - DNA, 130 bp, Homo sapiens
  MAP TO CHR14.3; EXPRESSED IN HELA, SIGNAL = 0.94; SWISSPROT HIT: Q61037, EVALUE 6.00e+00; EST_HUMAN HIT: BG763930.1, EVALUE 2.50e+00
gtttctgggatgtctgaattcctccctctctggaatggagccgctggaaggctccataatcctccctctcctggctcagaggcccagctacactttctaaaacaacccagagccatctgatttcaagcat

SEQ ID NO: 25529 - DNA, 110 bp, Homo sapiens
  MAP TO CHR18.3; EXPRESSED IN PLACENTA, SIGNAL = 1.2; EXPRESSED IN HELA, SIGNAL = 1.1; EXPRESSED IN BONE MARROW, SIGNAL = 1.2; EXPRESSED IN HEART, SIGNAL = 1.9; EXPRESSED IN FETAL LIVER, SIGNAL = 1.2; EST_HUMAN HIT: BG718347.1, EVALUE 4.00e-48; SWISSPROT HIT: P29041, EVALUE 1.20e+00
aaagaggagtcgtcatgcccagcagatggcacgttggatttagtctgtgaatctgaattggatggtacagatatggccgaggcaaatgcccatggagaagaaaatggagg

SEQ ID NO: 25530 - DNA, 186 bp, Homo sapiens
  MAP TO CHR14.3; EXPRESSED IN HELA, SIGNAL = 1.1; EXPRESSED IN PLACENTA, SIGNAL =   1; SWISSPROT HIT: P46029, EVALUE 7.40e+00; NT HIT: M16697.1, EVALUE 2.60e+00; EST_HUMAN HIT: BG256645.1, EVALUE 9.60e-01
ttgtccgtcaggatagtccgtcgtcccacttaatgagggaagacattggatgatattatcttccttgtgatcatcactcaagaaaataattgtggactcagctttagtccacattactttggagttttgctgtattttcacctcaagtattgtaaccacaccattttgtggctccagacccaccat

SEQ ID NO: 25531 - DNA, 180 bp, Homo sapiens
  MAP TO CHR16.3; EXPRESSED IN LUNG, SIGNAL = 4.6; EXPRESSED IN BONE MARROW, SIGNAL = 1.3; EXPRESSED IN HELA, SIGNAL = 9.2; SWISSPROT HIT: P49588, EVALUE 2.00e-29; NT HIT: gi16179468, EVALUE 5.00e-97; EST_HUMAN HIT: BG679136.1, EVALUE 8.00e-97
atcttcactgctgtcatccaccttcaccaggtagccttcgtcatagatctggcctccttgctcagcatagaaacaggtcttgtccagcaccactccacactcctggcctgtggacacctcttccacgaacatcttctccctgcgcagagccatcaccgtagccactgtgttctcaaatac

SEQ ID NO: 25532 - DNA, 87 bp, Homo sapiens
  MAP TO CHR16.3; EXPRESSED IN PLACENTA, SIGNAL = 2.8; EXPRESSED IN HELA, SIGNAL = 3.9; EXPRESSED IN LUNG, SIGNAL = 2.7; SWISSPROT HIT: Q61124, EVALUE 5.50e-01; NT HIT: X99832.1, EVALUE 7.00e-42; EST_HUMAN HIT: BI754391.1, EVALUE 2.00e-37
gctgtgctcctggcggacatcctccccacactcgtcatcaaattgttggctcctcttggccttcacctgctgccctacaggtctggg

SEQ ID NO: 25533 - DNA, 200 bp, Homo sapiens
  MAP TO CHR18.3; EXPRESSED IN PLACENTA, SIGNAL = 1.4; EXPRESSED IN HELA, SIGNAL = 1.5; EXPRESSED IN BONE MARROW, SIGNAL = 1.8; EXPRESSED IN FETAL LIVER, SIGNAL =   2; NT HIT: M11506.1, EVALUE 1.80e-01; EST_HUMAN HIT: BE842167.1, EVALUE 2.60e-01; SWISSPROT HIT: P04741, EVALUE 1.10e+00
tgggtgtgcaggttcatggcctggtgggtgcaggaggcttcagattggaagggacaggaagacactgaagcagtgacggtggctgctcttgggaggactttgctgctggaggacagaacaggtgtgcccactcctgcaccttgtgccatccaggaaacagctggggtgatgacggatgagactggaatggtgggtgctcc

SEQ ID NO: 25534 - DNA, 126 bp, Homo sapiens
  MAP TO CHR16.3; EXPRESSED IN HELA, SIGNAL = 8.3; EXPRESSED IN HEART, SIGNAL = 8.7; EXPRESSED IN FETAL LIVER, SIGNAL =  14; EST_HUMAN HIT: BF883288.1, EVALUE 5.00e-60; NT HIT: AJ271736.1, EVALUE 3.00e-60; SWISSPROT HIT: P11087, EVALUE 3.50e+00
tgaaccccagtcgcgcctctgccttctcatccctgcgcaccacacaggctcgctcgtgcccggtgaatgctgaggctgctctgcacgtggagtgtggccctgtgggcaagggctgggctcttggag

SEQ ID NO: 25535 - DNA, 174 bp, Homo sapiens
  MAP TO CHR18.3; EXPRESSED IN HELA, SIGNAL = 0.99; EXPRESSED IN PLACENTA, SIGNAL = 0.95; EST_HUMAN HIT: BF132909.1, EVALUE 1.00e-92; SWISSPROT HIT: O09112, EVALUE 1.50e-01; NT HIT: AJ318212.1, EVALUE 6.10e-01
gtcaccctgccccatctccatctcctatgagatgagtgactcccaagaccccaccacttcccctgtagttaccacccaggtagagctggggggctgcagccggcaaggtgggggcaatgggttcctccgttttcgccagcaccaggaggtccaggccttcctcagccttctggg

SEQ ID NO: 25536 - DNA, 125 bp, Homo sapiens
  MAP TO CHR14.3; EXPRESSED IN HELA, SIGNAL = 1.7; EXPRESSED IN BONE MARROW, SIGNAL = 1.2; EXPRESSED IN PLACENTA, SIGNAL = 1.2; NT HIT: gi13787208, EVALUE 1.00e-01; EST_HUMAN HIT: AV654587.1, EVALUE 3.00e-64; SWISSPROT HIT: Q03503, EVALUE 8.00e-06
gccatggtaggggaggagtgtgtaggtgccatcgtttgcaagttggatatgcacaaaaagatgttccgcagaggttatatagccatgttagccgtggattccaaatacaggagaaatggcattgg

SEQ ID NO: 25537 - DNA, 309 bp, Homo sapiens
  MAP TO CHR16.3; EXPRESSED IN HEART, SIGNAL = 2.2; EXPRESSED IN HELA, SIGNAL = 2.6; EXPRESSED IN BONE MARROW, SIGNAL = 4.2; EXPRESSED IN PLACENTA, SIGNAL = 3.4; SWISSPROT HIT: Q29438, EVALUE 7.20e-01; NT HIT: gi14776074, EVALUE 5.00e-86; EST_HUMAN HIT: BI907290.1, EVALUE 8.00e-86
ggctctctgactgccacccctgcctgcctgcccggccctgcacaacatgcagccctccggcctcgagggtcccggcacgtttggtcggtggcctctgctgagtctgctgctcctgctgctgctgctccagcctgtaacctgtgcctacaccacgccaggcccccccagagccctcaccacgctgggcgcccccagagcccacaccatgccgggcacctacgctccctcgaccacactcagtagtcccagcacccagggcctgcaagagcaggcacgggccctgatgcgggacttcccgctcgtggacgg

SEQ ID NO: 25538 - DNA, 179 bp, Homo sapiens
  MAP TO CHR16.3; EXPRESSED IN HEART, SIGNAL = 1.6; EXPRESSED IN HELA, SIGNAL = 3.9; EXPRESSED IN PLACENTA, SIGNAL = 1.2; EST_HUMAN HIT: BG748478.1, EVALUE 1.00e-95; SWISSPROT HIT: P10911, EVALUE 1.00e-04; NT HIT: AK024475.1, EVALUE 8.00e-96
atggcagaccttggtctcactgagtgctgtgggaacagcaacctgcgcttcgagatctggttccgccgccgcaaggccagggacacctttgtgctgcaggcctccagcctggctatcaagcaggcctggacagctgacatctcccacctgctttggaggcaggccgtccacaacaaggg

SEQ ID NO: 25539 - DNA, 308 bp, Homo sapiens
  MAP TO CHR16.3; EXPRESSED IN HELA, SIGNAL = 1.9; EXPRESSED IN LUNG, SIGNAL = 2.3; EXPRESSED IN PLACENTA, SIGNAL = 2.6; NT HIT: X56163.1, EVALUE 0.00e+00; SWISSPROT HIT: P01764, EVALUE 2.00e-47; EST_HUMAN HIT: BG756124.1, EVALUE 1.00e-119
tgtgtctcttgcacagtaatacacagccatgtcctcggctctcaggctgttcatttgaagatacaaggagttcttggcattgtctctggagatggtgaatcggcccttcacggagtctgcatagtatgtgccaccaccagtaccaatagctgatacccactccagaccttttcctggagcctggcgaacccagtgcatagcatagctactgaaggtgaatccagagcctgcacaggagagtctcagggaccccccaggctgtaccaagcctcccccagactgcaccagctgaacctcacactggacac

SEQ ID NO: 25540 - DNA, 101 bp, Homo sapiens
  MAP TO CHR18.3; EXPRESSED IN HELA, SIGNAL = 1.8; EXPRESSED IN PLACENTA, SIGNAL = 1.4; EXPRESSED IN LUNG, SIGNAL = 1.6; EXPRESSED IN BONE MARROW, SIGNAL = 1.6; EXPRESSED IN FETAL LIVER, SIGNAL = 2.4; NT HIT: gi16163711, EVALUE 3.00e-44; SWISSPROT HIT: Q9P2G3, EVALUE 4.00e-14; EST_HUMAN HIT: AL552067.1, EVALUE 5.00e-44
caatagttaccattcggattccactggtcctctccacccaacacgaacaagaagttttccacctccacaacgcagtggtgggcactgttgtatggcataac

SEQ ID NO: 25541 - DNA, 330 bp, Homo sapiens
  MAP TO CHR16.3; EXPRESSED IN HELA, SIGNAL = 4.2; EXPRESSED IN HEART, SIGNAL = 9.1; EXPRESSED IN LUNG, SIGNAL = 2.6; EXPRESSED IN FETAL LIVER, SIGNAL =  15; EST_HUMAN HIT: BI859115.1, EVALUE 0.00e+00; NT HIT: gi13628441, EVALUE 0.00e+00; SWISSPROT HIT: P71613, EVALUE 7.10e+00
gatgaggccagaccatggacactacacccagcaatagagacgggactgcggaggaaggaggacccaggacaggatccaggccggcttgccacaccccccacccctaggacttattcccgctgactgagtctctgaggggctaccaggaaagcgcctccaaccctagcaaaagtgcaagatggggagtgagaggctgggaatggaggggcagagccaggaagatcccccagaaaagaaagctacagaagaaactggggctcctccagggtggcagcaacaataaatagacacgcacggcagccacagcttgggtgtgtgttcatccttgtt

SEQ ID NO: 25542 - DNA, 175 bp, Homo sapiens
  MAP TO CHR16.3; EXPRESSED IN HELA, SIGNAL = 1.1; EXPRESSED IN BONE MARROW, SIGNAL = 1.3; EXPRESSED IN PLACENTA, SIGNAL = 1.1; EST_HUMAN HIT: AA932515.1, EVALUE 9.00e-01; NT HIT: AF109905.1, EVALUE 1.50e-01
agaacgttctacaacccccatataaattcttagaacccagagttccacggagcatgaaacagtcatctgctttcactttcatgttattgaaatcatgtgacatcacaaggtcacagggctggaccaagaagggaacaagacttggatctccttccaaggtgtgcaagagggccat

SEQ ID NO: 25543 - DNA, 141 bp, Homo sapiens
  MAP TO CHR18.3; EXPRESSED IN PLACENTA, SIGNAL = 1.3; EXPRESSED IN HELA, SIGNAL = 1.8; EXPRESSED IN HEART, SIGNAL =   2; EST_HUMAN HIT: AW663350.1, EVALUE 1.00e-73; SWISSPROT HIT: P20591, EVALUE 2.00e+00; NT HIT: gi15305008, EVALUE 7.00e-74
ctgcataatgtaccggaatctctatctttggcccaatgacatagtgaccctcctccaagctgtgggcagtgatggtggtccactggcggcaggaatgaatcagcagatagtcattttcccgcagcccttctacgcactctc

SEQ ID NO: 25544 - DNA, 97 bp, Homo sapiens
  MAP TO CHR14.3; EXPRESSED IN HELA, SIGNAL =   2; NT HIT: gi14751050, EVALUE 9.00e-48; SWISSPROT HIT: O75843, EVALUE 5.00e-12; EST_HUMAN HIT: BG253747.1, EVALUE 1.00e-47
ctgcaggaaggggtcgctgactccagatatgctgtgttctgtggagtatcccattgtcaccagagtccggaggatgtgtaccagctggggtaccacc

SEQ ID NO: 25545 - DNA, 212 bp, Homo sapiens
  MAP TO CHR19.3; EXPRESSED IN PLACENTA, SIGNAL = 0.9; EXPRESSED IN HELA, SIGNAL = 2.2; EXPRESSED IN LUNG, SIGNAL = 1.6; NT HIT: gi16163368, EVALUE 1.00e-116; SWISSPROT HIT: O80300, EVALUE 9.50e-01; EST_HUMAN HIT: BF893888.1, EVALUE 1.00e-116
tcaggctgctgtctggcagggcggattctggctcctgccccaccagctccatcaggtcactagcctcgtaccagttgagggaggggcccactgtgctgctaggtcccctgacactgcagagggcctctgacagcaactccagggggccgctggtccctcggggtctctgcagcagtgcccgaagctccaccaggctgcgcagcgccaggagc

SEQ ID NO: 25546 - DNA, 171 bp, Homo sapiens
  MAP TO CHR14.3; EXPRESSED IN HELA, SIGNAL = 1.9; EST_HUMAN HIT: BI766254.1, EVALUE 2.00e-91; SWISSPROT HIT: Q9Y2Z9, EVALUE 1.00e-11; NT HIT: gi16190888, EVALUE 1.00e-91
tctgcaccatggcggcccggcttgtcagccgatgcggggctgtgcgtgcagctccccacagcggcccgctggtgtcctggcgcaggtggtccggcgcctcaacagacaccgtgtatgacgtggtggtgtcgggtggaggcctggtgggcgctgccatggcctgtgccttgg

SEQ ID NO: 25547 - DNA, 273 bp, Homo sapiens
  MAP TO CHR14.3; EXPRESSED IN PLACENTA, SIGNAL = 1.1; EXPRESSED IN HELA, SIGNAL = 1.5; SWISSPROT HIT: Q60793, EVALUE 2.90e+00; NT HIT: AL163285.2, EVALUE 2.50e-01; EST_HUMAN HIT: BI836525.1, EVALUE 3.70e-01
ttagccaggatttgaaagcaggggattcccctcttctggctggcatgaagcatcatcaaatccatgagcgtcaatctccagggccttgctgtaaatcactcccacaacatagaaagcctggtactcacatccatatgggtcaaatagaagaggtgatcttgccccaagaagctgattcccaagttccctgtccgttgatccaaggcatccactcaggtgcttgtgttggtgacaaaagagctccccagagggctgtcaggaagctgatcatgt

SEQ ID NO: 25548 - DNA, 229 bp, Homo sapiens
  MAP TO CHR16.3; EXPRESSED IN HELA, SIGNAL = 1.3; EST_HUMAN HIT: AW373827.1, EVALUE 1.00e-59; SWISSPROT HIT: Q9ULV5, EVALUE 8.00e-31; NT HIT: AB029347.1, EVALUE 1.00e-101
ggagaagggcctggcactgctcaaagaagagccggccagtccagggggggatggcgaggccgggctggccctggccccaaacgagtgtgacttctgcgtgacagcccccccgccactgcctgtggctgtggtgcaggccatcctggaagggaaagggagcttcagccccgaggggcccaggaatgcccaacagcctgaaccaggggatcccagggagatacctgacagg

SEQ ID NO: 25549 - DNA, 250 bp, Homo sapiens
  MAP TO CHR14.3; EXPRESSED IN PLACENTA, SIGNAL = 0.88; EXPRESSED IN HELA, SIGNAL = 1.2; EXPRESSED IN LUNG, SIGNAL = 1.8; SWISSPROT HIT: P25713, EVALUE 6.40e-01; NT HIT: AF152864.1, EVALUE 5.80e-02
ccgcgcggtgatccagccgcgggatggagtctagcccctgccctggccttggcgcctgctccgcagcgcagtgttgcactcttggttgttgtagtgagactgcctttccgacagttgcaagcgctgttgcatcgttcgaatgcgaagtcgcagccctgggaacttgagggtttacaggacacagacattcattttgttcaaggaagcgcaattcgattatttccaggtgttattttcgaaaacatagtat

SEQ ID NO: 25550 - DNA, 105 bp, Homo sapiens
  MAP TO CHR16.3; EXPRESSED IN PLACENTA, SIGNAL =   1; EXPRESSED IN HELA, SIGNAL = 1.2; NT HIT: AL115355.1, EVALUE 5.20e+00; EST_HUMAN HIT: AU099804.1, EVALUE 5.00e-01
aatgcgacggttccaggcaaagcaaatcaatattgtgctccgccattcatcttcattcgcgccacatccgcgcgctatccccggcgcttctcgcccaggctcctg

SEQ ID NO: 25551 - DNA, 186 bp, Homo sapiens
  MAP TO CHR14.3; EXPRESSED IN PLACENTA, SIGNAL = 0.92; EXPRESSED IN HELA, SIGNAL = 1.3; SWISSPROT HIT: P29376, EVALUE 4.40e-02; NT HIT: M63790.1, EVALUE 2.60e+00
tagggtggttcctgcctcaagcgccggctgcctcggattccaacggctttcctggcggctgtgagcgcctcgggatgcagaccctggccccgcgtcctgctccctgactcctccgagctggcgccgtccacgggctgggggcgatatgacagcagcctttccgccgtagcctgcaggcctggcgcc

SEQ ID NO: 25552 - DNA, 109 bp, Homo sapiens
  MAP TO CHR16.3; EXPRESSED IN HELA, SIGNAL = 1.4; NT HIT: gi16166324, EVALUE 7.00e-55; EST_HUMAN HIT: BI254984.1, EVALUE 1.00e-54
ctactcatgaaggttacttctcttgtttggatatctggacgctgtttttggactatctgacaagtaaaattaaaagtcgtcttggagacaaggaagcagttctcaacag

SEQ ID NO: 25553 - DNA, 132 bp, Homo sapiens
  MAP TO CHR18.3; EXPRESSED IN HELA, SIGNAL = 2.1; EXPRESSED IN FETAL LIVER, SIGNAL = 1.9; NT HIT: gi5174456, EVALUE 6.00e-68; EST_HUMAN HIT: AA911686.1, EVALUE 1.00e-67
gaagcagaggaagaggatgaaaaatgtgccagtgagcttgagtccttggagaaacacaagcacctgctagaaagtactgttaaccaggggctcagtgaagctatgaatgaattagatgctgttcagcgggag

SEQ ID NO: 25554 - DNA, 153 bp, Homo sapiens
  MAP TO CHR16.3; EXPRESSED IN HELA, SIGNAL = 4.1; EXPRESSED IN FETAL LIVER, SIGNAL = 6.5; NT HIT: U34804.1, EVALUE 6.00e-81; EST_HUMAN HIT: BI252512.1, EVALUE 2.00e-78; SWISSPROT HIT: P50225, EVALUE 7.00e-22
ggaacatggagctgatccaggacatctctcgcccgccactggagtacgtgaagggggtcccgctcatcaagtactttgcagaggcactggggcccctgcagagcttccaggcccggcctgatgacctgctcatcagcacctaccccaagtccg

SEQ ID NO: 25555 - DNA, 234 bp, Homo sapiens
  MAP TO CHR16.3; EXPRESSED IN FETAL LIVER, SIGNAL = 2.2; EXPRESSED IN HELA, SIGNAL = 1.5; SWISSPROT HIT: P17656, EVALUE 2.40e-01; EST_HUMAN HIT: BI907373.1, EVALUE 2.00e-54
acccaagaagcacagagagtgtttgtcttttacctcggctctgcccctcatggagcagtgggcacctcctttattcagcacatggaagctgcaggcaaggcagaaatcggcctttcagttttcccagcaaagcagaaagccctgttcctggctggatgcctgggacctgcctcctggggacagaggagcccctctgaggccagctggcgtcctgacgccatggctgccacgtgg

SEQ ID NO: 25556 - DNA, 97 bp, Homo sapiens
  MAP TO CHR19.3; EXPRESSED IN PLACENTA, SIGNAL = 2.7; EXPRESSED IN HELA, SIGNAL = 3.6; EXPRESSED IN BONE MARROW, SIGNAL = 3.3; NT HIT: gi15321338, EVALUE 3.00e-47; EST_HUMAN HIT: BF691479.1, EVALUE 5.00e-47; SWISSPROT HIT: P52738, EVALUE 6.00e-05
ggcattctatttctaaaccaaatgtgatctcctacttggagcaagggaaggagccctggttggctgacagagagctaacaagaggccagtggccagg

SEQ ID NO: 25557 - DNA, 136 bp, Homo sapiens
  MAP TO CHR16.3; EXPRESSED IN HELA, SIGNAL = 1.4; EXPRESSED IN PLACENTA, SIGNAL = 0.91; NT HIT: AJ277661.1, EVALUE 1.20e-01
agccatgggcagtgggcaaagctggaagaaaccctcgtgcacagcttcctcaaagctgtacttatcctatgccatggctgtcctggccacaccttctgggggactctgccacctgtgtgcacacctaggggaccag

SEQ ID NO: 25558 - DNA, 248 bp, Homo sapiens
  MAP TO CHR18.3; EXPRESSED IN HELA, SIGNAL =   1; SWISSPROT HIT: Q9H3N8, EVALUE 1.00e-29; EST_HUMAN HIT: H94320.1, EVALUE 3.30e-01; NT HIT: gi14251204, EVALUE 1.00e-125
cccacaaagaagtcagagatggccaagttaagaaaaaaataactacttcgatgtctaaggtttttgtccaccacaaaagctaaaatgaccaaagcatttcctagcattatagcaaaagctactaaggacataaaaaatgctaaagtaacacgagtgcttagtgataaattgattgtgctattagtatctggcatcacatcaaatgatgaagaaggtcaaattagcaaattaatccagccagacaattc

SEQ ID NO: 25559 - DNA, 108 bp, Homo sapiens
  MAP TO CHR16.3; EXPRESSED IN LUNG, SIGNAL = 1.4; EXPRESSED IN HELA, SIGNAL = 1.9; NT HIT: M34895.1, EVALUE 1.40e+00; EST_HUMAN HIT: AW502279.1, EVALUE 4.00e-54
ctgatggaaatctttgccactgcttttaccatcgccactgaaatccacatgcgaaaataggcagcgtaataaatgcctgtctgcctcaggaccgtgccgattcacaat

SEQ ID NO: 25560 - DNA, 274 bp, Homo sapiens
  MAP TO CHR16.3; EXPRESSED IN PLACENTA, SIGNAL = 1.1; EXPRESSED IN HELA, SIGNAL = 1.7; EST_HUMAN HIT: AW298721.1, EVALUE 9.00e-73; SWISSPROT HIT: P55299, EVALUE 1.70e+00; NT HIT: AB011128.2, EVALUE 6.00e-73
ctgtcactgctgcggctgcccaaagcatcagccctgccagccccagagtcccccgagccacgccatcagcctgagggtggctggcagccccgagcacacagatttgggttatggcaacttagacgtctcctcagatattgcggccttccccgacagcgtgaactccctggagggtgtgggcggggacgtccgcaccccagacaagctcatcgaccaagtgaacgacaccagtgatggccggcacatgtggctggctcccatcctgccgggcctg

SEQ ID NO: 25561 - DNA, 81 bp, Homo sapiens
  MAP TO CHR19.3; EXPRESSED IN BONE MARROW, SIGNAL = 0.76; EXPRESSED IN PLACENTA, SIGNAL = 1.1; EXPRESSED IN HELA, SIGNAL =   1; NT HIT: gi14767579, EVALUE 2.00e-38; EST_HUMAN HIT: AA382331.1, EVALUE 4.00e-38
agagtacaagttgttgttcttcttcattggcagtctgtactggatgatcgcttttaggggctctaggctgctctgtggaat

SEQ ID NO: 25562 - DNA, 328 bp, Homo sapiens
  MAP TO CHR16.3; EXPRESSED IN HELA, SIGNAL = 2.8; NT HIT: gi7662353, EVALUE 0.00e+00; EST_HUMAN HIT: BI830846.1, EVALUE 0.00e+00; SWISSPROT HIT: P53129, EVALUE 5.00e-02
ggatccaaggacaaggaccagccacccagcccatcaccaccgccccagtcagaggccctgtcaagcacctctcggctctggagtcctgcagcccctgagaatagtcccacatgtagccctgagagtagctctggaggccagggcggggaccccagtgatgaggagtggcgcagccagcggaagcatgtgtttgtgctgagtgaggctggcaagcccatctactcgcggtatggtagtgtggaggcgctgtcggctaccatgggtgtaatgaccgccctggtgtcctttgtgcagagtgcgggagatgccatccgtgccatctacgctg

SEQ ID NO: 25563 - DNA, 285 bp, Homo sapiens
  MAP TO CHR18.3; EXPRESSED IN HELA, SIGNAL = 2.7; NT HIT: AF074901.1, EVALUE 6.70e-02; EST_HUMAN HIT: BE243382.1, EVALUE 3.90e-01; SWISSPROT HIT: Q9R098, EVALUE 5.20e+00
gctgaaggagaaaaaattgattcagaagaggcactgatctatgaagaggatttcaatggaggagatggtgttgaaggcgagttggaagaaagcacgaagttaaaaatgttccgcaggcttgcctctgtggcctctaagctcaaggagttcattggcaacatgatcaccactgctgggaaagtcgttgttaccatcttactgggctcctcgggtgagtgtctcccacactggctgcacgtagcaaaaggcacaagcagtgctttggtgaatgagagaaatggttga

SEQ ID NO: 25564 - DNA, 147 bp, Homo sapiens
  MAP TO CHR16.3; EXPRESSED IN HELA, SIGNAL = 1.5; EXPRESSED IN BONE MARROW, SIGNAL = 0.82; EXPRESSED IN PLACENTA, SIGNAL = 1.5; NT HIT: M32993.1, EVALUE 2.00e-77; EST_HUMAN HIT: AL546493.1, EVALUE 1.00e-39; SWISSPROT HIT: P47896, EVALUE 2.00e-11
tctcgctccccttggagatgcaggagcagcttatggaaagacaggtagcagtcaggggcatcggtccgcactctaccagagtcacaggctgcagggagacccgacatgacctcagggcagcctccgctatcagatggtatccacatg

SEQ ID NO: 25565 - DNA, 108 bp, Homo sapiens
  MAP TO CHR16.3; EXPRESSED IN PLACENTA, SIGNAL = 0.93; EXPRESSED IN HELA, SIGNAL = 1.6; EXPRESSED IN FETAL LIVER, SIGNAL = 1.4; EXPRESSED IN BONE MARROW, SIGNAL = 1.3; NT HIT: gi14778833, EVALUE 3.00e-54; EST_HUMAN HIT: BG779352.1, EVALUE 4.00e-54; SWISSPROT HIT: O14342, EVALUE 6.10e+00
gatgacgagttccagttattacagagaaatttcatggacaagtactacctggagtttgaagacacagaagagaataaactcatctacacacctatttttaatgaatac

SEQ ID NO: 25566 - DNA, 262 bp, Homo sapiens
  MAP TO CHR16.3; EXPRESSED IN HELA, SIGNAL = 1.9; EXPRESSED IN PLACENTA, SIGNAL =   2; EXPRESSED IN BONE MARROW, SIGNAL = 2.1; SWISSPROT HIT: P13942, EVALUE 4.20e+00; NT HIT: gi10181121, EVALUE 3.80e+00
atggagggcacagcccgtgtgaggctcggtgctggtggagatactctcgaacagggagaggatagtgaggaaagccgagaaaaaggaagcttgtccctggatcgtggagggcctgaaggtctactgaagcagcgtggtactaaagcgtcttggagtcagtgggggcccgggaaggtgactgagccagtggcagtgtgtgcctcccgtgtgtgcaccagtagtcaccgagtgcagaggggaaagtctcagagccaattaggag

SEQ ID NO: 25567 - DNA, 126 bp, Homo sapiens
  MAP TO CHR16.3; EXPRESSED IN HEART, SIGNAL = 2.3; EXPRESSED IN HELA, SIGNAL = 1.2; EXPRESSED IN LUNG, SIGNAL = 2.1; EXPRESSED IN PLACENTA, SIGNAL = 0.97; SWISSPROT HIT: Q02004, EVALUE 7.80e+00; NT HIT: gi13129147, EVALUE 1.00e-16; EST_HUMAN HIT: BG115897.1, EVALUE 2.00e-16
cacccacaccgcggctcgcttacggttggagaaatcaaggccctaccggggccacctctctgttgtgggcgtggacgaggctggggtgagcctgccggagctgcagttgccagcgacatgttcaag

SEQ ID NO: 25568 - DNA, 159 bp, Homo sapiens
  MAP TO CHR18.3; EXPRESSED IN PLACENTA, SIGNAL = 1.3; EXPRESSED IN HELA, SIGNAL = 1.1; EXPRESSED IN LUNG, SIGNAL = 1.1; EST_HUMAN HIT: BF208667.1, EVALUE 8.10e-01; SWISSPROT HIT: Q63191, EVALUE 2.60e+00; NT HIT: AJ229041.1, EVALUE 2.20e+00
gggatgtgttggagacttttcctccagcccctttcccaggagcaagcaagcttgcccttcacaaagctggtgcatgctctagcaaaccctgtgttgaacaccatgaaaaccaacgctcagacgccaagcgtttggtgcttaagaagaacgacagttctg

SEQ ID NO: 25569 - DNA, 139 bp, Homo sapiens
  MAP TO CHR14.3; EXPRESSED IN PLACENTA, SIGNAL = 1.1; EXPRESSED IN HELA, SIGNAL =   1; EST_HUMAN HIT: AW810442.1, EVALUE 1.00e-57; SWISSPROT HIT: Q02751, EVALUE 5.20e-01
gccacagttaagatggaggaatatagtgaccttctgaagagcactgaggcttggatagaaaataccagtcatttgctggccaatcctgctgactatgactctttgaggacactgagtcaccatgctagcactgtgcagg

SEQ ID NO: 25570 - DNA, 458 bp, Homo sapiens
  MAP TO CHR19.3; EXPRESSED IN HEART, SIGNAL = 4.7; EXPRESSED IN FETAL LIVER, SIGNAL = 6.3; EXPRESSED IN HELA, SIGNAL = 7.7; SWISSPROT HIT: Q15717, EVALUE 1.00e-59; EST_HUMAN HIT: AU123765.1, EVALUE 0.00e+00; NT HIT: gi14757941, EVALUE 0.00e+00
ccttctcacttctcattcagacaaagacaaacacttgtgaaaattggcgcaaaatgagttgtacactaacaagaaaagtttcaactccttcactcttaattatctattccgtacaaaaaaaagcatgagcgagttatttgtgggacttgttggttttgaaggaaacctgtaagattttgtcccccaggcggtagccgttcaggctggctatggccatcgcggcttcttcatagtttgtcatggtcacaaagccaaaccctttgcacttgttggtgttgaagtcgcggatcactttcacattggtgacggcaccaaacggcccaaacatctgccagaggatcccctcgtcggcatcctgccccaggttgtagatgaaaatgcaccagccggaggaggcgtttcctggcacgttgacgccagagagcccgctcatgtgatcgacgcccatgggggagaac

SEQ ID NO: 25571 - DNA, 151 bp, Homo sapiens
  MAP TO CHR19.3; EXPRESSED IN HELA, SIGNAL =  18; EXPRESSED IN PLACENTA, SIGNAL = 5.1; EXPRESSED IN HEART, SIGNAL = 4.7; EXPRESSED IN BONE MARROW, SIGNAL =  14; NT HIT: gi13654959, EVALUE 9.00e-80; SWISSPROT HIT: P53680, EVALUE 2.00e-23; EST_HUMAN HIT: BE047822.1, EVALUE 1.00e-79
gatccgctttatcctcatccagaaccgggcaggcaagacgcgcctggccaagtggtacatgcagtttgatgatgatgagaaacagaagctgatcgaggaggtgcatgccgtggtcaccgtccgagacgccaaacacaccaactttgtggag

SEQ ID NO: 25572 - DNA, 249 bp, Homo sapiens
  MAP TO CHR18.3; EXPRESSED IN HELA, SIGNAL = 1.1; EXPRESSED IN FETAL LIVER, SIGNAL = 1.2; EXPRESSED IN BONE MARROW, SIGNAL = 0.74; NT HIT: AF063610.1, EVALUE 2.30e-01; SWISSPROT HIT: O15084, EVALUE 5.00e-07; EST_HUMAN HIT: BG545518.1, EVALUE 2.00e-21
gataaagatggtgatagagcagttcaccatgcagcttttggagatgaaggcgctgttatagaagtactacatcgaggtagtgctgatttgaatgctcgaaacaagcgccgacagacaccacttcatattgctgtcaataaaggtcatcttcaagttgtgaagactttattggactttggctgtcatcccagtctccaggtaaaacctttaaagaaacacatcctgcaggtattgctaggatcctattaa

SEQ ID NO: 25573 - DNA, 371 bp, Homo sapiens
  MAP TO CHR16.3; EXPRESSED IN FETAL LIVER, SIGNAL = 4.1; EXPRESSED IN HELA, SIGNAL = 1.9; NT HIT: gi14777231, EVALUE 0.00e+00; SWISSPROT HIT: Q61127, EVALUE 2.00e-01; EST_HUMAN HIT: AU146348.1, EVALUE 0.00e+00
aggttctccagagagcgggcatccagagaggagtcctgggagagcgggcggagcgagcgagggcccccggactggaggcttgagagctccaacgggaagatggcttcacggaggtcagaagagaaggaggccggcgagatctgaacccgtctcccgggtgctgtaaatagtctgataaacgttcacacagtctaaaattaccctttatatttgctgaatacaactcatcttttgtagtttaaaatttctattgttttggagctagctgtgagtttctagaagtgtacagagttgctcctgtgttcccgggtcatgttgagtaggaataaataaatctgatgctgcctcctgaggctgcggggggtttctgc

SEQ ID NO: 25574 - DNA, 128 bp, Homo sapiens
  MAP TO CHR19.3; EXPRESSED IN PLACENTA, SIGNAL = 1.2; EXPRESSED IN HELA, SIGNAL = 1.2; NT HIT: gi14767957, EVALUE 4.00e-66; SWISSPROT HIT: O75437, EVALUE 1.00e-18; EST_HUMAN HIT: BI560505.1, EVALUE 6.00e-66
gggactgttgacatttagggatgtggccatagaattctctctggaggagtggcaacacctggacattgcacagcagaatttatatagaaatgtgatgttagagaactacagaaacctggccttcctgg

SEQ ID NO: 25575 - DNA, 182 bp, Homo sapiens
  MAP TO CHR19.3; EXPRESSED IN HELA, SIGNAL = 1.5; NT HIT: M62302.1, EVALUE 3.00e-98; EST_HUMAN HIT: AL134368.1, EVALUE 5.00e-98; SWISSPROT HIT: P27544, EVALUE 3.00e-20
ccggaaggcgtaggaggagacgatgaggatgagagtgaccacgtggtggagcagcatgaccaccgagtccttgcgccaggtgtccatgtatagcgtagcgtagatggagtggccatagaagcttccctggagcaggtaggcggctgcaatgtcccgtggcactgccatgcccggcgtccagt

SEQ ID NO: 25576 - DNA, 352 bp, Homo sapiens
  MAP TO CHR14.3; EXPRESSED IN PLACENTA, SIGNAL = 1.1; EXPRESSED IN HELA, SIGNAL = 2.9; NT HIT: gi14749088, EVALUE 0.00e+00; EST_HUMAN HIT: AW062518.1, EVALUE 6.00e-87; SWISSPROT HIT: Q9ULJ3, EVALUE 3.10e+00
atggagactgaaccaaaggcaagttacgggaagataagaatatctgaagagaattccattcaacttgatgattttacagaagcatatgaaagtggacaaaaccaagcatattctcttgaacattttagtcctgtttttcctaaaacagaaaatagccacattcacataaactctgacaaaggtcctgaagaaaatacaggatctcaagaacttttcagttctgaagatgaactgccaccaaatgagatacgtattgagttgtgtagctcaggaatactgtgttcccaactaaacaccttccacaaaagtgctattaaaagaagctgcacctctgaagataaagtgggccagt

SEQ ID NO: 25577 - DNA, 172 bp, Homo sapiens
  MAP TO CHR19.3; EXPRESSED IN HELA, SIGNAL = 3.7; EXPRESSED IN PLACENTA, SIGNAL = 1.4; EXPRESSED IN LUNG, SIGNAL = 2.7; EXPRESSED IN FETAL LIVER, SIGNAL = 2.8; EXPRESSED IN BONE MARROW, SIGNAL = 2.1; EST_HUMAN HIT: AL519824.1, EVALUE 3.00e-90; SWISSPROT HIT: Q92947, EVALUE 2.00e-26; NT HIT: AF012340.1, EVALUE 3.00e-92
cccagctggggcaggtacttctgccgctgttcctcgctgccataggcatagatagggtgcatgacgagggaggactggacactcatcgccgacctgtagccactgtccacccgctccagctctcgggccaggagcccataggccacagacgaaaccccagcacagccatatc

SEQ ID NO: 25578 - DNA, 96 bp, Homo sapiens
  MAP TO CHR14.3; EXPRESSED IN PLACENTA, SIGNAL = 1.1; EXPRESSED IN HELA, SIGNAL = 1.5; NT HIT: gi7705729, EVALUE 3.00e-47; EST_HUMAN HIT: AI417143.1, EVALUE 5.00e-47
gcataagtgttacattgtggccacagttgaccgggacctgaaaagaagaatccgtaagattcctggagttcctatcatgtacatttctaaccatag

SEQ ID NO: 25579 - DNA, 162 bp, Homo sapiens
  MAP TO CHR14.3; EXPRESSED IN PLACENTA, SIGNAL = 1.8; EXPRESSED IN HELA, SIGNAL = 4.3; EXPRESSED IN FETAL LIVER, SIGNAL = 1.3; SWISSPROT HIT: Q9JHU4, EVALUE 2.00e-24; NT HIT: gi15300984, EVALUE 3.00e-86; EST_HUMAN HIT: AU130180.1, EVALUE 4.00e-86
cacccattggccaggccatccaccgcctgctcctgatccaggctttccggcccgatcgcctgttggccatggcccacatgtttgtttcaacaaaccttggggagtctttcatgtccatcatggagcagccgctcgacctgacccacattgtgggcacagagg

SEQ ID NO: 25580 - DNA, 153 bp, Homo sapiens
  MAP TO CHR14.3; EXPRESSED IN HELA, SIGNAL = 1.2; EXPRESSED IN PLACENTA, SIGNAL = 0.83; NT HIT: AF069523.1, EVALUE 3.40e-02; EST_HUMAN HIT: BF310199.1, EVALUE 7.70e-01
cagctgttcctcaggttggggagaagcatggcgttttcctcctgctttacatgtgagtgcctgtgctggagatttttgtcctcgtatccaaattctctccctttctgtcagtctctggaaggactcgatgctcaaagaaaaacacttctcatc

SEQ ID NO: 25581 - DNA, 104 bp, Homo sapiens
  MAP TO CHR14.3; EXPRESSED IN HELA, SIGNAL = 0.87; EXPRESSED IN FETAL LIVER, SIGNAL = 0.82; EXPRESSED IN BONE MARROW, SIGNAL =   1; EST_HUMAN HIT: AW853910.1, EVALUE 1.90e+00
aagcaatacagacctcaggcctcttgctgatgtaggtcttgatcatattactgggcaagcagtgcagatcagtggcaaagtgctgaccaagggtgatagaaatc

SEQ ID NO: 25582 - DNA, 281 bp, Homo sapiens
  MAP TO CHR19.3; EXPRESSED IN HELA, SIGNAL = 1.5; EXPRESSED IN PLACENTA, SIGNAL = 1.6; EXPRESSED IN BONE MARROW, SIGNAL = 0.95; EXPRESSED IN FETAL LIVER, SIGNAL = 1.5; NT HIT: gi15304432, EVALUE 1.00e-104; EST_HUMAN HIT: AI224527.1, EVALUE 2.00e-36; SWISSPROT HIT: P03203, EVALUE 7.00e-01
cctgtgttctgggctcctgactccagtgctggggactcctggggggctttcctcccccagcctcagagggaggtcctcggcggggagtagggggtcgggagagggtctggcgttgggggccccaatccagaggaggtcggacatcaatgcgactcaacggggtgtgaggtcgggcagggggtgctgtgtctcctgagggggcagggggtcgccgcgcaggggcagaacggggacgggggaggctcagaggcgagggagggcgagagaggggggtgaacagg

SEQ ID NO: 25583 - DNA, 242 bp, Homo sapiens
  MAP TO CHR16.3; EXPRESSED IN HELA, SIGNAL = 2.6; EXPRESSED IN PLACENTA, SIGNAL = 2.4; EXPRESSED IN HEART, SIGNAL = 1.9; EXPRESSED IN FETAL LIVER, SIGNAL = 1.6; EXPRESSED IN LUNG, SIGNAL = 2.7; EXPRESSED IN BONE MARROW, SIGNAL = 1.9; SWISSPROT HIT: Q06002, EVALUE 6.00e-01; NT HIT: gi16165918, EVALUE 0.00e+00; EST_HUMAN HIT: AU140726.1, EVALUE 1.00e-129
aggattaccccaatggcacctggctgggcgacgagaacaaccccgagatgcgggtgcactgcgccatcatcccctccgacatgctgcacatcagcaccaactgccgcacggccgaggagatggtgctcacgctgctggactacctcttccaccgcgaggtgcaggctgtgtccagcctctcggggcagggcaagcacgggaagaagcagctggacccgctcaccatctatggcatccggtgt

SEQ ID NO: 25584 - DNA, 333 bp, Homo sapiens
  MAP TO CHR19.3; EXPRESSED IN PLACENTA, SIGNAL = 1.8; EXPRESSED IN HELA, SIGNAL = 1.4; EXPRESSED IN LUNG, SIGNAL = 1.9; EXPRESSED IN FETAL LIVER, SIGNAL =   3; EST_HUMAN HIT: BG768047.1, EVALUE 0.00e+00; SWISSPROT HIT: Q11020, EVALUE 1.00e-03; NT HIT: gi14760563, EVALUE 0.00e+00
ccttctggctgcaaatcgtttttatgggaacctgcagggtgacccggcaccttgctaactgggcttagagtctaagggcttgggggctgcatctgatacaggttggagtttggggtgggagagtcctaggaagggggccccaagtagaaatgagagaaatcaggaagggatatcgggggcgtccacgggggtgctccgactggccttgcacccgtaccccagctctgcaccccccgtcacgagcagttcaatgcccgtgcagaagttggcttcggaggccaggaacactgccgcagccccgacctcagcgggctggcccatgcggcccagtgg

SEQ ID NO: 25585 - DNA, 151 bp, Homo sapiens
  MAP TO CHR16.3; EXPRESSED IN HELA, SIGNAL = 0.95; EXPRESSED IN FETAL LIVER, SIGNAL =   1; EXPRESSED IN BONE MARROW, SIGNAL = 1.2; EXPRESSED IN PLACENTA, SIGNAL = 0.98; NT HIT: AE001895.1, EVALUE 3.30e-02; SWISSPROT HIT: P94132, EVALUE 2.60e+00
gttctccgccggccctggctgcgggcggccctcatctaacaagatgcttcggtccatgggtggaggacaaaggcctatgggcttggggagcgagttctttcgtctcctacatgaccttcatctgctcgcgtttgccatgaagcgcatctgg

SEQ ID NO: 25586 - DNA, 307 bp, Homo sapiens
  MAP TO CHR19.3; EXPRESSED IN HELA, SIGNAL = 1.3; EXPRESSED IN FETAL LIVER, SIGNAL = 3.1; EXPRESSED IN PLACENTA, SIGNAL = 1.3; EST_HUMAN HIT: BI772468.1, EVALUE 0.00e+00; SWISSPROT HIT: P05362, EVALUE 1.00e-54; NT HIT: X59288.1, EVALUE 0.00e+00
gggactccagaacgggtggaactggcacccctcccctcttggcagccagtgggcaagaaccttaccctacgctgccaggtggagggtggggcaccccgggccaacctcaccgtggtgctgctccgtggggagaaggagctgaaacgggagccagctgtgggggagcccgctgaggtcacgaccacggtgctggtgaggagagatcaccatggagccaatttctcgtgccgcactgaactggacctgcggccccaagggctggagctgtttgagaacacctcggccccctaccagctccagacctttg

SEQ ID NO: 25587 - DNA, 178 bp, Homo sapiens
  MAP TO CHR16.3; EXPRESSED IN PLACENTA, SIGNAL = 2.4; EXPRESSED IN HELA, SIGNAL = 2.8; EST_HUMAN HIT: BG029300.1, EVALUE 2.30e-01
gtttttttaagatttataccagggacccattttgccccagagagtcacaccatgctttcttcagtattaatgaatccaaaggctaaatgcccaggactcaggtgcatgccgatatttatattgatactcatgatcaatttcttctctactttcacacgatgtatcatttttcaaatgt

SEQ ID NO: 25588 - DNA, 364 bp, Homo sapiens
  MAP TO CHR14.3; EXPRESSED IN HELA, SIGNAL = 1.8; EXPRESSED IN PLACENTA, SIGNAL =   1; EXPRESSED IN BONE MARROW, SIGNAL = 1.3; EST_HUMAN HIT: AU129292.1, EVALUE 0.00e+00; SWISSPROT HIT: Q63634, EVALUE 1.30e+00; NT HIT: gi14752976, EVALUE 0.00e+00
gttggtatcatacgtgatcgtttgattcagttcatctctaaattgcagtttgccgtgactgtgcttttgacatcatggacagagaaaaaacaacgtcgaaaaacaactgccactttatgtatactcaacattgtcttttctccattcgtgttggtcatcatagttttttctacactactctcttctcccttactccctcttttcacccttcctgtgttcttggtggggtttccccgacctattcagagttggccaggagcagcaggcaccacagcctgtgtgtgtgcagatacagtgtactactaccaaatggtgcccaggttgactgctgtactgcagactgcaatggcagctggaagtttag

SEQ ID NO: 25589 - DNA, 273 bp, Homo sapiens
  MAP TO CHR14.3; EXPRESSED IN HELA, SIGNAL = 3.3; EXPRESSED IN HEART, SIGNAL = 1.7; SWISSPROT HIT: Q9JHU4, EVALUE 6.00e-45; NT HIT: gi9506548, EVALUE 7.00e-82; EST_HUMAN HIT: BG956259.1, EVALUE 0.00e+00
gtctaaaacaggctttggaaactgtgaatgactacaatcctctgatgaaagatttccctctgaatgatttgctgtctgccacggagctggacaaaataagacaggcgcttgttgccattttcacacatttgagaaagatccgaaacacaaaatatcctattcagagggcactgcgtttggtggaggcaatttcaagagacttgagttctcaattactcaaagtattgggcactaggaaattgatgcatgttgcttatgaagaatttgaaaaag

SEQ ID NO: 25590 - DNA, 181 bp, Homo sapiens
  MAP TO CHR18.3; EXPRESSED IN HELA, SIGNAL = 0.98; SWISSPROT HIT: O95704, EVALUE 2.50e+00; NT HIT: gi16329170, EVALUE 6.30e-01
catgtgtctccagactccttgatggatgatttgtggagtcaccgacctgctgctgtaaaaaccataaacctcaataaagtgatgtggaaatgtagtgtacagctgcagacttttaaaagtaagaagaggaaggaacacatgttcgtcttcctcccccagaagaaaaacaacattggattct

SEQ ID NO: 25591 - DNA, 105 bp, Homo sapiens
  MAP TO CHR14.3; EXPRESSED IN HEART, SIGNAL = 4.6; EXPRESSED IN BONE MARROW, SIGNAL = 5.7; EXPRESSED IN FETAL LIVER, SIGNAL = 3.1; EXPRESSED IN HELA, SIGNAL = 5.1; SWISSPROT HIT: P41929, EVALUE 8.00e+00; NT HIT: gi14753930, EVALUE 2.00e-52; EST_HUMAN HIT: AI198695.1, EVALUE 2.00e-52
gattggtacaagcgcaattttgccatcaccttcttcatgggaaaagtggccctggaaaggatttggaacaagcttaaacagaaacaaaagaagaggagcaactag

SEQ ID NO: 25592 - DNA, 189 bp, Homo sapiens
  MAP TO CHR14.3; EXPRESSED IN HELA, SIGNAL = 0.97; EST_HUMAN HIT: AW246988.1, EVALUE 1.00e-102; SWISSPROT HIT: Q55874, EVALUE 1.10e+00
agtctccgctctcggagtcggcacgggggctggtgggtggcgggatgaactcggggaaggcgacaggctggaaacgcagctcctcgactttgcagcgcaccaaccccctatcgccccgtccgctgctcaggtgcgaggattcgccagacgccacaggactgggggcgactcgcaagggcatcatgccac

SEQ ID NO: 25593 - DNA, 469 bp, Homo sapiens
  MAP TO CHR19.3; EXPRESSED IN HELA, SIGNAL = 1.5e+02; EXPRESSED IN HEART, SIGNAL = 1.3e+02; EXPRESSED IN LUNG, SIGNAL =  67; EXPRESSED IN FETAL LIVER, SIGNAL = 1.4e+02; EXPRESSED IN BONE MARROW, SIGNAL =  47; NT HIT: gi14767743, EVALUE 0.00e+00; EST_HUMAN HIT: BI551285.1, EVALUE 0.00e+00; SWISSPROT HIT: P29316, EVALUE 1.00e-64
ttagataatcccaattttgttggcaacatccaaagcatcgtaatcaggagtcagtcgaacatataccttcttctctccatcaggccgaatcagggtgttgaccttggccacatcaatgtcatagagcttcttcacagcctgtttgatctggtgcttgttggctttaacatccacaatgaacacaagtgtgttgttgtcttctatcttcttcatggcagactcagtggtcagcggaaacttgatgatagcatagtggtcaagcttgtttctcctgggagcgctcttccgaggatatttgggctgtctccggagtcgcagtgtcttcggccgccggaaggtgggtgacgtgtggatcttctttttgtggctgtggacacctttcaacactgccttcttggcctttaaagccttcgctttggcttcggctttaggaggggcaggagcttccttcttcactttcggcaccatc

SEQ ID NO: 25594 - DNA, 381 bp, Homo sapiens
  MAP TO CHR18.3; EXPRESSED IN HELA, SIGNAL = 1.9; EXPRESSED IN HEART, SIGNAL = 1.7; EXPRESSED IN LUNG, SIGNAL = 2.5; SWISSPROT HIT: P25794, EVALUE 1.40e+00; NT HIT: AF308871.1, EVALUE 3.60e-01; EST_HUMAN HIT: BF835734.1, EVALUE 4.00e-54
caattaagcacaatgcctttttggaaaaacaaaaagcctaaaagtccttcagggcacagtagaggtgctggtggttcatctgcaagagtctgagggtaccgcagaacacttgccagccatgccacggggtgtctgggaggtgccagtggaccccgcagggcacccttagagtgtgctaatgtgttgtttacagaagcttttcggttccgagggggatcattggtcctcagctgggtactacttgggctccgacagatctggcaggtttggtacactgtaacaagacccatgccattgaaaaacacttctggatgcccttcgcagaggctatagtagccccgcaagtcaccctgggggtcctctgggtctacaatgaggggc

SEQ ID NO: 25595 - DNA, 160 bp, Homo sapiens
  MAP TO CHR16.3; EXPRESSED IN PLACENTA, SIGNAL = 0.83; EXPRESSED IN HELA, SIGNAL = 1.2; EXPRESSED IN BONE MARROW, SIGNAL = 1.1; EXPRESSED IN FETAL LIVER, SIGNAL = 0.79; EST_HUMAN HIT: BE167597.1, EVALUE 8.10e-01; SWISSPROT HIT: P09991, EVALUE 1.10e+00; NT HIT: AF177401.1, EVALUE 1.40e-01
ctcataatgccagacagtctgcagtagctgggggttttggacgggctcggagacctggacggcacgagtagcttcaaggtacttggtggtctgggccagggcagcctctgggagctgctctacagactgccacaggtccagtggtgatgaaccaatttcc

SEQ ID NO: 25596 - DNA, 82 bp, Homo sapiens
  MAP TO CHR16.3; EXPRESSED IN BONE MARROW, SIGNAL = 1.8; EXPRESSED IN HELA, SIGNAL = 3.6; NT HIT: gi15317796, EVALUE 6.00e-39; EST_HUMAN HIT: BI915597.1, EVALUE 9.00e-39
cgaatgagacgacgaacaccacaaaaaggcagagaaacaatgaaagaaaaaacgccgccgctcggcaccgggagagccggga

SEQ ID NO: 25597 - DNA, 98 bp, Homo sapiens
  MAP TO CHR18.3; EXPRESSED IN PLACENTA, SIGNAL = 1.4; EXPRESSED IN HELA, SIGNAL =   1; NT HIT: AF250130.1, EVALUE 3.10e-01
gcaggatttctgattgctcatcatcacccctgttctcattcagctcttcacccttgtgtgtctcctctatggagagcttccattcatctgaatagcag

SEQ ID NO: 25598 - DNA, 284 bp, Homo sapiens
  MAP TO CHR14.3; EXPRESSED IN HELA, SIGNAL = 1.1; EXPRESSED IN FETAL LIVER, SIGNAL = 0.87; EST_HUMAN HIT: BG259756.1, EVALUE 3.80e-01
atggccaagtgtgccagtgtccacccccgtgcatctgccttggcacagactctgaagcctgacatgacatcaagaggctgctccaggtctcaacaaacaccaagactcagccttacaagtcctggcacccaggctcccagaattcagagaaatgtttggtggccaacaaccctgatgctgatagcagagtggatgtcacctcagagacaatcctggggctccagaatgcttcatgctcaggtttctaatgagctgcttgtgtttagaggaaaagcaatccaaag

SEQ ID NO: 25599 - DNA, 160 bp, Homo sapiens
  MAP TO CHR14.3; EXPRESSED IN HELA, SIGNAL = 1.3; EXPRESSED IN FETAL LIVER, SIGNAL =   7; NT HIT: U66097.1, EVALUE 4.00e-85; EST_HUMAN HIT: BG109351.1, EVALUE 6.00e-85; SWISSPROT HIT: P28876, EVALUE 4.40e+00
tagaccacaaaggaaaccgggaccagaagcttccagtgcattttcacagatcgttggtacgatacgctttggttaaaacgttggacacagctcataatgtcttccaccgtcagttcattctgtgctcgttcaggtgcgtggaagctatggttctgcagac

SEQ ID NO: 25600 - DNA, 358 bp, Homo sapiens
  MAP TO CHR14.3; EXPRESSED IN HELA, SIGNAL =  15; EXPRESSED IN FETAL LIVER, SIGNAL =  29; SWISSPROT HIT: P09896, EVALUE 2.00e-59; NT HIT: gi12738346, EVALUE 0.00e+00; EST_HUMAN HIT: BG944599.1, EVALUE 0.00e+00
ccaaagtttagaactggatcacttggccctttctcttcttatctcctcccagttcaaaatgcttgcatctcttaatggccagcatcctcttggatctgcagttaggctcaacacattccagccttagcacaatcttctttgtggtcttagccttcttccggaaaattggctttgtctgcccaccatagccactctgcttccgatcatagcgcctccttccctgggcatacaaagaatccttgcccttcttatactgtgtcactttgtgaggctgatgcttgccacacttcttacagaaggttcttcgggttttaggtacgttgaccatctttgcagcagggctgttttgtctatatga

SEQ ID NO: 25601 - DNA, 134 bp, Homo sapiens
  MAP TO CHR14.3; EXPRESSED IN HELA, SIGNAL = 1.2; EXPRESSED IN HEART, SIGNAL = 1.8; EXPRESSED IN FETAL LIVER, SIGNAL = 1.3; SWISSPROT HIT: Q9NQX3, EVALUE 4.00e-18; EST_HUMAN HIT: BI712780.1, EVALUE 2.00e-69; NT HIT: gi14746734, EVALUE 1.00e-69
gtaatcaaatgagcagccgtctgatgagcatgcgcagtgccaatggattgttgatgctacctccaaagacagaacagtacgtggagctccacaaaggcgaggtggtggatgtcatggtcattggacggctatga

SEQ ID NO: 25602 - DNA, 139 bp, Homo sapiens
  MAP TO CHR16.3; EXPRESSED IN HELA, SIGNAL = 2.6; EXPRESSED IN LUNG, SIGNAL = 2.6; EXPRESSED IN BONE MARROW, SIGNAL = 2.8; NT HIT: AJ000541.1, EVALUE 1.00e-72; SWISSPROT HIT: Q12846, EVALUE 3.00e-19; EST_HUMAN HIT: BE740572.1, EVALUE 2.00e-72
atcctgaaggacacgcaggtgactcgacaggccttaaatgagatctcggcccggcacagtgagatccagcagcttgaacgcagtattcgtgagctgcacgacatattcacttttctggctaccgaagtggagatgcagg

SEQ ID NO: 25603 - DNA, 84 bp, Homo sapiens
  MAP TO CHR16.3; EXPRESSED IN HELA, SIGNAL = 0.95; EST_HUMAN HIT: BG616695.1, EVALUE 1.50e+00
ggcaaatgctgtgtacccagaagctacctccaagagccggtacttaattacttttgactttgcaaatgacaggagggagagagg

SEQ ID NO: 25604 - DNA, 328 bp, Homo sapiens
  MAP TO CHR14.3; EXPRESSED IN FETAL LIVER, SIGNAL = 1.1; EXPRESSED IN BONE MARROW, SIGNAL =   1; EXPRESSED IN HELA, SIGNAL = 1.3; SWISSPROT HIT: P32985, EVALUE 3.00e-01; NT HIT: AF009605.1, EVALUE 1.90e-02; EST_HUMAN HIT: BI860943.1, EVALUE 0.00e+00
aatgtcttgaatgatgcttatgaaaatctaacacgctataaagaagcagtcaccagggcagtggagagcatcacttccctcgaagccatcattataccctacagagtagatgttggtaatccagaagaatctttagagatgcctcttcgaaaacaagaggaattggaatccacagtagcacacatccaggacctcactgagaaactgggaatgatatccagccccgaagccaaactacaacttcagtatactttacaggaactagtttctaagaactcagcaatgaaggaagctttcaaagcacaggaaactgaggcagaaaggtagg

SEQ ID NO: 25605 - DNA, 99 bp, Homo sapiens
  MAP TO CHR16.3; EXPRESSED IN BONE MARROW, SIGNAL = 1.6; EXPRESSED IN HELA, SIGNAL = 1.9; SWISSPROT HIT: P01359, EVALUE 8.00e+00; NT HIT: AF268380.1, EVALUE 1.20e+00
ctgagtccaggagggcatggttgaggcctctgcaggccagctagcatcctctgggtgggccccgggctgaagcaccaggggatgcccccattcacttgg

SEQ ID NO: 25606 - DNA, 126 bp, Homo sapiens
  MAP TO CHR16.3; EXPRESSED IN HELA, SIGNAL = 1.6; EXPRESSED IN FETAL LIVER, SIGNAL = 2.5; EXPRESSED IN BONE MARROW, SIGNAL = 0.93; EST_HUMAN HIT: BE563268.1, EVALUE 1.00e-57; SWISSPROT HIT: Q12849, EVALUE 9.00e-03; NT HIT: gi13435148, EVALUE 1.00e-56
cagcaaggctgatgtggtggacagtgagactgtggtacgggctcgtgggttgccgtggcagtcatcagaccaggacgtggctcgcttcttcaaagggctcaacgtggccaggtgggtgtggcaggg

SEQ ID NO: 25607 - DNA, 188 bp, Homo sapiens
  MAP TO CHR16.3; EXPRESSED IN FETAL LIVER, SIGNAL = 5.6; EXPRESSED IN HELA, SIGNAL = 4.6; NT HIT: D80012.1, EVALUE 1.00e-102; EST_HUMAN HIT: AI701015.1, EVALUE 1.00e-101; SWISSPROT HIT: Q14694, EVALUE 8.00e-25
tggtctaccatcacggcaacagtgcgacgggcggccattacactacagacgtcttccagatcggtctgaatggctggctgcgcatcgatgaccagacagtcaaggtgatcaaccagtaccaggtggtgaaaccaactgctgaacgcacagcctacctcctgtattaccgccgagtggacctgctgtaa

SEQ ID NO: 25608 - DNA, 199 bp, Homo sapiens
  MAP TO CHR18.3; EXPRESSED IN HELA, SIGNAL = 1.1; EXPRESSED IN BONE MARROW, SIGNAL = 1.2; SWISSPROT HIT: P45377, EVALUE 9.00e-15; NT HIT: gi13346507, EVALUE 6.00e-23; EST_HUMAN HIT: BE735962.1, EVALUE 5.00e-21
ggtggggaagccatccaggagaagatccaagagaagactgtcaaacaggagtaccgctttatcattagcaagttgaggctcaccttctttgagagaccccttgttaaggaggcctgtcagaagatccacaggtacctgaaactgaactacctggacatctgttttattcgctggacacagggattccagcctgggcagt

SEQ ID NO: 25609 - DNA, 447 bp, Homo sapiens
  MAP TO CHR18.3; EXPRESSED IN HELA, SIGNAL = 2.3; EST_HUMAN HIT: BG750143.1, EVALUE 0.00e+00; SWISSPROT HIT: P70362, EVALUE 9.00e-55; NT HIT: gi16166906, EVALUE 0.00e+00
tagaccaggctgccttcttccaagagcaagttctgcatcatccagtgtgggaggtagcagatgccctcatcagccacaaactccagcacgccacagtgcgtcatgcggtccaaattcttactggtcagtttgaacagcatgggataggtaatgttaagttggctgagttggtccagggctgagggcagcataattatcttccctcctttctccacatctgacttgtcattaggccctgctagcgtggacacagagaagcagcggtagtgtgtggagaagcggttttggaagaccctgggaattaggtggttgaacatgttgaaagagaacatgatggacaccacctcacagacaccgcttctctcagggaatgcgacaaaggcaccctgccgaccgctgtcctcgctgccgccgccaccccagtgtgttgtttttaaccttgacttc

SEQ ID NO: 25610 - DNA, 150 bp, Homo sapiens
  MAP TO CHR18.3; EXPRESSED IN HELA, SIGNAL = 0.92; EXPRESSED IN LUNG, SIGNAL =   2; EST_HUMAN HIT: AL044034.1, EVALUE 1.90e-01; SWISSPROT HIT: Q09101, EVALUE 1.20e+00
atgtcttcccccaattctagaatcttcttggagcacatctgctctcggggtccccgtgtttgctcctgcacgctccattttttatcaacctcctttttcctcaactcagtttccaggcctatctgtgggtatcctcagtctcacttgaag

SEQ ID NO: 25611 - DNA, 109 bp, Homo sapiens
  MAP TO CHR19.3; EXPRESSED IN HELA, SIGNAL =   6; EXPRESSED IN LUNG, SIGNAL =   5; EXPRESSED IN FETAL LIVER, SIGNAL = 2.4; EXPRESSED IN PLACENTA, SIGNAL = 1.1; EST_HUMAN HIT: BG393526.1, EVALUE 1.00e-54; SWISSPROT HIT: P25822, EVALUE 9.20e-01; NT HIT: gi14764015, EVALUE 7.00e-55
ctggactcggaaccgccacatggtgcccacggggatccccgggatgggtccgtagtggttggacgggacgatggtacattccttggtgcggcccacacaggccatgccc

SEQ ID NO: 25612 - DNA, 159 bp, Homo sapiens
  MAP TO CHR18.3; EXPRESSED IN HELA, SIGNAL = 1.1; EXPRESSED IN FETAL LIVER, SIGNAL = 0.97; EXPRESSED IN BONE MARROW, SIGNAL =   1; SWISSPROT HIT: O27131, EVALUE 1.50e+00; NT HIT: AE007604.1, EVALUE 5.50e-01
ctggggcttcttgagggtccagactcatacttaacaccctgattaacagcccaattgtgttttgattcatggctagagtgtttactatcatctctcctaaagagccattggtcagtaaacatgggaataaaaagtgctgcttcttgtccatgaatcatc

SEQ ID NO: 25613 - DNA, 232 bp, Homo sapiens
  MAP TO CHR14.3; EXPRESSED IN PLACENTA, SIGNAL = 1.6; EXPRESSED IN HELA, SIGNAL = 1.6; NT HIT: AL583925.1, EVALUE 8.30e-01; EST_HUMAN HIT: BG106434.1, EVALUE 2.00e-98; SWISSPROT HIT: P15992, EVALUE 2.20e+00
ggcaccacacctcctattgaggctgacactctggactcttctgacgcgcaaggaggtttggagcccagggtggagaaaactaggccggagcccacagaagtcctgcatgcctgcaagacccaggtggccgagctggagctgtggctgcaacaagccaacgtggcagttgagccggaaacattaaacgcagacatgcagcaggtgctggaacagcagctggtagggtgccagg

SEQ ID NO: 25614 - DNA, 126 bp, Homo sapiens
  MAP TO CHR16.3; EXPRESSED IN HELA, SIGNAL = 3.4; EXPRESSED IN FETAL LIVER, SIGNAL =   3; EST_HUMAN HIT: BG387658.1, EVALUE 5.00e-23; SWISSPROT HIT: P47835, EVALUE 9.00e-07; NT HIT: gi14772922, EVALUE 8.00e-21
agcatgatggccgcgcgaatttccaagaagaggatgttggtcgctgatggcatcttcaaagccgaacggaatcagtttcttactccggagctggctaaagacgcttctctgaagctcaggttcaag

SEQ ID NO: 25615 - DNA, 127 bp, Homo sapiens
  MAP TO CHR18.3; EXPRESSED IN HELA, SIGNAL = 2.2; EXPRESSED IN LUNG, SIGNAL = 3.7; EXPRESSED IN PLACENTA, SIGNAL = 2.6; NT HIT: AF225909.1, EVALUE 1.10e-01; EST_HUMAN HIT: BG748026.1, EVALUE 2.50e+00; SWISSPROT HIT: Q05877, EVALUE 2.00e+00
ctgcaggcctgagtggactgctcccgggaagccactttcatggcgtcccctctcaagggtgcccatctacctggagcgtcatcatcgtcactgctggagtcatgtctcctgttgccaatccaagctc

SEQ ID NO: 25616 - DNA, 104 bp, Homo sapiens
  MAP TO CHR16.3; EXPRESSED IN HELA, SIGNAL =   1; NT HIT: AF217490.1, EVALUE 6.00e-52
caatactctccagcagcaaaacccaatccgctcatattcttgcatttgctgcagcaaaacctgacctctctttgtgttacctgagtcttgacgaagaagactga

SEQ ID NO: 25617 - DNA, 218 bp, Homo sapiens
  MAP TO CHR16.3; EXPRESSED IN HELA, SIGNAL =   2; EXPRESSED IN BONE MARROW, SIGNAL = 2.5; EXPRESSED IN LUNG, SIGNAL = 3.2; NT HIT: AF275873.1, EVALUE 1.30e-02; EST_HUMAN HIT: BG912728.1, EVALUE 1.00e-21; SWISSPROT HIT: P22105, EVALUE 7.90e-01
agactcagtttcctcatctgtaacgtgtttgtgggagaatgcagggtgcagtggggggtgggggctggcctgactcttctccagggattctttctcctctggcagcccatgaatctgtcgtagcagatacccacaaacaggccacttacgggcagggtatctctcgtggcggcagtctaagtgaaagtcctcctcgctcccgtccctcttctccatcc

SEQ ID NO: 25618 - DNA, 295 bp, Homo sapiens
  MAP TO CHR18.3; EXPRESSED IN HEART, SIGNAL = 3.5; EXPRESSED IN HELA, SIGNAL = 1.5; EXPRESSED IN PLACENTA, SIGNAL = 1.1; SWISSPROT HIT: P55289, EVALUE 1.00e-31; EST_HUMAN HIT: BG568716.1, EVALUE 0.00e+00; NT HIT: AJ007607.1, EVALUE 0.00e+00
cttctggagacatctctggtacaatggcctcataaggttcatctaggaattttggttcattgtcattgatatccgaaactttgatgacaaactcagactcaggttccacagcccttccagtagcgatgtctattacctgggctcttaagatgtagagggatcgctcctctctatcaagcttctgtatggcatatatgtcacctgttctttcatcaatgataaaagtacttccagctccagctcccaaaagcttgtactggaaagaattgtttccattgtctaaatcagatcttag

SEQ ID NO: 25619 - DNA, 195 bp, Homo sapiens
  MAP TO CHR19.3; EXPRESSED IN HELA, SIGNAL = 4.9; EXPRESSED IN BONE MARROW, SIGNAL = 2.3; EST_HUMAN HIT: BE826050.1, EVALUE 1.00e-105; NT HIT: D38516.1, EVALUE 1.00e-105; SWISSPROT HIT: Q9JLX1, EVALUE 7.00e-32
cctgcgaaggcgcgggcctcgtcagtgggcacagcccgcaggtggcgcaggtcactcttgttgcccaccagcatgatgacgatgttgctgtctgcgtggtcccgcagctccttcagccagcgctccacgttctcataggtcaggtgcttggcgatgtcgtacaccagcagggcgcccactgcaccacggtagtac

SEQ ID NO: 25620 - DNA, 204 bp, Homo sapiens
  MAP TO CHR14.3; EXPRESSED IN HELA, SIGNAL = 1.3; EXPRESSED IN BONE MARROW, SIGNAL = 0.61; SWISSPROT HIT: Q9Y2Z9, EVALUE 8.00e-31; EST_HUMAN HIT: BE157239.1, EVALUE 1.00e-110; NT HIT: gi16190891, EVALUE 1.00e-110
gtggagtgatgctgaccacacggacttcatcgacacagctggtgccatgctgcagtatgctgtcagccttctgaagcccactaaggtctcggctcgccagctgcccccaagcgtagccagggtggatgccaaaagccgagttctgtttcctcttgggttgggacatgctgctgagtacgtcaggcctcgggtggcgctcattgg

SEQ ID NO: 25621 - DNA, 428 bp, Homo sapiens
  MAP TO CHR19.3; EXPRESSED IN HELA, SIGNAL = 1.9; EXPRESSED IN LUNG, SIGNAL =   2; EXPRESSED IN FETAL LIVER, SIGNAL = 1.9; NT HIT: gi15305980, EVALUE 0.00e+00; SWISSPROT HIT: O25254, EVALUE 4.20e-01; EST_HUMAN HIT: BE897506.1, EVALUE 0.00e+00
gaacatggtgatgagttttcgagtctccgaccttcagatgctcctgggtttcgtgggccggagtaagagtggactgaagcacgagctcgtcaccagggccctccagctggtgcagtttgactgtagccctgagctgttcaagaagatcaaggagctgtacgagacccgctacgccaagaagaactcggagcctgccccacagccgcaccggcccctggaccccctgaccatgcactccacctacgaccgggccggcgctgtgcccaggactccgctggcaggccccaatattgactaccccgtgctctacggaaagtacttaaacggactgggacggttgcccgccaagaccctcaagccagaagtccgcctggtgaagctgccgttctttaatatgctggatgagctgctgaagcccaccgaattag

SEQ ID NO: 25622 - DNA, 452 bp, Homo sapiens
  MAP TO CHR18.3; EXPRESSED IN HEART, SIGNAL = 6.4; EXPRESSED IN FETAL LIVER, SIGNAL = 6.7; EXPRESSED IN HELA, SIGNAL =  13; EXPRESSED IN PLACENTA, SIGNAL = 2.3; SWISSPROT HIT: O14834, EVALUE 2.00e-27; EST_HUMAN HIT: AI814618.1, EVALUE 0.00e+00; NT HIT: gi14760611, EVALUE 0.00e+00
ctcacaggataaacaccttcgttttactccaagggtaagaattaactttgactaggaaaatcagtaatctattcattaagtttcctgagaacaaacaagtaggcctgctcctctcaccacgtgcttgtttatttcggtgagttaagaccatgttatcaattccatctcagaggtgctccagccctggagcttcctgtattttccaaaggctttaaatagcttaaaacgtttccatacaaaaagggctccacgacatttatccgcgcagactgagggcgcctcagtagcggtacttggtggagtagtccttgggggacaccaccaggccgcggcctttgcgggccccgcggtacaccgtctcgatgatgtccaccatctcctgcttgtcctccatggcccagttaatcttgttgttgttgccagtccccaagtcaatcatgatgtgcttgttc

SEQ ID NO: 25623 - DNA, 185 bp, Homo sapiens
  MAP TO CHR19.3; EXPRESSED IN HELA, SIGNAL = 2.2; NT HIT: gi14759759, EVALUE 2.00e-99; SWISSPROT HIT: Q9Y3A6, EVALUE 7.00e-13; EST_HUMAN HIT: BF724969.1, EVALUE 3.00e-99
gggtggagccaacggaggccggggactacaagctgtgctttgacaactccttcagcaccatctccgagaagctggtgttctttgaactgatctttgacagcctccaggatgacgaggaggtcgaaggatgggcagaggctgtggagcccgaggagatgctggatgttaaaatggaggacatcaag

SEQ ID NO: 25624 - DNA, 207 bp, Homo sapiens
  MAP TO CHR19.3; EXPRESSED IN PLACENTA, SIGNAL =   1; EXPRESSED IN HELA, SIGNAL = 5.7; EXPRESSED IN FETAL LIVER, SIGNAL = 2.2; SWISSPROT HIT: O96018, EVALUE 1.10e+00; EST_HUMAN HIT: AA632231.1, EVALUE 1.00e-113; NT HIT: gi15306461, EVALUE 1.00e-113
ggaggagcagcagcgcctggccgagctctccaagtccaacaagcagaacctcttccttggctccctcaccagccgcttgtggcctcgctccaaacagccctgaactctgggcctcctcaaactcagtgcctgggtccagggccccagtgcttccagaccaagacttgggccaccacttgtccaataaagtacatcccagacgccaca

SEQ ID NO: 25625 - DNA, 118 bp, Homo sapiens
  MAP TO CHR19.3; EXPRESSED IN HELA, SIGNAL = 1.6; EXPRESSED IN LUNG, SIGNAL = 1.2; NT HIT: gi13654986, EVALUE 7.00e-43; EST_HUMAN HIT: AW068873.1, EVALUE 1.00e-42
gcggttaaagaagaggggcaagatcctgatgaaattggcatcgagttagaagccaccagcaagaagtcagccaagagatgtgttaaaggtattgtacatatgctgcttggggcttgag

SEQ ID NO: 25626 - DNA, 88 bp, Homo sapiens
  MAP TO CHR14.3; EXPRESSED IN HELA, SIGNAL = 1.1; EXPRESSED IN BONE MARROW, SIGNAL = 1.3; EXPRESSED IN FETAL LIVER, SIGNAL = 0.83; NT HIT: AF277806.1, EVALUE 2.70e-01; EST_HUMAN HIT: AA557142.1, EVALUE 6.20e+00
tagttagtggtgccacacaagaggactgtgatgctggtctttggataaaagctcttgtttgtgaccactaatttgttgtctagcttta

SEQ ID NO: 25627 - DNA, 81 bp, Homo sapiens
  MAP TO CHR14.3; EXPRESSED IN HELA, SIGNAL = 0.94; EST_HUMAN HIT: BI253610.1, EVALUE 9.00e-02; SWISSPROT HIT: Q9RPT0, EVALUE 2.10e+00
caaccctgcagggactcgaggtccttctttgacatgaacacatttgggcactgtatcttttccaccaagatctccaaaatc

SEQ ID NO: 25628 - DNA, 127 bp, Homo sapiens
  MAP TO CHR19.3; EXPRESSED IN HELA, SIGNAL = 1.1; EXPRESSED IN BONE MARROW, SIGNAL = 1.2; NT HIT: gi16176192, EVALUE 4.00e-41; SWISSPROT HIT: P52737, EVALUE 2.00e-15; EST_HUMAN HIT: AW962055.1, EVALUE 2.00e-65
gactcagtgacctttgaggatgtggctgtgaacttcacccaggaggagtgggctttgctgggtccttcccagaagaatctctacagagatgtgatgtgggaaaccttcaggaacctgatgtctgtag

SEQ ID NO: 25629 - DNA, 129 bp, Homo sapiens
  MAP TO CHR19.3; EXPRESSED IN PLACENTA, SIGNAL = 1.2; EXPRESSED IN HELA, SIGNAL = 1.3; EXPRESSED IN BONE MARROW, SIGNAL = 1.3; EST_HUMAN HIT: BI759580.1, EVALUE 2.00e-50; NT HIT: AY008841.1, EVALUE 1.00e-50; SWISSPROT HIT: P78329, EVALUE 2.00e-17
gagaagggatactgctgagtggcggtgacaagtggagccgccaccgtcggatgctgacgcccgccttccatttcaacatcctgaaaccctatataaagatcttcaacaggagtgtgaacatcatgcacg

SEQ ID NO: 25630 - DNA, 203 bp, Homo sapiens
  MAP TO CHR18.3; EXPRESSED IN PLACENTA, SIGNAL = 0.86; EXPRESSED IN HELA, SIGNAL = 0.98; NT HIT: Z31012.1, EVALUE 1.80e-01; SWISSPROT HIT: P13697, EVALUE 8.40e-01; EST_HUMAN HIT: AA493275.1, EVALUE 4.20e+00
tgtgtatacatgctaagatagaagttcccatgaaggaaggagcaaacaagaggattggaatgaggataagttggtatgggagatatcactgcctcggaactcagggtataaggctgcaactcgctccttatacaattgctgcacaagcaggaaggcgacttgccacaaagcccaaggcaagaaccctgttaccagaatcaggg

SEQ ID NO: 25631 - DNA, 494 bp, Homo sapiens
  MAP TO CHR14.3; EXPRESSED IN HELA, SIGNAL = 3.3; NT HIT: gi11434083, EVALUE 0.00e+00; SWISSPROT HIT: Q92524, EVALUE 2.00e-15; EST_HUMAN HIT: AI457963.1, EVALUE 0.00e+00
ggtatgttcgcaattcgtgctgatcatgattttgtagtacaggaagacttcatgaaagcagtcagaaaagtggctgattctaagaagctggagtctaaattggactacaaacctgtgtaatttactgtaagatttttgatggctgcatgacagatgttggcttattgtaaaaataaagttaaagaaaataatgtatgtattggtaatgatgtcattaaaagtatatgaataaaaatatgagtaacatcataaaaattagtaattcaacttttaagatacagaagaaatttgtatgtttgttaaagttgcatttattgcagcaagttacaaagggaaagtgttgaagcttttcatatttgctgcgtgagcattttgtaaaatattgaaagtggtttgagatagtggtataagaaagcatttcttatgacttattttgtatcatttgttttcctcatctaaaaagttgaataaaatctgtttgattcagttctcct

SEQ ID NO: 25632 - DNA, 242 bp, Homo sapiens
  MAP TO CHR18.3; EXPRESSED IN PLACENTA, SIGNAL =   2; EXPRESSED IN HELA, SIGNAL = 2.2; EXPRESSED IN LUNG, SIGNAL = 1.9; SWISSPROT HIT: P16779, EVALUE 2.70e-01; NT HIT: gi15297480, EVALUE 5.60e-02; EST_HUMAN HIT: AA490716.1, EVALUE 8.20e-02
ctggggaggcttcctgccaactgagcagggtttccaggtaagaaagggcattggctggatgtaggagagggcagagagcttgtctctactagaaccctcaaatggtgttggggaaactgttcagtaggctggacatgggttaaagagagaatcattggcttttttacttcttcatccccctttccaatttccttcctactttgcagtccatcgatttccaacttctccctgttctttcccat

SEQ ID NO: 25633 - DNA, 470 bp, Homo sapiens
  MAP TO CHR16.3; EXPRESSED IN HELA, SIGNAL = 2.9; EXPRESSED IN LUNG, SIGNAL = 2.9; NT HIT: gi11431596, EVALUE 0.00e+00; EST_HUMAN HIT: BF435450.1, EVALUE 0.00e+00
ttaaaaaaacaaagcttttgatcattcccttgtcaacataattggcagatctactctcaaacacacttaagagtattccacacaacatgttcggaattcagatttattgatttccattgtattgactttaaaaatggtatgaagctgactgcaagaaagggaactggtaattttaagttaaaattaagctaatggtgaaagtacatcacctctggcttcagtcaccacatcacctcagattgaatatagattttttatgaacaaagttccagaactctgaaatccagggatgctgcaggcctctcccggcaatgtccttcactttgggtcagtctcctgggccagaggtgaaagtgctttcaaaaatactgccatttccccagcacagtgtctttgattgcatccacatattgagttggaacccagtacacccagtagtaagaggcttccgtggggcccaactgaaacgc

SEQ ID NO: 25634 - DNA, 160 bp, Homo sapiens
  MAP TO CHR16.3; EXPRESSED IN HEART, SIGNAL = 8.9; EXPRESSED IN FETAL LIVER, SIGNAL =  12; EXPRESSED IN HELA, SIGNAL =  24; EST_HUMAN HIT: BG678218.1, EVALUE 6.00e-85; NT HIT: gi5579457, EVALUE 4.00e-85
cttaaccaacggcactccgccccggaccctttcccactccccgccttcattgtcctcctcctcctcatccaggcgcttggatttcctgtcgtgcttcttcttagctttgtcctcccgtttcttctcggctgccttcttgtcctcatctgtggtgggtgcc

SEQ ID NO: 25635 - DNA, 180 bp, Homo sapiens
  MAP TO CHR14.3; EXPRESSED IN HELA, SIGNAL = 3.4; EXPRESSED IN PLACENTA, SIGNAL = 2.6; EXPRESSED IN LUNG, SIGNAL = 2.9; EXPRESSED IN FETAL LIVER, SIGNAL = 2.6; SWISSPROT HIT: P78742, EVALUE 6.50e-01; NT HIT: AF130865.1, EVALUE 4.00e-02
gtgttgaggcatgtttgtggttattttgcccaagggaagacaccatccgtgtagtaaggcattggcgtcattccagtggcttctggatctagctagggccatgatggtgtcagtccccatgctacagccaggtcctcttgggtaggtgttactgctgtaggcctctttgcagggccccat

SEQ ID NO: 25636 - DNA, 80 bp, Homo sapiens
  MAP TO CHR18.3; EXPRESSED IN PLACENTA, SIGNAL = 1.5; EXPRESSED IN HEART, SIGNAL = 1.9; EXPRESSED IN LUNG, SIGNAL = 2.8; EXPRESSED IN FETAL LIVER, SIGNAL = 1.7; EXPRESSED IN HELA, SIGNAL = 1.2; EST_HUMAN HIT: BG216666.1, EVALUE 2.30e-02
tttggatctgctctgttcctgtgcacctcttcttggaatataaatttctgagcctcaatgtgccctgatgctgttctctt

SEQ ID NO: 25637 - DNA, 127 bp, Homo sapiens
  MAP TO CHR19.3; EXPRESSED IN FETAL LIVER, SIGNAL = 1.8; EXPRESSED IN BONE MARROW, SIGNAL = 1.1; EXPRESSED IN HELA, SIGNAL = 1.3; SWISSPROT HIT: Q13360, EVALUE 9.00e-12; EST_HUMAN HIT: BE315219.1, EVALUE 2.00e-65; NT HIT: gi13129115, EVALUE 2.00e-65
ctactgtggccaggttcttgtagttctccagcatcacgtcactgtagaggcttctctgagttgagtccagtaaagtccactcctcctgggtgaagtccacagccacatcgtcaaaggtcactgaatc
